United States Patent Application Publication US 2011/0183924 A1 - sequence listing, part 246

SEQ ID NO: 687824 - DNA, 306 bp, Homo sapiens
tcaatacgacggtttctttgtggggaaatatttttctttaagagcacacttaaaagtaacttgcatatacttccctgtaaagcatatccatattcacaatttagcaaaactaaagaggctatgtctcttacatgcattatatttttgggtcagaaaaaatgtccccatgggtgcttatcaagacccgattttaaacccattcatccaagctataactttaggccttctggtttgaccaacattggactaacaaaacatgaaatccaaaaaagggagttaaaggaaattttaaagcccaataaaggg

SEQ ID NO: 687825 - DNA, 215 bp, Homo sapiens
ggcgctggagtgcatggtcctcttggctcacgcaagctctgcctcccctgtagctgagattacaggcataccccaccacagccggctatttttgtctttttagtcgagacggggtttcaccatgttggtcagcctggtctcgcactcctgacctggtgatctgcccgcctccgcctcccaaagggctggggttaccggcgcgagccaccacaccc

SEQ ID NO: 687826 - DNA, 280 bp, Homo sapiens
gcccaagttgagaacaataatgaacaattattgtatgaacaagttgttagagacagctaatcacaaacaacctgcgggcacaatgacctcattccacacgtagcacccttcagcaggaccctataaaactttcctccagcccttgcctctttgcaggtagccccttctctgctgagctgcccactgcaacatattttcacaatttctctaataaatctgcccttctttacctacaactatcttggtaaatggctttaccacctgcaaaactgaccctagg

SEQ ID NO: 687827 - DNA, 1022 bp, Homo sapiens
gaccatgcaggagtatgcactcagcttttcatgttttcgtcaggatgcgggcatcaaattccagctcaaagatggggggagctctatcactgctcttgcgcgagtgaggctctgtacgcgaactctgagaaaccatacacgacaaatgccaatgagagcctacggccatacacgcagatccacctgcggataaagtgtagaccctttagataacacctgaatctagtgctgtgccttgactgtagcaagccagggtcgagaaagaagagacgcccgtgggtgccgacatgatcatggatgatgagagcgcgaaagtcaagacgcatactcaaggacaataggctcctctggaatttggattctgagatggtgggaaatggctccagaagttgggagcttgctctccaggttgcggagagaagccgtctggatctggaccaagactcgagtaatacgatccgcagaatccattgcactctagaccagcttcttactcgaggataagctgcccaggtattccacatccaacatctctgagtgcgctcctcggagctctaggtgacgaagggcaatcgtcttgcagcttgcttgcattcaaggaactgctcccctcatgtggctggggaggaccgatcccaagtttccacaaaggccccccatcttcttcctctgggaggcccagagcccttgcggtggaattccaaaggcttcccaaacttggcatgaccgattcagtaaaccaatgatgacgccaacgagagaaagagagatcggagcacgcagtgacgctcacaacacaaggactgttagttccgaggacggcatcaggcggggcaccagaaagaaaatcattgtcgggagaaccactgcggatggagacgcacgagagggcccgcggaggaaaacgacgaggacacgtctgtcagccaaagaggtgcagacagaagagaacattccggtgcatagccgaggggaggggagaacggagcacacagtgaagagcgcccacgggaagatacgcc

SEQ ID NO: 687828 - DNA, 153 bp, Homo sapiens
  misc_feature (40)..(40): n is a, c, g, or t
  misc_feature (81)..(81): n is a, c, g, or t
cgaaaccaaataattcaagcccggcttattacaattttantaggtttctattttaccctcctacaagcctcagagtacttngagtctcccttcaccatttccgagggcatttagggctcaacattttttgtagccacaggcttccccggactt

SEQ ID NO: 687829 - DNA, 101 bp, Homo sapiens
attactttagtgtggatgcagatgttgttttgacacatccgaggactttaaattttgattgaacaaacagagcgatcattgctcctcttgtaactcgtcat

SEQ ID NO: 687830 - DNA, 970 bp, Homo sapiens
gccagaggtgtaattgcgtggtcgcgctactggtcttctgagagcacgcgtccgtgcatgctccggcgtggcttatctgcctcacgtgaagtgcggtgtggtcggccgtatgtatgatacgagtgatgctggaatagtcagcccccgggagtggccttgggtgtaaacggatgatgctccgtggagcattatgggcgctgaatatctcgcatttgtgattttcaaagcgctaggaataattgatgagaggtggtaagcaggcaggtttggtcttgaaagaaaattgagctacgaaatgtgtactgtgtactgcatgcagttggtatgatctagctgcatgtgttgtacggcccgaagggaaggattggatgggtgtggctggattcatacttgaattattaagcagcttgggtgcctaaagtttatagtgtatgggacctcgccaatcgggatgtcctcttgggaggtagcgttatcgttattaaataccaatcgaagtagagtcggtaacgcgtatgcaggcagtaggtactacagcgctcaagggtctagtaggattggtatgatcgccatggaaattgaggctgagggccgcgtggagaatgcattacgttggggagtcattgccagaagagacggggcgtgacgggtagtaacgcgttaggggtagatcatcgaccgtgccgagagttgaccctgtgctggatgaggaggggttgctcagtgagcccggtatgaactgcacggccttgttctactacgtcgacagtttcttggaaaggggtgtgagtagagtgttgcgctaatggcttggaagagggaaggccgggaaattccataaaagcggaccaagtgtttgggctaatcctggagcccgggaaggttccttttgagttgcaacaccaaggaccgccatgtggctccgggccgaatgttatgaaggggagcttcaggcaagcgtttttcgaca

SEQ ID NO: 687831 - DNA, 420 bp, Homo sapiens
ctcttctcccgacacattgagaaagcaaatccagagaacacagagactaggaacaaaatgaggcaaacctgagaagaaagcttagggttccagctttgtttctgttgttcacttccagaaactgccaatttcgaaaaatcgtcctggtctcttgctgcaacttgattgtgtttttacttcatgtcctgtgcccttgttgctcagaatcccaagagagctgtttagaggctcagttacatgtttgctaagttttcgtcttctcctcccaagatgaatagtgttttgttttgaaatagcaggtgttttctgaatcccatgaagggccaacagctaaaagtgctgatcctgactctgatttcgctgcgtaactcccaggggcatcctgctctgatgtcaggggagaagagggtaccgagctcg

SEQ ID NO: 687832 - DNA, 424 bp, Homo sapiens
gtgctggggcgccgtctagcagagagggccgaaagatcaaagcgtgggcgcaattggctcatcgttgaaagggagacgtctgggtcagcgcttgagtgtatcaggaagcgaaatgtattctggtacactgccagcttgggaaactgaaatagaactatgctatgtgctaactgtgccatatacaggcaaaatattgaactggcacagatgcgaaaatactacaggggcacactgctatattgaccaggggacttgacatcattagaagcatgccagacagactgtgaaacgaaaccttttcacctacaaattcacctaaaccttaaacctgaatttcttataaatgctgtttaaactgatcactgctaattgattcacacttctcccttcacctctttatttctattattacatctttacacca

SEQ ID NO: 687833 - DNA, 154 bp, Homo sapiens
  misc_feature (12)..(12): n is a, c, g, or t
gtcgacggtacnaaacatataaaaccactgctagcattttgggtatttccacgtacttacttcttgcataaggtttttaaaaaatgttttactggccgggtgcggtggctcacacctgtactcccagcactttgggaggccgaggcaggtggat

SEQ ID NO: 687834 - DNA, 174 bp, Homo sapiens
gttatcggaagtttcccagacaaatcgctccaccagctacagaacgcgccagtgcatcaagcacccagtctgtacaaatctggtcggatcctctacgatatccgacctgtatgcaattcagcttgtcctcgagcacgtcgatccttacaagcgttgctgacttgtggaaacatg

SEQ ID NO: 687835 - DNA, 688 bp, Homo sapiens
  misc_feature (22)..(22): n is a, c, g, or t
tgggatgactatccccagtganagcattgcgaagtgagcagaggctggctgagtggactgcactttcttggtggccccccgtggagagtcagagtggcatgttaatgatgtggatcacatgtgccctggcttgtgtacttgtcactccccttcccactccctgctctcagcattctgtcacctccctacccctgtctgctggtgcccatgccatggccatgacctccctgtgccctggttctggtgtgttgtcccaaactggcactgagagtgcctgatgggcaatggagtacctggcttgcattctgctgcaagaaccgcctggcgggtgttttgggctgcttgacgctggccagtgctgctgcctgcctgtgtccatttgacactagccatgctacaatgatctttgtgtcctgggaatgagtggttgtgggcaagactggcgcttggtggccaatgctggctggcctggaggtgcctgtggtgcaccactgggaccacctggcatccatgaccacctgtggtatttttggccagccaagctgcaggccagcagccgtgtcgtcatgttcgtttagagttctgggactgtggagagtctgcactcaaaaagttcgatcatatgctgctggcttgcatggaggaacacaagatgccttcctcttccctcttctccttcactgaccgg

SEQ ID NO: 687836 - DNA, 118 bp, Homo sapiens
  misc_feature (57)..(57): n is a, c, g, or t
tatgtggtccagcttcacaggtgaatgtccagattataataggttcccaaagggcanttgacacacatacgccctctcagcactgagcctggtctgcagaagtacaacctgccggtgg

SEQ ID NO: 687837 - DNA, 227 bp, Homo sapiens
tgtcaatcataccagtcagcagtgtgtcagtgactcaagacaccaccccctccagcatctggggcccaggaacctctccctgctacagggtggtagggggtcctgctcaaacagaggtaagtagagtaggtaaaaaatgtactatagtacaccctacaatacagttggaacttgcctacatgaggagatataagagagtacttgtagactaaagtggaacgctggat

SEQ ID NO: 687838 - DNA, 919 bp, Homo sapiens
  misc_feature (102)..(102): n is a, c, g, or t
  misc_feature (105)..(105): n is a, c, g, or t
  misc_feature (108)..(108): n is a, c, g, or t
  misc_feature (122)..(122): n is a, c, g, or t
  misc_feature (146)..(146): n is a, c, g, or t
  misc_feature (152)..(152): n is a, c, g, or t
  misc_feature (155)..(155): n is a, c, g, or t
  misc_feature (167)..(167): n is a, c, g, or t
  misc_feature (185)..(185): n is a, c, g, or t
  misc_feature (190)..(191): n is a, c, g, or t
  misc_feature (208)..(209): n is a, c, g, or t
  misc_feature (220)..(220): n is a, c, g, or t
gggaaaagcgacggcgcagcacggtgcggcgcagctcctgctcgcctttcccttcgctgggcgagaggtgtctatggggcacccgctgccgccgcgtaccgncancgncactgccagcggcnactgtagatcatagccaaagaatntgtgangtntgggcttgcaanttggatgaagagatgaangaaannttcgtcaagttatccgnnaaaatataatnacgttgctatggacaccgagtttccaggtgtggttgcaagacccattggcacgcatattcaggagcaatgctgccctatcattaccatctatggcggtgtactgtcgacttgttgaaagataattcagcttagtgactgagccatttatgaatgagcaagggagatataccctccaggtaacttccaacttggctagtttaatttcaaatttacttgtgacggaggacatgtgatgcccaggactctatagagctactaacaattatctggtatccagtttaggaatacatgaggaggaaggacattgataccagtattttgcagaacttttatgacttttggagtggtcctctgtgaaaggggtcatctgtttcgtcatttcatagggttacgattgggtacttaatcaaaatcgtatacaaaatctaacttgcctgaagagacttgattcgttgagatccttcgatgtttgacctgtctgatgaggtgagtactccacgacaaggcggaaatctcaagaagttgatgggtttacagcggctgtcggcagtgtgctttagcgtgggggtgttaaccattagatcgggggtaagaaacaaacaaatgggggggaaaaaaaatgggggcgaaagaagttcgatgacatgggccaaaagggacattgtctcctcccagctgagcggaggaaaaacaggcga

SEQ ID NO: 687839 - DNA, 697 bp, Homo sapiens
ctcaccatcgctcttctactatgaacccccctccccatacccaacccctggtcaacctcaagctaggcctcctatttattctagccacctctagcctagccgtttactcaatcctctgatcagggtgagcatcaaaactcaagacatacgcaccatgatcggcgcactgggagcgagtagcaccaaacgaagtctcatatgaagtcaccctagccatacatatactactatcaacatgactaataagtggctcctttaacctctccacccttatcagaacacaagaacacctcgtgattactccgtgccatcaatgaccctttggccataatatgatatttatctccgacactagcagagaccaaccgaagccctcttcgacctggccgaaggggagtccgaactagtctacaggcttcaacatcgaatacgccgaaggcacccttcgccactattacgttcatagccgaatagcagcacacacattattataatcaacagcctcaccactaccaaacttccctaggaacaacatatgacgcagtcatccccgtgaactctacacaaccatatttagtcggcaagaccctagttctaactccctgttcgtatgaatcggacagaataccccgattccgtacggacaaattcatacctcctgtgaaaaattcataccatcacctagatactgtatgat

SEQ ID NO: 687840 - DNA, 1091 bp, Homo sapiens
  misc_feature (102)..(102): n is a, c, g, or t
  misc_feature (105)..(105): n is a, c, g, or t
  misc_feature (108)..(108): n is a, c, g, or t
  misc_feature (294)..(294): n is a, c, g, or t
  misc_feature (318)..(318): n is a, c, g, or t
  misc_feature (324)..(324): n is a, c, g, or t
  misc_feature (327)..(327): n is a, c, g, or t
  misc_feature (339)..(339): n is a, c, g, or t
  misc_feature (357)..(357): n is a, c, g, or t
  misc_feature (362)..(363): n is a, c, g, or t
  misc_feature (380)..(381): n is a, c, g, or t
  misc_feature (392)..(392): n is a, c, g, or t
gggaaaagcgacggcgcagcacggtgcggcgcagctcctgctcgcctttcccttcgctgggcgagaggtgtctatggggcacccgctgccgccgcgtaccgncancgncaccgccgagcgcgccgagtgctgtctctatggcgaggacggaggaggaggagcgctgagctcagcgacacaaggtacataacctaacggataaaatattttatgaaacaaaatcttcagatcaagtataacatttttgatgctttggcatctagactcccttgtgccctcactatgccagcggcnactgtagatcatagccaaagaatntgtgangtntgggcttgcaanttggatgaagagatgaangaaannttcgtcaagttatccgnnaaaatataatnacgttgctatggacaccgagtttccaggtgtggttgcaagacccattggcacgcatattcaggagcaatgctgccctatcattaccatctatggcggtgtactgtcgacttgttgaaagataattcagcttagtgactgagccatttatgaatgagcaagggagatataccctccaggtaacttccaacttggctagtttaatttcaaatttacttgtgacggaggacatgtgatgcccaggactctatagagctactaacaattatctggtatccagtttaggaatacatgaggaggaaggacattgataccagtattttgcagaacttttatgacttttggagtggtcctctgtgaaaggggtcatctgtttcgtcatttcatagggttacgattgggtacttaatcaaaatcgtatacaaaatctaacttgcctgaagagacttgattcgttgagatccttcgatgtttgacctgtctgatgaggtgagtactccacgacaaggcggaaatctcaagaagttgatgggtttacagcggctgtcggcagtgtgctttagcgtgggggtgttaaccattagatcgggggtaagaaacaaacaaatgggggggaaaaaaaatgggggcgaaagaagttcgatgacatgggccaaaagggacattgtctcctcccagctgagcggaggaaaaacaggcga

SEQ ID NO: 687841 - DNA, 891 bp, Homo sapiens
tggagacgtagatttgggtctcaggttgcagtgagccgagaatcggccatgtggattccagacgctcagcaagcaaggaccaagagataggtcgtcgaacccagaagaataataatacgctatacaaaaattagggaggagattgtggcacgataagccgcaataggcgcatggggacatagcctgtgccataggtggccgtgggtctattagtcgcccagggagtgaaacccatcagtttcccagaacactaactctgtggcgaaaaagcgtgggtttctcttcctgggcaatagttcttgggcagggatttaaattcacaggccctcgggtacggaatgtggggactcacgggacagaaggctgtcacacccccctgggaacgagaccgatttcgtggacgtgccgtggggtctggaccctaagaaaataaaccgggggggcggcgctaaaaaaaggcgtgtcacaaagcataagtcctacaagattctgggacaaggaaccgcccaagagttcctactacacatggggtggccctcttggggacaaacaggaattttgtaacccaaggggtggcgcatattttccggggggcacaaggtgggtgcacccaacagttcataactggtaaattcggcggggcgaatacacactaaaagagcaggccctcaaaaacacgcaaaagggccactttaaacagcccaaaaaagtgggtatatacaattaccgcggcgatcaccaaaaagagtgtgagagcacccgagggatgtgcgagaaccccagaaccacgggagggagctctccccagtcataagaaagtccctccgaagaaatcagcaaacccagaagtgggcaaccccggggcgagcgaaaggatcccatccaaagggc

SEQ ID NO: 687842 - DNA, 113 bp, Homo sapiens
cacaaatttccattgcgcgactatgcacaccaacacaacataccccctagcaggcgtgctccgcttactgatgctccgcttactgaactccgtactgatgctccgcttactga

SEQ ID NO: 687843 - DNA, 81 bp, Homo sapiens
tggatccacaatgaatttgcattttttgcgcactttttgctaaagtctttatacttgcaaaaaactactactactactcgt

SEQ ID NO: 687844 - DNA, 147 bp, Homo sapiens
cttttttatggggggtcctaaaggggggggccccgggggggggttggaaggtttgccccccctccccccaaggtttccccggggatttttttgttgggatgttttggaaaattttttccaggaaaaggggaaaagggtttccttcca

SEQ ID NO: 687845 - DNA, 401 bp, Homo sapiens
agaactggtgtatgaactttcatttgcctagtcaaactttactctcaaactaaaatggagctattttggagtagctcataatatcaagtatttgaggaaataatttctaattggatctagaaattgttatttaaatatctaagggttgccattggcattcactttttcttatttggagaaaagaagacactgcgaacgtggaaccaaccttcaattctttttttggtgattggcagggttgtaagaactcaataaaatgctgaatgacaacaaatcttgactaggattaaggaagacaaggctgggtgcattggctcacatctgtaatcccagcactttgggaggccgaggtgggaggattgcttgagcccaggagttccagaccagcgtgggaaccatgg

SEQ ID NO: 687846 - DNA, 139 bp, Homo sapiens
tccacttctgcggtatatatccttacaaagcagagcgaaaagtacaaccaaaacctgtcataagaaaatcctgtagcagtaagctgagatcgtgccactacactccagccggggtaacagcagtgggactccgtctcac

SEQ ID NO: 687847 - DNA, 236 bp, Homo sapiens
tccatcacatagatagtaaacactccagttgaacaaaatagaatacgaaagtagctataagagtatctgaacacacaatagcttatacccaaactgggattagataccccactatgcttggccctaaaccacatcagttacatcaacaataactgctcgccataacactacgagccacagcttaaaactcacaggacctggcggtgcttcatatccctctagagaagcctcatgtg

SEQ ID NO: 687848 - DNA, 547 bp, Homo sapiens
  misc_feature (404)..(404): n is a, c, g, or t
ccgcgggctgcaggattccggaacggggccgatacgttttatctgcatgtacctggcgcgaacagcgatggagaccggaactgcatgctgcaagaatcgtcgagaatgcagaatttttgtggacttctctttgctaaagttttaccacactgctgtgcttggttttagaaggataatactggaggcagaaaaaatggaccgggcagcttcactcggctggcctcaatgcttgtagacgtgattctgctgcaacgcctgaggacactgggaagatattgtacctgaagaagcaaactgtccgttattattgaagacacactatgctaaattgttgttgtgttaaccagaaagatatcacaagggtcagagcaacccttcctccagaacatgttgactcttggggntgaccaaatgaggtcactttcattggcatatcataagccctcatatttttaaaaaacaaattgcgtttcttaaaactatggccaagaactttatcggcattaatttttcagcgccgttcgcagtttaaaaaaacgcctcctat

SEQ ID NO: 687849 - DNA, 212 bp, Homo sapiens
tatctccgtactgaacgcactactctggcctaggctggctccaggtgtgccatgcccagccaaaacaaacacagagctgcctcaggcgattactgtgaagtttctggtctgagggaggtgtctctcgaggatccttttgcctgtgtgaaatattgatcctgaattaagctgtcaactttaacagtctgcacagtttccaaagctttactact

SEQ ID NO: 687850 - DNA, 480 bp, Homo sapiens
  misc_feature (447)..(447): n is a, c, g, or t
ttgtaagaaccaagtaaattaataaagcactgagaacagtgttctgcatgtgcttagcgctgagtgagtgttaaccatgttggattagtatttgataactgccactaatataattttttgtaacattccaggttggagagaaagctttttcttacttttagaaattatttctcttttgtggacccaaagtatatctcatatatgcaaattgcacataggtagtataagttttgtggatataagtggaaaagaaattaaataatatgtgtctatctgcgcacattagaagtaactaatgtccacatctgcccttaagacatgtatccctaattgtgttaaagatagaatctagccgttccagttgagtggagcaaatgcacctagagttgattccctttgtcacaactaaatattgatccaaatttgtagatctaaaatggcaaatantaaactgtgcagagctaccaattttgactttta

SEQ ID NO: 687851 - DNA, 106 bp, Homo sapiens
atgtcgatctagaggatccttttgcggtgctttcaaggcctgccaatggtcctattctcaggtctggggtgggctcaaaaagtatggagatttttttgtaatgtta

SEQ ID NO: 687852 - DNA, 841 bp, Homo sapiens
ggaccagccgcccacagagccccgagcccgtggtcccggcgagaagaggcacgcgcggcacagtgccggcctcctgcttccctggtgaagacttgctgcagctccgtgtgccactggtgttcattgcttgctgcccaccctctgctccctgggatgggccccgaggcgagcagcttcagcacatggcctggccctgctccagtgtgcatggaatggagtgataatggccgggccgagaggcggcacacctggaccatcccatgggcctccgcccgcgcctgcccgaggatgagtggtgatgtcctctagccacccctagcagcgtcggctctccctgtgactgtgctggccgcggacttgggacttggctttctcctggataagctggctggcaccggcgtcagctgatgacctgtgcagagactcgtggcctgcggccgtgctggtggccctggtctcactcatcctcaacaacagttggcgtgccttcacctccaactgggtgtgccagacgctgggaggatgggcgcaggcgcagccgtggggctgatggagggtcctgctggctggtggacagtgacccggggagggccgagccctggggccagagccggccaggtggacgcacatgactgtgaggcgctgggctggggctccgaggcagccggcttccaggacgtccgaggcaccgtcaaactgcagtacgacatgatgcgcgcctgcaacctggtgggcaactggcgcgctcaccgacagggcaactcaccttcctcctgcgcctggtggccttgccctgctggcaccggagccccggctggaggaggcatggcagcgcatcaac

SEQ ID NO: 687853 - DNA, 460 bp, Homo sapiens
atagaggcaggtcgatcacctgacgtcaggagttcgagaccagcccggtcatcatggcgaaacgccgtctctaccaaaaatacaaaaattagccaggcgtggtggcggatgcctgcaatcccagccactcgggaggctgaggcaggagaatcgcctgaacccgggaggcagaggctctagtgagctgagatcgtgccactgcactccagcctgggcgacagagtgagactccgtcccaaaaaaaaaaaaaaaaaaagaaagaaacctgaaatgggggggggttttttatattaacccacctgtggccctggtattatttttaacattttttcctttggtaccaaacctgtataaatactcatagattcccttgaggaagaggcttgccagcacttcttatcttccccaaaggttaaggcaataaattgatgtgcggtattcccttaaccaaggagtgaga

SEQ ID NO: 687854 - DNA, 131 bp, Homo sapiens
tccccagtgccagtcccctcagcctgtggtggccttgcatcctgactggatgttttcagccccttgttttgggcaaaaacccaaagctccccagtgtggatactaataaacctcttggagccccctctcca

SEQ ID NO: 687855 - DNA, 263 bp, Homo sapiens
  misc_feature (249)..(249): n is a, c, g, or t
gtcacacgccaccacatctggctaatttttgtattttaagtagagacggggcttaaccacgttggccaggccggtcttaaactcctgaccttaagtgatctacctgcctcggcctcccaaagtgctgggattacaagcttgagccacatgcctcgcctgggcttcggtttcctaatttgaaactcaggagggtttctggggctaaggtctgcctggccgggaactggagtagaggccggtgctcaccanagtctcaccaaagt

SEQ ID NO: 687856 - DNA, 876 bp, Homo sapiens
  misc_feature (138)..(138): n is a, c, g, or t
ccgagacgggtcgaccttcaaggcggtcgcgctatgcgcccggtgcgcagacattcccctcccccacgagagtggcccggggcccgcaaaaaaatgggggctgcaagcccaggataacgtcgtcgcgcgccgcgcgtngcaaacacagcagggggcgacacaacactgtgtggcggaacccaattctccgcggtaggggacgctccaccactggtcgcgaggcccgcgcagggcaacgccacgcctctgtccgggggtaggcccgcccccccaaaggcacccgcgccatgggcaaggccccacaatggggaaattcaagcgatctgggggccttgctggctgccatgatgcgcgcgtccccctgctgcacgggccccaccacaggtgggggcccactccccccggtaatggtattattctctccgcacgtcgtccccacgcggatacgcgggtttgtgcccccccctgcttgtgagggaagagacaaggtgttgtgcatagccgcgggtgtgtcgctgggcagcctcgggccgtcacttcgcacgcggggaatactttttccctgcgaccactggtacgacgagcacccccctgttatttgtcaccgcgggggtgtacacaggacctcgcaacgcgacttgctgggagcatcacatacttatgaatagcagggcttttctgacgcatgtccgagaatctccgtccgtgttagtaactaaagggcgtgagtcactgacacattctgcttttcccccctatgaagggcccactgggtacccctgccgcgctctggtagaaacgggtccaatctccctgatatttccgagggaagccgggctaatccccatgattattgggaccccaaaggaacataac

SEQ ID NO: 687857 - DNA, 388 bp, Homo sapiens
  misc_feature (64)..(64): n is a, c, g, or t
  misc_feature (102)..(102): n is a, c, g, or t
  misc_feature (127)..(127): n is a, c, g, or t
  misc_feature (131)..(131): n is a, c, g, or t
  misc_feature (133)..(133): n is a, c, g, or t
  misc_feature (136)..(136): n is a, c, g, or t
  misc_feature (148)..(148): n is a, c, g, or t
  misc_feature (153)..(153): n is a, c, g, or t
  misc_feature (158)..(158): n is a, c, g, or t
  misc_feature (165)..(165): n is a, c, g, or t
  misc_feature (168)..(168): n is a, c, g, or t
  misc_feature (183)..(183): n is a, c, g, or t
  misc_feature (194)..(194): n is a, c, g, or t
  misc_feature (197)..(197): n is a, c, g, or t
  misc_feature (227)..(228): n is a, c, g, or t
  misc_feature (238)..(238): n is a, c, g, or t
  misc_feature (241)..(241): n is a, c, g, or t
  misc_feature (251)..(251): n is a, c, g, or t
  misc_feature (306)..(306): n is a, c, g, or t
  misc_feature (311)..(311): n is a, c, g, or t
  misc_feature (345)..(345): n is a, c, g, or t
caccgcgctgctggaggccggcctggcgcgggtgctcttctacccgacgctgctctacaccctnttccgcgggaaggtgccgggtcgggcgcaccgggactngtaccaccgcatctaccccaccgtnctgntnggngcgctgccgttncggantttangcgccantgntacaggacgataacnttcgcggggtnatnaccattaacgaggattactatatgaggttnnttttcaactnttnacaggatttnaatatattattattttatcagctttggctcatcacattagatattactggtatcnccacnttttacaacttccagaatttatttcaattttctntcaattatcatttgctttttcattttttttactttcattttaa

SEQ ID NO: 687858 - DNA, 84 bp, Homo sapiens
cgccaccgtcacgatgatgcccggtacgcggtaaagaccgaaaggaagaggaatgatggcaccgggtggccatggtggctggat

SEQ ID NO: 687859 - DNA, 1186 bp, Homo sapiens
  misc_feature (904)..(904): n is a, c, g, or t
ggaggccccggtcttcctcctcgtcctgtgcgcagggatgagatccccatgacggtattcatgctgggcgtaaggtctggcctggtgccatctgtctccgacatacggccccaccaaggatacacacggctcagtgaccggaggagcatgctacatggaaggtcggtagctatgtagaagaaggagaagatcatcgaaaggacccaaactattcgggtgttgagagcaactatagagaaggagctaggcaaacagaagttgtatgcacaggctgtgcacataatctgggttaagacttggagtacaaggaaaaggtccactgctgagggttagagcacaggacggtgaagcgttgagataaggaacacttgagagaacggatggagtacgagtgaaatgagatcttcgaggaggctaaccagtggaggcttgttcacagatcgcgtgtgagtgtagcgtatgcgtccggacacagtagtgagattgtcatcatgggtagcagagatccgcgagaaggtcctgagttagcgtaatggtggcgaggtatcctttcgagatgcaagagggaccagggtggtacgtaaaaaggggaagagtaaggtggtaccagttcatccccatttgacgtttgaacctcgtgggacgagaaatagatggtgataaaaggcggaaaggctgttgtaccactgtgactgtggcatacgatgactgaaaggaacacgttgatgaacacgattactacttgggaataactttgggcactgaagaaaaaccacgtctggtagacgtacaggtagttcgaaacctatgcaaaggtcggcgggtggaaggtggctggaaaacaaggaataagaagagagaagaataacgttcgagagaatagttggtagctagatgctatttntaccagtgggaaaaggcttactttggagaaataacacaccaaaggttatggggcgtgggatttttgggggggtaattgccccttgggagcgggggggtggacatagttttggcattgttattcggtgcaactgccaggctttccggtccccgtggggattacgttagtacgaaaaaaacattaataaaaaagggacaacgtgcctagataataaaaaaaaaaaagcgggagagccacaaaacgtttgggggagaagaagacaaaaaaagtgttattggaatc

SEQ ID NO: 687860 - DNA, 140 bp, Homo sapiens
atgcagatcgaatcgagccggtaccgaaagtcctagatggcatcttcttccaatttaagaggtttgtcgtacactgaaaaaatctgtggtatagcacagctggctccataaactcatcttagctatatcttctggacttc

SEQ ID NO: 687861 - DNA, 870 bp, Homo sapiens
ccaaggttgaaatgaaggaaaaaatgttaagggaggccagaaaggtcaagttacccacaaagggaagcccatcagactaacagtggatatctctgcagaaaccctacaagccagaagagagtgggggccaacattcaacattcttaaagaatagaattttcaggggccaggcgcggtggctcacacctgtaagcccagcactttgggaggctgagacaggtggatcacgaggtcaggagatcgagaccatcctggctaacacggtgaaaccctgtctctactaaaaatacaaaaaattagccgggcatgatggagggcgcctgtagtcccagctactcgggcgacagagcgagactttgtttcaaaaaaaaaaaaaggattagaattttcaacccagaatttcatatccagccaaactaagcttcataagcgaaggagaaataaaatcctttacacacaaggcaaatggcggagagatttggtcaccaccaggcctgcctttcaaggggtcacaggtgaggtgaggctttgagaaatcacggtccttcagtacacctggtactaagaattggagcggggtaggaaaattcttggctaaggtcactcagtaaatggccaagcttagtatggttcccttaactgtttggagccacttcagaagaatcagggtctctgtgagaaagggctgtactcggagctaagtctttattcaataagtctgggggtccttggacacgagggtgtcacttccatggggggagctcgttgcgcacagtgcaacgccgaacaccagggtgcaagtgtcgtcccacaagttaacctacaaaggcttaatggagccttggaaggtaaggaggttcctttaaccaa

SEQ ID NO: 687862 - DNA, 668 bp, Homo sapiens
gaatcccctggtacgggagtggggtaggggtgggggtatgaagagaggctgattaatgggtacaaatatatattcagaaaaaagacctagtatcctatagatcagtagggtgactatagtttaccctactatagattatggattatagtataatctattgtacatttccaaatcgctagaaaggaataattagaatgcttctagcataaagaaagaaccaacatgcaaggtggtggctatcccagttacctggatttgatctctacacataatatgaatgtattaagttatcacaggtaccccgagtatatgtacatctatcatgtgtcaataaaaacaagcaagcaagcccatttcgggcgtgacgttgtttcactgggcttcgctttactgtacgtcacaggggctgcattttaaccaagtggaaggtctggggcagccctgtgtccagtgagtctacgggcgcctttttcaacagcctgtgcttggtgtgtgtctctgtgtcacattttgctcattcttggaatatttcaaactgtttcattaatattatatctgtgatggtgatttgtgattagagatctctgatgttactataattgttttggggtgctatgaactgcagtatatacaactgcaggctaatcaagaatgtgggtgtcctgacc

SEQ ID NO: 687863 - DNA, 123 bp, Homo sapiens
ctaattggttcttcgatgacgtctattgcctacccacagcatcttgggctctagacaccagcgccacatgttaagcgcttgacatgtgcaggctgaacgataccatatgccagggctttcagt

SEQ ID NO: 687864 - DNA, 138 bp, Homo sapiens
gtcccgattttctcctgcttctgtgcccggacattgcgacttcccgccctgtgaatccggaggtccccttgaaccatcgaagcctccagtcattgagtgctgagccccactgtttacaggaatccagagagtttcaag

SEQ ID NO: 687865 - DNA, 939 bp, Homo sapiens
gctgctccggagggcacgggctccgtaggcagcaactgcaaggacccctccccctgcgggcgctccgctatggcacagttacgcgttcgagagtgacctgcaatcgctgcttcagctggtatgcacccatccccaatgtaccccactgtcgcgctggcagcgcggagccaaggaagccggaggccctggaccttctcatcccagtgcgggcctggcaactcgatcactcacagagccgtgccaggacatccgagtggcctgaaacatccgtggcaagatccagttccaaggttcagaccactccatagtcaaagctggtggtgtaccgctatatcccccatcgcagtgctgcccagatggaggtggccaggctttcctcctgtagcaaggagaaccaggcctgaaagactagacatgaggtccaaccaagaaggaacctcagaaagcctgggctttgaacctgaacggttttgatgtacgaggaagccaagatccttcggctcagtggaaaaccacaaaatgcgccagagggttatcagaacagactgaaagtactctacagcacaaaaggccactcctggctccagccggaagaccatgcgttacattccttccctgccagaccgtatcctggatgcgcctgaaatccgaaatgactattacctgaaccttgtggataggcagttctgggactgtactggccgtggcacatggacaacagtgttgtacctgttggaggtgcaagctactaggtgacatcctgcacgcttttgcaaattggatgccgccctggggaccatatatattcctctgtggactggattccagaagggccaactacttggcttgttggcacagacagagctgcagttgcgctatgggatgtgcaaaaggagaaaggggttcgacatatgacaggcacactcccgagtggatccc

SEQ ID NO: 687866 - DNA, 444 bp, Homo sapiens
  misc_feature (35)..(35): n is a, c, g, or t
ggctgggtcgactccgaggatctctactaaatggncgttacccaaaggggcgttacctaaatggctgttacctaaagggctgtccatctgatcagcagcaactgattcatttctccttcttggacttttatgtttattttcacatttcatagcctgaggttattactaagggaaaggaagaaaactgtcttccacttccatgagaaagataaattatggtatcactttataacttggcaggaacactctgtacttacagtatcataatctatcccacaagatgattaattctagggaggaaaagtataaattgtatatagtacattcctgttcatcttggagtttagtttactagtttggaggtaacttatgcatcacattttctgaaactggagctagaagaggaagatagtctaatccagggaaattattcagagaccttct

SEQ ID NO: 687867 - DNA, 165 bp, Homo sapiens
cgacgccagtgagattcccatgcggggaagaggtggttttgacagaatgctcctggtcggggtgggctcccatgcctccatctagaagagattattgatgctatcgagccctcgtcagagaaacagcatcccctctcctcccggaacgagacggaccgggatggc

SEQ ID NO: 687868 - DNA, 894 bp, Homo sapiens
gggagtgatgggatgctccttagatgctatggtccttctctcatactacgaactctgactccttccccatgggtaaggtcatctatgctagtacaggtcccttatccctgtaatcgtcctcagagtgttgaccacgcacggactgaggacacatgccatgataatattgtctcgattacataggacgcacagagaagtatgtcatcgatataagcaaagatgtgttcacgaatactggttgtgacgtattgtaccgtactgatattctggctacatgtaaagagatcgcgcaacgtggcatggttgtgataggtcccagtaacagggcaccactaactttgagattaatgctgggtgagtctgtgaacaaatagttcggtgacaaaagtgatgcgttccccgcattctcgcagaggtctactcaatgtggtgcactccaggtatctcgactttcacaagttttgttgtccttctctcacattttgctcactcgatacctgacagcacgaaccgagagactagcatcatgaagagatctggaaatacatgtcgcacggtgtcgggaggaagatgagaatcgagctgtcttgccaactttctgtattgtcgtccttattcagaattagctgggactatgtctggcaacgaggttggtgtgacggatcaagattgttgctcagtgtctgcagggttgcgtccagttactcgtcaaaaggcagtcccatttactacacaaaaggtctgggcctccaagtaaacgggttcacgcaatggagctacggcccgcggggatctcttttacccccaaatatttggccgccctcgccggacagggaacacaaactttcgggggccggaagcgaacttgctttgaccaaaacaggccaacgggtc

SEQ ID NO: 687869 - DNA, 347 bp, Homo sapiens
ggatccctctccgagtggcttcatttaaaagtctccttatagccagcatggtagctcatgctattatcctagcacattgggaggctgaggtgggcggatcatttgaggccatgagttggagacaagctgggccaacatcgtgaaatcttgtctctactaaaaatacaaaaaaatttagccgggagtgctggtgtcttcctgtaatctcagctactcgggaggctgaggcaggagaattgcttgaccctcggaggtggaggttgcagtgagccaagatcacgccactgcactccagcctgggcgagagagcaagactctgtctcaaaaaataaaaataaaaataaaaa

SEQ ID NO: 687870 - DNA, 265 bp, Homo sapiens
ttcataattcaaggcagcatttgtagggcagcactcagtcatagcagcaggtcagcagtttttcttcgtgcatcagtggttcagtggcataagtggcgttggcttgcccatgattgtgcaggggtcaggcagtcaggtcagttagtattcaggcaggggggttgttcagggggtcggcaggaacacaggttggggacacagctcaacataggttgttgttgcatttggttcacacacaaatagtcagggggcatgcatgctcaat

SEQ ID NO: 687871 - DNA, 277 bp, Homo sapiens
taccagaaacattagaaatcatgtgcaatttaatctttacacaaataaaggaaaactatcacaatgcctgaataatgaagactcccggagaaaaagaaaggcctgtccccgaggatgctcttcattttctctcctggactcagcgcggcgtgcacccggcgagattcactccgcgctgatacacgtattaatggtattctggctggaagagagtggatgttctccggtgattgcccgtgcagctgtgactcagttctccaactcataacaatacatt

SEQ ID NO: 687872 - DNA, 102 bp, Homo sapiens
cttctttaagcggacggtgcgcaatgactgacctacacctgctgcgaaacaaggactgctgattgacatgcggcagggaaccggtgcctgtactgccgctac

SEQ ID NO: 687873 - DNA, 139 bp, Homo sapiens
tcgtggtggtactcgctcccgtacagagcaggattaccatggcgacaacagcatcatcagtgaggtaaaatctaatctgtctcacgatggtctactaacagctcacgttcccgtattagtgggtgaacaatccaacgct

SEQ ID NO: 687874 - DNA, 226 bp, Homo sapiens
gagcgacgaaagtgcgctggagtggatcaactctaggctcgaactcattatgaaaagtgggaagtacgtcctggggtacaagcagactctgaagatgatcagagaaggcaaagtgatgttgttcattctcgctatcaactgcccagctttgaggaaatctgaattagagtactatgctatgttgtgtaaaactggtgtccatcactacagtggtatcgataaatat

SEQ ID NO: 687875 - DNA, 351 bp, Homo sapiens
agatctataacgagataagccatatgtgaaggataaccacagagaaaatccacaaggttgtctgctatatcctgctcctctaaaaccaggtccatatgccattaaaggcccttggtaacagaaaggaaagaaggtacccaaagcgggtaaggggaataaccctgcagaaaatggaaatgccaaaacagagcaggcactgaaagctgaagctgccggagataccaagtgaagtgtgtgcatttttgacaactgtggacctctggtgactgtacggtttgaaatactattttttatcaagtcttatataaatgcagaattttgttttcctttgcttattttttttaaaagcta

SEQ ID NO: 687876 - DNA, 1798 bp, Homo sapiens
  misc_feature (1003)..(1003): n is a, c, g, or t
  misc_feature (1335)..(1335): n is a, c, g, or t
tatttattcttgttgttattttagttgtatctctctcgagtttatcttgtttttgtatttatatatctttatttgttattaaccgatttatagcttgagtgttgctatcttctatctttatgtcatatttcgttgctacaaagtattgtgtatgttttttgatactcttaatttgttttattggtttttattatttatgtaatctacagaagcgacatcgactatttgtgagtattccttcgttttgtatgagtttattcatgtatgctacttctacccgttttttatatgtgtcatcttcatgatttggtagattaaaatgtttgatttgtcttaatttattaactataattattagtgtcttttgtgttggtttgtgttggtgtgtgggtgtggggtgggttatattagtttggtgtgttggttcgtccgcgctccggttgcttgtgtgatcgcccgacacccaggttgtgtaagtgttcactgtacccctcttattgtggggattgttaataaacaacgcaataatctcgacgatttttatttgggtggactcacccggcattatgtgggagatcctttcctcgtaatggggagttctcccccaacccacaaagtgtgtgtggtgagccaccacaataaataatcgtcatccggcgttgccgtttgtgtggtttatagatcttgctttccgtgcttccctctctcttggtgttactctgtgatcttaccacggggtgctttcttcttataagggtttttgttcctcggaaggcgcccccctttttgtggttgttgcccgaaataattttcttctggcccctctcgagttggcccaacagaagattccaaaagaggtggtgaaaaaaagtgtagtgattaccctcccccccattcctcgggggggaacattgtcttgtcgaattctcccgccgcgcatacaactcttggtgttgttgccaaaaaaaaaaatactgctttttttttggggggagagatattngtgaagaaacacacagaatctgttaattacctccgcagagtcaccaccccccacacaggtgtgtttttggggagacacacacctcttcacacacagggggcacagaaaccccccctcctgtggtgttttttgtccacacacagtcttttagatatatcacccctgtgtcacagagatctcctcttttttgggcacactctctcgtgagagagaatattgtgataaaagagatttgcgtctgtgtctcacactctgcacacacacgttttctcgagagaggcgcccacacagcgcacaagagatagaaatattctctgtgggagagaaagggntttttataaacagggtgttcgcgcgagagatatatgtagaggttaatatagagaaataacacacacacttttttcacaagatatacgtgtgagaaacatttttgtgtatttttgtggagataccacaggagaacacacacatcgcagatattcggggtatatcacacaatatatgagaccccacgccacatgtgtggattttatcggcctcggaacttttatattgtggtggctcgggtataggccacaggttttaagcacttgcacaacacacaagaaagcccacaggcacacaggctgcacattgtgggcgccaaacacacacagaaatcacaccacaaagaaggagggccacatgcgctgggtccccacagaaagatatgatggggtcataccttcctggccaaatataatttcccgttttatccccaaagagccacattaaaagagtttccaatggaaa

SEQ ID NO: 687877 - DNA, 672 bp, Homo sapiens
tttttttggagcgagggggaactttactattgcaaggctcttttattttacatgaagtatcataattttaactctaaggctgtgataagttaagaatgtatatcataattctcagaaacactgtgaagcaataatgcgaaaagatacagtttaagccaacagaggaatttagatgaaataccccaacattaattaacccaaaagaaagccggaagttaagaacaaaggaacacaaaactgaatgggacaaatcgaaaacaaatagcgaaatgatagacaaactcaactatctgttgtctataagagaagcgcatttaattaaaaaacacagggtggaagttaaaacatgggttaaaatataccagtaaacagtaagctaggaaggctgcagtggctatactaatatcggatgaattagacttcaagataaggagtattatcagcaataaagacattttataatgagtaaattgtcaattcatcacgaagacacacgaaccatatatgtttatatgcccaataacagagcctcatgcacaagaaagcttgcccttaagtaagtgcaatttacagccctaggtaaggttacactcctggtcaataattatagcacacttccattaacaatcattccatttaagatctgagacacttttcaccttataccttgct

SEQ ID NO: 687878 - DNA, 796 bp, Homo sapiens
cctggtgggcgcggccccttggattgcgcggtggctgcgggcccagggtgtgaccgaggcaccggggcggtgccaattccatatcgcggcttctatttttgccgcgccggggcccttggggggggcttctttaccccgcgacgtgctgacggctggtgggtggcccccgcccccgagaaggtggtttacaccccggcctcagtgtgaggtgtcttctcacgagcagttctttggcgggcgcacgaggcgctcgccctggggtggaccacgccccgcggtcccgagcgttgcccgtggttcccgcctggtggttgtgcagactctccccgggagttcacccctgccccgacgggcccttcccgcgggtaggccttgctgcttatctggtggcgacatgcctgatcccccctgctcagtaattggcctttcgccccccgtccagactgttcggcggagccattgggggtctcgccgattgtgcccactcctgtccaatggccgctctacatgacccctcccgtggcttccctcacccccctgccttttttcccccaaccggccctgtggcggttcccccccacggcttgcccctctgggtcccctctcccccatggctcctcctgggccggcgagctacctcggggccccttctgcccggagtgttgcatcgcgtgagactgaggcggtctgcaggcaaacactatttgcgggccgccgggccgactctttcattttggggcggggtgagcgttgtgggcccaaatttccctaattacaaacccgaactttcataaca

SEQ ID NO: 687879 - DNA, 734 bp, Homo sapiens
  misc_feature (40)..(40): n is a, c, g, or t
  misc_feature (103)..(103): n is a, c, g, or t
  misc_feature (117)..(117): n is a, c, g, or t
  misc_feature (136)..(136): n is a, c, g, or t
  misc_feature (155)..(155): n is a, c, g, or t
  misc_feature (186)..(186): n is a, c, g, or t
  misc_feature (214)..(214): n is a, c, g, or t
  misc_feature (295)..(295): n is a, c, g, or t
  misc_feature (366)..(366): n is a, c, g, or t
  misc_feature (424)..(424): n is a, c, g, or t
  misc_feature (431)..(431): n is a, c, g, or t
  misc_feature (439)..(439): n is a, c, g, or t
  misc_feature (453)..(453): n is a, c, g, or t
  misc_feature (460)..(460): n is a, c, g, or t
  misc_feature (462)..(463): n is a, c, g, or t
  misc_feature (479)..(479): n is a, c, g, or t
  misc_feature (489)..(489): n is a, c, g, or t
  misc_feature (519)..(519): n is a, c, g, or t
  misc_feature (710)..(710): n is a, c, g, or t
ggctcaccctgctctctgcgggccacgtgatgggaaaggngctgcctgtgttcctcccgggctgccggggtgggcactggtcagccactccttctcggtttcnggttgtggggcgangggggggggggtgcttgcngttgtgcggacaagggggngggtcctccctcctctttcagggtctctgtntcccccacagggcatattatgcccagcntggtcccacttgctggcacttgcctatcttaggctgcggccttcttttgctttggctgatgggggatcaagattctgtgantgactgctcttttcttgacacaaagcagccacagaacactttcctacatacagtatggcagcgggcaagcngaaggccctgctggctcggcttaaggcacttgatagagacacaaggtacatcctcctnccctgcngcccccanaggcctcaggggancctgtgngnncaccctttatcctcangtccccttanccctgcccctccctactgctgggcaatgangaggacaggagcgtgccttaaaggaccatggtttggtgggagtacagggtaggaggatgaggaaaacaagaagggagctggagatttggccaaggagcaacttcagaaggacaggagagcacgagcattaggaggaagccaaggcagcagcagagggaagccagttaagtcatgagagaccaacggcagtnatgtttgctggcgcagatgcagaa

SEQ ID NO: 687880 - DNA, 364 bp, Homo sapiens
gaattcccccccccccccccccccctggagaaaactaaattctcatgggaaagtggttataaatgggggattgttacaaggtcagggagggtggggagtatctactcgttcaggattgaggagtccatctgatgaagacctgtgaaggtcctgtatatgctgctccagtctctgtgattacatatttccttggatcctgttgactaagaaggcctggttacctgggggtcctccatcccctctagcttaggtgttattcccactgaatttcttgagctctgaggggagagatttaatggagacatcccgttgtagatctgagtgttacattaaagacgtgagccaccatgcccggttgcttatg

SEQ ID NO: 687881 - DNA, 630 bp, Homo sapiens
  misc_feature (13)..(13): n is a, c, g, or t
  misc_feature (15)..(15): n is a, c, g, or t
  misc_feature (27)..(28): n is a, c, g, or t
  misc_feature (127)..(129): n is a, c, g, or t
  misc_feature (143)..(143): n is a, c, g, or t
  misc_feature (165)..(165): n is a, c, g, or t
  misc_feature (167)..(167): n is a, c, g, or t
  misc_feature (169)..(171): n is a, c, g, or t
  misc_feature (182)..(182): n is a, c, g, or t
  misc_feature (184)..(184): n is a, c, g, or t
  misc_feature (195)..(195): n is a, c, g, or t
  misc_feature (203)..(203): n is a, c, g, or t
  misc_feature (209)..(209): n is a, c, g, or t
  misc_feature (228)..(228): n is a, c, g, or t
  misc_feature (248)..(248): n is a, c, g, or t
  misc_feature (258)..(258): n is a, c, g, or t
  misc_feature (264)..(264): n is a, c, g, or t
  misc_feature (274)..(274): n is a, c, g, or t
  misc_feature (276)..(276): n is a, c, g, or t
  misc_feature (286)..(286): n is a, c, g, or t
  misc_feature (294)..(294): n is a, c, g, or t
  misc_feature (296)..(298): n is a, c, g, or t
  misc_feature (309)..(310): n is a, c, g, or t
  misc_feature (320)..(322): n is a, c, g, or t
  misc_feature (325)..(326): n is a, c, g, or t
  misc_feature (328)..(328): n is a, c, g, or t
  misc_feature (335)..(335): n is a, c, g, or t
  misc_feature (338)..(338): n is a, c, g, or t
  misc_feature (341)..(341): n is a, c, g, or t
  misc_feature (343)..(343): n is a, c, g, or t
  misc_feature (345)..(345): n is a, c, g, or t
  misc_feature (350)..(350): n is a, c, g, or t
  misc_feature (356)..(356): n is a, c, g, or t
  misc_feature (362)..(363): n is a, c, g, or t
ggggaacaggatnanagacagagccanngcagggctgccccaccaggccccggtgggtttgtctgcacttggtgctcctgcccacaccagccactttggtgacaatgacccttccaagaatctttgnnncaaggagcaccagntccctcttcattcttgaagcangnannntttgaccgggngnttgtcgcccangaagtggngctcgnaacccataactaacacctnccacccttggaaaccatgtnttctgggggngagatnaccattctgngnctaagactgnttcaaagnannnctcatagactnnctggtccagnnnacnnanggtacancantgncntnacagngacagngtcatnnggagctcgccctacccaatcaaccctccttattctagacccctgtctgtttcttcatttcctcgacccctaagatcatcgattccccttccttaagataggcttttctctctctctatctcttttttccttccttatcttttatcttcccctttgaacactctaattctctttctcttctccgccccttgtttttcctcttccctcgcccctttttttcgccgtgtctttttttcctcccctccactccatattgaccctaaaccaa

SEQ ID NO: 687882 - DNA, 161 bp, Homo sapiens
  misc_feature (69)..(69): n is a, c, g, or t
  misc_feature (140)..(140): n is a, c, g, or t
agaagatggggctttcaaagcgttaaatgaaacacagaagccatggccaggcacggtggctcatgcctngtaatcccagctctcagggaggcaagaggcaggagcatagcttgagcccaggcgttcaagacctgcctggnaatatagcgagaccccgttct

SEQ ID NO: 687883 - DNA, 502 bp, Homo sapiens
cctggaagccggctgtgtacaggcagcttgctagacaggtcataagttaacgaatggcaggggccgggggcagggagagtcaggccagagccatggctctgagaaaccctggcacacgtataggccaggagccagggatgggctcttctgcaatgagtactgtatcagggccgactgcacacgggagaaaagccgtttacatgtacctggcccacgtgccattactcattcctcacaggctccgcgatgaaagaacactacaggacgcacacaggcgagaagtcgtatctgtgtgacctctgcggctttgccggcgggacccggcacgccctacacaagcatcgcagacaggacacaggagaaaaaacttatcaggtgcgatgagtgtaactttggctccacaactcagtcccatttgactcggcataaacgtgtacacactggagaaaaggcctacagataccccctgtgtagatacaggtccaactgttgtgaaaatatc

SEQ ID NO: 687884 - DNA, 622 bp, Homo sapiens
  misc_feature (13)..(13): n is a, c, g, or t
  misc_feature (15)..(15): n is a, c, g, or t
  misc_feature (27)..(28): n is a, c, g, or t
  misc_feature (127)..(129): n is a, c, g, or t
  misc_feature (143)..(143): n is a, c, g, or t
  misc_feature (165)..(165): n is a, c, g, or t
  misc_feature (167)..(167): n is a, c, g, or t
  misc_feature (169)..(171): n is a, c, g, or t
  misc_feature (182)..(182): n is a, c, g, or t
  misc_feature (184)..(184): n is a, c, g, or t
  misc_feature (195)..(195): n is a, c, g, or t
  misc_feature (203)..(203): n is a, c, g, or t
  misc_feature (209)..(209): n is a, c, g, or t
  misc_feature (228)..(228): n is a, c, g, or t
  misc_feature (248)..(248): n is a, c, g, or t
  misc_feature (258)..(258): n is a, c, g, or t
  misc_feature (264)..(264): n is a, c, g, or t
  misc_feature (274)..(274): n is a, c, g, or t
  misc_feature (276)..(276): n is a, c, g, or t
  misc_feature (286)..(286): n is a, c, g, or t
  misc_feature (294)..(294): n is a, c, g, or t
  misc_feature (296)..(298): n is a, c, g, or t
  misc_feature (309)..(310): n is a, c, g, or t
  misc_feature (320)..(322): n is a, c, g, or t
  misc_feature (325)..(326): n is a, c, g, or t
  misc_feature (328)..(328): n is a, c, g, or t
  misc_feature (335)..(335): n is a, c, g, or t
  misc_feature (338)..(338): n is a, c, g, or t
  misc_feature (341)..(341): n is a, c, g, or t
  misc_feature (343)..(343): n is a, c, g, or t
  misc_feature (345)..(345): n is a, c, g, or t
  misc_feature (350)..(350): n is a, c, g, or t
  misc_feature (356)..(356): n is a, c, g, or t
  misc_feature (362)..(363): n is a, c, g, or t
ggggaacaggatnanagacagagccanngcagggctgccccaccaggccccggtgggtttgtctgcacttggtgctcctgcccacaccagccactttggtgacaatgacccttccaagaatctttgnnncaaggagcaccagntccctcttcattcttgaagcangnannntttgaccgggngnttgtcgcccangaagtggngctcgnaacccataactaacacctnccacccttggaaaccatgtnttctgggggngagatnaccattctgngnctaagactgnttcaaagnannnctcatagactnnctggtccagnnnacnnanggtacancantgncntnacagngacagngtcatnnggagctggtcgtgcccagccaaaccctcctttttcctagagcccagcccgcacgcaggagttcctggaccctcaggacagtgaacttccataccccagggcaggcctttgacccacttcaggagatgagaccagccttctggcttcacctacgatttattcttggtctctgcctctcctggaattttgaacctttttatactcccttatgcacaaccacttttttaaccgatgcctttctctgcacttctaggcctaac

SEQ ID NO: 687885 - DNA, 654 bp, Homo sapiens
cagattatacacacacacaacaacaaacacacacacatattcatttttttgtttgagatgagtctcgctctgtaccaagctggagtgcagtggtgtggtctcagctcattgcaacctctgcttcctgggtccaagtgattctcctgcctcaccctcccgagtggccggtactacaggtgcacaccaccatgcccagataattttgtgttttagtagagacagggttcaccatgttggccaggatggtctcaatcccttgacctcttgttccacctgcctcagcctcccaaagtgctgggattacaggcatgagccaccattcctggcccaagttataggtatattaaaggccttattttttttttaatgggaccttgtttggctgaaaaaaaggattctcagtcgactgaattcttttctccatttggttttcccactttaatacatgcatgagaggccaataatctaataggagatggggaaccaaaacatcttatacgctacgggatcctttggcctatgtactatatatgcgacgatctatgtaatgtctattcatcaagctctaatgacctagaggaacataagtttgactcaaatatctgagggcacagcaccactgtggtcattgagtccctgactatctgggaatcc

SEQ ID NO: 687886 - DNA, 589 bp, Homo sapiens
cgtggtggcgggcgcctgtaatcccaaccactcaggaggctgaggcagaagaattgcttgaacctgggaggcagagactgcagtgagccgagattgtaacactgcactccagcctgggctacagagcaagactgtctaaaataataataataatagcgtactgtatacttggtcaggcatggtggctcatgcctgtaatcctaatactttgggaagctgaggctggaggattgcttgaagctgagttcaagaccagcctgggcaatacagcgattcttagactctacaaaaaatttgtttaaaaattagctgggcggctgggcatggtggctcacgcctgtaatcccagcactttgagaggctgagtgggtggatcacctgaggtcgggagcctcgagaccagcactgaccaacatggagaaactccacctctactaaaaatacaaaactagctgggcttggtggcgcatgactgtaatctcagctactcgggaggcttaggcacggagaaccagttgaacaccagcaggcagaggctgcagtgagctgagatcatgcactgcactccagcctgggcaacaagagtgaa

SEQ ID NO: 687887 - DNA, 344 bp, Homo sapiens
cacgcttgtgctaacaacaaatttctcagaacatatctggcatttctgaggacgtatctccattgttaagtgacacattaactgtataaaagaatcttcatcctctccaactgtggataatgtcacatttcttaatttttgccaatctcacgagagtagatggtcacttgtaatctttattttgaaattctgtgattactaatgatgtgaagtatcttttcatatttttttccaccatttatgcttcctcttctttgaaatactagttaatgctttttgcacatttttctttttcttttttttcttttttctttttcttttttttgttgtgggcaatcaagctt

SEQ ID NO: 687888 - DNA, 277 bp, Homo sapiens
ggagcatcaagacatacttcctgaaatcttacagacataatctctactcttatttatttatttagagacagagtctcactcttgtcaccaaggctgcagtccaactggcatgatctacagcctcacaacaacactccgcacatccgggatatcaagcaattctacctgacctcagcactccccaagctagctggcgcgtcacagcgtgcgcgccaccatgtcccggctaaattttagtgttttcagtaggagacggggttactccatgttagggggg

SEQ ID NO: 687889 - DNA, 285 bp, Homo sapiens
tgattcgactcgagctgagtaccctcataaggccaaaccgagattagtctcactctgttgcctaggctggagtgcaatggcgcgatctcggctcactgcaacctctgctcctcgaattcaagcgattcttctgttttgggctcctgagtagctgggattacagatgcctgacaccacacctggctaatttttgtattttttgtggagatggggttttgccgtgttggccaggccagtctcgaactcctgacctaaggtcatctgcctaccttggcccttatcgag

SEQ ID NO: 687890 - DNA, 457 bp, Homo sapiens
catgtaattggtaaagtataggcttgagtacgtgtccggccgcatgtgtaatgaaccctaaagctttcctaatttgtagttagcatcgtccctaagcggaacgatttcccgtgaaacaagatttgtacttttctacgagccgtacagtatacggagaagctgcacaggtcctcggcaaagcagatgcttttgccatacatcgtgcttaacaaagctgtagttgaagacggagcccagttagagaatgtggccttcaatatcaaaagatcacgctggacctagatgtatcttggagtcacccagtaaaaccatctggacgcaggaccgaagccccgaaaagcaaggagatgaagcaccagtgtctgtgaccaggagtcagagaggggaaccgacgtccactacacaaagtgaagagcggaagagattcctattatagtgggcttatgatcagccaacg

SEQ ID NO: 687891 - DNA, 245 bp, Homo sapiens
ctagctggtagcgggtgaactccacgtagttgaagttgcctttcttatcaagggggtgcctcccggtacatctcgtaccacttcctcatctgtgaaggcggacacccatggtgtgtgagcagctcccgtgaggtggtcctcatgtgatgaaacctagaggcttcctcgtacgaagcatggcaaatggcgtatgcgaattggcatcctacggggtcctgtgcctgttcagctttctccccaaaact

SEQ ID NO: 687892 - DNA, 1020 bp, Homo sapiens
  misc_feature (15)..(15): n is a, c, g, or t
  misc_feature (94)..(94): n is a, c, g, or t
  misc_feature (105)..(105): n is a, c, g, or t
  misc_feature (111)..(111): n is a, c, g, or t
  misc_feature (116)..(116): n is a, c, g, or t
  misc_feature (122)..(123): n is a, c, g, or t
  misc_feature (139)..(139): n is a, c, g, or t
  misc_feature (141)..(141): n is a, c, g, or t
  misc_feature (157)..(157): n is a, c, g, or t
  misc_feature (174)..(174): n is a, c, g, or t
  misc_feature (178)..(178): n is a, c, g, or t
  misc_feature (193)..(193): n is a, c, g, or t
  misc_feature (204)..(205): n is a, c, g, or t
  misc_feature (210)..(210): n is a, c, g, or t
  misc_feature (213)..(213): n is a, c, g, or t
  misc_feature (224)..(224): n is a, c, g, or t
  misc_feature (246)..(246): n is a, c, g, or t
  misc_feature (248)..(248): n is a, c, g, or t
  misc_feature (274)..(274): n is a, c, g, or t
  misc_feature (279)..(279): n is a, c, g, or t
  misc_feature (305)..(305): n is a, c, g, or t
  misc_feature (320)..(320): n is a, c, g, or t
  misc_feature (416)..(416): n is a, c, g, or t
  misc_feature (425)..(425): n is a, c, g, or t
  misc_feature (455)..(455): n is a, c, g, or t
  misc_feature (460)..(460): n is a, c, g, or t
  misc_feature (496)..(496): n is a, c, g, or t
  misc_feature (627)..(627): n is a, c, g, or t
  misc_feature (672)..(672): n is a, c, g, or t
  misc_feature (681)..(681): n is a, c, g, or t
  misc_feature (703)..(703): n is a, c, g, or t
  misc_feature (710)..(710): n is a, c, g, or t
  misc_feature (920)..(920): n is a, c, g, or t
  misc_feature (935)..(935): n is a, c, g, or t
  misc_feature (949)..(949): n is a, c, g, or t
  misc_feature (1007)..(1007): n is a, c, g, or t
ctgaatctgaatgcncccataggtggaacttcaaactctcaatgttcaaaacaacatcgctttttcttcacaaaatcttcattatgtttttttntggaacttatnttcttnatatnacatannttccaagctttaggtncntttgacgtttaggggnttatagatagggaacanttanttagatgctaagttnttttagttttnnttttnttnttttttttcanttctaattgcaagctatatatntngcaagttctgattaagttcttttggnatgtnttttctaatttctgaacctttccttntgctttcaaaaatgntgatagatgtttaagcttttggttgatagaagatttgaactgttgacttggatgttgggggacatttgaggactccacccctatttccaagcactnaggcaagcnaaaatattctaatataaagttatggctggnaagcnatattaagtttattcactcaataaatccagttcttntacaataaaagaaaggaagaaacacttggaacactcaaaggttagaggggggaaattactgacagtttcatgtacctctttgggcaaagggtcagttatggggatttgaggtgctcagaaaatagtctgtnttctggaagttataaaacggaatcaggtttatctaagttggagtnagggctctnacaaagtacccttgggcaaatnatctctntgggcttcagtgttctcattttacaaataatgcctaattctcagggctgtttctcgagaataaaacacatttcctagagttctgcagttacaacgatgactaaaatttattggtatgttttttacgcaccaagcacttttctttactcatttaatattcattattctgcaagagagttactagctcatttacagatgaggacacagaganattacgttatttgtncaaggacacaaggnttaaaagttgttacgtatacggaaaagccaacactgttttaatactgttacactgggnagggggaacagct

SEQ ID NO: 687893 - DNA, 112 bp, Homo sapiens
cctagtgttagaagtttcatagcatttcatctcaatatttaacaattattatgttcaagtatggaatagtaaaaagaagctaaactttatctcttggggtatggatttcagc

SEQ ID NO: 687894 - DNA, 896 bp, Homo sapiens
  misc_feature (1)..(1): n is a, c, g, or t
  misc_feature (65)..(65): n is a, c, g, or t
  misc_feature (212)..(212): n is a, c, g, or t
  misc_feature (232)..(232): n is a, c, g, or t
  misc_feature (236)..(236): n is a, c, g, or t
  misc_feature (238)..(238): n is a, c, g, or t
  misc_feature (260)..(260): n is a, c, g, or t
  misc_feature (561)..(561): n is a, c, g, or t
  misc_feature (567)..(567): n is a, c, g, or t
  misc_feature (598)..(598): n is a, c, g, or t
  misc_feature (631)..(631): n is a, c, g, or t
  misc_feature (646)..(646): n is a, c, g, or t
  misc_feature (730)..(730): n is a, c, g, or t
  misc_feature (732)..(732): n is a, c, g, or t
  misc_feature (748)..(748): n is a, c, g, or t
  misc_feature (752)..(753): n is a, c, g, or t
  misc_feature (792)..(792): n is a, c, g, or t
  misc_feature (836)..(836): n is a, c, g, or t
  misc_feature (891)..(891): n is a, c, g, or t
ncggaggtaaaggaagataaggggtttaaaaggaaaaagcgagtgaggatgtacgtgaagtggtnttgaaacaattatccgttggctacaaagatcagtaacgagaaggggatggccagtccaaggttggacaggcagtggctgctgcataatgtgccttgtaagcattgtgttttgtgtgagttttggtggccgttgtgtgcaaggttgtngtttgtggcaggtgcttttntgcnanttctttatatcaggcaattatnagtgagaactttcccatcacggctttccctgactccattctctgacagctttcacaatctagagtcagaatcccggaggagaggagtaccaaatagcttaagagtttttttttgtttttgttttttttcgttaaaaaaaaaccgctaaactctaccctgatcagtgaaaagaatttatgcttgaaagatgcagtttcttcttggcagattcagacaagaagtgcggcggaagcttacacctgcacgtggtgggacagaggcaatgaacggatggtctggctgaggctgagagaaccaagcnggattnggatcggcttgagggcccggcgtcgtcagtngtggacctctctgacctgaggcaagttagtcangctggactgagcgtntaaacgtcgggtgtttttcaatgtgacgcgctagaataatccctttatctttcccaacttttgtttgttgagtgtaggcaactntnatgaatggaaaggaancctnnttgtactttaaatccgagaacattctctactctccagancaagtgatctgcaggcgcggcatgtggaatccgtgaggccagcngtacggcgggccgccccggacccaggctttgctcctcactttccgctgtttttantgcgg

SEQ ID NO: 687895 - DNA, 241 bp, Homo sapiens
gctcctctatctcttcagagtctggtcatgtggaggtggggtttcttgggatgctggagaagagctgccaggaaatgtctattctgggtcagtaaataacaacggtcatagggagggaaattctcagtaatgccagtcaactctaggttacctttttaaatgaagagtagtcagtcttctagattgttcatataccacctctcaaccattactcaaacttccagcgcccaggtccaagtct

SEQ ID NO: 687896 - DNA, 123 bp, Homo sapiens
agaagatcacctctgtataaacgcagcatcttaaccagctgaccattagccataaggaacatgggaatcaagtcaacattccagtctcttcctctccccatagactcgggaggtgatcttctg

SEQ ID NO: 687897 - DNA, 165 bp, Homo sapiens
tcgcgcgtccgccggattcgtcgtcgtcgtatcgaattaccagacaaatcgctccaccaactaagacggcatgcacgagccgactaattcccggaagtcgtcgtcgtggttatcggaattaaccagacagatcgctccaccaactaagaacggccatgcaccacc

SEQ ID NO: 687898 - DNA, 369 bp, Homo sapiens
  misc_feature (182)..(182): n is a, c, g, or t
  misc_feature (185)..(185): n is a, c, g, or t
  misc_feature (196)..(196): n is a, c, g, or t
  misc_feature (198)..(198): n is a, c, g, or t
ccgcaggtccagcttggtgcccaccaggatgatgggaggactacgaccgtctccggccgctctcctatccacagacggacgtcttcctcatctgcttctccctcgtcatcccagcctcttatgagaacgtccgcgccaagtggttcccagaagtgcggcaccactgccccagcacaccatcntcngtgggcaccangntgacctgcgggacgacaaggacaccatcgagaaacttaaggagaagaagcttggctccatcaccttaccctcaggcccttggcacttggccaagaagattgactcggttgaattacctggagtgctcagttctcaccctatgatgaggtcctgaaaacccgtgttcgacga

SEQ ID NO: 687899 - DNA, 871 bp, Homo sapiens
  misc_feature (297)..(297): n is a, c, g, or t
cttctgaaaaagcttgcgtgttaaaggtcgtgtaaaagcagtcacggttggccacagcaattatttgggggaagccaagtgtcgcactggttcacgcgaaagaaagacaatttggtgcgcccaaccacatgcacaaatgtgtgtggacctcctcgcttttcttcccccagagtcttggttaggagggtgtcttgtgcatgaactcactgctcctcttttgtgtaaagggggacagaagtatgattttctctctgcacgcgtagcgcgccccctcctcgagaagatggtacactaacntgggggaatatatcccgagggttcatcaacacgtgtctgccccggggaagaagcataactctttgcggggtgttgtttgaccccgcccgtctgtcgagagcgagaggattggataaaaaaggggtataagagggagacactggcgccgacactccgtcggtgatgaaaaggtgtaccaagttggctttgccccctcccacgcaggtggttccacattttactgggcccgcgtgctagtttcggaagaagggaagactaatacatgagtgagatttctctcttgccggagaacacttgtcgagagtcgacctcttgtttatctagccccataaaattgtgggggtttcgagatcgccacctcgtggtgttgtcgccacaagaatgtttgtgggcacacccccgggggaaataagaaaagggaccgccggttgtctaggcgacagaattacttttatttgttgggggagatgccccggggctagattttgtttccagggggagaagacgaccaccctctcactctcgtagacctatggctaagaaacccggtaaaccacccaacggcaacaaaaca

SEQ ID NO: 687900 - DNA, 986 bp, Homo sapiens
taccgggatggctgagtccatgaccaggtgcccttcgacggcatgtggattgacatgaacgagcctgccaacttcatcagggctctgaggacggcatgccccaacaatgagctggagaacccaccctacgtagcctggggtggttaggggggaccctccaggcggccaccatctgtgcctccagccaccagtttctctccacacactacaagctgcacaatcctctacggcctgacctgaatgccatcgcctcccacagggcgctggtgaatgtgctcgtgggtgacacgcccattttgtgatctcccgctcgacctttgctggccacggcctgatacgcctggccactggactgggggacgtgtggagctcctgggagcagctcgcctcctccgtgccagaaatcctgcagtttaacctgctgggggtgcctctggtcgtgggccgacgtcttgcgtgttacctagagtgcaacacactcagagtgagctagtgtagtgcagctaggacaccagatagggagagcctatctacccctatcatgcatgaacacaacaaacaggcctgatacagtctatgccccagtgagccagtaacagctatccagcgagcactggtccaggcaggacattgaggaagtggcctcaacacctgcgctaagacactcactcttcgacaaaatctacaaaactgttcacaacccagggtctcaacgagtacgcgagcagcgacgaacatgctcgacccctggtcacccatataatttaccttggtgaagatgtaacacaccatacgttaaactacattagtgccgacctcatgtgacaccatggatttgaactgcaaacagaaagaataccaatgcttgcagagtgggtatagtgtccacatggttcatattataaaccacaatgattacatcccaagtgtccaggtagaataaggtgacgaaacagatgaaattcatccaacatatcacacacatg

SEQ ID NO: 687901 - DNA, 1018 bp, Homo sapiens
ctagtcccgggctggcgggagtgcagttctagagtccctggccctgtgcgttgctgcggagcggggcagccagcagcggagtgctgcggtgcgcagcacaccctggggaccatgggctccatgttcctggagcgaggagtgtggccctggtccagctctttctgcccacatgcgtgctgcctacacctgcgtgagtcggctgggcgagctgggcctcgtggagttcagagacctcaacgcctacggtgagcgccttccagagacgctattgtggtatgatgttctggcgctgtgaggagctggagaagaccttcaccttcctgcaggaggcaggtgcggcagggctgggctggtcctgcccccgccaaaggggaggctgaacgtgaacccaaaacaccgggacctgctgcgcatccaggatggagacggagcgcctggcccaggagctgcgggatgtgcggggacaaacagacaggccctgacgggacccaggcttgcaccagctgcaagatccacgacacgaccgtgcataaagccagtgaccatagaacctcagactggaaagccgagccacacaagaaggggcctcagaagaggacgccacttgaatccaaggcacccccggggggggccgacaaccaaggaccatgaagggtcaaacatttggttggacagggatgctcggatggagagccccaacaagggacccatgcccctaagagcgccactgcatctgggaaggggacctagcacagaggaaatatccatcatatgccaagcatattcaggggaaggctgggaagacaagccaggcagtgaaagcaacccgccgaagaaccgggacggaagagcaaagacaaacggtggaaagcaccagtatactacaatcatcacatacagggagaatgaagaccgcatacgaaaacacgaaagaatccagacaagaatacaagagaccagcaatacgaccaagacaagcgaaaaaacccagaaatgtgagacggcagaaggaaggaca

SEQ ID NO: 687902 - DNA, 161 bp, Homo sapiens
gctcggtaccctcattcagcataataccctccagttccatccacgtcgaagcaaatggtgggtatttgtcatttctaaaggctgagtaatactcccagttagatcatgctctcctatggcattctattttttttccctttcaaggatataacaggttagaa

SEQ ID NO: 687903 - DNA, 374 bp, Homo sapiens
attcatagtgcagctcaatactagcttcagtataaaaactgtacagattttagtatagctgcataagattctcgtgtagagaaaatacgttttaaaaaagtgcaggtcggtagctttcttgatggggctactcatagcaggttagattttacagctgtctgagtggttgaaatgtgtcctaaatatttaatggttgtttttaatgttcttgtggtgatggtaagcacagcaaaattggtaggaattagtatcaagtagtaaattttgggtttttgtaggatgttgctaatttcgctttgttgttagaagagagaagattttagtcaatgaataatataatgtcaatattcataagaaagagaaaaatagacagg

SEQ ID NO: 687904 - DNA, 648 bp, Homo sapiens
  misc_feature (210)..(210): n is a, c, g, or t
  misc_feature (511)..(511): n is a, c, g, or t
  misc_feature (552)..(552): n is a, c, g, or t
ggcacgagagagaactagtctcgagcatatgataccactctatgagatggaggctcgctgtgtccaggctgtgagtggacagtctcagctcactgcaacctacacgtcccaggttcagagagattatactgcctcagcctcccaagtagctgggactacaggtgtgtgccagcacacccagctgattgtcgtattagtagtagagacggngattgaccatgttgtgcagcatgcgatttatgtcttgacctcgtgagccacctgcctgagccccacgtgctgggatcacaggcatgagccagcatgcccgagcagcccggtgtctacagagtaaccgtatgcatgtcgctggcgtgatggagagcacctgcatgctcagctactcatgggctgagctgagaggactgttcgagcctgtgaggtgcaggatcgagaagtcatggcacaccactgaactcaccgtgacgactacaagatctgctaactgactagtgaactggagcggaccgangcactagctaatgagctgtacgatactgcagctttcacatngactggaacatgcgtacactagcgcttgtacatctctctcagtggtgctagatgcgtcgtgactcaagtgagcgatgaggaatgtgctttcgtttg

SEQ ID NO: 687905 - DNA, 142 bp, Homo sapiens
ccccagtttcaaacaaaatttttatgggcaaagggcagcaacctttttgtatgtttaacccccaggacgctttggacatttgtgataacgcctgttttatattcaaatgaacaaataaaagcttttatttttgttgctttga

SEQ ID NO: 687906 - DNA, 126 bp, Homo sapiens
cgactcgtggatgtagtgacgaaatacaactaatggactctttcgaggccctgtaattggaatgagtccactggatgaggtgcatgcgagtctgtggggaagatactgagtctgtggtgccacaaa

SEQ ID NO: 687907 - DNA, 231 bp, Homo sapiens
tctaccatctgctgcgagtattttcatattgcccacagtttacttagtgcactctgaatgactaacactcatgccaggaattgaggaaggtgaaagagagtgacactgtagttaattactagtctaagaaccctgttttaaagaataaccccagaaaacattaaattagaattcacagtccccgtcccacagttttccctggggctaaaatacttttaaataaaaatgtgg

SEQ ID NO: 687908 - DNA, 205 bp, Homo sapiens
cagtgacgtcggcattatgggaagaatcttcttcatccgaatcaactatgagaacgtcatcttgctcgtgacgctgtggaggtggagggctgagctccatcatcactgccatcggttatgcttttggcagcatcttcagcttgttagggccccactttttccggggcatcaccaacaaccttcaacattcaaccgtccatttcct

SEQ ID NO: 687909 - DNA, 190 bp, Homo sapiens
tcgttaccaatgtgcgactcggtcgcgaatctccgctctggtcaagcgaattctcctgcctcagccttcctgttcagattctgccccctctagtccattctccacgtgaagtcaggaggagctttggaaaatgcagattgcgtctgtgaaccctccccctccaccattacttcttcccgcttgcctcaga

SEQ ID NO: 687910 - DNA, 209 bp, Homo sapiens
tcatgggagggtccttcatcggagtgctaaagctttgagtagagtctccctggatcacataccaggtcagggaggagtctgtgtcttcctctacgtttatcctgggatgtgctagggtaaacgaaggcataataagccatggatgacctctggagcaccaggggccaggacttgtctccatgtgtatccatgcattatataccctggct

SEQ ID NO: 687911 - DNA, 755 bp, Homo sapiens
ataggcccccccaatgatggggccgtccggaaattgccaaccccatcgacaaatgcaggatcgagcgacggctcaaagcaaaagtatgttggatgataaattgaaatattagttgcggatgaagcagatagtgggaaagttgagccataatgacgtgaagtccgtggaagcattggctacaaaaaatgttaagcggtagatgccgtcggaaatggtgaaggtagactcgaaggactcttagggcttgtaggagcgtagaatagagccccagtacaattgtcataccgagtgcgtagattctgtggtctcggttgtggtctattagcctatggtgagctcaggtgcttgatactcctgatgcgagtaatacggatgtgttgggtagtgcggacttgtcggggatttagcgggctgatgcctgttggggaccagtggccccttagttgccgggtagggctgagtctggactggtaaaaggctcagaaacatcctgccaagacacaagcttctgaggtcatgtataggattctcccgtgccgaaggccttcttgcacaggtggtgtgtggtgtccttggtatgtgcttgctcgtgttacatcgcgccatcattggtatatggttagtgtgttggttagtaggcctagtatgaggagcgttatcgagtgtaagtgtagtcacatgcctaggccgtaggtaattagtcgggctgagaggccatctgctaggggtcatgggctgagacttgctctatgata

SEQ ID NO: 687912 - DNA, 468 bp, Homo sapiens
catgcggggggcaaagtggaggcagtgtgtggcccagtgcttagtactgtaatccccaagcttgttttcactaaccctgtttttagactctccctctttcctttaatcacctagccttggttccacctgaattgactctcccttagctaagagccagacagactccatctcggctctttcactggcagccccttcctcaaggatttaacttgtgcaagctgactcccagcacatccaagaatgcaattaattgataagatactgtggcgagcaatatccgcagttcccaagaatttgtcccattgataacgcccaacgacccgcgtctatcaccttgtaatcgtctttaagcccctgcacctagaactgtttactttcctgtaaccatttatccttttaacttttttgcctactttatttctgtaaaactgttttaactagacccccctgaatggggtaccgagctcg

SEQ ID NO: 687913 - DNA, 813 bp, Homo sapiens
gggattactatatgtcgatccacggcgctctgaagagacactgaggagacttcctggtatctcttcactgtgcagggtgcagactgaggccatcggcgatggtgcagctgtgatgcctgtccccacaggtcccaggcagaggatgtgccggaaccatggcggcatgttgtgtggctgtgtaccatgagggtgcctgtgaaggatactggcccgagctccgacaagagcgagtgatgctggtgagtgtcggacagaagctgtggtgctgcggtattacctcttccagggccagttgctatatctggatcgagacccagcaagccttctaccaggtcagtctcctggaccatggccgctcttgtgacgactgtctaggctggtcccgtcccatggcctcagcctccaggagcaagatggtgatggaatgtgccatttactggtgcccaactgtagatcagagatacctggtcaatgtccgtacgcctccgagcttgctggtgtacgatggccactgaacccctactatgggttccaggccgttcagggatcgctgcttgtggacttggcttgaccacttactactgggtatgcccttttgcgattcttacctcattagcctcacatctccagtctgccctgttcagctgtacgatgaccaggaacaagctaaggcccagacttctaatgggaaccatgggtcacagttgtccattgcgaggtgtgcggtgtgccggccagatgtggcgacggaagcattggggttggaccatcagttgaggctatgtgcccggaaaacttccatggtggtgaccc

SEQ ID NO: 687914 - DNA, 785 bp, Homo sapiens
  misc_feature (387)..(387): n is a, c, g, or t
ggcaggattgatatgatcgacgtcatcggggtgaccaagggcaaaaggctaccaaggggtcaccagtcgttggcacaccacagaagcatgccccgtcagagacccaccggaaggcctgcgcaatgtggtcggtattggggctatgggatcctagctcgtgtgagcctgtctcttgtggacaacgcagcatggggacatgaaagagcatacctagtcagccggcactgacagtccaccaaaaaaaagtttatatgaactctggacgaaggtctagccctctcaatcgagaaggacggacgaagtgctgaatcaagtaagcaaatgccgtccacatgtaactagtgaccttaatcatggagcgaagttgagtcaatcaaccctcctccntggggtggctgttagtctacacatactagtggtgacaggtgagcaaaactgagcattagtatatgcgtgaaaggctgtgtaggaagagagagcccaatgagaggctgagtgtagtctcatcactactcgctaagatctttgctggggcagacgaagcggccgggctctggcagaagattgagccttagacttcagtttgaaagctcaagcctcgcaagttttggccagtggccgcttccaggaccatggcacggaggaacgaaagcattcatgggaccactgaagagagaccgaattgcaaaaggacagacggaggcttaatgccaggaacagatgatgccagttggtgtggtctcaccaaagaagttattaccactgaggacacaaaatggcaccgt

SEQ ID NO: 687915 - DNA, 299 bp, Homo sapiens
agttgcatgttgtaagccatttaccaataattgttgtaggtaatgaagggcagatttattagagatattgtgaacatatgttgcagtgggcagctcatcgatagaaggggctacctgcaaagaggcaagtgctggatgatagttttatagggtcctggtgtaaggtgcgtatctcgtgaaatgaggtcattgtgcccgcaggttgtttgtgattagctgtctctaacaattgttcatacaataattgttcattattgttctcaacttggggctctccccaacctggggacccttcctta

SEQ ID NO: 687916 - DNA, 638 bp, Homo sapiens
ttttctttgtattgaacgaggatacaccaagatcttaattacatagacaacggactaagtatgtgaacagtagacagcgcccacgatgggcgcctagttgctggaatgcactggcaagagactacgcctgggagtggtcgtcgttgtattactcgaaaccacaagctactctgtgtcgtacagcgcgtgcataattgtgatcacatactatctattgatgtgactcgtacatagaagaattatatccaacgcactttgtatcatagagcgaacatctcataggcgtgggtcgatcttacttacatagcgagacaagatagaagaaagatagcgcgtggtacacggaccacctaagatacatatactcgcacgccagagggggccgctcccgcacttatccatttgcccaggcactttacacccacaaagcggctagccgacccattgggatagacatcacacctggggatgtgtcaccgcgcatacaaactggggtcgccacgatatgtgtctagtatatagtggaatctttggtccaaaggcaccgttacgcgcaaaaggagtgtccacatggggacctttagaaatacgagtgagggcacttgatacacgacgcggatgtggcgcagcttggaaca

SEQ ID NO: 687917 - DNA, 1202 bp, Homo sapiens
gtcggacgccgccgcggcgcgctctgcagactccgggtcgccgctccgccgggacgcgttggccggggcgcgcggtgcttggctgcggtgctcacactcatgaggagccggaagctcacaggtgcagtgcggtcttcagcgcgcttgaaagcacgaagttgttcggcagccaggttggcctctgcccaggaagttgctggttccacgtctgccaagacagcatgtctgacttcctcatcccacaaagccacagacaggcgaacgtccaagaagttcaaatgtgacaaaggacatcttgtgaagtcagaattacagaagcttgtccctaagaatgacagcgcttctttgccaaaagtgacacctgagaccccttgtgaaaatgagtttgctgaaggcagtgccttgcttccaggcagcgaggctggcgtttctgtgcagcagggggctgcaagtcttcctctcggtggctgcagagttgtgagtgactctcgcttagcaaagactagagatggcctgtccgtgccaaaacacagtgccgggtccggagcagaagaatccaacagcagctccactgtgcagaagcagaatgagccagggctacagacagaggatgtgcagaagccaccacttcagatggacaacagcgtctttctagatgacgacagcaatcagccaatgcccgtgagccggttctttggaaacgttgagctcatgcaggacctcccacctgcgtcttcatcttgtccttcaatgagcagacgagagttcagaaaaatgcatttcagagccaaagatgatgatgatgacgacgacgatgatgcagaaatgtaggggccatacaaaataatgtccttgagtatttagtaccattaacaatttgacaatttagcacattacaagatttatataaaatgtatctccaagagaatgtcttaatcaaacttcagaactgacccatctaagtcaatagtgcaaagcacccaatacctgtggaggatgtactcatgggaactaaaactcaaaccatctttgaggttgcaaagctgctgtactgtgccaatgtcctttctttttttttttttttttttcccttggagacagagtttctctcttgtcgcccaggctggagtgcaagggcgcaatctcggctcactgcaacctccacctcctgggtccaaggtgattctcctgcctcagcctcg

SEQ ID NO: 687918 - DNA, 1290 bp, Homo sapiens
tggtacgctcggattagggatatgtcgacccacgctgtctgctgaggagctgctgggtccagtggagcatgacctgtgcccctgcggacttccgaggccgtgaaaagccctgcgctgccggcccttcccagtgcccccgatggcctgttcgccgttcccgaagcccgactggggtgaacgagtccagcaccaaagctggcctggttctcggattccggagcgttctggagccccgacgagacgcccctgtgtggttctacgaagctcccacggggcgcccagttcccggcttcattcgggccgtcctccgaaacccactcgggtgcacgggtcgtcggcgagccgcggacctggggtccttgtgaccgcgcacacatgatccgttgtgcggacctccgatgttgccgcgcaggagctcaacggactaccttgcgggttctgccccggggcagggcgtctgggcgaattcgatgccccccgggagagtgagccaggacgcgcgacggagcccgggcctccgggcaggaggagccccttcgaaggggtccccatgtccgctccttcattccccacggtggcgacgcgaaaggttccctttctggaccgaagggggctcacttggaacaaggcccttccgaaggccaggacaatcctgtggtggccttggaacggggcaccttggaattgctccttcttgtgcgccgcatgtaagaaaccaaggctttggggacaagtctgtgctttgcatgcggcgcccgttgccaccccgcttgaacctttaccttttttagcccaggcgcgtttccttgtgacgtgccccttggcgcacattaacccgtgacacatgtgctttgccaacgccgcgggcaacttgtggctacccccatttgtggagccacaaagcgtatcccgttgggtgcacgccccaaacttacacacctttggcccgcattccacattgccgcgctttgccacgtcaccccccggtacaccatatattagtagatttgcgtgccgttttaaagcgcatttgggcataaggggtcgattacacgcacacagagttggtgcccggcaagcatttatcctttgacaaggaacattggtattggcgttgaccccctgttagaaagtgcgcagtttcactgagcggcccgttcccagacccaggtgggacaccgcaccgcgaagtgaaaggctgggagcgcaacacaccttcgaagtcgcgacggaccagtctgctcgacaacgtattcaggagattgagacgtcgcaagctacgggcccaag

SEQ ID NO: 687919 - DNA, 1144 bp, Homo sapiens
gtcggacgccgccgcggcgcgctctgcagactccgggtcgccgctccgccgggacgcgttggccggggcgcgcggtgcttggctgcggtgctcacactcatgaggagccggaagctcacaggtgcagtgcggtcttcagcgcgcttgaaagcacgaagttgttcggcagccaggttggcctctgcccaggaagttgctggttccacgtctgccaagacagcatgtctgacttcctcatcccacaaagccacagacaggcgaacgtccaagaagttcaaatgtgacaaaggacatcttgtgaagtcagaattacagaagcttgtccctaagaatgacagcgcttctttgccgtgacacctgagaccccttgtgctgtgcagcagggggctgcaagtcttcctctcggtggctgcagagttgtgagtgactctcgcttagcaaagactagagatggcctgtccgtgccaaaacacagtgccgggtccggagcagaagaatccaacagcagctccactgtgcagaagcagaatgagccagggctacagacagaggatgtgcagaagccaccacttcagatggacaacagcgtctttctagatgacgacagcaatcagccaatgcccgtgagccggttctttggaaacgttgagctcatgcaggacctcccacctgcgtcttcatcttgtccttcaatgagcagacgagagttcagaaaaatgcatttcagagccaaagatgatgatgatgacgacgacgatgatgcagaaatgtaggggccatacaaaataatgtccttgagtatttagtaccattaacaatttgacaatttagcacattacaagatttatataaaatgtatctccaagagaatgtcttaatcaaacttcagaactgacccatctaagtcaatagtgcaaagcacccaatacctgtggaggatgtactcatgggaactaaaactcaaaccatctttgaggttgcaaagctgctgtactgtgccaatgtcctttctttttttttttttttttttcccttggagacagagtttctctcttgtcgcccaggctggagtgcaagggcgcaatctcggctcactgcaacctccacctcctgggtccaaggtgattctcctgcctcagcctcg

SEQ ID NO: 687920 - DNA, 227 bp, Homo sapiens
agtgacagcactacgctgggattttccaaacaattttatttcctcagagtcttccttaatcctagggaacaggaggcggcacggaatagggcccagtagtgggggctggcttttctactccctccccccaatataaaaatatagacttttttttttttttttttttttttttttttttttttttttttttttttttttttacgaccgcgcggggggtcatagacagc

SEQ ID NO: 687921 - DNA, 126 bp, Homo sapiens
tgtaccacttggagaagtgcatgtattgaagctccaaaacaaaaacaagcaatctttgaaattgccccgtaatctacctacctacaatggtgtgtgcctgacccagtaccctttggatcctctagt

SEQ ID NO: 687922 - DNA, 612 bp, Homo sapiens
tatctcttcaggggaacactcacagtgctcaggaatcctggtttaccttatattcaactccggggaaactttctctaccagcctttactaagccttttctactttaaaagactaatttccatgccctgaatcctttatcctcagatcatctcataaaacaatctcagtgaagcaggatacaaggtaaatgtcatacatccccaacatcttaatttatacctctcaaaattttctctccacccatcttcccttaccttgtcctcagtctcaaatgagaagatggcctacctcctaaggctaaagcaatactttcggttcagcctccttacctcctctctacaacttcgctctatcaatggttctgtatttctcgtattttcaagggttaacgccaggttcctggctatggtttggttttaataaccctaaccttgctaccatcagaataataattatattactactaactgcaaaatcttataacattggtatatatacttcacactaccattcattagctattactctttaatctaacttcctatccatcactcatctgcaagtgcttcctctaaatctttataacccaatccagtggctatactcagactt

SEQ ID NO: 687923 - DNA, 170 bp, Homo sapiens
tgtagagtgctgacgggaggcagagtgctgggcctggaggggccaccaatgatgcagtgatgctgggcctggagagtgctgcaaagcaagcatgagcgtgggcctggatgagagtcaagcttgcagaagagttcagtggccgtgggagacgaagtgcttgggagtgcagt

SEQ ID NO: 687924 - DNA, 885 bp, Homo sapiens
  misc_feature (489)..(489): n is a, c, g, or t
  misc_feature (510)..(510): n is a, c, g, or t
  misc_feature (544)..(545): n is a, c, g, or t
  misc_feature (559)..(559): n is a, c, g, or t
  misc_feature (573)..(573): n is a, c, g, or t
  misc_feature (580)..(580): n is a, c, g, or t
  misc_feature (582)..(582): n is a, c, g, or t
  misc_feature (589)..(589): n is a, c, g, or t
  misc_feature (597)..(597): n is a, c, g, or t
  misc_feature (609)..(609): n is a, c, g, or t
  misc_feature (669)..(669): n is a, c, g, or t
  misc_feature (822)..(822): n is a, c, g, or t
  misc_feature (825)..(825): n is a, c, g, or t
  misc_feature (829)..(829): n is a, c, g, or t
  misc_feature (834)..(836): n is a, c, g, or t
  misc_feature (842)..(843): n is a, c, g, or t
  misc_feature (858)..(858): n is a, c, g, or t
gctggttgctgtgcgggctcttgtcaggatggtggaatgcatgtacatcgagaaaccatgccccggagaggctacagagcaggagattgcgcgtcagctcttcgagccagtatgtggaagggtgctggaatgtgacatcagttacagaattacgggctttgtgcacgatagaagacaatgactggtgagttgacggatgccgagtagcagcgaaggcatgtcatcgcatttacaacgcgttcagtggaggatgaaccgatcaagcgatggaagccgagcgaaagaataagagcaaaaccgtcaacaaagttgcatgtgggcaacatcagtcccacctgcaccaataaggagcttcgagccaagtttgaggagtatggtccggtcatcgaatgtgacatcgtgaaagattatgccttcgtacacatggagcgggcagaggatgcagtggaggccatcaggggccttgataacacagagtttcaaggcaancgaatgcacgtgcagttgtcnaccagccggcttaggactggcccgggatgggagnncagagcggctgctntcggtgcgggaaanaggggcncnggtccanagagtgtncgatagatcgtncaggccgcgtggcagacttgaccgagcaatataatgagcaatacggagcagtgcgtacgncttacaccatgagctatggggattcattgtattacaacaagcgtacggagcgctcgatgctactacaagcgctgcgtgctgccggtcctatgaggcagtggcagctgcagctgcctccgggtataattacgcagaagcagaccctgttccagntgncacnagtcnnnaatacnngcatggcagtcactnactccaactctctcaatcctacataaa

SEQ ID NO: 687925 - DNA, 544 bp, Homo sapiens
tggcatttacgccaatgtacttcgttggattagtgcattgtccagaaatggaaatgtcacgcgttgcttcggggttctggagatttggcttttaccaccttttgtgacatgcaccaactccacccttccactccctttcattatcctggatttcttctggtctttttcttccgacacatcattcttcagctggtggctggagggaaattctcacgaaggccacgtacgtgctgctttgcagttcactagctcctgcccttaatcagaggttctgatgaggcaagttctatattcccttttcttgattttccaccatcattcttgtcctcttgactattcggttccgttttctcagtggttgctgcgagctcttggggaacagggtttggcttctttatgttgatctcgatgctaccgttgtcttgtttcagctccagtggagacccgtgcactctggccacaccttcaaacatctgggatttggttaaggagtgggcaggtgccaccgtgggacactctctttccttctcctcctctctatgaa

SEQ ID NO: 687926 - DNA, 118 bp, Homo sapiens
gtcttggaaaatgggcaggagtcacatatactcgagcaggtaggaggagcattttctcttacaccatcaggttagcaaggctctagtgtgtacttagagttgggaagttggggtcttg

SEQ ID NO: 687927 - DNA, 453 bp, Homo sapiens
  misc_feature (57)..(57): n is a, c, g, or t
  misc_feature (78)..(78): n is a, c, g, or t
  misc_feature (112)..(113): n is a, c, g, or t
  misc_feature (127)..(127): n is a, c, g, or t
  misc_feature (141)..(141): n is a, c, g, or t
  misc_feature (148)..(148): n is a, c, g, or t
  misc_feature (150)..(150): n is a, c, g, or t
  misc_feature (157)..(157): n is a, c, g, or t
  misc_feature (165)..(165): n is a, c, g, or t
  misc_feature (177)..(177): n is a, c, g, or t
  misc_feature (237)..(237): n is a, c, g, or t
  misc_feature (390)..(390): n is a, c, g, or t
  misc_feature (393)..(393): n is a, c, g, or t
  misc_feature (397)..(397): n is a, c, g, or t
  misc_feature (402)..(404): n is a, c, g, or t
  misc_feature (410)..(411): n is a, c, g, or t
  misc_feature (426)..(426): n is a, c, g, or t
tgccgtgaacccatctacttgccgtatacctgtaccgtgataccgcgtaagggcaancgaatgcacgtgcagttgtcnaccagccggcttaggactggcccgggatgggagnncagagcggctgctntcggtgcgggaaanaggggcncnggtccanagagtgtncgatagatcgtncaggccgcgtggcagacttgaccgagcaatataatgagcaatacggagcagtgcgtacgncttacaccatgagctatggggattcattgtattacaacaagcgtacggagcgctcgatgctactacaagcgctgcgtgctgccggtcctatgaggcagtggcagctgcagctgcctccgggtataattacgcagaagcagaccctgttccagntgncacnagtcnnnaatacnngcatggcagtcactnactccaactctctcaatcctacataaa

SEQ ID NO: 687928 - DNA, 938 bp, Homo sapiens
  misc_feature (392)..(392): n is a, c, g, or t
aaaagctctcgagtgagcccctgcccgagtgccgcgggggagaggccgcgagcgggaccgagaagtgggctgggagcagaggtcgcggaggtggcgagctgaggcctggggcccaggctggggacctgtgcaggggcccttggagtggctgggcactgccagggtcagtggtgcctgggctgaggggagggtggccctgtgggttgggggaacgggtgcgcccggtggacgggagggtaaagcagcccttgcagtgcctcgtgtgtgcacctgtttgctggggctggctgcctggctgggcatttgtgcggatgtggccccggtcccggcgatctcgggggtgcccattcgccgcccatgacgccggagcggcttcttgttccttgagcaancgtagcatgtggctggcctgatccgtcgggactttcaatggtggcggccatcgtgagtggcacaactgccgcctggaacgcgtggtagactttgccttggacctttcgctggacgcgtggtgaccgcttgtgtacaacgcaacctgtatttcccgcgtttgggccgccttgggcattcgggttccccggtgttggcctgcgaggacgattccgttggatgctgctgtgccatgctgctggctgtccgcgggaccgttgcttgtttggcaactccgacgggggagtcttcgcctaggggtccctggggtgccatcgtcgtccaagcagcgcaacgggaccccttagagggcacccagtgcagaacagggcagaagccgtggagcccggcgactcaacggggaggcatttcaggagaggccggcattcaggacgacacacggcagcgccaggcccgcggaggcaaggtggccaagcccctagggcccgccttgaaaggcttcttgtagggcgcttcagccgcaaggttacggaccaagcgttgggaac

SEQ ID NO: 687929 - DNA, 138 bp, Homo sapiens
tcctattcgtgcacgagacgggacgagacaagccccctaggaaacacctaccatgccgacaagaataccttccacccttactacacaatcaaagacgctctcggcttacttctcttccttctctccttaatgacatta

SEQ ID NO: 687930 - DNA, 1641 bp, Homo sapiens
aggggcagacagcgaaggaacaacgcagcggggtgggagaagaacacttagtggcgcacacaatcaggtggggggctgtccccaccactcgcaggggggggccccccccaacaaggggggggagaatccaccaaggaagggggtcctcgcgcacgctgcgggtgtggtggagcatgcgcggggtggcacacaaacacaaggagtgccggcggggaggagacaggagagacgaccgctggagtaggaggatcggagggagaagcgatcgacatatgagggggtgtggtcacccaaaaaggtggggtgataaacatcatgcagtggttgtgctaaaagtgcggggaggatgggccgccccaacaccccctccctccccagtaagtgaatagtgtggtgtgtaagtgtgggagtggcgacacgacacacaagggtggtgcgtacagcacccccggggtggggaacaagacaggcgtggggtgagaacgagcatacacgcagcgaatgaaagtggggtgcgtattaaatagaagaatgacccgcggggggaaaaagggagcgtgggcgggcgcgagaagaaaacaccatggcgggtctgatcgtggcctcagctgtgctgagtgcgcaacagccaccgcccccccgatgtgagtggttgctgtgcggtgagagacgcgagcgggttgttgagtagtactcgcactcgactagtagagtgcgcgctaatagagagtgcgcccgaccgaagagagagagagagggcgctgcgcgggaggagcagcacaagagtagcagctgctggggggtgtgtggtgctgccccaccacgctgcggtgagagtgtgagagacacaacagttgtgttgggtgataatgaaagtagtggaggtgcgaggagagagagcacacacagagagagaaggagtagggagcgcccacagcagtgttgcctccctgcggggtgtagtagagtggtgagagagtagctctacaccctcagcagcatataccaccgcagcagcagaggggggcgtcagcggatgtaccacaccacagcaataagggcgccgctgcggtgatgagagaacaacacgcgcgtgcgtgttgggggagagatagagagtgcgatgagagagacgcgacaccaccacgcgcgccgcgagggaggtggcacacacacacatagagggtggcggcactcacacacgcgtgtgtgtgctcacgcgtctcacacgcgcgtgtgtgtgtgtgacacaccaccgctggtgggaagaaatcacacgcgctgcaccacggcgcgcgcgccctccacaaatgagagggggggcaccgctggagcactctatgtcacacaccaccacacccctctgggtgtgtgtgtgtggtgccatacaacacactgtgccaggcgcgcggctgactgtcctgtgtgagagtgagtgagtgacctgcgagaacaccaccacaaaaaagtgagaacacatgctccaacagagaaagagtggtgtaaggagatgaggtgttgagagagaggggcacaaacacgatgtcgctcgcatcacatgcggtccagccccgtggctgtgtcaccacaatgggtagattgtactactgagagagtgtgggttgactgtgtggtgaaata

SEQ ID NO: 687931 - DNA, 318 bp, Homo sapiens
gcgattcttctgcctcggtctcctaagcagctgggattacgggtgcgcgcgaacacgcctgggtgatttttttgtattttttaatagagatggggtttcaccacgttggtcaggctggtctcgaactcctgacctcatgatccacccacctcagcctcccaaagtgctgggatcacaggcttgagccaccacacccagccaaagcatttttgatatttagttcttcttgtaagactattgaggtaaacattctaagaaatacaggtttagagaacatctttctgctgagcttattatagagttgatatagttgacatg

SEQ ID NO: 687932 - DNA, 1090 bp, Homo sapiens
gaaaggcagcatcggcgggagctggaggatgaagaaggagcatgtgcttcactgaccacgattactcctggcgtgtgtacccgttgcttccgagtgacgttagccatcaaagagtgtcattcttccagcttcctcacgacatgtgacatgcgattattatacctcagactgcatgagttacactctcgtgtggtcttcacggaacggtgatgattcctatcctagagcacgattgctcagtccagcacagttcatgagtgaacgcaggtaaccaagatacgtgtggatactgagtagatgcatgaaatcgatcgagcgcaacgcgttacagtgcgaccagaaagtttccatgagattatggcactagcatagagagctctcagcgaacgcatactcaagtggttccgcgttcggagggtgcagttggtccttgtcgccgtaacgccttcacagtatgggaatgatgactccctaagggggcattcgcggtaattggggccatacgcaaatgcaagtaagtgtactgcttgcaaatagtggctacacacaaccccatgcaaagtcggaaccactgcatgtatacctggcctatttgttcgagacgacacgttcactgacttaatcactgcaagcgtcaggtgaactgttgccactcaagtcgcaggttctcactgtccaattgggtaactcgaaattgagatttctcgcaagactccagtggtaatacgacactatttgagagatcgtttcggtccgcataaattggcctgttgaactttggagtttccctcgggggggcttggagatattcagaggtggctttattggttccaaccgggagaaatagcagaggcgttgaagtcgcgtgatgttgcgttcataaaggcagcaacgttacgagcagcaaagttaccttaattgaattcaattactgtgcctaaaaagcgaagagacgggaaaggaaacattttcgcgcagattggcatatccaaagagcttttatctccaacgaaaaccaccagtaccaggtaccaacattttccttaagcaatgaagaacttttggggttccgatcattttccggagggca

SEQ ID NO: 687933 - DNA, 119 bp, Homo sapiens
agaagatgccagatgctgaagctcgacaaaggagaaccgcctttggatcgagctgagcaggcggaggccgacaaagaaggccgccgaagacaagagccaagcagcttgaagattgactt

SEQ ID NO: 687934 - DNA, 832 bp, Homo sapiens
  misc_feature (78)..(78): n is a, c, g, or t
  misc_feature (162)..(162): n is a, c, g, or t
  misc_feature (165)..(165): n is a, c, g, or t
  misc_feature (198)..(198): n is a, c, g, or t
  misc_feature (219)..(219): n is a, c, g, or t
  misc_feature (221)..(221): n is a, c, g, or t
  misc_feature (263)..(263): n is a, c, g, or t
  misc_feature (265)..(265): n is a, c, g, or t
  misc_feature (283)..(283): n is a, c, g, or t
  misc_feature (296)..(296): n is a, c, g, or t
  misc_feature (339)..(339): n is a, c, g, or t
  misc_feature (373)..(373): n is a, c, g, or t
  misc_feature (377)..(377): n is a, c, g, or t
  misc_feature (404)..(404): n is a, c, g, or t
  misc_feature (428)..(428): n is a, c, g, or t
  misc_feature (505)..(505): n is a, c, g, or t
  misc_feature (518)..(518): n is a, c, g, or t
  misc_feature (520)..(520): n is a, c, g, or t
  misc_feature (526)..(526): n is a, c, g, or t
  misc_feature (537)..(537): n is a, c, g, or t
  misc_feature (566)..(566): n is a, c, g, or t
  misc_feature (613)..(613): n is a, c, g, or t
  misc_feature (633)..(633): n is a, c, g, or t
  misc_feature (675)..(675): n is a, c, g, or t
  misc_feature (719)..(719): n is a, c, g, or t
  misc_feature (724)..(724): n is a, c, g, or t
  misc_feature (734)..(734): n is a, c, g, or t
  misc_feature (736)..(736): n is a, c, g, or t
  misc_feature (747)..(747): n is a, c, g, or t
  misc_feature (752)..(752): n is a, c, g, or t
  misc_feature (763)..(763): n is a, c, g, or t
  misc_feature (772)..(772): n is a, c, g, or t
  misc_feature (824)..(824): n is a, c, g, or t
ttcgctgccactgtctgcgcccccgggccgccgccgcctccccccgcagcccggggctctctccgctgggcccgcgcngctcgccccgagccaggagaacgagctcgaggaggatgcctgggcccgtcccgcgcggccccgggtgaggcacgcccgcgcgcncanggcccatgggaaggagcgggcgccgctgctgtnccccgccggcgcgcgcacgantngagaactgccacgggcagcccccggccgcgggtccccgagtnangctggcggcacctgaaantgtggcgcgggcncggggccacgcagcggagcccagtgtccagtaaagcgtctaangacccgccgcccgtgccgccgccatggtgatgtnccanggcacctacacgttcctcacgtgcttngccggcttctggctcaactagggnctcaacgtcctgctctgctgcttctgcactacctgcgccgccgcctcaaacggcgccaggaggagcgactacacganaaacctgcgcgcncnaaaacnggagcacctcnaactcgagggcagtatggccgggagcacnccgggcctggcgccgccgcagccaccaccacaccgtagccgcctggnggcgccggctcacgcgcacncgcatccgcacgtgcacgtcaccccgctgctgcaccacgggnccgcgcaccgcacgcgcacgccacccacacccgcaccaacacgngctcncgcacccgcngnctacgcacctnttggngccgccacggncctggagcnacccgcgccaaggggaatcggacatgtgcaaaccaccgtgttacgaaaaggnggtgctga

SEQ ID NO: 687935 - DNA, 117 bp, Homo sapiens
ctgacggaggagtcaccataggcactcgctttataactctcacaggtctttgtcggaggtgtcctgcctcctaccccagcgtggtgggagtgcgacgccaggcttctccctcctccc

SEQ ID NO: 687936 - DNA, 327 bp, Homo sapiens
  misc_feature (98)..(98): n is a, c, g, or t
  misc_feature (285)..(285): n is a, c, g, or t
aggcagagagagtataagactggcgcgtgaaattacgcggccgacgggcgcggataatattataatattaaagagaataataaagtggcttctgatanggggaaccggcagccgacttactctaaactgggattactgcacaaaacgaggagttcgcccatggactgagaaagttcacccctctctccttgctgcggagctcggcgctggatggcagattattaaaatgaattgccagataattactccggccgattattaatgatgagcaaaatgagcctatcnaatactatcttttaaaggacgcgaacaaagagaccccttaca

SEQ ID NO: 687937 - DNA, 306 bp, Homo sapiens
  misc_feature (77)..(78): n is a, c, g, or t
actagaggactctcttacgccccaaactcagactacctagtctagataatagagatgacatgtggaagattacaggnnacattgagtgttaactcaggggaaaacttctcagggagagaaaaactttttgggggaagtttcagtcgaacaacaggctactggaggtcctattaaaaccatttggtaggacacttctctcctgtcattcacaatgtattggcaaaagatgtcttcgtggtctccggaagacaaaattctgaaatcagccgtgatgacctggtttttttttttcctctccgtcggggg

SEQ ID NO: 687938 - DNA, 278 bp, Homo sapiens
cagcgtactggtcgaatcagcgggagtatacagccctatcccatttctattgctctgaccccgcctcctttctaaatgcagcgacctgtgtactacagccctgatccctttctattcctctgatcccgcatccttttctaaatgcagcgatctctgttcttcagccctatccctttctattcctctggaccccggctcctttctaaatgcagtcgagctctgttctgcaactcctggtccctttctattcctctgaacccgcatcctatataaatgca

SEQ ID NO: 687939 - DNA, 119 bp, Homo sapiens
ggactccaagatgagcaggttccaggatgtccagagattcctcctgtccaggcaaagtgactcgatgtttcttaataccgtcaccgcagagctccgacaccacctccggactccaacct

SEQ ID NO: 687940 - DNA, 538 bp, Homo sapiens
  misc_feature (46)..(46): n is a, c, g, or t
  misc_feature (231)..(231): n is a, c, g, or t
  misc_feature (269)..(269): n is a, c, g, or t
  misc_feature (271)..(271): n is a, c, g, or t
  misc_feature (294)..(294): n is a, c, g, or t
  misc_feature (314)..(314): n is a, c, g, or t
  misc_feature (354)..(354): n is a, c, g, or t
  misc_feature (415)..(415): n is a, c, g, or t
  misc_feature (483)..(483): n is a, c, g, or t
  misc_feature (498)..(498): n is a, c, g, or t
  misc_feature (509)..(509): n is a, c, g, or t
  misc_feature (522)..(523): n is a, c, g, or t
  misc_feature (528)..(529): n is a, c, g, or t
tttccattgaagactggttttgttgtttcagtgctttttctatggnaatttcttttctcaagtaacttgccttgaaatcagagacagcactttgtcaagctagtttacaaggtcaaagacacaatgctgccaatgccattagtatttgggaataattcgccgctgttagaaaaagtctgtggccaagtgggtaaaacagttgcagtgcactgcactgacatccagaacagnaaatagggggggcccagagattgcccttcctgccaaancnaagtccagtagttccccagcccnaagggttccccactgtctcnccggctctcttactcatgtgtacctgccccttcctcttgnaatctggcctttttatttccccaagcccctttcagcctcccgtgggggggctcccgccccncgccggtttttcgtcctgcttcccgtcgtctcctttctcccggtcatggcttaggttgggcgatgggncctgtggctttgggngtctttggtgnagcggctgggcgnntcccnnatttattcc

SEQ ID NO: 687941 - DNA, 620 bp, Homo sapiens
cgcaaacttgtaagcttatttaattgctctgtggtcataaagacaactaatgttagcataaaaacactgaacaattaatccacactcattattccccttccccggttaatctgaatttatgagcttgtaagttccatcagtcagatggcaccagagcactcttcccttgcaagggcaaaataggctcaatgggaagagatgaaacggaaccgctgactccgggtggatgtctcgtaggcgtgttcccaagagcatgcttccattttccacttttcccacatccattgttttataacacacaaacccgggaaatacagaaaagggctgaacaaaaaccaaaagtcacccagaatcccacagtcttagcactagcagtaattttttttttttaagtgtcatttcggctagtctcttctttctgtttaaaccccgtggtggttgaggcacggagctcacacctgctgaggaagatgcagctgccatgcaggggggtgagggggatccaagccaggtggtgggcagaagggtccacagacggctgcacgcagggttctgcacacacaaggacactcaggaacgggaatgggagctgggctctcactgtcagggaagttacaaat

SEQ ID NO: 687942 - DNA, 448 bp, Homo sapiens
ctactactactaaattcgcggccgcgtcgacgaaagaaagaaagaaagaaagacaaagaaacgaaggaaggaaaaaataaagagagagaaagaccgaaggaaggaaggaaagagaaagagagagaaagaaagagagagagggagaaaggaagaaaggaagaaagggagaaagaaaggaaggaagaaagaaagaaagaaagaaagaaagaaagaaagaaagaaaggaaggaaggaaggaaggaagagagagagagagagagagagagagagaaagaaagaaagaaagaaagaaagaaagaaagaaagaaagaaagaaagaaagaaagaaagaaagagcgaactgtgcagggatatcctacagaaatagtggggggtggggcgtcgattgcagctgttcatctggcaggagatgtcgacgcggccgcgaatttagtagtagtagtcgacc

SEQ ID NO: 687943 - DNA, 1711 bp, Homo sapiens
tactcaaaaaagtttcatttttttatttagctttctgactctgtgcttgtgccttacaaaactttcacaacgatttgtgctgagcaggcactcagaataggtccagcgtagtgacatgaccagaagtaggctatccctcaccataaccagcctctaaacagaactaaggactagacccgaaccccatagagggactaacacaatccacgctaccacactctccatccagccacagaacacgcgcacgagcgcaacagccacccccaacacaaaacacgcacaagccagcgccgctgagctgagccacaggacacaccactcaccagcagcggagcaccacgacagcaccacgccaacacaaccccacaacaaggacattcccctaggtgcagacgacaacacgactcacacacaaccaaccacacccaacacaccacgtcgcttcacagcaacacgacggcaacctcacatcgaagcctggagcacatcaccaccatgaccagcatggaccacgacaccatcagacgaacaccaacgaacacacgggcactacacaaccgcgcgccgagcaccaacaccccacagaacctccacgacaggacaacccatcaccagcacacgcacactacaccacaaggccacacaccatagacctcgccgcccgtaccacccgcgcgcacacaacgggcaccccacaccagatctcccagctaacactgacgcccactacaaactccacaccaaccaacacgctagcacacagccgccataccctccacgcagcatacaacccaacacacaaaccccatcctcacactcacacaacagcacgagcataccagatgcatccgaagaagagaaaacgagcaacgacgaggcggggcgagaccacatcacgcgcacaaccgaacacggctccatgccaccggcgcgtacgacgccgacaggcaaaccacaacgcaactgccggccactacccccacagtcacgcggacacgaaccaaacaacgagcaagcaaagaccaccccgccgacagcaccgtcacgtcaagcggacgacgcgcagaggccgagacaggacgcgccgagaggccgggcgcgagggcatccgagggcgagagtgtatcgagaaacatgcggcgtacgggcgcggggatgagagaaggatcagcgcggacggcgagaggagtcagagaacgggcagggcgggaggcgctgcggcgtgagggagggagcagaggggcggaggcaggcgggcgctagccgacgccgtgcgacacgacgacgcgaggatgatccgcgcacatagagagaataacccgaccggccgcagaccacgccagcgaccaggccagcgaagacggggaccagcgctcgatcgcagcaacgcagaccacacgcagcagcgacgacgcatagccatgccaagaccagagcggccagccggcctcgcgccggcgggcgagcgggcgacgcggcgagcggagccgcacgcacgcagcggaggcagagacgcagcaggcagcgccagtgaggagcgaggggagacgccgaagccagcaggcgaggacacagggcacagaccgcgaacagagccggcgatccagaaggcacgacccgaaggagcggcgagaggccgcggcggagggggccgccggcgggtgggcgaccggaggcgacgagcgcagacgcgggacgggcgcaggaggga

SEQ ID NO: 687944 - DNA, 558 bp, Homo sapiens
  misc_feature (71)..(71): n is a, c, g, or t
gaaggaaaagttggttccgtttttggtaaaaactggaaaatggccctaaattcttgaaggctggggaagcngccaatggttaatagggtcctggcaaggccatgtgtggtgagaggttttcaaaccatccccctttggggtgcttttctgtttgttatattaaacaaacagtttcggggggggttctcaaaacagtgggcaaaaagggtggtgggggtgggaagggtccccagtttgccccaaaaggtccgaagggttaatggatttttttcctaaaacctgccccccccctttttatcaggggggggagaacgggttccaaaccgtttggttccattggcccctttaggtttgggggaaaaggctgggttattgtaaccaatgcccgtgtaaaccttccgaagggaaggggaatgttttgggggcccccttgggttttttttttggggggggggggttttaggttttaggtttttaaaacagggcttttttatgggaacaacttggcccaaaatttgggccaggatttttgggcccctttaaaaaggttaatgggga

SEQ ID NO: 687945 - DNA, 272 bp, Homo sapiens
cagtagaggatatttcaaaagttaactcggaaggtgcccttcatgatgattgagctgatattattgaagcctgtgatgtgcgtctgaaggaggatgataaagatgttgaaagtgtgatgaacagtgtggtatccctactcttgatcctggaaccagacatgcaagaagctttgattgaaagcctatgtgaaaagctggtcaaattccgcgaaggtgaacgccccgctctgagactgcagttgctaagcaaccttttccacgagatggataag

SEQ ID NO: 687946 - DNA, 101 bp, Homo sapiens
gcaacacagcgagaccttatttccactaaaaagaaaaaaaaaatcagctaggtgtggtggcatgcacctgagttccagcaacttggaaggctgaagtggga

SEQ ID NO: 687947 - DNA, 599 bp, Homo sapiens
  misc_feature (234)..(234): n is a, c, g, or t
  misc_feature (283)..(283): n is a, c, g, or t
  misc_feature (351)..(351): n is a, c, g, or t
cccttctaaaagccatgaagaatcaccttcaatgtctactacttcagcagctgtagcccagccaaccttagtccgcttacgactggaacctggtctcggcaacggacgcgtcgggcaagcctcttgtggcgatgaacaaaggcatcgagcgcaagttgcgcgttgccttcggtgacaagaacctgagcatcagcggtggctgcaatcgtcagttcggcggctttcactatcagnacggagttctgaaggttcagccactggcctctacgctgatggcctgtgncaagagcctgatggaccttgatgcccaagtagggcggctgttcaagggtgatctgcgcgctgtgatcnccggcgataacgtggcgccgatgctgcaactgacgacagcggatggctcggtgctcaagctgcaaggcgaggccaccccgcagacccgctacggtagcgagggtgaggtcaagtttctggaagtggcggccaagacggtcaagtgcagccatcctttgatcccaggttatcagtgcctgcaactgcgcgagcgtcgctatgtcgacgcggaactgcgactggcgacccaagacaccgggtgtgctttc

SEQ ID NO: 687948 - DNA, 112 bp, Homo sapiens
aagatggccactgaggatcatacaacacaactgaaaatatgcactgggagtgtatccacctgtcttttcattggaaacctggtcagtttgtgttcaaggtgtgacttgagat

SEQ ID NO: 687949 - DNA, 134 bp, Homo sapiens
atccccaatctattgatccccaactccaaatatctcatcaacaaccgactaaatcaccactccaaacaatagactaactcaaactaaacctacaaaacaaatgatacaccactacacaacagctaaaaggacga

SEQ ID NO: 687950 - DNA, 180 bp, Homo sapiens
tccatctcagccttccaaagtgctaggattacaggtgtgagccaccacgcctgacctatgttaagactttgattggacacccccccccgccacacacacacacacacacacatacacacacacacacatctcgatcgtgctccttcgctgaggggaggggtgctctggacacatgtgcgt

SEQ ID NO: 687951 - DNA, 152 bp, Homo sapiens
agaccgagccggacctaatcacaggtcgtgggcactctcggcgcctctataggcgtcgacatcgtacggtttcagtcggtttccggaagattttcaatccaggcgcatccccggttttagcgtccgggcatggctatcgctcttgcggcagg

SEQ ID NO: 687952 - DNA, 104 bp, Homo sapiens
gtcaatagcatagattaaaaacaaaaaagaagtatacccaacatacctatgtaattttaccctatatctcttcctttgcatatactgtcttatttcctctgcct

SEQ ID NO: 687953 - DNA, 244 bp, Homo sapiens
  misc_feature (15)..(15): n is a, c, g, or t
  misc_feature (29)..(29): n is a, c, g, or t
  misc_feature (40)..(40): n is a, c, g, or t
  misc_feature (45)..(46): n is a, c, g, or t
  misc_feature (50)..(50): n is a, c, g, or t
  misc_feature (54)..(54): n is a, c, g, or t
  misc_feature (63)..(63): n is a, c, g, or t
  misc_feature (65)..(65): n is a, c, g, or t
  misc_feature (94)..(94): n is a, c, g, or t
  misc_feature (101)..(101): n is a, c, g, or t
  misc_feature (118)..(118): n is a, c, g, or t
  misc_feature (213)..(213): n is a, c, g, or t
ctgcttgcttaaatnacagcagtcacatnacagctccacngggcnncccncccnggcgctgcnantacaaacgccgccccagtcgtacgtgtcntagtgtntgttagcaagctgtgtncgcgcagcaagtgtgtagcgtgcagtgtgtgcgtgcgcccgtgtgtgcagtcaaagtcccgtgcgtgtgcaccgtcgcgtgcgtagtgcgtcgtnccgcccaaaaaacccgtgcgtgtgtcaaaaa

SEQ ID NO: 687954 - DNA, 137 bp, Homo sapiens
tatgcgcccagcggtcattctacatttcctccggaagctgtgtctggtgcagctgaggctctggtgtatccacgccgacgtgagcacctgtctgaagttgagtacccgcctttcgctgggcatgcatcgcatacatt

SEQ ID NO: 687955 - DNA, 230 bp, Homo sapiens
gagggtagagaatgagtgtgaggcgtcttataccatagccgcctagttttaaggagtactgcggaaagtactattgacccagacgatgggggcttcgacatgggcttaagaggcgctcataagtagagtccgtacaagaggatatctttactataaaagctatagtgtaaagcaagtcatataacgtagtaggctcagagagtatgatcgatacttgggcagtgagagta

SEQ ID NO: 687956 - DNA, 292 bp, Homo sapiens
  misc_feature (64)..(64): n is a, c, g, or t
  misc_feature (70)..(70): n is a, c, g, or t
  misc_feature (93)..(93): n is a, c, g, or t
  misc_feature (108)..(108): n is a, c, g, or t
  misc_feature (129)..(129): n is a, c, g, or t
  misc_feature (139)..(139): n is a, c, g, or t
  misc_feature (146)..(146): n is a, c, g, or t
  misc_feature (154)..(154): n is a, c, g, or t
  misc_feature (159)..(159): n is a, c, g, or t
  misc_feature (172)..(173): n is a, c, g, or t
  misc_feature (180)..(180): n is a, c, g, or t
ggaagaagcgcgaagagccgttagtcatgccggtgtggtggcggcggcggagactgcgggcccntagctnggctctgcgaggtgcaagaaagnctttgaggtgaaggngtattaaagtcatcataacanatgttttcanaaacttntaggaggntgttnaaaactactaggnnacggcgnatgtattgagggacctcaatttaattaatggaggatgtatggttctgacaataggttatagctggccaatgatacttattactttgccgtaccactaggttcttagggtatt

SEQ ID NO: 687957 - DNA, 274 bp, Homo sapiens
  misc_feature (5)..(5): n is a, c, g, or t
  misc_feature (13)..(15): n is a, c, g, or t
  misc_feature (40)..(40): n is a, c, g, or t
  misc_feature (42)..(42): n is a, c, g, or t
  misc_feature (63)..(63): n is a, c, g, or t
  misc_feature (65)..(65): n is a, c, g, or t
  misc_feature (110)..(110): n is a, c, g, or t
  misc_feature (142)..(142): n is a, c, g, or t
  misc_feature (196)..(196): n is a, c, g, or t
  misc_feature (234)..(234): n is a, c, g, or t
  misc_feature (268)..(268): n is a, c, g, or t
caaangtggagtnnngggtgcgccgttagaatagtggatnancgggtgaggaattggagaggnangggaatggtaatttattgaggatgtgtgtttgatttagtgtggtnagggttggttgagaattataaaggaattgttntgtaaacggtgttaatttcaaaatttggggatttttgtagggtaagatttgagntaaaattttgaaggcaaattaattttgtgcttttgctnggataatggagttttttttagaaaagtgaaagantgaaag

SEQ ID NO: 687958 - DNA, 233 bp, Homo sapiens
caggaatgagcactcgtaaacatggggtttcttttgtgagtaatgaaaatattgtggaactagacagcagtgatggttgcacaattctgaatatactgaaaacaactgaactgtatgctttttttttttttaagatagagtctcactctgtcgtccagggctggagtgcagtggcatgactcctcatgctcacgtgaacctccacggtccaaggtacaaggtatttctccagc

SEQ ID NO: 687959 - DNA, 284 bp, Homo sapiens
gggaaggtaaccctgaagcaggacttgtaaagcaaataagattgggaggccaaggtgggtggatcacgaggtcaggagttcgagaccagcctggccaacatagtgaaaccccgtctttactaaaaatacaaaaaaattagccaggtgtggtggtgggtgcctgtagtcccagctacttgggaggctgaggcaggagaatctcgaacccaggaggcggaggttacagtcagctgagaccgcaccattgcactccagcctgggtgacagagcaagattccgtctca

SEQ ID NO: 687960 - DNA, 874 bp, Homo sapiens
gccctggggccgtacgaggcgcagcgaggaggtagagggggcgggggtcgcacgtagaggggtccctagagaacgaggacgctgaaggcgggacactggggtgcgaccccgcgggcggaggccaggccattaacatcgagtcgcgcacttctgtggccgagacgactgaagctgggcgtctgtggacgggacagtcatcgtcatgaagtgcctctagaaatcatcccacgggcagactccatcagagatcctcgcactatccttggcgccctatgcacgtgacgttagaatccgagcagccgctctgtgcgaggttccgacggatcgttcgaaggtctggtggatcgaccgtgagaggtctgtccccgctgcgcgggcgtggctggcggcgctctgagggatgatggcctcgggttcgaggcacgctggacgccctgcagctggagctgggagaccctgggtgtcttctgccagccggtgcctgcgctgtgctgtgaggacgcgagaacgccagcatcctcaccgagcgtggcaggataagaaaggtgacagacgattccggaagctgggtcgagaccatgagactcgggagctccccccaaagcatgggaagcccaagaaggcagaaactggaagggaaggcgggacgatgggccgggacctggtgccaggacgggccaaatgctgaaagcttgcagcccaagatccaggcatatgaaaccgactggatgacccgtatcgacgtggcacggatccccaaacaagtgatgcctgccaacaggatactgggcgttcaagtggaggccgctactgtgcctggacatcaccagcgtaggatggtgcgcccacttgaggggaagttacctgaaggccc

SEQ ID NO: 687961 - DNA, 285 bp, Homo sapiens
agtgaattcgactcgggtactggaggactcctcagagatcgagccaggcgtccagtctaaagcgagtatttgggaggtcagctacggtgctcacgtgtcgacggaacttgtacagggaggcatgcaccgcgagtggtgaatacacgtcgaccaggctccatgtatgcgtgattgggaggtcagcacggagctcatgtgatcgacggaactggtatagggaggtatgcatcggcagtggtgaatacacgtcgagctggaggcatgcatgcatgatcgggtactgga

SEQ ID NO: 687962 - DNA, 125 bp, Homo sapiens
gtatactcctatttcccagcgccatgtgcttccatttcccagtactgtgaatgggacgcacatggcactgggaaataggagtatacagcactgggaaaggggagcacagtactgggaatggggag

SEQ ID NO: 687963 - DNA, 111 bp, Homo sapiens
attaacgacataaaacctcatcagacgagagaacaccctcatgtcagtacaccgtatcccccattctcctcctatccctcaaccccgacatcattaccgggttttcctctt

SEQ ID NO: 687964 - DNA, 122 bp, Homo sapiens
cgaagttacttaccgggaacgactgtatagagtatactaggaagtaaagaatcgcctggactatcatatatctgtacagaacatgatgcgtcgaaaggaacaagaacaaatgataaaactgg

SEQ ID NO: 687965 - DNA, 855 bp, Homo sapiens
gggggcttcgggcccggagttcgggggctgggtctggacccccacgcagactcgccggcctccctgccccagaggaggccgggatcagaagcgcatcgtcgatctcccacgcccggtcgcgcagtcctcctgcgttagcttgggtccccagcgtcttgggcttcagaccagcggcgtctcggcgtaccacgttgccaattcgggccgtcctgcggggtcggggtgaggcgtcgacctgggtgtggcagagtgcctcgctgggctcgaatggtgctgcacgccttgtctgggcgctggacgcacggggtatcctgacctacactgggttggactcgatgacgcgatcgggctttcctgcgtcgtggctcagcgcatgatacggactgcatgtgcctggcccagaggtcctgcgatcgactccgaccggcacgcgggcgccgcgcctcaggtccccgtttgcccgacggctgctcgacagcccctgggaggaaccggtcacagcgcagtctgaagaccagataaagccgtgacgaacccacggaggcaagagcagaagcgaggtgcccgggtcgtccttcatcgtagaagggcccgccatggtgtttgcgcgcaactcccgggaaagcagggagggcagccgcggactccagggcagggacgggggctgcgggggcgcctggagccgtttcttcgcgccacggcggggaacatacctgccgccggagcccacggggccccttctccccgtgcggggcacggcaggggtggttgagcgtcgtgcttgcgcgcgcttgaccactccacgcgtcgttggggggctccggcttggtggagtatcccggcatgaagggactg

SEQ ID NO: 687966 - DNA, 103 bp, Homo sapiens
ggcagtatagttgtttctgagtgtacaggacggccagtatagctgtttcctgattgtacccggagggccagtcctcgctgtttcctgattttaaccggctcgg

SEQ ID NO: 687967 - DNA, 282 bp, Homo sapiens
agctaaaaacccatttttaataacaattttaaaaacatgggtttaggccatccacatgctttaactcatgctcaggctcctgatattgatggggtgtcttttattttttttgaggccctcctttgggaatttacccgttttggaagaaaacccaattaagggtatttttcccaacaacccctatttccaatggggattccttccttttattcattttaagactcctctacccgctgagaaaacttttttcaagcacaggaattgtgtgcctgtttaacaaag

SEQ ID NO: 687968 - DNA, 290 bp, Homo sapiens
ctggggccagcgtttcttgtctggcatccagatccggtgtcccccagggtgagggagccccacggggccgcgttggagaagtgcgcctgggtgcgctcccaggtcgctcttctgtgatccccctgacggtgtccctggattgagtaagtgcacccgcgtttcactatccactcgtgcccacgttcatagtgtgagcgatgcccatagtcctacctattgactgccatagagtcaataatagagaacatcgaccacagtgcctcgcagagccataaagagagatgtaccag

SEQ ID NO: 687969 - DNA, 373 bp, Homo sapiens
tagacgatcccgatctgatctcggcgcatcccaatcgttgtgtttcgttaccacttcttcattgaatgccttaggttggatgttctctctgatttcgagtcctacttatctcccacagaacaatcctccaggtgtgctggccctgctggacgaggaatgctggttcccctaagccacgtgaccagtctttcagttgagaagctgtgtcacggagcacggcattcctcctacgttccagaagcccaagctgctcagtgactatactgagttctccatcatcctattatgctgggaagagtaccagccatcagggccttaccggtggactctgtctcacgggatccccaatgcctggtcatcgccgagattagat

SEQ ID NO: 687970 - DNA, 3255 bp, Homo sapiens
tcactttctacacaattagatggcacttgctgccgagtgaagaagatcctgcttgcaagaactggagagtaattttctaatacaacaaaagctggtggaagctgcaaagaaacttgccaatgagccagacctttgtaaaactgtgaagaaaaagcgaaagcaagattacacagatgcgatgaaaaagcttcaggagattgaaaatgcaataaacgaataccgaattaggtgtggaaagaaacccagccagaaagcaacagtgttaccagaagacataatcccctcagagagtagctctttgtctgacaccaccacctatgatgatcccagtgatgccttcacttttcctgggcagcgatcaagttcagtacctcattctccaagaattcttccccccaagtctcttggtattgagcgaatccatttcagaaagtcgtccatcaatgaacagtttgtggataccaggcagtccagagaaatgctgtccacacacagcagcccttacaaaactctggagaggcggccccagggaggacgaagcatgcccaccacgccagttcttacccgaaacgcctacagcagcagccacttggaacccgaatcttcatctcagcactgccgccagcggagtggaagcctggagtcccagtcccacctgctctccgagatggacagcgataagccatttttctccctctccaaatcccaaagaagcagcagcacagaaatcctcgatgacgggtcttcttatacaagccaatcaagcacagagtattactgtgtgacaccagttaccggcccctattacaccacccagaccctggacactcgcaccaggggtcggaggaggtcaaagaaacagaatgtttctacttcaaattcaggaagcatgcccaacctagcacaaaaggatagtttgaggaatggtgtttactcaaagagtcaggagccaccgtcttccagttactacattgccgggtacacaccctatgcagagtgtgacttttattacagtggtggttatgtctatgagaatgacaccgagggacagtatagtgtcaacccttcctaccggtcctcagcccactatggatatgagcgccagagggactacagcagatcctttcacgaagatgaggtcgaccgggtaccccataacccatatgcaactctccggctgccaaggaaggctgctgcaaaatcggagcacatcaccaaaaacatccacaaggccttagttgccgagcacttgcgtggctggtaccagcgggcctctgggcagaaggatcagggacacagcccgcagaccagctttgactcagacaggggatcacagagatgcctggggtttgcggggctgcaagtaccttgttctccaagcagtcgtgcatccttgtactcttcagtgtcttctacaaatgcttctgggaactggaggacccagttaaccatagggctgtcggattacgagactccagcacattcttcttacaccagctgctatggcaatgtctataatcctttaccctctccaagcagacaatacacagaaatcagtcaactggatggtacagatggaaaccagctggaagacaacctggagagtagtgagcagagactcttttggcatgaagattcaaagcctggaacattagtctgaactgcagttggacctcctgaccaagcactgcgttctcacactagtgtgccttgcaaattgtatttgtcttccgagaggatgttcgttttagaaacctaaagacatcaaaggttgaagagaagacttagttgccctggaagtgaatcagtgaatcacacaccaagccccacaaagcccctaaaggaggatttggcctttcaaactctaggcactaacgtaactgtagggtctgcccacatgttgaagtattgccaagagaggactcagtgtgaagccttcatcaatagcaagcactttttaagggagtaaaagttgttaaaggcaaacgtcaaaaacatgaaagggcattcaggatgtcccatggcaataagaacaggggaaatctcagagcacaattcagcaggatgagagaaggggaaccagaagctccggagtcattgctcacttcagagtttgaattcgtgagctgacaaagagtaacatgctctttctacacagacatggacaatttagacagtattggaaaattacttgaagctggattttcatgaagttctgaatgagtgtaaatgttttttaggatactataaagagtgatgtttttcataagcaccataaaatgggttctggaaaaactgattaccttagcatcctgtaatataacttatggtagcagattggggaaaatgaagcagcccactgaataattgacaaagtctgcttggagaacattctaaggtacaatatcatggagctcctttttcctttctccactaattgcgtgatgagctattgttctggctggtaattctccaactcggctgtcatttgaagtggcagacttaatatggaaagtttttataattatgagtttgaaaaagcattttaagatgatacagaaagtatccaaaacaacagaaaaaaaaagccacgtcattttagatgaattgcgtgccttaaaatggtgaacgttagaaaattaaacaagtctggattccacaagtagttccaagtcaccaagtgacaaaaacaaggttaacattaaaaaagaaaaacaacaacaacgacaaaaagctccaagctgcagtggatttaattatgaggctaaaactacctcatactttccttggaagaactaattagctatggtttattgtagggttttgtttgtttgttttttaaagcaaatgatttccatattcctgattgatcttttttgtcatctttgcttcaaaattacataaaaggtgctcctttcccccttcttttatacaagtttcttgttcatattgtgaatagaaaagtttctgaacaacttttttggaacattttctatctatattccaaagcatgtaatatatacataaaaacgatttgttaaactggtccttagtcatttgtataattagaaatgaagtttgggaaaaaattttggaaaaaagacaagcaaaaaaaaaataacttattccttttttgcatatttgtatagccttctagaatcagaaataacctttttgcatattcttttattgttctgacttttcaagacctattatttttttacataggtcaataaacaaaaggtgtgctactga

SEQ ID NO: 687971 - DNA, 108 bp, Homo sapiens
  misc_feature (65)..(65): n is a, c, g, or t
  misc_feature (82)..(82): n is a, c, g, or t
gcgataagacacaggtgaggtccagcttgaagagaaagaaaacaaggaagttccctgtgtttaangggcggtgtcattcaangaagcaggttggtccgcggggaccaa

SEQ ID NO: 687972 - DNA, 3200 bp, Homo sapiens
tcactttctacacaattagatggcacttgctgccgagtgaagaagatcctgcttgcaagaactggagagtaattttctaatacaacaaaagctggtggaagctgcaaagaaacttgccaatgagccagacctttgtaaaactgtgaagaaaaagcgaaagcaagattacacagatgcgatgaaaaagcttcaggagattgaaaatgcaataaacgaataccgaattaggtgtggaaagaaacccagccagaaagcaacagtgttaccagaagacataatcccctcagagagtagctctttgtctgacaccaccacctatgatgatcccagtgatgccttcacttttcctgggcagcgatcaagttcagtacctcattctccaagaattcttccccccaagtctcttggtattgagcgaatccatttcagaaagtcgtccatcaatgaacagtttgtggataccaggcagtccagagaaatgctgtccacacacagcagcccttacaaaactctggagaggcggccccagggaggacgaagcatgcccaccacgccagttcttacccgaaacgcctacagcagcagccacttggaacccgaatcttcatctcagcactgccgccagcggagtggaagcctggagtcccagtcccacctgctctccgagatggacagcgataagccatttttctccctctccaaatcccaaagaagcagcagcacagaaatcctcgatgacgggtcttcttatacaagccaatcaagcacagagtattactgtgtgacaccagttaccggcccctattacaccacccagaccctggacactcgcaccaggggtcggaggaggtcaaagaaacagaatgtttctacttcaaattcaggaagcatgcccaacctagcacaaaaggatagtttgaggaatggtgtttactcaaagagtcaggagccaccgtcttccagttactacattgccgggtacacaccctatgcagagtgtgacttttattacagtggtggttatgtctatgagaatgacaccgagggacagtatagtgtcaacccttcctaccggtcctcagcccactatggatatgagcgccagagggactacagcagatcctttcacgaagatgaggtcgaccgggtaccccataacccatatgcaactctccggctgccaaggaaggctgctgcaaaatcggagcacatcaccaaaaacatccacaaggccttagttgccgagcacttgcgtggctggtaccagcgggcctctgggcagaaggatcagggacacagcccgcagaccagctttgactcagacaggggatcacagagatgcctggggtttgcggggctgcaagtaccttgttctccaagcagtcgtgcatccttgtactcttcagtgtcttctacaaatgcttctgggaactggaggacccagttaaccatagggctgtcggattacgagactccagcacattcttcttacaccagctgctatggcaatgtctataatcctttaccctctccaagcagacaatacacagaaatcagtcaactggatggtacagatggaaaccagctggaagacaacctggagagtagtgagcagagactcttttggcatgaagattcaaagcctggaacattagtctgaactgcagttggacctcctgaccaagcactgcgttctcacactagtgtgccttgcaaattgtatttgtcttccgagaggatgttcgttttagaaacctaaagacatcaaaggttgaagagaagacttagttgccctggaagtgaatcagtgaatcacacaccaagccccacaaagcccctaaaggaggatttggcctttcaaactctaggcactaacgtaactgtagggtctgcccacatgttgaagtattgccaagagaggactcagtgtgaagccttcatcaatagcaagcactttttaagggagtggcaataagaacaggggaaatctcagagcacaattcagcaggatgagagaaggggaaccagaagctccggagtcattgctcacttcagagtttgaattcgtgagctgacaaagagtaacatgctctttctacacagacatggacaatttagacagtattggaaaattacttgaagctggattttcatgaagttctgaatgagtgtaaatgttttttaggatactataaagagtgatgtttttcataagcaccataaaatgggttctggaaaaactgattaccttagcatcctgtaatataacttatggtagcagattggggaaaatgaagcagcccactgaataattgacaaagtctgcttggagaacattctaaggtacaatatcatggagctcctttttcctttctccactaattgcgtgatgagctattgttctggctggtaattctccaactcggctgtcatttgaagtggcagacttaatatggaaagtttttataattatgagtttgaaaaagcattttaagatgatacagaaagtatccaaaacaacagaaaaaaaaagccacgtcattttagatgaattgcgtgccttaaaatggtgaacgttagaaaattaaacaagtctggattccacaagtagttccaagtcaccaagtgacaaaaacaaggttaacattaaaaaagaaaaacaacaacaacgacaaaaagctccaagctgcagtggatttaattatgaggctaaaactacctcatactttccttggaagaactaattagctatggtttattgtagggttttgtttgtttgttttttaaagcaaatgatttccatattcctgattgatcttttttgtcatctttgcttcaaaattacataaaaggtgctcctttcccccttcttttatacaagtttcttgttcatattgtgaatagaaaagtttctgaacaacttttttggaacattttctatctatattccaaagcatgtaatatatacataaaaacgatttgttaaactggtccttagtcatttgtataattagaaatgaagtttgggaaaaaattttggaaaaaagacaagcaaaaaaaaaataacttattccttttttgcatatttgtatagccttctagaatcagaaataacctttttgcatattcttttattgttctgacttttcaagacctattatttttttacataggtcaataaacaaaaggtgtgctactga

SEQ ID NO: 687973 - DNA, 692 bp, Homo sapiens
  misc_feature (42)..(42): n is a, c, g, or t
  misc_feature (45)..(45): n is a, c, g, or t
  misc_feature (140)..(140): n is a, c, g, or t
  misc_feature (168)..(168): n is a, c, g, or t
  misc_feature (186)..(186): n is a, c, g, or t
  misc_feature (207)..(207): n is a, c, g, or t
cgggaccctctgaaccgagtcctggccaacctgttcctgctnatntcctccatcctggggtctcgcaccgctggcccccacacccagttcgtgcagtggttcatggaggagtgtgtggactgcctggagcagggtggccntggcagcgtcctgcagttcatgcccttnaccaccgtgtcggaactngtgaaggtgtcagccatgtcnagccccaaggtggttctggccatcacggacctcagcctgcccctgtggcctgccaggtggctgctaaagccattgctagcactctgagtgtggcttgtgcatggccgcagttggtgggctgggtgactggctgcagccccagtgcgcctccaatgggaagcatgtgatggaaagatgaggcatcgtgcctcacatcctgctccacatggtgcaatgagcctactagctggcttaccagttccccgcctcctgactacctgacctccaggatgtctcccggtttcttctttcaaaatttcctctccatctgctggcacctgaggagagtgagcaggctggaccacaaagcccagtggtcacccctgtgtgcgccctgccacagccaggagtagtcttacctctgaggaactattctagatgcaaggtgtgtatagtgtgagtgtgagtgtggtgtgtgtgtgattagagagtatagagcaatatga

SEQ ID NO: 687974 - DNA, 107 bp, Homo sapiens
acatgatgtgctcgatgcactccacacatgtagctggtggctggggcattactcctcacagctatgtgcatgcactgccagacaaatgtgcattggtcatgagaatg

SEQ ID NO: 687975 - DNA, 235 bp, Homo sapiens
gaattcgagctcggttcccctatcaactgaggcgattccgctatcaactgaggcgattccctatcaactgaggcgattccgctatcaactgaggcgattccgctgtcaactgaggcgattccgatcaaatatattctctagatcagcagttatatcaaatgtgataaatcccagatcacttctttctctaggtccagtgaaatcttctacattttttagcagatccgctatccgt

SEQ ID NO: 687976 - DNA, 1940 bp, Homo sapiens
atctttccagagaattaaataatcctttttatgggcctgttaaacaatgctccagtatgacattgaaagaacatgcagtcacccttctcctttcccttatctctacattttgggaaatttttcttaacagtgcttcctactaacttctttaaatgtagtagtctttgtgctgtggggacaaaaatatggccacaagtagtaacttttctggttttctttaatagacaatacacagaaatcagtcaactggatggtacagatggaaaccagctggaagacaacctggagagtagtgagcagagactcttttggcatgaagattcaaagcctggaacattagtctgaactgcagttggacctcctgaccaagcactgcgttctcacactagtgtgccttgcaaattgtatttgtcttccgagaggatgttcgttttagaaacctaaagacatcaaaggttgaagagaagacttagttgccctggaagtgaatcagtgaatcacacaccaagccccacaaagcccctaaaggaggatttggcctttcaaactctaggcactaacgtaactgtagggtctgcccacatgttgaagtattgccaagagaggactcagtgtgaagccttcatcaatagcaagcactttttaagggagtaaaagttgttaaaggcaaacgtcaaaaacatgaaagggcattcaggatgtcccatggcaataagaacaggggaaatctcagagcacaattcagcaggatgagagaaggggaaccagaagctccggagtcattgctcacttcagagtttgaattcgtgagctgacaaagagtaacatgctctttctacacagacatggacaatttagacagtattggaaaattacttgaagctggattttcatgaagttctgaatgagtgtaaatgttttttaggatactataaagagtgatgtttttcataagcaccataaaatgggttctggaaaaactgattaccttagcatcctgtaatataacttatggtagcagattggggaaaatgaagcagcccactgaataattgacaaagtctgcttggagaacattctaaggtacaatatcatggagctcctttttcctttctccactaattgcgtgatgagctattgttctggctggtaattctccaactcggctgtcatttgaagtggcagacttaatatggaaagtttttataattatgagtttgaaaaagcattttaagatgatacagaaagtatccaaaacaacagaaaaaaaaagccacgtcattttagatgaattgcgtgccttaaaatggtgaacgttagaaaattaaacaagtctggattccacaagtagttccaagtcaccaagtgacaaaaacaaggttaacattaaaaaagaaaaacaacaacaacgacaaaaagctccaagctgcagtggatttaattatgaggctaaaactacctcatactttccttggaagaactaattagctatggtttattgtagggttttgtttgtttgttttttaaagcaaatgatttccatattcctgattgatcttttttgtcatctttgcttcaaaattacataaaaggtgctcctttcccccttcttttatacaagtttcttgttcatattgtgaatagaaaagtttctgaacaacttttttggaacattttctatctatattccaaagcatgtaatatatacataaaaacgatttgttaaactggtccttagtcatttgtataattagaaatgaagtttgggaaaaaattttggaaaaaagacaagcaaaaaaaaaataacttattccttttttgcatatttgtatagccttctagaatcagaaataacctttttgcatattcttttattgttctgacttttcaagacctattatttttttacataggtcaataaacaaaaggtgtgctactga

SEQ ID NO: 687977 - DNA, 175 bp, Homo sapiens
gtgatgacggcgtgcggctggtggcgacagtttcgtggccagatgctgttgctcggccttgagagctgcgtggggtactacaccttgcgctacggcatctcagtcggcgagcgctggcagatgttctgcttcctggtgctgggcttttccggcatcgtgctggtggcccaaccag

SEQ ID NO: 687978 - DNA, 384 bp, Homo sapiens
gaattttttatgcacctatctcagaaatcacttggccatatctattcatctgtattttgcgcttttctactctatttcatatatctagtgtttttccccgcaactgataatatattgtcttgattactcatagctatgtgaataagctttgcaaatacaggtacactgagtgatagcccctattattttctttttcaaaattgtttctggttattctagttcctttgtctattcagataaatttgagcatacacttttctgtatcttggaaaaaatcttgctgtcatttttataggaattgcatcaaatctttgggagaattgacatctttactgtgtagagtcttccaatctatgaacatcgtatgtctcaccatttgtttac

SEQ ID NO: 687979 - DNA, 339 bp, Homo sapiens
  misc_feature (61)..(61): n is a, c, g, or t
gacttccccgggctcgcagggtttttaaagtcagggccaaaatataaacacgaagagcacnaatggaacaataaagcgaaaatatatgtgaaaaacaatagaacgcaaatataaagccagggcagcatatatgaaaggggaagaagggagaggaagaagaagctcccatcaacgtgagcgaaagcacgatgagacagaactggatttcaaagcacacaccggcatttctccccacaagactctgggcaagatgaactcttgtcacccaggctggagtgcagtggcatgatcatagctcactgcagcctcaaccttctggactcaagtgatcctcctgct

SEQ ID NO: 687980 - DNA, 3528 bp, Homo sapiens
tcactttctacacaattagatggcacttgctgccgagtgaagaagatcctgcttgcaagaactggagagtaattttctaatacaacaaaagctggtggaagctgcaaagaaacttgccaatgagccagacctttgtaaaactgtgaagaaaaagcgaaagcaagattacacagatgcgatgaaaaagcttcaggagattgaaaatgcaataaacgaataccgaattaggtgtggaaagaaacccagccagaaagcaacagtgttaccagaagacataatcccctcagagagtagctctttgtctgacaccaccacctatgatgatcccagtgatgccttcacttttcctgggcagcgatcaagttcagtacctcattctccaagaattcttccccccaagtctcttggtattgagcgaatccatttcagaaagtcgtccatcaatgaacagtttgtggataccaggcagtccagagaaatgctgtccacacacagcagcccttacaaaactctggagaggcggccccagggaggacgaagcatgcccaccacgccagttcttacccgaaacgcctacagcagcagccacttggaacccgaatcttcatctcagcactgccgccagcggagtggaagcctggagtcccagtcccacctgctctccgagatggacagcgataagccatttttctccctctccaaatcccaaagaagcagcagcacagaaatcctcgatgacgggtcttcttatacaagccaatcaagcacagagtattactgtgtgacaccagttaccggcccctattacaccacccagaccctggacactcgcaccaggggtcggaggaggtcaaagaaacagaatgtttctacttcaaattcaggaagcatgcccaacctagcacaaaaggatagtttgaggaatggtgtttactcaaagagtcaggagccaccgtcttccagttactacattgccgggtacacaccctatgcagagtgtgacttttattacagtggtggttatgtctatgagaatgacaccgagggacagtatagtgtcaacccttcctaccggtcctcagcccactatggatatgagcgccagagggactacagcagatcctttcacgaagatgaggtcgaccgggtaccccataacccatatgcaactctccggctgccaaggaaggctgctgcaaaatcggagcacatcaccaaaaacatccacaaggccttagttgccgagcacttgcgtggctggtaccagcgggcctctgggcagaaggatcagggacacagcccgcagaccagctttgactcagacaggggatcacagagatgcctggggtttgcggggctgcaagtaccttgttctccaagcagtcgtgcatccttgtactcttcagtgtcttctacaaatgcttctgggaactggaggacccagttaaccatagggctgtcggattacgagactccagcacattcttcttacaccagctgctatggcaatgtctataatcctttaccctctccaagcagacaatacacagaaatcagtcaactggatggtacagatggaaaccagctggaagacaacctggagagtagtgagcagagactcttttggcatgaagattcaaagcctggaacattagtctgaactgcagttggacctcctgaccaagcactgcgttctcacactagtgtgccttgcaaattgtatttgtcttccgagaggatgttcgttttagaaacctaaagacatcaaaggttgaagagaagacttagttgccctggaagtgaatcagtgaatcacacaccaagccccacaaagcccctaaaggaggatttggcctttcaaactctaggcactaacgtaactgtagggtctgcccacatgttgaagtattgccaagagaggactcagtgtgaagccttcatcaatagcaagcactttttaagggagtaaaagttgttaaaggcaaacgtcaaaaacatgaaagggcattcaggatgtcccatggcaataagaacaggggaaatctcagagcacaattcagcaggatgagagaaggggaaccagaagctccggagtcattgctcacttcagagtttgaattcgtgagctgacaaagagtaacatgctctttctacacagacatggacaatttagacagtattggaaaattacttgaagctggattttcatgaagttctgaatgagtgtaaatgttttttaggatactataaagagtgatgtttttcataagcaccataaaatgggttctggaaaaactgattaccttagcatcctgtaatataacttatggtagcagattggggaaaatgaagcagcccactgaataattgacaaagtctgcttggagaacattctaaggtacaatatcatggagctcctttttcctttctccactaattgcgtgatgagctattgttctggctggtaattctccaactcggctgtcatttgaagtggcagacttaatatggaaagtttttataattatgagtttgaaaaagcattttaagatgatacagaaagtatccaaaacaacagaaaaaaaaagccacgtcattttagatgaattgcgtgccttaaaatggtgaacgttagaaaattaaacaagtctggattccacaagtagttccaagtcaccaagtgacaaaaacaaggttaacattaaaaaagaaaaacaacaacaacgacaaaaagctccaagctgcagtggatttaattatgaggctaaaactacctcatactttccttggaagaactaattagctatggtttattgtagggttttgtttgtttgttttttaaagcaaatgatttccatattcctgattgatcttttttgtcatctttgcttcaaaattacataaaaggtgctcctttcccccttcttttatacaagtttcttgttcatattgtgaatagaaaagtttctgaacaacttttttggaacattttctatctatattccaaagcatgtaatatatacataaaaacgatttgttaaactggtccttagtcatttgtataattagaaatgaagtttgggaaaaaattttggaaaaaagacaagcaaaaaaaaaataacttattccttttttgcatatttgtatagccttctagaatcagaaataacctttttgcatattcttttattgttctgacttttcaagacctattatttttttacataggtcaataaacaaaaggtgtgctactgaaaatgtttacgttttcttccatttatgtcaggggttcatgtgaagcaggtcgcagtgctctacttcaagtaatcatattgggcaaggcttcggatttttatttatagtattaccgtattttattaattccgggatgtacatttttaaatatttacattaaaaacatagttcatctttttattgatggcatattctacttgaattggcagttttttcttaatagtacattaaaaataatgctgtgtcttacaataaagttgccttagaattgaa

SEQ ID NO: 687981 - DNA, 557 bp, Homo sapiens
  misc_feature (165)..(165): n is a, c, g, or t
  misc_feature (271)..(271): n is a, c, g, or t
aactttgtatgtgtgcatgtgtgtatattgagtattttccctgtgtagtgagtattttctcaagtctaaatatttttctatagaaatttttaaagatacaatagtattctcatatagaaataccataatttacccatttctctcttgttggaaacaggctgtttnttattttccactactataaataacaatgtgataaggattttcccaatacgtgtgtacgtttggtcattttagtacagcttgttctttacttcaaatgtccctttcntagtagggggccctcctgcctccctactgtatcacccatcccactcccacaggcgacccttcttctcctttcctgcttatttttctccacagatcttaccatgtttattcgatttttaactttgggggtagttttgtttgttttctttcttagtcaatcttcccttcactacaatttaagctctatgaaccagagatttcaacgtaattaattcactgctgtaactctggtacctcagatagtggctgtaacactgtttaagtatgcaataaacttctcattaata

SEQ ID NO: 687982 - DNA, 134 bp, Homo sapiens
gggcggactccgcggacaaggccaggcctagcattgagctccgtcgggcagggcgccgggattggtgtcggcagacgtgagccagcgcgtggagtcggcgagcgggagtgaaagaagaaaagctagagagcgaa

SEQ ID NO: 687983 - DNA, 420 bp, Homo sapiens
ccaactacatcagtcacctcacccaatgccatcagcggcctcatccaactccatcaacggcctcgtccaacgccatcagcggccccgtccaactccactccagccccagccgcattgctgggcttctgttgttttgaaccaagacactggctcccgaatttgccgaagttgccaaacatccactgggacttgagctctttgctgacctcctgtttctttccagtcacccccagggcagagaggtgccctccttctggacccaaaatgatcctcgtcactgcccacagctgcgggtgtttcggcgaggacgggaccttaaactccgccaccctgacgcacgcatttcccgatgacaggtacagagttggggcgtgtgcttagggagcatgcaagcgtgagatcctgctcacccttgagggc

SEQ ID NO: 687984 - DNA, 3063 bp, Homo sapiens
tcactttctacacaattagatggcacttgctgccgagtgaagaagatcctgcttgcaagaactggagagtaattttctaatacaacaaaagctggtggaagctgcaaagaaacttgccaatgagccagacctttgtaaaactgtgaagaaaaagcgaaagcaagattacacagatgcgatgaaaaagcttcaggagattgaaaatgcaataaacgaataccgaattaggtgtggaaagaaacccagccagaaagcaacagtgttaccagaagacataatcccctcagagagtagctctttgtctgacaccaccacctatgatgatcccagtgatgccttcacttttcctgggcagcgatcaagttcagtacctcattctccaagaattcttccccccaagtctcttggtattgagcgaatccatttcagaaagtcgtccatcaatgaacagtttgtggataccaggcagtccagagaaatgctgtccacacacagcagcccttacaaaactctggagaggcggccccagggaggacgaagcatgcccaccacgccagttcttacccgaaacgcctacagcagcagccacttggaacccgaatcttcatctcagcactgccgccagcggagtggaagcctggagtcccagtcccacctgctctccgagatggacagcgataagccatttttctccctctccaaatcccaaagaagcagcagcacagaaatcctcgatgacgggtcttcttatacaagccaatcaagcacagagtattactgtgtgacaccagttaccggcccctattacaccacccagaccctggacactcgcaccaggggtcggaggaggtcaaagaaacagaatgtttctacttcaaattcaggaagcatgcccaacctagcacaaaaggatagtttgaggaatggtgtttactcaaagagtcaggagccaccgtcttccagttactacattgccgggtacacaccctatgcagagtgtgacttttattacagtggtggttatgtctatgagaatgacaccgagggacagtatagtgtcaacccttcctaccggtcctcagcccactatggatatgagcgccagagggactacagcagatcctttcacgaagatgaggtcgaccgggtaccccataacccatatgcaactctccggctgccaaggaaggctgctgcaaaatcggagcacatcaccaaaaacatccacaaggccttagttgccgagcacttgcgtggctggtaccagcgggcctctgggcagaaggatcagggacacagcccgcagaccagctttgactcagacaggggatcacagagatgcctggggtttgcggggctgcaagtaccttgttctccaagcagtcgtgcatccttgtactcttcagtgtcttctacaaatgcttctgggaactggaggacccagttaaccatagggctgtcggattacgagactccagcacattcttcttacaccagctgctatggcaatgtctataatcctttaccctctccaagcagacaatacacagaaatcagtcaactggatggtacagatggaaaccagctggaagacaacctggagagtagtgagcagagactcttttggcatgaagattcaaagcctggaacattagtctgaactgcagttggacctcctgaccaagcactgcgttctcacactagtgtgccttgcaaattgtatttgtcttccgagaggatgttcgttttagaaacctaaagacatcaaaggttgaagagaagacttagttgccctggaagtgaatcagtgaatcacacaccaagccccacaaagcccctaaaggaggatttggcctttcaaactctaggcactaacgtaactgtagggtctgcccacatgttgaagtattgccaagagaggactcagtgtgaagccttcatcaatagcaagcactttttaagggagtaaaagttgttaaaggcaaacgtcaaaaacatgaaagggcattcaggatgtcccatggcaataagaacaggggaaatctcagagcacaattcagcaggatgagagaaggggaaccagaagctccggagtcattgctcacttcagagtttgaattcgtgagctgacaaagagtaacatgctctttctacacagacatggacaatttagacagtattggaaaattacttgaagctggattttcatgaagttctgaatgagtgtaaatgttttttaggatactataaagagtgatgtttttcataagcaccataaaatgggttctggaaaaactgattaccttagcatcctgtaatataacttatggtagcagattggggaaaatgaagcagcccactgaataattgacaaagtctgcttggagaacattctaaggtacaatatcatggagctcctttttcctttctccactaattgcgtgatgagctattgttctggctggtaattctccaactcggctgtcatttgaagtggcagacttaatatggaaagtttttataattatgagtttgaaaaagcattttaagatgatacagaaagtatccaaaacaacagaaaaaaaaagccacgtcattttagatgaattgcgtgccttaaaatggtgaacgttagaaaattaaacaagtctggattccacaagtagttccaagtcaccaagtgacaaaaacaaggttaacattaaaaaagaaaaacaacaacaacgacaaaaagctccaagctgcagtggatttaattatgaggctaaaactacctcatactttccttggaagaactaattagctatggtttattgtagggttttgtttgtttgttttttaaagcaaatgatttccatattcctgattgatcttttttgtcatctttgcttcaaaattacataaaaggtgctcctttcccccttcttttatacaagtttcttgttcatattgtgaatagaaaagtttctgaacaacttttttggaacattttctatctatattccaaagcatgtaatatatacataaaaacgatttgttaaaaaaaaaaacctgcagcccggg

SEQ ID NO: 687985 - DNA, 218 bp, Homo sapiens
tactacaagaacaagatctggaggacatccccttgaattattacggaatcagcctcagtttcaacagatgagcaacctcattcagcagaatccttccttgcttcccagagtaactacagcagataggtcgagagaatcctcaaaaacttcagcaaataagacaacacacaggagcatataattcagatgtacaatgaaccaggtcaagcacagctgtt

SEQ ID NO: 687986 - DNA, 550 bp, Homo sapiens
  misc_feature (5)..(5): n is a, c, g, or t
  misc_feature (18)..(18): n is a, c, g, or t
  misc_feature (50)..(50): n is a, c, g, or t
aaaangaggcttctgacngggatgagcgcctcacccctctctgagagtgncagtcttgtagaaaattttaagatgcttgaatgtgattgacaacaaattatatccacaaagaccaatgaaatcataaggtgttagcttctcaaaatattctagaattttctttttgataactgattatgtaggtatagtgtgtgtttgtagttactgatttgagcatttctagaaataaagtcagggctgtaactatatttcatattttgaagacctaagaaaaaaattttcactggagaatggctataacatggcatagaaatcattaaaaatggatctttttgaatactgtttatattactctgtatatgatgcatcgagtaaaattaaacaagagatggataaaaatggcaagggaattttattctgttatcacaccaacagttgcttgtatagtttctgcatattagtctttagtagggcaagcagatctatttgttgttgcctgcaatttgtacacatcctacctatgctgatttaataaagtagtgatcatctc

SEQ ID NO: 687987 - DNA, 1287 bp, Homo sapiens
  misc_feature (535)..(535): n is a, c, g, or t
  misc_feature (571)..(571): n is a, c, g, or t
  misc_feature (578)..(578): n is a, c, g, or t
  misc_feature (592)..(592): n is a, c, g, or t
  misc_feature (739)..(739): n is a, c, g, or t
tcacttctacgatgagtccaaggctttcacctgcctggacgggttcggcacaccatcccatattgatcaggtcaacgatgactatagcgactgcaaagatggctctgacgagaccgagggcgacgggatgcctgtcctaatggcagcttccactgcacacaacactggctataagcccctgatagtatccccatccaaccagggtcaacagatggtgtcttgtgcacatgctgcgatggcaacaggaagagtacaacaagcggcgtcatctgtgagaacacctgcaaagagaagggccggtaaggagagagagtccctgacagcatgatggccgaggtcacccgcgaagggttccgtctgaagaagatccttattgaggactggaagaaggcacgggaggagaagcagaaaaagctcattgagctacaggctgggaagaagtctctggaagaccaggtggagatgctgcggacagtgaaggaggaagctgagaagccagagagagaggccaaagagcagcaccagaagctgtggngaagagcagctggctgctgccaaggcccaacaggangcaggangctggcgtgctgantgccttcaaggagctggatgatgacattggacgggacggtctcgggtgactgagctgcagactcacccggagctggacacagatggggatggggcgttgtcatgaagcggaagctcaggccctcctcagtgggggacacacagacangactgccacctctttctaccgaccgcgtctggggccgccatccaggggacaagtccgtgtcctgaggctcttgcccggcgatcttccagcagcttcttgcccctgacttgacggagcccaaggagggagcagccgccagtgccctcgtcgcccacaagaggaggaggcggaggaaggaggacggggcaggagagagaggctgacgaagaggaggggggggcggatcccggaggagggcccaccgcgcagtgtttacccccgctagccggcagccctgtgagtggagacaaatggcgcctagaagaagcaggcgcagggctcatcgggtgctgccaggggggccgcaacagtgcgatgaggcgagcgggcgcttgaggctgtgcgggtcctcggacctggcgcggagatgttttgggtttgcccagggggtttgttccttccgcgtgtttggtctccccccgattttatggctttcctctttttttggaacccactgggtccccctttctggtgtttgcccccatttgcgatattggggggggcccccc

SEQ ID NO: 687988 - DNA, 913 bp, Homo sapiens
tgaggctgcgacaggagaatcatttgaactcgggaggcagaggttgcagtgagccgagatcacaccattgcactccagcctgggcgatgagcgaaatgtctcaaaaaaaaaaaaagtgggggtctcgctgtgtggaccaggctgtctcgaattctgtggcctcaagtgatcctcccatttggggcctcccaaagtgttgggtatacaggcgtgaggcaccaaccttgcttggtggtgtcctctttaaaatactaggtttcaatgtaaattgcggtttaagataccttggtaaaatacccttatcaaatgagttttctataaaaactttgcattgtgtctagactttaacatactacgcaaataattcaggctcacacgtgtgcggcttaagtaagttcctcattgtcttacatttaaattaccgtctgtacaaattgaaggcagttacctcccatttcccggggagggtgacgcatagggtgcctggccacaatgggttattaggcccagtaagttgagcactgcaggttagactaatcccttggaacattacaggttgggccgacacccaggctattggtcgggttgggccacctttggggtattaggggttcaccacattgtccccgtgacgggctcaccaattaacggtgtggccagatttctaaacctgatgggtaacaggacgttttcccggaaacgagtgttttgttcgtggcccggtggtcaaatagcgaggaagggcttgcaattatgtgcacggtggggccatgtgtgggggtggaggccacctggagaacatagtgctacgatcaccgttttgccgcacactcactaactctcttggcagaccagcgaacatgttgcgattactgtgacgtatactaccgcgcgtatgggtggatacatcaca

SEQ ID NO: 687989 - DNA, 184 bp, Homo sapiens
ctcggctcccaagcagctgcactcaagttttaaagccactagattatattcatctctagagtgtcttgtaattgtaagattaaacactttttctctatcttactcaccaaacacatataaaccagtcctcttctgagccccacagcacttctttagtgcctccttatgataccgcacattcttc

SEQ ID NO: 687990 - DNA, 381 bp, Homo sapiens
ccaaccattcagtctcttgttacttaggtctggtcacaggttttcatggatttagggttcggtgattgactttagactgtagctcctaaggtctggttgatccctctagtattccccatggggtctcctggtatcaccccagaggttggagccaccatgcatgctagggatgtttcccactgcgatgccttcttcggacaggttgctcagatccagcggtttcccacagatctctcctgttcataccttgttcttcattctggtgttgaacttctccggagttttctctcgcctgatgtggaatcgatgagctatcgaggcgtccacgccaactggaccaagtagttcttgctgactttgcactggggactgggtcacttc

SEQ ID NO: 687991 - DNA, 245 bp, Homo sapiens
  misc_feature (166)..(166): n is a, c, g, or t
  misc_feature (175)..(175): n is a, c, g, or t
  misc_feature (178)..(178): n is a, c, g, or t
gcttgggtggacccggtcaacttcaagctcctaagccactgcctgctggtgaccctggcgcccacctccccgccgagttcaccctgggtgacgcctccctggacaagttcctgctttctgtgagcaccgtgctacctccaaataccgtgaagctggacctcggtgncatgcttcnttncttggcctccccccagcccctcctccccttcctgcacccgtacccccgtggtctttgaataaagtct

SEQ ID NO: 687992 - DNA, 584 bp, Homo sapiens
atcacaaggatgctggatttcatacaggaagccatggttgggagctggtggtggccatgatatgggtgggactagcagctcaggacttttcacaaagcctgtggcattgttcttcctccctctttgctgcctgcagtaccaagtcttatggttgctgccaccgtagcagagacctgtcctccgtgttgcaggttctacctcccacaaggaacatgcatttagttggctgcctttgcagacttcttttttacagtttgacttttccaagagtcggggacatttaggcaatccgcaagagtggaagttacattcctttaacccctgccttttgaagtctccatgtgtgcttgctgtggtcgctgagactcaaagtttaggacccccttcatgtatctctcatttgcgggttcagttgcctgctgttttccaactgcattttgtgtgtgtgtgtgcccagccccagtgttcttcttccccatttgtgccagatccacccagccccagctatcctccaaacccctgttaatcgggcgtgccttgtaaggaaggaggtgcatgctcataggcacatagcctttatctgt

SEQ ID NO: 687993 - DNA, 614 bp, Homo sapiens
agttctacaaatgaggaacacccccaattccgtttcaatcctaaacaagggatctaggatatacacaaagttaactaagttatgagagctgaatttccaatctctccaggttgaaacttcttcattaggccaaatcggtatgcaagtcggcactgtttcagcacctcattgaaaccctcacagagcttgatgtcacactggttctgggcacactccatatactgtttgatctcatagaggcaagactgcttgatactgtgctgactgggtcccctgaggctcctggtaagtaatgtcagacctcgcaggctcagcattacttcctccactaaagccctcagtaatggcgtgacccaatgtgtgctccacaacagagcccacagccacgccagctgcagtggttgccatctgggccatcagacctggctctcggggcgcatcagcacaagacccacctgcagatgggggtgccactgctggtggctgagcgactggtactggcctgggtgcagctctcatctgaggggcccggctgaccggagggaccatgaggaggttcggcttcgacttagacgcgccctccatggcactctctctctctctctctctctctc

SEQ ID NO: 687994 - DNA, 170 bp, Homo sapiens
aatacaaatctcttttggtgtttgttccatggcaaccactgaagtggtagctatcatcatccatgatcttcgaaagaccaaaatctgtaatttttatctctccacacgctgtaccatttactaaaagaatattacctggtttgaggtcatagtgtatgataggagggggg

SEQ ID NO: 687995 - DNA, 933 bp, Homo sapiens
taccatgctggaatttaggctttaaaaataatgtctcagggccaggtgtggtgattcatgcctgaaatcccactactttgtgaaggctgagggtgagaattgctagaggctagtgagctgtgactccaactgcatgtccagctcggagaaatacagagcgagaccgttgttctaaggaataatagtaataaaacatataaaataacgtttaatgattatttattgcaaggtcagagttacagatctgttataaattgtggaggaaatcttgtgataaagagatatgaaggaaaaagctttgtggtaaaagtgacatgtgaaggggctatgaagtaaagtatgctgcagattaatgtatgctaagtcaaaagtacagcttagtatttgctttaaaataaactcttctttcttctttaagagtatactatctcaaaactcattatgtgtcagagccctagagctggttagtgtaacactgactatgagtaggtgggcccacacttgagttgaggtgataccatggtgtcttcaggctctggaataggggtgtcactgcattgcaaagccaatgaatctgtttgagagtcctctccatttttcccagataaaaacctaatacaacgagtgacgattatcactcagctttggatcaaactataaacgtggtgcttcagagtatgggcagataaggttcataagcttcatcagaccgattttgaccctaaaggcgtgcaatcgtaagccccgaaaacctggggagggattgctgaacctgtatgttaagacaacacaggtgggtcaacaaagcggaccgcattggtgtcacgaggccgagtatacacgcacatcaaaattcagaagagcgggaacaagacaccaatagctgttaacatctcctcccgtgtcagttgtcctgttaatttatatattggc

SEQ ID NO: 687996 - DNA, 518 bp, Homo sapiens
cacagagtgaaaaactcttacgttacgtaggacactggatccacaggaaaaagggctgacaaagaatgagaaccaaagtccagaagaagtcactgcttactacaagaaaccccttcgggtatgacctcatacctcgagaaccacatccaaagaccctgcccccacaagacgtcctcgcaccactcaggtccccaacagccaagaagctcaggcaggaaaggagcagctatgggagcaagctggccaaggcagtggcgagcatgccccgggaggtgcgacagtgtaccacgacacggctcctcaagccttctgcaacaaagggcccaacgacccgcgaccccaagaacacccgtaagaagcgaccatatctaacgaaccacttggagactacaaacaaccccctggacacggccgactggttaggaccggatagagtaacactggagcaagacaaagacgaatggatcgaagcggacactagacctggccacccagccgccccagacaccgccagagaa

SEQ ID NO: 687997 - DNA, 258 bp, Homo sapiens
gtgattatagctctacctgctcgcaataggaggtgtctggtgtatttgatgttggaactgtcgcctccatcagagatgagtgccaccctcaatggctctgccactgctggaactgtagccacctccaatgccaagaccactgccatacgagtagctgcttcctccaccccggcctaagctactgccgacaccactggcaccgccatcgccactgtagacggtggactgcaccactgagatgttgcctttcggagaaaa

SEQ ID NO: 687998 - DNA, 1494 bp, Homo sapiens
taatgggtctctctctctcttttctctcttttacgtggggggggagacttctctctctctctccccgccctcctccctcccgcggggggctatacggggggccgcaggcgggacgcaggggggcggggcggtgggggtagtccgacaggggggtacacaccgcagtgggccaacaaccactactctgcaggggcaacacgggggagaactctatgaggagacgagaaacaagagagagcgcgcacacacaacaccagagagaaaaaaaaaagagagagagagaggacggcacaagagagaaaccacagcaacacacacagaagggaggcgaaaaggcacacacacacaggagaggaaaacatatcacccgccgagcggagagcgcagtgagaaaataaagagacgccccacaaaaaacaccaaccgagggaggacgcataacataagaaaagagaggggcgacccaaagaaaaacgagccagaaaacacaccgtgtgagggaaaaagaaagaagagacccagaaaaacacggagagagccatcacacacagaaagaatactaactctcgagagagaagaaccaaacccaaccgaaacacaaacaaaacaaacaaagaagacgacacagagaagagaagacaggacggaaaaaacaaaagaggaagcaataaaccacaaaagacacagagagagagacaacaccgagagagagaggcgaacgaacccacgaagagagacgagaaggcacacccaagacgaagagagaaagaacaccaacgacaaagagaacaaaaaacagagagccaaccccaaaaaaaagaaaaacgcaccgcgacaaaacaaacaacaaagagaaccaacaagacaaacaaaaacaaccacaacacgaagaaaacaaacaacccaagcgaacacggaaacaaaacaccaaatacgaaagagacataccacgaaaaaagcaaaaaacaaactaaaaaacacaaacaaagaaactataactaaaccaacgacgcacacaaaaaaaaacaagaccaggagaagactacccaagaaacaaaagcacagagcgtgctcacaccccagcaaaaaaaccgatcacaccaccacaaaacacatgaacacaaacaccagacgggcaaaaccagcccccgtgggacacacgacagaagaaaaccaaaataagggagaggacacacacgagggggaggagcaacaacaaccccaaccgggacaaagtacacaccaccagggagacagaagagacaacaaacaaagacgacgcaaccgagcagacaaaaaccaaacaacacgaatgaccaaccacaaggtgatgacacaaccagtcacaccagagcaagcgacggaggagaacctcacacacacaacgacgcagcaacgaggaggaacaaaaaaagaacacaccttcgataaacacgacacaacaaaagacaaggaagacaagaccccccccaaacgagaaagaatcccccccac

SEQ ID NO: 687999 - DNA, 1766 bp, Homo sapiens
cccacccatcgtcctgcccagcgacggcttccagagtggacttggaagccaactgcctggacagacagcatctaccagcacctgctctacgatccgccacttatctgtgtgggatctgctggagacagagccagaccaccggacagacccatgtgcaggccatggacagattggggccatcccagaccatgatgtgaacccagaggagtatgacaccacagtaggtccattgacagtggcaaacctgtgatgggacccactgaaagactttgcccaccctgggcttcaccaggggaaccccttgtgacccaggcaagaccccggtggaaggttgggacaccacgtgaagacgttaaacctccttacaccatttagcagtggaggagtggcacatcccccagtgggagcacacaacgaggaccacaccccacaccttgtgaacacgaggcaaacaccaggagaaccagatagagagcagagacttccacccagaggcagttggaggacccacaacccgagaacgaaccgtgacacatacagatcaaccattgacacatttgggctccaacagacccatacacacaagacaaaacaacacaagctaagggggccaccttggacgcgcccatgggaagggaaacccccccgggaacgtgggggacccaggacagtacccggcgacggggaccccccctatgattcgcacacacacaacgaccggatgccccccaaggcgggaacgggccacagcacgagaaaaccaggggaacacgtccaagaacagcacaccatacccagaggagagactagggcaaagcaaatcccccggcggaaaaagcggcaaaacaacatccatgcaaaagcaccacatatgacaggagcagagagaagttacaccaccaatcccacaaagacacaccggggaacacaaagacacgaggaagccaatacacaaggacaacaggaaagaggaacgaatcacactggcaacccacgatcataaacaaacaggggacggcgaaagcacagtggacaccggcaaggcacgcaccacccagagacaatagagaggaacatgggagccaccaagaaacacccagaaagaggaacatgacaaacaacaagacaaccccaatggaaacggcaacacacgcgagacacccaatcaaaaaataacaaaggaaacagcatgagaaaccaccgaacagaacaagaacagcaccgaaaacgccgaaaccacggacaagcgtcgacgagacacagtagaacaacaacgaggacgaagaaaccgagaacaacacagtagagaaagagaatcgaacacgggacacaagcaacgcacaccacacagagggagagcaaccggcgtacatcacagcactggacagaagcactagatagaagacaacacggaaacaccggccgcacagtgacgcgagcaaaacaccacaacagtagcgaggcacacacgggaccgacgcagccacacccgcaacgagtggagacaccagcacgcacaagcacacgaaaacagcgacagcaggaagagcaccccactcacacaacagacggagcaagcagagagtagacccgaccacaaagacgcacgagacactccgcaacagcagcgcagtatacaacggtgcaacgtcacagcagcgagacacaccgacgagcagacgaacgatcagaagcagacgcagagcagacacacgcaacagagacaacacagacagacaactagaagagacaggaagcacgaacaa

SEQ ID NO: 688000 - DNA, 1100 bp, Homo sapiens
atagtttatctcttaaacatctacacagccgcttagatgtagaatttcttgttgcttgttttctgcaaaggcagatacatttacaatatattcctagctcctggggctgcacaaactgttcggctggctttttgtccccactgctttagactaagctgggataggcaccatgcatattcagcttactataactaatactgtgataggcattccgtcagtcttcttcacaactaataggacagtctgttgaactagcattcctcgcaactataacccctaacaaacgccagtacctttaacattagtcctggcttccttgctacattaatttgtgatttccttgcccaaggcagctttctgtacctctacctctcgtgaccattgcagcaacgcctggttacgcacgtctgtataacgttccgtctggagcaaggtgttatcgcgacatcaccccttgcatgccaaaacatacgtctactctctcattctatgttccaccttacatggaacgtgggcttaacttctaaacgccgctcctactaacccaaggagtccctggatggccccatcatgcgtggccaaaaccacaccgtctaaccttaacgccttcaacgcattacagcttactactacatggggcccattgggcatgggctggaccccatcccccccaagttttgctcaccaccccttctcaaacgacaccttgcacagccaccttcaccttaacattaaagttcatccctcaccgggccttggaccccatgcgaaacactacaccgaaccacttactcgttcaatagcctgacgacctttaccctccgaagaagcacaccaaccgactactccccctaaaacaggtacccccctttacactctttccataccacgccctcttccatcacccatctcctccctctttgagcctttctccccaacccagacccgaaaacacgcccattcccctctagcgcctcaacacctcaaacactttcactccaacgaccgggacaaccccccactcttccccattataacccttcaactacacaccccccgtcaaacgactgccccaacatcctcaaccaccttcccttccc

SEQ ID NO: 688001 - DNA, 306 bp, Homo sapiens
gtcgacatgaaaaaaattaaaaaaattattatacatagtaagtggttgctcttttctgattgtaaaagtaatctaaattcattatagaaattttagaaaatacaaagccaccaaaagaaaattaagaactataattctgttatccacatttccttactggggtcagataaccagtgttttccactttgcaatatactgtgcatggttccctcccctactgatatgctacaatttattagccagtttgctattactgggacactttggcgatgtcctgaatttcagggtgtgtgtctgtgtactaga

SEQ ID NO: 688002 - DNA, 192 bp, Homo sapiens
ccactactggtttattttaaacaagagtctaatcacctgtacttgagttattactactctatcatacttagctaatttcatagctgctagaaatcttaatcaggtcaatctttttcacacttcttcttgtttcaatctacttaacttgtcttctggcagaataggccggactgttggtcgccacccttcaat

SEQ ID NO: 688003 - DNA, 310 bp, Homo sapiens
cactacagttgctaggtatcataacctaagactgttagatataaggtcatatactttataagttctacgtaactctttttcccatccctgattcttttctgagtattctgcagacagggaggggggggcaaatgtgtacccggaaatacagtgacaggatggacctcatacctcatagcctgtgctactccgcccgcctgtgagacatgcctcagtggctctcaaataccaatcttctcagctcgtagatcttagagatcactctgcctgctcccttagtgattagggcagggaaccctccccgcactgt

SEQ ID NO: 688004 - DNA, 202 bp, Homo sapiens
tgagagaccgtgttgcatcgcaaaccatgactagatcaaacaacacttgttccacaatgaggaagaagcatttgcatatggagcctattgatataactgttaaagaaacaaaagccaagaggaagaggaagctaacttgttgacagtgtcaaacgacgttggatagcaagacacattagagccccaacttcagtgattattc

SEQ ID NO: 688005 - DNA, 401 bp, Homo sapiens
ttggttttctgtccttgctgtagtttgctcagaatggtggtttccagcttcatccatgtccctacaaaggacatgaactcatcctttttttatgactgcatagtattccatggtgtatatgccacattttcttaatccagtctatcattgatgggcatttgggttggttccaagtctttgctattttgaatagtgctgcagtaaacatatatgtgcatgtgtcttcagagcagcatgatttataatcctttgggtatatacccagtaatgggattgctcggtctggtatttctagttctagatccttgaggaatcgccccaatggttgaactagtttacagtcccaccaacagtgtttagtgattgccattctctggtgtgagagcgtgctcacttcggcg

SEQ ID NO: 688006 - DNA, 374 bp, Homo sapiens
cacatagtggatatctcattctaaagtctgtaccattagcagcactatggcacatcttatctatactttatatactattactccagtaatacatgtttactttaaaaatagttgcagtgaagaaaaacctttaactagagaaatcatggcaaaccgtcttcatttaccattggctatgatggacttcatattgtatattaaaaatgcatattgatcactataattctaaaacaattatttaaataacaccagcaggttgctaaaagaaggcattatatctaaagttatactaataggtggtatagcagatatataaaatttaagagttgcttttacagttaacaatggaatatgccttctctgctatgtctgaa

SEQ ID NO: 688007 - DNA, 261 bp, Homo sapiens
  misc_feature (8)..(8): n is a, c, g, or t
taggagtnggaggctgcagtgagacagattaacaccctgtctcaattaaaaaaacaaagaaatgtgcttaatgaaaagcgtagccctcttcagggtgtgctctctgcatctccagagagtggaatgggaattagcttatggtttttgcctgcttcttcccttcgggcaagtaacacgccctttcaagccttggtgtttctttttttgggcacagcagttaatgtgtagaaaccccaggcctgggttctgatacggtttgga

SEQ ID NO: 688008 - DNA, 348 bp, Homo sapiens
ctagagtatccccggcagtgcagagagaactgaaacatcatagcagagtgtgtaagactattctatgattgtacatcctagtataaagagaaagcacaatatatagtccgggtttcatgaaagtttgaccatgatgggtaacctattgagcttatatgttcacaaaaagaatattttctgaaacttggcgcttctagagcataatgtggctcttgctttccagcgagatttaaccattctcttgcaagtgggacgtttcaataaattgtggtacaatttatgtttattatgccgctttacaaagagagacgctcttacaaatttctggcccttcattctctctccagt

SEQ ID NO: 688009 - DNA, 641 bp, Homo sapiens
attactagattccataaccccggggttgaaaaattttttgcccctttttataattttttttgggggcaaatgggtgaaccccccaacaaaattccccgggggttgaaaatttggtgaaccttgaatggacattggtgtaaaattagcaaacccaaaaccccctggttgttctttggaaaaaagccctccaaagggttgaaaccaaataaaaaaaacattgggaattggtaaaaaaaaagaatgcctttgttatgcaaaactttttcccaaaaaaaaaaaaggcctttgtttaaggcccaaataagggtttaatttttttaaaaaaaaagccccaaaaaaattatttttgggaaaaaaagggtttctccctcccccctaattaaggggaaaccaagggggggaggttttttttaaacctggttttactttccccaaatttaaggagaggcccacccctatttaagggggcccagaaaaaaaaaaaaaggggggggttttttttaaaaaaaaaaaaaaggttaaaaaaggcgggggaaaaattttaataaagtttcgggctcctaatgggggggcctttgtggcccaaaggaaaacccacactttggaaaacccttgggcggaatttcttggagcccgggggg

SEQ ID NO: 688010 - DNA, 360 bp, Homo sapiens
aggaggtaccccacggccattcaggatgaaagctgcggtgctgacctaggccgtgctcttcctgacagtgagccaggctcggaattcctggcgacgggatgaacccccccagagcccctgggaacgagtgaatgacctggccactgtgtacatggatgtgctctaggaccgtggcagctactctgtgttctaggttgaaggctgctgcttgggcagctcaacctaaagctccttgacaactgggacagcgtgacctcgatcttcctcaagctgcgccagctcgggcctgtgacccatgagttctgggataacctgtaggccaatgcgcacgcctacgtgcacgacgtccagaagagtggc

SEQ ID NO: 688011 - DNA, 156 bp, Homo sapiens
  misc_feature (69)..(69): n is a, c, g, or t
gtcaaggctgagcccagtgtgtcaatagtttggtctctgtaacaccagaattcttcacccacttgcttnggaggacgaggaagatgctagactgtaatctgtctattccctgccatcaagacaataaatgaatcagaaccgagttcaatgattttc

SEQ ID NO: 688012 - DNA, 400 bp, Homo sapiens
tcctcggtggtcagacgcatgtctcatagcggtctcacttgcattgggcatgcttcggaacatatatacctatcttccagaatggtagcgggtctggggtaatgctagctcttgtaacagttgagccagtagtaaacagtggacgtaatctagctgagataaggatgacgtagtgctcttacaggtgtctgcgtcatgtgtccatcgcaggcggttcctaatggatcctatgcgtcttgtctgtatgtaaggatttccattccatctatagtattggtattcacagctgtcttcagttaagttctctgctccagtgtcagctatggaattcggcagtgggtaacgcaagctcgattacaggagaagagtggtctaatacaccattatctgtatatgacac

SEQ ID NO: 688013 - DNA, 246 bp, Homo sapiens
  misc_feature (12)..(12): n is a, c, g, or t
  misc_feature (76)..(76): n is a, c, g, or t
tcggcgtctgtnaagcagaagggatgtttgtcacttgttctgcaacttgggctgggagtggtggctcatgcctgtnatccctgcactttgggaggctaaggtgggagggttgcttaaggcgaggagttggagaccagcctgggcaacatagtgagaccccatctctacaattaaaaaaacaaattagttgggtgtggtggcgcacgctgtggtcccagctacgcaggaggctgaggtgggaggttc

SEQ ID NO: 688014 - DNA, 252 bp, Homo sapiens
gatactgaccactggaaatcgcagcgttttgctccatcaatgaaatacgctttcgcatttcttcacggggcgcgccctatgcttcttagcgtcgcttgtcaaaatatcagctcatctgtctctaatgaggtactctggcagctccgttcatgtcattgtgtataatacccgatatcatactgcgtgtttcctcgctaccgtccacttcgatcttacctgggtcataagctgtttcctgaatatagatagagg

SEQ ID NO: 688015 - DNA, 306 bp, Homo sapiens
atagaggctcagaagaaaccaaccctgctgataccttcatcttggactttcagcctgcagaaacatgagacaatcaatttatgttgtctaaaccacccagtccatggtactttgtttacagcagcctcagcaaacaaatgcactggtttagaacacaccagcagctgggcacggtggcgcacgactgtaatcccatcactttgggaggccaaggggggaggatcacttgaggttagaagatagggaccagcctggccaacatggtgaaaccacgtctctactaaaaatacaaaaaattagccaggc

SEQ ID NO: 688016 - DNA, 422 bp, Homo sapiens
atgggtacgctccgggatattccatgaacgccatcttgatatccgcgtaaaaatgctctttccaacggatcacgcttacagtcttctcatagggtgtatccctcacttgttgactgtctagattccttcggccttgtccaaggccgggcagagtttttctgccgttggtgggctcgatgccgacatagaaagccgatgtgtcggaaccgtcaaggacgccaacctgtgttgagttctaaccaataggacacatgtattcaaatgatcgtaaagtcataagcacgtaacgataacaatgctatagccatcagctgagatggttattcgccccttttatagggcaaagccagctatgatgtgccctgcacagagaaaaggtttaatccctaggagagaatgaccgcctgttgccgatattcaac

SEQ ID NO: 688017 - DNA, 214 bp, Homo sapiens
cggagacacttacggctacctccgcctcctctagaatattgatccatgatccagtatttctatattaacccactccgcttgtttcttctgacgcttcagcctagagatcaaaagtagtttctgacattctaagagaaaccagtcagaggaactaaatacactccaatattttgttcactgcgagtatacctgtactcaatttcgtatagttgtc

SEQ ID NO: 688018 - DNA, 306 bp, Homo sapiens
catcccccccttacacttccttacccttctctaagataccattcttcactttcctcaggctgtgtgtgtgtgtgtgtgtgtgtgtgtgtgtgtgtgtgtgtgcgcgcgcgcgtgtttagaggcacagtcttgcgtgtcgccccagttggagtgcagtggggtgcctgctaggtacaagtgattcttcgtgtctcagcctcccaaatatctgggactacaggcgcatgctaacaccaccgagctaattgttgtatttttagtcagatatggtgcattttgccatgctggccaaagatggtctttgaa

SEQ ID NO: 688019 - DNA, 366 bp, Homo sapiens
  misc_feature (154)..(154): n is a, c, g, or t
  misc_feature (268)..(269): n is a, c, g, or t
tgagtcgtagtccattatctgtgtacaccacatcttgtttatctattcatccatggatgggcatttcaggtgttcctacctttcggctattattgtaaataatgctgctatgaacattcacgtacaagttttttgtttaccttagtgtgggttnttaattttgtatttctcttttcaccatgtttaaaaaccatgtgcatttttaatttctctgcaaacttgctattcctgggcattgcataatgggttgggggggctcccttgggcnntttttttttttttttttttttataaagaaccaggatctaccctttggtgcacgcgggggggttttttggaaattttgggctcaaacccaccccctgg

SEQ ID NO: 688020 - DNA, 191 bp, Homo sapiens
taaaaaaaaattaaacccgggggggggggcccccccttataaccccaccttttgggggggtgggggcgggaaaaaatttgggggcaggggtttgaaacccccccggaaaaaatggggaaacccccgtttttaaaaaaaagcaaaaaataaccgggggggggggagcaaaccttggcccccaagttacaaag

SEQ ID NO: 688021 - DNA, 119 bp, Homo sapiens
aacggttgaggtacagctcgagatgtaaccaaagctttactgaaccctcgacccaaatcggtaactcaagtgcatcaatcataatgaacctccccaaactcagtatttatgattatttt

SEQ ID NO: 688022 - DNA, 124 bp, Homo sapiens
ttccgaatttgaatgaaaaacttaatgccatggattttttttttttgcaagacacctgtttatcattttgtttaaatgtaaatgtccccttaggcttttgaaataaatttccttttgtaatttt

SEQ ID NO: 688023 - DNA, 184 bp, Homo sapiens
aagcagttaatacagactcacaatgtagcttggattacagtgcgggtcgcatacacccagctaatttatctattttaagtagagatggggtttcaccatgttggccaggttggtcttgaactcccgacctcaggtgatctgcccggcttgggttcccaaatgtgctgggacttacacggcgtga

SEQ ID NO: 688024 - DNA, 540 bp, Homo sapiens
tgagatggagtcttgctctgttgcccaggctggagtgcagtggcatgatcgtggctcactgcaacctctacctcccgggttcaagcagttctcctgcctcagcctcccaagtagctgggactacaggcacttgccaccacaccgggctaatttttttgtatttttagtagagatggggtttcgccatgttggccaggctggtctcgaactcttgacctcaggtgatctgcccgccttggcctcccgaagtgcgggattacaggcacgagccactgcacccggcccatatttcttttaaagaaagattggaaaatacagaaagttagaaagaacaataaaaaggccaaaatctactaccatgttttttagtgcatgtccttcagtctttatatgtaaattgtttttaatagttatgtaattatatagttttacatggcctaatcttttcaccttatataaataataagcaatacacacgcacacacacattttggcaccttatataaataataagcaatacacacacacacacatttcgga

SEQ ID NO: 688025 - DNA, 409 bp, Homo sapiens
atagcgcaccgtaccccagataacttagaagggtcaattcgtgagggtctggtaagggacgggatcgatacatttgagcgcaccgtgcccaatcctgacatgcgagcggcaatttcagaggttgctcatcaatgttcttccgctcctgcgtggtttgaattgcaacctccgcgagtgaaagacggctatagcagcagcgttggcgaccggcagtacttcatcgactacaacccggcggtctcaaggagcaagtgcaacagtcagttaacttttctgcacctgctaagcgaacgcaatcccgcttccaaaacatcatcatcaatggacgtctgaccgaaccgagccgatctgcttgcacacgattttcactgccgaaagcttaccccatgacaagctcttccgtcgctga

SEQ ID NO: 688026 - DNA, 156 bp, Homo sapiens
agtaggtagctgcagataatgctagcggttaggcgtacggacagagactattgtgaatgaatgagtagagctgatggtttcgataataactagtatggggataaggggtgtaggtgtgcccatgtgtgtaagcaagtgggctagaggcatttataa

SEQ ID NO: 688027 - DNA, 189 bp, Homo sapiens
gagtggcagtgacgagagcctccagaggacgaggaggaagaggacggaagggagaaggagaatgtgacagttctggagcaaagacactgtgcagtagacagatgtggcatgctatgggcaggtttactagagaatcatggtgcattctctggcaacacgtattgacatgaagtatggaacaatagataa

SEQ ID NO: 688028 - DNA, 669 bp, Homo sapiens
atgtcagggaacgtttctcctcattgctgtcatggcaccctgtgtgtggctctgaccagacttagctatccgctttgatttctgtctttcaggggctaagtcctgcctacatcctcagtcagcatgctgcctaacacataacagatcctaagcaaatattgggtggatgaaaatcactaccattcaaggcttcattgtatttatcagtaaaactgaaataatatctaatggggtcgagaagatttactgaaaatatatatttgaaagggctttgcagttttaagtactgtacctatgtgcattgctgttacattcaggagatttctgagttttagacagtcccaagcttcagcttaaaatctgtagactgcagcccgtttctgaaacgtttgtactacgtgttgactaggaggaacaatgacagactctgtagtcaccggaaatacttaaggaatcatgaggtactatgtatttccttaaattatactgttttttaaagctgaagtatctaatagttaatgggttgtccaaatttgtcagaacatttgactgtaatttaatgtctcaccatttttcaaaaagatatattaataccaaatattaaaatgtgtcaagactaaatctgagttagtgtcttaacacacattttccaaaatctgtccgtgatca

SEQ ID NO: 688029 - DNA, 629 bp, Homo sapiens
gggatacaggtgtaagcattgcccccggcgggcacattgctttataactctatttaattccttgcttgcacgttgaatagatctaaatgactgggggaaaagtaaaaacatagtctttagtccctttcattgtggtaaattcactgaatgatagacggaaatttcagccttcttgggtctactgccaggttctgtagttatttgtatgtctcatggagaaatcctcattgattacactgtatggctaaactgacttaaaacagataactgagcctatttcaaaattgaaaattctttaaaatggaaagttagtactctattgttcccaaactgttggattgcatgccattttcccaaactcacagacgttgataagatttcaggcaaggggaacaaggaaggggtcacagtggaagcgaattcttcccctttttctgactgtgtttgcccacctgtcctttacccttcgcagttctattctgagaggtatgtgaggaagatgggagccactgctgctagatagttgccattaaacaggtttcatggcttttgtgggagcctccttttcattagtatttgcacatgttcaccagccaagaaccaccggggtacgagctcaaatcgtaata

SEQ ID NO: 688030 - DNA, 244 bp, Homo sapiens
tttagaagttcatagcagatttcgtgggccatggtgtcttgtacttgtggctcaccacttctttaatttcaggaactgatgtgcatgcctagttttagaagtttcaatagccattgccattcactttttcttatttggagaaaagaagacactgcgaacgtggaaccaaccttcaattctttttttggtgataggcagggttgtaagaactcaataaaatgctattgaaacttctaaaactatg

SEQ ID NO: 688031 - DNA, 176 bp, Homo sapiens
atcagctggtaccgtatgaattctatccagaagagataactgtactgaattactaataagaccataagctaccatatatagtttcttcttaaaaaacaaaaacaaatacaatttcctcaaccatgcaggaatgccaggacagggctataaagatgcaagatttgctgcctcctata

SEQ ID NO: 688032 - DNA, 313 bp, Homo sapiens
  misc_feature (76)..(77): n is a, c, g, or t
  misc_feature (86)..(86): n is a, c, g, or t
  misc_feature (105)..(105): n is a, c, g, or t
  misc_feature (222)..(222): n is a, c, g, or t
  misc_feature (245)..(245): n is a, c, g, or t
cggcggatgcatactttatttttgatttccctttttgatgtttattttcatgaaaaatggggtgaagggggtacannaagttggcngtgggagcgggggatctcngataaacctgttgccctctgagtgtttcccatagtaaacgtagcgacacttccccaggacacctgccttttcccacctctaacttccaagatcagtgacaagagggggttggcgaanaaaatgaggggggggcgtctcanggactctgaatcttctgctggggttttgggacaggggctatccacatgccaacatttccacgtctgca

SEQ ID NO: 688033 - DNA, 234 bp, Homo sapiens
gaagaaataccttagaccatgcaagtttccgcatctctgtgaactttcccaactttagtttcagaattccatctttctaccctccgcaaacgttgaaagtgatacggccagtcaagcctgattacttgaccaaactcctccatcttagttaataaaaattccggtcaaatggtttccttgtcactagagacctagtttgggattccccaggctgaaaaaaaaaacagtccacgc

SEQ ID NO: 688034 - DNA, 199 bp, Homo sapiens
aatattatcattgcccttcactgtctctggaaaattacttaaacttatagacagtttacctcaaaataaggtgggataataataacagttctctttcaacttctgggtacctcaggttataaaatgccatgacagcacagaactatccacagcagcaaagacatggactcaaactaggtgcccatcaatggtgcaatga

SEQ ID NO: 688035 - DNA, 793 bp, Homo sapiens
gcatcgcagagcgcagcgccggcgcggggccgcgagaacgcagcgcaggggagcagcccgaggcggacaccgcgagccgcccggcactcccgcagtccagccgtgctcctctagcccgtgccacggctccgctgcgggccacccaggattactcgcgtctggctccaggcgccgagaaggcgcgctgggcgcccgtggccgccgcgccagctcctcctcctccctgctgctcctgctccctggtggcgagcgcgcagcccctgagccctgccctgcgcctcccggagccctccccccctgctgctcccatgcgctgcgggtgggtcatgaggcacagctgccctcgcgtttctagcgcctaaggaatgcagtgtaaggcatcatgctgtgcgtgctgtgctgtgctggctggatggcgtgagtgctggctgggtgcatgactcctgtccttgtgaccatgctgctgctcctactggacaattagcgtcctgtgccccttgcccatggctctgtcccctggcctggcatgtaccaatgcctttttgtgcactgcctgtgccccccttctgacccccttgcgccaggccaaccgcctgccaatcaaggtgctgaagatgctgacggcacgaactggccacattttgcaccccgagtacctgcagcccctgccttccacgccggtcagccccatcgagctcgatgccaagaagagcccgctggcgctgttggcgcaacatgttcgcgatcgggaaggccggacccctcgccctcctggacggccaccactttaccc

SEQ ID NO: 688036 - DNA, 122 bp, Homo sapiens
  misc_feature (89)..(89): n is a, c, g, or t
cagttcttgaaggtgacaacttagagactcctatcacactcatcagtatgtggccagagcactatgacccctcacaatctcctcaactntttcatgatgacacccattcaagaatagaacaa

SEQ ID NO: 688037 - DNA, 965 bp, Homo sapiens
cgctgtggttcaggcttgtaatcccagctctcagggagtctactaggcggaagagatagctggatcccaggagttcgacgagctgcctgggctgatatatgcttgggaccccgttgtcctgataaatgattaatcaaccaaatgttatgaagggaatcttggtgcgaacgagactctcaggaaagaggggatgaaattgcaagacgtttgggctggagatcttcaaagtaagcatcaagctgtgttccaggggttcccagaggacatgtgcggaatagccccatgtcgtatcaaattgttatagagaggatgcccgcgtgtaagcttgagagcgagtactagggagagaattgcaacaaggcgtagtttgtccgccaaaggtgggtctcagatagccaggagacacgtgggggactgttttcaaaacacagcgcctcgcggggggttaaatgtacattgggccgcaaaccataatgaagatgtgagcccttgttgatgtgggggaaccagggaagacgagatgtcactgtttaaattcatgttcaccccataagacattggttgttaacccactgcattggcagaaaactttgaatgtcactgcatgaattaattttcaggagagggacctatcccaaagtgtgggagttggatgctatgcaaagtcccttggaagaagggagtttcaaggtatagtgggggtcataaagattgaatcaagaatcaagctatgggaagtctaggcacaggttttgaaaggcttgcgacagttgaaaagtggctcatttaaggtttgcgtgaatgcttggcagtttgtacatttaacagtggtgaaggtattgggctgtcaggtaaaaagaattgaagtattcctttggggagcgtgtgtttgtatatacacaaaaaaaaaagatggggggcgagagaaagatgggcagagaggaagacgaactgagtgtaaagcg

SEQ ID NO: 688038 - DNA, 462 bp, Homo sapiens
tctctatgaaaaatttaaaaaattaggccaggtgtggtggctcacacctgtaatcccagcaatttgggaggccgaggtgggtggatcgcctgaggtcaaaagttcaagacttagcctggccagtatggtgaaaacccgtctctactaacaatacaaaaattagccaggtatggtggtgggtgcctgtaattctagctatttgggaagctgaggcaggagaatcgcttgaacctgggaggtggaggttgcagtgaaccgagatcgtgcctttgcactccagcctgggtgacgagtgaaactctggtgtttttttacttccttttttttttttgaattcccagcttctcaggaggcagaggtgggagaattgcttgagctcaggagtttgaggctgcagtaagctatgattgccccactgccctccaggctgggagaaagcaaaacactgtctcacaaaaaaaa

SEQ ID NO: 688039 - DNA, 341 bp, Homo sapiens
  misc_feature (22)..(22): n is a, c, g, or t
  misc_feature (206)..(206): n is a, c, g, or t
  misc_feature (280)..(280): n is a, c, g, or t
  misc_feature (298)..(298): n is a, c, g, or t
gtcgcatctaaggatgagaggntctgccggtccaccctgaatcactttcctaccctacaaatactttcttccatggctcagaaggagctcaaagccctagtggtggaaagaccctcgacagcagtggtcctcagatttccttgtgcaacagtacaacaaagagggcttgtggatagagatttcccttactctggttaattggtttnaggtacggcccaggaatctgcatccaatgtgctagtctcaggacatgttgatataggcctttggaccacatttnatgagcccttctttcctncctggtggggcacagtgtatcacacaacctcttgctatggact

SEQ ID NO: 688040 - DNA, 81 bp, Homo sapiens
gccgaggacacggccgtgtatcactgtactagaggatacagtggccgcgcagcttatgcttttgatatctggggccaaggg

SEQ ID NO: 688041 - DNA, 358 bp, Homo sapiens
  misc_feature (4)..(4): n is a, c, g, or t
  misc_feature (106)..(106): n is a, c, g, or t
  misc_feature (131)..(131): n is a, c, g, or t
  misc_feature (137)..(137): n is a, c, g, or t
  misc_feature (185)..(185): n is a, c, g, or t
  misc_feature (194)..(194): n is a, c, g, or t
  misc_feature (209)..(209): n is a, c, g, or t
  misc_feature (237)..(237): n is a, c, g, or t
  misc_feature (354)..(354): n is a, c, g, or t
ctcngggttggggcaatgtgggctctgtcttggctgggcttgtggtggagcgttaatgtgggccatggcggtgcataacccagctcctggcttgggaggcattggngtctgggcacaggtgtgtgccatgnccgggngaagctgtgcgcagctccacctgcctgccaccgttgcctctgttctgntgggcgggngtccagctccaaggntgggtgggtgactcagctgcttatcgcnccctgggaagggtgggggtgggctcatctctgacagtgacatgcggctctcccacctgaggcctgtctcctagctgagcgcaggtaagacagctaggactgagggcctgctaggtcnggag

SEQ ID NO: 688042 - DNA, 409 bp, Homo sapiens
aaggtggtccggcacctggaaaaaaaacctggtttgcctccagggcagcctgtttttatccctgggggccccgaggggggggacgtttaaaccatggccccctacgtccaggatttccccccaaaaatgttgggtttggccgggtccccccaacaggttgccccgggtagtcccagtttccgggggtttttcaatcccggccccaaggattagggcccgggttacattgggggcccccccattgccatttacctggtcaaccccgggggccttttcccggattttttcggccggagcagatcggtttagcagatttcaaacagtgggggggggcccatgggggctttccccagtgtcctttttttagcccccccagtttgggccccctcctttaacggggggggtttta

SEQ ID NO: 688043 - DNA, 371 bp, Homo sapiens
agtatcatagacgctggtatgtgtctaatcctttctcactcacgatgctgaagtaccagtggaatcaaagtgtcaaactacgcaaaaacgatatgtggcttatgggtattagtgtctcattcttggtatatgcttgtgttaactgcccattggcctgaaaatactcattgtaagcctgaaaaaaaaatctttcccactgtttattctgcttgtcgtaagaatcaaatgaaataatgtatgttttaagcaccttgtaaactgtaccctatcaatgtaaaatgtcaaggtgtgttgttatttcattaattacttctcagtacagaatggaatttcctatgcaccactgtagactaggaaatgctgaaaacaac

SEQ ID NO: 688044 - DNA, 298 bp, Homo sapiens
tacaactcagctctgtacccagcagcatagatattaccgactccatctcaaaaaaaaaaaaataagaaaaactttttaccgtcctgattaccacatcagcaaccctaaaaaaacaaaaaacaaccccaaaactttttaaaaatttattattgcaaaattatcattatccattaatttttaaccttaattattatccttattggtatgatttataggcaatttagaaagaatgcagaaaccaagggatcctcttaattgtgcgagcagaggctattttccagaaattggagtctcactt

SEQ ID NO: 688045 - DNA, 129 bp, Homo sapiens
gtttatctagaggtcccgacagacctgtctgccggatcgaaggcaccgtcccgtcgggctggacaccacgcggctttcctgccggtcatctccgccacccgctggggccgcccagttggtcgatagagc

SEQ ID NO: 688046 - DNA, 282 bp, Homo sapiens
caaaaaaaatccaaattttgaggttcttggaaccattttttagtttcaggcatattaagtttgggccccaaggggctggggaaaaagggccaattcttttaaaaactggtaaatcccggccaccaccggaagttttaagcttctggtcccccctttttaagtggagggggggggggaaagcccaagcctttatttccccggttttattttcaacaagggaacctggtttctggctttgcaaaaatttggctttcccccttttcctttaaaacaaaggttcca

SEQ ID NO: 688047 - DNA, 703 bp, Homo sapiens
tattttcaaaaaaggacttgtttttcggcaagggtaaaaaaccacaatccttttgcaaagattcagcctgcccaacaaaagggttcaaaagaattaccccaattaccagtggcaatcaagaaattcttctttccccaattaaaactgaggttgtcaaggttcctgtcgtccctcaagtaacgtgtggaattctccagaaaagataaacgtgttgggaatctcttattttttggataggctaatacctcgcatgtgtcacaacgtaaacagggtggttaataattcgtcccacaagtaaaaaacttcatcaaattgtattccccttttttggcaacaaggggtgccaagtccttacgccaagcttgattttagggcccataacattctcagggagtctgggtatgctggtaaaatcagccagatgctggtgattttgacaccattacattttgatcgggaccctcttcaaaagcagccttcatgccagagatctgtggttattcgaacctttattactagtgacttcatggctggtatacctgcaacacctggcaatgagatccctgtagaggtggtattaaagatggtcactgagattaagaagattcctggtatttctcgaattatgtatgacttaacatcaaagcccccaggaactactgagtgggagtaataaacttcttgttctattaaaaaaaaaaaa

SEQ ID NO: 688048 - DNA, 419 bp, Homo sapiens
  misc_feature (91)..(91): n is a, c, g, or t
  misc_feature (110)..(110): n is a, c, g, or t
ttaccctggtcacctgctccatcctgactcatctcgggtcacctgctttgaccggagtcacctttagttacctcttcctaaaccgtccttncccaccaaactgctcaccnccgccactctggcttcgtactcctgctctttttaaaatagccagtcggaattagcttagactgtgtggtccaaccctagccaataagggaacgacacagcagtagggactacctgcctcagggataagacctcctgtccctcccgtgtccaggtatgctcttgccatggctccacctgtgagggtcaccctttatgcaaaaagtcaaaactgccttgctgagaacattaaatggatgctcgagtgctatttctctgtggcactggggaacaagcattttgcatttctaacagtccaggcaccagccttt

SEQ ID NO: 688049 - DNA, 530 bp, Homo sapiens
  misc_feature (176)..(176): n is a, c, g, or t
tagaggagctgtaactgggtcgagtcttatgctcgcatctgttctagctgttctttatttcgggtcttttctccgtttagacttatgtgacattccaggtgaggaacagggatgagaaagtagaattactcctggtacatttattccaaatcctataacttcataaggtaaatgtntgggtgggcttaaacaattcaaaactagctgggcatggtggctcacacctgtaatcccagcactttaggaggccagggtgggcagatcacttgaggtcaggagttcgagaccaaactggccaacacggtgaaaccccgtctctactaaaaatataaaaattagctgggggtggtggtgcatgcctgtaatcccagctactcaggaggctgaggcaggagaatcgcttgaacccgggaggtggcagttaccaagagccaagatcgcgccattgcactccagcctgggccaccgagccagactccgcctcccacccacccacccccccccccccctccccccccacccccccaccc

SEQ ID NO: 688050 - DNA, 820 bp, Homo sapiens
  misc_feature (657)..(658): n is a, c, g, or t
gcctttcctttggcaaggatggcggagtacgagttgattactcgcatccgtgcagtttttgtgatcggtatctattcattgccgcttcttgagattgtcctctctggtcatccgtgcagcatgatcatcaatcgacataaggaatcttagtcactccaggtttaaataagggaccgttcttgagtgattaccgaacatggtggactctgcttagtggatgtaataccataaaccattaattctggatggatattcgctcatgctatgtagatgatgacgaaaaggaacactacaggtggttgcagcaagatgaagacagcttctagggaagaaactggaaggctaaggttgtgaatgattgtttggatagatcacaggataacgtacgagaggcaacaagtgcaaggtcaagctaggtgatggtatgagtgcttcatttgaagtaacttggcggatgagcgtggtttaagtgcaaggaactagtttagattacagtcgtacatgatactgcagtaaattccacgttacgatatgtgggaacttactcaggagcacgcagaatatctttattgtttttagagtgctggttccagcaacagatagaaatgctttaagttcactctggggaaagctggcctctgaaatcttaatgcaganntgggatgcagccatggaagaacctttacacggtttaaaagagaccatagattcataattctgtgagttctccacttcagtctcttcagcagagaacatggcttcattccacgtggtctctgaagggtcttcaatcaccccaaaggtcggataatatcattga

SEQ ID NO: 688051 - DNA, 165 bp, Homo sapiens
ccgggagctgccgacggacggagcgcccccgccccctgccggcttccggccgccgccgccatgcccttctccaacagccacaacgcagtgaagctgcgctacccggccgaggacgagttccccgacctgagcgcccacaatcagaccacatggccaaggtgctga

SEQ ID NO: 688052 - DNA, 280 bp, Homo sapiens
  misc_feature (117)..(118): n is a, c, g, or t
ctcttttaaccgtgtaaggtcttccatggctgcatcccaattctgcattaagatttcagatagaaatgctttaagttcactctggggaaagctggcctctgaaatcttaatgcaganntgggatgcagccatggaagaacctttacacggtttaaaagagaccatagattcataattctgtgagttctccacttcagtctcttcagcagagaacatggcttcattccacgtggtctctgaagggtcttcaatcaccccaaaggtcggataatatcattga

SEQ ID NO: 688053 - DNA, 144 bp, Homo sapiens
tttaatgccttatcagtagacactgccacacactcctcagaggatgtcgaacagatctgtctttgacttacgacccattttgcaacgacttaaagccggaggaacacattttcagattgttaaataagaggtctgattctgact

SEQ ID NO: 688054 - DNA, 155 bp, Homo sapiens
cacactgaaaatgcgggggcttttggtcccccccgcccccctggacctcctgatcccactgactctcccagcgctggttttgactttagcttcctgccccggccacctcaagagaaggctcacgattgtgtccgctactaccgggctgatgatgc

SEQ ID NO: 688055 - DNA, 373 bp, Homo sapiens
gagattaacaagtttcattttataattgagatcaaagcattggaatctgccctgtatagtacgccgtagcttcggtatttgtgttggatgtttcctgcagttacacttgccagccccactcacaatagttgttcatttcattgggtcactggctttatttgctagtcttgtctgtgaaccgagcctctgcctcagttttattacttgaaatcttggccggtgctttatagggaacatacattcggctatgtcacttgtactgattgtatatttctctagttaagaatgagggaatggggaggtttgctttctacaccagtgccttctgcatttgacttagaaatttttagtgtgggtcctccgtctagagagg

SEQ ID NO: 688056 - DNA, 134 bp, Homo sapiens
accggtactggcacccactcgactcacggactcacgcaccgttgcgcggccttctgctccgggtcgggacgtgccactgtgcttggcacacgttgacctcacggtgtgtgtgggggactcctctacgacgtcga

SEQ ID NO: 688057 - DNA, 256 bp, Homo sapiens
ttaccgcaggatgatggaagcgacgggccgtacaaagacagaagcgttggtttcactgagacagtgctgattctctcaaatagagcttgaaggataaatctttatttttgtatcaacaaaacttcgatacaaaatggaagaaaataatctacagtgcactagtgtgggtgatggtaattttgaagaagttcccagggagacggaaattcagtttaaacctacactatacagacagagggaccagatcggaaaaaat

SEQ ID NO: 688058 - DNA, 89 bp, Homo sapiens
  misc_feature (64)..(64): n is a, c, g, or t
actggatatgttatttaaagttacaaaagaggggagaaaaagaaaatcttgatggtcactctgntatgagcttaatggggttcaagcgg

SEQ ID NO: 688059 - DNA, 222 bp, Homo sapiens
cttgtcaaactgtggacttaaccccacttaagcgccctctagctctaagcttgcgtggtgtgatggggaagccaggctgagggttctccaggtggaggagatggggggcagccccagtgcatcccaaggtgagggacgggccgatttcccaagttcaggacataaaccatgagtagaagatgagctgattttgggagaacatgctggatcagcggatcgagt

SEQ ID NO: 688060 - DNA, 972 bp, Homo sapiens
cggacgcgtgggtcgatgccactctacccaggctgagctcattttccctgtcgtttccaggacacatttggccctcagcgcattctgcctcatgctctctggagcagaccgagagagattctctgagacatagaactttctttttttttttttgagacggagtctcgctgtgtcacccaggctggagtgcagtggtgccaatctcgatcactgcaaccatccgacctcccgggttcaagcgagttctcctgtctacagccctcccgagtaagttgggatatacaggcacgtgccaccaacaccctggctttacatatgcaatacacataaggggtattaaacaggtgcaaagatggggcgttccacacattgtgggtatcaaacgggggcatgcaaaacttcgtgaccatagagaaacacgacgtgactaggggccatcccagaagaggtccctggaagagtgacacagggtgtagacgccacagcaagagcacaagaggttgaacaaacagaacgaaagcatacacggaagacataaacgagtaacaaacagacccccgcagagcgaagagacagccacacagaacacgtagcaaaaccaccacagcgaaccaaagccaaagcagccaacaagagtagagagcgaaaacctaacgcagctggaaaaaccgagacacaggacagataaggacaggagcgacaaaagcgagaacacaccaccacacgcttaacaggaccgaaataaaataagagagacatagaacagaccaaaaacatagagagaagcggagaaacagtgataacaagtacacaacgtaaacaaagcgacgtcaagagatagcaagcaaaaaatacagtagaagcaatgagcagaaataagagcagcaacaaagaagtatacagaagaaaattcacaacacaaaaagggacagacagaaaagaacccgcaaagacaacgagcagactcacgac

SEQ ID NO: 688061 - DNA, 96 bp, Homo sapiens
aagacagcagcatatatctctgcagcgttgaagtcaccaggacgacttctaacccctacgagcagtacttcgggccgggcaccaggctcacggtca

SEQ ID NO: 688062 - DNA, 977 bp, Homo sapiens
  misc_feature (5)..(5): n is a, c, g, or t
  misc_feature (48)..(48): n is a, c, g, or t
  misc_feature (136)..(136): n is a, c, g, or t
  misc_feature (152)..(152): n is a, c, g, or t
  misc_feature (171)..(171): n is a, c, g, or t
  misc_feature (202)..(203): n is a, c, g, or t
  misc_feature (208)..(208): n is a, c, g, or t
  misc_feature (233)..(234): n is a, c, g, or t
  misc_feature (239)..(239): n is a, c, g, or t
  misc_feature (327)..(327): n is a, c, g, or t
  misc_feature (523)..(523): n is a, c, g, or t
  misc_feature (531)..(531): n is a, c, g, or t
cgagntaaagacaagccaaacggggattggggggggagtctcacagtncctttggaaggccccgaacttgcctttaatcttccctcacccaataaggtaattagtgcttggagagaatctgaatgttaggatgggnttccactgccccaaanggaaagatttttacccttnttttatatagatataagtgaagcaccccccnngtgcngaatatgtagtactgatatgccttnnaattncggaaattccaaacttgtactattttttttcccatgtagaaggcaggaatgtctcctaagctttcctggacagcagatgaatgagcgntagctttagtttgtacgtaggtacagttggagcactatatgtactctctggactactttggacagaagtaggtttttgaatgtaacaagataagtcaacttgagttgtaatatattttggggaatcagctcactacaaattgtgactgtaaacattgtactgtaaatgttttgtagttttcccccaataaaatttntgggaaanaaaaaaacaaaacaaacaaaaaaaacttgtgttgcgggcgcggccctggggccctggaaagaaaagttttttatagacccaatcgcgttggtgggcgccgcggggccccgagttgggtgttaggtgtgacaccggtgtggcccatagggggtatcccagaggaagacacccggggcccttgagacctagtgtggttggggatttcctcacccatttaaaaaagccgcccgggggagaaacccggacgctgtcccttggaaccaattcccagagatgggagtgtcgcgagaggggtccaataacgtggttctcctaatacaccacgagaggcccaaagagcagaggctcggaatattcaaaatttacggccccgctcgtcggggaaaaatgaagaacaaagagagacaaaacaacacacatactgcaagagaagaacacaacaaaaa

SEQ ID NO: 688063 - DNA, 387 bp, Homo sapiens
gactctaaggatcccttgtgggccttaccctgggacagctcgggacatttacaaacaatgtgaggagagggtttcctccgcagactgtgcagctgcagcccgggcccagctgatggctcaagacgctgtgcaaacacagaacacactgcactacctgctctgagcccatgacactgtgcacactcccaatcccccgcataaactggtctacgtgcttgtggacaccactcatgacagcaaccctgctcttgcattgaggaactgcgtgcgcacggaatgcaaacaacacataacacacacacaactcacacatactgcacacgcaactcacacacataatgcacaacactgcacacggagtcagaggtacatctagtactctgccga

SEQ ID NO: 688064 - DNA, 300 bp, Homo sapiens
attcgcggccgcgtcgaccactctttcaggccatattgaactcctgggctcaagtcatcctcccacctcagcctcttaagtagctgagactacaggcgcacaccattgagcccagctaattttgtatttctataaagacggtgtgtcactgtgttgcccagcctgatcttgaactcctgcactcacaacgattcacccacttacggcctgaccaagtgacgggattataggtgagccactgtacctgggccaggacatctctcttatgaaatatgacaccgtgcggcagcttacatctgt

SEQ ID NO: 688065 - DNA, 153 bp, Homo sapiens
cactatttactcttgagagttctgtaagctcactgcgactatcccttttattgcattctcctagttgttccttgttgtttccagtctcttccagactagacttggcacatggagattccgctcagaaagtgctcttcacacttctacctgctt

SEQ ID NO: 688066 - DNA, 1261 bp, Homo sapiens
  misc_feature (1)..(1): n is a, c, g, or t
nctatataagatgacgtagcaagattcttttggtgctttgctcctaactctgttcttttctgctacttattctttacttatatttgtcttcttcctctgtgtttactttttgctggtggttcttgccccccgctcccatcgtttttcctcttaagtattctcctcctttttagtgtagcacctttgtgggcttttttttttgccagcgcgctcactgttccttgttcgtcgtgtcccacccctatttgccttccccctttttgtgtccccagtattgtcttgtacccatggcctcaaatgggcgccttttcccccttatctagacttccaataggagtaatttaagatagaccattcaatatcttcttgtttaggctctttctttatttagtgagatctaagggattacccacagaaatgggttcagtctatcaccagctcccatggaattatctgggtcacccgattatggatgagagattctattcccgtggatcagaatccaactggtaccattgatcccctctggagcccttaagtgctcgcccaattggcaccaaaaagccccaggcttcgccagaataaacgcccaactttttttattgtgggaataatcaataaaggaccataatttttttctctccacgagttatagtgtgttatattgtctcttggccttgaagatttgagggagacactaaaataggggctcttggtgaaaaaagttaataagaaataccacacgtcactcaactctcactgaacatgtgtccctgtgtgggacacataagttaatttttcgcccacgttataagagtgagatatatatcgtaactccacgttggaagttgattctctccaagaagggtgcctcgcgtctcttttaaatgagaaatagagaaaatttatatagcttaatagtgtgttgttgccctccaaactctggcgtctttctggtgacacccaataccagtggtgtttgaatagttttgtggtggttcttgccataaaaatatctgaaatacaccaatatccgggtgatatctgtgtgtgcccaatagttagtatagtatagtaaaccatgatagtcaccagcccatttttttcataaatgtgagtaaaaataaaatagtatttttaaaaataatagtttgacgccaccgtataggtcccttttttgttccagacactttttcccaaaatctaaacataattaaaatactctttcagccacatgaataaataatgagtgtttcttgta

SEQ ID NO: 688067 - DNA, 365 bp, Homo sapiens
tacagagtgaatgtgacaagaccctgggtgaagcttcgcccgaggacgtcgaggtcggcgtgcccatccagcgtggcaagagcgggcccaagggcttgctgtcgatcctgatgagcaagcgcagcgagcccaacagcctgctgccggaaaacctgaacgacaacaaaatcatcaaccaattgatcgacctgcacgcccgcgacaaggacctgcgcgtggtgctggtgaccaaagacatcaatatgcgcctcaaggcacgagcgtgtgggatcgctgccgaggactacagcaccgaccaactggtcgacgacgtgtcgatgctctcgcgtggttatcacatgatgaccggctcgttctgggaccgt

SEQ ID NO: 688068 - DNA, 628 bp, Homo sapiens
tggtgactcacgacctttttctagatctcattgggttttctgaacttgggggacttactaatgccctggatggatttcaaccaatgaactttattcactcactaaaaaactattgacactcagatactatgataaggatcatccctaacatagtatccaacgctttaacggttaaactcttcacagcctataacccgacttacgacactaggaagatgaatcctcatatgactataaacattatccctcgttatccaagaaacctcttcataaagccaatatccctttactagcataatccgtcgcccaactttccgccttcttcctcattccacgatcagtccgatcaccctttataaacccgtactcgactgaaaccgcttaacttctatgtccgccgtttacgatatttggcctatctaccaacataaccttctaccctgacactaaaccctggcacactcaagggctatctctatgcgttactagatcctacatctcgccgtaatcccttaaatcacggcttacttcactcatgctttttttaagcttacttcacttagctcgttgaacaacttcagaattcttcaacttaccctactagaacaatctccgcagctcccatttc

SEQ ID NO: 688069 - DNA, 194 bp, Homo sapiens
tcagggacgcaaggactgtgtggaggcagccgagaaacgcattcaggagatcattgaggacctggaagctcaggtgacattagaatgtgctataccccaggaaattccatcgagtctgtcatggtgccccaaacggttccagcaatccagacagattactcagggatttcatgtgttcaagattaaacttccca

SEQ ID NO: 688070 - DNA, 817 bp, Homo sapiens
  misc_feature (39)..(39): n is a, c, g, or t
  misc_feature (118)..(119): n is a, c, g, or t
  misc_feature (210)..(210): n is a, c, g, or t
  misc_feature (250)..(251): n is a, c, g, or t
  misc_feature (254)..(254): n is a, c, g, or t
  misc_feature (268)..(268): n is a, c, g, or t
  misc_feature (277)..(278): n is a, c, g, or t
  misc_feature (322)..(323): n is a, c, g, or t
  misc_feature (335)..(335): n is a, c, g, or t
  misc_feature (348)..(348): n is a, c, g, or t
  misc_feature (354)..(354): n is a, c, g, or t
  misc_feature (375)..(375): n is a, c, g, or t
  misc_feature (380)..(380): n is a, c, g, or t
  misc_feature (390)..(390): n is a, c, g, or t
  misc_feature (403)..(403): n is a, c, g, or t
  misc_feature (442)..(442): n is a, c, g, or t
  misc_feature (445)..(445): n is a, c, g, or t
  misc_feature (504)..(504): n is a, c, g, or t
  misc_feature (511)..(511): n is a, c, g, or t
  misc_feature (613)..(613): n is a, c, g, or t
  misc_feature (678)..(678): n is a, c, g, or t
  misc_feature (715)..(715): n is a, c, g, or t
  misc_feature (813)..(813): n is a, c, g, or t
ccttcaggggttgggagttgggggggcacgccttccaanctgcgataggtacttatggtgggtatctggtgattcttagttggcccaaatgccctgcctagcccccttacctgcgtcnnttcccagatggggtgttttgttgttggtgttgttagtaggcggggttgccttaccctgggggagaaagaccagcttgagtgaaagtccgcngtgtttttgattttgtttgtatgtgtgttttaatgccacnnccngctccccgtttccnagtgggaanntattcagtagcatcatgtacttgtactataggtaagggcttaanntgaccatcctcnatcctggcctccncaaatnagccacctggcacattacttnattcnttccctcaanagaacttacactnggggcttccgccccctttatggggggcggtttcccggcngcntggaccattcggatttgggtttgtgttccgcactttcgcaggttccactttttgcttcngccccgnttgggctccggtgcgggcttctcatccatccctttctaaagccaaagcacatttgtagcacataatccaggagaagcagaagtaaatgctatgactggtggnatttcttagcctggttttgtagtttttaggcagtaagtagattatgagcgaacaaatgtgaaggntcatgtggagtcataatacctgtgatctaggtatggncttggtcaagctcagagacaacaaagccttctaggtcattaggcaatggtgggtttctagcaccatagactgtctactgacctcatttttcttttggnatgg

SEQ ID NO: 688071 - DNA, 140 bp, Homo sapiens
gtaacttgcggcgtaatctctaccaccctgctcactaacaccctagatctccgtccaggtatagaaaacacctattccgggtagtctaggctccacgttaagcaaacaccactttccgtgttcaccgacatacatagtta

SEQ ID NO: 688072 - DNA, 215 bp, Homo sapiens
cgcggcggggacaagagaagtcgaagatggactgccactggtggcataggtggcaccatttacgagtacggagaccctcatccattgatgtgggtaggagtacatcccctttcaaagcagtatgctggcaaagtacgtcctctcttgtcaacgtggccagtctactgatggcctgacggtgccagtacattgtaactgaatgcactacaggcaag

SEQ ID NO: 688073 - DNA, 193 bp, Homo sapiens
  misc_feature (153)..(153): n is a, c, g, or t
atgtactgactctgctccaggtctgagatttctgctctgcttagctctgagtgagatacaggctccgcacacactcggtaattttgtatttagtagagatgaggttcacatgttggcaggctggtctcaatctcttgacctcaggtgatccanccgcctcagcctcccagagtgctgagagcagcattcttga

SEQ ID NO: 688074 - DNA, 835 bp, Homo sapiens
ggggaaaagcaagccaggatggtgcttgtcgggtcgctttctagtagttctccacgtgcgctgcccgggcggctggcactaacgcggtcctgcagtgctgtgcgctacgtgttgctccgtgagcttggtggcagccgctgatatggagagtcctgatgtggcgaagatgggcgtagagggacgacccacgctggactccgttggaggagctgcggcgttacagccaacaagtgtcagagtaacctgggacgtgggagcggagagaggatgcttcgagatacttcgtgtcctagcgggataacggtgaaagaggacatggttgctgtgggcgaagctgcagggtttcaagagattgagacgatacggtgaacgatgtagaagtgtggacgggaaagatgacggtaaatggatgtgtactgggaagaaggaaataccagtttagggcaagtacgtcaagaggggagagacttaatcttgtcttcttatgagattggaaggcggtcgaagacgtagaaccttgggaacaggggtagctttctaaaagatcaagggaaggtaccaaggtaccagaaagggcagcgatgggtgagcaggaattcacacgcaagaattatttggtccttggaattgaacacaccagcaaaggccagattggggaagtatgaaaatggtggtgaaggaacatttaaaggttggattggaaggccgcgatatggagcacggaaacgagagcaagtagaggggccggtggcacacgaggcgagacaaatatactgccaggattgtggaccgtttcaaaagttcggagacggggggaaagaaaagaggtgggatg

SEQ ID NO: 688075 - DNA, 411 bp, Homo sapiens
gtcataatggtcgatccctttgcttcggacgggcaaggctttgcatatgacctggggtcacgagttcaagaccagggtgaccagcacgggagaagccctgatcctatactgagaatccacatcactagttaggagtcagtggcacatgcctgtagtccgaggcactcctgaggttacggcagctgaatcacttaaacccgaggaggcacatgttgcaggtgagccaagatctgccactgactctacgctgcactgcacattgagactccatctctaatgagactccatctctattcggccaggattatgcgctcagttggcaatttgagcctattgggagattgatcacaattcactggcgcgtgacatacaactggccgacgtggaacacccgtcgcgttgcctctggct

SEQ ID NO: 688076 - DNA, 486 bp, Homo sapiens
ggagaaggtcccggagagctgagcagttcaagatgtgtgacattcaccgaagaccagaccgcagagatgaatgtgaaggtgctgtgactttgagcactttctgccgcatgctgcagacagtggtccaagaacaaggaccaaggcatctatgaggattatgtcgaaggacttcgggatgatttgacagaggtaaggagaatggacaccgtgtcatggagctgcgtgaagatcgcgagcatgtttctttggtcacactgggtgagaagatgacagaggaagaaggtagagatgctgttggcaagggaatgaggacagccaaaagagatcgtctctaacgtaatgacaacgcttagatgacggcctagtccatgtcggaagatgaagaggaacccaagggggcgagagacattcgatacagcagtggacatgcagcaatgagacgaggaaccgttccacaacatctaacaccaaaaccaacgccaaaca

SEQ ID NO: 688077 - DNA, 802 bp, Homo sapiens
cgtgttcccctttgcgccgcccctacctcccctttcggtcagtcggcaaattggtcaccttccctcccttgtaaagtcaccataatcacccttttgcttcgcgccaattcctcgctcttatttctcgcgcggtcggcatatcggtcttttaaccactacggggtggatatcttttcgggcacgaaaagtccaactcgtcaaatctttcgggggcggctccccaccctaccgtgtgtcagtagcacctttctccttagtacatccgggcccaaatgtgcccccctttgccaagccgcctttgaccttgctaaggaactcctttttcccggcttggttcttcaacccaacgccttcccccattttggcgatcaaaatctctcccaattgattccttctcgtgaatcaactcactggcgtcaggaacgcgcccctatgggtacggatgcccggatagtacaagctgctgttagctgacacgagggcaggcacctggtctcacgagtcgacctagatcactaccgcgtgatctcagggacgggcatgcaagacgatgacaccgctctaacgctcgaggcctttggtgtgtgacttctgactctcttcttgttagaaaaagctcctctgctagcaataactgagtctaattcttctcactcctgctcgcaaggcgctgggactcgtgggtgcggatactgggattatgggccacgggattcttcccctaaatttgtcccccctggtactctccctctagttgtcttctctcgcttagactccatccagacctgaaccagctttgtgt

SEQ ID NO: 688078 - DNA, 159 bp, Homo sapiens
agaataagtggttcctacatatttcaatgaacggatgaatttaggcagtttaccgaagtgcctgtgacagcaccagtcacaggcacttttgtgtgcgcgatgaaatgagacgagaacgagtagtgatacattgtggtgtctaaaacagcatgaatcaga

SEQ ID NO: 688079 - DNA, 1504 bp, Homo sapiens
  misc_feature (772)..(772): n is a, c, g, or t
aatggttgtgtctatgcgtgggtggtcgcacgccgccgcatcgtttgggtacgtctgtgtacatcgcttgtgttggctggcccgggcgtgcatggcttcacgtgtgtgagccggagggttgtctcgctctcggtacgcacctgtggtgtgcttgctgaggacagggcctgttgtgtgacgttggggtagctacccttttctttggccgctgggttgttttggtcgctgttcttgtttcggtagagccccgcggaagaccgtccttttgtgtgtggatcctcgttgtcttggtgtagcgctcgtgggatgccgctttccacgcctggcgcgtctgtctcctctccggactttcgtggtctgcggactctccagaggggtcgcgcaccggcctgtgtgtccccgtgtggaagcggaacacttgttcgtggggcgccggcgacacctcttttatggggaaacggcaagggggactctgtggtgggtgctctgtccccgaaggcgccgtgtgtgtggtctcccggagttgttgcgtcgcctgtggggcgccgcttacccaggatgcacccgcgccttctctgtgtggtggttgcttccagaacggttgtgtgaagagaaccctaccactgtgtaaaatggactgaggtgttatttgtttacctggtgattctgttaagcgcgctgttaatgttgtgtaaaaaatgtgaataaggcgaaagagaagaacaatgcctttgttaggcagtgccgctaacgtgttcttccgcccccagcncccctcgtgtccctccccccccggagtagtagataattaaatgggggtaatatttttttaagaagcactatggtgctcgcccctccgggtgcaccgcccccagggcttttgagagttccaccgttgggttaacgaatcaacagggtgcacacgcccccccaccacattctgggctataattttttaaagaaaatgtagattttctaaggggacccacgggttctcccgctcgtggttgcccccacggggtttgtgttctttgagagctctcctcgagccctctcacagtggagtcctcccctcgttctctcaggcgctgcgcccacaagttggtgtaccacagcacttctatagccactggtggtgttaaaatccggtaagaacttgagggcccgggttgccagtggctcaccaccctataaatgcccccccctctttgggaaggccacaaggcacaggccgagtttgcttgaagctccacaggaggtttccgaagagccacgctttggcgcagggtggtgaaaaccccgctctctaccacgagaatacccacaaacttatgctgggcctggtggctcaccacacttgggtagtcccacgctaacttgggaggcctgaaggtgggaaggaattgtttggaagccctatgaagggccggaggtttctgtgagaccgagatcaccacccctgcactcccagcctgggccaccgagggaggagaccctgtttcca

SEQ ID NO: 688080 - DNA, 290 bp, Homo sapiens
  misc_feature (5)..(5): n is a, c, g, or t
  misc_feature (11)..(11): n is a, c, g, or t
  misc_feature (18)..(18): n is a, c, g, or t
gtatnagcctnaggcacnctagaggattccccgactgtggtgtaccgtcgtactgtggtgttaccgtcgtactgtggtgttaccgtcgtactgtggtgttaccgtcgtactgtggtgttaccgtcgtactgtggtgttaccgtcgtactgtggtgttaccgtcgtactgtggtgttaccgtcgtactgtggtgttaccgtcgtactgtggtgttaccgtcgtactgtggtgttaccgtcgtactgtggtgttaccgtcgtactgtggtgttaccgtgtgaatgagggatt

SEQ ID NO: 688081 - DNA, 1272 bp, Homo sapiens
ggatctggtttcatggtgtcagatctggccctagcatgggtaaagccctttgtgtcagccgtactcccaaaggtatggctggcagtagcaatgcttagcaaggatggcatctgatagaatactcttctgtcgaactctgatctttaacggttatcagacgatggcatccaacgtcttaatacaaggtgaatgaacagtgatcatgcgaggctagtctcgggattggataaagatctagctgagtcagatagaagacgcatgtgacgtggtgacgagattgcgcgggtattaaagcctcatcgtacggcagcctcgactggggattcttacccaccgtgcgtgtaccaggttttagacttaggctggctgggaaatcgggtactactccttcgttgggttgctgacaagatagaagattgccaaacaaggcgctagggtcgagcagggtgaatcgtttttcccttcagctaggcccttttaccattgaggtcgcgaattcctaaggagaatcctcgagcgaagcctaatcggtaccatccttggaaatctggtttcaaatggtccactattttggtacctttggtgctttccatcattgtaagtcctaaatctccaaccgatggtccaagggaatacaattgaactttgagttgattgctgggttggaattccttattttcggaggggcaaaattggtgtctccggtgtttcaatctcatggatctgtgtttgacacagaaaggtcatgtgggcggggcaaatttccaggaattttcatagggaactagaattgcgatgtttgtgcaagggaggaaaacgcgaggaggagaggcctttgggggggggggttgtcacatggaagaattgacttcctaaacaaaaatttttgttcccaccaaaatgggcccaacaggttaagagggagcaatgacatacttccgacagcaactttggtcgcgccccagaggcttgaaacttgcggccgttacttgggtgcccctggtgactcatttccccaattaattgggattgggcctcgtggcaactacttattttttatcgccaaagttctacacgcggttccacacaggggttgtccatagcccattcttggagggagattatacagaaagacttcattttaacgacacttttcgccaggcagccgttcaaaaacacacaaaggtcttcatttttgtcttggcgcaggactttgccaccttcgtcgcgttctctcaagcacaacggctttccaagagggaaacaccttaa

SEQ ID NO: 688082 - DNA, 225 bp, Homo sapiens
  misc_feature (34)..(34): n is a, c, g, or t
  misc_feature (80)..(80): n is a, c, g, or t
  misc_feature (107)..(107): n is a, c, g, or t
  misc_feature (149)..(149): n is a, c, g, or t
caactgtcaagatcgtcctgaaggagaaacatangaaagcctgtgtgcatggcgggaagacgtactcccacggggaggtngtggcacccggccttccgtgccttcgncccttgccctgcatcctatgcacctgtgaggatggccgccangacttgccagcgtgtgacctgtcccaccgagtaccccctgcccgtcacccccgagaaaagtggcctgggaagtgct

SEQ ID NO: 688083 - DNA, 110 bp, Homo sapiens
ctgcgtaccctttattcagcgacgctggagtcgcatcataatccgtctctcaatggatgcaaactctacgtcccactaagtagctgttttgatagactatctagtcaagc

SEQ ID NO: 688084 - DNA, 108 bp, Homo sapiens
  misc_feature (41)..(41): n is a, c, g, or t
  misc_feature (74)..(74): n is a, c, g, or t
gatcaacctgtggctgttttcccgtctaggttctcacaggnatctcctgacagaggtacttaacaatggctctnctggaaatttctataaataaaatgtccaaaatgg

SEQ ID NO: 688085 - DNA, 303 bp, Homo sapiens
cgtgaaaaagcggttttgccgggccaggtcctgccagggacccttggaacagtggggtgggttctccctatgttgcttaagctggtttagaactcaagccagtttttcacttcagccttttgagttgttgggattacaaaagcccccatgtccaactgctgattttgaacttctggggtcaagtgatcctcccccctcggcctcccaatgtgttgggattacaggggtgagttgcggcgcccagctgatatgtatacttttttataggtatattacccttcaataaaaagtttgaaacagaca

SEQ ID NO: 688086 - DNA, 336 bp, Homo sapiens
actgtcacagtcacgtgacagggtgaagcctcaggccctggctgggtacacagcctctcctctgacgccccccagtcagaaccagctctgctctaaagcacaagcccagcacctcaggacctccgttagccctgatgctgccctgatatctacaaacccgccgcagcccctcgacaagtcatggacccaaccgtatctccctctcgtggatcgccctattcgcacatccctgaccttgcctggttatgggttcagtggtcatgcaaaaggttttcgtgtacacagctccgctagtcaacatcatttcaggcttcgccaaccccccagtcctctgtc

SEQ ID NO: 688087 - DNA, 287 bp, Homo sapiens
  misc_feature (30)..(30): n is a, c, g, or t
  misc_feature (66)..(66): n is a, c, g, or t
  misc_feature (137)..(137): n is a, c, g, or t
  misc_feature (156)..(156): n is a, c, g, or t
  misc_feature (187)..(187): n is a, c, g, or t
  misc_feature (236)..(236): n is a, c, g, or t
agacagcctgtagaatggggaaactatttncaaactctgcatctgacaaaggtccaatatccagantctacaaagtacttaaacaattagacaagcaagaagaaaaaacccaattaaaaaatgtgcaaagacatgancaggcacttttcaaaagangacatacaagtggccaacaaacgtgaaaaantgctcaatatcactaatcatcagataagtgcaaatcaaaactgcaatgngttaccatctcttaccagtcacaaagttggagatggtgggtgaggctgcag

SEQ ID NO: 688088 - DNA, 305 bp, Homo sapiens
gggtcccgggggacccagcctgggacgacctgcgtgctgatcgtgatcgtttcaccgtgcgccgtgcgtccctctgtgtggctgtaacttcacgtgtactttaccctcgagctgaagcagatgcaggacaagtactccaaaagtggcattgcttgtttcttaacagaagatgacagttattcgggaccccaatgacgaagagagtatgaacagcccctgtcgggcgagtccagtggcaactccgtgcagctcgctctggaaggattattttgagaacctctagagtcgatctctactagagtcga

SEQ ID NO: 688089 - DNA, 178 bp, Homo sapiens
taacagcgcatcacatcaatgactggacgtgggctacgatgagatatgggaattggatgtgcctgtcctcacttccgcgaccccctcgtgaatccctgccaccctgacgactcccaaaccgccgattgatggtgtgttgcgctggtacgggtagatagtgcagactctcgctgtcata

SEQ ID NO: 688090 - DNA, 197 bp, Homo sapiens
  misc_feature (173)..(173): n is a, c, g, or t
aatagaaatttctccaccagatatcctaaattatctctctcaagttcgaagttccacaaatctctagggcaggggcaatatgccaccagtctctttgctaaagtgtaacaatgaatcacgttgtgctccagttgcccaagcaagtttcccctatctccattctgagtaccacnccttcctctttcgaggggtaccga

SEQ ID NO: 688091 - DNA, 1342 bp, Homo sapiens
tggggtaaaaatggggggtctcgctattgttgggccaggcggggtctcaaattcctgggcctcaacgatcgtcctggtttcgggctctcccaaagtgtggccggggtatgagacagggctatgtgacgccaccggggctctgggccctctttctttgtggatatggggctctctcttgggtgttcccggtttcatatggccccgtggctatctttttgggggagccccaagggtgtggtacctgtgtgtgaggtattgagattcctctttttttcccctcttttctttttaacctctaatattaaaggtctgtgccattgggaagagccccgcctagggaaaaacaccccgggagggtgagattatcccgaacccgaaaaagaacgggaagtgtgggtgtgtggcggggggtcccccaaacccagaggtggtgggtgtgtccacggggcctatcaagacagatgtccattactcggggtgggggggtggaaccccaatttgtgggggaaacactatgggggaccccctggtggcctcccctcggagacgccacaagaaacgggtggggccactggagactgtacacgaaaaagctctgtggggtttcaccacacaaaaatgtctcttcacgagggggagcaggagatgagagggctctcttatatcccgagggtccttttggcgaaagaaaacccggggtaaacctgtcgtggggggtcctcacaaaaaagtctggggaaaaccagagagcacaggtccctcctcctagcgaccgtgtggcccggtgaaaagggaaccaaacaacgctttggggaagggggggtctaaaaaaggccgctaaaaggggcaaagtcaaaccccgcgggtgtgtcgccccaggtgttgtgtggtcggactccctgcaagaggcaaaacccgccccccgcggctctggcctcaaagcaagagtacacacgtgtgaaaaaacacagaaaaaaacccataccagggggactccaaaggttccaaaccttaccccaccacgggggagaggaggggacacatctgcggactacacccctggtggcccggcgaaacaaaaacccggggtgtcagaggacgaaccatacaacccgggggtgcaacaaacacaccgtgggactaaccgaagggggaggaaacatcccccgcacaagacgcgtattagttctcacccaccacacatcttccccggtcgtagaaaactaggaggagcccaacaggtgtatgatgcacccgggtgatacacatgagagcaacacaacacaaggcgtcctgcccacaacaacacaaaaaacacacaacctacgctgggcagggccgt

SEQ ID NO: 688092 - DNA, 522 bp, Homo sapiens
  misc_feature (15)..(15): n is a, c, g, or t
  misc_feature (91)..(93): n is a, c, g, or t
  misc_feature (209)..(209): n is a, c, g, or t
  misc_feature (243)..(243): n is a, c, g, or t
  misc_feature (264)..(264): n is a, c, g, or t
  misc_feature (322)..(322): n is a, c, g, or t
  misc_feature (335)..(335): n is a, c, g, or t
  misc_feature (347)..(347): n is a, c, g, or t
  misc_feature (522)..(522): n is a, c, g, or t
agaagaacaaacagntagtgggtgccgaggggtgaagggcagaaacaacgaaaaaacgcctgctgcgtagcatggagctgaaggtcagcgnnngcaacgcccatcgaaccaaataccacaactccgcgacaagcaggaaacaaccccagcaagggagaccacagcagcaacaacccacgaaaaacgccaagacccattgccaatcacanttagcaaccaaaggagtcaactctaaacaaaaanagacgaaaaaaaaaaagcaanccgacaagacagcaacgagaagctttacgtagcggctagtggcaaactcattggaaanaacgggataaaanagcggaaatcgnacttcagcagccaaaaaaaaaaacaaccaaggagactcaaaggaaccggaatggaacccaacaaagcttagcgaaaggaaacgccgcgcaaaccaaaactcagccaagaaaaaaaaagcccgcgcgaatcgatagagcaaaccaacaaggaaaccaaagaggccgcagccacacn

SEQ ID NO: 688093 - DNA, 410 bp, Homo sapiens
  misc_feature (52)..(52): n is a, c, g, or t
ctaccaggtgagaaaatatctgtaaaacaaacccctgtgatctgtgactacncatgttacaggctgaataatataatctggtagactaatttacacaggcttccaaaattacaaaaagtccaaggaaaattacctgtttctgtatgtgtgtataaaatgaattgtatatctggtatgtattattaagctttctttatattgaagttatagtttatgcttggacaaaccaactacatgcttgtgaaattttctgacaaatgtctgaaagaacaatgaacaggaaggagtatattactacccaaatagactaaaaatacagctcttaagctgtttaattcttttaaatagctacaccattgaggcaaaaatagtaactggaatttaaggctgacaaatccaataaatagcag

SEQ ID NO: 688094 - DNA, 190 bp, Homo sapiens
  misc_feature (190)..(190): n is a, c, g, or t
ggttttccctgtacttgagtttcccctggtcttggctggcgggctgctgtttgaagcgttagtgtgctgagggtggggagctgcccagcctctgttgtcctcttccatgtcaggttctcccagcaggctgagctgagccggagccgggtgcatgccattggtgagaaggtctccttggtccagtgccagn

SEQ ID NO: 688095 - DNA, 214 bp, Homo sapiens
  misc_feature (7)..(7): n is a, c, g, or t
  misc_feature (44)..(44): n is a, c, g, or t
tacgagnttagaggatcgcagttctggtccccactcctactgtntggtctatgatgagcccatcaaaggcattttgcatctctgttagtcttttttgattctaacctgtgctttttttttttttttttttttttttttttttttttttttttttttttttttttttttttttttttttttaaccaagaaaaacccgggggggaggggggggggg

SEQ ID NO: 688096 - DNA, 208 bp, Homo sapiens
tcagatatattatagccctctctgaagatcctgattggctgtcagcacccacctcaaaagccaaaacagactctatcaatatcctagcggacgtcttgcctgacgagatgcccaccacagtgtagcaaagcatgaagctaggggtggatgtaaatccgccacggagaggtcattgttcaggccatttctgccgagtccgctgcattgt

SEQ ID NO: 688097 - DNA, 197 bp, Homo sapiens
gttgaacaggacttaaacgaatcatcagggcccggatattttttatttttcatttggatttttacccttgaatccaaagtgtttgcaatggccaccaattgaaggagtggcaaacttacttgtattgagagcccacccaattcctactggtgaaattactgtttttgtttttaataaaataaaagggattcccaata

SEQ ID NO: 688098 - DNA, 330 bp, Homo sapiens
  misc_feature (41)..(41): n is a, c, g, or t
  misc_feature (47)..(47): n is a, c, g, or t
  misc_feature (169)..(169): n is a, c, g, or t
  misc_feature (184)..(184): n is a, c, g, or t
  misc_feature (256)..(256): n is a, c, g, or t
aggtggctttgccttgtctatacatggcccagagagaaaanaggaanagggctgggcgcgggtgctcacgcctgtggtcccagtactttgggaggccgaggtgggaggatcacctgaggtcagtagttgagaccagcctggccaacatggcaaaatcccgtctctactnaaaatacaaaaattncctgggcgtggtggtgggcatctgtaatcccagctactccagaggctgaggcgggagaatggcttgaacccnggaggcataggctgcagtgagccgagatcatcccatggcactctagcctaagggatagagtgagactctgtctc

SEQ ID NO: 688099 - DNA, 255 bp, Homo sapiens
gagtaaccagctattctcacgagacctcgctatgcgaccgagacaattattccctagcgaaccccgttaatgtacccctcaccacatttaagcccgacataacatttcctattcgcctacacaattctccgactccgacccttacaaactaggaggcgttcttcccctatgactatccatcctcatcctagcaattatccccatcctcgatacattccaactacaaagcataatacgttgtcccggcaaatcgaa

SEQ ID NO: 688100 - DNA, 621 bp, Homo sapiens
tacctctctgactgtcagggtcacttacatggatcgaagtccctgttacggctaccagtgcacgtcagaggagcacgacaaggcacatcacactgcttatctcgagttctccccaagcaagagcttagtgcaccttgagcccatgtctaatgaactaccctgtggccttactcagacagagcaggcgcattatatgctgaatggaggcaccctgctggtgctgaagaagctctacttctattatctgatcatggcaaagggaggcattgcccgaactgcacctcatggactgttcgtgaagcatgtagacatgaaggtgcatgctgtcatctcaatccatgtgaagacagacattgctcctggcgatagagtgctcatgtatgctgctttacctaccggggacgaccttggggattctgcataacatgaggttgtgacagccttacacgcatacctgcgagttacagcggcttgttaatccgtctgaagcctccgtgccgcggaccaaagcatgctgctcatgaagcctcatgctgagctctcagctgctgggctacctgatgccagataggacctcactgcctcactgaggctttgaagaccaggacgataagactggtc

SEQ ID NO: 688101 - DNA, 507 bp, Homo sapiens
agcgggacgtggaaggggccttgaacactacactaaaggaacggggagtaagaggggagcccatgaaggtttctaggaaggtgagtaacatgatctgatagaagaagatccatctgttggtgataaactgcatcatcggcggcaaggtgaaaaggcaatcacccaacagaaaagggcagtggattgggtaactaaaatatcggaaggtgcacggtcacagtgctatcgcaattaaggggaaggagattaagtatcagttgagtatcgcttaaccaagatgtaggggagtagaagtgttttagatttcaaatttgatcagattggggaatatgtgcagatataaaattatctggggtataggacccaagtctaaacattaaattcatttatatataatatacatcttatatacatagccggaaggaaattttacctttctctaagggacagggaatcaatgctatgtggcatgattgcatttggactgcatgtggaggacaggagtgg

SEQ ID NO: 688102 - DNA, 256 bp, Homo sapiens
catctcaccgcgcctcttgacttcgacagcgacatagaccccgtcggcatcgcgacaaagcaggtcaaccggaccgataggcgtcatgtactcacgacggaccaacgaccagccatcgccgaaagtattaggattctcagccagtaattcctggagatgagcctctaccccatctttctgcaggcccggatcaatacccaattcctcggtgacatcaagcaccttcggtcccagcaggatttggagatggtcgccg

SEQ ID NO: 688103 - DNA, 215 bp, Homo sapiens
tcccttcatagaggccacggaggctaaaagcgcagatgaggcaagatgagattggcccacatagatggagatcatctgacacggctgaacgtctaccaggcttttaaacaaagtaagtgtaacttggatgggagacactctggtctaaatgtcactggcagtgtataagatgtttcttggtcccacttggatttataatccgtggcctctatgaa

SEQ ID NO: 688104 - DNA, 119 bp, Homo sapiens
tgagcatgtgctgttggaaaagtggaacagatagacttgctggagacagggttgccacaaagtttcaatttgtaaaaaatgtgatatatatgaaatgcaataaagtaaagtccaataaa

SEQ ID NO: 688105 - DNA, 105 bp, Homo sapiens
tgtacagagtacagatacacacagtactgactgtagtacactgcagtgcaacgcggagcagcagcgtccagtagcacatgtacactgcagcagctgtgacagccg

SEQ ID NO: 688106 - DNA, 181 bp, Homo sapiens
acggggccatcatgttggcaggctgatctcaaactcctgacctcaggtgatccacccaccttgcctcccaaagtgtgggatagcaggtgtgagctactgcgcccagccaaatgttctgcatttgaatagtgctgactggtttacacacagcgtgtacatactgtcacaccgtgtacacttt

SEQ ID NO: 688107 - DNA, 101 bp, Homo sapiens
aagacttatcagaggttctgagaggacttgtaatgaactatccacatatgacaaatcttatcaatctgggacagagcactgaatatcgtcacatttggtcc

SEQ ID NO: 688108 - DNA, 294 bp, Homo sapiens
cacgagggatcgccgcgaacatggacagcacgacgacggggccgaaggcgatcgccgccggcccggcctctatggtggccaggccacggaaattgacgagtgacaccagtatcgtgatgacgtagatgtcgagcatggaccagcggtcgacgaattcgacgatgcggtagcacccgggtgcgctgcatgacgctgcgccaccagcggagctgcagcgtcacggtatcaccacgcgaacgtctatgatcttcaacagcggtaccatgctgctggctaagaagaccaccgccgaca

SEQ ID NO: 688109 - DNA, 1146 bp, Homo sapiens
tacacgactgaggttttaactccagtttatacaaatgacaaatccaaagtcaggggcatagggcagggaccaattgccgtacctgttgacagaatcttaggacagaaaaccccacaggtgtggcacagaattggagtgctgagtagagtccctaagggagatgcccattcttcagccacctcccgtggacagatcagccatgaggacaccaaatggctgctccagttcaagtgaaatgggacacttatattggaggctccagggccacggggcctggcgcaggagcgttgcccttcaagggaaagaacaaccttattggaccttcttctggggacgcaggtagtcggtagtgaccaaacttcatatcattgcggcagtgtgcccagcaccgagggtcaaggcagaagacatagcacttgcggaagcactcactctgatgtcgcagaaggtatatgctgggcaacgctgcgtggacacaaaaaggctcaataagtgccacctcgcaggcgacaaacacccaggttgcatgggttgtgagacatcatatacatggagaaatgtcagatcagcctgtaagagaagtgtggcgggaccaacatcacatcacaagcatgatattgcccgtgccaaaatataatcacgaccggcgtttcgttggctaccaggttgtggacataaccccttaccagtaggtacttagaaatttgggggcatttagaacaatttccctcaaaatgtgagtgtaccaccatgggggatttcggagcaccctaaacgaggtgatagaatgagggaaatatgtgtgcccaaaaataaaaggggacttcattcacacacgacagagattctagtgacatagtgttagtaggcgaatgacagctccacctgcgacaacatctatgtgagtgacattacaggacatagaattcctcgcaccggtaccgaagattttactacctaggacctgggtatgaacaaatggtgtaaatacaaaatgaataattcggtccgggacacgttgtggatcctatttgcacaaatgtgaggtccctgctacagtattgtttgccaacagcaatggataatgaaactgtgacgtaacagaaggtctctccccgaaaagacggtgtatacaaccaataccaa

SEQ ID NO: 688110 - DNA, 440 bp, Homo sapiens
gaggggtgagtgagtcaggagtgagtgagtcggtgagtgaggggtgaagggtgagtgagtcagtgagtgagggatgagtgaggggtgagtgagtcagtgagtgaggggtgagtgagtcggtgactgaggcagtgactgcggcggtgagtgaatgcaaaggcctgggagatgactgtacactatggtagactttctcaatactgcacagaggctacactaaatcgattaaaaaaaattgtactacgatgttacaatggctacaatgtcactaggtgacaggactctctcagctccattataatcttacgggactaccatggtgtatgtggtctgtcattgaccaaaacatcatcatgtagcacacggctggatctgatatttcatgtctactttgcaaccaaaaataacgagacatgctaaaaggcaaaaaaaaaaatctg

SEQ ID NO: 688111 - DNA, 181 bp, Homo sapiens
agtaaggaattcagaatccatgatattttggccaatgcagagggtcttctctgagctatagcccatgctctccctgtgtgtgcttttaattacgtcttctcgtcaacttctaaatcacgtcaaagaatcagctcaagatttcttatcaaattttcgggtagtgacagatgggtagtcaccg

SEQ ID NO: 688112 - DNA, 673 bp, Homo sapiens
tcatgccagtaatcccagcactttgggagtgtttgaggcaggcggatcacaaggtcaggagtttgagaccagcctggccaatatggtgaaaccctgtctctactaaaaatacaattagcctggtgtggtggcgggcacctgtagtcccagctactcatgaggctgacgcacgagaactgctcgaacccaagaggccgagcttgcagtgagccgttttcacgccactgccctccagctgggtgatacatcacgaattcccttcacataataccagacctgtttcttatggacccctcaattccaatctgcacaccatggcactccccttcccccctctcccctcacgtgcttcctcctcacactttacccgatcctcacctaccctcacgctccgctcatcatcttattctcttctctccgacctgcgtctctcgtacttatcccaggcccctgcctatcacgtctctcaatgctcctgtctatctctccatccaccgcttctgcctccccctaccacccagcgagcttcactctctcacaactcgctttacctccaccatcccacatcttctctactatctctatccatactccaccatatcatctccgcatctcctcgccatctctcaccctactcctgtatcacatctaccgttctctcgcattcctcccc

SEQ ID NO: 688113 - DNA, 471 bp, Homo sapiens
atttagcgagccaaggtgtgtatcagaataatacacatttggttttgctttatccaaaaaggaagttggataaaaacttactaaaagccacttgacgtaacaattggcatccaagagatgttcacacatttatccgaagaatattgagcactacttcctgcgcagctgattctaattaagtggaatgcaactttgacaacgtattatgccccagtcagctaccggtcatttgaaacaaggcttaactgacacgtgatagtaatcataaaaagctgcgggatatttctcacatttagatgcttgcatatctttcaagccaaggagccatgaggggcaaacgggtggattcagagatttgaaaacactcatattgcagacctggggtcaatattacctgcaaggggatcttggcactcccaactattatgtggtgacaattatatgactcaaaaaacataatatacaggcgtg

SEQ ID NO: 688114 - DNA, 323 bp, Homo sapiens
ctaacgacccatagtacgcttctctattctcatcgggccgagggacaccctagaacatatgagaagggtgcatgccagattatgatccggggtgaagggtctgtgaaagaaggtgaggttgggccggaagattgccagatgttgcccggagaagatgaggcacttcatgccctgtgttactgccaatacaatggtgaacgtccaaaaggccgtggcacagattagaaacatcctgaagcagggtatcgagattcccagaggaccagaatgatctacggaagatgcagcttcgggagttggctcgcttaaatgggacccttcgg

SEQ ID NO: 688115 - DNA, 170 bp, Homo sapiens
  misc_feature (5)..(5): n is a, c, g, or t
gttanggctcactccaggtcctgttgccttttctggccccctacactctagttacagcactgtcttctgaagccaatactctgtccacaaatggaattcaccgctggaaaagaacagcagcaggaagcagatcacacccatgtttgaatggccatcctcagctgtcctgc

SEQ ID NO: 688116 - DNA, 691 bp, Homo sapiens
  misc_feature (450)..(450): n is a, c, g, or t
  misc_feature (586)..(586): n is a, c, g, or t
ccaggtgctcgaacacacataatccccttggtcagagagagcccagtcaccatccaaggtcccaggattagacaccgggcctgtctgacttgggtctgtggtcttcctataacacagtgaaaatggcagcagctgacaggcttcttgttttaagcactggctggggtccacctctcttctgaggctgcttcaagccctgccaaggtcctcccaacagagctcggtcatgccagatatgaattcgtttcacacccctctgatcttattccacgctgccaaacacactgcatccctccttttcacttaggcattctgttgaacggtgaaaacaacagtgttggacagcagggctgtgagaggaactgagggacacacttatgtttaaacactgagactttacccgtgttcagcccgtactcagtccttggaaactgaatcttcagcacaganttacgcggtctcttcatatggaaacagtggcaataattacagatgacctggtccagtcgctatgtccgtcttacttggtcgccttggacagtagtagctttgcaaagcgtttactgtgcctaaggcagtcccctancagagcgttcctaaacactcatattcttgggccccatccccagagactctgattcagtggcgtctgggtggggcacgaggcagacattgtcagtttagacaagct

SEQ ID NO: 688117 - DNA, 258 bp, Homo sapiens
cctcgggcattgcactggaagggtggaaccagcccaaattgcccccctgtttcacttccaatgattaggagccagcccaccctcctgccctgcccacacccctgggccctgggccagtcccttgggtttgatgttcccccccccccatttcccttaaaaggaagggccgggcaaggcccctactccctaaaaaaattttttgggtaggaaagggtgtgggatggtgggaggggaagcattaaaaccccccacttttta

SEQ ID NO: 688118 - DNA, 345 bp, Homo sapiens
gaaggactgagtgtcagggatttctctagagggtggagaaccagtgtttgtctgcgggtctgtcagcggtggaaagtccaagccgtaggagccaggtttcctttcttagctgatgtcttgggacagaacagcgtgggctgttactagctttgagtaggaagcggttggcatttacgcctgtaactgtattccttcttaatttatgtaaggttttttttgtacgcaacttctcgattcttggaagagatgacaacaaatttgggttttctcctgttatgtgagaacattaggccccagcaacacgtcatggtgtacggaacaaataacaagtgctgccgtacaaac

SEQ ID NO: 688119 - DNA, 487 bp, Homo sapiens
  misc_feature (136)..(136): n is a, c, g, or t
aagcgctgctggcaaagaggacgtcgcatcgaagagaccgcgtgtccttcgagcaggagttaactctgtctcctccttggtggagaacaagaaagctcagctggtggtgattgcacgcgacgtggatcccatcganctggttgtcttcttgcgtgccctgtgtcgtaaaatgggggtccctttctgccttatcaagggaaaggcaagactggtccgtttagtccgcaggaagacctgcccccctgtcgccttcacacaggtgaactcggaagacaaaggcgctttggctaagctggtggaagctatcagccccaccccaatttcagatacgatgagttcctccgtcactggggtggctttgttttgggtctttagtttgtggctcgtatcgccaagctaaaaaaggcggggggtaaagaacttgccactaaaatgggttaaatgtacactgttaagttttctgtacataaaaataattgaaataata

SEQ ID NO: 688120 - DNA, 101 bp, Homo sapiens
gggaagcagcacttgttgtgcctcatccatggtcttgtccgtttttctccttggttttccttttttaactgcacagggctcagtttaatcccccatttttt

SEQ ID NO: 688121 - DNA, 124 bp, Homo sapiens
gagggttgaggctccgattcttcactgtagcgatggactttgtggtccaaggaggtcccagtttccagaagagtctatcatgctgtgcttttgggagccaagttggttttattctctctagaat

SEQ ID NO: 688122 - DNA, 691 bp, Homo sapiens
ggacatggccacgctataggacttgaccttcaggctagaagtatgagaatgaggtagctctgcgccaagccgtggaggctgacatcaacggcctgcgtagggtgctggatgagctgaccctgaccaaggctgacctggagatgcaaattgatgagcctgactgaagagctggctactctgaagaagaactcacgaggaggaaatgatcagaccttcgaaatgtgtccactggtgactgtgaatgtgcccaagtgatatgctgccccgggtgttgatttctgactcaacttctgaataacatgagaagccaatatgaacaacttgctgaacaagaccgcaaagatgctgaatcctggttcagtgagagagagcaaggaactgacataccagcaaattgatatatacaccacttgaactagatatccagactaataaatctgagattactgaattgagacgtaatgtacagagctctggagcatagaactacggtcgcaatggccttgaagagcaatcgcctggaatgacctcctttggcagcaacacaggaagggtccgctacttgtgtgggagctcctcacagatttcaggagccagcattatcccgtactggaaatgaacagtgtgccaagcagaattcgaggactgaaaaccgaggtggccaggaatactgaataccaaaagtcctgga

SEQ ID NO: 688123 - DNA, 178 bp, Homo sapiens
ccgcggaccagactgatgctgagaacccctaattgctctgggtacgatttgtatgtttgaatagaagtggtgagaggggggcatccttgtccttgtccctgatctcagtaggagaagctgttcgattttccactcttgaaaatggtcatagctatgggctttatcatatgtggtgttt

SEQ ID NO: 688124 - DNA, 177 bp, Homo sapiens
gttcggttggtctctgctattgtggagataatcatattatggccaatggtcactgatagcggagctaactcagaggatagtcttgtgatatgtgatcagggtggacaggttaaaggagccacttattattaatgtttattgtaccaatgatagctagggtgcctgcgaaccctctca

SEQ ID NO: 688125 - DNA, 984 bp, Homo sapiens
gcccttcctggggtatttggattttgtttttatttatatgtgtgattgaggttaatgggaccttgagtttttttgccctctttgtgaaccccgttttcccggccccaacttttcctttccttcctgcgccccctgggccacacaaggttgtcccccttatgggtccctgtcccttcttgtgtttttgggtttggatcgtccatccaagagggtttaatgtggcctgggtttctgtctttctaacaggccccaccccggagggtcctcccagtggttcccttggggaccccggacggggcttcctgaaggggttaccgaattttggttgggcccctccccctcgagggttctctggggttccaggcttttgcgccttctgctgcctttccagttccaccccatagttcgacctcccctctcttggaagattcccgtgcccctcttctcttgggatagtgcctctttggaggtccaccttcttgggctctcgtgcttgttcgtccccttctcttcaagctttctttgttccctctgggaacacaagggttcaaacgcccagcgattgggccccacggccctggggattcccccacccccacggatacccccacggccccctctccccttgctcgtcttttccggggggcccggcgcacgaaatggaactccctctttgggtctccccgaaggtggggtcccctcccacgccctgcaatcctccgctgccgtaagaccctgctccccacgaggaaggggccttgagacccacacacggaacgctgtggtggcccctggcacactcacgggagacccccacgctgccccacgccctggttcttctggcgcatctcttccctcttgtcccgcaagattctgcgccttctagtgcctctttgaggggttcccatcatccctccctgatattgtattgaaaatattatgcaccctgttcatgcttttactaatccataaacgctttattta

SEQ ID NO: 688126 - DNA, 108 bp, Homo sapiens
tcgtacttgtgtgttacgtaatatatgtcagagttagaatctgctgcgttgtgaaaagaagcttagtgatgcggtattggccagatgcatgattatggaaaatagaaa

SEQ ID NO: 688127 - DNA, 1480 bp, Homo sapiens
ttttgttcgttgttagaatggtctaggccccctggtgtgggtgtggggtgtgtgtagggtgggtgtcctttctccgtgggggcctgtgaggtgtcgtcccccatgtgggtgtccctttgtgatcgaggggtcctcctattgtgggctgcctctgttttcgcgaatggtgtgggcccccctccttgaaggggtgtcccccgcccccctgagagggaggggtcttttccccgggggggatccctttgtggtcccccccttgttgggggcaccccccttcggggcgtccccctttggcgctgtgtgaagaggttttttttttggaggcaccttgtggtgtggcccccccctggggcccccccgggtgtggaaagttgtgtccggcgccactcttccccttggggggagccccacaatgtcccctccccgtgtggtcggtcgcttctccccccggttaaggagtgtcctcccttgggaaaacttgtggaggggaacccccgctgtttgtttttgggcgcctcgggggtgtttggagcccccacgccccggggtttcttgggggcgccccggggcccgcccacactggtgtgagagagggcaccgcccacagagaggcccggtgtgtttgtcacaaccactgtcctgtcgcaacaggcgcccaacacacccacagggtaacacagagtgtgtttttggggtctccccctctgtcacagctccccagcagcgccctctttctccccacttgtgtgtccgccccctgcggtgagccctctctactgtcccccctctgaggagcccctctgggtgtgtcctgcggcgtgtctcttgtgtgtgtcaccgcctctggggagcccacacagagcccacaccccacaggttctggagactcaccccacagagttacgtcacacatgtcacagccacacggcgcccctgtcgtgcgccacacatgctctctcacatcttgtgtcacacacacagaggggcgcgtgagagggtctctccagcgagaaggtgtgcgccacaaaggctttgaccacagaggtctcccgctgttctcctgagacacttcaccacgccacgcctcccacacacacaccaggcgtcccacagagacctatggctcactggagacgcaagaatgggagaaggcaccacgcggaagaaagggagataacccctaccaccccacgagacccccgcggctggacacacacgctgaactgtccttctcccctcccacgcctcttggcctctggcttttttaagcgctcatttaacctcgcacagcgctgagagccacacttcttttccctcttttccccacgcactcacactcccccaaggaaagagagcccaagttttcccccccataatacccttttgccgacccctagttccctctgctccagacccagacttgttatcagcctttcagggccctgggtcacccatagaataaaaggtagtaaattagaaa

SEQ ID NO: 688128 - DNA, 169 bp, Homo sapiens
cccctcccccacatatcactggtctcatcctcaaaccctgacctcggggctgagggatctgcaggggctgcttccagccatggccctgaagctgcagccagaattgtttggccaaataggggagggtgtgcttggcagggggcctcttggagccaaagggatgtggtgt

SEQ ID NO: 688129 - DNA, 90 bp, Homo sapiens
gcggccgcctactactactactgctcgaattcaagcttttaacgatgtacggggacatggcaaaaaaaaaaaacatgaaagttgtactgc

SEQ ID NO: 688130 - DNA, 121 bp, Homo sapiens
  misc_feature (52)..(52): n is a, c, g, or t
tggaccggggaagtcagcccagcccagagagatggaggtgccctcggggggnatcctggctctctatcgatctgccctcctaaaagcaagctgagggcgctgctcactcccctcggagcct

SEQ ID NO: 688131 - DNA, 1498 bp, Homo sapiens
gataagaaccaagagctggaagttgtgagtgcaagcatgacgcggagcagtctgcgagagacggagctaagcctaggcgagaggagcacccattgtatcgagctccacacggcatcgacggctgcgatgctttgctctagcggctgctagcaggagatagcgtcggacgtatgcgtggactaggatcggcgaaccgtgcaatgctggaagcagaacgtagcgcgagcttcgcacgggagacctggtggcgtagcagcttggaacgcgactgaagtgcatgatgaagcgatcgagggctgcacggtagcaggtggcagcgatgagaactacgaagctggaaggcctggcgaggaggtcacgcctgggtacaatgagtctacgggtccgcccgacagtgcgcagttatcgttgtgcaaggagagcacactatgagaaacgagcggatgcattgggttcacggggcgcgagtactccgcaatagaggaaagaaatgcgcgaatgtgaccaaggcaacgccttattcaccaggcacagagaagacctagataccaaatgcaatatgcacttatgcacagggcccgaagtactgtgccaacaccggcaacctcccagttccagctaccccgagtgcggccaggctgcttttgccattaagcttcccggcggggacataaccctttgcaaccaccacattataccgaagagcacgcaaagctggaagaggtacccacttcctggttcgggtagcgggcaacggcaagagggacgcaaaacacgagagcccgatgtctacaatacattatacccacaacgcaaagaacccacccttcttgtggaaaacggtctatcgcacatgttccacttttccacatagggctttgatctggcgcttcggccaaagaaaccgtctcaagacagagggagccccaacattcggaccacacacatagagggggcatacgtgcttacgacaacggcacatatcgaggtacaaaactcgtggcagcggacggctaaaggcgaagatctgagacgaagatgtgcgttaggagggagcacagcaacaggagttacatgacacattcagagcaagcggaaacaaagttaggttcccccgcgctttgcggacatactgacgatcgatataggggccattttacgccagtgcagcgcagcacgttacggccgacagatagactggtgtgtaccagtttcccgccggtgaccaacggtgggtagcgaggacagaaggccctatggtggtaaccattgtgccgcccgtgtcctatgcgcgcctcgccagtagagctaagagcaatacataaatagcccatattggggtccaatgaagttccgtgggcaaccgtgcgtaacacgcacagcatagacaactctcacagtgcaaagaaccatggacccagcgacaggggcacacaatggggtctgtgaacacgatacacacgtacgaagctaacacgaggagttcgatcacgagagc

SEQ ID NO: 688132 - DNA, 353 bp, Homo sapiens
atgttgacagagttggagaaccccttgaactccatcatcgacgtctaccacaacgtactccttgataaaggggaattcccatgccgtctcagcgcatgacttgacgcacttgctagagaccgagtgtcttcagtatatcagccacaacggtgcagacgtctggttccaagagttgcacatcaacactgatggtgcagttaacttccagcagttcctcattctggtcacacagctggccgtggcagcccaccaaccaagccatgccagaaagccacccagagtacctgagtcactgggcccagaggctggccccctggacatgtacctgcagaataataaagtcatcaatacct

SEQ ID NO: 688133 - DNA, 161 bp, Homo sapiens
  misc_feature (40)..(40): n is a, c, g, or t
  misc_feature (86)..(86): n is a, c, g, or t
  misc_feature (123)..(123): n is a, c, g, or t
actgtagtttggtatttccctttactttggtggcctgctnccctcatgccctggaatacaactcagagctccaggcagcggaaccntctattgttttgtttgccagaaagtgttttttttttngtctcctgtccaagttggaaatattatgcatgtgcagg

SEQ ID NO: 688134 - DNA, 268 bp, Homo sapiens
  misc_feature (120)..(120): n is a, c, g, or t
aagcagatacttcagattacctgagcaatatcatagacaatgatctcgttatatagtagagaggtgtcatttcaacaccaggatgaaattccgggtccaagaggaacgtctacaccatcnagactactgctagcctgaagctcagggtagtttgagcaacgttcgagacatgctgcattgcccttggttaacatctgatatgtgaagcgtgcttcagttcatacatgttcaggcaactgacgtctccaacaggattaagcctattggg

SEQ ID NO: 688135 - DNA, 1045 bp, Homo sapiens
ggagcgggtgaccttccggaggcgggagcgagcgaggaggccctggtgtagcgccgagcgtctgccgccgccgcctgccatgaacaactcgtggctgcctgacgtagatcgggcaagctcttcgtgggcggtcttgcactggagcactgacccaagagactctgcgcagctacttttcccaatatggcagacagtcgtcagcatttgtgttcatccatgcacacagcatcaaaaccagccaacccagtcttcgcagggcttatcgaggtcttgtcaaaaatttcaacaggcacgccaacactgtgattggggcacgtgtgctgggcccagcgagaccgggaccacgcgtgagcatggcccgtgaaaccatcggaacccggcaagcccaatgcagacaaccacccgagtgggcattgcaagcctggcagcagaaacacagggcccgcaacgcgcaaaggcatgggcagacagatggggacacgcaaggacgccgacttacaccaggttcacaagtcgaaagttacacgcacaacgttgatggatccgtgatggggacatttgcgcgtacaagcagaggtgtggtgggcttgacggaccactggacgacctacacgcgagcaacagttacactgtccaacacgtaacgagttattccaggagacaagtgggggtcccacctgggcacgcgggtacacggtccaagtagaaatccctcgatttagcaacgtggcccctggcacgtgaacccggccactggaacggaggcaccacacgtggcaaagagagttatgctgtgggggagaccactatcatgtgcaggttttgcaacccgtttgttgtccgcgcaagaggcacaaccgggaaacacacgacaagtttcccaagcattgtgggggagccacccccatggtgggcccctttgtgttccacaaacaccaccatttggcacgacattttcttgcagcccaagcgggcgaacacgctagtttccacgaattggggtgcgacacaccacaatacagaccaacgggtgtgggtgacgacg

SEQ ID NO: 688136 - DNA, 1232 bp, Homo sapiens
  misc_feature (379)..(379): n is a, c, g, or t
  misc_feature (381)..(381): n is a, c, g, or t
  misc_feature (407)..(408): n is a, c, g, or t
  misc_feature (411)..(411): n is a, c, g, or t
  misc_feature (419)..(419): n is a, c, g, or t
  misc_feature (423)..(423): n is a, c, g, or t
  misc_feature (435)..(435): n is a, c, g, or t
  misc_feature (488)..(488): n is a, c, g, or t
  misc_feature (542)..(543): n is a, c, g, or t
  misc_feature (552)..(552): n is a, c, g, or t
  misc_feature (591)..(591): n is a, c, g, or t
  misc_feature (596)..(596): n is a, c, g, or t
  misc_feature (615)..(615): n is a, c, g, or t
  misc_feature (621)..(621): n is a, c, g, or t
  misc_feature (652)..(652): n is a, c, g, or t
  misc_feature (654)..(654): n is a, c, g, or t
  misc_feature (658)..(658): n is a, c, g, or t
  misc_feature (678)..(679): n is a, c, g, or t
  misc_feature (690)..(690): n is a, c, g, or t
  misc_feature (715)..(715): n is a, c, g, or t
  misc_feature (726)..(726): n is a, c, g, or t
gtgctaacacccttgacatcctctttgcctaccggccaccccagacccccttcttcccaaccaaattaaatcgcctggctgggcgcacgcatctggtagtcgcagctactccggatttgaggaaggaagatcgcttgaacgcaggaattcaaggttatagagactatggtcaacccctgcactccaccttgggccaagcgcagcctctctctctaaaaaaaaagtttcacaatgttcactggttttgatccggggttaaatcccctcccgccagtctcctcctcgttgatgctgtcactgctgaagagcattttctatcacttcactcatcggctcaaaaatcttcaggaagtcttgacttgcagcattaaaagttcanangccttggctgaacatgccagtcttcnnccnctcgcccntttngcaatttcatcnctgtctttggtgaggtacaaagcgtgccaggtcagagtcagaagacatgaatnaaagtcatgattctgtgaccaaccagctacgtgatcttaggctaactacgtcanntgcactggnccggggctccttcccgttcctaaggagccgggaggcgtntcggncagactggattgtcacagntcactnccatctctaacaagcggacttctgagccccntngcgnccacaagtaggaccatctcnngcatcctcctnacccttctacttctagggaccacanggcttctgtgnccacttcttgctgcttcgcttttgccttcctaagtagactaggctttagaagagctacaataccagctcctttaaggtcgacctcctcccggtcacaaggcacttgcctcccactcttcacttgggacagtcctcttcacagtcagaatccgccacgtagtaagtgccgcttccaaccaatcaagaggcagttagcgcagacctttgagggacatccacttccaccaatgatcttcaagtcttctccagcgcctcgctttgtggggcgaggccaaccaccgcgatggccaatctgttgtaggaaaggtattccgggaactgatgagcgcaccaatcaggtaaaaagacgtcggggaagggcatttctcattggtaattgcgtccggaagagggacgggcctcgaacgacgaaattacgatttgattggtaggtgcgatgttgaccaccagggaaagtccaccttccccaacaaggccagcctgggaacatggagtggcagcggccg

SEQ ID NO: 688137 - DNA, 538 bp, Homo sapiens
  misc_feature (525)..(525): n is a, c, g, or t
gtagatctagaggatcccgacgcatccaacgccgcctacaggatactgcataatttcatatatatcacccaaaatgttgattctgtctggtttgtacagtacatccacaaaatttttgatattcttttactaggaggtggagcttagttcccctcccatgagtgtgggctggacttagtgactcccttcatgagtagagtatggacagggaataaagtaacttaacaatggagaaacctggttgacaccagcttaagcaagtgatcaaggctaacatcaccagtggtgagtcatgttgacatcgtcatgttgacctcgtcctccccgctatggtacgatatgaaggacacttcacttctgtggtattttcccccagaatctgtaagcccagtctcatcatgagaaaacaccaagacatgcaaatgaaggacattttacaaaatacctgacaagtactcttcaactgtgtcaaggagagactgggaaactgtcacagaatggaggaggctaaggagacgcggcgtnggatgcagtcggg

SEQ ID NO: 688138 - DNA, 201 bp, Homo sapiens
  misc_feature (7)..(7): n is a, c, g, or t
  misc_feature (57)..(57): n is a, c, g, or t
  misc_feature (95)..(95): n is a, c, g, or t
  misc_feature (165)..(165): n is a, c, g, or t
  misc_feature (169)..(169): n is a, c, g, or t
gctagtnatctctcagacacttggtcggtagaaaagatcccgcaccatcctccaggntccaatggccttggagagagggctgcagggcccacggncattgctgactctttagaacgtgctgacatggagccagaccactcggccctgagtgcggcgaggaccctntttntggatgtggaggagcgcgggccggagcattgt

SEQ ID NO: 688139 - DNA, 86 bp, Homo sapiens
tttatattttttatttttattattactttcagatacagggtctctcacttattttgcccaggttggactgctgggctcaatggatc

SEQ ID NO: 688140 - DNA, 482 bp, Homo sapiens
actcctagaggatccccgacttacggctcctagacgggaagggactgtctgtcagcagctgggacgcttctggatgctgatattagtggagtgctccaggagaagcaggtctcggctacgtgtagctaaatattcaacagttggtgccatactccagagggaaacattagattaaaattagtttgcgttccactgacgctgaaagggaaagcgggcattaagggccaattggtgggtgtttatttcctcatatgagatgacatgttagtattctactcgtgggattatgcaaagtccgtgtgtggacaggcctgatgaccttggccatggccatcactaacatgtagatcttgtctctattggattagcatgtccaggattcccatgactccacttcttgatttctgatttcttgccagtttattttcactgtgacaactgaacattttaagtgctgtcatgggatgactaaggacatattt

SEQ ID NO: 688141 - DNA, 162 bp, Homo sapiens
  misc_feature (101)..(101): n is a, c, g, or t
gcacagcccagctggggctaggcccgtgggaaggagagctcgttaatttattcttattgctcctattaatattatatgtttatgtctctctaggtgatggngatgtgctgatattttacttatcgaggtagatgtcctcgtgtatcagctctgattgcgttc

SEQ ID NO: 688142 - DNA, 151 bp, Homo sapiens
cgctagaggatctacggagccttacctccgggagccgaacctccgggagccttaccctccgggagccttaaccctccggagccttccagcgagccttaaccctccgggagccttaacctccggagccttaacctccgggagccattaccct

SEQ ID NO: 688143 - DNA, 728 bp, Homo sapiens
taacccctctttaagctttatggcgcgctcaagaaaccaaataaaaccccccccccatgtgtaaaagggggggcaggggacacaaagcgacaaagaacagacacagaaggcacagctcgggagaagaccacacaggtcgtggcccccgagacattaacgcggcactctggagtgggagacttacgggtgtaacacacatctctgggccgtggggaggcgagtgagggtagagaagcacgagagggtgtggagaagcactccgctggggaggcgcacctgaggacaaagagagaagacaccctctggtgagaaaatgcacagagagggggcgccgtgcgggacgcataaggcgccacatatggtacagcgagagacctggggaatccacgaggggagaacaaaaggtggacatagggatcccaacagagagacaacatcccaaagaacgcgagaacagaagagagagagagagcgagtatatcgagaacaagcagcgggcccctcacccacagagagtagcaccaacgcagaagtgagtctgctcgaggagagagacacaacgagagcagcggtagagagcacaacatggagaaatggcaacagagaaaaggcattacgccaaaggaagacgagaaaacagggacgcaacacacaaaagagagatagaaaaacaaaaaacgggaggcaaccaaaaaaaaaagaacaagagaaaaacagaagagacatag

SEQ ID NO: 688144 - DNA, 626 bp, Homo sapiens
  misc_feature (14)..(14): n is a, c, g, or t
  misc_feature (70)..(70): n is a, c, g, or t
  misc_feature (395)..(395): n is a, c, g, or t
cacgagggacttgnactcctctgtccagcttttaacaatctacattacaccctcttctgggtcacactanaatcagatctactctccagcatcttctagtttcctagcaagtatttcctactactttagattgaccacgatggcctagaactaccttgtgacatgagcatgagggcttctagatcagaagatcatccacctgttgatggaagacaaagaactgaaagagatcaagaccttaaacaatgccttcagaccagaattgagagatgaattttctaagctccacaacaagaccaagctaactgtacttaaatgatacattctacatgagccattcctaaaaagaacctaccgaaacgtctcaatcatcatccacaccacctatatcatgnatatctttaatatcactcacacagaatccatcatgaatgtcaatgtgaaaggtacccagctactgttggaggcctatatccaatccaatattccagtcttcatgtacaccattagcataaaagtgaccaatcccaaatcctacaaagaaatgatccagaacgggccccgaagaagaccctgtatgaaaacacataacccactgcatacccgtacaggaaaaaacttactta

SEQ ID NO: 688145 - DNA, 1041 bp, Homo sapiens
ggtgacattcgtcttttgagcctgtgtggcattccctgacgcaccgccgtgatgcccaggtaacgacagggcgatctggaagtccaagctacttggccttgaagatcactccacagctatatggatgattatcacgaatagatgttgtcatatgtggtggaggtccgacaatgtgtggactccataggcagcatgcatccagactccgccactgtcccattcggtgcgtggaaggcgtgttgggtgcgtgatgcggctacagtaacagcccatgcatgcgcataggccaatcgcgaggtgcacgctggcaaaagatcaaccccagtctactgagagaacagctagcatagcacttcaatattcctgcgcgcgtgaatgtggagcttcttgttgtatcagccagagggacggacgcgtcagctgtaagtatcatggggacgaatgatttgctggcccaactgagacggatgtcccatgcgtgactgcaccgtggacgtgtgtgcgcaatttggcaccctatggtggaagctcacgtgatgccagtgcccacgaaacacctgtggtctgcgaggtcccaggtaggaagaccatcctttttttaccacggctttattacgtgtattcaccaacgttaagacactctccaggtgagcaccaatttggaagagtccgtgaggtgatgttgcaggctagagtcaatgaccttggacgaacaacacgttggggaagccatgacgtaacgcacacgcatggcatgaacccattgtcgtcaatacagtctacccgccatatcgtcccttttggggcctgggtcatcgcacgcacacgggtggttccgaccaaatggacaaggcatcttaacgaatcgctggaagggtgctttggaatattcacaggaagggaacaggtcctggcatttctcacgacttccttggaaggggtggtccggacactgttggccagtagtcttggtcatgcagatttgtgctacccaaactggttagcatcagtaccaccatttctaatatcaagggggtagaa

SEQ ID NO: 688146 - DNA, 606 bp, Homo sapiens
ctggtacgggagtaggtggctgtgcacctgtgtgccggccacttggtaggctgaggcaggagaatggcatgaacccgggaggcaaagcttgcagtgagctgagatcgcgccactgcactccaacctgggtgacagagcaacacgccgtctcaaaaaaaaaaaaaaaaaacaaccaaaaaagattgttagatcccaattaggcaggaaaaacattcagcctgcagactttgagggcagtgtgaacttggctgcatgactgtggtttgtgactggaagcccaagagaaaagggtccatacagagtgaagctttgtgaccactttatgtgtgactatcaggtctagtaattctgaccattgtgagagaattatctttaaaaccagaggccaggcacaggggcttatacctgtaatcccagcacttgggggggggcgaggcgggtgaatcacgaggtcgggagttcaagaccaagcttgaccaacatgttgaacccccgtctctactagaattacaaaatttagccaggctttgtggtgtgcacctgtggtcccagttactcaggagactgaggcaggagaatcgcttgaatccggggaggcgaactttg

SEQ ID NO: 688147 - DNA, 877 bp, Homo sapiens
agtctgcgttttttgctcgccccaagtatagctgtgacgactctgtgacggcttctttctcgggggtctcgctggtgctcggggtatagccgccgcggtccacccttttgttgttcgcctctgcgcgccgcacaataccgcggggggtcttttttgcgtcacctcattgcgccgctgcctccaaaaagattccgtcctgcggtggttccacccctctttttatcgggtgtgccgggtctcgtccctctgtccaccgtgtccgcgcttcccgaatgacagtagtcgtcgtgccctcattttttggggcctgcatccttttttgcgggctccccccaaatgggggcgccttgtttgccggttttcccctgggggggctgcccctgtcggttcgcccctcccggggtctctggccccgtcccaatgaaatctccccaaaaggggggctcccagcccttttccgccctttgggtgggaaagggggggtctttggtcaatggggagtgcgggcgcgagcatgccctcagtcgaggctgggcggcaggtccttgcgtgtgctcatcgtcccctgtgcggccttgaagcagattcaagtccatccagttgcaataacatgggtctatacggctaccctggcaaggacacgcatgcactgctccaatcctctcatgctcagctgcctctgcggccacggacttctgcccttcatctgctctctcttactctcctgagcctagcccgtccgtaagctccctctcctgcctggttcccagggcaggctgactcagttgactgcttgtccaagcctggcctggcactgtcagtcagcgtaagaatggataagcctttcccggtttttgcttttcgttgtttgttgttc

SEQ ID NO: 688148 - DNA, 607 bp, Homo sapiens
tcagcccacctgcacccaggtgaaataaacagccatgttgctcacacaaagcctgttggtggtctcttcacacagatgtgcatgaaatttggtgtggtgactcggatcgggggacctgcctcaggaaatcaatcccctgtcctcctgctctttgctccgtgagaaagatccacctacgacctcaggtcctcagaccgactagcccaagaaacatcccaccaatttcaaatctgaatctaatttgaagcactgagaaggataaggcatccatttgcacaccaggactcctatattgcaacatgaattctgctaacaattgaacgcaagaacaaacactcaacatttatgatgaagtctggcgtagaacgaacgatgaaattagtgacgctttataaacaccgtctattcgggacaataccccaaatgaatcagcagtttaccacactggataacttactttctaacgacgaaacaacgatgactgtcgacgatgaacgcctgcaacggcagaccatctacatcaattcggcaccgcaccaacacttcactcttgttcatgccctaacggcaggaagactgacaattaacagcaactgacaatagccaa

SEQ ID NO: 688149 - DNA, 1065 bp, Homo sapiens
  misc_feature (52)..(52): n is a, c, g, or t
tgatatagtagcattttgttatcatcgttcgtttctcataagtgcattgtanctgccttgaaccgttcctgtcggtagccggcgaggttttactcctaatatcggttcttcgccacgtaacgccgttagattttggtggaggcgcccgccatactttttgaacacactattaagacgtcctcttcccggccgcgaaattatgcgcggcttgctcgccctatctgtcccgggccattttccctcgaaaggtcctgccgggcaccgtgcacccacaagatgggtggttttccgcggtatcttctgctccgatgtttttagggcgctcttccaccttggttgccgacaccacgtgcgatgggccaaaaactcgtaccaccaccgcgatttgggataattatattacggcgccctgctgccacgcgatccctgtccgagctcccgggaggtgttaaagactcctcgggggacgcccccgaaggtcttgtagcaaccaattcatgctaagacttcgtgacttctgaggcacccctttttcacccccagtcgtgcaacaaaccaatctgggccccacggaatcttacagcacccgcgtgccctcttgtgcagtgttcatttccgaagatgcaattctgcggcgtttgttgcaacacacagacaagtgaatacgtgcctccgcttcctcggtgggtccgttaaatccgcggcaccatcttctgcggcaaccatcggggcagaaaagagatctccacagggaacaaacacaaaccacactggtggtcaggcgctactagggccacccaacaggtgctttcacaacactatcaggacggtggctcccccatgcgtggctgcaagaggccgtggaggcaccatccccccatcctcccccagatatcacggatcctctgtcccacctacgctgaatacggtgctattcagactcgcaaagagtctccctcagaagcttttgtcgtttctggagcaaaagttcgccctcacactatcttgtgggagaagctttccggcaccctttcccccaaaaaaattcttcttcaaacaaaaaca

SEQ ID NO: 688150 - DNA, 678 bp, Homo sapiens
  misc_feature (83)..(83): n is a, c, g, or t
  misc_feature (99)..(99): n is a, c, g, or t
  misc_feature (454)..(454): n is a, c, g, or t
  misc_feature (633)..(633): n is a, c, g, or t
cggcagcagcgcaaacgggtctcctagagcccaccaggccctggaactcctgagtctaagaaggccaccagctgtttcccacntgccccattgactccnccagagaacctggaccaattttgcccaaccaaggctgggggctccctgggccccaaaaaagtaaccccgaagcaagcgcccaagccgtttaaacccgtttggaaagggcggtgcccccgagcaacacgcacaaacacgggccacgtccttcgccagaccgtctcctttacctttatataccccaacggtgccgtttgaaacccctgtggcgcccaagttcgaagtggcccgttcaaggcatctccccttcaaatgcagacgaacgcccaaagaggaacaggcctacgggagacaccacagcgcgtttcctgtccgtgtctgtgtggatgccccttcacacgcgaatagggcgccnttgttccaaatggggctttccccccacaaatcaatcctccggcaactggtggggaaaaccctcctgtaccacgaattttctttcccgttcgacccaattttggcccaaacactagcaccaagcaagttccgcaagagctgaccccggtccctaacattgtgctatgtgcactgacacanattttgggggagtgaccccaaccgcgcatgcgtaaaggcgcttaa

SEQ ID NO: 688151 - DNA, 160 bp, Homo sapiens
aatggtaaacagggaactggaggattagggggagggagaggggaggggtgatcagtgaacgcacccgcaggcacctgagcctgcccagtgctgtctggggtgtcttgagtgtgtctcccgtgggagtggtgcatctgggaagctgggcaaatgtgccctg

SEQ ID NO: 688152 - DNA, 332 bp, Homo sapiens
ttttttttgagatggagtcgtcgctcaggctggaatgcagtgtggtgatcttggctcactgcaacctctgcctcctgggttcaagcaattctccagctttggcctcccaagtatctggaactacaggcatgtaccaccacactccgctagtttttgtattttaagtagagatgcgggtttcaccacgttggccaggctgggtcttgaactcctgacctcaagtgatccacctgccccggcctcccaaagtgctgagattacacccatgagccactgtgcctggtcaatacatggtattcatagagtccctttgctatacaggtcatgctgac

SEQ ID NO: 688153 - DNA, 1067 bp, Homo sapiens
agcgggaatggcgcgtgtgagggcgtttccggagcacgcgccgggcgggggccgctgacgtcgggctcaggtgcgcgcgcccgtccgcacggcccagttggcggcgcgcacctacaggtggcgggcgtgcttgcgggtgagtgggaccgccagctggcgtaggcagtctcgcggttggaccctgggcgtctgcggctcggggggcagcggccggtgatggggccgtcattgggtccatgtcgctccatgttgagcgggccggcgggacggttccgtgctagagagaagcttgcgcacgtcacggtgctgattgctgcggagaccctgagtgacggccggcgatggccattgactgttgttcccgggacccccatgaccactttcagcgcggcccagtggcacctttcgaccgacgcgggaacgcctctccccttccggtgcacgtggggccggcgcgccccggccggctttcaacttatcgcgctggcgccccgtgcgtccggccccaggcttggaacgctggcgcaagctttggttctcccttcgcttcccaggcgaggctgtcactgctgtgcccgaccaaggggcgccgtaaggaaactccccggcgaccgtctccgcggaatgcgggagcgccccggcacgccctctgtggctgggtgccccaccagcgccggtttaaccccccccggagggggggagacattgggcaaaggggggactgagtgcgccccgccggaagaggccccccgcaccaggagagtcgaggggcactcccgcggctgaggagtaccccccaagccgcgccctatggcagcggggggccaccacaggcagggccgtaagagccgataccccttgccgcgacaccatccaggaggagccgcccctacacaacagtattctgaatagtcccccgggtcccgaaccccccagagacgccccccattttgagtaacataacacaccagggaaaggcttcaaactatggggggccaggataccgcggagcggaggctctcacgagcacgaagagtgccacacaactgttgcgggccaaccgcgag

SEQ ID NO: 688154 - DNA, 167 bp, Homo sapiens
gcgcgttcgtaccggtcccatgccagttatatcatacataaggctgatgttggagggctcaggagagggactgttaagattttaagaaactctcctacccccaggagtccctccctccctcatcctcagaaggagcagggatgggggagggagggactccagtggag

SEQ ID NO: 688155 - DNA, 105 bp, Homo sapiens
ggatgcataatcacccccaggacacctccatctcgttgccgattcatatacttcatagtcttcatctggagttgtgcctgcagctgggcatgatgggtacagggt

SEQ ID NO: 688156 - DNA, 144 bp, Homo sapiens
  misc_feature (131)..(131): n is a, c, g, or t
gcgtttggcatgatttcttcgagtatttggacctgactcaaactgcatattagtccttcaaacatgacaaaccagaacactccagaatatatgaaaaagataaaacagcgtttgtttgaaagatttgcgcnatgtatacctcat

SEQ ID NO: 688157 - DNA, 153 bp, Homo sapiens
cacgaggagtatgctgtccaggtttgtaccgcaagaacatgagattatcacatttggcctacgtggatatctgactccaccatctatttttgtgtgtgcacactccacaacattcacacactgctgcgtttgtctgacgtggcatttctcaca

SEQ ID NO: 688158 - DNA, 432 bp, Homo sapiens
cgttatgttctaccatcgtggggtttggagcatataatttgtacgaatactggcgtagaatagtcgataagatgggatctattctgtattaggccagcattttctgtatgccaggaacttatcctctgtacacttgttccttctttccttcctggagtttatacattagggatgaagacttgcattcacggagtctggtgtgatcagcattgtatttgggaagtacgtatattgtgggactgaacagtgagaacctaacccagtagttatcctcgttggctgtctttgaggaattgtgtctgattttgggatctcacagatagagataggattagtaaaaatgagcccaggctagaaaggagactgtgtgaggccaggtatatcctgttctgggaacctgtgagtgctgtctgactggtagaatagccaaaa

SEQ ID NO: 688159 - DNA, 244 bp, Homo sapiens
tgaatcagaggtgctcacaggacatactgcactgcacggcagtagtcgttgtgtggattgctggctaggatgaagaataaagatccatctgcaggatgctgcgcaagagggattgctgcttatttgtggtgttcacttggagtagggcaagctgccaacaagctctgtcccatagggctggtggtgggggggtgcagtaggatctgggctaggaaagtcccaggagctctggcctgcaggggtt

SEQ ID NO: 688160 - DNA, 363 bp, Homo sapiens
  misc_feature (358)..(358): n is a, c, g, or t
ggaggtagggctttgaaaacaccttcatccaggcggggcgagggtggctcacgccttgtaatcccagtagttggggaggccaaggcgggcagatcacctgaggtcaggagttttagaccagccgtgccaacatgacgaaacccggtctctactaaaaatacaaaaattagccaggcgtggtggcaggtgcctgtaatcccggctattcagaagtgcgaggtgggagaatccgttgaacctgggaggcggaggttgtgatgagccaagattgagccaaaaaaaaattagcagaatgggggttgggccctgaaaaattagtccgatttggtggtgcttgacttgcatcgtctcaggagancccaa

SEQ ID NO: 688161 - DNA, 303 bp, Homo sapiens
ttccatcagcagtgtaaaagtgtcctatttctccacatcctctccagcacctgttgtttcctgactttttaatgattgccattctaactggtgtgagatggtatctcattgtggtatttcatttgcatttctctgatgggagaagactgcgcgcatcttgctccccatcagataatgtttcttggagacatcccacaatgggctctgtttttattggaagactcattgaacatatgcaagaatatgcctgttcctgtgatgtggatgaaattttccgcaaggttcgattttcatttgagcagc

SEQ ID NO: 688162 - DNA, 119 bp, Homo sapiens
agataagtaggagagattaatatagagaggtagagtataatcgtggtagtaggttcactggctaacgtggcgtaggcttgccaatgattgtgaggggttggagtttatgataccgcgaa

SEQ ID NO: 688163 - DNA, 221 bp, Homo sapiens
ttgactggtgttgttaatccgtctctctggtattcagcagcagcaagaaccctatcacaaacagcactatggactgggcctgagttaatcagagtggctctggatctttgtcctgtagacaaactagagcgaggaactatcctcccttttattagcgttatggaaaggacaccagccaacccagccactctatcttgaaaactcttgcttgggctctgaca

SEQ ID NO: 688164 - DNA, 808 bp, Homo sapiens
atataccatctcacttctaggaatactagtatatcgcgtcacacctcatatcctccctagtatggcctagaaggaatagtactatcgctgtatcattatagctactctcataaccctcaacaaccagtccctcttagccaatatgtgcctattggcatactagtcttgccgcctgcgaagcagcggtgggcctagccctactagtgctcgaagtctccaagcacatatggcctaggactagcgatagcataacctaaacctactcgcaatgctaaaaaagtaatcgtcccaacaattatattgactaccactgacatgactttccaaagaaaccgacataatttgaatcagcacaaccacccacaggctaattatgagcatcatccctctactattgttttaagccagagagtcaacaacaacctatttaggctgttccccaactcttttcccttccgagcgcgccctaacaagccccctccgttaatagctagactagctgatctcctacgcgcctcacaatcatggcaaggcaacgccagttatccgagtgaaccactatcacgaaaaagagtctaccgtctctatactaatcgtccctacaaatctccttaagtgtaacattcacagcacgagaactaatcatagttttatagtcttcttcgaagaccacacttatccccaccttgggtatcatcagccgatgaggcagcagcagaacgcctgaccgcaggcacatacttcctatgctaaccctagtagggtcccttccctaatcgatcgcactaattacatcaaaaaacctagg

SEQ ID NO: 688165 - DNA, 156 bp, Homo sapiens
ctgtatacgctccgagacctggagcctgctctccgctttgtcttctgctttggtattcatttctggtgttcccaaaccaaagcggttctctggtaagacctggtgctgcagtttaggccctgcaccacctccatccggccattcgacgcctccgga

SEQ ID NO: 688166 - DNA, 269 bp, Homo sapiens
atgtgaaaaatccctggggcaccggggcagttcagtctcatcagcagtcaaagaaaatgctccgaagacatatttaatcacttcaaatacacagttcaactgcacacgagcaccatgtacattatcagattctttttaaaaaatcactacaaaggacaaaattaagaccagtagagcaaagccaaagaaaactgcttcaactatatttcaaggaatcatatataattgtggagagttgtccacagtctgcatgtctcctatcttcccag

SEQ ID NO: 688167 - DNA, 345 bp, Homo sapiens
atcccatgggttatctgtatggactgactgggttattgaaaggactagccccaaactagcattttagggcccttatctgtctttatgtcttggggttgggggaggtaaaaaccaaatgaaacactttcaggcccttccttcctcttgcaggtgttttttaatctcctttactagaggagataaatattttgcaaataatgaagaaatttttttagtaaaaaacgcaggccttttattttttaaaatgatgataggataaaaatgttaggaaaacagaatgattttagattttccagagaatattataaagggctttagggatgaaaataaatcatctttgtttga

SEQ ID NO: 688168 - DNA, 261 bp, Homo sapiens
  misc_feature (36)..(36): n is a, c, g, or t
tgaacaaaggcaaaacaccgagaagggatcatattntgggttttatgtggaccagttctatagctcgtggaagaagaatcacagcaataaacaaagagtcctgggtcattgttcgtttgtaaaattggaaagactgtgttttccacaccacagccaacctccaatattcggtaggtggctgaggatccaggaaactcatcaccacaaatttccaggtcactaactccctgcagtacatcgatgaacgcatgatggagtctg

SEQ ID NO: 688169 - DNA, 115 bp, Homo sapiens
caacatatggtattgtgatggatggggggtccccgaccgaatccaggtgaccacggacctgtaccaggttctagctgccagagggctaccagctggagtgtcgaggggtggtcaa

SEQ ID NO: 688170 - DNA, 1360 bp, Homo sapiens
ggccctggcggagcagagacaggccctcggggtggacggtcttagagtttcataacgagcctgacgagagacttatttactacacgatatgtgtaaccacacccaaacgtacctgtgaccctaggaccaggctgctaacggatgtcttcaaccaaacggactatggcttaggcaatggtcaacgactagaccctgacaaaaccaatgtcttgatagtggacgtggacattattactaccttactggtcactgcttaccactgactaccacgggaacacgcactcacggcaaccctacgacaacccaagactactcacggctctgtaaacctactgagaccttacccttacaacccaggacacactggacacacacgaccacactacctactacgggaccacgacacactcttcattcgggacgacactacagttggcctgacacggcgtaagacaacctgacctctttgattacccactacatttgtaacgcgacagcaccaaggacacacgaccagacgctcgggacacactatcgacacggtccttcctactaacagcggggactctgtattaacgctcgtatgggccggtaaactagtacgacttactacggaattatagtacgtgggacgcaagccattactaactggtgcttgtgttgattagtggattgagccctttcgacaaggcgttggacttttgcaatgggcttatccacgacattgcaagtttattgaccatcaggcctaatattctcaaaactctgtcccacatgagcttacttttcgccccctgcgtgttccacaggctggtgtgaacttcacacgcttgtcagacaccaatagtgaaaccggactagggcaacctggaactcctggcaaggtaaccaatctagccaagaacaggggaatcgagtacagatttggaccacattcccttaacaccattgctttggacacagccagcggagaaccaaagaccccgcacagggcaaacgcctgacaccgacacgagccggcactcgcacacacacacccaacaccggcaacagaacataagagacaagtcggtatggacacggtagtctgtaagacgacccttgtaccgaggtataaaaattgtgtatactagcataataggactgaagtaaatcatgctgagagataactgagtgctagtaattcatggacgacaatgatatatgagaacaagaaaagatctggcagattcaaaaccataatatggtgacaacgtcgcaagaagtaataactaaaatacaccagaaagatcatctccgaaccattgattgattacaaaatgaagtgctcgtctcttctgctacgcttactctctcctga

SEQ ID NO: 688171 - DNA, 763 bp, Homo sapiens
  misc_feature (362)..(362): n is a, c, g, or t
  misc_feature (395)..(395): n is a, c, g, or t
  misc_feature (413)..(413): n is a, c, g, or t
  misc_feature (446)..(446): n is a, c, g, or t
  misc_feature (459)..(459): n is a, c, g, or t
  misc_feature (505)..(505): n is a, c, g, or t
  misc_feature (730)..(730): n is a, c, g, or t
gacggcccggcgcgtggctcgggctcgggcggagctggagacgtgtggagctgtcgaggactcgcgggtgtgcagtgcacctatgatatgtgttagaaatagccgtaaacttgggttggaatgaagaatgtctctcaatccacctatatttctcaaacgaagtgaagaaacatagtccaaaattggtggaaacaaaacagtcacaaactacttccatagcttcagaagatccccttcaaaacttatgtttagcatctcaagaagttcttcaaaaagctcagcaaaagtgggagatcaaaatgtctcaaatgtgggtggtcccagaatgttctactgctatacatgttatgtccagttgaaantgtacctattgaacagattccacttgtgtgaangcttccattgaagattgncatctattaaacttccaattgaaccaggatggncaaaagtacctgntatacatgcaaaaatctcttagcacctgatttgtgtaaactttttnacagcgtatccgtgtatcccagaatatgacgaaaaggaccatgaagtggcactcatttttccgtggacctcagtctatctccaataaaagatatttcttttcatctgcaaaaagggttcaaaataatgttagaggcaaaatgatgacctgacagccatttttaaacggcaaagactgagaacagagtctggatttgatgacagcagtgcaagcccacctgaaaanttttttagatgcgcgggcaacacaaattccgtg

SEQ ID NO: 688172 - DNA, 189 bp, Homo sapiens
acttccagagtaggtatatcatttctaaatattcagtaagaagtcggcctggccgttagtggtggctataggctgtgcacttacattggtatttggtaattcattttctttgggatgtaaaatttttaagcttagttgtatgttatttttcaaccgtcttttctgtttatcttctactctggaaaggtg

SEQ ID NO: 688173 - DNA, 300 bp, Homo sapiens
  misc_feature (95)..(95): n is a, c, g, or t
catggatgagccttgaaagcttgctaagtgaaagaagccaggtgcaaaagcccacatattgtctgactgcattgaaatgcaatgtctaaaatggncgaatctatatagagtgaatatagattagcgtttgccagggcctggaggctgtgagagatgaggcatgactactaagggtttggggtttctttttcgggtgatgaaaatgttctgaaattagtggtgattgtgcccgattttgagaatgtactaaaaaccaatgaactttaaaaaatcccaataaccaaaaaaaattccccagaa

SEQ ID NO: 688174 - DNA, 513 bp, Homo sapiens
aaccccagcaaagaaggagccagcaacagtgtcaatagtgtcagggtcgagaaaccctgcttttttgctgctgttgtttgttttttgttttaaatcccctgttctactttgaaggttaaaaggaaagaacagcacgctgatgagctgatgccaaatccacttttgctactgagaccatttagggcccaatttcaggatttccgggtggaacctccaaccctggtaaagctgcccttggtgtatgtggctatgagaaagtgcttaaagcttcaacctaaggctgtgctgagtgggcctggtacccaagacacagagacattctgtttggtcagagagagagaaaagggctgcagagttaggtcagaggtcagccctaagatggtcaccctaaaatgaaaactgctatgtaaacctgtggtaaataccagatgaaaactttgaggcggagcttgcagtgagccaagatcgcgccactgcactgtagcctgggcgacagagcgagactccatctca

SEQ ID NO: 688175 - DNA, 161 bp, Homo sapiens
atcagtactacaggacggcgatgatggtgtcaggccagcagctactgtgttggttagttctgcttcaatctgaatggtagtcaagttgtagcgttcttccttactatatcattacttgtttatatgtgatagaaatttctgaggaacttgaaaatgagtta

SEQ ID NO: 688176 - DNA, 681 bp, Homo sapiens
  misc_feature (43)..(43): n is a, c, g, or t
  misc_feature (88)..(88): n is a, c, g, or t
  misc_feature (171)..(171): n is a, c, g, or t
  misc_feature (173)..(173): n is a, c, g, or t
  misc_feature (190)..(190): n is a, c, g, or t
  misc_feature (355)..(355): n is a, c, g, or t
  misc_feature (372)..(372): n is a, c, g, or t
  misc_feature (375)..(375): n is a, c, g, or t
  misc_feature (402)..(402): n is a, c, g, or t
  misc_feature (414)..(414): n is a, c, g, or t
  misc_feature (421)..(421): n is a, c, g, or t
  misc_feature (439)..(439): n is a, c, g, or t
  misc_feature (460)..(460): n is a, c, g, or t
  misc_feature (464)..(464): n is a, c, g, or t
  misc_feature (467)..(467): n is a, c, g, or t
  misc_feature (472)..(472): n is a, c, g, or t
  misc_feature (513)..(513): n is a, c, g, or t
  misc_feature (528)..(528): n is a, c, g, or t
  misc_feature (544)..(544): n is a, c, g, or t
  misc_feature (572)..(572): n is a, c, g, or t
  misc_feature (592)..(592): n is a, c, g, or t
  misc_feature (595)..(595): n is a, c, g, or t
  misc_feature (605)..(605): n is a, c, g, or t
  misc_feature (675)..(675): n is a, c, g, or t
cgagtgtccggagctccgtggtttctgttggacctcgcgggangcggttttctcccgcctgctgtgctctgtgacctctctgctgccncctccacggtctctgggcggagcaatccacactgctgaacctggggtggtttggaattcttcggcgaagtggagcgggccganantgggtttcccgtccccnagccctccctcatctcggagatgccgcacttgtgagcgacagggcttcatttgaattttcgcacctcgcgagttgcggagctgcatctctgaagctgcctcggtgaagagccacaacattattttttttctctttgggaaagtagctgtctgggatttaaaatcntatcttccctgcaaatnacnaggttgcatcttcactgataggaatanatttacttcacnaaagganatgaataaaaataaaaanaaccagtctctgataacaagnagcnaanatccnaaaaaagcagtaaaaaaacgtcaaaattcaacacggaattncggaacaaataattnttctaggttttctagnaaaagcttaaaactgaattatagactanaagaagatgtaactaaatcnaanaaaggaaaanatgggagatttgtgaatccgtggccaacatggaaaaacccctctattccaaatgttctcagatggctganaatgga

SEQ ID NO: 688177 - DNA, 194 bp, Homo sapiens
ccccagtctgaggagagccaagatcatcacaccactgcactccagcttgggcgatagagcaagactccatctcaaaaaaaaaaaaaagtatggggcgtgtttcaagagtgatgtgaaactcaaattccagtttccaaacacttccagttttaccagcacacaaccacccccatttgtttacgtattgctcagcg

SEQ ID NO: 688178 - DNA, 973 bp, Homo sapiens
ctcttgttttcctcttttttgtgtttctttcttctctgttcccttcatttgttttgtttgttgtttcttttctcgtttttgtgtttctcgtgccttctctccttgtcgttctcttttctttttgttttcttctccctctcctctggcttttggtcgtctcctcctctctctctctctctctcttctttggggagtcgtgtttcccctccccttctctctcattttcatctcctccctctcctctcttcttttttttctgtgttatgtgtgtggtgcccgctcctccccctctctctctctctctctctctctctttctctctccctcctcgcggcggcgctctgctgtcgtgtgcgtcctcctctctcccttgtgcgtgtgtggtgtttataacacaccgccgcgcctgttctctccctccctcgcgcgcgcgcccccgcccttcttattttcgtttttttggtcggacccccccccctcccctccgcgcgcgcgcgcgctctctctctgtgtctgcgccgcgcgcgctcgctcctcgctgtcttcgcggtctgctcgcctccgcgcgcggcgagaggacacacaaatctcgccccccccacccctgcctctctcaccactctcttctctctcccctcccccccgcgcgcgtgtgtgttttttgatataaaaaaggtgtgtgtgtgtatatatatattatggtttttttatagcagcgcgccgcccttttttttgttttgttttttgtgtgtggtttctctctctctctctctctctctttctctccctcatttttcttttgtttagtgtagtgttgttgtgtgttgtgtagtagagagagaacgcgccccccctctctctctcttttctccccgcgcgcggggagaggagagagagagtgagtgtgtgttgtctctctctctcctccgagagagagagaaaaaaaaaaagagagagaggagggtgagagaga

SEQ ID NO: 688179 - DNA, 1376 bp, Homo sapiens
gtaggtgttaaaaggcgttctttctttctcccctctcggggggccaccaacacacatagtggtggggccttttcaacaaaaggttggttcgcacaagcgaaacagtgtggttgttgctgtcggctcccacacgagaggaaatagtggtgttttctgttgttcgcgggtgggggcgaaaacccgcgttttgtggtcgtggtggggagaccacaacgcgccgcgacgaagtaatgtgggcgccgcccccccgccccgagttgggggagaaagcacacagccctgtgggtggctgttaccaccacgcggccttcactacgcggtgggaagagtgtaatttccccccctggaggaggcccatcttccccaagggcgccccacatatttattaggcgtccccccgcgcttttatattgccccccccccggggtaaatttggaggagtttggccggccacacacacgggcggtcatcacaccaaatgtgcacaaaaggcggcaagagttgtttgcggcttgtagtgtcctgtagaagggggagagaaacagagtttgatggtccccccccttttcctcgggtgagaaaaagcgctcgggagaaaattgggggcgcgctcgacaaatatttcttctcgagaaatgtcttcgggtgagagagtgctcgcccccctctgtgtgtgagataatatggtgttctcctcggcaccacagccccacatctgtgtgtgtgtttggagagagagactctttctctcacagagactcatttgtccacccctctctgtggggtgtctcctcttttgtctcgctgttccgtcgagtatttagagagaccacagaccacagctgtgtccggtgtgggtgtgttcactccacacaaccacactgtggacacacacagagaagaggctctgtctcggagagctcgcgccacacagagtgcaccacacaagtgtctcgccccacgcagaaaggctccacagagaaggcgtaaatagagataattattccctcatataatacctcgccaccgcgccacctctcttataatctacagcctgtggtgggagaagagaccgcgtgtctccacagagacctcgtgttgtgttcacacttggcgccactcttaaagtgttatagtgaagtaaaagagactggttataatgagataacacacatgcactctgtaaaccccttcacagaaaggaaaaggagagaaatgtttttgttggagccccctttggttttctttttttgcgtgttggcacacttttaaagttaatatatagattttttaaatccaatactttttaatggaaaccaccttgaccccaaatttgtccccagaattttgagaccccctttaaaaaatttaatgag

SEQ ID NO: 688180 - DNA, 694 bp, Homo sapiens
gaagagcaacgtgctttgggagcagagaagagggagaaagcagcatcttgcctggatgagccaggggacacagaagagaagcccacatatctcatgtaatctttacgaacatctcattgcaaggttccctgtgttgtgaaaatacatgagataaatcatgaaggccgactatcatcctcctatctgctgggcacaagtgtcctgggctggaccgattatcaacagagaggcttatcatgacttgtatgctagaagatgaggcttctgggataggcccagaagttcctgatgaccgagacttcgagccctcccataggaccagtgtgaacccttccgctgtcaatgccagtcttcgagtggtccagtgtaactagatcagggtctggacaaagtgccaaaggatcttccacctgtacagaactctggatagaccctgcagaaagaagcaagaataacgcgagactgcgacaagatggaagactttgaaagaaccctgaagaaaccttcacgcaatggattcataggtcaagcaagtagaatgtaggcaaaagtgacgtccatggagacatttaagaacattgggtgacagtacggaacagaatttatactgggccaagagatcaagggtgaaaggaaatggccagagaaaaatgcccaaaagtctagcaggagactggcgtgccccatgagcctg

SEQ ID NO: 688181 - DNA, 101 bp, Homo sapiens
ctgctaatggatcatagctctgtcaccaggcatgagtgagtgcgcatctcagtactgagcttcattctggctcacgcgtcttaacttcagcctctcgagta

SEQ ID NO: 688182 - DNA, 176 bp, Homo sapiens
cctgacgggttaaaaaaagtaaaaggaactcggcaaatctagccccgtcctgtataccataaacatcacctctagcatcaccagtatcagaggcaccgccagcccagtgagccaagattacaccactgcaccccagcattggctacaaagtgaggccatctcataacatataaaaa

SEQ ID NO: 688183 - DNA, 878 bp, Homo sapiens
tacttctatttgctgcataccttagtacagcctgttgagacgagtggtagttataagtcattgtccatttgtaaaacataatttgataaggaatgctcttatctcgagtatgtagaataccacctactggacagaacaattttggtactcacaaacactgtcattttcttagagatggcttgagaggagtaccactatggtttaaggcttgcagtataaatgccaagcactgtagtaccttggaatccagtttattcttgtgctaggcagaattgtaaaatagttaaaaggtcttatcaagtaattcgccgattacaaagacaccattggttttttatttcattcttggttttaactcatgtggtagtgatattaaatactgttctgatcaaacgggttcaaagtaaaaggtaagtttcacatttcttttaaagaacctctgaaagtgtaacagttacgccatattcataagtggtagagaaaggtataaaatttggaaacatttggtgggcatagtagtgatgggtgaaaaggatacttatatcaacaatgagaatgtgtgtactgtggaagtagggagctaaggggatgttcttcagtaagtagaactggaacgttgtctactaacagtgttttataatgcttgtcagtaatttatcggtgtagatttaattcagtggagctataagtggttctgaccgtactgattaattaccaggattgttagaggtaacgttaaatgggtaggttaaaaagtggattttaagaaaaaagaaaagagtggggcgcccgagataaacatttggggccgagagatagttgggcagacggtagggtcacaaggggggtgaacagggttgtaaacgaacgcgcaggaa

SEQ ID NO: 688184 - DNA, 396 bp, Homo sapiens
ggaggtgatctagaggatcccatgcgcgagctccatcaaagtccatctcttagccgggtatcaaacaaaccgtgagttttccagaatctgtttcccagttttcccctcagctttcctggtctcccatccgaactgcttctgtgtgcacctcttgttctttctcttggctcccagtcttgattcctgtgatcactcttgcatcactaatggcacaagtgattgcaggtgcaactctgattagcctgcgtccacacagtgatcgatgatcctatgtgcctagaaaggacactgtgtgctgctcatgacctgcaacaggaacaaagccatttcttgttagcagtgtaagaaccttagagcaaaggagttgaccttctgatggatggaagcgtcgcgcat

SEQ ID NO: 688185 - DNA, 1448 bp, Homo sapiens
gaaggaggggccccgccgcctagagggtggagggagggcgcgcagtcccagacccagagcttcaaaacagcccggcggcctcgacctcgacaaccccagccagtccgtcgatccagctgccagcgcagactgtcagcgcctggcacatccgctgctctgtggctttaaaacgtgacccactcgcactcgacatcgcacctgccctgtgaaaaatgataggttgcttacttgcgttacatcatcgaccattccacatcacactctgcaagcctatgctgtaacagttgccaaccgatcggacacatgccatggcctgggctacggagaatgacgtatttatctgcgagcattgtcttgggaggaaatactggtagccagaacaaccgaccgaaactggccacaaggtcccgtcgaaatgaaccaggaattggcaaacgcaagtaacgtcgccaccgccatagccacagcgacggagacacaagggccacgacacccatggattccggtcagtccaaccaaatatcatacgttggcgatgccaagtacagcccattttcatatcaagtccatttccggtaggcataccacagccactccattccaccgagcgcgttggaaacgacacaggggaacggaaagcaagggactagggatcccgttaaacgcagtagccaatacgaatacacaaggacattagattggatacaatggatcatggtgaaatgcagcacaagtgccaactgggcagcgcaccgataccacaaaaccacatcacacaaggcacaacaggaggacacgacgtgcatacggaacacattgcacaacggaagcagaagaacaaccaacgcacgaccaaaatacacgtaagcccagcacggatagaaccccaaagcgacgcacaagcaggacatgcacatacacaagggcaattacacacacaccttacaccacatccaccagggagcacagcattgtgaaagcatggagaaccaaaattgagaaccacatgtgcacaaaccgatcgatcaaacacaaggagacagcggacacacttgcaacacggatgacacccgtaggaaagccacaccacgggaagaaggccacgagcgacacaacagctgcgcagagagccaccgggcaccagcctggggaggatctgttccaacccgagaccaggtcgaccaggatgacgaagacgcaacatcacacacaatgataacgaaagcatcaaccacacagatgcagcggcgctccctacagcaacgaccagatcatacgcgcacggaatcgacacccacgcaaccacgagggcacatggcggactcgcagctcagaaagaacgcgcgaaacacaaacgaaaacacgaatcacagccccgaaacacagtagtggcgacacgccgagacaccagccgaacacgaagagaaccaaaaccacgatggtcgcac

SEQ ID NO: 688186 - DNA, 289 bp, Homo sapiens
  misc_feature (22)..(22): n is a, c, g, or t
cccccccttttttttttttccncaacagcgtttggacttaaggcttgttttaaaaaaattttaagatttacacaatgttcccctgtaaatctcgccattaaatgtaaaaaccctcaataaaccgtttatggcagttacacagaattccaatcctggtatatagcacctggtattatgggtaccaaaaaccctaattttttttattaaagaacattttgcttttaaaagtggatttttttcttttgtttttagaaaaaataaaataactggcaaatttttctttgggcca

SEQ ID NO: 688187 - DNA, 344 bp, Homo sapiens
ccctacaccttcctgtacgtgtggtcttggtcacttctgtggctacggtaagaacgtgcttgttgaagacaggtctgtggcttggtgagtctgtgtggctagcagcctctgatctgtgctgggtattaacgtttcagggctgagtgttccgggatttctctagaggctggcaagaaccagttgttttgtcttgcgggtctgtcagggttggaaagtccaagccgtaggacccagtttcctttcttagctgatgtctttggccagaacaccgtgggctgttacttgctttgagttggaagcggtttgcatttacgcctgtaaatgtattcattcttaatttatgt

SEQ ID NO: 688188 - DNA, 618 bp, Homo sapiens
  misc_feature (15)..(15): n is a, c, g, or t
  misc_feature (50)..(50): n is a, c, g, or t
  misc_feature (57)..(57): n is a, c, g, or t
aattcggcacgatgngcagcacttaccagcccacatccccatcccacccngggggancgcctggccaaggtttggacatcagagagccatagaggattagggtacaccctctgaggtcgagaagtaatctctcctctcaccagaccacattccccctctagacagctgagtcaccccacccacccagggcccctgcccctgagtcaccttcttatttcagtgccgcaaggggtgaggaaaaaatttgtactctccctgggccctacatggggcagggcggggcagtggggttccccaggaagaagggattcttaagaagtctaggcagggggcagtggctcatgcctgtaatccactttgggaggctaaagtgggaggatcacttgaagccaggagtttaagactagcctgggcaacacagcaagatgcccatctctacaaaaaaatttaaaaattagctgggcatggtgtcatgcacccgtagtcccagctacttgggaggcttagctgggaggagttggagctcgagagttcaaggctgagtccaggagctggaggctgtagtgagctatgattgtgccgctgcactctagtctgggtgacaaagcaagactctgt

SEQ ID NO: 688189 - DNA, 351 bp, Homo sapiens
tccgcatagatctactttgctcccctctcctggagtacgggaaggatacgtggagagaagggacaggaatctgcatggcagcaaaagaccggggaaatcctctcctggacggagtctgacgagaggcttcgatacctaagtagcaaaggacagagagtgtaataaatagtaaatacaggatatggagccagggtgttccgattccgtccacaaaaataactcaggctgctttgccgaaccatcctgtccaccaggggcgtagctgaggctgtctgcctggaaggttcaccaatgggcgcggaaagtcctcactctcatggctcgggccatcgccgccgtggggtaggaggt

SEQ ID NO: 688190 - DNA, 174 bp, Homo sapiens
tgtagacactgggttttgccatgttgcccaggctggactcaaactcctggcctcaagcaatcgcctgcctaagcctcccaaagtgctggtattacaagtgaaagacactacatccaacctacacttttaaaaattatcccacaggttttggatattctgttgtttttaaaaatt

SEQ ID NO: 688191 - DNA, 911 bp, Homo sapiens
tgcaatgcccacatcgtgttctgtcttggcgagggggctgtccctttgcccctctttcaaggtggccgctacatcttcttgtggttgggatgccgtcttgatctagcaagtcgtttggggcccaaccaacgagaattggggggtgttctggggaagtccctgttcaatacaccctgtttgggtaacccgtggcacatcccgttctgttctcgatgtggttgtgttcacccccaagtcctctgggcgttgaagctattgggcggggcctttgtaagttctgccgccatgtttggcaatctccaaccgttattgtttccccacacagtggtctcctcgggggaaagggaattttaagaccgccttagtggtaggttgtgtcacaattctcgttgcgcgtggaagagtattttgtggcagtcacaaaccaggtccttatctttacaaatctggtccctttgtaatgcgtcacgattttttctagttatagtgcccgtgcggcttcacaaacaaggttctgtggggcagtttatcagacccacgctatgagtgttcttcggccatatctccgtaacgtcaccttggttaatggtctttcttcctcaattcctgggcaccagtctcctttgttttcttgcccctagaagtgtcaatcccggtatgaatctaatgtgtgaaccttgcaaagattggagctgcagtttctgtatgtgccaagaactgatatgctggttgctgctgccctgtgtgtcttcaataggcccctgttggaactgctgcctgaccaagcttgcttctttcttgattgactgaaattgtgtgatgggcattgttcgccttcccttttgccccttgggcattccttccccagagagggcctggaaattataaatttctatcacataaggattata

SEQ ID NO: 688192 - DNA, 113 bp, Homo sapiens
  misc_feature (52)..(52): n is a, c, g, or t
  misc_feature (85)..(85): n is a, c, g, or t
gatgaggggtctgggtggtcaggaaggccaatgaagaatctggagtgtatcnttctgtggcttttatggaaaacgtgatgtcacnagagttgtgggtcaagaactgtgtaagc

SEQ ID NO: 688193 - DNA, 401 bp, Homo sapiens
gagtgtgaaatgttctcttagctagaaactccgttgtctcttcatgttctatcaatcgtaagtttctcaagagatattcacgtgcagtcttcagacggttttctttcatagcaaactgtcttctagttctcctatgccatcatccaggaggaagtgtgaggatatcaggaaaggacagtccctggagtcccgcgaacactgtagctccaccaccacagcttcctggcctccctccatacccactttcatccaaggtgttatattttgcaatttcaaaatcttgaggaagatgaggaatttcaacattctgcataccaaactcagtgagttccacagtgtcttcctcctctgtggcactgtccgggcatagaccttctgttttcacttcagaactgctcgcc

SEQ ID NO: 688194 - DNA, 468 bp, Homo sapiens
  misc_feature (66)..(67): n is a, c, g, or t
  misc_feature (69)..(69): n is a, c, g, or t
  misc_feature (84)..(84): n is a, c, g, or t
  misc_feature (166)..(167): n is a, c, g, or t
  misc_feature (258)..(258): n is a, c, g, or t
  misc_feature (275)..(275): n is a, c, g, or t
  misc_feature (278)..(278): n is a, c, g, or t
  misc_feature (328)..(328): n is a, c, g, or t
  misc_feature (354)..(354): n is a, c, g, or t
gcaagcagtaagatctcctgcctgtcctttgcactagacgacctcgatgaccaggccgacgcgcanngngccaggcgcgccggnaaacctgggcaagaaccccgacgtggacaccagcttcctgccagaccgcgaccggaggaggaggagaaccggctccgagagnntggcagccaagagtgggaggctcaggcgaggaaagtgaaggacgaggagatggaggtcaccttcagctactgtgacggctcgggccaccgncgcacggtgcgggtgcnaangggcaacaccggtgcaagcagttcctgaagaaggcgctgcaggggctgcnaaaggactttcctggagctgcgctcngcccggcgttggagcagctcatgtttcatcaaggaggacctcatccttgccgcactaccacaccttctacgacttcatcatcgccagggcaaggggcaagagcgggccgctttt

SEQ ID NO: 688195 - DNA, 177 bp, Homo sapiens
ctgcgttttgtaacagtcagcgtgagctagttaggcacacgtggtcaggctaattaatcccagggctaagggaggcctcgaggtggcgcagatcacataaggtcgggagttcaagaccggcctggccagcttggtgaagccccatctctaccagaaatgtagaaattaccccggtgt

SEQ ID NO: 688196 - DNA, 399 bp, Homo sapiens
cactccccttccacttaaatgtacaaaccctgtgtttctgtggtgttttacaggttttatttttatttttggggggacggagttttgctcttattgcccaggctagagtgcattggtgcgatctcaggttactgcaacctccgcctctcgggttcaagcaattctcctgcctcagcttcctgagtagcggggattacaagcatgcgtcaccatgcccggctaatttttttgtatttttagtagagacggggtttcacatgttggccaggctggtttcgaactcctgacctcaggtgatctgcccgcctcagcatcctggagtgctgggattacaggcgtgagccaccgtgcccgacctgttttatagtttttaaataggcagcatttgtatatctctag

SEQ ID NO: 688197 - DNA, 991 bp, Homo sapiens
  misc_feature (454)..(454): n is a, c, g, or t
agcggtcgggctgcggggctccggctgcgggcgctggtgccgcggaggccgcggagcttgggagcggagacccaggccgatgccgcgcggcgccatgaagggtcaaggacgcgacgacacggacgggcgcgcggcaacggcatggggcgctggtctggcggaaggccccgagaagacgcccgaggcgcgcaggagctctagtgagcatgggcaatcgtctgttcagtgcggccgagtaagtacgcctgcgatcggcaggctggtcatcgctacaggcgccgctgccgatcacccaggaacccagcttgcgttggcccgtcgtcttatcgagccatagctcgggcctttgtgctaccatgaatcgagtgcattgctagctaccgagcaaggctccatgggcctcgcacctgcacgtgcagcgctctctggtatgctgtgtacgggcaagtcttgntgtaagtgctgcaactttcctttcccttggggagcaagatgcgcaatgcatggtagcgacttggaagcaagtcttatgtaatgcatggcactattctggcccaaaattcgtgacaaacagcaagtctttatcaacgccccatgtggcgcaattggcagtcacgccgtgcttgtacatcgttccggaggcactgtacctattgcgcacacagagtcggcattcattttcgggaaaaatctgtcaggaaaatgcatagtaaatgaccgtcatggggtataacccagttaacttttgcatggaagaccggggctggctcagtacaccaaactcgagttgtccaggcaagccccgaaacgtccttgtccaaacattgcccattaatgcactgttcttttccccagagaggggtcctttcctaagttgtggtcccccggttgtcggggggccacgagcggcttgttaaaagcgcaacgggtggggcaaagggaccgttggttgtgccacaaaaaggggcagagggttttgggtctcccagaa

SEQ ID NO: 688198 - DNA, 467 bp, Homo sapiens
ggggttgaaaagtcgcaggagcccaggaggagtgcttgggaacagtgctgatgcggtgcctgctccagtgatcgcctcagaagcagcagcagcagcagcctcagcccatgccatggaccgctgcacctcaactgcacggccctccaattccctgcccgctaacctctgcttccaaagacaggagggcgtaatcattgccacttgtaaataagttttactcagtttttagtctttacaaacagcttttgaaatgtgaatatttaaggtataaacctgtgttgtaagatatatccagcttatttggctttttaaatgctctacaactttaaaagaatttttttttaactttaaaaatgtgaaactttatatacttcaagcttaaaattacttattaagtgtaataaaaaagtaatatatgtatctttacagttttgaaataaactactcttggaaatgtaaaaaaaaaa

SEQ ID NO: 688199 - DNA, 332 bp, Homo sapiens
  misc_feature (45)..(45): n is a, c, g, or t
  misc_feature (63)..(63): n is a, c, g, or t
  misc_feature (65)..(65): n is a, c, g, or t
  misc_feature (71)..(71): n is a, c, g, or t
  misc_feature (73)..(74): n is a, c, g, or t
  misc_feature (125)..(125): n is a, c, g, or t
  misc_feature (145)..(145): n is a, c, g, or t
  misc_feature (164)..(164): n is a, c, g, or t
  misc_feature (216)..(216): n is a, c, g, or t
  misc_feature (224)..(224): n is a, c, g, or t
  misc_feature (229)..(229): n is a, c, g, or t
  misc_feature (256)..(256): n is a, c, g, or t
  misc_feature (331)..(331): n is a, c, g, or t
gaggggaaagggacaccgcgcgcgaagagaatgacgaccacaganaccaatcttcacaaaaanantccaananngatttctagggaggagcagggcatggtcagctcaaatttggtgaaaacgtnaggatgaaggaccccaagcntcccgacgctttgaccccngggaaagatctttgcacatcgcccggggaagaaagcagggccttctgaggcnttgatcanatatncccccttgttttcaccaggagggacanggagcaactgcataattttgttcagcagcgcatgaattatctgaaacccaggatttttgttgtaataaaaaggana

SEQ ID NO: 688200 - DNA, 282 bp, Homo sapiens
tcccccccccggggggggcccgggtttttttttttagggggttaattttgtttccccccccccccggcccccccccctttccgctggttaaaggggaggtgggccgggcccctttttttttttgggccccctgggaccccgggcttttttggcccccccaagggggtttggggcctggttgtcccccccttgggggcccctccttggggttgcccccgttttccccccttttacctttgggggtttttccccccctttttttttcccggggttggggcccga

SEQ ID NO: 688201 - DNA, 407 bp, Homo sapiens
  misc_feature (11)..(11): n is a, c, g, or t
  misc_feature (74)..(74): n is a, c, g, or t
  misc_feature (84)..(84): n is a, c, g, or t
  misc_feature (91)..(91): n is a, c, g, or t
  misc_feature (182)..(182): n is a, c, g, or t
  misc_feature (221)..(221): n is a, c, g, or t
  misc_feature (270)..(271): n is a, c, g, or t
  misc_feature (279)..(279): n is a, c, g, or t
  misc_feature (285)..(287): n is a, c, g, or t
  misc_feature (307)..(308): n is a, c, g, or t
  misc_feature (314)..(314): n is a, c, g, or t
  misc_feature (320)..(320): n is a, c, g, or t
  misc_feature (330)..(330): n is a, c, g, or t
  misc_feature (339)..(339): n is a, c, g, or t
  misc_feature (357)..(358): n is a, c, g, or t
  misc_feature (363)..(363): n is a, c, g, or t
  misc_feature (383)..(383): n is a, c, g, or t
  misc_feature (404)..(404): n is a, c, g, or t
ttaaaaacatngtttctcacttcccaacttcggccttgagagaaagggcacagcacggagcaatcccccaaatnagaggacatnatggtangggaggcctggaattgtcattctggaggagcgaggaagggggttctgggaggccaagttctctactaaaaccccgtctctactaaaaatgngggataatatgggagcaatgaggtggtcacaggcacacnaaagcctgaaatctgatttccaaggacaccacttggtctctggaccgannagttcctngggacnnntgaatatatcctcaggaganncaaggntcaatncaggtctcanaaagggtanggttggagtgacaggctnngtaanaaataccggccaatagaaanctcaatatgagcccccgggcnaat

SEQ ID NO: 688202 - DNA, 410 bp, Homo sapiens
  misc_feature (203)..(203): n is a, c, g, or t
  misc_feature (355)..(355): n is a, c, g, or t
  misc_feature (394)..(394): n is a, c, g, or t
atgacctcatggatccacccgcctcagcctcccaaagtgctgggattacaggcatgagcactgtgcccggcccgtaacccaattcttaaacagctttattaacatataattcacatgccacaaaattcagtcatttaaagtatacagtttaatgtatttaatatattcacagagttgtgcaaccatcaccactgtcaacatgnggaaaatttccataacctcaaaaagaaattccatacccactagcactcactctgcattttccccagccatagacaaccatttatctactttctggtctctatgaattcacctctttctgggacattttcatatggaatagagttatataatnaagtggaagttttggtgactgggcttcttttcacttagnccagcgtttttcaaaa

SEQ ID NO: 688203 - DNA, 915 bp, Homo sapiens
gccttgtccagtgaaagagcctcggtgggaagtcagtacgttctctcctctcctctcttcttgttcagaacatggtgtggagtaaagcagacagctgttccaggcatttacagatccagtggtggctgttcgagcccccagaaaaggtgcttggttcttccagctctgccagtaattcgagatcagtttcatcgaggagagctgaacaataagatatgcaggagggaaccccgtttgcgtgcgccaactcccaagtggcaaaaaggaatggagaattctttaggttgtcccctaaagattcctgacaaacagagaatcagattcctgaagaggcaggaacgcagtggcttaggaaaagcacaagagaaaagcatgtcctttgcaactgatcacacaaatgatgaaaaagaatagaactttctcattcatctttgaataacgtctccttgtttaccctggtatctagaatgtaaatttacataaatgtgtggttccaattacctttgttgaccaggcctttcaattaacacaatttagggtctacactttcgatgttcaacagtagtttgtgaacctcgagactggtccagactacttatgggttaccttagcttagtattcactcatactgcttggtccgcttctttaacaaattaagtgtctagttcttgctacagtccagtcatgcttgtgtctaataccagtattggactgcgatgctagatgtgacgcggcaataaatgggtggcatggccgggcgcatggacctctactggtacacgccgcattcgcgcttacactgttcaccaaaaaaacaacaaattggcgcgccggacgtataaacatgggcccgagaaaaacgtcaagggagctgccaacacggcgaacgttgtctcactctcggggcaaggaacc

SEQ ID NO: 688204 - DNA, 272 bp, Homo sapiens
tcatcatgcgaaaatttttccacaactttatgaaacatcgtgttgccggacgtatcggcggggcggtcttttatgccgttattgtcgcggtcgccatggattatttctggcggccagggcatatttactcttctggttttaccgttttgcccaattagtgtcaacgtttatctggcgggcagattccagttggcttgcgttggcctttgttaatttgcctatgttgatgattgcttggtggcgggtatcgtggcgatttgcgatttttacca

SEQ ID NO: 688205 - DNA, 309 bp, Homo sapiens
  misc_feature (16)..(16): n is a, c, g, or t
  misc_feature (80)..(80): n is a, c, g, or t
  misc_feature (91)..(91): n is a, c, g, or t
aatggatgaccgtagntagcttattaaaaaaaaagagccaagatccaattaaccccattaagaatgccaaagggacattncccaccacccnttagaattccaaaaaccctcagagctattaggccacatctatgcacacaaactggaaaacctacaggaaacaaataaattcctggaaacatatgacctcccattattgaaccagaaaaaaaattgaaatgctgaacagaccaataatgagtttcaaagtttaatcagtaataaaaaccctactaacttcctggtgtggtggctcacacttgtaatccc

SEQ ID NO: 688206 - DNA, 318 bp, Homo sapiens
tgtgatactgtgtgagcttggactgagcgttggtggttcttcctcaataggaattgaactttcttcgcggcctgcaggtctctgggccttcagcgcgggtcctggtgcttgcggccacaccagcctggggtgctcattgacagagcttgccataatgaaccttaaaggacgggaatcacgagggaagctggggctcccctggccacaggagaggatccccgttcttcaagcttctctgctcagtgtctactaacgaccgacattagctaatgtacattatagtaaattattgagaattctaattcttttacacagtta

SEQ ID NO: 688207 - DNA, 223 bp, Homo sapiens
atgcccttgactcacctaaaatgttatcaactgtctggatgtgacatttcagacttctaaacaggaggcatatcaaaacaggccttttgcctattcatgaggttgctagcctgataaacaacatcctcatagagccacactaacacaccttgacctgcactggagtattcaggagtagctaggtaccagcagcggacacagtgtctaggcaactaggagctac

SEQ ID NO: 688208 - DNA, 901 bp, Homo sapiens
agccaaaccatttacccatataaagtataggcgatagaaatagatacctgtggcgatagatatagtaccgcatgggaacgatgaaagaattcatagccaagcataaatgaatagtcaaggattaacccctataacttactgcgataatgacttacgtagaaataactttgcgaaggagacgccacagcaaagtacccccggagagctccagatcgatgctgaacctcatgtacacaggctaatgaggagcatcacccagttccttattgatacgtcgccatactatgtcgtgagcaacgatttgatacgagtaggcagagcacgatcaaaagcgctacctgatgcctgcgtcgatagctcggtgagtccataggaagttaggaaaattctcttacgcttgcagacgttataaatacttatgggccccaaggagatatcccacttactgacataattgctcccctttgtccgaatagttggtgaaccgtggtttaaagttccccacataggaaggggagacccaagcatgcttatgggaccaaactcagtggacataataaccgcttctgtcagccaagacgcaagtttagggcgcacatgtcaaccgtcaagcccactacgttacgagtcccttgacagcagcaggcgacgtcaccatccaaaatttatagagagaaacgccgattcccataggacttccagaagagtcctctatatacttctacaaccaaaactctcccatagagcaatttattacatctgaatacgttcccctccaacgtacgccaagaattgtgcacaccacattccttatttcactcccctattcagcaccgcagacggtacatcgctacagagttcattacagttaaggaatggacaacacatcatttcatttcgt

SEQ ID NO: 688209 - DNA, 1234 bp, Homo sapiens
agctggtccgtgctaaaacgctttattcctaactgctgggcacaatttccaactcccagtgagctcttcaaaaaactctctctcttcttggcaactactacttctttctctcagttggattacattacattagacacaaacgctcatatgacaccttgccctgatatggcattgtgtaaccggtaaccttaacacattacctgtcaactgggcattcatataattccacgttgacacgtggttctctgactgttgcatttgtgttacttctccttaaggttgaatatgtgcatctcataatattcacaagaagcgaggccgttcttaaaaactccaaagcttcgcttttccaggctttttacactgtcgcactaatacgtgatatcgtcagtacttacacttctgctcccttccaccgtggtattatttacaggtgtgtttctcaaataattgtgtgcacaaaacacgctctaactctttccgtggggcggcatatttgggccatttaaacacagggggccctattccatcttctttttactttaccagcaggtttggcacacacactccacttgggggttataacttgtgcacaactcttctccacgcgccacagggtgcacttcacacaccgtgggttataacgaggttggcttcatttccttacaccaatagttaacgctaacatcttactttcaacagtcgttcacagcagactttgcccatcttacttctggggcaccaacaaccaaacccacagggtggtctttctgcataacttccccataacttggcgcactttgctccaacatcgtcactctttcgggaaatttttcaaccgcgacacactcaccggctgggttctcacaacacaactttttccccttaaaacacgtttggggctatcctagtgaaactgttggccttatcgacattcatattaccaaccttctgcggcatccaagcagcaacagttgggtttgcacaacttcctcccatgcattaaccttgtcccttttataaacaacgttttcgtaccaccgcgcttcaacccgggccgttcaatatagtttggcacgggaacaatacaaacatcaactatcgaaccctactacactacatcatcacaacacacataacagaacacaccacctattgttgtgttctcggtcacgtgcgtatctagttctggcacccatcctcagacaacaagcagctctacttactacgaaga

SEQ ID NO: 688210 - DNA, 177 bp, Homo sapiens
  misc_feature (168)..(168): n is a, c, g, or t
gtcacctaaggacgctgtctgctctgatcttttataagaatagtgtgggctgggcgcagtggctcatgccgcaatcccagcaccttggaagtctgaggtgggcggatcaactgaggtcaggagttcgagacagccctggccaaaatgtgtgaaactccggtctctacntaaaaaaca

SEQ ID NO: 688211 - DNA, 154 bp, Homo sapiens
catggcccagcgcccccctgcggctcgcgcccgggtggggccgtgctgccatgctgctcccctcgggcctgctcttgccggggtccatccggatcgttgagccatccccatgttgccaattgcgtcacacacccacccacccggcccgtcccgt

SEQ ID NO: 688212 - DNA, 958 bp, Homo sapiens
cttcgtgcgtcacgtccttgtctttacgttcgcctgtttttgcggcgtcgttagcaggcactgtcttgcgtggcccttgccttgtcgaacgtgttcgtcgattccgattctgccccgcctcgaattgcctgcccttggtttggtggttcgccttgttcgcccgtgtgtgcttggacatcgtgggcgcctgtcgagccttctccagagcacggccgtgtttccccacgcctccctggggcccacactatccgtctacggcccacccaatgtgtacaggggcccgcctatgatacccgtggtcattatagagggatccccaccccttttgggacagaatcttttggatggcagctccccaattatgtacgcacccttgtagtttaccggtgtaggagtagttatccgcagaagcttatttaaaggtaagtaccaacatagacgtttgtcctgaatgtggtcacctgtgtacagaaacatgttcctttgtggcctactgctatgaaaaggtgtgtcataggatgactgcagaaatcagacgacagatagggtactccagaagggggcccttttaaggcttccaccatagagactgtggtgctgtacacaggagagacaccgtctgttacaagatcagggccagaggatcattgtgacgagacagaagcgaccatcctggttcacccagaattgacacccaagatgttaaaaggataacttcacagtaaatcatgttctcctgaaatagaggaagattctttacgttgttgttgcttgtttttataatcatcagtatagtttaacacattcttttttaagcagttttgtgtgggataatttgaagatatattatgagttactccgaaaattttgtttatcccaaggctccatggattatgtttctattatatacacaggttttaagtaaacattaaatttcccggaccaaaaaaaaaaataa

SEQ ID NO: 688213 - DNA, 259 bp, Homo sapiens
ttttggggtctttgctcgcttcaaccgactgctgtcaccttcaccgttccagtttttaaatcctgagtcaagccaaaaaaaaaaaacacccaagccatcccaaaaaaaccaattagggccaccccgttcccattttttttcttgcccaagtaagattttgaaaaaaagggtgtaaccccaataaagcattatcccgctaaaaaccttttctggcgaacaatgtaggggcggatctgaaaatccttctgttgcttgatca

SEQ ID NO: 688214 - DNA, 745 bp, Homo sapiens
ctgatgtccgccgagcggtgactattctctacaaagccacaaagagcattggaacagtatacctataattcgtggcatgagcgggagtcctaggcacagactctaagcctccttattcgagccgagctgggccagccaggtaaccttctaggtaacgacgacatctacaacgtaatcgtcacagcccatgcgtttgtaataatcttctgcatagtaatacccatcataatcggaggctttgagtatactgagtagttcgccctaataatcggtgcccccgagtatggcgttgtccccgcaataaacaacataagcttctgagctcttacctccctctctcctatctcctggctcgcatctactatagttggaggccggagcaggaacaggtggaaccaggtgctagcctccacttagcagggatattatcccaccaatgaaagcctccgtagaccgtaaccatctttctccttacgacctagcagggtgtctccctgctatcttaggggccatcggatgtgcatcacagacaattaatcacgtatagaaaccccttgcggataaaccgaataccaaatgacgctcttgcgtctgatccgtcctaatcacagcaagtcctacttcttcctatctctccaagtcctaagctagctgagatcaccttgactagtaacagatcggaatcttaaacaccttgtttggacccggctgtagtcggtggccccattgtatagaggagctatgg

SEQ ID NO: 688215 - DNA, 496 bp, Homo sapiens
  misc_feature (471)..(471): n is a, c, g, or t
ctcgtgccacccaagcagtgtacactgtacccaatgtatatttatccctcacccccctcttatcctttcccccgagtcctcaacacccattgcattattcttatgcctttgcatcctcatagcttaggtcccacttatgagtgagagcatacggtgtttggttttcgattcctgagttacttcacttagaataatggtctccaaatctatccaggttgctgtgaatgacattatttcattcctttttatggctgagtagtattccatggtattccatggtatatgtatgtgtgtgtgtgtgtgtatatatatgtatacacacacatatatatatacatatatatacacacacatatatatgtatatatacatatatacgtatttacgtgtatatgtatatatacatatatacgtatttacatatacacacacattattccatggaatacttttatatatatatttatattntctttatccactcatcgattgatgg

SEQ ID NO: 688216 - DNA, 474 bp, Homo sapiens
gaggtcagagtgactccacatactgttgaaattggggcacagcgggctagtgattagtcaggatcaatcagtggagaggagattaaactcacatctggagtccgaatcagaacttgagttcttttttttgaaatggagtctcgctctgtcgcccaggctgtagtgcagtggcgtgatctcggctcactgcaacctctgccttccgggttcaagcaattctcccacctcagcctcctgagtagctgggattacaggcgcccaccaccacagccggctactttttgtatttttaggagagacggagtttcaccatgttggtcaggctggtcttgaactcctgacctcatgatccacctgccttagcctcccaaagtgctgggattacaggcgtgagccaccatgcccagccctatagtagttcttcttttgccccttaatatcctcacccacatgtcctgtaccctgcctgaaccc

SEQ ID NO: 688217 - DNA, 347 bp, Homo sapiens
gttcagtagattccttctggccacggaatctgccggtgcacatctagatttcaccggccgccatctactgtaccgtagatttcatccggcaggacctcgagcagtgaggagctggaggacatgctggtagagtgtgacccccgtccatctttgcctctgggatcatcatggagctccagcatctcgaagcaggctctgagcgagattgagacgcgtcacagtgagatcatcaagctggataacagcatccgctgagctacaccacatgcttcatggacatggccatgctcgtggagagccagggagagatgattgacccggaacagtacattgcggtaggattggtg

SEQ ID NO: 688218 - DNA, 403 bp, Homo sapiens
  misc_feature (323)..(323): n is a, c, g, or t
gaatgtatagtgactatatgtcagagatttacttacttcattagtgagaaaaccagtaggcagatcaagtcagttcacagagtatttgaggaacaaagatttatatggtcagtcaggaaagggaggttaaaaaaatttgtttaattgggttcaaaactgattaagtccctccaggccatacaactacaatgcttgggattatcttttctcccagagatatatcattccctccttacccagataagtccccgtgacccctttctaaacaaaatcacctttcctctgccctttttttcccaaaaaaataaactctcccccccccnctcccccccgtgtgattgacatgtttattacttttattgtagtgatggtttcatggcaatatacatatgttaaaatttaa

SEQ ID NO: 688219 - DNA, 107 bp, Homo sapiens
agtgattagaggatcccctcccttcacaggcaaatgatgtgccagcatcagctactaaaataaacaagcaaaacactccgccataagaatttttttggcatttatgt

SEQ ID NO: 688220 - DNA, 91 bp, Homo sapiens
cggtccaacgttggatccgattcggatccaaccggatccaacgttggatccgaattcggatccaacaccaatctgaagtgggagcggccgc

SEQ ID NO: 688221 - DNA, 151 bp, Homo sapiens
aagcctgcggtattctaccaggcttgtcggacaacttctaggtgggcactgtgcggaaacttgaggataaatcagggagctgcatgcacttaaaaggcatggcctgtctcctcacttaagtgcaggtccatcgaccaaagccctgtactag

SEQ ID NO: 688222 - DNA, 369 bp, Homo sapiens
tcctcctagcgggcctagctgggtctgtagcacatcttgctgtgtggggatgtagtcactctgtgcgatactgctccagtgtcgttcaggtagtagtgcagctgagtacgttgagcttggtattcccattgagacggacaaatgcaggcctgacacaaccatgtgtcagccctagagcctcctggatgacgcctggacatggtcatcagtggagcacgcacttgctcctcaggtggtgcaggacagtgcaaatagctgactggcgtcgtccgctctggaggggtcggcaaagtcgatctgcaggttgcccatggctttgacaatggccatgatggactggatggtgtagctgtagacaaccgcccggta

SEQ ID NO: 688223 - DNA, 273 bp, Homo sapiens
  misc_feature (4)..(5): n is a, c, g, or t
ggtnntgtgatgatcgttgatgtttgggtatgagaccgtttcagcggtattgaagtgtgccggctgggatctgggtccgagaggagagggtatgcactgcgcaaacatttcaagagtatacgagcaagcgctgttatggtgagaaatgttagcgcttttgcgccgtaaacgtgtatggcctttgttctgcgctgctgaagtgttagctagatgatatttatatttgatgcttttaaggctttgattaatcactcttatacttgcctggaacat

SEQ ID NO: 688224 - DNA, 432 bp, Homo sapiens
atcatagctcactgcagcctttacctcccaggctcaagcaatcctcccatctcagcctcccaagtagctgggaccacaggtaccagccaccacgcccagctaactttttattttttgtagagacaagggtctcactatgttgcccaagctggtctcaaactcctgggatcaagagatccacccacctcagcctcccaaagcgctgggattacaggagtgagccaccaagtccggcctggtgtgggcatgtatttattttgagatagagtcttgctctgtcacccagactggagtacagtagtaggtatgtatgcatgtagtaggtatgtatacatgcatccatgttttttttgttttttttttttttgagacggagtcttgttctgttgcccaggctggagtgcagtggcacaatcttggctcactgcaacc

SEQ ID NO: 688225 - DNA, 899 bp, Homo sapiens
  misc_feature (624)..(624): n is a, c, g, or t
gagcggcggggggcgctgcgcccggctgtccggcctccgcgctccgccctcgtcgccctcgcgccgccgggcgggcgctcgcgcgtggcgtggggggaccaggggctgatgcgcgggtcgccagggacaggtgcgccaggggtgcgctggttcgagtgagcgcggtaaaggtgacggccgaaggcctgcgtggcctcgaggccgcaggggggagcctggggtcagcgaacacgtgacgagaagagagatagaaacgccggagagaaaagcgttcgtcgtaggagtggcaccgggaactgcacgagtggacctcgaggacgaaggcagtggactagaaagggccccgatgaggggaagcaaacgacggaatgccagcgcgatcgcgatcacaacgaacgaaggtcacgcacgggttcccagtgtgcaccactggcgtactgactcccgcatacttttcggaagcgttccgttcgcgtgcctgttacatcacaggtgaccgggaccggggacctcagggcaactgagcagaagattcccgactgaggacaacgaacaacaaaagtagcccaaagggcaaagcaccaaggtgccatagggcatcgagaagcgccactccccagaggnacgagccacagggcaaagtgcgaacaacgcgcgcacatgcgcgcaaaaaggggcactgggacacccagtcaaactcaaccaaacgggaataacccacgtgagacccaaaggcggcgagccagggcaaagggtcgactggcaaccacacgggcgccgtccgggcaacacgcgagggtcaccctacgctgcacagtggcgcgaaaccgcaaacacgctccgcacgggcatttcgtgaagccaaagaaaagaacccctgggccgcaaacacaccaaac

SEQ ID NO: 688226 - DNA, 239 bp, Homo sapiens
  misc_feature (181)..(181): n is a, c, g, or t
aactaaccagaggatccccccgccgccccgagcgggaagagactggagatgaggaggatgggagcccatcggaccacccagccttctgggccctccccccatggccaatgggaaacctggcgaccctaagtcagccccaaactggataccacccacatgtccatcatcagtagaatggatnaataaattgtcgtgtatgcatgcaaagagactacactgcaacgaaaaatgaatgaact

SEQ ID NO: 688227 - DNA, 212 bp, Homo sapiens
  misc_feature (81)..(82): n is a, c, g, or t
  misc_feature (134)..(134): n is a, c, g, or t
  misc_feature (152)..(152): n is a, c, g, or t
  misc_feature (156)..(156): n is a, c, g, or t
atcaattggctatatgggatttaggataaaggatatttacaataaagaatatttacaatagagagtttattattatttgtnngtgtgagcaacaaacataccctttatctctgtaaaatttatacacacaaaanttaacaagagattctgtnaganttaattggctatatgggatttaggatagactatttacaatacagagtatttacaat

SEQ ID NO: 688228 - DNA, 538 bp, Homo sapiens
gctatgtgaaccaggcaggatcaccgccttagtatgatgctctcatggtactgcaggcggagcatggcaaacttcattgttgaggatgtgcatggacactatgaaggcaatcccaagctcaaccaggagttctccgatggcacccgtactccatcaaagaacacctctggtgtgtttgaagccttgatggccatcttcttctcagggggccactgtgtcagggcagtgtgggaaagcagaggtgtgttcaacaggttgtcactgggggaaaaactggtccttcggtccttatgcaccagggaggaatgacgaccactagactattagagggtacaggcaacaattcccctcaggccctgagggctaaggaggcctggctatgtcctattttgtgttggacttggttgctggacgcaaaactttagctcaggtgcatacatattagtcccaaagggcacattcagtccaacttctttgggttttggacacgtcccccgggtgacttgcaacaggccatctggccaggaggccagtcctg

SEQ ID NO: 688229 - DNA, 114 bp, Homo sapiens
aggaaacgggagtaaacggagagcgtagtgacccatcatgaggctctccacaagcccagagtgagatgaccccagagagctgcagcagcgagaggaggagggatttaacaaccg

SEQ ID NO: 688230 - DNA, 435 bp, Homo sapiens
gtattcattccacatacaatatctgtttaaaacgatttcctgtataagtagctttaatgtttttttctctagaataccgtagtctatccttatatcatcactccatgctttcttccgtgggttttaaacttcatataactttcataaattggatatcaaaaattttgcttgtcactgcacatcaatataaaaaatcttatttaacttatcaaaacgtatttattgccaaactatgcttttttttgttaattttgtcatatttacgggatgacaaaccatagaatatatctttatgttaatatgactcatataatcttaaatttgtgtcggcttttccttttttccacagttttaatatattattctcaactacatttttttgaactttacacttttttggttattttattttaaaaaaattgtaaattaatttaa

SEQ ID NO: 688231 - DNA, 389 bp, Homo sapiens
cgtagcaactggtatggtcttttccccaaatgtctaggcatgccgcgacgacgtgatcgaggaccacgtaatgcggcttaattggagtggttagtacgattagtcgcttaggggtcgttcttcgttcccctccccgcaaagataagacttccgggagccccaacctcgccacgcatccgtttcgcggggttcttatcgtcccctcacgggagatatctccaacccaatagacgagaacacccccaaatctcgaaaacaaacaacaccacataatgcaaaacctgagggggggtttggcatttaacccgtttcacagcgagctgaaccataacctatcggttgttgccccataatgctgcgatcgggtttcggtcccattcatccctgtg

SEQ ID NO: 688232 - DNA, 168 bp, Homo sapiens
tgactaccgactccccacaaataaaattcccttggccttgaggtctcggcaccgtcttgatggtgtccctcatattcagaaatatcctaccgtcaactgactgatgtcaccaagtatccaaacaatggtaccaatttactcgactgaagatcataccaccagcttgac

SEQ ID NO: 688233 - DNA, 261 bp, Homo sapiens
gacaagaacgggttactcgtgctcagtcttagaccagatcgtgggtgcatcatccgtccagcgtcggccttccgttccgtccaggaacctctttggccatctggcgctcacctttttgcatcttgacctcggacttcagacaaccaaccgcattcattaaactatcaatcttcttatcataacaggttcattttaccagtagaccttgagtcataccatctatctgtaaattaggtcacatataagtcgacatcactgatg

SEQ ID NO: 688234 - DNA, 994 bp, Homo sapiens
  misc_feature (340)..(340): n is a, c, g, or t
cagttggcgccctaccgtgcatagcgtgaagtggagctcctcgctggctgccgatcggggtctgcagggctcgctagccgctcacctgcgtgtgacgcgcggacgcccgcagtacccgccgtcctgggctcagagcgacgtgactccccgaccctgctgcccggtcacctccccgggggtccgtgcgcccggttccaggcgtcggaggtccagcccacgcggcggctcatggcatgcgcgcctggctcccagtccatcattgtttccccacttggttaaagctagttgactggtggttgctggacggctttctgctggacatgatgcctttgggctccgnaggtctgcagcgggtaccggcatgctgcccgctaccgcctgatggggtagggcgggacgcttggtactcttctgctgacacgctgccctcaggttcctctgtccccggtgccctcgagagacgtggtcgtgcgtgtcgtcctggcgcggagccccagtagccgggttcgtgcgcgtggactggcgctgtagctcacgctggtccgtgggccgctgggatggagctcgcggcctggcactgtgtcctactcgacttgcttcctgggtggcacgtcccatcgagctgccacgcctggaacaaggaccgaagccagatttgcccatcttgatccgaacagagccagtggagtgtgcatagtcgtaatgagagaagagcggtgacaacatggtcccaaggttgcacagagcttcgaacgagctacaacagggcaggttgacaggcagtcgactgggccaccagaagagtaaaccgtcattgtgaccctgcgtgcacagagccgcatcgccttacgttgttggactgctgaagggggccgcaatatggaaggcccacggctgggtcatccctgcgggatccaaccgggctgcccgctgcgttcgcttggcccccaaaggagaacgagttgctggtggccagcgggtctccgtgtgtccc

SEQ ID NO: 688235 - DNA, 150 bp, Homo sapiens
tacccggccatagtacgaatagacggaatgccgtcctggaatgtttcgcgtggtaatgggtgtgcagttgggccaggtcgatcatatagcggctgtaggcggcggtatcggagtccgtcgccgaggtcagccagtccgggagttgttggt

SEQ ID NO: 688236 - DNA, 103 bp, Homo sapiens
cggtgactctgaggatcccactgccggtaagaggttgagagggttgttgaaggccccgcccaggcaatgagcagaggaaccatgatcgtgggtgcagccactg

SEQ ID NO: 688237 - DNA, 319 bp, Homo sapiens
caccaggcgcacttcttgactcacactaagtgtagcactgtagtactaaagacatcgttgagaaactgtaggctatcaccatacattggtcatctatcggagttgtggccaacggcaatataaaataccttagctaccttataccctgtatgcatttcataccatgatcaagtctctaatgacagcccagttctcatgcttatctctggctgcctattgagactggccccactacggtggggactggggatggggacacacatcagtgcccaagcttcattctacacctccccccttcagccagaagtgcgcctgggtg

SEQ ID NO: 688238 - DNA, 1134 bp, Homo sapiens
  misc_feature (5)..(5): n is a, c, g, or t
ctcangcaagctgtgcagtggtggctactgcctgtaggtattttccagtgactgaaagaggctgctagtggtcgggattagatatcatctgatgtcctaaaaagactgaacccttcatattccccagaagaataacagctgttccccacctcccacacatctgcatcaagctgaagttctgtgtcctcgtgagctgatttcacctttgcacagatcttgggggaggtgatgacaatacaccctggacctcaactttctctgtctgaagctgcagggggcccctgaagggtgggggagatggcaggcccaccaggataccctgtgctgatcaatcctcttctctcttctccagggcttctgcactgactcctgagactgttttaactaggactggttatcactcttctgtgatgcctgcttgtccctgcccagaattcccagctgcctgtgtcagcttgtccccctgagatcaaagtcctacagtggctgtcacgcaaccaccaggtcatctcctttcatccccaccccaaggcgctggctgtgactctgcttcctgcactgacccagagcctctgcctgtgcatggccagctgcgtctactcaggtcccaaggggtttctgtttctattctctcctcagactgctcaagagaagcacatgaaaaacattacctgacttcagagcttttttacataattaaacatgatcctgagttatctgtattctgaactttcttaattgagaagaggcaagaaatcactgcagaatgaaggaacatcccttgaggtgacccagccaacctgtggccagaaggagggttgtaccttgaaaagacactgaaagcattttggtgtgtgaagtaagggtgggcagaggaggtagaaaatcaattcaattgtcgcatcattcatggttctttaatattgatgctcagtgcattggccttagaatatcccagcctctcttctggtttgctgagtgctgtgtaagtaagcatggtggaattgtttggggacatatatagtgatccttggtcactggtgtttcaaacattctggaaagtcacatcgatcaagaatattttttatttttaagaaagcataaccagcaataaaaatactatttttgagtcta

SEQ ID NO: 688239 - DNA, 1346 bp, Homo sapiens
gcactggactgagaaccttcaccaaaaaaatgtctgcccagagacagatgaggtccttcagctccagtgctgattggttcttttccaaaggcccatctaatcctaccacgcacggaaatatccacaggtttttattctttctgccaggtacatcagatccatcaggtccgagctgtgttgactaccactacttttcccttcgtctcaattatgtcttggaagaaggctttgcggatccccggagaccttcgggtagcaactgtcaccttgatgctggcgatgctgagctccccactggctgagggcagagactctcccgaggatttcgtgtaccagtttaagggcatgtgctacttcaccaacgggacggagcgcgtgcgtcttgtgaccagatacatctataaccgagaggagtacgcgcgcttcgacagcgacgtgggggtgtaccgggcggtgacgccgcaggggcggcctgatgccgagtactggaacagccagaaggaagtcctggaggggacccgggcggagttggacacggtgtgcagacacaactacgaggtggcgtaccgcgggatcctgcagaggagagtggagcccacagtgaccatctccccatccaggacagaggccctcaaccaccacaacctgctggtctgctcggtgacagatttctatccaggccagatcaaagtccggtggtttcggaatgatcaggaggagacagccggcgttgtgtccaccccccttattaggaacggtgactggaccttccagatcctggtgatgctggaaatgactccccagcgtggagatgtctacacctgccacgtggagcaccccagcctccagagccccatcaccgtggagtggcgggctcagtctgaatctgcccagagcaagatgctgagtggcgttggaggcttcgtgctggggctgatcttccttgggctgggccttatcatccgtcaaaggagtcagaaagggcttctgcactgactcctgagactgttttaactaggactggttatcactcttctgtgatgcctgcttgtccctgcccagaattcccagctgcctgtgtcagcttgtccccctgagatcaaagtcctacagtggctgtcacgcaaccaccaggtcatctcctttcatccccaccccaaggcgctggctgtgactctgcttcctgcactgacccagagcctctgcctgtgcatggccagctgcgtctactcaggtcccaaggggtttctgtttctattctctcctcagactgctcaagagaagcacatgaaaaacattacctgacttcagagcttttttacataattaaacatgatcctgagtta

SEQ ID NO: 688240 - DNA, 143 bp, Homo sapiens
accccttttttttggttttttaacccccggagcccggttttcggttttccaaaacgccttttcccattttatattggggtttttccccgggttcccgccacccctttttgggtttaacccctttgcccctttggaaaagggga

SEQ ID NO: 688241 - DNA, 902 bp, Homo sapiens
gtggagacgcgctggcgtcctctgctgagcagccagcggaactgtaccatcgccgtccacattgttcatatccaactgagaaagagatatgtgctcggtagcatctgtctgctgacgcatcggtatcgcagtccatgtaacagatacatacctttgacatcacctgaaggggaaccgtgtggtctctcttttaaacggggacctaggttgtcctcggtgaatctgggggacgcgcctgaagtagttgaaggtacggcgagtagagagttggtagtctgtaaggaacaatcaagacgcatgagtctggacctgacatcgacccgcaagaattctcaggattcgagatgtccgtggacaacacggtggttgagctgaaaaggtatagataagcaagggaaagcagggatgtctcctacggtacatatagcagatgacctgaatcctattgcggaatgacgtgtgaaaacgctgtgggggatggtgcatgaaggtcaaggtttgcaatacgtaaaacccagtttcaacattggagggctagctgtctgggatgctgcgatcagtttggatgcaaagaactgaataagttagaagtataaagggtgtaatgtgggcaagtgcgtgtgggggagatggcgcaagcatacatgatttgggtgtggctttgttcatatccagggtttcgctttgatgcaggatgtaaggcatgaagagggggtgtcaggattgcttgatatgatcgccgtccgttatgtgcagagggagactgtctcgaaagtagtatcgatcgttagggggtaggaggtgaaaggtggcatgtagaatggtgtacagcattgggtgataattttgggtcctggaaattgtcttggattgtacgaaaataaatgtgtcgttgaattgac

SEQ ID NO: 688242 - DNA, 1752 bp, Homo sapiens
gcactggactgagaaccttcaccaaaaaaatgtctgcccagagacagatgaggtccttcagctccagtgctgattggttcttttccaaaggcccatctaatcctaccacgcacggaaatatccacaggtttttattctttctgccaggtacatcagatccatcaggtccgagctgtgttgactaccactacttttcccttcgtctcaattatgtcttggaagaaggctttgcggatccccggagaccttcgggtagcaactgtcaccttgatgctggcgatgctgagctccccactggctgagggcagagactctcccgaggatttcgtgtaccagtttaagggcatgtgctacttcaccaacgggacggagcgcgtgcgtcttgtgaccagatacatctataaccgagaggagtacgcgcgcttcgacagcgacgtgggggtgtatcgggcggtgacgccgctggggcggcctgacgccgagtactggaacagccagaaggacatcctggagaggacccgggcggagttggacacggtgtgcagacacaactacgaggtggcgtaccgcgggatcctgcagaggagagtggagcccacagtgaccatctccccatccaggacagaggccctcaaccaccacaacctgctggtctgctcggtgacagatttctatccaggccagatcaaagtccggtggtttcggaatgatcaggaggagacagccggcgttgtgtccaccccccttattaggaacggtgactggaccttccagatcctggtgatgctggaaatgactccccagcgtggagatgtctacacctgccacgtggagcaccccagcctccagagccccatcaccgtggagtggcgggctcagtctgaatctgcccagagcaagatgctgagtggcgttggaggcttcgtgctggggctgatcttccttgggctgggccttatcatccgtcaaaggagtcagaaaggacctcaagggcctccaccagcagggcttctgcactgactcctgagactgttttaactaggactggttatcactcttctgtgatgcctgcttgtccctgcccagaattcccagctgcctgtgtcagcttgtccccctgagatcaaagtcctacagtggctgtcacgcaaccaccaggtcatctcctttcatccccaccccaaggcgctggctgtgactctgcttcctgcactgacccagagcctctgcctgtgcatggccagctgcgtctactcaggtcccaaggggtttctgtttctattctctcctcagactgctcaagagaagcacatgaaaaacattacctgacttcagagcttttttacataattaaacatgatcctgagttagaaatcactgcagaatgaaggaacatcccttgaggtgacccagccaacctgtggccagaaggagggttgtaccttgaaaagacactgaaagcattttggtgtgtgaagtaagggtgggcagaggaggtagaaaatcaattcaattgtcgcatcattcatggttctttaatattgatgctcagtgcattggccttagaatatcccagcctctcttctggtttgctgagtgctgtgtaagtaagcatggtggaattgtttggggacatatatagtgatccttggtcactggtgtttcaaacattctggaaagtcacatcgatcaagaatattttttatttttaagaaagcataaccagcaataaaaatactatttttgagtcta

SEQ ID NO: 688243 - DNA, 205 bp, Homo sapiens
aattccagcttatcttcatcacttgctttaaggtgtgaaagatgctctaatacttttgccagagcctctagttcctttaaggtctcatgcctgtctggatggtgctgaatcactttgccgaaagcatcatattcttggcgatgttattcgtattcgttgtgcttgaagaattgggtttttgcactcagcaccatccagacaggca

SEQ ID NO: 688244 - DNA, 196 bp, Homo sapiens
  misc_feature (16)..(16): n is a, c, g, or t
tcagctcgtacacatnattgtcacgctcttgacgagctaggtcagaacaccacgtctgccccaagccaatctagtgatgacctctgaacgggctccctccccttacctctagtaatgggccagtgctccttcacagtctcttctccctccagacacagtgggatcctactagtagatcgacctagcagtgcatagc

SEQ ID NO: 688245 - DNA, 716 bp, Homo sapiens
  misc_feature (5)..(5): n is a, c, g, or t
ctcangcaagctgtgcagtggtggctactgcctgtaggtattttccagtgactgaaagaggctgctagtggtcgggattagatatcatctgatgtcctaaaaagactgaacccttcatattccccagaagaataacagctgttccccacctcccacacatctgcatcaagctgaagttctgtgtcctcgtgagctgatttcacctttgcacagatcttgggggaggtgatgacaatacaccctggacctcaactttctctgtctgaagctgcagggggcccctgaagggtgggggagatggcaggcccaccaggataccctgtgctgatcaatcctcttctctcttctccagggcttctgcactgactcctgagactgttttaactaggactggttatcactcttctgtgatgcctgcttgtccctgcccagaattcccagctgcctgtgtcagcttgtccccctgagatcaaagtcctacagtggctgtcacgcaaccaccaggtcatctcctttcatccccaccccaaggcgctggctgtgactctgcttcctgcactgacccagagcctctgcctgtgcatggccagctgcgtctactcaggtcccaaggggtttctgtttctattctctcctcagactgctcaagagaagcacatgaaaaacattacctgacttcagagcttttttacataattaaacatgatcctgagtta

SEQ ID NO: 688246 - DNA, 1764 bp, Homo sapiens
gcactggactgagaaccttcaccaaaaaaatgtctgcccagagacagatgaggtccttcagctccagtgctgattggttcttttccaaaggcccatctaatcctaccacgcacggaaatatccacaggtttttattctttctgccaggtacatcagatccatcaggtccgagctgtgttgactaccactacttttcccttcgtctcaattatgtcttggaagaaggctttgcggatccccggagaccttcgggtagcaactgtcaccttgatgctggcgatgctgagctccccactggctgagggcagagactctcccgaggatttcgtgtaccagtttaagggcatgtgctacttcaccaacgggacggagcgcgtgcgtcttgtgaccagatacatctataaccgagaggagtacgcgcgcttcgacagcgacgtgggggtgtaccgggcggtgacgccgcaggggcggcctgatgccgagtactggaacagccagaaggaagtcctggaggggacccgggcggagttggacacggtgtgcagacacaactacgaggtggcgtaccgcgggatcctgcagaggagagtggagcccacagtgaccatctccccatccaggacagaggccctcaaccaccacaacctgctggtctgctcggtgacagatttctatccaggccagatcaaagtccggtggtttcggaatgatcaggaggagacagccggcgttgtgtccaccccccttattaggaacggtgactggaccttccagatcctggtgatgctggaaatgactccccagcgtggagatgtctacacctgccacgtggagcaccccagcctccagagccccatcaccgtggagtggcgggctcagtctgaatctgcccagagcaagatgctgagtggcgttggaggcttcgtgctggggctgatcttccttgggctgggccttatcatccgtcaaaggagtcagaaagggcttctgcactgactcctgagactgttttaactaggactggttatcactcttctgtgatgcctgcttgtccctgcccagaattcccagctgcctgtgtcagcttgtccccctgagatcaaagtcctacagtggctgtcacgcaaccaccaggtcatctcctttcatccccaccccaaggcgctggctgtgactctgcttcctgcactgacccagagcctctgcctgtgcatggccagctgcgtctactcaggtcccaaggggtttctgtttctattctctcctcagactgctcaagagaagcacatgaaaaacattacctgacttcagagcttttttacataattaaacatgatcctgagttatctgtattctgaactttcttaattgagaagaggcaagaaatcactgcagaatgaaggaacatcccttgaggtgacccagccaacctgtggccagaaggagggttgtaccttgaaaagacactgaaagcattttggtgtgtgaagtaagggtgggcagaggaggtagaaaatcaattcaattgtcgcatcattcatggttctttaatattgatgctcagtgcattggccttagaatatcccagcctctcttctggtttgctgagtgctgtgtaagtaagcatggtggaattgtttggggacatatatagtgatccttggtcactggtgtttcaaacattctggaaagtcacatcgatcaagaatattttttatttttaagaaagcataaccagcaataaaaatactatttttgagtcta

SEQ ID NO: 688247 - DNA, 1804 bp, Homo sapiens
gcactggactgagaaccttcaccaaaaaaatgtctgcccagagacagatgaggtccttcagctccagtgctgattggttcttttccaaaggcccatctaatcctaccacgcacggaaatatccacaggtttttattctttctgccaggtacatcagatccatcaggtccgagctgtgttgactaccactacttttcccttcgtctcaattatgtcttggaagaaggctttgcggatccccggagaccttcgggtagcaactgtcaccttgatgctggcgatgctgagctccccactggctgagggcagagactctcccgaggatttcgtgtaccagtttaagggcatgtgctacttcaccaacgggacggagcgcgtgcgtcttgtgaccagatacatctataaccgagaggagtacgcgcgcttcgacagcgacgtgggggtgtaccgggcggtgacgccgcaggggcggcctgatgccgagtactggaacagccagaaggaagtcctggaggggacccgggcggagttggacacggtgtgcagacacaactacgaggtggcgtaccgcgggatcctgcagaggagagtggagcccacagtgaccatctccccatccaggacagaggccctcaaccaccacaacctgctggtctgctcggtgacagatttctatccaggccagatcaaagtccggtggtttcggaatgatcaggaggagacagccggcgttgtgtccaccccccttattaggaacggtgactggaccttccagatcctggtgatgctggaaatgactccccagcgtggagatgtctacacctgccacgtggagcaccccagcctccagagccccatcaccgtggagtggcgggctcagtctgaatctgcccagagcaagatgctgagtggcgttggaggcttcgtgctggggctgatcttccttgggctgggccttatcatccgtcaaaggagtcagaaagggcttctgcactgactcctgagactgttttaactaggactggttatcactcttctgtgatgcctgcttgtccctgcccagaattcccagctgcctgtgtcagcttgtccccctgagatcaaagtcctacagtggctgtcacgcaaccaccaggtcatctcctttcatccccaccccaaggcgctggctgtgactctgcttcctgcactgacccagagcctctgcctgtgcatggccagctgcgtctactcaggtcccaaggggtttctgtttctattctctcctcagactgctcaagagaagcacatgaaaaacattacctgacttcagagcttttttacataattaaacatgatcctgagttatctgtattctgaactttcttaattgagaagaggcaagaaatcactgcagaatgaaggaacatcccttgaggtgacccagccaacctgtggccagaaggagggttgtaccttgaaaagacactgaaagcattttggtgtgtgaagtaagggtgggcagaggaggtagaaaatcaattcaattgtcgcatcattcatggttctttaatattgatgctcagtgcattggccttagaatatcccagcctctcttctggtttgctgagtgctgtgtaagtaagcatggtggaattgtttggggacatatatagtgatccttggtcactggtgtttcaaacattctggaaagtcacatcgatcaagaatattttttatttttaagaaagcataaccagcaataaaaatactatttttgagtctaaatgatagaagcccaaatatattttgttcatggtaaaaaa

SEQ ID NO: 688248 - DNA, 840 bp, Homo sapiens
gctcgcttattcacttctgctggaacgacaggacgtgcgtgggaacgtggaagacgacttgatcatcttccctgacgactgtgagttcaagcggggtgccggagtgccccagcgggagggtctacgtgctgaagttcaaggcagggtccaagcggcgttttcttctggatgcaggaacacaagacagaccaggatgatggagcattgccggaaagtcaatcggagtatctgaacaagctccccgatgcgctggggcacttgggggccagcggaagcagcgggcacgaactcgtcttgccgctagtgctgagtgacgggtggcgctgctatgagccttgctgggaaatcatgaagccacaagccagcgtcatgcagcgtcattccggaccacgccgtggctacggagggacgtgggttggtgcgtgggggcccttgtcttggacctgggccatgtgccagcttacatggtggaagcagttggtgcctccaggggatgcagctccttcctccagactcccggagcctgtcggcagcaggtcacgcccgtcatccaccgaactcatttcacccgtgcctatctccagtcccttactgctccagcgagcgtgactcgagtaagataacccggagccctcgagccacagttaccgggaatggagccagcactagcaggcagcccgacccaggccatccagcatgaacgagctccagagcatcctggccacgatgaacgtaccagccgggccagcaggcggcagcaagtggacctgggcagtgtgctgacgccggagatatggtcccatctcgccaacgcggatgtccaggatcgcatgttcccta

SEQ ID NO: 688249 - DNA, 767 bp, Homo sapiens
taataaagcaaaaatcaggctagtacgaggctccgtgtttatgatggctacatgctctcatcagctgctctagtacagtggggctcagtgtcctgcgtgctctccgacaccaccccacttccattttggccaaaccaaccgcacccctgaatttctccgcaaatttcctgaccgtgacaatggtcccagcatttgatgggtgatgataggatatcttgtgtgttttgagatgcaacgccattgcctactattgtgagcaatgagtgagctgcgtgtggaagtactccagagtgcagcagcccagtgtggttgcagtgggttgagctttgctcgattcctgatatagtgcccccagccagtacctgtggtgttccccacctatgtgtgcatcatgcaccacaccaaacatggccactgatgaatgcaaagtgatgtgaacgtgatggctgaattcttgtgtggcttgctgtgatgcattacttgaatgacgagttgacttattctagtgctgggcgaacgagtgacattggctgacatacacagtttgtctgcaaccctgtatgtaggctctataagcaggttctagagccttcttacctgccatggccttttcacccaataccaaccgctggttcctcacactgcattaaccagccccagttcctgggctgtcttgtggcgatgtgaaactgtgtgagcacgatggccagtttgatgctacaacagtttgcatgagatccaaactaaaagtgaccacaatggaatgc

SEQ ID NO: 688250 - DNA, 1828 bp, Homo sapiens
gcactggactgagaaccttcaccaaaaaaatgtctgcccagagacagatgaggtccttcagctccagtgctgattggttcttttccaaaggcccatctaatcctaccacgcacggaaatatccacaggtttttattctttctgccaggtacatcagatccatcaggtccgagctgtgttgactaccactacttttcccttcgtctcaattatgtcttggaagaaggctttgcggatccccggagaccttcgggtagcaactgtcaccttgatgctggcgatgctgagctccccactggctgagggcagagactctcccgaggatttcgtgtaccagtttaagggcatgtgctacttcaccaacgggacggagcgcgtgcgtcttgtgaccagatacatctataaccgagaggagtacgcgcgcttcgacagcgacgtgggggtgtaccgggcggtgacgccgcaggggcggcctgatgccgagtactggaacagccagaaggaagtcctggaggggacccgggcggagttggacacggtgtgcagacacaactacgaggtggcgtaccgcgggatcctgcagaggagagtggagcccacagtgaccatctccccatccaggacagaggccctcaaccaccacaacctgctggtctgctcggtgacagatttctatccaggccagatcaaagtccggtggtttcggaatgatcaggaggagacagccggcgttgtgtccaccccccttattaggaacggtgactggaccttccagatcctggtgatgctggaaatgactccccagcgtggagatgtctacacctgccacgtggagcaccccagcctccagagccccatcaccgtggagtggcgggctcagtctgaatctgcccagagcaagatgctgagtggcgttggaggcttcgtgctggggctgatcttccttgggctgggccttatcatccgtcaaaggagtcagaaaggacctcaagggcctccaccagcagggcttctgcactgactcctgagactgttttaactaggactggttatcactcttctgtgatgcctgcttgtccctgcccagaattcccagctgcctgtgtcagcttgtccccctgagatcaaagtcctacagtggctgtcacgcaaccaccaggtcatctcctttcatccccaccccaaggcgctggctgtgactctgcttcctgcactgacccagagcctctgcctgtgcatggccagctgcgtctactcaggtcccaaggggtttctgtttctattctctcctcagactgctcaagagaagcacatgaaaaacattacctgacttcagagcttttttacataattaaacatgatcctgagttatctgtattctgaactttcttaattgagaagaggcaagaaatcactgcagaatgaaggaacatcccttgaggtgacccagccaacctgtggccagaaggagggttgtaccttgaaaagacactgaaagcattttggtgtgtgaagtaagggtgggcagaggaggtagaaaatcaattcaattgtcgcatcattcatggttctttaatattgatgctcagtgcattggccttagaatatcccagcctctcttctggtttgctgagtgctgtgtaagtaagcatggtggaattgtttggggacatatatagtgatccttggtcactggtgtttcaaacattctggaaagtcacatcgatcaagaatattttttatttttaagaaagcataaccagcaataaaaatactatttttgagtctaaatgatagaagcccaaatatattttgttcatggtaaaaaa

SEQ ID NO: 688251 - DNA, 367 bp, Homo sapiens
gatggtcaccagagccaatggaaaggggctgccgcgcgccgtaaagagttgtagaggcagttcgggtgcggtacgttgcattccggtaccgagccgagagcggttgtctccgtctctggagtgcaggcgagaggtgatcatgtccggtcgcgggaaaccaggcggcacaagtggagcaaaggccaaatccgttcttccgggcggccttgcaagttccccggtggccgtgttgccaggacttgctgggacaacagggacctacgcggcaggcaatttgggcccgtgcgtcgccggttttcacctggcagggatgtagacacataccctacagggcgacaaattttcttgacttgcttgacaaacagca

SEQ ID NO: 688252 - DNA, 1370 bp, Homo sapiens
gcactggactgagaaccttcaccaaaaaaatgtctgcccagagacagatgaggtccttcagctccagtgctgattggttcttttccaaaggcccatctaatcctaccacgcacggaaatatccacaggtttttattctttctgccaggtacatcagatccatcaggtccgagctgtgttgactaccactacttttcccttcgtctcaattatgtcttggaagaaggctttgcggatccccggagaccttcgggtagcaactgtcaccttgatgctggcgatgctgagctccccactggctgagggcagagactctcccgaggatttcgtgtaccagtttaagggcatgtgctacttcaccaacgggacggagcgcgtgcgtcttgtgaccagatacatctataaccgagaggagtacgcgcgcttcgacagcgacgtgggggtgtaccgggcggtgacgccgcaggggcggcctgatgccgagtactggaacagccagaaggaagtcctggaggggacccgggcggagttggacacggtgtgcagacacaactacgaggtggcgtaccgcgggatcctgcagaggagagtggagcccacagtgaccatctccccatccaggacagaggccctcaaccaccacaacctgctggtctgctcggtgacagatttctatccaggccagatcaaagtccggtggtttcggaatgatcaggaggagacagccggcgttgtgtccaccccccttattaggaacggtgactggaccttccagatcctggtgatgctggaaatgactccccagcgtggagatgtctacacctgccacgtggagcaccccagcctccagagccccatcaccgtggagtggcgggctcagtctgaatctgcccagagcaagatgctgagtggcgttggaggcttcgtgctggggctgatcttccttgggctgggccttatcatccgtcaaaggagtcagaaaggacctcaagggcctccaccagcagggcttctgcactgactcctgagactgttttaactaggactggttatcactcttctgtgatgcctgcttgtccctgcccagaattcccagctgcctgtgtcagcttgtccccctgagatcaaagtcctacagtggctgtcacgcaaccaccaggtcatctcctttcatccccaccccaaggcgctggctgtgactctgcttcctgcactgacccagagcctctgcctgtgcatggccagctgcgtctactcaggtcccaaggggtttctgtttctattctctcctcagactgctcaagagaagcacatgaaaaacattacctgacttcagagcttttttacataattaaacatgatcctgagtta

SEQ ID NO: 688253 - DNA, 701 bp, Homo sapiens
tgttctttcatttgaactgcattcccactggcccttgtaattccctggtgttgctatcctcctatcataactgcctaacaaaacctcaaccatggcttaaggctgcacctagctcttttcaatcctatattgtgccaattgcatagtactaggtaaatcagactgtgaagattatgtagtctacaaattcatggccttgatcttagtcaggctcctagccctgaaggcacttcttttgtgtttcattccctcttccattacgatattccagacctttaccactctcctcaagatgcctactgagtccctgcccctccatctcctttcctatgacctcaagcataaggtgtccctgctccccctaggtcctggattccattttctcctaaatctcactcttctgtacctttacctcttttactttactggatccttcagcttcactcccaagttttccccattccaaagaagcaaagaaaataaaactttctcttaatcctctgtccttctctatctaccatcccatttccatgcttttcaattaaaactttccaagaagtccaaattaccacttcccagtcagttctctagtcacggtaatctggcttctgtttcactgaaaccacttttacccaaggccacctctaatttccaaatctgctgttcttgatagactataccctctctctttaaaacattct

SEQ ID NO: 688254 - DNA, 1697 bp, Homo sapiens
gcactggactgagaaccttcaccaaaaaaatgtctgcccagagacagatgaggtccttcagctccagtgctgattggttcttttccaaaggcccatctaatcctaccacgcacggaaatatccacaggtttttattctttctgccaggtacatcagatccatcaggtccgagctgtgttgactaccactacttttcccttcgtctcaattatgtcttggaagaaggctttgcggatccccggagaccttcgggtagcaactgtcaccttgatgctggcgatgctgagctccccactggctgagggcagagactctcccgaggatttcgtgtaccagtttaagggcatgtgctacttcaccaacgggacggagcgcgtgcgtcttgtgaccagatacatctataaccgagaggagtacgcgcgcttcgacagcgacgtgggggtgtaccgggcggtgacgccgcaggggcggcctgatgccgagtactggaacagccagaaggaagtcctggaggggacccgggcggagttggacacggtgtgcagacacaactacgaggtggcgtaccgcgggatcctgcagaggagagtggagcccacagtgaccatctccccatccaggacagaggccctcaaccaccacaacctgctggtctgctcggtgacagatttctatccaggccagatcaaagtccggtggtttcggaatgatcaggaggagacagccggcgttgtgtccaccccccttattaggaacggtgactggaccttccagatcctggtgatgctggaaatgactccccagcgtggagatgtctacacctgccacgtggagcaccccagcctccagagccccatcaccgtggagtggcggagggcttctgcactgactcctgagactgttttaactaggactggttatcactcttctgtgatgcctgcttgtccctgcccagaattcccagctgcctgtgtcagcttgtccccctgagatcaaagtcctacagtggctgtcacgcaaccaccaggtcatctcctttcatccccaccccaaggcgctggctgtgactctgcttcctgcactgacccagagcctctgcctgtgcatggccagctgcgtctactcaggtcccaaggggtttctgtttctattctctcctcagactgctcaagagaagcacatgaaaaacattacctgacttcagagcttttttacataattaaacatgatcctgagttatctgtattctgaactttcttaattgagaagaggcaagaaatcactgcagaatgaaggaacatcccttgaggtgacccagccaacctgtggccagaaggagggttgtaccttgaaaagacactgaaagcattttggtgtgtgaagtaagggtgggcagaggaggtagaaaatcaattcaattgtcgcatcattcatggttctttaatattgatgctcagtgcattggccttagaatatcccagcctctcttctggtttgctgagtgctgtgtaagtaagcatggtggaattgtttggggacatatatagtgatccttggtcactggtgtttcaaacattctggaaagtcacatcgatcaagaatattttttatttttaagaaagcataaccagcaataaaaatactatttttgagtctaaatgatagaagcccaaatatattttgttcatggtaaaaaa

SEQ ID NO: 688255 - DNA, 148 bp, Homo sapiens
gggattgatctttgcagacaccttagccaaaccatttaccaataaagtatagtgcgatagaaagttgaaacctggtcgcaatatagtatagtaccgcaagggaaagatgaaaaattatagccatagcataatatagcaaggaatcgtg

SEQ ID NO: 688256 - DNA, 1728 bp, Homo sapiens
gcactggactgagaaccttcaccaaaaaaatgtctgcccagagacagatgaggtccttcagctccagtgctgattggttcttttccaaaggcccatctaatcctaccacgcacggaaatatccacaggtttttattctttctgccaggtacatcagatccatcaggtccgagctgtgttgactaccactacttttcccttcgtctcaattatgtcttggaagaaggctttgcggatccccggagaccttcgggtagcaactgtcaccttgatgctggcgatgctgagctccccactggctgagggcagagactctcccgaggatttcgtgtaccagtttaagggcatgtgctacttcaccaacgggacggagcgcgtgcgtcttgtgaccagatacatctataaccgagaggagtacgcgcgcttcgacagcgacgtgggggtgtatcgggcggtgacgccgctggggcggcctgacgccgagtactggaacagccagaaggacatcctggagaagtcctggagaggacccgggcggagttggacacggtgtgcagacacaactaccagttggagctccgcacgaccttgcagcggcgatggcccaagatcaaagtccggtggtttcggaatgatcaggaggagacagccggcgttgtgtccaccccccttattaggaacggtgactggaccttccagatcctggtgatgctggaaatgactccccagcgtggagatgtctacacctgccacgtggagcaccccagcctccagagccccatcaccgtggagtggcgggctcagtctgaatctgcccagagcaagatgctgagtggcgttggaggcttcgtgctggggctgatcttccttgggctgggccttatcatccgtcaaaggagtcagaaagggcttctgcactgactcctgagactgttttaactaggactggttatcactcttctgtgatgcctgcttgtccctgcccagaattcccagctgcctgtgtcagcttgtccccctgagatcaaagtcctacagtggctgtcacgcaaccaccaggtcatctcctttcatccccaccccaaggcgctggctgtgactctgcttcctgcactgacccagagcctctgcctgtgcatggccagctgcgtctactcaggtcccaaggggtttctgtttctattctctcctcagactgctcaagagaagcacatgaaaaacattacctgacttcagagcttttttacataattaaacatgatcctgagttatctgtattctgaactttcttaattgagaagaggcaagaaatcactgcagaatgaaggaacatcccttgaggtgacccagccaacctgtggccagaaggagggttgtaccttgaaaagacactgaaagcattttggtgtgtgaagtaagggtgggcagaggaggtagaaaatcaattcaattgtcgcatcattcatggttctttaatattgatgctcagtgcattggccttagaatatcccagcctctcttctggtttgctgagtgctgtgtaagtaagcatggtggaattgtttggggacatatatagtgatccttggtcactggtgtttcaaacattctggaaagtcacatcgatcaagaatattttttatttttaagaaagcataaccagcaataaaaatactatttttgagtctaaatgatagaagcccaaatatattttgttcatggtaaaaaa

SEQ ID NO: 688257 - DNA, 81 bp, Homo sapiens
  misc_feature (73)..(73): n is a, c, g, or t
tacgaaactactaaaagaaaacattggggaggccggcagccatgagtcagggttggcgtggtctgtgcagtanccggtaaa

SEQ ID NO: 688258 - DNA, 398 bp, Homo sapiens
  misc_feature (269)..(269): n is a, c, g, or t
  misc_feature (357)..(357): n is a, c, g, or t
gagtgatctctacaggatccctgctgcttctcctcctcactgaacgctgacttttgcagcatcgaacgctcgcgtaaagtctgtcgatcttgcgtgtctggcatgtagcttcacctccagtcttctccttcttgccctctgcttcccggattcctgcgtcccgttcatccttggccacgccaattttcgcatctctctgcaccacagccgtctgggtcttgcccagagagctcctatcgttcactttgtcatacacgtccttgatgctnacgttcaggatctcaatggccatacggccatactcaaggtctgccacctcccgcaccagcttgttgctgctgctcccggtcctgtatnaatctgctccactgtccggctcccgaggaggaaaagcagca

SEQ ID NO: 688259 - DNA, 497 bp, Homo sapiens
  misc_feature (57)..(57): n is a, c, g, or t
  misc_feature (115)..(115): n is a, c, g, or t
  misc_feature (369)..(369): n is a, c, g, or t
  misc_feature (448)..(448): n is a, c, g, or t
gagcctccaatggtcctcataactgttggtccatcgggcgaagtcccaccctggagnggaacccatacccaattttgaggactgtggggaaggcccaacattagtgaagtcaggntcttgacttccaccatagaaccccagctcgggagagagatccttatgcctgtgatcactgcgggaagacctctagacatgcttctaggatgttgaatcataagaaactccactgccaaagaaagccattgaaatgtgaagactgtggtaagaggcttgtatgccggtcatactgtaaagaccaacgaagagaccgcagtggagggaacccatccaaatgtgaggactgtgggaacccctccaagaggcgcttgnatctggatataattttatcattatttttaaatgacatataagttatacatatttatggagtgtgaaatttgatacatgnatataatgtgtgctgaataaatcagtttaatttcacctgaaaaaaaaaa

SEQ ID NO: 688260 - DNA, 244 bp, Homo sapiens
gtatcaatgttggtgtttttaactgacacttaaaaatatgttaaaatatgtaatggcttgatttctgaccagactaaactctcagcctgtctaagtgttaggcagcttgatctaatcgatctcatccttttcttttcctcagtccaattttgcaattgctatgtcagtttcagttcacaataataccagtgcagacatggctccttaagattttctccttttccctcacgcgggtcgcttttaa

SEQ ID NO: 688261 - DNA, 894 bp, Homo sapiens
acacaaaataaaacactaaatcataacaaacaacaaaaaaatgcactgcataatctcgtatatagcactcacagcttactttgtaagtctcttccgaattttctttgccatataccatctagttttgtcccccatatttggttcccatcgtgtaccaacgatttcgcgaattgaccctgtggccttcctccactgggtttccttgtatttccccgacattgtcccccggcgattgtttccccgttaccaagactttttactaggcttttatccacaggcgctttcaagggattttggttagcggacaacccttggcaccccttggggcaagacacaactatgtgcgttcgacccggtgcgcctgccaagaaccgtctttttgggcatctccgtatatgactcgtgagtacgcaagctactgttcgctgcgtgtttcacagaacgacctccacaggttgtccggggtcttccatcgtgaagcccgcccgttaagtacgagaacatttcccctcgggggcgtgtaagatcacacacattgttgcttgtgagctgggccactcaccgggtaattatgtgttgacacccgttttgttggacaccctgcgccctttctctccaactatgtccataagagtgtttacaagcccccacgagaacatacaaatggtagatttgtgtagacgcgccctccccatgagtcatccgtcgtatcctactcccccccctcaataattttcatgtttcccaagacctgagtacattttaccccctctgttagattcacaactccacaaataatttgctgctaaaaaaagacttctttttattgtagatttcaacaccccagatcaagggttccaatcccctcggaaactaccggcccgcccacataac

SEQ ID NO: 688262 - DNA, 175 bp, Homo sapiens
tacggttgttttataatatagattcttcatagaggagacgccacctagtaagttttttcagttaattctgcatagaagtattttctttttcagcttttcttccttcttcatcttccagactgtaattctaagagtcttcctcctgatcgcttgaagttggttctagcaaatcagt

SEQ ID NO: 688263 - DNA, 152 bp, Homo sapiens
tatcacaatcagtcagtaaatatatgctgtgacatggtttctcctggtgggaaggcactgggaagtgaagggctcggtgtggtggtaccattttctttcttctttaagactgtgtttaaccatgtgtgcagtaacacatctctttcgttcat

SEQ ID NO: 688264 - DNA, 116 bp, Homo sapiens
gggaatccttacttcaggaaccgcagccgcggctctgtgttttgagagtgcaaatgtcatttgtcagagtgaaccgctgtgttccccgagttggtgtaagaaagacaccgaaagta

SEQ ID NO: 688265 - DNA, 155 bp, Homo sapiens
ggacagagccaccagcaggggtgctaaggggctctcccttttattaatgacagcggttctctcaaggaagtgtagtgccctcccctttggatagttgcctgacccttttcatcagtccttcaagtaccctcatcagtatagagcccgtgcattct

SEQ ID NO: 688266 - DNA, 876 bp, Homo sapiens
gcgggagcgaggctgcaaggaagatgtgcgtgacggcgtggaccacatagacatttacgcggatgtcaggtgcgaagagttcaaccaggaagctagacagtatggtgggcatgagtcagatagagtttgtagtgacgagtgtcatatctccatctgcgaaataatggatgatgccccagaagaccgagatgacatggctagctctccgcagcgcaacatgtatggtgatgatgtgggtaagaaggagcagcaaccgaaactgttgtctatatcatatacctggcaataggagaattgcattactatagtatggaaatctaatcatggtggacaacgagatgaaggacttaactccgaagcgagtgtcacttctgtgagcggagtcaaatgtgagtatgcctcggaagatcaaagatactactatgcgacaaatccggggcaaaactgggcccatgtgcgaaaggggggtgttagcccgtatagtcagcgaggtccgcgatcatcgaacgcaatcatggcaagacagaagcgtcacaaggggactcaagcgcacgcgtcaaacagagcaagctaccagagcgtacagaaaatccctgataggaacagcataccacgacagataaaaccgagaggacgcttgaaggatcaaagcacgcaaaagcagggaccacagggaaaacacgtcacgcacaaagaccagggacacaacaatggtcctggggggacaagggtcaaagagacatgagctgccgtaccaccgggaggggcaggactacacggtgacaggagcaatcaacctcagcaaagggtgggacaaagggaagggacaaccggcaaaaaccagagggagaatggaaccaagagaggcggacacga

SEQ ID NO: 688267 - DNA, 273 bp, Homo sapiens
  misc_feature (9)..(9): n is a, c, g, or t
  misc_feature (14)..(14): n is a, c, g, or t
  misc_feature (20)..(20): n is a, c, g, or t
  misc_feature (25)..(25): n is a, c, g, or t
  misc_feature (34)..(34): n is a, c, g, or t
  misc_feature (37)..(37): n is a, c, g, or t
  misc_feature (44)..(44): n is a, c, g, or t
  misc_feature (72)..(72): n is a, c, g, or t
  misc_feature (83)..(83): n is a, c, g, or t
  misc_feature (85)..(85): n is a, c, g, or t
  misc_feature (87)..(87): n is a, c, g, or t
  misc_feature (96)..(96): n is a, c, g, or t
  misc_feature (105)..(105): n is a, c, g, or t
  misc_feature (113)..(113): n is a, c, g, or t
  misc_feature (118)..(118): n is a, c, g, or t
  misc_feature (127)..(127): n is a, c, g, or t
  misc_feature (142)..(143): n is a, c, g, or t
  misc_feature (147)..(147): n is a, c, g, or t
  misc_feature (153)..(153): n is a, c, g, or t
  misc_feature (156)..(156): n is a, c, g, or t
  misc_feature (158)..(158): n is a, c, g, or t
  misc_feature (161)..(162): n is a, c, g, or t
  misc_feature (168)..(168): n is a, c, g, or t
  misc_feature (178)..(178): n is a, c, g, or t
  misc_feature (186)..(187): n is a, c, g, or t
  misc_feature (191)..(192): n is a, c, g, or t
  misc_feature (196)..(196): n is a, c, g, or t
  misc_feature (199)..(199): n is a, c, g, or t
  misc_feature (202)..(202): n is a, c, g, or t
  misc_feature (209)..(211): n is a, c, g, or t
  misc_feature (217)..(217): n is a, c, g, or t
  misc_feature (221)..(221): n is a, c, g, or t
  misc_feature (224)..(224): n is a, c, g, or t
  misc_feature (238)..(239): n is a, c, g, or t
  misc_feature (241)..(242): n is a, c, g, or t
  misc_feature (253)..(253): n is a, c, g, or t
  misc_feature (260)..(260): n is a, c, g, or t
  misc_feature (265)..(267): n is a, c, g, or t
  misc_feature (271)..(271): n is a, c, g, or t
ttttacccncctanaaaccncaaantacttcgantcncccttcnccatttccgacggcatctacggctcaanattttttttancnanaggcttccncggacttcncgtcattnttggntcaactttncttactatctgcttnntccnccaacnaananttnnctttanatccaaagancatttttnncttnnaatnccnccncctgatnnntggcantttntanatgtgtggtttgannanntctgtatgtcnccatctnctcannngggnct

SEQ ID NO: 688268 - DNA, 376 bp, Homo sapiens
ctctacgaggatcttactacaggcacgcaccaccatgcccagcatattttgtatttttggtggagacagggttttgccatgttggccaggctggtcttgaactcctgacctcaggtgatctgcccgcctcggcctcccaaagtgctgagattacaggcatgagccactgcgcccaggcaaaaaatttaaaattgtaaaaatcagccaaacatggtggcattcatctgtagtcccagcaacttgggaggctgaggtgggaggatttcttgagcccaggaggtcaaggttgcagtgacctatgactgcaccactgcactccagcctggacaacagagtgaggccctgtctcaaaaaataaataaataggagtttgagg

SEQ ID NO: 688269 - DNA, 160 bp, Homo sapiens
gaataaatagcggtacctctctccacactggattcttctgtttaccatcatagtataagattttccagcaccagtctgcccatacgcaaaaatacagacattatatccctcaaaggcgtgtaagtagcatttccttgccaatgtcccagtgtggagagag

SEQ ID NO: 688270 - DNA, 462 bp, Homo sapiens
aggacgaccactatcacggggggccgacgcacacggaacaacacactatagcatcggaggatcagagccaaatggggactcgcggatgcacagccacgcaccccacgtgttagcgtgcgtgagatacagtaggcggaatataactaggtgcgtgtaggtagagtggggctgaggtactcttactactgtggatgtcatacgaagtcaaaggtcctgcccaagccgtgcggtcccctcagtcaactctgtttcggagacttaacgattgggcatggctacacaagtcaagaaatgttcaagcccttggatgtagggaaaagaaagcagcagatcagactgtcactgtgtactatctcgaaggggaagacttaagagactaccatttgggaaaagacctgtactttaaacaaatagcttagctgagatgtaagtaacatatgtagctatgccccaggcactttg

SEQ ID NO: 688271 - DNA, 230 bp, Homo sapiens
aactacctaaaggttctttcagagcacggcttctgccccattacttccgacatccggtatggacagactttctactatgcggaagactatcaccatcagtacctgagcaagaatctctatggctactgcggccttgggggcaccggcttgtcctgcccagtgggtattaaaaaataatttctccgatcatggtgggcctttgatgtttcagtaaaaatgctttcatctaa

SEQ ID NO: 688272 - DNA, 1381 bp, Homo sapiens
  misc_feature (396)..(396): n is a, c, g, or t
  misc_feature (668)..(668): n is a, c, g, or t
  misc_feature (1381)..(1381): n is a, c, g, or t
ggtatactgtaccgaggttccacgtgatgctgtgcgagccgtatcgctctgtctcctcccaatctgggaggcgctggatgctatgggctcagtggtgaacaatggcagtctacgggtatgggaaggaaggaacccgaaggtgagagcacctggaatgtggctgtcagtgggtctccattctgaggggagatgcgtgcatcgacgctcgtgcgaagaatgatgtgaggacagagcgactgtcatatggtaccagagcatgcttgagcatgcacgattgccttgcatgcttgagggaaagaggggggactttgggtgcgctgttggacctctacgctgtcgctaccagtggttgggaagtcggtcgagttagcgtggaacaatagggaaagcaccaanttcctattcgtctgacttcacggtacaaagcccacgactacattcccccagagacgtgctcaatgtagctagggtcgcgtatgtatcaccccaaggaccaattagtggattgagttatagaacgcgtatataccacaatctagaagggaggacgtgcggaaggaagcgattggctacttatcccgagtgattgaatctcggggaacccccttgacttggtcttagcttagtatctcgcattcggatgcggtctgatcggaagctcgcgaganacataggtgttctggaagggctccccgtggttggcccgcgggactcgtcttaacgagaacatatgccgtaacgatattagctcctatcgttgtactcatacaagagtcaacctttgattagtaaacttaaaaagcagcatgtaagtggaagggtgcatgtgtgttacaagggttatctatcaagacgagataggaaattaacacattcacagggaaacccgaatgggcttgcctccgtggggcgcttccaagtgttgaggagggcgtggtgcagataaacaaggacgtgcgttgaaactataaaagaggggcgtgggccatgggggacccccttttgtggcgttgattaccatgtggaaaccgcgtggggggttaatgaaatgaggggctcgcggaagtggggggatatacaactaggtcgaaagggggtatgtcatcatttacacgtgtggaaggggggttggtgaggggaatttgggagattaaggcgcatgggtggtttaaaccgggggctgagatatagaaagagcagagggggagaacaaaaagagttgctacaaaagagacttgtgacagttttcacggaattgccaaaaggaccgttgggagaaaggaaccccgcagggaggagggaactagcacacacacgagtgttttatagccattgaacgggtgcgcataggagaattcagagtagtagtcaatgttacccn

SEQ ID NO: 688273 - DNA, 269 bp, Homo sapiens
agcgagagagagagggagagagagagagagggagagagagggagagagagagagacgagagagagatacaccctagtgggcctaatgcccttatatgggtcaagggttctattcaaacaggttctctgtggagacttataagtggtgggtttatatcacgcaggcacagagttctctggggctcacagtgatgagtgtagcaggtgagacactgtgttccatgcagggtgtgtgggtgttccaggtctctatgtcaagatatattgtca

SEQ ID NO: 688274 - DNA, 654 bp, Homo sapiens
acttttgcggaggtgacgacctacgcacacgagaacatgactgtggaacaggatatccttcatacatctccagaagaggagaataggaaccacaagacgaaacgcctggagcatagctcaaaattctacttcatggatgcgaaatgcccacaatgctgtacaagcaccacgtgctctagccatgcacaaacggacgattcgtgcgagggctgctgcactgaacattgacagcctacactaggaaaagcacggtttacagaaggatgtgcctataagaggaagcaggactgcactctgagctaagaagagtgggaaaccatctcaatgaacacattcaggatgatggatggcgacgtgaccggggcccaggcctatgcctacaccgacaagtgcctgaacatatcatgtcggacgcttggcactatcatgatcagagtagtcctgttaccgggctgccgcaatgcgagctactacgccaatatgccctagagagagcaggataacaagtcactgtacgaggctgtacaagtctggactgttagaactcagtgtgaaccgatgtaactgcactgtaggacatgccgcttttggcagcttgtgcaagcctagatgcaccagacgtacgcactaccaagatcggtgacctgtgagagg

SEQ ID NO: 688275 - DNA, 212 bp, Homo sapiens
gacctccttatgctgcttcagcagaagaagtggccaaagaacttaagtcaaatctcgggatcgaagtcctctgctatgtcttcagacgggtcctggctgaaacggatactgccgaggagaagccggctcccagatgacgggagcacgggtacgcaggcccccagccactctgaaagtgccttgaatatgactctaaacgtcaatcaaatctc

SEQ ID NO: 688276 - DNA, 1302 bp, Homo sapiens
gggcttgatcttgtctataacacatgactagtgcctttcagctataatgtctgtcagattacacgacgttgcccttaatatctcgttgggaaggagatgtccacgattattgcaaatcttcttattatatgttctccctttctgtcgtatgcacatcagtggagacaatgtatcaactaggttcgtagtgtacgaagtgggggtgtctacgaaacgatggaacgtgtatatcccctaaacgacctattggaatagatgtaaccatcctggtgaaactcgatattaaccagggcattactgcgagacctgttagcaattctcaactgtctgcacatccacgttgtgcgtttgacctgccatgactcactcaagagtgttcactctttgcacaaatcacgccgaaacatcatcacggaggataacccagggtcattgcgccagtgcgcggtggctatccgcctgcaactgtgtatttcaccgaacggagtttgacttgcgtcacaacgggctctcatctgcgcctcgtgcaacgcaactggctctcacaacaccttgcgcatgggtggaccggcaagcgctacccttgtgtcgcgcccacttggattgccacatctgctcggcgcgccacaaccgcctcagaactcatctcctccccctcttccacctcacgttggtcctaacgtcagctcgcgacgcgaaccccaagcagggggcgccacggtgcaacgagcctctgctgcacaacatagatagtcgcaccgcctctaacttacaggtctgcctggccctcttcccatcacaccatcgctggcacaacctcatcaaacctaggtgcacaccaatgcatgacattccgccctcttatgccgccgtacccctcggcccaactatacacgactcgtctgaacattctcacgcgcctacactttggctctcaccaacccggcacatctcatggcacccgatctcggtcctccgcagtaatccttcccacgtcatctagtcctcagcagacgggccaccgtcctcccgactcagaggtcagttttcactttactcatcacacaagacgctatcgcgtaacgcatcccatgcactcagctgcctaaatcgtcttgccttttgaaacgagacaccaccgttcaagccgatcagtttctgggccaaacgccggtccattggctgtaccgccttaccgccacgggtctttgcgattagtccaacaacgcgcgctatcacgcgctactcatcatcctcctatcactctccacgtaatgtatcctgaccaataaacgtgcatgc

SEQ ID NO: 688277 - DNA, 238 bp, Homo sapiens
tctgccggtctctagtgagatctgctagacctggggacactggcagctctcacaacgactgctgtagaggtagtcaaagcaattggatcaaattcaccttctacttcaagagaaagagaccgatttatctttctttttttatattcatgggaagaacaacttccattagctgtataaaaacaaacctctgatatgacggtagacaataggtttcaatcacatcattcagtcaaagcaa

SEQ ID NO: 688278 - DNA, 239 bp, Homo sapiens
agctgacatcacatggcgtgagccaccgtgcctgggctgatttctttttgcgatgacctgctgctgattttttttatggtgactgtgaattctgcaactttactgaaacctttttatcagttctaatagttttcttgggggagtctttcagtttttcccaatataagattgtcatctgtgaataaggataattttgacttcttcctctccaatttgggtgactgttatttctttctctt

SEQ ID NO: 688279 - DNA, 126 bp, Homo sapiens
gtccgacgacagggcgactccagaaggtattcggagaagcgataaacattaaaaaggacgttatgagcaaaccaacaacgtacattcttgctgtgacgaagtgagaatacacaatgcatcatgggt

SEQ ID NO: 688280 - DNA, 1822 bp, Homo sapiens
  misc_feature (894)..(894): n is a, c, g, or t
  misc_feature (1043)..(1043): n is a, c, g, or t
ttgtttctcatgtgttgtgttgctcatctggagcgcggctgtctagttgcctccgcttcgcgactctgttattgatgtcgcgcgttggctgctattgtgttgatccgctctaccgttgtactttgatttgatctgtttgtggtccccacctgcgcgttgttgtttatccttctgttgcgttgttgctttgatggagtgaggggtccacctgagttgccacaccgtgtgctgtatgatcgcttgtgcgtcatcgatgttctcccttgtgttcgccgcgccttgtcacggagtggggggggggaaccaggcccgtggacacccacatgggctaaccaggaacccttgatcgttcgtgggtccgctatgtgttgtggttttgttaacacgtcggcgtgtcccccaccttgggggggatctctactcactgctttctgctctcctgccccccctttttggggggttggttcctgtgtaggtctttttactcagggcgccccatcttccccgagtgtttggtgtgtggataacttgtgtggctagagacgccctttgctggtgaccccccacgttcgtggtgatccactcccccccgagttctgtgtgcgcgcgccgccaatctgtgtttatgtgttggtgggtgctttctctctgcggccccgcgctacaattataggaggaccacagtcagtttgaagtatgtttgttgtgtgttgggtcgtcccacgttgcccccgagcgcactacatatatagtttgttgtgcccaatatggttgtccctgtgcaccccccgtggttgtgtggcccgccccccgacgcagtgttgtttggcggccgttcgccatccatgggcgtagtagctttggctgtgttctaccaggaggggtattatttcnttgttgggggacgacttgtgttcctgccccagcagccgccccgctgttgtggtcggcgcccccagccgccccttttggtatggtggtttctttagtcgccacacccttcttgcgtagtatacgcccccctcgctttctcggcggagagngttctttatatcctttccccccctgggcctcccccaacaggtgctccctcataatatctttctacagggggcgttgtttactcacacagccgtgttatattgtgagaggggcgcgagaacacacaagctgagaggcgcgttattataggcgcgacaccttgggagaaggggcgtctgccgcgccccctctttgttgggggtgtcacctctctggggtggggcctctatgacagagagagagtgtgtggcacccaccgcggagaaagaggccgctcctcggacgacacactctgtgtgtcacacacagcagagagaatagcgagagtgtgtcacaccctcttcctctgggtctctctctgctgtgtgtgggggtgtgtgttgcacagagagtgttgctcgtaacacggtgtgtcacgagccacactcgggcggcccacacactcgggagacacacacacatgggagattttctctttgttgtttttgctcttcttctgaagaccacactctctctggctctctctattgtgcccacgcggctcggaagtgcccacactggcccgccgatttcacgacttcactgcacacatttccgccctctcccggggttcacagaccgatttcttctggcccccgacttctcccgaggagagcttaagaagagcgcggagagatcagacttgagacccagcggagatttcgcagaacctcgccctcgggccaaataagcgagacccccttttcccagaaaaagggaaaaaaaaaaaaccaaagaccca

SEQ ID NO: 688281 - DNA, 100 bp, Homo sapiens
gatccacgtgccattgtggaaaatggattgtaaatcaaagacctgagctttagtcctactacctttgctgaagtttcttgtgtgatactctgcgtgctcc

SEQ ID NO: 688282 - DNA, 369 bp, Homo sapiens
ccgcgtcgacctatgactgatatcacctcgttgttctctatgactgatgtcacctcgttgttctctatgactgatatcacctcgttgttctctatgactgatatcaccccgttgttctctatgactgatatcaccccgttgttctctatgactgatatcaccccgttgttctctatgactgatatcacctcgttgttctctatgactgatatcacctcgttgttctctatgactgatatcaccccgttgtcctctatgactgatatcaccccgttgttctctatgactgatatcaccccgttgttctctatgactgatatcacctcgttgttctctatgactgatatcacctcgttgttctgtcgacgc

SEQ ID NO: 688283 - DNA, 779 bp, Homo sapiens
agcggagactgcccggagagcgcgctctgcctgccgctctgtctgcctgccactgagtggttcccagcaccagtgagggcctgagatcttctttctcctttgcctggtccgggagggccttggcagccccgtcagcatgcaggccctgcctgcatgagcacagaggtggtggaagaaactgtggcaaacgtgactgagcgtatctgtgggagctaatcctgtccaatggtggaagtaggagaatttgatgatgagtgcacgagtgaaaccgccagaggaggtgtgtggcggaagacatctcctgtccagaaccgatcgcactgacaaacagcggcaaggtgctgccgaggctggatgagaacgaacagcaccatgtgcgtgtgccatggaccccagcagttgtgaccctaacctctattggcgagtctgagaccggtgtgcagcgaattgatcgagacagagacctgtgcgaacctctttgcctgaccgacattcgtattgcccactaaaagtgtggaccctggaaggggcaccaaagaaagggccacgagcttccaccgtggactacactctgtgcctcgtcgcattacatcccgccttgatctgtgacgctgagcctgatccgatttccctcctgcgcatgcttggactggtctctagaacgtcctggtcaccctgtgatcagagggatgaggacaagcatcttctgacttgataagcagaagctgcgggtgaatgaagatccatgagaatgagaagcgcctggaggcaggagacca

SEQ ID NO: 688284 - DNA, 322 bp, Homo sapiens
tcacagcactggcagatactccccattatctaccatgggccggcagacttctaagctggcccctaagacttcctgcaccctcatctacgagccctgcacctactgaggaaatccattgcatcagatggcatacaggatccttaagggtcatttcctggattccagagctcaggttacctgacactaattcaagcacctcaagctcacgtaaactggtaatctgagccttagcccaagctaatttccaggtaaaatctgtcccttaattcattaagtttagaaatctgcattccatggtaaatatagaagagtagcactttag

SEQ ID NO: 688285 - DNA, 777 bp, Homo sapiens
  misc_feature (372)..(372): n is a, c, g, or t
gaagcgatcgcgagaatgactagtgtatctaccatgcattgtctcagaaagagacaaatgattccaatgtcggccttcagtgatgcacagcagggccgaggaccttcgtgatggccttcctgaagctgcagctactccctcgtcatgatgcaccgctagaggtgccagacgcatggtaccattctgactcgtgcaagtgggtgtggttctggaatctactttcagctcgctcacaaaagacgacgataaggtagaaggaataggaaggagaagcctgaaaggccgtcttcatgactccggacgatggcgatgcggataggctgtggcctcctttgaccattaaatccatgtgtatgcagacatacgagcgcnttgtcctcccgtcgtcctatgaatgtctgtaacactggtcatatccggaaccgtggtgcacttggggctcaaagcctagaaatatctggcacgtgcgagcacgcattgattccattggtgctacgcatccttaagggggcagaatcgttgcaccggggaggctagttgacttcgcgatggtgcatggaaagatctcaaaattgacgcccctactataagttgtggtgtcttaaccagggagagtcccctatcatactagcgtagaatcatatggcacattgtgcatccaattaatcaccaacatgaagtacccgcctgagacacgttatctgccatggtctaagacctgcgtgtttcattgtgcgaaaggcgaagagctttattgccctacatttaggggagcaa

SEQ ID NO: 688286 - DNA, 235 bp, Homo sapiens
tttttccccccctgggggggctaaagggccccccccattaaggagggggtccgggccccccccccccccctgaaaaatccccagccaaataatggggcccccccccccccagggggccctttttcccccccttagagggactaaggggggggtaggggccctggaaccctttcccccgggctagggcgggggggggtttaacccctgggcgggccatttccgggcccatttttta

SEQ ID NO: 688287 - DNA, 165 bp, Homo sapiens
ctggaaaaaaagtgaatagggtaggttttgtggggaaagttaccctttgtcaatgcccagccttaaggccccctaataaagggtagccaaagtgataaatgaaataacccctgatgaaactcctttcaatatggtaaaaacccttaaatttagggttttctttta

SEQ ID NO: 688288 - DNA, 365 bp, Homo sapiens
  misc_feature (5)..(5): n is a, c, g, or t
  misc_feature (7)..(7): n is a, c, g, or t
  misc_feature (15)..(15): n is a, c, g, or t
  misc_feature (34)..(34): n is a, c, g, or t
  misc_feature (38)..(38): n is a, c, g, or t
  misc_feature (62)..(62): n is a, c, g, or t
  misc_feature (65)..(67): n is a, c, g, or t
  misc_feature (77)..(78): n is a, c, g, or t
  misc_feature (88)..(88): n is a, c, g, or t
  misc_feature (122)..(122): n is a, c, g, or t
  misc_feature (127)..(127): n is a, c, g, or t
  misc_feature (136)..(136): n is a, c, g, or t
  misc_feature (152)..(152): n is a, c, g, or t
  misc_feature (167)..(168): n is a, c, g, or t
  misc_feature (182)..(182): n is a, c, g, or t
  misc_feature (187)..(188): n is a, c, g, or t
  misc_feature (211)..(212): n is a, c, g, or t
  misc_feature (221)..(221): n is a, c, g, or t
  misc_feature (240)..(240): n is a, c, g, or t
  misc_feature (248)..(248): n is a, c, g, or t
  misc_feature (255)..(255): n is a, c, g, or t
  misc_feature (260)..(260): n is a, c, g, or t
  misc_feature (297)..(297): n is a, c, g, or t
  misc_feature (299)..(299): n is a, c, g, or t
  misc_feature (314)..(314): n is a, c, g, or t
  misc_feature (341)..(341): n is a, c, g, or t
  misc_feature (356)..(356): n is a, c, g, or t
tcaantncttctganctcttctagcctggctaantatnctcctaagcactatggtcagcagntgnnnttgtctatgnnacatcaactncccaaaatgaagacatttcatgaacctaccacanttttnggtaatagnttacctaaatgcactncacttaagccagaanntaacacattgactncagannctaaattgtgggatgatgcaaannattgctttncacggtgtacagctgcggnatccaaanctttgcnttttntgctacagggctgttgtctcatgttgaagagggcttngnttccgatgcaactgntagcagctctgatgacgctttggatgntatacccttagaaanaatgtggca

SEQ ID NO: 688289 - DNA, 442 bp, Homo sapiens
gattcgacttgcaggtctacaaagtgagtccagcgctggggctttctagttgcttatattgtactccattgttaacaagaataaagttaggcatccttccctctattcccccagcaccctaactgttctctctattataggtcttaccacattttacgataactggcctgaggaccttgagaacaagaatcatttccatattttaaaatctgcaatgcttagctaagttcccagtacaaagtaggtaatgttaggccaggcatggtggctcatgcctgcaatcccagcactttgggaggccaaggaaggtgggttatctgaggttgggagttcgagaccagcctgaccggcatggagaaacctcgtctctactaaaaatacaaaaattagctgggcgtgttggcacgtgcctgtaatcccagcaactcgaaagccccaagcg

SEQ ID NO: 688290 - DNA, 185 bp, Homo sapiens
agctgctccgtaacgagcgcctcctaacaccctaacgagcgcttcctgtaacagcgcctcctaacacgcctcacgtaacactcccctgactcctgtaagttaggcatggcgctcgattacgggagggctactgatagggaacacggtgcttcgtttactggagtgctgcatctgattcaagaact

SEQ ID NO: 688291 - DNA, 680 bp, Homo sapiens
ggtcagctccagctcactggctggcaccgagacttctggacaggaaactgcaccatccggtcttctcccagtcaagggggctccagagactgcccacccaggaagtctggtggccgtggggatttggacagtgccttggtaatgagccaggctccaggaagagatgtccttgtggctgggggcccctgtggctgagcattcctccgtgacgtctgcggtggagcttgtggaagccaggcgcacaggatgcataggcatgcctaggcccagggaggccagcagctgcatcctcgagagaggaagccaggagtgccccactctgctgggggtactgcaggggtggggctggaggctgcagagcccacagaccctggtcaccagggcagagcccccttcagtaacccagcagagatccgtccacaaaagcggtagaagaacagggggcagtccccaaaatgctggggaacgagctatgcagatgtgtgtggggacaagggcctcgggacgttcgacctacagaggttctgagctgcgaagggctgcaagggattcttccgccggagcgtcaatcaagggagcgcactacatctggcacagtgagaggcaagttgccccatggacgacctacgatgcgtcgcaaggtgccaggaggtgtcggcttcgcaaatgccgtcaggctg

SEQ ID NO: 688292 - DNA, 420 bp, Homo sapiens
cgtagaacacagtgatgtcaatgagtacacgagagaacagaagtgagattagcactaatcacctctaatgccatgatgtccagtaaagtttagagaagaggaatagctaattggctgctccttctgaggctttgtgtctcgcgaagctctggaattaaaaggtagaggagagatgctgaatgatgctttttttcttcttaatcttggggggtcattatgattaagttattgatatcatatcaccgtatgacagcacatgatgaaagaaaatcagatgtttgtttcaatcaaagtgaaacaaaatgagaataactatttgggcaaaacacttttatcactgctaagatactactagaactgagcagagaaatactcagagagagccatggcatagtactaattaataatggggtacattta

SEQ ID NO: 688293 - DNA, 520 bp, Homo sapiens
aatgctgtaactaagattagtatgtgtataggaagatgagtagatatatgaagaactgattagggttggggtctgagtatatatatcacagtgagaatactatgatggaccatgtaacgaacaatgctacagtaatgaatattatggagaagtcgtctagttggaagctaagggagagctgggtggttggggtggtggctcagtgtcagtccgagataataacttcttggtctaggcacatgaatatggtggtggggaagagacttgataataagggtggatgcgagaatggatattacataaggggggtatgagtccttatggtaagggtaaacgagggtggaaaggatggggggaattagggacgtcagggttagggtagtcatagtagtgtgcatggttgtaactattatgagtcctagttgacttgaagtggagaaggctacgatttatgggatgtcatttttgtgtaagggcgcagactgctgcgaacaggggtggtgatagcgcctaaagcgat

SEQ ID NO: 688294 - DNA, 138 bp, Homo sapiens
atgctcatccctcctttatataaatgcttaggggtatagttcccctgtcttctgaagtatacttgatgccggtagacgtggcggtgtgtacactgctaatagcgctgttcatctacgcactctactctcaatgtactg

SEQ ID NO: 688295 - DNA, 112 bp, Homo sapiens
  misc_feature (23)..(23): n is a, c, g, or t
  misc_feature (64)..(64): n is a, c, g, or t
  misc_feature (67)..(67): n is a, c, g, or t
aattctttatccaaatgtagtgntacaaaactagttgctactccatttgtataaagaattgtgnggnagcactacatttaatgtaatgagatacctttgttcatttttttaa

SEQ ID NO: 688296 - DNA, 155 bp, Homo sapiens
cgaggactcgaaatggacgaacatttttatgaagaatttttgtctaggagaatataacagtgttacccacaggttgtgtctcttaagggtggttcatatttctctgtaccttttgtgtactcacacaggaaagtactaggagtcctaagaaatgt

SEQ ID NO: 688297 - DNA, 393 bp, Homo sapiens
ttagtccaaaagccaaaaatatttatcttggttttacattttaatttccattcttaattgtaatttttttctttaaataaggaaaccaataatctcatgtataaaaacttaaatattttacaagttacatatagcatcattctaaaataagaattttttttgttttctgtctgcttttttgcatatgtctcgtggttgaggtttaatatgttcaagtgcgttatttgttgctgtgtgttagagtcattagttaaaatcatatccagatgtcccttgtgatacttggtgctgctgctgagaaatggtacgtgttgtgcatataagacagtcccgagtgtcatcattccattcgagtgaatgtttagcaggtgtcaattgagaagaaaggggaga

SEQ ID NO: 688298 - DNA, 780 bp, Homo sapiens
catttttactccctctcccttttgttctctacactgtttagtcccacttcaccactccgtcgagcccaattttcttcatattgtaccctaccccattctacccatctcctctctccgcccagggctctatctttctcctctctcacaatacgctcgccccactgtgctaaagctagttctcatatagagacacaacattacacatacatggtatctcccctcgaagtgctgttcttcttttctaaaccacgagccccttcatcgcccagccatcatcagcgggaccttagtctgtgggtggtagagcacgggtccccccgcttgcgggtgtcgcggctcgtcaccatcaccaccccccgcgtctgttgttgagtactacccccccgccacgactccacatcttttgtgtgagcgagagtgcgtcgcggaaatgatttaattatcatgcgggtgaggactacatgcagagagagtgtagagatacagaagataagaacatagagcgttatggatatatgatttgtctttcacttacgcacccacccccccaagcggctgtctagttagatataataaaataattcatttccaccgtggctctactgccccttctcccgcatctgtcgctgcgcgacatcatatcacgaaaacctcccccctccctccttcgtacttaaagcgacaattattttgtttctattccagaaacataattatttttttcatagccaaaaacaaaaaaccaataatcaacaacaacaaacacaatcaatagtcaca

SEQ ID NO: 688299 - DNA, 179 bp, Homo sapiens
tgaattggaagctatcattgaagaagctgatggtgatggcggatgggtagatacatatcacaccacaggtattaccggaataacggaagccgttaaagagatcacactggaaaataaggacaatataaggcttcaagattgctcagcactctgtgaagaggtaggtatgctgaaggacg

SEQ ID NO: 688300 - DNA, 539 bp, Homo sapiens
  misc_feature (442)..(442): n is a, c, g, or t
gaatcctgaacgctggctgctgaggcacagctccatcgttacaatggcctctttagacccttttcctgcctcccagccttctctccaggccctgaacattctcagctgaagcgatcctgccacctcaacctcccacgtggctgagactacaggtgcgtgccacgtatgcccaactaatatttggaattttcatatacgtggcttccagaggggtgacagcgaaacgtgccaacatccagatgcaggaaaccaagcttaacacgcccactgattctacattatgctgctacctcccggtagcctgtccaggcccagaactttctccagtcagcctctacagaccaagctcatgactctcaatggcctatttaggcccataccctacgtcacggccagctccgcagatgaggctactgcctcacaacagcctccacaggcacangctccatcgtacaatggcctctgtagaccccagctctgcctcccagccttctctccaggcccttgactttctcaaggtgacctcaccaggcccaggt

SEQ ID NO: 688301 - DNA, 720 bp, Homo sapiens
gcatcccccacgcccacgcccaggaactggtggcgtccaaagggactgcgttggggtgaggccggggttgagggcctagggcgcagagccggctggaggcgccggcgtggggaagggggccgagggtgagtagtgtagctctgagtaaaagagccatgggctgcctgatgtgggggaccctgggaggcattgacttttgctgctgtttgccctgcggctcggagcaagcagactgccatctgttttgcctggctgcgacgcgtcccgtttaattaccctcccggcagcctaatagagatgatattaaactaaatctttctgacattaaaagtaattatccccaaacctggtggctcccgtggacggaatggcccctccctgcacccaccccttccctgtgcctgctgccggattcctgttagtttgagctgatactctcctgcccgcggaatggtggcgcagaggacaacggggggaaagtgcctttgggagaatggaatctccactgggtttgcctaaaaccgcgttttcccgcgacaaacacagactctcctgtacctatgtgaaacacacgcaccgtgtacacacatgacacgtagcgacattttcctccagatcaactcatgagtcatgctgatgaagaccctcagccggcacaccctctgtgggcagggagacgcgcaagcttgggtttccttgtcccgttcctctgacaccgta

SEQ ID NO: 688302 - DNA, 169 bp, Homo sapiens
tctagaggatcccgtggggtctcggtggattaatttcaaggttttcttctgactcgcatagcaattggtagagatgtcctggcccgttgggtacgctggtgctttcatgattctctccaggtggccagaccatccgtacgggcgggccaccaaagcacacggagattct

SEQ ID NO: 688303 - DNA, 121 bp, Homo sapiens
gagcccccagtgccggagcaaaaaggaccctggacccaaaggcaaatactgcggggtggtaaaaaaggtaaagtaggctgtggcaatggaataaaacccgattaaaaacgttaagaactga

SEQ ID NO: 688304 - DNA, 222 bp, Homo sapiens
agacgtccattctaggcatagactcattcttgcatacagcaaaatgtgctcaatgtattggcctgcttacaacacggggagatgtgttggccagtaagttgctcatcacaagagcaccagactggggggtgtaatctccggcaactggcatgccctctgaaagaagggttttctgtgctgtgagatgcatagaactatactttgccatgcaggaagggaggt

SEQ ID NO: 688305 - DNA, 111 bp, Homo sapiens
gggtgtgagtgctctttgcgtgcgtggtgtgttggatgtggggggtgccgttccatgcttcaacccaccccaccccccagtgaataaagactgaagttattcattccaata

SEQ ID NO: 688306 - DNA, 396 bp, Homo sapiens
  misc_feature (215)..(215): n is a, c, g, or t
  misc_feature (242)..(242): n is a, c, g, or t
gggttcacccccaggccccgggggtgcaaccagcagcccccgccgttctccctcaggccccaggggtgcacccaccagccccagggatgcaccctcaggccccgggggtccacccccaaccttccggggtccatccgtcggctcctggggtccaccctcagcctccgggggttcacccctcaaattttggggtgcaccccccaattttcatgccncaaatgttgaggcccccatttccctcngaagggccagggaacatacctccccctcccccaaccaattgagaaggtgctccctcccccagcaagcccagggccaggtggttttgccttttccccctgaaagaagggtgcttttttgtactgccccccgctcattaaacagcctcccccagca

SEQ ID NO: 688307 - DNA, 148 bp, Homo sapiens
  misc_feature (55)..(55): n is a, c, g, or t
  misc_feature (84)..(84): n is a, c, g, or t
  misc_feature (91)..(91): n is a, c, g, or t
ctaattggttcttcgatgacgacctgtcattaagtgactctgtgtgtgtgtgtgncagtattgtaatatggagaggccatttcngcatggntaaatgtgtagacttaagaatcatacccaacacatgcgtcatcgaagaaccaattag

SEQ ID NO: 688308 - DNA, 85 bp, Homo sapiens
gaccgtaggatagagttccatacaagcgctaaatgaaacagcgcatcaattaaaaaataaacactccattctaggagaaagacag

SEQ ID NO: 688309 - DNA, 428 bp, Homo sapiens
  misc_feature (35)..(35): n is a, c, g, or t
  misc_feature (398)..(398): n is a, c, g, or t
gttggtcgatcactgtactatatgcctgtttcaantctacctgagcaattgtggtattttttaatctactctttttttttaagaggtgagggtcttgctatattgctcaggctgacatcaaactcctggactcaagcactctttctgcctcagcctcctcagtagctgggtattatggtatgtgtacatatatacttttagagacagggtctcgttctgttgtccaggctggactacagtggtataatcatggctcactgcagcctccaacacctgggctcaagcaatcctcccacctcagcctcctgagtagctagggactacaggcgtgtgccaccatgcctaatcttcttttttttttttttggaaagggagtctcgctctgtcacccaggcggnagtacagtgatcgaccaaggggtaccgagc

SEQ ID NO: 688310 - DNA, 231 bp, Homo sapiens
ctagaggatccccacccgggtcctttctccaagttctgtttaatctggatcacgggttctttttaaggcccgggcagtttttggggtcccggctccttgcccatagtaaaacagcttgaaatatcccaggcaagagagtagtttcaggtgggcaactctgctctctaatggagagggcgtgcacaatcaaaagtactatgcaatgtcaggacaataaagaacatacagttt

SEQ ID NO: 688311 - DNA, 390 bp, Homo sapiens
tttgatacagagttccgctcttgttgcctagcctggagtgcaatggcgccatctcggctcactgcaatctccgcctcccgggttcaggtgattctcctgtctcagcctcctgagtagctgagattacaggcacctgccaccatgcccagctaatttttgtgttttagtagagatggggtttcaccatgttaaggtgggaattctcaaagcatggtccctgtaccagcaacatcagcatcacctgggaacttgttagaaatgcagactttggctgggcacagtggatcacaaatcctgtaatcccagaactgagggaggctgaggtgggaggatcttctgagcctaggagttactggacaacatggcaagaccgtatctctaccccccccc

SEQ ID NO: 688312 - DNA, 204 bp, Homo sapiens
cccccccccccatttttggggggggggaaagggttttttccccccttgggcccccgttcccccgtttgttaaaatttttttataaaccccccccccccggggggttgggggggttttaatttaattttgtggcaaaagggcccccccccgggcccggccccccctaagggggggggcccctaaatggggggtttttttttttta

SEQ ID NO: 688313 - DNA, 193 bp, Homo sapiens
  misc_feature (185)..(185): n is a, c, g, or t
attctgtgggcatgaatggaaggaggcaggagagctagaaaaagggatagatctaatgttccctacggaacctggcttatgctggcccttcacatactgtgacatgtaatccttactactgttctctgaggaataaggctgtcccctcttccaggtaagaaaacaggctttgtgtgacttgcccnatatcctt

SEQ ID NO: 688314 - DNA, 890 bp, Homo sapiens
ggctaatggtttatgagaggggcggggagaagccgagcctcctcgacggactaagagaaaaattcccgcggagcgctcatttgggtgggccggagaacgccccatcagcacctttgcgcctctaaccctcctcagctgagctgcagttgggcgcggtgcccgtatatttccagccattggggcaggtgcttggacactgcatgtagggcagctcggttaggtgcattatctccgggtttctggcactttccagaccccattgatacattgatttatctcgagtgccagacgctcatttaggaggtctcggcgggatttccgatcgtcactgacgacgacgtcactcgcgaacgcttggccatgaggggtccaggatttccatagctactgatgccccatcccttcctggagggcagagatgacggacctagatggcgctatgcgggcagctggcgttccatgcgatcccgaccaacagcagccgttcatctgtgtggccacctggaccggcggcaatcacagagacccggctttcttaatccctgcctctggtcactaaccagacttgcgtgatcttcgagaaccaaccgctccatcctcctcgcgcaacgcctgggcacacctagttcccgaaggctttacgctgccacctgcataccatggtcccgcacgacccttgacaccccacggacgacacttcctaccgagtcccgctcgccatgcagccaggcaaaattctcggacgctgggcaatgggcaggggcgaacactcacccagcacgcccaccaatcctccacacatataccttggccactagcggcatgaccgcccgctgccaaagtgacacgcaacctcgcacagcggatgcaaccacgctggaaacgggacg

SEQ ID NO: 688315 - DNA, 467 bp, Homo sapiens
  misc_feature (15)..(15): n is a, c, g, or t
  misc_feature (125)..(125): n is a, c, g, or t
  misc_feature (136)..(137): n is a, c, g, or t
  misc_feature (154)..(154): n is a, c, g, or t
  misc_feature (217)..(222): n is a, c, g, or t
  misc_feature (238)..(238): n is a, c, g, or t
  misc_feature (269)..(271): n is a, c, g, or t
  misc_feature (273)..(273): n is a, c, g, or t
  misc_feature (284)..(285): n is a, c, g, or t
  misc_feature (297)..(297): n is a, c, g, or t
  misc_feature (304)..(306): n is a, c, g, or t
  misc_feature (309)..(309): n is a, c, g, or t
  misc_feature (323)..(323): n is a, c, g, or t
  misc_feature (346)..(346): n is a, c, g, or t
  misc_feature (354)..(354): n is a, c, g, or t
  misc_feature (396)..(396): n is a, c, g, or t
  misc_feature (400)..(400): n is a, c, g, or t
  misc_feature (402)..(402): n is a, c, g, or t
  misc_feature (434)..(434): n is a, c, g, or t
ggacatatatatttngttacagtaattcctgcatctcaaaaataatacaaaaagtgaaaataagtttagaccagccttaaccttagctcagtgtgctaatttatatataaatctatgtgcattcntttcaattttnncttacaaaatctaaagngatgctgttataatactaaaagattccactttaaacagcagcagtttcagaataattaaaaannnnnntcaggcatggggctgntaaagaccgaagttctcccttccccccttannntncgtcgctttcnnctattgcctccnttgccgnnnagnctgtcctgctggcntggccacaggccctttaggtggntacttttngtaaactcttcattcatcctggcattcttgagaatgttcgtnaaananaggggaagactcatcttcacgttcctttggtnctttaaattctaggtcttctccatattgaatgg

SEQ ID NO: 688316 - DNA, 158 bp, Homo sapiens
aagggggaatgataagcattgaaggacctccggaggaatattctaacaaggcaataccctgatccgctaccttcggcacttagtttctcgggtactattgcatatggttccaattatcaaaggggaatgataggcattgaagggacttcgggaaaatc

SEQ ID NO: 688317 - DNA, 808 bp, Homo sapiens
gatttcaggtttgttctctttccaaatgttgaatgaaaaacaaattttccaatccatttatccctggggaaggattcatttgttgcgagtgccagtatacttaaatgtatactttatatacatttaagcagaaatttaaaatgtggtctttgttctctttaaaagaaacacttctgtgtcagaaatgaaaataaactcatgtccttttactttcttaaatagaaagcacttcaaacactaacaataccacgaaacttctacaacaaaacgaaaaattattgactaagcccttgcctcttacttctctgggcacgaactaacaccatttgattatagggcttgagggctgcaacggactgcctttacacggtgcaccaatgaacgctagagtggcccatgcattgctgtgttctcttctaaaacaagctactaacaagagagagaacacatgcaaatttattaccagtaagcataagtcatatttaacattggaataactaagcattttatacaaagacttttcctcttgacccagcttgtgcacttgtgtacatcttcattctatctcagattcaacagcgtgctctgtcacataatactttgtaaatactagtgtgaaaaacagataggatgccttttccagtggtaggagcatctgtaagtgcattcaactcattacgaagctttttatccataaactagaaacccttatcaaacaacatagaacattttctttctacaagattattaatctcaccatacctaaacagaagtccttagaagtaatcattcaaccaaatgaattcca

SEQ ID NO: 688318 - DNA, 104 bp, Homo sapiens
ctagcggatcccttatgtaagatttgaacagcataatgaacaagcttgatttactgcacatagcagaatgctgcatcctataattaaagaatgcatattctttt

SEQ ID NO: 688319 - DNA, 512 bp, Homo sapiens
tcttttgttgggcctgtagggattttcagaaaacaggggtgtttttttgtaagacagggagcccagcttctggggccagccttgttgtaccgtctgggtcggaactatgcttttgttgtgcaccgaatgggctgagggatgcttaattcatgctaaataatgacagaagtaccccgtttgcccgagaaaatagccttcctcctgagggccataaccgaatatgtccacttgtttttaagacggacggaagctgaaggcatccctcctgctcactggtccttccactttagatgaacaggtggaactcacataacacaacctttttcgacaagatttcctttagagagagaacattctagggatgtgatcagtgggcatccgggctccaagcgaaaaaggcaacctgttacatagggcagttcccatttagccatgcaggcaagagacccattaaaaccttatgtgagggaagaggtcccagagaaaaggttcctctctgcgtccctgagaaa

SEQ ID NO: 688320 - DNA, 831 bp, Homo sapiens
  misc_feature (42)..(42): n is a, c, g, or t
  misc_feature (65)..(66): n is a, c, g, or t
  misc_feature (68)..(70): n is a, c, g, or t
  misc_feature (91)..(91): n is a, c, g, or t
  misc_feature (95)..(95): n is a, c, g, or t
  misc_feature (97)..(97): n is a, c, g, or t
  misc_feature (100)..(100): n is a, c, g, or t
  misc_feature (105)..(105): n is a, c, g, or t
  misc_feature (112)..(112): n is a, c, g, or t
  misc_feature (117)..(117): n is a, c, g, or t
  misc_feature (128)..(128): n is a, c, g, or t
  misc_feature (140)..(140): n is a, c, g, or t
  misc_feature (146)..(147): n is a, c, g, or t
  misc_feature (164)..(164): n is a, c, g, or t
  misc_feature (169)..(169): n is a, c, g, or t
  misc_feature (177)..(177): n is a, c, g, or t
  misc_feature (184)..(184): n is a, c, g, or t
  misc_feature (200)..(200): n is a, c, g, or t
  misc_feature (202)..(203): n is a, c, g, or t
  misc_feature (218)..(218): n is a, c, g, or t
  misc_feature (252)..(252): n is a, c, g, or t
  misc_feature (258)..(258): n is a, c, g, or t
  misc_feature (326)..(326): n is a, c, g, or t
  misc_feature (339)..(339): n is a, c, g, or t
  misc_feature (422)..(422): n is a, c, g, or t
  misc_feature (424)..(424): n is a, c, g, or t
  misc_feature (444)..(444): n is a, c, g, or t
  misc_feature (452)..(452): n is a, c, g, or t
  misc_feature (459)..(459): n is a, c, g, or t
  misc_feature (461)..(461): n is a, c, g, or t
  misc_feature (471)..(471): n is a, c, g, or t
  misc_feature (484)..(484): n is a, c, g, or t
  misc_feature (487)..(487): n is a, c, g, or t
  misc_feature (496)..(496): n is a, c, g, or t
  misc_feature (498)..(498): n is a, c, g, or t
  misc_feature (507)..(507): n is a, c, g, or t
  misc_feature (534)..(534): n is a, c, g, or t
  misc_feature (540)..(540): n is a, c, g, or t
  misc_feature (574)..(574): n is a, c, g, or t
  misc_feature (587)..(587): n is a, c, g, or t
  misc_feature (590)..(590): n is a, c, g, or t
  misc_feature (594)..(594): n is a, c, g, or t
  misc_feature (608)..(608): n is a, c, g, or t
  misc_feature (610)..(610): n is a, c, g, or t
  misc_feature (623)..(624): n is a, c, g, or t
  misc_feature (634)..(634): n is a, c, g, or t
  misc_feature (666)..(666): n is a, c, g, or t
  misc_feature (795)..(795): n is a, c, g, or t
  misc_feature (809)..(809): n is a, c, g, or t
  misc_feature (828)..(828): n is a, c, g, or t
tattcgttcatggtaactgcatgacaaaacatttcaggaggnatttacaatttccagcttaaagnncnnncccaccaacataaccaatttntgananccncttcnctacccngcttncccccccttcncggccctgccgnccaggnncaaagctacaacttggnctgtncctttggnggctggngttgggggtccatctntnntcaggtgcctgatancagcctgggcaacatagagaatccgtctcaacanaaaatnttttttagccaggtgtgctgtgagctgtagtcccagctacaaggtgggaggattgcttaggcctgggngattgaggatgcnatgagctgtgattgtgccaccacactccagcctgggcaatacagcaagactgtctcaaaaaaaaaaaaaaaaacccaaaaaancncaagaatgtaatgaatgatncccaatgngcctttncnggaaaaagtngccaaatatatcnctngggtctgcngngcatgtccnctgatacataaggcaagcatgtttctncccccngtgttgatgccagttagttttcagaatccaaacngggggcggccacnggncctngggactgacatccncngggaatataaccnnctcttgggcngagatgctgctgccagctctaaaacagcactntgttctcaaaacctcatggcaggctcctggctccaatactcagctgccaaacatgatgctgattcttcacgaatttgcaacccagttctctcgggtttgcacacccccactgtgggccggggaacgggncccggccttcgcanactccaggctctggcagangtg

SEQ ID NO: 688321 - DNA, 115 bp, Homo sapiens
tcaagatgaagaccatttgcttttctcgggagtctggcggtttttattaaggctgttcatgtgaaaggccaaggaggatgaaaggggttgttcttgttgacaacaaatgtaaggt

SEQ ID NO: 688322 - DNA, 126 bp, Homo sapiens
atcttagtgtttggatgaaaacctttgtgttgtttagctttcatttgctttgtatatttaataatggacctttattttccagtaagccaacattttgtattgcacaataaatttattttaaaatga

SEQ ID NO: 688323 - DNA, 873 bp, Homo sapiens
  misc_feature (70)..(70): n is a, c, g, or t
  misc_feature (873)..(873): n is a, c, g, or t
acacgccgtgtcagtactaacgctgtccaatggacatcgatggttttgcaggcccacctcataatcacancgacagcctttggatactaatgaaacaccgtattttatgaagagcatagactgcatccgagccttacgggaagaagccattaagttatcagaagagcagcgctttatcaccttcctgaaagcccttgaagagaaagtggaaattaactattacatcattggtgggaaaccgtggaccaggatggaattactctgatcaccataaagggagccgttggaacgcctgtcctaccctgaagaggccactaagtccctggcccccacgcacgcacacgtggcaaccggcgggtggattcaaacaaagcggtgagcgccacgacttattgcccagatgacccgcgcaccgtagcgccatataagaaatataccaagtgtaggtgcctgctcgccttaccaagccacgaagatctcgcatcgcatagcagtaccgaccatcatacaatcaccaggggataaggtaatttaagaactacgcccagtatagaggaccaaaaaccggccacgatataacatggcctccccccagaacgtaaatcgcctggttaacagtagcggcggtgactagtggagtcagctcacagaagtcggccccgccgactatagcatagataacattacaccagcgtccgttccgaatcacaatggagtaaatgcaggattacacgggcgaagttgctttctcaagtcactatcagagaaaccactcacgcgcactcgatggcctcagaagaggcatagaaatatgactactgtaccgcagcactacttgccacaacgatatttgcgtaacacgacttccaagan

SEQ ID NO: 688324 - DNA, 439 bp, Homo sapiens
  misc_feature (173)..(173): n is a, c, g, or t
ctgtccgattgccatgcctgcccaatccaactgaaggtgttttagagacttgagaaaaactagtttatagactactctagacattaaccttagtttttcctttgtttccatagacatacctcttactaacagacatcttacttacaagcatattacttacaaacatctgttgncctgtatcatatgtagagacttggctttgagatcccatctgcaatgccacctcctggaatggggcacaagtgtttaactgaaccgacttataagagactgattcaagaaggtatcagctgcttggtctaatgtatgctttttccccttcccctttgccagtctcttatctcacaacctctgacccaaacctcttcatagctaccaaccccattttaatatgtgaaactttctaaacacgaagtttcaaatggggggactaaaaaaa

SEQ ID NO: 688325 - DNA, 364 bp, Homo sapiens
tgtatcggcgtgtgagtgtataccagaagtgggagttaccggcccctcgatatgtaacaggaagacgggtgtaacggcagcatgtcattgctctcttatcggtcaggtcgagcgccatgacattctcattcccttaaaaaaacactcattcaaatctaggtcgaacttccacctttcatcatcaaaattatcacacaacatttattttgttttattcacgaatgcaaaagaaggccaataagtatatcttaaaatattatcagcagtccgtttggtgtggttttacatttttctgtctgcccataataaagaaatcttgcattgatttcatttgccccccttgtcatagcgacacggtctctca

SEQ ID NO: 688326 - DNA, 111 bp, Homo sapiens
cgaatccgcgtgctgcttctctttcttagccagctgttccttcacttgcttcacggtatgccgaagtacctccagctctcttatctgggctgcctccagagcacgaagata

SEQ ID NO: 688327 - DNA, 423 bp, Homo sapiens
aagctggagatcaagtatctgtaatcccaatgactcctgacccgaaaatgttaggctgagacaggagaatacttagtagtgcttgggccagctaacctggcttagatagcagcaaagagacctgtcttaaacaaggtaaaaccagattacaacgcaggagccatagctccacatgcttaccatgacatggatgtgcacttctctctcttgtgctctgtgtctctgtttctctctctcagcctctctctccctgtctctctctgtgtgtctctctgtgtctctctctgtgtctctctctgtgtctctctctgtgtctctctgtctctctctctgtctctctctctgtctctctctctgtctctctctctctctctctctctctctcacacagacacacacagagacacacacacaggtcgacgc

SEQ ID NO: 688328 - DNA, 136 bp, Homo sapiens
catacttgagctggtaccctcgataaggccaatatgagcaaccatgtccatctggtattcatgttttcaccaattaaggaactggtagtttgtgtgaagttacgcaaggtatgtgcttgattgtgttctgcagtcc

SEQ ID NO: 688329 - DNA, 131 bp, Homo sapiens
ttagttctactgtgggacaaaagcacagtcagtcacttgtggagacataaaaaaaaaggtcgcgattcaagggttgcggggtagtgtctttaaggcttgaggggttccggagctcgaatttggtattctgg

SEQ ID NO: 688330 - DNA, 423 bp, Homo sapiens
gtgtgtgtgtgtgtgttgctataaatgtccagcccagtgggaatacaaagagaaagcatatgagaattactgggtcactgcctactggagttgtgagaagagggccacagtcctccagaccccagaatggtagatccaccgacagcttgcactgtattcctggaaaagcctcagacgttcaacgccagcctgtgaaagcagccaggagtggggctgtaccctgcaaagccacagaggcagagcctcccaaggccatgggagcccacctcttgcctcagcgtgacctaaatcacttctcctttctgccgttatgtgaagaaggttatgtttgcttccccttctgccatgattgtaagtttcctgaggccttcccacccacgcagaactgtgagtcaattaaacctctttcctttataaattaaa

SEQ ID NO: 688331 - DNA, 244 bp, Homo sapiens
gcacgaggctgcttgtggaagtaataccaaaattgcaggaaggtatcgcacaaagatggatttgctaaaggaccaatctcatttgaagcaccatctgacacctgaccctcattaagaagagaaccattctccaaaagtcattggaacctgaagtttgagaaacagagaactacttagaaaaagaaatgctgaagtgcttgaaaaggaaacatcacaatggctattgggagaacataaataacgc

SEQ ID NO: 688332 - DNA, 1073 bp, Homo sapiens
ggggaagtggagtgctcccccaccagacagcctggagagtgctctgcagtgcacaagcatcagctgggaacgcagccacgagctggccagacatgtgaagtgagacgtgtggctgtgtgccccgagaccggagtgaagcggagtgtcccggtccccaagctcgcgagcacatgggcactgggagcacagtgcgtgcctcggtccctgtgagaagtggccgcagacccggtcccattccccagagaggaagggggctgtgagggaggctctaccccagcaccccttgcacagggggagccagtggcgggcaagacctcccacaccaggttgccagaccatatgggcggaagcacatgtctcgccggaggtggctacggccgacaaggcccccctgacaggcatcccccatgatcctggacggatggccagctgagtgtgagccggacgacctggacctggatcatggcgactccgtgagaggccggacaccgtcttcagactgatccctcacaccgacgccgtccacatccagctcgatgacatcgagctcgcacaccttctcccgcaaagccacagactcttccccagagcgagacttcccactgaagcctgcgtagcccccagcaactggacgtgaccgccatccacaccgcacgtagtcatcgatgcacgatgaaagacccttcgacaggccgcacccctccaagagggcacccaggacccacattgctcaggcggagcgcctgccaggtgacgaccaaatcaccgatctgcgctgtggaacgaagcgccctctccactgtcaggcaagggagaccgaccgcgcgtgagaacggtgccacgcaagcccccgcagcgcgcaccagagctcgccagcggccacagaaagctcgatagtggaaccgtcccccccggcggacgcgcggcggtcgagcgaggcgagacaacgccacggagcggccccgggtggccgagcgcgaagagcacctacaacacagaccacgcagccactcggccgcggggcgggacccccccagcgacgtcgggcccctctccacgcaccgctccccccc

SEQ ID NO: 688333 - DNA, 378 bp, Homo sapiens
gagctggccccgtctataatgtgtgccattttactgttttcctaaaagcacatattgacaggctacttcttttgaataattcagtattttaaaaatgcaagccaggcacagtggctcacgcctgtaatccagcactatggaaggccgaggtggggggatcacgaggtcaggagttcaagaccagcctggccaacatggtgaaacctcatctctactaaaaatacaaacattagctggccacggtggcgcgtgcccgtagtcccagccactcgggaggctaaggcaggagaattgcttgaacctgggaggcgaaggttgcagtgagccaagatcacgccaccgcactccagcctggcaacagaggggaagactctgcct

SEQ ID NO: 688334 - DNA, 637 bp, Homo sapiens
cgttgatgtacactgggggttgacccccgcaatttgttgtaaggtggtgggggaaacacttctcttgctcagtttcccaaaataaataggtgcttcaaattaccacccctgttatgtccgcgagtgactggcagcggggatcaaatattaaggttggtatgttttagcaccggggttgtcctggataattaatcttcttctccgcctctgttagtcgctcgcccctacgcaaaatgttcgatgtgagatggtaggcaccatgtgcccctcatgtatgcaccagcgggcggtgttctacccctcggtgtgtaaataaaaggtctccagtgctacttcttgtgcgaaacaatgtggcgcagtcgccagcagttcttgttgccgagcaggaacgtacactcacgggggagccccgttgatagaagttcccccaaagaattgtatttcggtgcgcaaggcattcttgcgacaaaggagttgttgtatttttgcgagaacaaatttcccagtgtgcgtgaccttcaaccaatagaatgtgtaaacaggcttgtcacattccctcacactatgtgcgccgcgcccttatccccaggttatacccccgacacccccccttacccctgcccaagttatcaaaaca

SEQ ID NO: 688335 - DNA, 338 bp, Homo sapiens
cgccaggttttccccagtgccgaaagagaccatttctgaacctgggaaggccgctatgaggggaggctggttatggagtgctggactgcaagacatttcaggcctacaaaggctgccagtagctgtgtaggagccgattcaaaagaggctctttggaggcagtagctggtcctgtagacacagctgctagagaggactgtgacttggagaagaggccgggagtcagcaactgcgttggtgtaggccgacttgaggaatttcctcggcctggagagtccaccaaaagggaaaagctgcgcctaaggtgtcctgtgggagaaatgagctgggcctttagc

SEQ ID NO: 688336 - DNA, 192 bp, Homo sapiens
ggcgaataaaaaacctcttccttctttaatccggtgtccgaggagtttgtgtgcgactcgtcctgctacatttcttggttacaaaaacctcttccttctttaatccggtgtctgaggagtttgtttgcgactcgtcttgctacatttcttggttccgtgaccgggaagcgaggtgattgaaggacggtcgag

SEQ ID NO: 688337 - DNA, 990 bp, Homo sapiens
taacctaggttggcaaatgcaggtttatacaggtctattagtgtcttgggcatcagacactcagaaagtcataggtatcaccttactccttttggctttctggacggggctagaatgttgagtatgttacgctcatcctatatcttgccgtagcatgtgaattctggcattagctctgatatggagaccctatgtgcttccttgctcaagtgccaaacgtgatgattcgtacttcgctgtagtatgtagtgggttaaacgacggagcctaggttacaactagtgccttattgttgttgcctagtgagagccgtccgaactcccgtaatgcctacttgggtacatgtgtggctctagagtattgccaagcaagctctcgtagtcggcctcttaaggtcaactattagacctagaacatcgctagtacctttgatctctactaacctctgggggcattggataacggtaatgtgtagtttatgggatatcacatccctgcccggttagtggttgcttccagtagaaatctttgctctggaaatgaaggcacgtcattgcttacgcactggtgacagcttgagttcagtggctttattcttctgctagccagtctctgtcccctgggccatgccatgtcgataggtttttggataggagtctaaaacttgatcgccagtagggcaagtgtcatgtggaaagttattcagagtataggctctcgccggtccagaggccctgaggattacttggcatgtcatgaaggcttttcgtgttagacatacagaaattgtagaccagttatgctttggccagaaggatgaatatcttaggatagttagctgataagggaggggtggagaatgggtgtggcagtgtatggtgtgtgatttttattttcttctttggtcatgggggcacaaggagcaaggcatgagtcttccctgtcaggctctaacagccaccggcacctgtgtccactgtctggaagaca

SEQ ID NO: 688338 - DNA, 113 bp, Homo sapiens
attcagtcatgcttcagtctattcaactgtgaactgttgaacacgtcttccaatagatgaaggcacacactacattacagagctacattagaacttgaaacacgtattaccaa

SEQ ID NO: 688339 - DNA, 204 bp, Homo sapiens
  misc_feature (191)..(191): n is a, c, g, or t
gcgggcgcctactactactaaattcgcgggcgcgtcgacaaatgaacgtgtgtctaataatttatatgagttctcatattttaaagatctgcaaatgtctgttgtagaaattgcttcatgtggtttcttttttactctgaagtactcctttttttagtcgtgggaaggtcgacgcggccgcgaatttagtngttgttgtcgacc

SEQ ID NO: 688340 - DNA, 287 bp, Homo sapiens
agaggatccctggggtctttcctgacaggtcacacgtatatcccttggtgtcctttagagggctgggaagctgtgggagatgacacacaccaagctctcagccatccggatgtgcaggaggagggatggggaatgacggtagaggcaggagggaaataagggggtgaggggagaagaacaactgtggctccagaaggaggaggcggcgtgaatcagcaagtggttaagtggtggggaggtggcaagggggaagcagtttctcatcttcgctgatttccaaagggatg

SEQ ID NO: 688341 - DNA, 541 bp, Homo sapiens
  misc_feature (521)..(521): n is a, c, g, or t
gttagtgtggtggtgtgacttgccgtcctagctactctggagtgctagcatgaattgcttgaacccagagggcagaggttgcagtgagctgagattgtgccactgcactccagcttgagcgacagagtaagactccatctcaaaaaaaaaaaaaaagaagagagatgaaggaggaggaggaaaagaaagaggtgggggaggggaaggaagagaaagaagaagaaggggacaaaaaaatttagctgtcatctgggctctgatagcataatactgatgatgaagacaatggctaggtgggtgagagagggctatatacacaccagaaactctccaggttatttggcaggtccaatatattgggttaagttatgtctcatgggagcaccttctttcccggtaactataaccagggctctgcaagctcagtcaacaacaacatggcatgttggctccataccgggactctgggtccattgggtaatgaaaccatcccaccagtgtcttcataatatatttttacncacacggggttaagtaagcg

SEQ ID NO: 688342 - DNA, 292 bp, Homo sapiens
gcaaagagacacacacaccatagacacgagcgatctgcccaccatatggacctcccaaaatgctgggattacaggcataagccaccgagcccggcactctgcataatatatatactacagggcagatataacttcccataattatatttttaccatattatatatataacctaggtacactaaaatatactctgggtgtagacacaaatacacggccctataagcaccaccacaatacaagacagcgaacaataccatcaccctcaaaatgcactatgcccccctttggccg

SEQ ID NO: 688343 - DNA, 1516 bp, Homo sapiens
  misc_feature (643)..(643): n is a, c, g, or t
  misc_feature (670)..(670): n is a, c, g, or t
  misc_feature (1516)..(1516): n is a, c, g, or t
tgagagctagaattagtggcaagggcaaaaagggctgactagaggagaaaactcatcccgggtacatctggcataggcgatttcggtcagtcgacgagtgggagctgacgcccgtatagataggtggaacttaactctgtgcgcagaccagggtccaaagcggaagtgttgcttgtgataaggcgatctcgagatcatgggaaacggaagtgggacatatcccaagaggaatagggttgggatgcgagggagggaagaagaaggtgtcatggcgagtaacagccttggcacaaggtcgtacttggagtgctgggagcgatggttggcatcgtgcaagaagaatccgtagatctcattggagtgtatgtaaccaggaagagacatggtggtatctattgaaatactgctagttgtatagtggccgtattggtcatgcaagacgcgtgcatattgtagaatgagcgtttatatagcgacgcgaatcaatatcgatggaatgatttgtgacgcgatgtgcatgatacctaagtagaacgtttgctggagaatgtatgcaaaggagtattcttaaatcttatgcgttgcaatattgcacataagtcgcgagtgacctaagtgtgtcggccagtaatcactgtaagcncattagtgagagggaaaggctcagtcnattagaagagactgactatctaaatggctgtcttttcgtggacgcctctgtgttgcgggacgcaggttcaactccgaggcaaacgaacctaggactcgttgcgagcacacatagtccattctcgatcacacatttcggtgtgaatagcaatctgaacctggaatttagcactggggaataacttccttaggagcagccacgaggagtggctgggggagccccaggttctaaaatggcggctaacgaaaaccatgagatgacgaacacatcgggcgacctcttccctcgggtaatacccccaaaatactttaggagagacagggtacgcacaaccgggaccctgcgtcgacaattcagcgcgtcacacgcgccaacaaacgcgacgccccggcaagacaagcggcaccacagacggcccagcacagctactcccaaaagagggcaacagccccaacaccaacccaccagagtcgggggccaccagaaggaggggcggaccactacccggcacacacccggcgtaacaccaagaagcacgaccagctggcgaccaaaccagaacaccccagggagaacaaaatctacgagcaggaacagaggcatcggacggcggagaaacacccgcagacaagcagagaaccgtatacgacacacaaggaggcggatcaaagggacgaacgaacaagcaggagcaacagagaccgagcgcacaccaagaccagcagcaagaagaaataaaagcacagcaaagacgacacaggaagacagcgagaaggacgaaaacgacagcaaaggggacggacggaagagctgagtttaatacgtaaacgcacgcgaaggagcacn

SEQ ID NO: 688344 - DNA, 422 bp, Homo sapiens
tttacggcatcaccgaccattaagggtgataacgcagaatggtcagctgctatctgtaattcactaggttgccgaatcacatcagtctagagcgctcgtaagatgctagtactcgcacaactggcaatatagtcgaaatagctgaaggtagcaactcatacaagatgctatgacatttatggcatacgcgaacggtaagcgagtgtccaccactggatgcatgcataaacactgacatctagtatatgcccaggcgttgggtccatgaaagactgagccagtactgagatatgggtaatcatagacatggctgaacgtgcgctgtcacagaatcatcacgcgttcgcaagtccttgcgatggttcatgacgtcgttgtacttcagcactaagtataggcgctcgtacagccgcatgtggtag

SEQ ID NO: 688345 - DNA, 305 bp, Homo sapiens
ggactagaggatcccagcggggaacaaagtgagagtcgctcagacagaagaaagaaaaaaaaaaacaggggggtactttttttagttataagtcatagatgtggaaagggataccggaaggtattttataattggtttatgtccatgtagaaggggatggtcccccagtcactggaacaatcactggaacaatcactggaccaatcactggaacaatcacttgaacaatcactggaacaatcactggaacaatcactggaacaatcactggaacaatcactggaactaggggatggtccccggcg

SEQ ID NO: 688346 - DNA, 1307 bp, Homo sapiens
ataacaccgaaattggtcgggattgacggccgggtgacagcgtggggggccctgagtggtgcctcgtgcgttgtgcccatgaggaatgtgggaacacagcggatgagcttcgcagcgagaggttatcgggcagtgggtcatccggcgagcctggagttcgtagtgccgtagcgacagagtgtggctgcgggccgaagcgccgtggaagcttcgacggaagcgacaaggtccgcaggagtactggaggatggaatagcccagtttactcacagttggcgccagcattggtacaccggagcattgactgaactcaatgatgcccgtggaaggacgagtctacctgctctatgtcaccgtgggcccagtgtaacggagcatcaggagattcagttgcagtgtttcctctacctggggcgggcccttcgtcgtgcaagggaattgaagggtgtaatcgagaggattgatgccgggttgcgagaaagcacgaatccggtgccgtgccagcgccacctaggattcaaccggcgaattttggtgagcgtatcgaggagactacagagtaggactcgacgtacggtcatgggatgtaaacttgctcgcaacggcagtgtaggggcacacggcaatccggtcgagggcgcatacagtaccatagggcacagaggcattctccaatactgatcgccactgtgcgcaggagagcatattgaggcggggaagcgaagagtcgagcagaggccccaagcgactagttcgcctatgcagatggtcgacgggggtcccgcgtgcggggacttcctgttgcttgtgtaactgggccctcgagttcctcggtgcagctccaaggggggcagcgtggactactctgtgctacccgcgaccctggtagccctataggaaaaggctagattccattgacttggcggttgagttattccggagttggagcgcttggggtacagagccttcaaagtgcccggaggggggttatgaaattgagcctaacacctgtgggccagagactttcggcccgacggaggccgaccccttttgggatgtggccagttatgctaaagaagacttaaaagggtaacagtaaacgcccgcgacaacttcttgtgtaggggagacacttgtgatttccaccagcaggattggtcccatacaaaggagggaggttcatgtgggatgacaccgtgtgtacgagaacgaccagccagagattttccggttgcacagggagacatacgagggccagccaggtggtacaacatcaggcgggtgtgttctacaagacagcaagcatg

SEQ ID NO: 688347 - DNA, 384 bp, Homo sapiens
  misc_feature (1)..(1): n is a, c, g, or t
natcgccttcgcgttgaaattattcccagagcccacagtctcccaatgtgtgtagttagcagccccacagcacttaaaatctgcttgcatcctgtccaggttcgaaccagtgtggttgtttttcgggtaattctccttctgctaccgaaagtggttattaacttgtgacttcactttatctctaaacacatagccacgcaatgtctgcggccacctccaccacctattataagagacagaatatatggcaaactgtgtctcataagcacatatagtttcctccctgtgcgagcgcccacgacacacgagccacacaatgagccccacgagataatgagaaagcacacactcgtgcatattatgccctgcgtgccatattcctac

SEQ ID NO: 688348 - DNA, 425 bp, Homo sapiens
atgtgtgaagagaaaaaattctctaaagcaggtgagctttaatgaacaaatgtgtattttatctgagtttgagtagggtgcgttgtggattttgtctcttgggttttttttttttctttgtaattatatgaagaaagtccagttctcatacatattgatcacttacaaaccttactctctcttgaaaaggtacacatgtccactttaggaacataactcaagtaggggctgcccccccaacaagaatgtttctccgcccgttcattccttatttcggacctggcactcggcttctgtttttcaatagtgacaagcacggttcagttctaggaatgttctggcagatgctgttaattttactttaaaatgagaatctggtgttactgtatttcatcgttttcaataaaacttcttaagtgttttgg

SEQ ID NO: 688349 - DNA, 140 bp, Homo sapiens
ccggtaccgaccaggatgtttaaaaaactagaaatgtgtcagaaattaaggtcacagaaggagatgatagtgaaatgtttcgagggtgaaggaggacattcagcattccagagaatcctgggtaaagtaagagaggaaag

SEQ ID NO: 688350 - DNA, 114 bp, Homo sapiens
cggccgatcaggatttattaagcaggtgcttctgggcagaaactggtaaaaaagtagggataactatagcatttcaagtgaagtcgtaggataagccgggtactgctgatagct

SEQ ID NO: 688351 - DNA, 186 bp, Homo sapiens
atgatacgacatcgagctggtacccccgctggcgcactgcaccgcctgcggcgctccacggtcctgctgtccatatgccaccgttgcacctccaccactctggtcttgatttgccagcgggacttgctgaagccaacatggtcaccccaggccatgttgacttcagaagttttctcatgaggagat

SEQ ID NO: 688352 - DNA, 244 bp, Homo sapiens
tccgcgtgcagttctacacaatcaatgggaatcttgatagcacagatgaccagaaatgcgtacaacctatttatgacaggggctgcagatagaaatcaagcacatccttgctaatttcaaaaactaccagtactttataggtgaaaagatgaatccagctggcatggttgctctattggactaccgtgaggatggagtgaccccagtatatgattttcttataaggatggtgtaggaaatagaa

SEQ ID NO: 688353 - DNA, 829 bp, Homo sapiens
tcaccccgttcccaggaattggaggagccccccatcccagaagtggggttgtttttttgttgttccgccttttttgtcggccccaaacacagcctcaaactcaaccctctctatgccatatcgctgtcttctcccccggtggcggcttggggggaccacaaagagcttgggggtcaccaaaagaagtgtaatagggggaaaaacctacgggcttttaatacctcggcccaaagaagctcggaagagaccccccacacacccacccatatggggcgcacacaacacacgcgcttatattcttggagagacaccccgcgtgaaactcggttcttttctttccacagagatgggagtctccctccctcggtggggctcttctgggaaggcaccatagggattggccacggcccactcgtttaatgggaagtttctcccaacgaaaaggcacaaacacccctcttaacaccgcgctaagaatggtggggacaatttatcaacagccctgtgcgttccagccctaaccgctactggctgtgtgctgcccaccaggcccccagccatccaagaatactgggatatttagaagggcaaagaatcccattgttagaatgaactgaagccaagaaagattataccagtacccagccagcaaggccagaacccacccccagtgcaacttcctggcctggtttgtctgatggcccggacgtctgtttgctggctacacaggacaaacactggtgcgagatgtggccggtgacccaatggccaccacacctagaaagttttatggccagaagcctttaccaaattaaaaaaaaactggcca

SEQ ID NO: 688354 - DNA, 99 bp, Homo sapiens
ggatttgctggtgcagtacaactaggcttaaatagggacatgccaccacctgaactccacgcctgggtgataagagcgaaactccaactcaaaaaaaaa

SEQ ID NO: 688355 - DNA, 403 bp, Homo sapiens
ggcccagagaccgagaggccggtacctgacaagtcacaacaaacccagacctcctcgcctgttcatgtctcagaccgcaaacctaccatgcatactgtctgctggcgataattacccgagctctgatgctccccgctgctcctggattatcgggccataagtcatggaacaactgaaagaacatggctcgatacagagagtatacgtgtaacgggcaccaaagctgatgtcgctttaactcacagttatgctgcctgatgccgatgaacacacagacattctccgatgttcaaggaaagttcacgtgccattgatgatagatttggaaagcgatgatcatcgaaggctttgccaacagtgattgtgatgtactctgacgtactgcagagatacgcgtctgtgt

SEQ ID NO: 688356 - DNA, 730 bp, Homo sapiens
cacagtttctccctccagcttatccggctctcatggctggcaaagcgtgacaccagtgccacaggtaaactgcaatcctgcctgcctctcttcccaataatgtggggagagcacggttttgctatggaagatagtcggctttgacctgaggctgacttgagagtcccagctgtcatgtctcttccaaataagctgctgaacttggaattatcttggctgaataattaatcaggactgtaaatgaacctcaaactgcctgggctttgcttaaatcctacacaggcactagcgatcaccttacgatcgaagacagattctgacgaatctgcctctcatccataggtggccactaggcaactcctctgggaccatttcttcctgctctatgctcccatgaccttcagtcataactccctcttcccctgcgtggaaacctacttctttgtaaccgtcctcataaggtaaaataggacccaggctggtgaacaaatagaatacatttgctctattctaaagagaagcattagagaagggatggtaaaactgatgcagagacataatcgagcttctgggctacatcatgaaatacttgagcagtcagcagacatgtaagaagagaattctactccccaccacacactataaccatctgcaaacctgaatgccgagacttagcctcaccagacgccagcagcataaatgagaggagtatatcaccctgggaggctca

SEQ ID NO: 688357 - DNA, 439 bp, Homo sapiens
  misc_feature (265)..(265): n is a, c, g, or t
gtcgacgcccgccgcgtcgctcgcgttgcacgacgacgcacacgcgtcgcagcattcccgcatacaacgctacctgcaactgctgctgctcgtgatcgccgcgggcgcgatctacccgatgctgtatctgcggcaggtgtaccagccgacgatgctgcaattcttccggatcgacgacgtgcagctcggctacctgtactcgtcgctcggcacgatctttctcgtcagctatctgccgagcggctggctcgccgaccgcctgtcnccgcgctggctgatctgcttctcgctgctcgcgacgggtgcgctcgggctcgtctacgcaaccgggccgtccttcaatacgctcgtgctgatcttcggcgcctgggggctgaccaccggcctcacgttctgggcggccgtgatcaagcgcgtgaacatgatcgccggccccgac

SEQ ID NO: 688358 - DNA, 202 bp, Homo sapiens
ccccccccccccccccccggggggggggggtttggggcatttttttggggggccccccccccccccccctttccccccccttttggagagaggggggccccaaaccccccccccggggggggggtttttttttccccccctttttttgggggggggggggttgggggccaaaaaaaggggggggttttttttgggggggtta

SEQ ID NO: 688359 - DNA, 207 bp, Homo sapiens
  misc_feature (134)..(134): n is a, c, g, or t
caaggatttgcgacacctcaagctcgaaggtacgccgcagatacgccggaggccacatcatcctcgacgtggactcaacaaggacagccgggggagaccacgcctgcgggatcgcgaatcacaccaagcacgtnaagacccaggtactgctcgagaacggcggcacggtggtaatcgggggcatcttcgagcgggtcgaccgggatg

SEQ ID NO: 688360 - DNA, 164 bp, Homo sapiens
ttgatctagaggctcccctcggaagaggggaagcacgggtcttaaaatcaacgacggggggtggccacgcagggggaggactccagtaaggggaaactatagggccggaataataaagaacagtattttacaattatatacaccaggtccttacctcgtgcgga

SEQ ID NO: 688361 - DNA, 628 bp, Homo sapiens
  misc_feature (203)..(203): n is a, c, g, or t
  misc_feature (286)..(286): n is a, c, g, or t
  misc_feature (315)..(315): n is a, c, g, or t
  misc_feature (359)..(359): n is a, c, g, or t
  misc_feature (384)..(384): n is a, c, g, or t
cggtcaaggggccaaggcttacttgaagaagaagtcccttggatcttttgggaaaaacttgaaatccggcaaaaatttcgtggccgggcaagatcttccctcgggggggtcacaagccacgaggcgcaggaagaaagaagaacttgagggcttggctacgacttctacccaggaaaaatgatgtgcacggacttggggccgcnaaggtcaagaagcttgagttacgggaaaatgttcttcacaatggaatggcacttaccagtcttgggtgtggttgcaagtgccnccgcaggacacagccccctactcctgcancgtgcagcacacaagcctggccagccccctcgtggtgccctggnaggccagctaggaagcaagggttgnaggcaatgtgggatctcagacccagtagctgcccttcctgcctgatgtgggagctgaaccacagaaatcacagtcaatggatccacaaggcctgaggagcagtgtggggggacagacaggaggtggatttggagaccgaagactgggatgcctgtcttgagtagacttggacccaaaaaatcatctcaccttgagcccacccccaccccattgtctaatctgtagaagctaataaataatcatc

SEQ ID NO: 688362 - DNA, 222 bp, Homo sapiens
gtaattctgatttcgaacagaggagggtggtgcttctgcatggaggtggcagaggaccttgattgattgccgtcacggggctcagtggcagcgtgcccgtctacgcattcacagccctggatgccctggctgatgggggtgtgaagattgggacttccaatggccgccatggcatgtcctggcctcggtggcccatggcccatcctggttggcttgccaatg

SEQ ID NO: 688363 - DNA, 115 bp, Homo sapiens
  misc_feature (107)..(107): n is a, c, g, or t
ggcttttgcaaggctgtggtcggtggtcatcagtgctcttgacccaggtccagcgagccttttccctggtgttgcagctgttgcctcaccgccgccgttgtcgccgncgccgcct

SEQ ID NO: 688364 - DNA, 468 bp, Homo sapiens
ggtgaaaccccatttccactaaaaatacaaaaaattagctgggcgtggtggcgagcgcctgtagtcccagctactcgggaggctgaggcaggagaatggcatgaacctggaaggcggagtttgcagtgagctgagatgggcgccactgcactccagcctgggcgacggagcgagactctgtctcaaaacaaaaaaaaacaaaagacccaaatctggagtcttaatcggtgtgtactggatagaagggtcagatatccccactatggagttgagtggcgagaaagaggatctcaccttaaggagaaaataaactttccccttttaaagaaggaacccaaacgtgggtcctgtgggtacggcaaggggttgttacaaggcactctgtggtgacaagttatggacgctctgaaaagacctgaaggggccaggacagtttggcatggggcttgagttataccagtctagacc

SEQ ID NO: 688365 - DNA, 150 bp, Homo sapiens
cattactgtatctgtactgatcgtactcggccagaggtagggattgcgtttcaaacatctcccctaagagcaattgccttagagcccatggctgtggtcataatatacttcgagagtagaactcctgatgccatagttctgctatctacc

SEQ ID NO: 688366 - DNA, 906 bp, Homo sapiens
ctctagcaggacctgacacatagaatgctagaatagaataattattggatcctctaaagatgtctctgggggttttatatgttccggtatataattgatggcttataggtttatcattatcccaccacttccggtatttttattattgttcaggagtttaagactagaaagactagagtgctttctagtcccaatagaggtccgtgaaacagcttttggcatcagattttcctttggagaggggagagctgtggtactggctaaaaagaaagggagataacatccagtaaccacaggaatatattctctgtgaattaaaagtcttcaaagttatcatttctctgacatatgtaggagtagtcatttccattctttacatagtcatgaactggattgataaccctcatcatgcaatattttcacgcccgtacaatttttaacaggggtatccttatttgatgcatcacgcactatttacgttgtcagattgcgtccattattaacatgaattaagtgcacatttgaagttctcatggaatcaattatcttgacacttgggcctagacttcgacatgtccaaggtggctgtctataaagttttgactatcattggacagcaggatgaacgcctacagccagcatgagtctctatccatagctgaaccctgaggacagcctcatagctcatgtaatcagggcactattgccacataacacgaaggcaatagcatgaaccaaaggtcaacaattaaaggccaaagacactaaagcaagaccggaacccactggtacccataatgggaacaaacagaacaaacaagtacaacggacccacaaaggtcaccctataaacaatcctggaaccacaataaaaacatcaagaacaaccaagcacacctgcacgga

SEQ ID NO: 688367 - DNA, 137 bp, Homo sapiens
tttttcatactggcaaatgagaatgacagacaggttctttgcatgatcgccactagtgagggagtagggtgtgcctgaagtatagaggctccccaggcaatcaggagaccagctgccaggcacccctaggctggccc

SEQ ID NO: 688368 - DNA, 286 bp, Homo sapiens
  misc_feature (57)..(57): n is a, c, g, or t
  misc_feature (156)..(156): n is a, c, g, or t
  misc_feature (204)..(204): n is a, c, g, or t
aacatttgaacacactgctttaaattgtccaactctccatgaatattgaaagatttnctgatgcatcaaaataaatcccactgggaccaaaagatatttccctgcagactaaccgaaacatcttctaatatgatgacaacagtgccaaatttgcanggaggttgatttaacttccttttcttaaatccaaatcagcctaaagtntttcttatgccagagctacaaatgctttctccttttttttttttttcctgagtctcgctctgtcatccgggctggagtagca

SEQ ID NO: 688369 - DNA, 316 bp, Homo sapiens
tctagtggatcccccgtccgtcgaccgctggatctgactcaaagtaggacacacagaggttgtctacatgtttcgtatgtatcttcaggcgtggagggctccattgctgatcaaagccaagaggcctcaggaaggtgacatactcctggaagaaaagcgtctggtactggttgcggcgcaagtcttccatcagccttgcaatttcagaatcctgcagcttcgagccaatggtgagctccttctggatcagctccttcagctccttcttgctcagggtgtgcttgtcaccctccctgccggagtacttgtggaagat

SEQ ID NO: 688370 - DNA, 344 bp, Homo sapiens
  misc_feature (293)..(293): n is a, c, g, or t
  misc_feature (305)..(305): n is a, c, g, or t
tgtttaagacttagcaacgaactccctttccctctcttttcttccccttcctttttttctctccttctctctctcctttccccctttccttccttcctcccttccttcctctgtaatatgcaatgatagataaatcgctatgccatttattacatgtaaacctaatgagactgatttgtgaatgtcatgagaagaaatacccaagttatctttcttttttttttaaacttataaattgtttatttctgtaaattttccatttaaagatttctggaccatggtttgaccatggnaagtgaaactgnaacataaaggggagggactattgtacctaaggttaaata

SEQ ID NO: 688371 - DNA, 530 bp, Homo sapiens
  misc_feature (416)..(416): n is a, c, g, or t
caacgatggtcctcagctggagcaggacaaaaattaggaaagtgtctagttattaaccagtcaacgggctgcgtggggccaatggtcacagaagtaatggtttttacttggtggatggtttctagagagagcaatgggacctccaacaagtctgactggtagcatgctggcttcctgagtggttatgtgcagataagggttgggcttccttccggggcttgtggttaccggtggtgggtgagagttctgttggtgtatatggcctggccatggtctgtatatttggtctctcttttttttttggagagggagtctcactcggtcacccaggctggagtgcgggggcgtgatagctcattgcaacctccacctcccaggttcaagcaattcttgtgcctcagcctccggataggggngattacaggcacacgccatcaggctaactttggtattccaagtagagacgggattccccatgttggccaggatggtctcaaaccctgacctcagatgaccaccatgtcgaatcc

SEQ ID NO: 688372 - DNA, 367 bp, Homo sapiens
cccccccctagtttttacccgtgcattttccctataacatgccctataatggctgcatcccttttgggccccctccaaaatttacatttacccagtaggtaaattagggatgcctgcattatcaaaatactttcagggttcctataaatggcagctttcctgttgtattcaggtgttgtttacagactaccaattggtttggccaatcccctggttaaatgcccttcctggggttgaaatgaacccgtcgatttttccccaatcgatgaacccatgttttgcaatgccaatattaatttgatccccccctaacattttttttatggaaaacgtatgttgcataaaccaaggcccccttttgttttta

SEQ ID NO: 688373 - DNA, 440 bp, Homo sapiens
  misc_feature (317)..(317): n is a, c, g, or t
  misc_feature (343)..(343): n is a, c, g, or t
  misc_feature (359)..(359): n is a, c, g, or t
  misc_feature (369)..(369): n is a, c, g, or t
  misc_feature (426)..(426): n is a, c, g, or t
  misc_feature (433)..(433): n is a, c, g, or t
gtttcctggggctgctacgacaaagtaccgcaactgggaggcttaaataacagaaagttcttgcctcacagttctggagatgagaagtctggcatcaaggtgtcagtagggttggttccttctgagggctgtgagggagagtctgtcccatgcctcactcctagcttctgctggcctcaggcattgcattctttgttgtaggggatagtgttcttccctgtgtgtttcacattgccttcctctatggcatgtcggtctttcgtgtcccaaattttcccctcttataagggacctcagtcatctgggggatagggggnccaccttagggggacctcgttttcantttcatcacccacttntaaagacccnatctttcccaaggaagggcacattcttgagggacttggggggggcttcaacaaatcnttttttnagggggg

SEQ ID NO: 688374 - DNA, 721 bp, Homo sapiens
  misc_feature (7)..(7): n is a, c, g, or t
  misc_feature (67)..(67): n is a, c, g, or t
  misc_feature (95)..(95): n is a, c, g, or t
  misc_feature (105)..(105): n is a, c, g, or t
  misc_feature (243)..(243): n is a, c, g, or t
  misc_feature (256)..(256): n is a, c, g, or t
  misc_feature (267)..(267): n is a, c, g, or t
  misc_feature (347)..(347): n is a, c, g, or t
  misc_feature (392)..(392): n is a, c, g, or t
  misc_feature (424)..(424): n is a, c, g, or t
  misc_feature (446)..(446): n is a, c, g, or t
  misc_feature (469)..(470): n is a, c, g, or t
  misc_feature (528)..(528): n is a, c, g, or t
  misc_feature (573)..(573): n is a, c, g, or t
  misc_feature (588)..(588): n is a, c, g, or t
  misc_feature (719)..(719): n is a, c, g, or t
gctctcncccctccctcttgccaatacaactcctgacccatttcctcagggccagttcaaaactgancctgttcactgctgttttcacagaaaanaaccagtgcnagggatgtaggggaagaggattggaagagggcaacagtactgtccagcttctacccaaagataggcaaggtggagattcacagaattcaaatgaatggactggtggcctcacaatgacatagtctaattaaaatgggntggaggggatctnggtgggttaangccattgggggctttataagacatgtcatgggtctgtgtcagactcagaataaccaacaggggaagaatggggggggccnggggggcagtctgatggaaagttcacaattctcccatgttgggangtgggaaagtccggggggcaccaagcgcctcnctcattttggcaggaaaacttnttctagtgctggggagtccccannctgccacggaccctgagaaaggctaccaggggatgcccagtttcccaaagcccggtgntcctagttcgccccttgcggtggggttcatgctactgacagaganactttgaaatccaanggccgggagagtggccttttaggaagtccctctgcaccagtcacccaaacttgaccccaggttagacaacctggctgagtttcacaagcagctgacaacattgggggtagggaatgtcacataaaaaggantt

SEQ ID NO: 688375 - DNA, 763 bp, Homo sapiens
gacaacacttgagaaatgggcaaacttaggacaatccacaaagcatcctgttaacgtgaatatcagcatagaaaagaaatagcttggcactattctccatatgtgtatccaatagattttatatgggcaaaatttacaatattacacataacatttaatattgctagggaaaagcagaccagcatattttagctgtcagagcacattcgcttcatggcatgtcctcttaacatgcactatgagggcataggtcgaactcccacactgcttctcctaacatgtacatgacacacaacatcacaaagcaaccgcaacaagacatgagagacctggcagctacatacatgcgctacgtaggaactgcacacactggacacaagccatttctggaacaacacgtttccgtttccttgtacaagttaacaatatactcataaggacccggacataccactcccaattatttatctaagcagctaaacacttatattcacacaattcatatgccaatgtacagtagaatacatctttaatctttcacataactaaactgggagcaacccaaatatccttcactgagtgaatgaataaactcaggtacatccatatactggcataccactcaacaatgaaaagaaaactattggctgaaacaacactggctaacagctcaacatgcataatagcctaacctgaaagaagccagaatcaaaagggtatacagaataccggtaacatcccattagacatcacatactggcaa

SEQ ID NO: 688376 - DNA, 277 bp, Homo sapiens
gagaaccccctagcacttccctggatcattggtatcaaattgacctacagcggtaagggcgacgccaactggacgcagacgattaccgttgcgcaagacggaaaggtcacggagagaagggtggactctggtccaacatactataattcaagcgacttttctgcctaccctcaaatacagaatgggagagttttcacggatgcgcccggaatgaaccctatatcgggactgtccaaaacatacgaattgtctctcattgttcgtagtggatcggcgg

SEQ ID NO: 688377 - DNA, 1479 bp, Homo sapiens
  misc_feature (978)..(978): n is a, c, g, or t
agcggactacgtgaggggaggcttccctcccacaggaactcacacctgtgggcaggaagccgggaggcccgccccctgcctgggttcctgcaggggaaggcgagggtggctggatagagcgtgccctgtagaggtggttgggcacggaggctgggcatggtgtggcacgctgcgcatgggtggaccgggagggagggcaagaatctgcggggggcgcccagatcacttccctccacggtttctcggtgactgggggcggggaacgagcgggaatgtggggcgtttggggaagaggcgagaaccctgtgttcgttccccacgattcccccgttattattcaagcccagcagggctattacaccgaggggtgccgcgaagaacaggggacaatttattcttcgaagtagagaaattttcgccctgggggttttaacaattacttttctttttaacaagaaaacaccggaagaaagcatttttggcaaaacacgacagtcgggaggtcgttatagtaggcgaccccgcgttccgcagaacaacaatttgaagccccctatttgtgtaagttgggccgtctctgcagaacagcacaggtagttgtggggcgaaccccccgaagtcggagatttaaggagttggcggatatatagatgtaccggtatttatataggtaccagtaatacggtggtaaatactcgttaccggcaagtagagaactttgtatgacaaggcggccttttttccttttttcctagaggagaacacacgacaggggtgcgcaccaagggcggtgttcccccctttttgtgaacacccccacgcggccgtttggaggaagagtcttcctgtgggaagtttggtggccgacaccgccgacaatttaacgcgttaaatttataggaacacgaggcagaaggcccacggcgcacacttttggggagtcgccccttatagtaggtaggcgcctcggagaagaangcccgcgaaaaaaacagggttatcccaacaagtgtgccgttgcggagaaaacactttcctaaaagagcaatttcccaacgcaaagcgaggtacctcaacaaacgattctccgacaggacgaagacgggcggctggacacacacaaccaggcgttaacaaagttctcggcgttttttcccccccttttgaaaaacttggcgggcggaagagttgggggcgaccagcccaccactcttagggttttggtagacccccccacatggagaaggaggcagaacccacatagctgtgtgggggggcgcacagcacattaatttctcagacgacctgtgtgatgtccacccagataggcgtggccgtacccccctttttaagtttagttcttgaaaagtggaaccgctttttcacaaaaacacaacattatgataagaaggaggacagaagttatggagtataatatctcccgcggaaacgcacactctttggttaaggacccccgcg

SEQ ID NO: 688378 - DNA, 299 bp, Homo sapiens
  misc_feature (3)..(3): n is a, c, g, or t
  misc_feature (6)..(6): n is a, c, g, or t
  misc_feature (52)..(52): n is a, c, g, or t
ttnagntatgcttttggagtcctggatgggaatctggggggagaaaggaagnacaggtcaggtctcccccagccccttctgctcctgtctcctcgtgtccgcattgctggagctccacctccctcttggtttagccgcacccgcccattttccttctgtctttacctgcttcgtatcctttcccagataatgtgaataacccctttacacacccctcctatcaaagtctgtccaggtgacagtgtaccaaccgtatctgtaaataaagcaatgcagcttatgagctggttaaaagaaaa

SEQ ID NO: 688379 - DNA, 418 bp, Homo sapiens
ttatggaactagattgtggactatcacctcatccactttgaccgccgtggtacgtatgtgtgtagagcagggaagggaactttcctgcctatatataaaccctgggaccgagaattcgatggaatctagcttgatcatgagactctgagagccaaacaacgcatcaatacctcttggccagcattcttgaccagatattgtactacttgtagacgttttttcacgcgcctcgatgtaccatgtgggggatatccacgtgccttagccttcgtcacaagtgctgctggtcccccagggacacacacagcagaacttagggcggggagtggacttaagcctgacggtgcccgagaagcgcttgtccttctggggatcatagttcttcaagctgatctgcaactccaccgtctccaggaac

SEQ ID NO: 688380 - DNA, 964 bp, Homo sapiens
ttacgtagtaagtaggccgctcgtgtgactattaatatctgctgggcgctattctgcgggtgtctatagcgacgacgccttgttagaaaagttgcgcagaaatatctgggtgtaggaccgctgtccaacaagtgcatggccgcgggaacggttaaaccggggcgtacccccccaggcaccttaaccccttggggagacctgctccctccgcccgggggcccctgaacctcttacggtgcactcttgctctcctttgccgttcgcagaccaaccgtgttgttgggataacgcctcccgttaaacacggggcgcccaaagtattggccgggaaacacccgggcaccggtcctaccgcgggcacataagctgcgcccaggtggtaaaaaccggcgagcgatcccagcggtcaggggaaaaatttcccattcaggggccgcctaccctagcgagctgcgtatgttgaacccagcactgggcccaaaacgaggtggtgccccgcgggaacgcattgtgtggcattgagttttttcaaaagtgacctctgtttgttggattacacgacattatatcgggcgctttcagcaacggaaaatggcgcgcaaacagcccaaacgatggtgatctcaaacacctcgggccccccttgcggaaagtctctatgatgtactcaatatgttctccacttgcgcttggtacacatacgcgagaactttagcgcgttcttccaagcaatcagtaaaacaaatgtcttgttcccggtgactagcgattgcacggcatatgtactattgctccacgaacatgaggcgaacaccacagagaggcggactagaacaacacattgaattcagggcgtcggcgatagaagtcaaacgaggaatattggagactaacgacgcacttgtgtactatcaatgggaagaagcagttttaaaacaatcaaacaagggcgacccaaatgaca

SEQ ID NO: 688381 - DNA, 235 bp, Homo sapiens
gtttagctgggttttctgaccaggtatccctgctgctatgttgttcccgtggtaaggttggacgcacggtctaagctaattccgatgggctattttaaagagagcagaggtatgagccagagtggcgaagtgagtagttgggcaggaaggacagttaggaacgggtaactaaaggtgacttacatcagagcaggtgaccaggggtgactcaggtcaaagcaggtgacggggatga

SEQ ID NO: 688382 - DNA, 300 bp, Homo sapiens
cttctctgtccctctggattttctccctcacacgtaccccggtctaggactcgaaatgttacaccgggcaggtctccaggccactcacctctgcgtacgctcgtggttgtatacactctatatcggaccgactccaagagctgccaccgctcggtgctgcactgcggccccccacgtgaactcggttgtaacggggcttggaagaaaagctagagagagaattgcggagaatcagactccttttccagggcctcagctccctcctagtgttgccgccctttactccctttctggtgcggt

SEQ ID NO: 688383 - DNA, 116 bp, Homo sapiens
  misc_feature (11)..(11): n is a, c, g, or t
gtcagatatgnatcatagatatcgtacgagaactagcgcgaagagtgatcaggtatgcagttagatatccccgagtctacaatgctatcattacctttgatattgggggctcaggt

SEQ ID NO: 688384 - DNA, 191 bp, Homo sapiens
  misc_feature (38)..(38): n is a, c, g, or t
gccaccgaggccccgccctcgccaaacgcggcggtggnttcgggcaaggccgacgtggaggggggcatcatccagatcgcctcccgcaccgccggcatcgtccgcgaagtgatcgcccaggaaggcgatacggtgaccaagggacaggttctggcccgcctggaagacgatcagcctaaactcgccgtgca

SEQ ID NO: 688385 - DNA, 500 bp, Homo sapiens
ttcaaagacagcgtgtggatgctttactcatagaccttagacagaaatttccacccagatttgttcagcaaaagtctggagaaaagcctgtcccagtggatcaggcaaaaaaagaggcagagcctttgccagaaactgtaaaatctgaggagaaggagagcacaaagaacattcagcagactgtgagcactaaaggtccccctgagaaacgaatgagactccagtgaatgttggacgaggaagaagctggccagctccttgtcagtcgctatacctcagcaccgtgggaggctcttgagcctggaaacactatcgcagtttgtacggaatgcacttgttctttacaaaaggacgttctccctaccatgttttctatgtgaatatttcttaaatatcttttgtaatctttcctctactggacttgggcagtgcacctaactcacagatatgccagtatatatctttaaaacaataaagttatttgtatatattaaaaaaaa

SEQ ID NO: 688386 - DNA, 1432 bp, Homo sapiens
agaggagctcaagcccggaacaatccccacgttccgggccgcgacacctgaccctgcagcgtaccgggaagcgaaaccggccggcatgggccgcatgagcccgaatcgggcacatgatgtggagccaccctgagagctgagatcaggatgttccgctatcatgagggacgctggagcctgaggactcccatgcttcctgcatggcatcccattatggcatacttcacacgtcagccaaatatgagccgatatgattgatcagcgctggccttagcgatacctagcccccttccctcaggccatcacagactgcgcacaccatgccagggcaccagagccatgccccagcccgccggcaattgccagacacggcctcggcaagctgctcatcaccccccttcggcgcatgcctgcggcaactgtccggcgctggacctcccaatggacacactgctcaaggcgaatgcatgcacctgcacactgacttgggcaacagcaagtgcgcaaccacccgctgcaacacggcctcgcgcagcgccccactctgcaccatgcacgcctttcgtccacctcctttcccagctggtcccaatcctcccttactacccaactacacgagcgatgcactgagcatgcccccccccccaggctactaggaccaagagaagcaaccactccacgcaggacctgcacgcccccgcgccaacccagcggacggacaactcctagggccacgacccacgcacggggaacctggcgaccgagcggaaaccccagccaaccagcaggaaacatggagcagaccagccattgctgcccccagggcgcaaaacgcacagatccagggggaaaccaccggccaccaaccaactgccgacgccgacggcctcccccaacacagaccaactgccacggggcgcggacacacaggacgcaacaccgcgcaagccacactcaacaccaccgcgctcgcctgcgagcacctcacagcccgcacgccgggctaggaaccgcaccgagacggcacaggcgagcagaaagacccagcgcgacaccagccaagacaccgagcccccatgcgacaccctaccgcacgcaacgcaaacacacgtaaggagacagagaaggacacgaacagagaagacagaagaagcacacacaccgcatggcccaaaacgagagaccccgaagagagcaacccgccatcgccacgaacagcgcaccgccagcgcagatcctcgtgacagaagcaacgccgagcacatagccgacacaccggcgcacaccgccaagacaccgccaactagcgccccactaccgagccaagcagacgaacagcacacaccaaccacgcaccgaccatccgtacacaacagcgcagcgagtgaccaccaactaggagggaatcaagaaacagacaaacgacgagacc

SEQ ID NO: 688387 - DNA, 668 bp, Homo sapiens
ccccgaacactgagtcttgtctatcaaatgtataagatcccttggttcacctgcaatttactctacctcctcctccctgaaatcaccccaggcaaataaaggactccctgccctatttactcactgttctgtcagaggttcatactcatggtgccccatcattcttcaaacacttacttgtaggagccagtactaggaggtgagtagaacggaagaaagcttgggtcttaagaatcaaacctacctaagttcaaatttcagttctgtctctgagacaatagggagctttgtcaagggatgacctgagtcccttcctcaattataaaaagacaccaccgtgcccagcctaaatccattaacttctgtttggatgccctgcccagctcaggctaccatcggcaaacaagagaggtgctccagaattgaggaagcactgggcaaaatgcaggcatgatcgttaacctctgtaaggtggacccaggttcagctacatgagccaaacatgaaaggtgagggctggtgggaagaaaagcaggtttaattggagagccggcaaatggagatgtcaaacgagcgtactaaaggagcatcttaccttttcaaattgaccataggggtttaaagcgaaactggctgggagattgggaatgtgcgggccgagctggtct

SEQ ID NO: 688388 - DNA, 256 bp, Homo sapiens
aactcgagctcggtaccgacatatgagtctcatttacgtactagacgaggttaaaggttgccagtatatgacaacaagtagatttagtaagatctactatcattgattacagcttagtgttacaattcatagatgaagacttcttaaaaacaagtgagcttgttaaaagcccccctgaagcattacagatggcttatagctgtccacggggttggtagaggtgggaaagggaagggttctaggacacgaatgttca

SEQ ID NO: 688389 - DNA, 850 bp, Homo sapiens
gtagctgttctcttctgtcaaccccacacgccttaggcacaatgaagctgggtaagctctatttcccttctttttctcgtttagctcggtttattccaggtgtgtgtatcgtcgagatgcacacaacgagtgaggttgctcatcggttataagagatttgggagaagaaaatttcaacatgccttggtgtggattgccttagctcagtatcttcagcagtgtccattggagagatcatgtgagaattagtgaatgaagtaacctgaatttgcaaggaacatgtgttgctgatgagtcagctggaaaattgtgacaaatcacttcataccctttgtggagacgaaattatgcacagtgtgcaactcttcgtgaaaccatatggtgaaatggctgactgctgtgcacatacaagaatctgagagaaatgaatgcttcttgcaatacaaagatgacaatgcaaatctcccccgatcggtgagaccagaggtcgatgtgatgtgcactgctttccatgacaatgaagagacattattgaaaaagtacttatatgaacatggccagaggacatccttactgtatgccccggaactccttattctttgctacaaaggtgatagagctgtttaacagaatgttgccaagctgctgataaagctgcttgctgttgacaaagctcgatgaacttcgggatgaaggggacggtttcgtctggcaaatagagactcaagtgtgcaagtctccaaaaatttggagaaagaagctttcaacggcatgggccaagaaatacgcgtgagccagaagattcccaaacttgagtggagaaatttcaagtagtgacagaatttacaag

SEQ ID NO: 688390 - DNA, 110 bp, Homo sapiens
  misc_feature (31)..(31): n is a, c, g, or t
tcagcttgctatgtgcttgtccaggcagaangcacaggagtgccaagtttctattagtgtaacatgtattgatttaaaaacaaaacaaaacaaaacaaaaacaaaaaaaa

SEQ ID NO: 688391 - DNA, 236 bp, Homo sapiens
tctagaggatccttagtttagggcgacctaagatgaaagttagaaccacccccttttgaccaggcgcggtggctcaggcctgtaatcccagcactttgggaggtagaatcgggtagatcacctgaagtcaggagtttgagaccagcctggccaacatggtgaaaccccaattttctactaaaaaaatacaaataacttagccgggaagtggtggtagcgcgcccgctagctcccag

SEQ ID NO: 688392 - DNA, 548 bp, Homo sapiens
caccctcatcctgatcaactacatcttcctcaaggaatatggaaacttcccttcagcccagaaaatactagagaggaggacttctatgtgaatgagacaagcacagtgaaggtgcccatgatggtccagtcaggcaacattagttactttcgtgattcggcgatcccctgccagatggtacagatgaattatgtgggaaatggaactaccttcatcattcttccagaccagggccagatggacactgtcgtcgctgcacttaatcgggacacaattgataggtggggcaagcttatgattccaaggcagatgaacctgtacatccccaaattctccatgtctgatacctatgaccttcaagatgtgctggcagatgtgggcattaaggatttgttcaccaaccaatctgatttcgcagacaccaccaaagacactcccttgacattaacggtactccacaaggccatgctgcaactggatgaagggaatgtgctgcctgctgccaccaatggccctcctgtacacctgccctccgaatcattcaccct

SEQ ID NO: 688393 - DNA, 142 bp, Homo sapiens
gacgtgatacagtgctgctggataaatctggaccttggaagttagcagatttggtacttgtctgaagataataaggaaggcatggtacgatgtgatacagcggttggaacacctgattatatttcccctaaatgtatcgtga

SEQ ID NO: 688394 - DNA, 243 bp, Homo sapiens
aagctgttgatagaataatgtcctcgaccgaacaatgaacttgtaacacgatattcgcaaagccttcaacgttcttagtgattgggtcacgattgtctcccctctgctggaggtatccaagtaagtcttcagacactgtcatcaatttcttgtaagccaaggtcgcacggggaatgctgtaggactgtaagcctccaggaacggtgttgtaaatgctgaaatttccgagtctgcaatgagtcc

SEQ ID NO: 688395 - DNA, 837 bp, Homo sapiens
gcgctgttcagtgcctgtgttgcagagggtgagggcagctggagtgcgttctgcgcgaagcttgtggttgcacgcccatcgtcttagggagctaccttccgtgagcgatgttcaagtctctgaatgaaggttggtggaggagagccgcgagaagaaccgagtcctgaggtggacatgagtgaccggggcatctccaaacatgctcggatgtcaacggacctctttaccttatgccatatcacacaactggtcctcatgcgatatgcaaggctaacaatggtgccagcgaaacatcgcagaactgaagaattgggaggtgctcagacttttttactaaccaagatcgaggagctgcccactacagatcacgtagccttcagaaactcaaacagcctgaaccttggcatgaagcaggctgaacactttggcacgaggcttcggctccctgccagctcttgaggttctggacttgacgtacaacaacttgagcgataagattctcttcctgtgacacttcttctagctgaagcacctgcgtgcagtctatctaagtgacaagcgattttgaacatccttggcggcagatatcgggaagctcaacacagttgcagatacgtcaggcttagggataacgacctgaatctcgctgccttaaggacatcaggggagcttaccccagcttaaaagaggctccacattcagggagaagctgctcacccgttgtggcccccggaagtagtgaagacttggacttgtaactgggcaggacgcaggtatccaaagccgagaacaatccctgggtgaccccattgagaccagttccagattgcggtgtcc

SEQ ID NO: 688396 - DNA, 978 bp, Homo sapiens
aagaaattgaaggctcatgaagaggatgatatgacgaaaatgataagaccgaagaaatgtccaaatgattcagtccttgatgaacaagtctcttcgaagaaaatgaggaggaggagattgggaacctacagcttgcctgggatatgctggatttagcaaagatcatttttagaaaggcaagagacaaaagaagcacagctttatgctgcccaggcacatcttaaactacggagaagttgagtgtttgatagtctgaaagactatgtgcacagctgtgcgaggagttccagtcctgccttaacctgcaggaacagtacctggaagcccgacgaagcgtctcgcttgctagcagacccactacctagctgggcttgtgcttatgggtacaactctcagtatgatgaggcagtggatacggagttcagcagaatctattgaagtcattgagaacagaatggctgtactaaacgagcaggtgaaggaggctgaatggatcgtctgcttgaatacagagaaagaaattgaggaagtaaaggatcttgtacccgaaaatttagagagaatgatagaagatgcaaagtgagtctcagcggtagtgggaattgttagctgactggtctgaaaggtactctggtggaaagttctcacttgagtttcaatgctggtggaaagaagtcattattcttcatgattgccgttaaaaagccaaagacggggcgttttcattaaatggggtgatggattttccaccgggtggaaaggagaggaaccaaagggatatgactcctggaagattagtgaggaggcaaagaagggaggtaggagaaggggagtgttcccggaatgagattggaaacgggaggggtaatagtgaaggacatggaggggggacaaaagtgtttggggccggaagaggtgataggagggtagtaaaggataggcactgatagtttgtcatatttatatatgttgtgacga

SEQ ID NO: 688397 - DNA, 240 bp, Homo sapiens
ttaaaaggagctctgaggtattccagagatttaattctgacgcagtcatctcgaccccaccattcatttaagacccctagcgaaagtactttcttacatgttaaatctgagaattaggaaatccaatcgctttatgagaaattaagtagaatttgattttcgacttctaatttcttcaagattactcacggaatctcaaagccaggcgttgaaatcatcggccgctacatcagcatgtga

SEQ ID NO: 688398 - DNA, 142 bp, Homo sapiens
ctcttcccacagacggtggtatatcatttaatgtgtatggctgcacaggaattctagaccagcctgggcaacatgtgtaaaccttctctctacaaaaaatatttaaaaattagctgggtgtggtggtgcacgacctgtggtc

SEQ ID NO: 688399 - DNA, 288 bp, Homo sapiens
ggcctttctggggaatcggtcattacatcccatttatttgttgtaggtcatcagcttcaactgaagctgaaagaccatcttcagctttggtcagcctggtctggatctctgtatgccattcgtggttttgctatgattcaacctggagtctaaatgaatttgcacccactagaagtcaatgacatatggacagtatgtaagatcattaacaaagaatgggctgggcatgttgaagagaaatacgttactgcttcagagagctatgttgcctagcctgaatcatctcaa

SEQ ID NO: 688400 - DNA, 463 bp, Homo sapiens
  misc_feature (94)..(94): n is a, c, g, or t
  misc_feature (231)..(231): n is a, c, g, or t
gaccatttttttagttttcctgcgcgtgaattgacgcgggcttttctttgatttgaggtcaggcaatgaaataaccaattttccatatcaaaantgattcttatagagtgactgaggggaccttgtattttgaagcagactaaaaatctgaccagccgccaaaataggtataaaattagaaactttaaaaatcaagctaaatttcagctttgacccacctaactccagtgnaataggtggcagctcagaaacaaggacagcactgctgctgccagagcaagctcacatccagctggcacttcgtgagagctccttcctgccgggcacgtgtgagttcagcgtgggcaagagacttttatgcacattctgtcattcaaaagggaaatgatgccaaccccagatgcagcatgtcctgaatgaatgatctgtaaaatacaataataaaagcttatagtttgagtaa

SEQ ID NO: 688401 - DNA, 325 bp, Homo sapiens
acttgcaattcactaagcattcggctgatcaattatataagaggtttttggggatattgttgaagtgttttgggccatctgactttaattggtgctacttttctaactaataatgctgtgaaataggaccttataaagaaggttagttacctccctcgtcttgatctcacatctcctaataagccatatagattcttggtatatctgtgtctgtccctgtctttctctcactttctctttctgaagataccaaaaaatctgcagtttaagcttctaaatgtagcataacatcatagataaaagtagaactcttaatctcaccatt

SEQ ID NO: 688402 - DNA, 154 bp, Homo sapiens
agcttcgagggcaccttgtttaactttgccaagtaatcttctctctgcccctggacaactttggaaatgcccaatataaatgcctcccttatcccccggttatccctgagtattcgggcaggagcacactctcccccagccttccttggtccca

SEQ ID NO: 688403 - DNA, 259 bp, Homo sapiens
tggcccatttttcccggttggggggcccccgttttttttttgggggtttttttttttgccacccccccttggggggccgtttttttttaaattttcccccggggtttttttccccccccggggggggggttttttttttccccccgggggggggtgctttttgggggttcccttcccctttttttttggtttccccaaaacccccctttttttttttttttttttcccccccccccatttgggggattttttcccccca

SEQ ID NO: 688404 - DNA, 331 bp, Homo sapiens
aatgatgatggtggggaaaaaaagcatccatatagtcaccccaaatttatggagggtttcttctacaattaggactttcgcttcgaagcgaaggccttctccaaatccatgtaaaattattaatattacctgcctgtttagaagaaatgaaatgagccctaccagatgatagggatgtttcatgtggtgtatgcatcgggtagtccgagtaacgtcgggcattccggataggccgagaaagtgttgtggaagaaagttagatttacgccgatgaatatgatagtgggtacacggacctccagaaactagctctgggaaggcaggccccaat

SEQ ID NO: 688405 - DNA, 202 bp, Homo sapiens
ccccccccccccccccccctttgtttttttttataccccgggggccccgggggttttttaggggtttttcccccagagatttgaaaaatgggggtttccccccgagccccccccaattttttttttgggggagaaaaaccccttttttttttctttggcccccccccttttttgggttttttttgggggggggggggaaaga

SEQ ID NO: 688406 - DNA, 112 bp, Homo sapiens
gcttgtggttcctcatccatggcctggaccgttatgctgctcggctccacaatctaactgtacacggctgtgtgatctccctatgtctccaacttaaaccaccctacgggtg

SEQ ID NO: 688407 - DNA, 190 bp, Homo sapiens
gctcggtccgcctgatgactggtggttgcggttcatgtactgtcccagatctgggtccactgaggcctctgtccaaccagcttgtcccctcccctagctcttgagtctctgttctggtccctaccagtggctttgctgtgctgatgccttatcttcctctatccaccagttcattcaggctggggatcca

SEQ ID NO: 688408 - DNA, 140 bp, Homo sapiens
aggatccctgcggttctacctgaccttctcgagggtctgggctttttatacatcaaaaaatccatgctcacgaaaatccccaaaaatacaatccaggtaggaaggcatccagttacagcacttccctttctggaagtcag

SEQ ID NO: 688409 - DNA, 442 bp, Homo sapiens
gatcctattggtgcggggctttgtatgattatgggcgttgattagtagtagttactggttgaacattgtctgcagatgtacagaactgaaattcgaatggcgaggatggcaagaaaaggttggcaacttctatgtacctgcagaacccaaattggcgtttgtcatcagaatcagaggtatcaatggagtgagcccaaaggttcgaaaggtgttgcagcttcttcgccttcgtcaaatcttcaatggaacctttgtgaagctcaacaaggcttcgattaacatgctgaggattgtagagccatatattgcatgggggtaccccaatctgaagtcagtaaatgaactaatctacaagcgtggttatggcaaaatcaataagaagcgaattgctttgacagataacgctttgattgctcgatctcttggtaaagacggcaagcgg

SEQ ID NO: 688410 - DNA, 264 bp, Homo sapiens
cagcagcactatgcatacatcacacatagccacaaaccaccaattgtaacccaacaaacatcaatctgtggtcctcttcaggccaatcccacactggattctcggccgcagtacaagttatcaaacttcagtaatggtaacagaatcattgacgttcatggccggaaccacagagattcccagctttggagagctgataccgcctgtgaacaacagtcacgctctcttccacaatgactcggatcttcttagcatccaggggct

SEQ ID NO: 688411 - DNA, 270 bp, Homo sapiens
atcagggataataggaggtatgaagattgtaacaggatccaggtagtaaagtcccaggatcataactggagctgccagtgtataaactctagtagatggtaatatgccggctcaagggggtgtgtggaggaaggtcaggaaacggggagggaggaagtcagccttattctgagagctgtatgagtctgggggtgccctccccactagaaaatgttccccaatctcagcagggccctcaatagtcccattctccaccccatctttctgcaa

SEQ ID NO: 688412 - DNA, 234 bp, Homo sapiens
tccaggtttgtggagggttcctcttactcttgggactttccgcttgtgagagcgaagcttctcacatcatgataattattaatattactgctgtgagagaaatgaatgcgcctacagatgataggatctttcatgtggtgtatgcatcggggtcagtccgcagtcaacgtcggtgcattccggcataggccgtagaaagtgttgtgggaagcacacagttcagcattcgcaccg

SEQ ID NO: 688413 - DNA, 267 bp, Homo sapiens
  misc_feature (151)..(151): n is a, c, g, or t
acgtctaaaaagttactagctagaaagacaaaccattgtgcaacaactgcctacggcatttagtacagcaacatgctgtacaggcccgaagcccaggagcaacaggctggaccatatagcctaggcaggtagtaggccgtgccatctaggnttgtgttaagtacactctgtgatgctcacacaatgacaaaatcacctaaggatgcatttctctgaatgtctccctcatcattaagtggggcatgactgtatttttttttctctata

SEQ ID NO: 688414 - DNA, 126 bp, Homo sapiens
ctctagagtgtatccccggcagcccccgcaagccgctttcacaaactcctttcttaccgtaggtttctcccctcccgccgcccgggcgagcgacacggctgcggcccccccgtcttgcggggtctg

SEQ ID NO: 688415 - DNA, 107 bp, Homo sapiens
gttggtagcagagtgtaccttggatttcaagcccctggcatgtgctgcatctcctggagagaaaggtgcttttctgatttgcacagagaccccttgtgggctgttct

SEQ ID NO: 688416 - DNA, 635 bp, Homo sapiens
  misc_feature (229)..(229): n is a, c, g, or t
  misc_feature (267)..(268): n is a, c, g, or t
  misc_feature (276)..(276): n is a, c, g, or t
  misc_feature (291)..(291): n is a, c, g, or t
  misc_feature (293)..(293): n is a, c, g, or t
  misc_feature (317)..(317): n is a, c, g, or t
  misc_feature (373)..(373): n is a, c, g, or t
  misc_feature (454)..(454): n is a, c, g, or t
  misc_feature (462)..(462): n is a, c, g, or t
  misc_feature (464)..(464): n is a, c, g, or t
  misc_feature (487)..(487): n is a, c, g, or t
ttcctacccttgctaggggggcttagtaagattacacattcaagcatacccgttccatgaagcttaccctctaaggaaccacgatcaaaaggtatcagcattaagcacgcagtaatgcacatcaaaacgctcagcatagccacacccacacgataaacagttttgggaagctggtcccaataaaggagagcttaactaaggtaggctagccccaggtttttatcaattncgcgcctttcaccgttttcaccacgttaacccaagacnntaaaattngttataatgtgtgcntnaggaccacccctaaccaacaaagnttaaacttatcttatatgtccaaaactttccttaacacaaaatacgacccggtaancacccacaaaattatttttcaaaaattagccaatctcccgacttggggtttgttaccacattttctttatcttcttttatnaaatcttntnaaccaatattacattatttatanataatatacaacccaactatctatcttataccactcacattctaattttatccatctttagtgcatcatcaccatacttcatcacctcctctttctccaattccttataattgttatactttttatatcgtcttattacccccaaaat

SEQ ID NO: 688417 - DNA, 344 bp, Homo sapiens
gtaatccgaatgtgtttagaagtggcacttctagggtattaagcggggtaatgcctgttgggggccagtgccctccaaattggggggtagggtatagcctgaagtggtaaaaggctcagaaaattcctgagaatgcacagttggtgtgtggtgcccttggtatgtgctttctcgtgttacatggcgccatcattggtatatggtaagtgtgttggttagtaggctatagtatgaggagcgtatatggagtgaaagtgaaatcacatggctagcccggaggtcattaggaggtctgagagggcccctgttaggggtcatggtctgggttttactatatgatagcc

SEQ ID NO: 688418 - DNA, 407 bp, Homo sapiens
  misc_feature (37)..(37): n is a, c, g, or t
  misc_feature (60)..(60): n is a, c, g, or t
  misc_feature (65)..(65): n is a, c, g, or t
aatgtggggaggtagagaaacagtcaccctttgtgtntccaatacccctttccctcacantgacntgtgttccttccctgttctcttttttattaaaaataagaacctgggcagagtgcggcagctcatgcctgtaatcccagcacttagggaggccgaggagggcagatcacgaggtcaggagatcgaaaccatcctggctaacacggtgaaaccccgtctttactaaaaaatacaaaaaattagctgggcgcagaggcacgggcctgtagtcccagctactcaggaggcggaggcaggagaatggcgtcaacccgggaggcggaggttgcagtgagccaggattgtgcgactgcactccagcctgggtgacagggtgaaacgccatctcaaaaaataaaaattga

SEQ ID NO: 688419 - DNA, 366 bp, Homo sapiens
actgctgacatatttgtgcaaatcagaaggagcagagaagcaggcagtctcatgcatgaaaggtaaccctatcaggatgacagagctgagggtctcttgtaggagttgctcttgttgtgtaaagcactattgtcttggggtagagccctaggacagttcttggtaggtactgctgggcaaaacatatgggttccatctcggatagaggagtaaacctcatcctctatccgtaagtgtccttccatgcaaggtcccacatctaggtgatagacagggaccccttctaatgaacctttgaggaacggaggaaggaagaaatgcgtatagatctaggatgcagcccttacaaagggtacaatgtaccca

SEQ ID NO: 688420 - DNA, 580 bp, Homo sapiens
ggagtttgagaccagcctggacaacatagtgagacccccatcgtgtacaaaaaaaacaagtgctgctgtgggaggctgaggtgggaggaccacttgagcccaggaattcgaggaggtcatagtgagctatgattgtgccgcgtgcacctcacagcctgtggttgacaagagcaacaccttgccctctaaaacaaacagtctccaacctaatttaatttttacaattttcctggagacaggcatgtcgctctggtcacccaaggctggcagtgcagtgggtataacacatgggttcaccttgcagccgaactcccaggctcgggtgatccttcctcctcaagcctcccaagtagctgggaccacaggtcattggccaccatgcctggcctaatcttcaatccggtagaagacgaggtcctcgctatgtcgcaagcagggagatcaccttaagtgatcttccctcatgggcttcccaaagtggtcgggatcccaggcgtgagccacttgaacccggcttgacctaactatcttaaaccactactcatatgggcatcatctacacttcacaacaatttgccaa

SEQ ID NO: 688421 - DNA, 116 bp, Homo sapiens
agcggggccggagcctggagcgccaccagtgcagcagccgccgcagccgccgcgctgggcagaggagccggagacgcgagcgggcgaggtggcgtgcggcggcggagcgggagcgt

SEQ ID NO: 688422 - DNA, 837 bp, Homo sapiens
ccggggtttttccccgagctttttggtcccccccgggcaccttcttgggatttttgtttttcggcccaggatgttacttcttttctccggcatttttgggtgcgcgcgccccaactcgggtgcgtttgtgtggggtcacatcatcgtccttcccgttgccgcatgatgctctgctcgtaggccccccccgcggggtgctctctacgcctcgcgcttttgtagtaggaggtccccccgcggcttgttttttttcgatgtagtgcccctccccctgttagggggcggtgtgtggtcgcccacctcttggggtgtggcttgtgagtgtatggggggcccacattgctgagttggtgtgtttcatcactccttggcgtctcgtgataaatatagagagagctgtttcttcaagagaggaggacccgctcctccgtgccccgccgttttttctacacactatctcggcggttggtcccaccaacatcactcctacccacaggatctgctggtggtgtacccgtccccgccgcccatcttctattggtgtgctgcagccaccgcggcgggtgctggcactaccgtgccttcttctttgtctcccccgcggttgtctcccgtccccccccttcagtctttcttcttttcaggatatctcctccctacgggggggtcccccccccgcgccccgcatagacaaagaggagagaatccccccaacaggcgccccggggggggggggggggaaaaacacgcaagagggggggttaaccccccccccccccctcgcggggtgggtttttttttttttttcccccaaaaacagggggagggcctttatta

SEQ ID NO: 688423 - DNA, 719 bp, Homo sapiens
acctttatgtcctagagcataaaggtggtcctccgatatagagttcataagcagagcttgaattgcatcatgattgctcatccggctagtgcgcctctagggctcaagagaatgagactttcgggtcctcatgctatcgatagcatgaaataattcatgtacagtccaggtgaagggcattctggaaaaaataattaacacaagcaaagcgatatttttctaaggagtagagctgctgcacaccagtatgagcgagcttagcaagccgaattgaggatcctcagatacaaggctcattggtcaaatatctagatgatgtttatgaatctagtgtgaaagtattaagtcagcatcacaaggtctatgaacaatatatgcaagtccattcaatcgtgcaattgaactattggagttgagcagattcgagttgtacatagagatggaagagtaattacactgtcttatcaggagcaggagctacaggattttcttctgtctcagatgtcacagtcaccaggtacatgcagttcagcaactcgccaaggttatgggctggcaagtactgagcttcagtaatcatgtgggacttggacctatagagagcattggtaatgcatctgccatcacggtggctccccaagtggtgactatgctatttcagttcgtaatggacctgaaagtggcagcaagattatggttcagtttcctcgtaaccaatg

SEQ ID NO: 688424 - DNA, 565 bp, Homo sapiens
  misc_feature (67)..(67): n is a, c, g, or t
  misc_feature (135)..(135): n is a, c, g, or t
  misc_feature (233)..(233): n is a, c, g, or t
  misc_feature (386)..(386): n is a, c, g, or t
  misc_feature (390)..(390): n is a, c, g, or t
gaggttcctgcagagggagcgtcaaggccctgtgctgctgtccctgggggccagaggggttgcccancatgcccactggcaagagagagggaactgacccacttgctcctaccagcttctgaaagtgacactganccccaagtgacaccacaccaccaaagaaggtgcttgtgtttgtcaaacaaatacagccagacctgccaccccttaagctccaaagtccagaggtgcanaaagccaggaccaagagacaagcagctcaccagggtggacaaatcaccaaaaatatggtgcattatcctgttttcacttttaacatgggtttatgctgagcctaccatatatagagagatcctatcccctaactatcctcaagcatatcccantaangtatagaaatcttaaaacatagaagttcctgaaagatataaaattcacctctacttcacccatctaaacattgagctatcagagaactatacatataactcagtacagataatctcaaaatacactaaagaaagaaagctctaatgacaaataacagtaacaatccccactctcc

SEQ ID NO: 688425 - DNA, 143 bp, Homo sapiens
catgagataccgtgggagatgtatagctgatcagtgctatcccagacacctcctatcccaaacacctccttcccaacacctccttcaccaacacctcctatccccaacacctccttccccaacacttgcaactccaacagcct

SEQ ID NO: 688426 - DNA, 906 bp, Homo sapiens
  misc_feature (187)..(187): n is a, c, g, or t
  misc_feature (384)..(384): n is a, c, g, or t
  misc_feature (456)..(456): n is a, c, g, or t
  misc_feature (495)..(495): n is a, c, g, or t
  misc_feature (518)..(518): n is a, c, g, or t
  misc_feature (703)..(703): n is a, c, g, or t
  misc_feature (711)..(711): n is a, c, g, or t
  misc_feature (713)..(713): n is a, c, g, or t
  misc_feature (753)..(753): n is a, c, g, or t
  misc_feature (756)..(756): n is a, c, g, or t
  misc_feature (769)..(769): n is a, c, g, or t
  misc_feature (771)..(771): n is a, c, g, or t
  misc_feature (777)..(777): n is a, c, g, or t
  misc_feature (798)..(798): n is a, c, g, or t
  misc_feature (820)..(820): n is a, c, g, or t
  misc_feature (834)..(834): n is a, c, g, or t
  misc_feature (843)..(843): n is a, c, g, or t
  misc_feature (846)..(846): n is a, c, g, or t
  misc_feature (856)..(856): n is a, c, g, or t
  misc_feature (882)..(882): n is a, c, g, or t
  misc_feature (901)..(901): n is a, c, g, or t
gtgagtagctgctttcggtccgccggacacaccggacagatagacgtgcggacggcccaccaccccagccctccaactagtcagcctgcgcctggcgcctcccctctccaggtccatccgccatgtggcccctgtggcgcctcgtgtctctgctggccctgagccaggccctgccctttgagcaganaggcttctgggacttcaccctggacgatgggccattcatgatgaacgatgaggaagcttcgggcgctgacacctcagagcgtcctggacccggactctgtcacacccacctacagcgccatgtgtcctttcggctgccactgccacctgcgggtggttcaatgctccgacctgggtctgaagtctgtgcccaaaaanatctcccctgacaccacgctgctggacctgcagaacaacgacatctccgagctccgcaaagatgacttcaanggtctccagcacctctacgccctcgtcctggtgaacaanaagatctccaagatccatgaganggccttcagcccactgcggaagctgcagaagctctacatctccaagaaccacctggtggagatcccgcccaaactacccagtcctggtggagctccgcatccacgacaaacgcatccgcaaggtgcccaagggagtgttcagcgggctccggaacatgaaatgcatcgagacgggcgggaaccantggagaanantggctttgaaactggagccttcgatggcctgaagctcaantanctgcgcatctcanangccaanctgactggcatccccaaaaanctccctgagaccctgaatgaantccacctagaccanaaaaaaaancangccatcgaantggaggacctgcttcgctactccaanctgtacaagctgggcctangccac

SEQ ID NO: 688427 - DNA, 388 bp, Homo sapiens
atgagtcaacaggtttcactaatatttgtcatgctgtagcatttgtaagatgggtaaatgatgaaattcaaagaaaactttttctattggtaggagcctgccagaacaaaggccaatatataatgttgtgacatcatatctgataaccagaggtctggtatctacactcctggtgccccatcagtggttgtctccataagtcattttgcgttattaaaaaaaaaaaagaaatcctgatgttgacattatagcacactgctttctccacagagatgctgatatcaaaaacttgaagatacagtgaagttctgaataatgttacaaaactggttacctgtatcaaagacccatttatgtaaaaaaaaaacataataatgaaaaaacatgt

SEQ ID NO: 688428 - DNA, 190 bp, Homo sapiens
atccccacctgtgtgctcagatgtacgccgaccgttgactattctactacaaatcacaaagacattggaacactatacctataattcggcccacctgtgtgctcgtgtgtctacgtctattcctactgtaaactactgtggtgtgctcacacgataaatccctagtgaagccgattgatatcatagctca

SEQ ID NO: 688429 - DNA, 385 bp, Homo sapiens
  misc_feature (182)..(182): n is a, c, g, or t
tctccgtgccgttgtcggggttatcccgtttgctcctcgcaggtctgcttgtctgtgatttcgtggttcgcgcgctttcattcgttcttgcgtccgggtttgattccgggtaatcgctggcgcaaatcggcggcatccgccacggtggcggtattgcaggcaattaccagcgccttggcgcnttgctcgcgacagaaaccggagatcaccgcgcagcgctggcgaatgtactccgggcttttttcgccgtaggggatatgcccgcagtcggcgacatagaacagcgactcattgggcagcagggcctggatttccttgagcaccgacaggccgccgacgccagagtcgattaccgcgatcggtgcgtcacgcatcgcgtcgacgc

SEQ ID NO: 688430 - DNA, 232 bp, Homo sapiens
atgggtgctcatcccccacgcagatctccactgaggacatcaacaagcgctatcactaccagctgacattcggctgctgagggctacctggaagaagctgaccctcaataggcccattctttggaaaaggcccttcaaggcggcggctccggtcgtgtcaagcctaattctgaggaattgggctttggggaaactgggaagaacctacattaaagctggaacaaaactgggg

SEQ ID NO: 688431 - DNA, 617 bp, Homo sapiens
aatcccagcatttaaggaggtgggaaaatgcttgagcccaggagttcaagaccagcctgggcaacatagggagaccctgtctctacaacacataatttaaaaaaattagctgggtatgttggtatgcacctgtggtccctgctactaggtgtgtggtatgcacctgtggtccctgctactacagaggctgaggtaggaggattattgagcccaggaggttgaggttacagtgagcaataattatgccttgcaacactctagtctaggcaacagcatgagaccctgtcccaaaaaaaaaaaaaaaaaaacaaaaaaaaaacttgttgctgggccggctccgaggagccccagaaaaaagggtttctaaaagaccacctgcggtgggagccgagcgggcggccccaatatgcgacagtgtgacaatgtgcgcaaaagcagtggtccccgaaagagagacccggtggctaaaggacaatgctcgcgttggtatcccaccacaagtaaaaaaacgcgcggggaaaccagatagggtccggacaaaccccaagatggagtctgaggcaacagggactcaacacaggggctccaaggagccagaataatacacgcgcggggat

SEQ ID NO: 688432 - DNA, 767 bp, Homo sapiens
gcagcactcattactacctgctgccaccgtcagacctatgcctcaggccgccccagacccaaaggccaacttctccaccaataacagcaacccagggcacggccaccatccctgagggccacggctcggctgccacagaggggctgcccaggggacgggcaagaggctgctcggccagcagacaaggtccagatgctgcaggccatggtgcatggggtgaccacagaggagtgccaggcggccctgcagagccacagctggagtgttcagagggctgcccagtatctgaaggtggagcagctctttgggctgggtcttcggccacgggtggagtgccacaaggtcctagagatgttcgactggaacctagagcaagccggctgtcaccttctgggctcctgtggccctgctcatcacaaacgctgatggttgactggagagcagtggtctgccctaaaagaacctcttgaacctgtctgtgggacaagggtgggggagctgccctgcctcaggcccgaaggacccacaactgcctgcggctcccaggggacagtgagacccaggcagcaggaggctgggagcctcaccttggcccacctcgctcacccacccagcgctgttctgcacaccttggttcagccctcagtgcccaagaggtgggacgttccagcttgtgaaggcagacaggaagctgctggagggtctgtgtgggctgctctggatcagatcaaaggtgggctggggtaaatggccaaggttcctgggga

SEQ ID NO: 688433 - DNA, 471 bp, Homo sapiens
  misc_feature (213)..(213): n is a, c, g, or t
  misc_feature (360)..(360): n is a, c, g, or t
  misc_feature (376)..(376): n is a, c, g, or t
  misc_feature (381)..(382): n is a, c, g, or t
  misc_feature (392)..(392): n is a, c, g, or t
tagaaatatgtctgataaaagagttactttgatagagtaaaaaatagaggttcaaaccctcttatttctagcacaataggactcgaacctaaacctgagaattcaaaattctccgtgctaccaaaatacaccacattctacagtaggtcagctaagctaagctatcgggcccataccccgaaaatgttggttcatacccttcccatactaatnaatcccattatctacactacccttatcataacagtaatatccggaaccatactagtaataatcagctcacactgactactcatctgaatcggattcgaaataaacctattagcaataatcccagtattaataaaaaatttaacccangagccacagaagcagncacannatatttcctnacacaaccacagcctccatgatactaataatagccatcatcatcaacctcctatattctggacaatgaccaggcaggct

SEQ ID NO: 688434 - DNA, 360 bp, Homo sapiens
cagcaggacgttgggatcgggctggcgcttgtcgaacgcgtcgggatcgaccgtcgtcggcacgtcgtcccggagcgtcaccagcttcttggagatgcgcgccggctcggcattgacctgcagtgcctcgcggcgcttgggctgcttgatctctccggcgcgcgccaacagcgtctcgaggtcgccgtactcggccagcaattgcgcggcggtcttgatgccgattcccggcacgccgggcacgttgtcggtcgaatcaccggccagcgcctgcacgtcgatcaccttgtccggcgtcacgccgaacttctccatcaccgcctcgggcccgatcttcaccttcttgatcgggtcgtacat

SEQ ID NO: 688435 - DNA, 260 bp, Homo sapiens
acgagcgcatgtgcgacagtgaagcgcgccatggcgattcgcatgatatgcctctagagctcggcttagttgagccacgaagttccgctgcgaagctcacgcggacataggctgctgattggctaagagacttgtgatagggctcatgtttgagcttgctgctgaaggtcttagcacagtagctactgtagagtacattggcagactatgagcaactggtgcgaggtactggatcatggtccctctagtgctgttgcatg

SEQ ID NO: 688436 - DNA, 471 bp, Homo sapiens
  misc_feature (213)..(213): n is a, c, g, or t
tagaaatatgtctgataaaagagttactttgatagagtaaaaaatagaggttcaaaccctcttatttctagcacaataggactcgaacctaaacctgagaattcaaaattctccgtgctaccaaaatacaccacattctacagtaggtcagctaagctaagctatcgggcccataccccgaaaatgttggttcatacccttcccatactaatnaatcccattatctacactacccttatcataacagtaatatccggaaccatactagtaataatcagctcacactgactactcatctgaatcggattcgaaataaacctattagcaatgagtgtggaaaaggttttacagtgaagcgctatctgattgcccatcagcgaactcatagtggagagaaacccttacgtatgcattgaatgtggaaaaggcttcacggtgaagagcaatctcattgtgcatcagccgctctta

SEQ ID NO: 688437 - DNA, 332 bp, Homo sapiens
cgtctgcgaaatcatatggctgtaccattcgtgctatcccgtgggggttgccacgctttgtatacgtttcgtgtggctgatcagaagaccgacggcatactgtcagatttctacagaaattacgatgtcatgcaacagatttggacgcgagatagagcgaaggctggtactcttttcacgcagtgtaagagtaactcttgcgacatataacagacctttccttcagtgttggacattaccctaagcaaccgtttgtcaacatgcacttgttgttcctgaaaactatgcacacattgaattactgttgcggctaatgaaagtagttccctctt

SEQ ID NO: 688438 - DNA, 179 bp, Homo sapiens
atatctgatgccacgtgtatagtggaatgcctgtgtaggcattaaaaagaatgaggtagatcactatgtgtattactatcttttaattttaatgtcttgaactaagacagaactttatgtatatttttcagaacagatgaccaatgttatagacaagagacagaacccaaggtttgaat

SEQ ID NO: 688439 - DNA, 767 bp, Homo sapiens
ggagagggaatctccctccgtcacccagactgaagcacaggggcatgatctcagcttactccaacctttgcctcccaggttcaagggattctcctgcctcggcctcctgagtagctgggattacaggcacccaccaccatgcctggctaatttttggatttttaggacagatagggttttgacatgttggccaagctggtcttgaactcctgacctcaggggatccatctgccttggcttcccaaagggctgggattacaggcgtgagccacagcccacagccaaaaaaaaaaaaaaaaaaaaattcttaaatgggtaatacatgcaaatagtccaagatttttaaagaacaattggggattatttgaaaaatcaagttttcttttcttcccttaaacaacccagatgtgtgccttggaccaaccacagttaccagttccaaggtttttttaacaaggcccttggtaattttttgaaattcaaaattttgccaccccacgtggggggggttaaaatttgggtgccgggaggaaaccatttggttggttggctttagattattccccaattacttacttttggactttaaataggaagctttttccttccccaaatggagggtaccgggccccccccccttagggtttttttaaggttggaagggaataccccctaatggccttaaaggtctcttccccagggttgggacacaccaaacaaccaaactcgagaatgttaactttggaactttttccaaaaccaaaagg

SEQ ID NO: 688440 - DNA, 400 bp, Homo sapiens
ggagtagttgtagacagcgttaatcaatctgagcagctagtgtctcagtatggttggcatacaggccgtatagtatatcacagcaagtgtcacccttggctcacactcaaagaagggcgatggctgtaaggatgctccctggagagaatacagagtgggtgctgttagactggtgttcaagctgacgatatagagtgaggtcgcactcagcaagaatatgggggtacgtattggaggttgcgttataatgctcatggtgtgatgtgtctatataaggagtagcatctacttgaagatgtttatcgagatagtgatgagatgtgttaacacattcatagcaacagaacaataccatacgacacagcagacgccattgtagagtgacggtcccaagtcagtg

SEQ ID NO: 688441 - DNA, 258 bp, Homo sapiens
cattcaggtaagggtcagctgcattgaattagcgaggagctggagtggtcctggtgcagcctgtccctaacacaatctacctccgagtcgtgactattacataccctagcttgaaaaggtgaacatgaagcacctgctacactgccctgttgccaccagcattgtcactgctctagctcctgtggcactgcacggacacgtggttgctacaagttagtacgcatatttggccttattagaggcactttcctattgtaa

SEQ ID NO: 688442 - DNA, 226 bp, Homo sapiens
gaaaatcacgtctataatctgttcctgggggtaccgctaggtagaagggctgagaagcgattcaaagtactagtagctgggcgagccaggttctgatgctgcgtctggagggcttggctcctgagcctccgctgctgcccttgcccagctcagtcgccctccaggtgcaaagagctggttgttagaatcgatggagccaggcttggtgatcttggtgagtcgttga

SEQ ID NO: 688443 - DNA, 375 bp, Homo sapiens
agacctggcttccaccccccagtcacccacttgggttatttgctggaagttatcgataggactgtgtggccaaccaagtgcttgtgagatcactgacactgcaaaaacaaagcaaactgctccgggtaccaggacttcctccaacctggcaagggtgtgcgctgaggcggggcttgcaggtgcaccgggccgtatgcttcagcccccccccaccccacccagaaggcaccaggcctcatcgccaggtgttcaagcacagcaatcccatttgggagttattttgatactgcgatgagtaagggtaagggcgcatggaatggggctaaggtgggagtgaacactggggtgaataaattttaaatcaattcaagtaaa

SEQ ID NO: 688444 - DNA, 351 bp, Homo sapiens
gatgagaaaaatagatgaagcactcgtgacagtgttcagatagcgtcacgattctgtcattggggagtcatgacgacgaattgatgtccggggctagattctgtgtagacggtgactttgaggatggaaaatcaccactcccgactgggttgtcctagctgtttccgggagctggatggcaaggcctgtgcgacagataatgcctgaggaaatgttcctgagtcacgctgaggagagccttcactcaggagttcatgctgagatgatcatgagttcatgcgacgtatattttcctttggaaacagaatgaagcagaggaaactcttaatacttaaaatcgttcttgattag

SEQ ID NO: 688445 - DNA, 151 bp, Homo sapiens
aaccagaacacggatccctgttatcaatcttgaagataggactaggctggtggcgggaagatgctccttaaaattaggatttagttgaatggcttaagctgcaccctacttacactgttgtatatgtccaagttatgtaccatagaatgca

SEQ ID NO: 688446 - DNA, 813 bp, Homo sapiens
gggatgcactgagtgctcctgcccagcaggcggcggcaagatcagctgacagttcatgctgtgcccggagctgcctgcccaactgcatcgaggctgtagtggtggctgacagcgtgcccacagtgcaggccagtgtgggctgcgtccacgcagggccacaagtacgccagcatggcacacactgttcaccgtgaccgccaatgcccagggcctagcacagcatgccactgactgccaggtggagaagtctcagtcttgccgtacgcaggctccccgggattggcccaccgaggacaactttctacacgaatggccggaggaaggagttgaccgccggaaggcgacgcacttaagcgaaggaatccgcctaacaagacatagtgacacaggggaaggggctggagacccgaagtacttgcgaaaacggaccagcacacaacaaggcaccccttgccacgagcgagtttgaaggggttcccccaagaggacagagagataggacagggatacccgaggaggcaaagaggcaggccacatgcggaagtgaccccccagaccgcacagccagtgcccatcccttggggcacacaagtgtgatgtgtcgacacacatttccaacgagcagccaacctatggcattacccaaaaccaaaattccccacagggggaacaaagccgcgcacaacgtgtggggcacccaaggacacgttggaaatcgcccattcacgccccaacgaagagaggacccccaccaaggacacaggaacgaagttacatagggcacctatgaacgcaaccctagaggagggatta

SEQ ID NO: 688447 - DNA, 213 bp, Homo sapiens
tgatcgatacaggccactgcgacataaagaggatcagagcttctttcccgtgaaacgcagtatagggcgccatatattagcctgggttaactggggggatctaaagctgtcaaataagacattctgtgagaggtaaacatcgaaacgggtaataagtaaaaccatcaagccaacaacagggtcgtgagataatccttgaagcttatagtactg

SEQ ID NO: 688448 - DNA, 107 bp, Homo sapiens
agtatccagaagaacccattgagtccctaagaatgacacacaggtgacagctgaaagaaggagggacacagaagatttagcagcatgattctctgggggaaaatgag

SEQ ID NO: 688449 - DNA, 420 bp, Homo sapiens
tgaagctgagtagcacaggctttgtaccaagggagaaggtaatttacgtcatccaaggtgccaaaggttatgggtttgctaccccattccgggtattaccccatcccctgctctgccaggagccaccctgaaggggtgccaaattatttatcactgtgctgttggagggtcccacatggaggtagagatgcagcaggctgggcctgaagtctaattcccagcccaggattctgcagttcccctggtgtggcctgtactagggaccacatgccagctctcctgctgagcttccctgaagtggtcatcatagcacttagtgtcccagacactgcttggtattttagtatcaacttatttaagtctcaaaattacatcaaccttatgaagtagaattaagtcaggcactgttctaagaacgtc

SEQ ID NO: 688450 - DNA, 428 bp, Homo sapiens
tctatagggtataacgatgaaagggatggcatttctacttaaaattaaagtttgctaattctataaatgagaaaaggctgaagactggatggcaaaatgtttttagcaggaaagaatttactctggtggcactcagacgtattagacatgttagactaatgtacaacaaattcagcaactgataggaacagaaagaacgtggagtaagataatgaactctttctctgttagtatttacacactaacatggacaaagctttgtgactatgaacttaacaaaatcatggtagatgcgcaggagaacagaactttgaatggttttattttggatttacttactgccattaacagagtctttgtgcctgcaacctagtggggtttgattttgttttaatccgatttgttggctgaggcagttttgttgttta

SEQ ID NO: 688451 - DNA, 438 bp, Homo sapiens
  misc_feature (6)..(6): n is a, c, g, or t
  misc_feature (31)..(31): n is a, c, g, or t
  misc_feature (103)..(103): n is a, c, g, or t
  misc_feature (114)..(114): n is a, c, g, or t
ccaaangagcttcaagcaacttgcccctaanccatatccctagcagacgggagaggccaggattcaaacccagaaattcttttctttttttgaaacggagtcntctcttcttcnttcccaggctggagtgcagtgcaaaggtcttcagataggtgcgtatcaggcctaaggaaggcaaggccaggagggctcgagtaaagagaacggggagatagaattaggagatgaggcgggagtggaaatggaacttctgaaaggccactggaggtgccttggctctagttcacaggattgaagtaaccttgagacttggttgatactaaaatgtcaaacagtgttcgggacactaagtggtattttagtatcaacttatttaagtctcaaaattacatcaaccttatgaagtagaattaagtcaggcactgttctaagaacgtc

SEQ ID NO: 688452 - DNA, 456 bp, Homo sapiens
atatcctagaattaggagtatccccttcttccagagttggttaggctctggtaaaactagacagatatgtacagagaacttggcaattagtaacaccttgaagtatagggccttgtataaggagaagagagagctctcagtagttagtacaaaaggttacttttcccctccctctagcatagggggatttttctccagtcctcacaatagagaacctggagagagtacaggagattaacctacttcaatagtatgagaggctaccctaaaatacaggttcccttagagtttttaaaattactcatgtatgtacacatagagccttcagcaattcatccatattagcttaaaacattcctatagatattagatatggcgaagggcttctgctccatgtaagctagtggttatctgaatccacctgtttgtctctgtagttatcagggcagcattgcc

SEQ ID NO: 688453 - DNA, 400 bp, Homo sapiens
  misc_feature (189)..(189): n is a, c, g, or t
  misc_feature (205)..(205): n is a, c, g, or t
gctctcgaggtccggtgttcctttgtctaggaaaataaacaaagcttcatagaccacaaagggaaattatctcggcaagtaaaattttagatggaaattatctactacaccacacttgggggaattgctatactcactctactgtttgcaatagggatacacacggtagcaccttctaactgaaatatnggacagagtttccatngctgtagtattttgcttaattattatccttagagcaggaataatagttactgacaaggaagcatgaaagttttactatcactgagtctgctaggactttttttgggtttaggggtgattaacacctctagtaaagtagagaaaaatctacaggtacttaaagatcaaatcaaaattattgacagacaaagggaaa

SEQ ID NO: 688454 - DNA, 173 bp, Homo sapiens
  misc_feature (10)..(10): n is a, c, g, or t
  misc_feature (34)..(34): n is a, c, g, or t
  misc_feature (123)..(123): n is a, c, g, or t
  misc_feature (135)..(135): n is a, c, g, or t
gccaagcgcntacgctcagcaggcggcaggcggncctgagcttcagggcagccagctccctcccggtctcgccttccctcgcggtcagatgaaagccttcagtcccgtgagtccgttagaagnaacagcctgtcngatcacagcctgggcatctcccggagcaaaacccctgt

SEQ ID NO: 688455 - DNA, 815 bp, Homo sapiens
cagttctttcgtcccgcatatccggtttccttcccgggttcctttccaacgccgcggcccgattcccggttgcccccttctcaaggttaaccttgttggcaattgaacatgttaccccaaccgccgcgggctgccccgctccggaaacattatgtgcgcgcatatttctggccccacgcccccccactatttggggggccccccgaatgtctccgggcgccccgagccaaaatatcccccccccccgtgggaggcctccctctttgttagcgccacgggtatactatctaccggcctctgtctcccccgtaattattcttgtcgccccgattcatttattccaatccccggcgtttccctcattaagaaaggcacttgggtggcaacttaagagaacacggttatgggtcccccccaaaaccgccccgtgtctgtgcgcggggtctgtcgccaccgtgagccgcagcgcgtgtaaaatttttggcgcaacgggagtgtcccccggttttaaaataaatttggaaagtgtctcccgaggttttaacaaccacatattgtcactccccctttaggatatttaaatcctactactcttcctgttctacacctgtatatactgggaaccacaatataatgtttataaaccctttccccctttttaatttttttttgggttttttggcgctccctgaattttatttctcttgtttgttccgataaaaaaagtaagagtgggatgtttataaatcctgccatttaattcctctgttatctcccaaaattaaaaaattaaaaaccggttgggttaaaaaaaa

SEQ ID NO: 688456 - DNA, 207 bp, Homo sapiens
ccgtaaccgtgcaatcggtcgcataatcacttgtcccttaattagggacctgtatgaatggctccatgagggtacagctgtctcttacttataaaccagatgaaattgacctgcccgatgaagaggcgggcatgacacagcaagacgagaagaccctatggagctttaatttattcaatgcaaacagtccggcgccggggatcctct

SEQ ID NO: 688457 - DNA, 230 bp, Homo sapiens
gctttggtccgccggactggcggtactcgagtgcgagagtcgcccttggagactcgatcttcccaactggacagtgggcccttcttcgcagccgcgcggcttccgtttcaacgggaaccttccgcgaagggaagggcggcccaagctttgagccgcggaaaccccgcttgcttttaaggggggacgcggggctgcgtctcacatgtgagagcagagagagcgctctcctc

SEQ ID NO: 688458 - DNA, 269 bp, Homo sapiens
  misc_feature (36)..(36): n is a, c, g, or t
aattgtgtggtgttatgcccactttgtttctcaacnatagctttaaaattcttaaaaatcgtaaacacttcagatttttgcttcatgaagtaaatccaagtcatacgagtatagtcatcaataaaaaaatgaaatacttattgttggcatgagttggattctccataacaccacacacatcggtatgaataagctccaatttatcctttgcacgtcaagctccactttttgaaaaaaattctcgatgatgctttcataacaccaccatt

SEQ ID NO: 688459 - DNA, 758 bp, Homo sapiens
taggcttgcctcactggccacctcccaacccaagagcccagccccatggtccccgccgccggcgcgctgctgtgtggtcctgctgctgaatctgggtccccgtggcggcgtgggtgcccaaggccatgacccagcactccgacctgaaatgcagctggtgtcatgtttactgctttgtggggccccatgaccctgcagctacctggagcacctgcccggactggtcttcccctgtgaatgacaaggataatcctagaggacgagaatgatgccatggcctgacgccgaccgcctggctggaccagctggctgcctgagctcttgtgccgccacgtgtgtccacactggctttagccgtgtcgtcctgccattaactgatggagtgatgggtcttcagaacgagggggttgttgattaatgccggaaaggatatgcaccagcagatgatgcttcccatgtgcgactcccaatacagcggggagttccagcacgaggtttatagccaatagtcaggagcctgaaatcagtgctagacttcaagcctgccgcgctcccccgggaggtctactgagtgaccttgccaggtctcgcagtgccacccttgatgccaggttggtccacacctgggtctaccccgagccggtggcgtcacctcaccacagcatgcatctctgaggatctgggctggtctgatcctgggccgtgactgccatgagtccggacatagcgaccggtggagtgaggtatcgggctcaatg

SEQ ID NO: 688460 - DNA, 278 bp, Homo sapiens
gataccttctgggcttctcttgctatggctcgtgggggtgctctcgatggtccccgtgttttggtgggctgggtgggagagggcgcttggacggtgtgcattgtcgggaggttgtgagtcacggggttgcctccagggttgatcccttccatggctgcaggaagtcttcttggagccacacccacgatgccggggggatatctgtatgtggcaccattgagctcaggatgaatggctggcgggtcaataactgaccaaggcgctgtaggtgggttacc

SEQ ID NO: 688461 - DNA, 165 bp, Homo sapiens
  misc_feature (117)..(117): n is a, c, g, or t
agcgaggctgttttgcaggcatcccggcaggcatggccaggtgtggtggggcagccttccgctcctcccaccgcagtttcttgtcagtgtcatccattcctcccatggtggctgcantggtcacgcagctcgcaattcggtcactccatggtccatcagctgttt

SEQ ID NO: 688462 - DNA, 207 bp, Homo sapiens
gtaccaggcatctcccagtgctcaagatactcaatccattgcctccgatggaaccccacaggaggagaaggaaaaggaacaaagaccacctgagttacccctgctcagcgagcagatgaatttgggcgagctgtgggacatgcttggggagtgtctacaggaactagaggaatcccatgaccagcatgcggtgctagtgctacagcc

SEQ ID NO: 688463 - DNA, 1203 bp, Homo sapiens
cctttacgattcagcaccatggctggaagacatggagaccaaaatcaatgaactacaatgacctgaccctttttgacatgccgcttccccaaacagaaccagactagaaactgctggcagaactacctggacttccaccgactgctcagaatggcaatgaccgctacagcgaggcgatatctctgtgtgcgaatggctaccagcgtgtgtaccagatccctactgaccccacatacctagggtacacagactggtgcatgcagccaactgcggcctgaagcgccacgctaaccctgtgtgcacagcatcctagacactaggctgccatctccacttatccatctagctacctccgatcacgtatcctcacccagcggactagcgttgcaagctgcgagcgcaccctgggctacccctaggtgattcacccaaacgccacatgggatcccctgaacatccactgcacttatacctaggcgtcaagtagagcaacacgttacaaatagggcacaacccacggcatgacaaacacacacacaaccaaccaccacaaccccaccaccgccgcgcacaccagcgcgcccgggaaggccgcccccacccacacacagccagcccaaacacgcaaccacacacggccacacacacacgcgcccacagatgagctccgtagtcggatctcataagtctagaaacaacccactgcgccaacgtctaacacccgacggaaacagaccggacacgactagctcctctactcacgcttcatgccccttctgcctaccctctcgccaagcaaacaatactgataagtatcgaacactgactgacttaatagacatatatctcggctactctccgttactagcaacgatgaccgaccaccgccccgattccatcaacctagtcgcacgctgcgatctgcgctcatcatctcccacagatacgcatccagtcgctatctaaatcacaactagatcgatgtcctagcgcaccagtagatccagcagcgctgcataccactgagcataccactacaccccgcgcgccacgctacgacgtgcgatcactcagtctggtactcagagtacgcgacaccaccagtatggccggagcccgaacatacggacgagcccccgccgaccactcaatatctcatttcagatcacacgacacacatgacatatcgtacgagacctcctt

SEQ ID NO: 688464 - DNA, 446 bp, Homo sapiens
cgttctgcaatagtcccctattattatctaaacagagcatggtcttatataccactgtctttcccaagactgttacttttttttatttgggaattgtgctctcggcttcggtccctggcaagtggcacgtgttctatttttctttcaaaaattgatggagaaacaacctctctgaaatctattcttctgattgctgccttgaaagcaaaagtaatcatcgccttgtctgaaatccgggagtcatcattcttgtattcatcactttgatcactgatttccacttggctttggtgcatttccatccacccagggagaggaacctcatttcataattttggtatcctgatacctaggggggagcttaaaagtggaaggggaacttattaaaccccttttgggaaggaggaaataacaccaatagattcctagggtgcatatagtaatga

SEQ ID NO: 688465 - DNA, 310 bp, Homo sapiens
taaatcgagctcggtaccatataactctcccccagtgggaaatgttacaggacaatgacctgtttttttggggtttttttgagatggagtctcactctgtcgcccaggctggatacagtagcgctgtagtgagctcactgcaaccttcacctcctgggtccgagtaattctcctgcctcagcctcccgagtagccaggactacaggcacatgccaccacacctggctaacctttgtatttctagcagagatgaggtttcaccacattgaccaggctggtcttaaactcctgacctcaagtgatcagcccg

SEQ ID NO: 688466 - DNA, 752 bp, Homo sapiens
cgtacgccctcaggggcccataccacgatcatgacctctcccccgatacctgggttcccttcttactgtccggccagttgtacactgtccccatatgggccttcagaaccttgccacaaggttttcgcccattcataaggggggggaacacctctgaacgttgttattctgccccgaaccacaccaggcggaccaacatttctcctcttccgagtttatcacgagccccgccctggtgtatgtgggggaaccgggctttaacacagggggtgccccacccacttggggaaaaaatgttgtacgcctcgccgccactcctgtggcgcgcccaccagctggcgcccctggcccacaaaggagcccccccccttggggagccctctctgcgacccccttacccggtgtagcactgttgcagcccgcccccaagaattgggggggccaaccgccccacactgcgcgcagcattgtgggccccccgcatacttggcttgcgcgggatattctttctttaacaacgccccacctcctcgggcagcccttgagttattgaatgtctatgcctcgggcttaatttccccctcaaaccctcgtggggtacattccctcggtgcgcaccaaggcaccgggcactcaaccatcgttggggggtttccgcctcaccccctctttctattaaagggccccaaaaacccccaaatttttggtttggccccccccctcaaaaaaaaaaattgggcaacccacaaaaa

SEQ ID NO: 688467 - DNA, 1565 bp, Homo sapiens
gctgtttattttttatgcggcggacatatatattcttgtgtgggggagaatatgacgccctcgctctgttttggtgtggtccccaccccctcggggggagcctccctccccatggggggtgtgtgccccccgtcaataattgtggtggccaacctgtgcgtggtagaatgaggggtttttctccccaccacagagggggtttttccgtgtcggtggggttgttttggtaggactagttggtaaaaggtgattgattggcgctcggcagtagttttgttcgctccaccagaggaatataggaaggttggagaaactatgtttcggccccaccatctgttttgagagagagacaacatatgttcccacaagagaaggcgtggtagattttaatatccgtcgaagaaaagaatgatggggggtgggttcccaccagggggggtgtataattataactatgtctttcggcggcccccggcgggtggaactttaataacaccggtgttgcccccccatcgggggccctactatcgtgggagatttcttcgtctagtaatccgcccctcgtgttgtacgccccacgacaaatattgggtgtggtgagtggttcctcccacaacgtggggggcgtcccactaccacaagcataatagtgggtgcgcgcactaggacggcgaccaacaagtggagtaaggtgttgatgaagaagcccgcgtccaccacccacgaagggtgaagagtgtgtgctcctacaacaagaagacttctacttctccacgagaggtgtggagtgaagcacgcttgtggggcggtgttctgctggtctactgtgttgttctctctggtgctgttgtgtggggtggtgttgtgttactgctggagataatattatacctcgcgctacgcacactattcactacaggagtactctccggagatagacgcgacgcttctgctatagaattgtcgtctctacacccactccacacacacagtggtctctcccgccccacaatattctccggcgagtatagagtatgaagattgtagtattgttgagatatagtcactagttggagactcccgcagcagagagaggatgctcacagacccacacatagtgagcactctgtgtgatattagagaatagagtgggggtcccacacatataaaattgtggagatgtttccacagcagcacacgcgcacattggtgagataatgcagcacacatatagagaaaaggggctttgctcgcacacatgtctatatttatattcctctctctccacatcgagagggtgtcgtgtcgctgtatagagaaaaggtatataaatagtgctgtaagaaagagccccagatttgtaattggggaagagctctcactggagactcttcactggtgtaagagccacctaggtttctggaaaagacccctcggggaacgcagaacaccgcggggctaaaattgtaaacggagactgtatggatatgtgaccccccggtcccagaaatctgttttaaggttccagacttccaatagatggcccaattaaaagtgctatttgg

SEQ ID NO: 688468 - DNA, 805 bp, Homo sapiens
  misc_feature (3)..(3): n is a, c, g, or t
  misc_feature (72)..(72): n is a, c, g, or t
  misc_feature (74)..(74): n is a, c, g, or t
  misc_feature (91)..(91): n is a, c, g, or t
  misc_feature (94)..(94): n is a, c, g, or t
  misc_feature (126)..(126): n is a, c, g, or t
  misc_feature (148)..(148): n is a, c, g, or t
  misc_feature (154)..(154): n is a, c, g, or t
  misc_feature (156)..(156): n is a, c, g, or t
  misc_feature (185)..(185): n is a, c, g, or t
  misc_feature (189)..(189): n is a, c, g, or t
  misc_feature (233)..(233): n is a, c, g, or t
  misc_feature (236)..(236): n is a, c, g, or t
  misc_feature (244)..(244): n is a, c, g, or t
  misc_feature (266)..(266): n is a, c, g, or t
  misc_feature (272)..(272): n is a, c, g, or t
  misc_feature (281)..(281): n is a, c, g, or t
  misc_feature (295)..(295): n is a, c, g, or t
  misc_feature (299)..(299): n is a, c, g, or t
  misc_feature (304)..(304): n is a, c, g, or t
  misc_feature (307)..(307): n is a, c, g, or t
  misc_feature (312)..(312): n is a, c, g, or t
  misc_feature (314)..(314): n is a, c, g, or t
  misc_feature (317)..(317): n is a, c, g, or t
  misc_feature (338)..(338): n is a, c, g, or t
  misc_feature (341)..(341): n is a, c, g, or t
  misc_feature (349)..(349): n is a, c, g, or t
  misc_feature (352)..(352): n is a, c, g, or t
  misc_feature (364)..(365): n is a, c, g, or t
  misc_feature (387)..(387): n is a, c, g, or t
  misc_feature (425)..(425): n is a, c, g, or t
  misc_feature (429)..(430): n is a, c, g, or t
  misc_feature (454)..(454): n is a, c, g, or t
  misc_feature (458)..(458): n is a, c, g, or t
  misc_feature (460)..(460): n is a, c, g, or t
  misc_feature (480)..(480): n is a, c, g, or t
  misc_feature (498)..(498): n is a, c, g, or t
  misc_feature (530)..(530): n is a, c, g, or t
  misc_feature (651)..(651): n is a, c, g, or t
  misc_feature (724)..(724): n is a, c, g, or t
  misc_feature (792)..(792): n is a, c, g, or t
gtnttattacagagaaagaaaaaacctatttcattggtatgaccatatttaatcaatgataatttactggtnanattcaaattattaaatnccngcatggcttctcatgcatggcttatataaatnaacaccttaaacagtataaacntttggnanactttactttccttggttttttataagtntagnggtctccaacccacaatgtcttagggaatagtttaacaataggnaancccttaanaccatctatctctatgtgaacncagacntatacatgngggtgggggttggngggngaatnganggggntngcnttcctaggggggaacatttcnggntttaatanatngattagcttttnnaatcagtcaagagagtgaagancttttaaataaatccccttattcattcattgtgctgcnatcnngcacaataaaatgggggtgatatntttnangtgttgttaatctgcgactntgtcttcttgggactaanatataatccaacttttaaatgcaaaatgagtnttatttgctagtcctttttattctcaaatatgttaaaagcacatgattatattgtcttatgttgtttcagttatgatcctcttctgaaatcaggaatacgaccccaagaaatgagtgagtnatatttgcttttatatcttatgcattgcaagaattcagtctcacaaacagttgaaccataaattaaaaatggnagactcacatttgaatagcagctagttatatataaaaaaatccaaattttttaaaaagtgacttgtantaataaaaactgg

SEQ ID NO: 688469 - DNA, 1412 bp, Homo sapiens
  misc_feature (558)..(558): n is a, c, g, or t
  misc_feature (1310)..(1310): n is a, c, g, or t
  misc_feature (1312)..(1312): n is a, c, g, or t
  misc_feature (1357)..(1357): n is a, c, g, or t
agcggacttccaagcatcgcgcgaccgcgaaggcagctgagcaggaggtcccgggacgctacttggaacccgaggctgtcaccagtgcccgcgccctgatcactcgctttccaccagggcgtcataggtctgagattcggtgagccctcctgccaaggcatgctgcaggccccaagcgtccctcgcttgaacgactctagaagagccgctcagcgtccgactgcatgggtcggacgctccactcctgaccctgaggtgcgcgagggtcccctcgcgtgagacagtggttcggtgcgtattcatgcctgtcgcatggcggacgacgtgccagccagaccgagagccgtggggagcgacataggagccagccgtcgtccactagcagtgtggaacgagcatcgtgtctgcaggcagtctatccctgtcatgaatcctgtccaaccattgcatctgagcatgagtagcctgtgtccgaaccttatgaaatagacccccgtttgattggcaatcgaacatccaatgcctacttcgcaacgcgactggcgtactggcatcccnttgggtaccgagccctccattgcatgaccccttcgcgggtcccttcccaccccacgttgtggcacttggacggaagaagctcaaactatgacaccgccccccattttgacttcgcccgaggcctatgccttctcttgctttgggactgggaattgggaaggactccctttgcgcccttcttatagaggcatttcggccgcccttggccccgcacgcttctacacacgcagaccccgtacggacgtgtcctacaacgctgctgggggcccgcagaccaacggctacgaggaacttcgacactaccccgctttctgggggcctccccccttttccctcgtcccacgaggacccttgcgggtcttttcgcacctatatacacccctgctccggttcccccatgccacaacaggcgccaagctcccgccggcgaacgtgacttaaagacgcggagaccccttatcggctccggtgtccccacggtacagttaatttccccttttacgccgtgtttgaaaccactttattacgccccttggagacgcattccgcgccttatggactcgccgcgcgcacactggatacggccgtccgccctggacaccgagccctagctctggcgtacgggctttcgcttacgtcccgctttctggcttggcaccccgtctccaaccttgtcgcctctacgtagagcgccgcattcgagcccctgctctggcgctgcgcttgagcttattctaggtttccgtcttganangacagtggcatcggttcgctttaacgctttatgtgccacccctcnaccactgttttacactatccgacaaatgcgcagtcgcgcgtataacttacgcgcg

SEQ ID NO: 688470 - DNA, 925 bp, Homo sapiens
  misc_feature (925)..(925): n is a, c, g, or t
cttcactatactactaacagaccgatacctcaatacctccttcttcgacccctccgtgaggaggaaaccccattctagtatccaatcatcctattactcgattatttacggtcaccctgtagtttctattcttatccgtacgcaggatttcggaaataatctcccatattgtaacttgactatcgtccggaaagaatggaaccatttggatacataggtatggtctgacgcttatgatatcaattggtttgcctagggtttatcgtgtgtagcgcaccatatgtttacacgtagtgatatatacgttgagacgatgagcatatttcacctcacgctaccatacctcatcagctatccccagcgctggtgtcaaaggtatttaagctgactcgtctgactccacgtgaggccaattcttgacaatgatctgggttgacattgcctctgatgccttaggattcatcctttacttgttcaccgtaggatgtcctgactggcattgtatcagtcaaacactctatcgctagtagatcgtgctatacgaagtgtactaggttgtagcctccacttgtgcgcactagttgttcctaatcatgacggagcttgtatttgccatcataggaggtcttcacttacatctgatttccccctattctcaggcttcgccctagaggaaatctttcgccactcatccatttcaggtatcgatattcatcggtgtcaaatctaagatttcttacccaccaaaatttctcggcttatccggaaattgccccgatcgtttactcgggaattacccgatgcatacccacatgaaaaatcctatcaatctgtaggctcatttcctttctctaacaagcagtattttcatagatttcctggattggagaagcttcgtttcgaccgaaaagtctaatatcgagan

SEQ ID NO: 688471 - DNA, 358 bp, Homo sapiens
  misc_feature (39)..(40): n is a, c, g, or t
  misc_feature (238)..(239): n is a, c, g, or t
ggcacgaggggaggacgatgagatcatgcagggattcanntcagctttcaggcccctgcccaggcactatggtacttgctggacttgaaacagatggaagagcgctgccgtttctagtgacctgtaaacccaacagctcacctccgcctccaggaagaccagactcccacccttccacacctccagagcagtgggacttcctcctgccctttcaaagaataaccacagctcagaatgnntaacgtggtcatctgtgtcgccatccccttgcctgctcacacctgcaccacggccatggggaggtcgctcctgggggcagagtctctggcagaggttattaataaacccttggagcatg

SEQ ID NO: 688472 - DNA, 271 bp, Homo sapiens
gcatttggggctgaccacaggcatctacttttggggaagcataatttaaaacaaatttattttcccaacacagaaaatctgtccacaaaagtagtagataaataaaagttttattattgaataaacattaaaccagaatacaatgcacatcacaggcagtccactaagacactgcaaagacggaaaacacatctcacccttttatatagccaagcaaatatcacccattgcatgcttgttttcaagataaacaataactagccaccactgc

SEQ ID NO: 688473 - DNA, 1070 bp, Homo sapiens
  misc_feature (1070)..(1070): n is a, c, g, or t
tctcctcctcctcttgctcctccagctcctgctccttcgccgggatgccgccgccgagtcctgcgccagtgccgaggaagcctcgctggccccatcccgtaacccgccgggcatcggagggcagcgcgccggaggccaaggttgccccgaacggtccggggcgaaaggacgtcgcgggctgccaagaaccacctggtcaggagatgggccgaccggccaaaactttgtgaaagccgagccagacggccccgtcatgtcggcggcagacaacacagagaagtgaccctgtggacaccgggcttcatcgatgccacttggggcagagttggcaccctggggactggggggcggccgatggcggtgccacaacttgcctgccccaggaccaacgcccaaagggagcccttcgtgaaaaccccacaactcgagactccgcgccagggtggctgggtgacacagaaccgcgtgtaaaaagcgatggtgttcccctatcggggtacgggcgtgggaccaacgcccattcaaggcaagatgacacgattgaaccggagggtaccacccaaagaaatgccccgattgctgcggtcacactcgcacgggcagctcccgaagagtcctctgatgggccttacggcctgggggtcacaggagctaccagtccctgctgacagggtcgcgtctatcgagggcccggatggtaccgcgtcggctggtccactttcgttgcacagtttgggaccagctcacctttccagggcaggggtgtgaaactatgcgtggtcacctggggtgaacttgacatcacatgccttgacaacctcgcttggatggggatcccaaaacgtgtgttatgaccgcgactgcctccattgggaccttggtccaacaacaacaaaccctggtcggaaaagcgatggattgaccagaggccccccggagagtgatatggcgaccagttcacgcgcccgcagtccctccggggctgcacataccacagagaatacgcgtttgtacagcacgaaagagggcttggtagagaaccccgcttgttatgacgcggctgcagcttn

SEQ ID NO: 688474 - DNA, 127 bp, Homo sapiens
  misc_feature (7)..(7): n is a, c, g, or t
accctgngtttatctcgggaacacctcgtgacgattctgtctgccgctggtctcacgccccttgacgacgacctgtggcatcagttcagccaccgcgtcgattcctcgatacaccgcgacctcatcg

SEQ ID NO: 688475 - DNA, 615 bp, Homo sapiens
ggtatctcactcccgccacagttgggatcggtctctgctgtttacgtcctccacctcgggagcccccggtgactgtcacagcctctttggcctgtgatctgcaggttctgggagacgcacagtaagatgccaggacatcctggaaggctgggaaaagatggagtttcactcttgttgcccaggcctggagtgcattatcccaatctcggttactacaactccgcctcccaggttcaagtgattcccctacctcagcctcctgagtagctgggattacaagcacctgccaacaacccggctaactttttgtacttctccagtacgagatggggtcccatcatgttggccaggctgtctcgaactcctgacctcaggcgatccacccagcttcccaaagtgccgggattacacggtgtgagccaccacgcccggctctcaactatcaactaatttttattctctagtagacacgttggtggtgaagccaaatcacgatggtcgtcctcgatcgagaaaaaggcagacacttgattttccgtggacttctcggcacactacacacttttttccccaacgcaaccaaccaccaccactatcaacccacaacaacaactc

SEQ ID NO: 688476 - DNA, 681 bp, Homo sapiens
gagcggctgggggatactggactaaacagcccctcccccccctttttttttctgaggcggagtctcagtctgtccaggctggagtgcattggcgcaatctcctctcactgcaacctctgccgcccaggttcaagcgattttcttgcctcagcctcccaagtagctggtattacaggcgcctgccactgtgcccggctaatttttgtatttttagtagagacggggtttcatcatcttggccaggctggtcttgaactcctgacgtggtgatccacctcggccgcctaaagtgctgggattacaggtgtgagccactgtgcctggcctctctctttattgggttttaaactaagttatattatgaatatacgaatggtttatcaaaatggttaccatgtgccaagccctggggatgtttggtatactagaaagggaaaagaataatgtgttactggcttccttgagatcctaatatttaaaagtactagccaaaatggtaaatgataattaaatgggttgattgggaccctcagtagtacatgagtatggtaataatatggggagttttttacaacctgcagtgagagtagcatgttggtctccaagagacagttctcattttgaagcacatgtggtaccagcctctggctgaaagcacgggttccccgtgttgaagcctgg

SEQ ID NO: 688477 - DNA, 281 bp, Homo sapiens
tttcatttcccttccctaaagcagggcggctgtgaaaagttgttaaaccaccatgctaatgtaaatgtccccccccccctttaaactttccctgttcagagcatcagatgaagacttcccttgggttttaaaggggctttctgatttttggtagccccttgaaaaagggagtttgaaagttgttgtatactgttaacgattgtctgcccctgtcccccccgaaaacccctgattgtttatggaaagtatctttaataaagctggaacccgtttggcttgga

SEQ ID NO: 688478 - DNA, 329 bp, Homo sapiens
ctgtatcagcatagcctttctgtatttaagaaacttaagcagccgggcatggtggctcacgcctgtaatcccagcactttgggaggccgaggcggatcataaggtcaggagatcaagaccatcctggctaacacggtgaaaccccgtctctactaaaagtacaaaaaattagctgggtgtggtggtgggcgcctgtagtcccagctactcgggaggctgaggcaggagaatcgcttgaacctgagaggcggaggttgcagtgagccaaaattgcaccactgcacactgcactccatcctgggcgacagtctgagactctgtctcaaaaa

SEQ ID NO: 688479 - DNA, 345 bp, Homo sapiens
  misc_feature (1)..(1): n is a, c, g, or t
natattatctcatagaatatcacacttgctgatgtcagactgggaataagagctgaatagtgcttatctggcaagttgcaggggaaggtgcccaaaagcgtatgaatgctattctctaacccagaaatgttaatcttctcacaaccatgcattctcggccagtctaccggttccaattttatagctgaatatcgaatggaaagcacaaggatatctcctttactgctttgcctcttgcccaggtctttcagcaaatacatgtactgaaaggaagaagaggaggtctgggacacagcttccacagtgttatttatctcatccactctatttctgagtggcctttcc

SEQ ID NO: 688480 - DNA, 282 bp, Homo sapiens
aacaatgtcatttgatctggacatttaactggctattagtaacataatggtgttgaaacagaacgtgatgttaagtctcaactctcttcttagagtctcacccatcttatattttggtaagctaataatggcaacagttaacatttttttgcataaagcttctcatgtatgttccagaagcataatttcttacatttaaatgataatattgacgatctattatgctgttatttaaataaaatctttatgtaaatcatacatttgtgcataatgttagagata

SEQ ID NO: 688481 - DNA, 421 bp, Homo sapiens
acgtgttgatttgctgatgacactgactgtgaaatcaaacagaatgcctgaatgcatgacatacttcctattctacaccctagtatgctcccttcccctactcctcgaactaatttacactcacaacaccctaggatcactaaacatactaatacacactctcactgaccaagaactctctcactcctgagcccacaacttcatatgactagcttacacaatagctcagatagtaaagatcacctcttacacggactccacttctgcctccctacagcccctgtctcaacacccaattgatgggtcaatagtacttgccgcagtacacttgaaacacgtcggcaatggtctcatacgcctacccctcattctcaaccccctgctaaaacacctagactcacccttccttgtactatcccaa

SEQ ID NO: 688482 - DNA, 279 bp, Homo sapiens
tgtgagtgagtattagcagagtcgagagagaaatgatgggcagttcgcctacaccggggcctctgcggggtcagtggggagctgctgtatgtcttggctgcctgaacggtcaaggtgacataggcttcatagccgaagaggcacgtagcgattaggcccagtgcccccttgggacgatttgtagagtaggtttcctactctcaagacggacccacaattgtaggtgatccaggtacgagtcattgcctgctatacagggtactggaaagaaaaatcact

SEQ ID NO: 688483 - DNA, 609 bp, Homo sapiens
ggcgtcgccgatacaacagccgactcggtcattgcgcaggcttcccggcagctttatcggtttcttccttggcctatggccaacttcaccggcccaaccattgatggtcttgtccagatcgttgccattgcgctgcatcgcgtcggagaactgatcacggaacagcttgccgatgttgataccgttgatgatcacgttacgcagtttccactcaccgttgatcttcgtcagggtgtaggacacagggtacacggcgccattgctgccggagactttcattccgacttcggcacggtcgcccgactcgtccttgggcgcatcaacgataatgccctggttgttgtattccagcagagcgttaccgtagaactggaacagccccttcttgaagttttcctggaacgtctgcatttgcgcaggcgtcgctttgcgcgaatatttgaccgtcatgctgcttttggagatgccttcagcatcgaccacagggccaacgatcgtgttgagcgcgttatcgaacttggaaggtcttgcttgtactgtactttattagccttgaggtcagccagcattttgctggtggtgtcctgacaaatcgtgggcagaactgca

SEQ ID NO: 688484 - DNA, 1012 bp, Homo sapiens
cagcgcttttgggcaatggaagattcagctgtcgaggagcctgtccctgaagttgtaccagtacaattagaaaccgcaaaaagtccaattagccgattagagaagttatcagactgcctgtttgagcctgaagggaatgtctgctggttgacggacagtaccgtggaggaacacgtgctggcgctggtggtagactacgtcagctgactgaagctcggggacagagatcaacacggttccctccgcagggcaggcaaagatgggggccttgtcgtgacagaaggaaacgtgaggatcaggcgtaggccgtgcctcgtagcaggcgtggctcaatacgggcgacgccggacgctgatgaggaggatgacccatccggtggacttgagctcggtctccagtgcgctactcgcaggcttcactcatcgctggtcttcaagagacgagcagaagaaacaagatgtcacgctttctctccagtgccactaggtgcgcttctcaatgcagaataattcagtatttggcgacttgaagtcggacgagatggagctgtctctactcagcctacggaagatcaagactggcgctgcagtgtgcgctgagcctgcacgcgcagtttgtgaaggatgctgtgagctacagaagaaaagtggtggtacgagctcctggacccagatcgacaggcgggggacccctcttggaggctcttctcactggaaccgacagaaattggtcccaatgacggcgtcagatgaagcaatggttgggaaagcctagagaaggagcacccttggtctggagtcaagtggatgaagcctattcgaatttcgtggattgccggctcgtcccgggagggaaaagctcgccgcactggcatacctgtttggcggagctgggggcctccaacagggccggcgcactacatctccttccctagacccgtgcctttttggaagccccaatttctacgcgcacacactatttagggaaaccaccgttcgcatgcatgctgtcg

SEQ ID NO: 688485 - DNA, 252 bp, Homo sapiens
  misc_feature (33)..(33): n is a, c, g, or t
  misc_feature (52)..(52): n is a, c, g, or t
  misc_feature (125)..(125): n is a, c, g, or t
  misc_feature (205)..(205): n is a, c, g, or t
cttaggggataatttaggttttttgtgtttctnttttaaatttaaatttttntttttttgaggcagtatcactctgtctctcaggctggagtgcaatggcacaatcaactcactgcagccttganttcctgggcacaagtgatcctcccaattcagcttctcaagtagctaggactacaggtgtgcaccaccatgcctggctganttttttttttaagagatggactcttgctgtgctgtccaggctcgtgt

SEQ ID NO: 688486 - DNA, 233 bp, Homo sapiens
gccccttgagccctcgtcgagtcgtccctgcgcttctccgcacgcgcgcgcttcgaggcgtcacgagaagaggatcgtcgattcgctatcagaactccatctttcgacctttgtgatgcaagtaaggtgatgactgcttcctgctgcactgaggatatatccatataaaatcaacagagaaaggcaaggaccttactactggtccaaggatcgctgactaattacgataagaa

SEQ ID NO: 688487 - DNA, 340 bp, Homo sapiens
  misc_feature (159)..(159): n is a, c, g, or t
tttaaacttgaaagtgtacgagttgctttgttacgatgaactagatgtgtcgcggaggatttgatgcttttctctcagcataggtatgcttactatgaccttccaagtttgacttgtataacatcactgtcaaactttgtcaccctaacttcgtatttnttgatacgcactttgcaggatgacctcagggctatgtggattgagtaatgggattgaatcaatgtatcaatatcttcatagcttggtaacgtgggctcaatttccatgggtctctgaagtatcacacactggggataccagatagcacaatactctctgagcacattgcgcctctgatgtg

SEQ ID NO: 688488 - DNA, 1296 bp, Homo sapiens
tttggtgagtttttttttattttttatttgggaaagcaaggatccacacttacccctcccggtcccttaatcccttttctaaaaaggggggaaaactccggatggatttgagggatgggtctggtgtcagctgtgtttttatggcacacctaaatcctgattataggctttacatttctccgcaaagcctttatttgggcagttaagccaattgtgttttccagaaagttagttatttctcctctttcttccctttctttcctcccttttccccgtctgaccccaaacgttatggtccaaacatgactggacagcagctttggtttcttgaccctgtatttatgacagtctgctaatattgacagaaggtgcagtatggggtaatagtcgtgatttcgctaatcaatcatattaacgccggaaacaaaaatgactggtcctggtggtactggagtcttaagaaaaagtgcccatagtttagtgacaattcccaaaggctttagtaccaccggtatttcaaaaggggggacccaaattcccggaagaaccaagctctgaacagactacgtgctcagcttagaacgacaagagaatctctagctgaccaagtttggacttccaagagtgtaatatggccttggtatcccgggcgaagacagacacagtcccgcacttctggaagtgtcggaggtaatcccagtccatgacacaactattttgaagaaaatatcctgaacaggtgtgcgagattccagcttattccttggaaaaaggatccctcttagaagactttaaccaacacgggcgtcgtgtgtcacaggtcccagtgcacccccccgaaatattcaggccatattgacgaagggagtgtacactggcggttgtgaacccacgagaagacgggattcacacatcttgggggccgccggagacatgaattttggaacacatctgtcctgtgcccagtggtttacaaggggggcacagaaaacttcttgtagaaacccctataggggccgcgtgccagccccacactggtgaggttaaacagacggggggacgatcataaaacaaaacgcttcgggactgtcgatctgtggccgcgccgagcgcaacaaagggcggcgccgtggaacacacccaccaaccagacagggtgtctccactgtgcagaaaaagccatgcagccaaccccaacaagagaagccgcacaaccaaaagataccgaaagcgcgcaacacgaccaaacaagagcacccccaccgggtgtagaccaacaagaagaccgacgctgat

SEQ ID NO: 688489 - DNA, 404 bp, Homo sapiens
attcgcggccgcgtcgaccccagcacagtggcatgcacctgtagtgccagcttcttgggaggctgaggccagcctgcctgggcaacatagcaagacctcacctctaaaaaaaaaaaaatctggccaggcacggtggctcacgtctgtaatccaacactttgggaggctgatgggggtggatcacttgaggtcaggagttagagacctgcctggctaacgtggtaaaaacctgactctactaaaagaaaaaaaatagctgggtgtggtagtgcatccctgtaatcccagctacttaggaggctgaggcgggagaatcactggaacctgggaggtggaggttgcaatgagctgatatcctgccactgactacattctaggagaaagagcaaggctccattttaaaa

SEQ ID NO: 688490 - DNA, 290 bp, Homo sapiens
  misc_feature (100)..(101): n is a, c, g, or t
  misc_feature (107)..(107): n is a, c, g, or t
  misc_feature (115)..(115): n is a, c, g, or t
  misc_feature (119)..(119): n is a, c, g, or t
agcggatcggcagctccagttcagctcgctcggcgcacccacgcctcgctgccccgcttcctgccctcaacctgggcatgcgcccagaagctgcgtgtannaaaccntgtgggantccnctcgaggtcctactacgtgatcactggacagtacacggactggagcgccactcagagcccagcgcatgctgtccgcgcttacggctgacgactgcagtgctgactgctaattgctacggaactgggactgctgggcccaaggagggtgctggatccccagaagaggggccc

SEQ ID NO: 688491 - DNA, 498 bp, Homo sapiens
tagaggacctcgatggcgacatttcaagtcatttttctttactttgattttttgaagtttgaatatcacatgcctggtatagtttttgtttggtttgggtttggtacttatcctggtttgtgttctctgaatttcctgactctgtggtttaaaatctgacattaattttgggaaattctcagtcatttttgcttcaaatattgcttcttttcctttctctttttcttcttttactgctgatattctcgttacacatatgttacatcttttgtagttatcacacagttcttatttgtttctgtttgttttcattctcttccttttctctgttttttggttttgaaagtttgcattgtcatatcctcaagctcagagattcttttctcagccatgtccagtctactaatgagcccaccgaaggtagtcttcaatttgttataagcgttttcaatctctagcatttctttttaattcttagaatttccgttctctgcttac

SEQ ID NO: 688492 - DNA, 309 bp, Homo sapiens
aggtagataagatgagaagataatatgttatgaaggaaaataaagtctatgttcggcgagcaacctgacagagacaaatagaggtttgccacaagtgggtacaatggaagattcggtccctacttggaaatgaaaactcagaaattaggcagattgagtgtgcagtaaacataaataagtaacagtctggtgctggcaagatcaagagggagttcagcaacactgagaatctgattaatgcactgaataagttggattaagtgccctcagaaagttaataagcaatagcaaaagtagtttttttttttt

SEQ ID NO: 688493 - DNA, 160 bp, Homo sapiens
cgctgtggccggcttcttcaaattttccggttttttccttcggctaacctccggagggttttggttttctctcccatatagtgcttctctgcaattgatatctccgagctttcacgggccaccctgagagggaaaaaaatgggcacactctcccttacag

SEQ ID NO: 688494 - DNA, 156 bp, Homo sapiens
  misc_feature (77)..(77): n is a, c, g, or t
gagatttgaaattaaaggcatagtaaatattttttaacaggcattctaaacaatacaaaagtaatcaaatgtatttnctctaaaacttgtcttttaatggagttctcctcctagtaaatattgaacacagacttttgccgtatcacattttgcatc

SEQ ID NO: 688495 - DNA, 752 bp, Homo sapiens
atcccagcaccttgggaggcagaggcaggcagattgtttgaggtcaggagttcgagaccagcctgaccaacatggagaaaccccgtctctactaaaaatacaaattagctgggcaaggtggcacatgcctataatcccagccactcgggaggctgaggcaggagaatcgcttgaacccgggaggcagaggttgcagagagccaagatcgtgccattgtactccagtctgggcaacaagagcaaaactccgtctaaaacacaaacaaacaaacaaaaaacccaaaaaactgcaaggcagaaaaaacaagatggacgacggaatggcgagactaaaacaacattaaggggtgtacaatgacacatacattaaccaattacaatgtatggaccttactgaatcctgcatgaccaaactatcaaccactcccaggggaccacctaggaacattcacgtagtcacatgaattctctgatccagggactatcatcaatcacacaactgcactatcattattaatgtcgcccactacacaggaccccttaacctgactcctaacacttattgggcagttgtcggtggtacaatggcgcagtacaaaccaaacaactcacggcctacctactggcataacgcttccaacacactactccctcaataacagcgcgacctacataaccacacaacaccccattcacactttaatctcgagcacataccacgccgacacccgggaccacacaccacccacccc

SEQ ID NO: 688496 - DNA, 103 bp, Homo sapiens
gctctcacccctccctccatgatcttcgcatagagcacagtaccccttcacacggaggacgcgatggctcccaatatacgcccatatttccagaagagctccg

SEQ ID NO: 688497 - DNA, 865 bp, Homo sapiens
  misc_feature (447)..(447): n is a, c, g, or t
  misc_feature (784)..(784): n is a, c, g, or t
ttccacacgtggaagcttttttctttgccctactaatgactcttgcttctgctcactctttgggtccacatgccttaaagaactgtaacgctcaccgtgaaggtctgcagctacactcctgagctagcgacaccacgaactcagcaggaggaatgaacaactctggacgtggaggaacgaacaactccagacgatccgccttaagactgtaacaactcaccgcgaaagtctgcagcttcactccaaagccagtgagaccacgaacccaccagaaggacgaaactctgacacatcggaacatcagacagaacaaactccggacacacatctttaagaactgtaacactcaccgtgagggtctgcgcttcattcttgaagtcagcaagagcaagaacccaccattccggacacaatggggttgcatttgaggcaactttatagcccagntaaatgtaatgacagcattataggttaatcctagaggtctatcaataatatagatcttcagttctagaaaatccaaagctgggctcgagagtcataaagtcaacaaattgcttacagaaagaaacagagagcagacgagcgaatcaccaaacggaagaatgactgaggactcacctgggtatgacgtacagtagcaaggactcaggcagactgtcgaagtggcagtcgtggcgcaagcctcctggactgttgtctccagaggcttagtataacgacccgataagaccttgaggaatatgggccaccccacctgagaggaatgcacggcacgcaccanggtggagcagtatagggacacttcacaacaaataccgttggattggcgcttggtccactccatggagggcaaaggacacaa

SEQ ID NO: 688498 - DNA, 754 bp, Homo sapiens
  misc_feature (141)..(141): n is a, c, g, or t
  misc_feature (567)..(567): n is a, c, g, or t
gagtcctctgccactctcgctccgaggtccccgcgccagagacgcagccggctcccaccaccaacccaccgcgccctcgcttcgcctctctctccgcggagccacgtccgctgccacccgccgccgcccacggccatcgcncaccctcccgcagcctatgtccaccaacgtgtccgctgctcctcgctcctctctcaccgcaggtatggttcgcgcggcccggggccaccggcgagccgggccggaggctcccagcccggggagctacggtggactacgttcccaccccgcaaccctacaggctctggggcacggcgcgcttgccgcccccaagcacacaggccggaagccttcttaccgccttcgtcccctcggtggcgggcggttgtattggccacggcggccttcctctgtgccgtggcggccttgcgggaagacaagtggtgccccggggggttgccgggctccttgccgagggacctcgcggggggcacctttcttccggcgtgggcccgagacgccaatttcaacaacccgcggagttccaagaaaacaccccgggaccanacgagacaggtgtgcacgcttggcaggacgcttggaattggacccggttgcgccaagttactgtcgaccagaggttgcggcttcacgttggacgcagacaggaaataaagattccgtgtttgaccggaagtcggagcaagactcaagggcccagggcaagttccgcccttggggggaccctctaacg

SEQ ID NO: 688499 - DNA, 209 bp, Homo sapiens
tcacttcccaggctgctaaagcgctcttcaagaagtcaaccttataaccatatagggagtaaggaacagtgtttgcactaacgacttcacttggtgggttgactggtcgtctggtgtgtcttcttgtgtgagtatgaccacgtgtatgatctctcttaccatgaaaggtatatggtgccctaggatctcaaatgaaataaataaaaact

SEQ ID NO: 688500 - DNA, 107 bp, Homo sapiens
gatgatctggatactattgatgtaagcaacctcaacagacagttttgtttcacaagaaacatgtaggaagatcaaaggcacaggtagccacaggaacagtgtactgc

SEQ ID NO: 688501 - DNA, 843 bp, Homo sapiens
acctttctctctggtgtgtgtgtgagggggaggaggtaggcgcaggacggcacttttttggccgcctggcttccgggggttgcaaccgtgggaccctgaaggtgggcgcggtctccgcgggtggcggcgccgtggtgggcccccccggttcctggtccgagagctggtcgcgccgagttcccgggtgccggtgttgcccgcccgcccaggggtaggttgtgggccagcgcggggggacaattggggggacatgacgcccacagcgagggcctcacctcaagcagggttagcagaactggggtccctcgccggttttaaaaccgcgtcccccccattgggggaagccatttcacaccttgggcgtcaaagacaaacccgttttctccgagagggcacagccccatttgtggcagccgcccctcttaggaacatggccggagaacccttctagcaacgtctcctccactactcccccctaggttatgagcgatctctgcgggtctttgcttgtaccaacggaacaagttctgcccaacgacaacctcgccctggatactgtgacaatcataaaactgaatgcgtgtgtcacatcacatatttcctgaggaacactgggggagatatttctaaacgggaacaatagtttcttgctcgccaccctatggagtacttccaccactgtgattatggacctagaaattttgataggtagttaataaaggtctaaaagacccgtggatggataaaagccagcctctgccacagcgtccccttgcaggttttttcaatacagcctttttcttcacaaccaagatttttcaaaaacacccctcgcccaacaaa

SEQ ID NO: 688502 - DNA, 261 bp, Homo sapiens
atcctcgaccgccatgcaactgcatgatcgatttgaggattgccagccctaaactggtcccgccctccaaccgcgaacgccccgcgcccacccggtagaaccgttcgaacaagcgcgactggtgctctgcagcaataccaggccctcggttctccaccgctagccgtacttcgttgcccgcacgctcgatacgcagatcgacgggctcaccttccgggctgtgccgaatggcattgctcaacaggtttgacagtgctcgct

SEQ ID NO: 688503 - DNA, 244 bp, Homo sapiens
ggttgcaggactacaggatgtgtaccacaggctggttagtttttaaatttttggtaaaggacagggtctcacaaggtggcccaggctggtctcaaattccgggtcttaagtgatcctcccacctcagcctcccaaaacgggatcaaggttttaatttttttgggagacaggctctttctctggtggcccaggttgggagtgcagtgggttggatctcgggttcactaacaacgctcgtgtctcc

SEQ ID NO: 688504 - DNA, 108 bp, Homo sapiens
gttacgatcacatccactcactctacattgattcacctggaaccttttgtatgacaggcccattatgctagtgagtgccacattgcgagtccacgtcaaatattcatt

SEQ ID NO: 688505 - DNA, 389 bp, Homo sapiens
cggccatcgcacagcaggttcgctagcaggatcggcaaggctggagtttttcgcaccggaaatgcgaatctcgccatcaaaggcgggcacgccggtaataatccatttatccatgagaatctcgacgccttgggggctcaggtgcgctcggcccaggcagcgcggatgaaaaaatttcatagtgaccgcatggattgctgccctcggtgatccatgggttcacatgggcatagatcttgctgatgacgcttgaccgggctcaatgccgcccagtatcatcgcttaatcacgttcagcttggaaattgcagccttcgccttcgaatactacagtcgtatcaggcagcttcccttcaaggaagctcttaacttctagggacatgacatgag

SEQ ID NO: 688506 - DNA, 119 bp, Homo sapiens
ctatagccttccccttaggtcttcagaagcatcaagttttaacttgtggacattggatttggtggaacagcaatcatgactgttggcaagagtagcagatgctgcagcacattgactat

SEQ ID NO: 688507 - DNA, 1759 bp, Homo sapiens
  misc_feature (442)..(442): n is a, c, g, or t
  misc_feature (1488)..(1488): n is a, c, g, or t
gattagacgtctctactaaagctttggtccccaccgcaagcctatagtcgcttcgatgacaccattgttagaaactgtagatagagtctggcatctctaaacgcgcatatatggctctgtgattcggagctgccatgagttacacaccagaggcctgtcttttataaaccatcttaggttaagaggtggatatcatctgtagtcctattctaattggaccgctcgttcctattgaccttcaaagcttacaagtgggctttagagcactgtctcctataatattggataccatcgcacagtgtgcgaagagatatcgcattgtgtcgagctctgttcaaccggcatgacgtagacagaggaaagccctcagtcatgtcagagatgcgatagaatacgaaatctaaccacatctttgccctaggggaacgccgaagaatccccntcccagaagactccaagcttgtggtgctgactttctgggcgtcgtgacgcttcggtcgtttgtgatcttcgccacgtgttcctgtactttctaccctacccgatggggatgaaggcgcctttgggtgcctcgagtatctcgaccatggagcgagcgacgccccacatccttggagttctataccacttcgtccttgtcgccctctcttgcgttgtacttcgtactagtcccccctccgagtgttctcccaggtacacttgcgaactttgttcggaacacctcgagttgggaagttagaacgtatttcgcacaatactattgactcttcttacgtaattcactttctagcaaaattggtcactatctcatggttaatcccatccaacacttggacttaaattgcaggctcaccgcttagttgccacctttgagttttcacattcaccacttttaaccgaacgcgtttgtggggcgaatacgggtggaagacgggagcttctattggaaccaatctggtgattgcccaatggaccctatttgactttggcccaaccgcagttaaagaatttgcgtggtagttgtgggccccaccttcccctggggggctacacaacctttgtttgagctcgctcggatttggggcccggctgggaggggccttctccccgcaagaatcccacttttctagttaccccccctgtggccattacgtagtctttggaggcggtctttggcccacattgggcttttggtgagggagcccagacgggggtccaatcttcgctttgtatgccctggaccccggggggcacagcctttcacctttggggccaatttggccccgtcttccccggttggttccccccccaacttgggcccaaatcggtgttcccacgtcggggttggggcaacccttggaaacactgggcccggcgctacagaaaacaacgtccttttgcccaatctcatttgtcttggaaccggttccccgaccacgggtgactggtcaaaggcccatggctcgtttgctggaagtgtggcccccncctcttctctgtgggcattcccttgtgcggcgttcgcctttgtcgacccccgatgtgtggtctcccctctgtgacgtttccaagaggcgagaatcccccgtctcgttcccatccttttggaaccccggggcgtcgtgcttgtgccctcctgagcacgcgttgttgtcgagctgccttccggctggcgtgaccaccgaccttgtttgtgctcacccgcggtggtgtgtctcctgtcgcctgatgatcgctccgattgaagtcgtccaccacc

SEQ ID NO: 688508 - DNA, 1527 bp, Homo sapiens
aatttttttggtttttttgtttatttttctgtcttgtgattttttgtattttgttttttgttttacttatgatagctgtattttatttgtgtgtatattattatttgtttaattgatatttattatctttgtgatattatgagggtttttgttgtgtgttgttgtgtgttgttattttcttcttgttgttagtttttttgtgttgttgttttgatgtattcttttattttatttttattttatgttttttattgttttttgtttgtttttgttttcttatttttttgttttgattttcttatgtctttttttgttttttattttggatgtgtttgataatgttgtttaaattatggtatatttcatggtggttttttcatagttttttgatgttgtgataatttggttgtgttcaaggtgattgtggtatattggtgtttattttattgtggtttgaattttggaagctttctccttttggttgtttgtgtctgtaataatttttatgtatatggcatgacttttaattttgaattttatggtgattcagtgctccttatatgtcctggtgtggttgcttttgaattgttcctttcgtttgtgttggggttccctgttctggtggtcagtttctgttcactgcgtgctgtttttggtgtctttcccttgctttcccttctttgttgttctctgggatgcctttgtggtcgggttcttgtgtcatttttcgtggttctcttgttggtttttatgtttggtatgtcagtgtttgtgtcgatgtgttaaatgtgttcttctttctggtcgtcattcttgttcgtgcgtagtaattccgtgatgtgtatgattgttgatgaccctggtcaagtgtatttatggttctccatggttcaatcttctaaaggatgacttgtgctgctatgcctctatttgcatgtatatttgtgagatgtgaatgacctgttctctttttgtggtagtgatgtgtgttatgtgtcatcccatggctcttgtcattgtgatatttgcgaatctggtgtgatcattggtcatccgtctctgatctttgtctctcttataattttttctgattggggtccagtatccctattatggctatgagtcatatgatgggatttgtgtgtgtgatgatgtgatgatgattatgtgttaaatattgcaatggatggatgatgatgatgatattcatgaatgtatatcttatgtggatgctgcagtttgaggatattgtctgctgtatccttatggggggagctctctaatcaccatgaccatctatgatggatattgttggccttatggccgtgactcctgccatttatgcatgagattgaatgactggtgattgcccgctgttttctttttccttgcattttcctaataggccgtgtactgatccgtttgctgtgaaccctatgttatttccatgtgtcaagtgggtcttgtgttgccagcttctatttgaagatggccttgcactcagtgtaagttgctgtgcagcagtag

SEQ ID NO: 688509 - DNA, 174 bp, Homo sapiens
  misc_feature (83)..(83): n is a, c, g, or t
  misc_feature (120)..(120): n is a, c, g, or t
  misc_feature (149)..(149): n is a, c, g, or t
cgactggcactgcgcaccaagaggcaaaatggcggaatttaaccagtgtagtgacctaccttcctctgggaacgcacgactgngtaacgtggcaaaatgcctcaacgtgagcatgcgcgncaacttcagataatcaaacctgtgcatgngggacgggtcaccgagctcgcaatt

SEQ ID NO: 688510 - DNA, 256 bp, Homo sapiens
tcaactcagcggaacagctgtgtgttcctccagagcgacatcaccattgtcctgtatccctggaacgcatccccgtgctcctggaaaacctttgactacgccaccagcatcaccatggcccaggcctcggatggcctttattccatgcaggtgccatggcagctcaccagcctgccctggtccctgacctttcgccaggaggagaccatcatcatcatccggcttatcgaacaggctcggcatgccagctatggca

SEQ ID NO: 688511 - DNA, 896 bp, Homo sapiens
ggaaaattattaccaagagagtggacgtgcaggtcgagatgagatgaaagcagactgtatttgtactacgggttggagatatattcaggaatagggttcaatggtggtgatggaaaactgtgggacagcagaagctttgtgagatgggtatcatactggtcaaaacataagcaaatgtcgtcgtgtgttgatggctcagcatgtcgatgaagtatggaactcagaatgcactgtacacaagagatgtgcgataactgcgtgtaaagacaggtggcatttggaaagaaagaacataacagagtactggaggagatctaatcagagatcctgaagcaggccaggaggcaactgagatgaaaaactcactccattgcaaactgattgcattctctggatgggaacagggtgccagcacgaacctgagagtagcaggctgtcgctggctcccacactctcctcgtgaaggatctgggacgaagagtgattgcacactttcctaagtacagctacggatcttcacagaagacgtacacgttattaacagcttatgctaccatttcgtactgtgaaaatcaggacctaatagctaatcttctgaatcaaatgaggccccatgctatgtactatgccagtgacaaagtccacgcaggaattctttcaggggctgaaatcgtctcaacacttggtcagttctgatacaaggtgatacaccgatggcagcgacagcaactccaggcaaatctcccagaagcacggctgcaaacatggcttccacacaacctggtcttcgcactaccgggactcaacaagcagcacacacggctgatccctgatatgaccgtcaccagactcccaccaagcagcggacacccatgcctagccacacacgggccgca

SEQ ID NO: 688512 - DNA, 828 bp, Homo sapiens
cacctgaggtcgggagttcgagaccagcctgaccagcgtggagaaaccccgtctctactaaaagtgggaagttagctgggcgtggtggtgcatacctgtagtcccagctgctcaggaggctgaggcaggagaatcactagaacctgggaggcagaggttgcagtgagctgagatcgcaccactgcactccagcctaggcgacagagctagactcagtctcaaataaatagtaaatatattcttaatctttatggggataaagaaattaggacttgtgagacattttaaaggtaatatcctggtttttaaggaatggtagcattttgtaagatcttcataatcatttaagagatcagctacttaccctattccagagggtttaatacagaaaagtctctcatttcttagctcttctaagcagctagctgtcctttctctcattggagttggagctcctggctgttttggttcattctcaccatgctttgctctatcttctcccacccatcgaccctcatccactcctgctgccactcagctgtgaagtcgatccaagaagcagcacctggtggagggtgaggtccatgggcaaacctcctggtggtgtgaagacggggctggagtcaacaggctggggcgggggaaaagaacacagacgggaacaaatccgtccatcacctggcgggaaactttatcccaacatggtcaactcctgcgaggaatcagggagcatatggggacgctgagcttattgtccatcagttactttgaattggatcgggtccgctgcggccagtgatggtgaccccttattcggctgtggggccc

SEQ ID NO: 688513 - DNA, 3987 bp, Homo sapiens
  misc_feature (3451)..(3451): n is a, c, g, or t
  misc_feature (3459)..(3459): n is a, c, g, or t
  misc_feature (3463)..(3463): n is a, c, g, or t
  misc_feature (3550)..(3550): n is a, c, g, or t
  misc_feature (3553)..(3554): n is a, c, g, or t
  misc_feature (3557)..(3557): n is a, c, g, or t
  misc_feature (3559)..(3559): n is a, c, g, or t
  misc_feature (3561)..(3561): n is a, c, g, or t
  misc_feature (3566)..(3566): n is a, c, g, or t
  misc_feature (3579)..(3580): n is a, c, g, or t
  misc_feature (3582)..(3582): n is a, c, g, or t
  misc_feature (3585)..(3585): n is a, c, g, or t
  misc_feature (3590)..(3590): n is a, c, g, or t
  misc_feature (3594)..(3594): n is a, c, g, or t
  misc_feature (3597)..(3597): n is a, c, g, or t
  misc_feature (3602)..(3602): n is a, c, g, or t
  misc_feature (3612)..(3613): n is a, c, g, or t
  misc_feature (3616)..(3616): n is a, c, g, or t
  misc_feature (3639)..(3639): n is a, c, g, or t
  misc_feature (3644)..(3644): n is a, c, g, or t
  misc_feature (3648)..(3648): n is a, c, g, or t
  misc_feature (3652)..(3652): n is a, c, g, or t
  misc_feature (3655)..(3655): n is a, c, g, or t
  misc_feature (3659)..(3660): n is a, c, g, or t
  misc_feature (3664)..(3664): n is a, c, g, or t
  misc_feature (3670)..(3670): n is a, c, g, or t
  misc_feature (3672)..(3672): n is a, c, g, or t
cgaggctccgtgccccgccccccgggtgccccgcccctttgcgcggctggcgcggccagccggccaggctcccctcggcaaacctgtctaattggggcggggagcggagcttcctcctctgagggccgtgccgcgctgccagatttgttcttccgcccctgcctccgcggctcggaggcgagcggaaggtgccccggggccgaggcccgtgacggggcgggcgggagccccggcagtccggggtcgccggcgagggccatgtcgctgttgggggacccgctacaggccctgccgccctcggccgcccccacggggccgctgctcgcccctccggccggcgcgaccctcaaccgcctgcgggagccgctgctgcggaggctcagcgagctcctggatcaggcgcccgagggccggggctggaggagactggcggagctggcggggagtcgcgggcgcctccgcctcagttgcctagacctggagcagtgttctcttaaggtactggagcctgaaggaagccccagcctgtgtctgctgaagttaatgggtgaaaaaggttgcacagtcacagaattgagtgatttcctgcaggctatggaacacactgaagttcttcagcttctcagccccccaggaataaagattactgtaaacccagagtcaaaggcagtcttggctggacagtttgtgaaactgtgttgccgggcaactggacatccttttgttcaatatcagtggttcaaaatgaataaagagattccaaatggaaatacatcagagcttatttttaatgcagtgcatgtaaaagatgcaggcttttatgtctgtcgagttaataacaatttcacctttgaattcagccagtggtcacagctggatgtttgcgacatcccagagagcttccagagaagtgttgatggcgtctctgaatccaagttgcaaatctgtgttgaaccaacttcccaaaagctgatgccaggcagcacattggttttacagtgtgttgctgttggaagccctattcctcactaccagtggttcaaaaatgaattaccattaacacatgagaccaaaaagctatacatggtgccttatgtggatttggaacaccaaggaacctactggtgtcatgtatataatgatcgagacagtcaagatagcaagaaggtagaaatcatcataggaagaacagatgaggcagtggagtgcactgaagatgaattaaataatcttggtcatcctgataataaagagcaaacaactgaccagcctttggcgaaggacaaggttgcccttttgataggaaatatgaattaccgggagcaccccaagctcaaagctcctttggtggatgtgtacgaattgactaacttactgagacagctggacttcaaagtggtttcactgttggatcttactgaatatgagatgcgtaatgctgtggatgagtttttactccttttagacaagggagtatatgggttattatattatgcaggacatggttatgaaaattttgggaacagcttcatggtccccgttgatgctccaaatccatataggtctgaaaattgtctgtgtgtacaaaatatactgaaattgatgcaagaaaaagaaactggacttaatgtgttcttattggatatgtgtaggaaaagaaatgactacgatgataccattccaatcttggatgcactaaaagtcaccgccaatattgtgtttggatatgccacgtgtcaaggagcagaagcttttgaaatccagcattctggattggcaaatggaatctttatgaaatttttaaaagacagattattagaagataagaaaatcactgtgttactggatgaagttgcagaagatatgggtaagtgtcaccttaccaaaggcaaacaggctctagagattcgaagtagtttatctgagaagagagcacttactgatccaatacagggaacagaatattctgctgaatctcttgtgcggaatctacagtgggccaaggctcatgaacttccagaaagtatgtgtcttaagtttgactgtggtgttcagattcaattaggatttgcagctgagttttccaatgtcatgatcatctatacaagtatagtttacaaaccaccggagataataatgtgtgatgcctacgttactgattttccacttgatctagatattgatccaaaagatgcaaataaaggcacacctgaagaaactggcagctacttggtatcaaaggatcttcccaagcattgcctctataccagactcagttcactgcaaaaattaaaggaacatctagtcttcacagtatgtttatcatatcagtactcaggattggaagatactgtagaggacaagcaggaagtgaatgttgggaaacctctcattgctaaattagacatgcatcgaggtttgggaaggaagacttgctttcaaacttgtcttatgtctaatggtccttaccagagttctgcagccacctcaggaggagcagggcattatcactcattgcaagacccattccatggtgtttaccattcacatcctggtaatccaagtaatgttacaccagcagatagctgtcattgcagccggactccagatgcatttatttcaagtttcgctcaccatgcttcatgtcattttagtagaagtaatgtgccagtagagacaactgatgaaataccatttagtttctctgacaggctcagaatttctgaaaaatgacctccttgtttttgaaagttagcataattttagatgcctgtgaaatagtactgcacttacataaagtgagacattgtgaaaaggcaaatttgtatatgtagagaaagaatagtagtaactgtttcatagcaaacttcaggactttgagatgttgaaattacattatttaattacagacttcctctttctaagattttgtgaattggttgaatagttctatacaaatgaagtatggaggtgtgtatgtttatatgtatataacaaaatattttcattgtgaccactctgaagtaagagcaatgggaatggcattattgtagaataagtcattgtatttttaacaccagaaagaaccttgccgatcaccaggcataacctaattttatccatggaagaaacacagaaaggcatctaatttagagctggcaccagaactgagacctccagaaatctattccagtattttttccactacacaactgccttcctgacaggttctgagataagtgttatgtttgtagatagagtgaaatatatttatatatatataaatatatacagatacatatctgtgtattatctcaaggaatgtacaaactttagtttttgattataaggacttcactgcaagttttagttaagaggtttgtatataaatctgtatagaacaggctgaaatttcttgtcataagattatgaaaccacatgagaagtgatnaaatgttngttnaagctagatagaggttaagaatcaagatataatggataattttcatagctgccgtatcagaatttcccaaatatttagcatcttccntgnnaanangnatttncttcttgaatttnncnggnctaangganaanactcntatctttggnnctncctaaaattggttaaaaatgcanttggnttancaanganaaannctgnattagnanttttaaagagttcccaaaaaaatccccagccctcaaggcggcaattgttgaattttccaaaactttaaattggcccactttttttaccacggtgttaaaagtggaggagagaaaaaaacttccacattttcttagggaaattttccccggtgtcctaccgggcctttcaaaaaaacttttgcccctttttcctttttatcccaaccaaaaattttttcaaaaattttttccaagctatccccccccctataaaaggtttttttatctgcaccaaggggatttttcccagaattcaggggggttccactttaaaaa

SEQ ID NO: 688514 - DNA, 566 bp, Homo sapiens
ggtctgtctagtggagagatccttgctgccgatcccttcgccatccttcaccgcacgcagaccccattcaagttctagtcatgcgtgagatgcatctccatccacgttggccaggctggtgtccagaataaggcaatgcctgctgggagctctactgcctggaacacaggacatccagcccgatggccagattgccaatgtgacaagaccattgggggacggagatgattccttcaacaccttcttcagtgaaacagggtgctggcaagcatagtgccccggagcagtgtcatgtagacttggaacccacagatcattgatgaagtatcgcactggcacattaccgacagctctatccaccactgagcaactcatcaacaggcaaggacagatgctgccaataaactatgcccgaggagcacgtacacacagttggccaaggagatcactagacctcgatgtagagaccgaattcgcaagcctggctgaccagtgcaaccggatcttcaaggcattctagagaaaccacagctataggtggagggaactggtatcctgaggttcac

SEQ ID NO: 688515 - DNA, 245 bp, Homo sapiens
catctgcgctgtctgcctctgctgcttgtctgcctctgcctctctgcttgtctgcgctgcttgtctgcctctgcttgtactgcctctgcttgtactgcctctgctccttgagaggcccctgggcagcagggattacaggtgcacagcaccgcgcccagctaattttttcgtatttttagtacagacggggtttcaccatgatggccaagctggttttgaactcctgacctcaagtgatccacccg

SEQ ID NO: 688516 - DNA, 4716 bp, Homo sapiens
  misc_feature (683)..(683): n is a, c, g, or t
  misc_feature (691)..(691): n is a, c, g, or t
  misc_feature (693)..(693): n is a, c, g, or t
  misc_feature (4180)..(4180): n is a, c, g, or t
  misc_feature (4188)..(4188): n is a, c, g, or t
  misc_feature (4192)..(4192): n is a, c, g, or t
  misc_feature (4279)..(4279): n is a, c, g, or t
  misc_feature (4282)..(4283): n is a, c, g, or t
  misc_feature (4286)..(4286): n is a, c, g, or t
  misc_feature (4288)..(4288): n is a, c, g, or t
  misc_feature (4290)..(4290): n is a, c, g, or t
  misc_feature (4295)..(4295): n is a, c, g, or t
  misc_feature (4308)..(4309): n is a, c, g, or t
  misc_feature (4311)..(4311): n is a, c, g, or t
  misc_feature (4314)..(4314): n is a, c, g, or t
  misc_feature (4319)..(4319): n is a, c, g, or t
  misc_feature (4323)..(4323): n is a, c, g, or t
  misc_feature (4326)..(4326): n is a, c, g, or t
  misc_feature (4331)..(4331): n is a, c, g, or t
  misc_feature (4341)..(4342): n is a, c, g, or t
  misc_feature (4345)..(4345): n is a, c, g, or t
  misc_feature (4368)..(4368): n is a, c, g, or t
  misc_feature (4373)..(4373): n is a, c, g, or t
  misc_feature (4377)..(4377): n is a, c, g, or t
  misc_feature (4381)..(4381): n is a, c, g, or t
  misc_feature (4384)..(4384): n is a, c, g, or t
  misc_feature (4388)..(4389): n is a, c, g, or t
  misc_feature (4393)..(4393): n is a, c, g, or t
  misc_feature (4399)..(4399): n is a, c, g, or t
  misc_feature (4401)..(4401): n is a, c, g, or t
ttttttttttttccagtaaagactagaagattttatttccataattggcacatgcaggtaacagatcctcagaaaatatttgtacagtaattgaggacaaaacaggaaggcacctgaagcggttgggaaaggcttgccaagtcaaactgagtatgaaacggcacttgtatgtgtaagggtaatagcatttactgagtcatctacgatgtgccagttaccgagttaagtgcttcacatacatcaactcctttaattctggcaacaactctatataaactgtattgtcagtcctgtgttaatagatgaggcagagaaattaagaaacttattcaagctcctaacacttgaatcgagcagatctttcatgctcttagccatctcactgcagtctgaattcttaacttatgctagagtgaagtttaatgactgcttgtgctagaatgtggtggagactgtatggcgcacctacctcgccaacatgtataagaatataggtatccaaattactggtcagaaaatcctgcggccttgggtgatgaaaagctaatggcaacagaaattgggccaggaagcctcgtgtagggaactacctgactggtcacattttcgtaagttacttcctttttgtcccaaacgaagccatagttttcaaagggataatgggccctggatgttgctaagantggcagananagctcaggtgtcgtccactccggatcattccagggaaaggcatcctctacagggttgcctgctttgatgacggagattgcgggcggcagtctgacgcggtgtaaaccagatgattcctgctgtctaattggggcggggagcggagcttcctcctctgagggccgtgccgcgctgccagatttgttcttccgcccctgcctccgcggctcggaggcgagcggaaggtgccccggggccgaggcccgtgacggggcgggcgggagccccggcagtccggggtcgccggcgagggccatgtcgctgttgggggacccgctacaggccctgccgccctcggccgcccccacggggccgctgctcgcccctccggccggcgcgaccctcaaccgcctgcgggagccgctgctgcggaggctcagcgagctcctggatcaggcgcccgagggccggggctggaggagactggcggagctggcggggagtcgcgggcgcctccgcctcagttgcctagacctggagcagtgttctcttaaggtactggagcctgaaggaagccccagcctgtgtctgctgaagttaatgggtgaaaaaggttgcacagtcacagaattgagtgatttcctgcaggctatggaacacactgaagttcttcagcttctcagccccccaggaataaagattactgtaaacccagagtcaaaggcagtcttggctggacagtttgtgaaactgtgttgccgggcaactggacatccttttgttcaatatcagtggttcaaaatgaataaagagattccaaatggaaatacatcagagcttatttttaatgcagtgcatgtaaaagatgcaggcttttatgtctgtcgagttaataacaatttcacctttgaattcagccagtggtcacagctggatgtttgcgacatcccagagagcttccagagaagtgttgatggcgtctctgaatccaagttgcaaatctgtgttgaaccaacttcccaaaagctgatgccaggcagcacattggttttacagtgtgttgctgttggaagccctattcctcactaccagtggttcaaaaatgaattaccattaacacatgagaccaaaaagctatacatggtgccttatgtggatttggaacaccaaggaacctactggtgtcatgtatataatgatcgagacagtcaagatagcaagaaggtagaaatcatcataggaagaacagatgaggcagtggagtgcactgaagatgaattaaataatcttggtcatcctgataataaagagcaaacaactgaccagcctttggcgaaggacaaggttgcccttttgataggaaatatgaattaccgggagcaccccaagctcaaagctcctttggtggatgtgtacgaattgactaacttactgagacagctggacttcaaagtggtttcactgttggatcttactgaatatgagatgcgtaatgctgtggatgagtttttactccttttagacaagggagtatatgggttattatattatgcaggacatggttatgaaaattttgggaacagcttcatggtccccgttgatgctccaaatccatataggtctgaaaattgtctgtgtgtacaaaatatactgaaattgatgcaagaaaaagaaactggacttaatgtgttcttattggatatgtgtaggaaaagaaatgactacgatgataccattccaatcttggatgcactaaaagtcaccgccaatattgtgtttggatatgccacgtgtcaaggagcagaagcttttgaaatccagcattctggattggcaaatggaatctttatgaaatttttaaaagacagattattagaagataagaaaatcactgtgttactggatgaagttgcagaagatatgggtaagtgtcaccttaccaaaggcaaacaggctctagagattcgaagtagtttatctgagaagagagcacttactgatccaatacagggaacagaatattctgctgaatctcttgtgcggaatctacagtgggccaaggctcatgaacttccagaaagtatgtgtcttaagtttgactgtggtgttcagattcaattaggatttgcagctgagttttccaatgtcatgatcatctatacaagtatagtttacaaaccaccggagataataatgtgtgatgcctacgttactgattttccacttgatctagatattgatccaaaagatgcaaataaaggcacacctgaagaaactggcagctacttggtatcaaaggatcttcccaagcattgcctctataccagactcagttcactgcaaaaattaaaggaacatctagtcttcacagtatgtttatcatatcagtactcaggattggaagatactgtagaggacaagcaggaagtgaatgttgggaaacctctcattgctaaattagacatgcatcgaggtttgggaaggaagacttgctttcaaacttgtcttatgtctaatggtccttaccagagttctgcagccacctcaggaggagcagggcattatcactcattgcaagacccattccatggtgtttaccattcacatcctggtaatccaagtaatgttacaccagcagatagctgtcattgcagccggactccagatgcatttatttcaagtttcgctcaccatgcttcatgtcattttagtagaagtaatgtgccagtagagacaactgatgaaataccatttagtttctctgacaggctcagaatttctgaaaaatgacctccttgtttttgaaagttagcataattttagatgcctgtgaaatagtactgcacttacataaagtgagacattgtgaaaaggcaaatttgtatatgtagagaaagaatagtagtaactgtttcatagcaaacttcaggactttgagatgttgaaattacattatttaattacagacttcctctttctaagattttgtgaattggttgaatagttctatacaaatgaagtatggaggtgtgtatgtttatatgtatataacaaaatattttcattgtgaccactctgaagtaagagcaatgggaatggcattattgtagaataagtcattgtatttttaacaccagaaagaaccttgccgatcaccaggcataacctaattttatccatggaagaaacacagaaaggcatctaatttagagctggcaccagaactgagacctccagaaatctattccagtattttttccactacacaactgccttcctgacaggttctgagataagtgttatgtttgtagatagagtgaaatatatttatatatatataaatatatacagatacatatctgtgtattatctcaaggaatgtacaaactttagtttttgattataaggacttcactgcaagttttagttaagaggtttgtatataaatctgtatagaacaggctgaaatttcttgtcataagattatgaaaccacatgagaagtgatnaaatgttngttnaagctagatagaggttaagaatcaagatataatggataattttcatagctgccgtatcagaatttcccaaatatttagcatcttccntgnnaanangnatttncttcttgaatttnncnggnctaangganaanactcntatctttggnnctncctaaaattggttaaaaatgcanttggnttancaanganaaannctgnattagnanttttaaagagttcccaaaaaaatccccagccctcaaggcggcaattgttgaattttccaaaactttaaattggcccactttttttaccacggtgttaaaagtggaggagagaaaaaaacttccacattttcttagggaaattttccccggtgtcctaccgggcctttcaaaaaaacttttgcccctttttcctttttatcccaaccaaaaattttttcaaaaattttttccaagctatccccccccctataaaaggtttttttatctgcaccaaggggatttttcccagaattcaggggggttccactttaaaaa

SEQ ID NO: 688517 - DNA, 373 bp, Homo sapiens
tggccccttcctaggtctttgggggttcgacctttcctggggcttttacaaatttgccccggaattatttaaccaccggctcatttccttagggggcttgtttttggggatgaattgtttttttccccccaaattcctgttgtggaaggctcccccccccttttgttgtttttgggcgttgggcctttggggggttgttgggttttgggggttgggcccccggggacttttacgccctttcccccatttggggtttttgttgggaggttgtttttgggggagcttgccctttcccccccccaccttttcccgcccctttattttgggtgtttattgcctcccggactttggggaattaaccctttttttttta

SEQ ID NO: 688518 - DNA, 4683 bp, Homo sapiens
  misc_feature (683)..(683): n is a, c, g, or t
  misc_feature (691)..(691): n is a, c, g, or t
  misc_feature (693)..(693): n is a, c, g, or t
  misc_feature (4147)..(4147): n is a, c, g, or t
  misc_feature (4155)..(4155): n is a, c, g, or t
  misc_feature (4159)..(4159): n is a, c, g, or t
  misc_feature (4246)..(4246): n is a, c, g, or t
  misc_feature (4249)..(4250): n is a, c, g, or t
  misc_feature (4253)..(4253): n is a, c, g, or t
  misc_feature (4255)..(4255): n is a, c, g, or t
  misc_feature (4257)..(4257): n is a, c, g, or t
  misc_feature (4262)..(4262): n is a, c, g, or t
  misc_feature (4275)..(4276): n is a, c, g, or t
  misc_feature (4278)..(4278): n is a, c, g, or t
  misc_feature (4281)..(4281): n is a, c, g, or t
  misc_feature (4286)..(4286): n is a, c, g, or t
  misc_feature (4290)..(4290): n is a, c, g, or t
  misc_feature (4293)..(4293): n is a, c, g, or t
  misc_feature (4298)..(4298): n is a, c, g, or t
  misc_feature (4308)..(4309): n is a, c, g, or t
  misc_feature (4312)..(4312): n is a, c, g, or t
  misc_feature (4335)..(4335): n is a, c, g, or t
  misc_feature (4340)..(4340): n is a, c, g, or t
  misc_feature (4344)..(4344): n is a, c, g, or t
  misc_feature (4348)..(4348): n is a, c, g, or t
  misc_feature (4351)..(4351): n is a, c, g, or t
  misc_feature (4355)..(4356): n is a, c, g, or t
  misc_feature (4360)..(4360): n is a, c, g, or t
  misc_feature (4366)..(4366): n is a, c, g, or t
  misc_feature (4368)..(4368): n is a, c, g, or t
ttttttttttttccagtaaagactagaagattttatttccataattggcacatgcaggtaacagatcctcagaaaatatttgtacagtaattgaggacaaaacaggaaggcacctgaagcggttgggaaaggcttgccaagtcaaactgagtatgaaacggcacttgtatgtgtaagggtaatagcatttactgagtcatctacgatgtgccagttaccgagttaagtgcttcacatacatcaactcctttaattctggcaacaactctatataaactgtattgtcagtcctgtgttaatagatgaggcagagaaattaagaaacttattcaagctcctaacacttgaatcgagcagatctttcatgctcttagccatctcactgcagtctgaattcttaacttatgctagagtgaagtttaatgactgcttgtgctagaatgtggtggagactgtatggcgcacctacctcgccaacatgtataagaatataggtatccaaattactggtcagaaaatcctgcggccttgggtgatgaaaagctaatggcaacagaaattgggccaggaagcctcgtgtagggaactacctgactggtcacattttcgtaagttacttcctttttgtcccaaacgaagccatagttttcaaagggataatgggccctggatgttgctaagantggcagananagctcaggtgtcgtccactccggatcattccagggaaaggcatcctctacagggttgcctgctttgatgacggagattgcgggcggcagtctgacgcggtgtaaaccagatgattcctgctgtctaattggggcggggagcggagcttcctcctctgagggccgtgccgcgctgccagatttgttcttccgcccctgcctccgcggctcggaggcgagcggaaggtgccccggggccgaggcccgtgacggggcgggcgggagccccggcagtccggggtcgccggcgagggccatgtcgctgttgggggacccgctacaggccctgccgccctcggccgcccccacggggccgctgctcgcccctccggccggcgcgaccctcaaccgcctgcgggagccgctgctgcggaggctcagcgagctcctggatcaggcgcccgagggccggggctggaggagactggcggagctggcggggagtcgcgggcgcctccgcctcagttgcctagacctggagcagtgttctcttaaggtactggagcctgaaggaagccccagcctgtgtctgctgaagttaatgggtgaaaaaggttgcacagtcacagaattgagtgatttcctgcaggctatggaacacactgaagttcttcagcttctcagccccccaggaataaagattactgtaaacccagagtcaaaggcagtcttggctggacagtttgtgaaactgtgttgccgggcaactggacatccttttgttcaatatcagtggttcaaaatgaataaagagattccaaatggaaatacatcagagcttatttttaatgcagtgcatgtaaaagatgcaggcttttatgtctgtcgagttaataacaatttcacctttgaattcagccagtggtcacagctggatgtttgcgacatcccagagagcttccagagaagtgttgatggcgtctctgaatccaagttgcaaatctgtgttgaaccaacttcccaaaagctgatgccaggcagcacattggttttacagtgtgttgctgttggaagccctattcctcactaccagtggttcaaaaatgaattaccattaacacatgagaccaaaaagctatacatggtgccttatgtggatttggaacaccaaggaacctactggtgtcatgtatataatgatcgagacagtcaagatagcaagaaggtagaaatcatcatagatgaattaaataatcttggtcatcctgataataaagagcaaacaactgaccagcctttggcgaaggacaaggttgcccttttgataggaaatatgaattaccgggagcaccccaagctcaaagctcctttggtggatgtgtacgaattgactaacttactgagacagctggacttcaaagtggtttcactgttggatcttactgaatatgagatgcgtaatgctgtggatgagtttttactccttttagacaagggagtatatgggttattatattatgcaggacatggttatgaaaattttgggaacagcttcatggtccccgttgatgctccaaatccatataggtctgaaaattgtctgtgtgtacaaaatatactgaaattgatgcaagaaaaagaaactggacttaatgtgttcttattggatatgtgtaggaaaagaaatgactacgatgataccattccaatcttggatgcactaaaagtcaccgccaatattgtgtttggatatgccacgtgtcaaggagcagaagcttttgaaatccagcattctggattggcaaatggaatctttatgaaatttttaaaagacagattattagaagataagaaaatcactgtgttactggatgaagttgcagaagatatgggtaagtgtcaccttaccaaaggcaaacaggctctagagattcgaagtagtttatctgagaagagagcacttactgatccaatacagggaacagaatattctgctgaatctcttgtgcggaatctacagtgggccaaggctcatgaacttccagaaagtatgtgtcttaagtttgactgtggtgttcagattcaattaggatttgcagctgagttttccaatgtcatgatcatctatacaagtatagtttacaaaccaccggagataataatgtgtgatgcctacgttactgattttccacttgatctagatattgatccaaaagatgcaaataaaggcacacctgaagaaactggcagctacttggtatcaaaggatcttcccaagcattgcctctataccagactcagttcactgcaaaaattaaaggaacatctagtcttcacagtatgtttatcatatcagtactcaggattggaagatactgtagaggacaagcaggaagtgaatgttgggaaacctctcattgctaaattagacatgcatcgaggtttgggaaggaagacttgctttcaaacttgtcttatgtctaatggtccttaccagagttctgcagccacctcaggaggagcagggcattatcactcattgcaagacccattccatggtgtttaccattcacatcctggtaatccaagtaatgttacaccagcagatagctgtcattgcagccggactccagatgcatttatttcaagtttcgctcaccatgcttcatgtcattttagtagaagtaatgtgccagtagagacaactgatgaaataccatttagtttctctgacaggctcagaatttctgaaaaatgacctccttgtttttgaaagttagcataattttagatgcctgtgaaatagtactgcacttacataaagtgagacattgtgaaaaggcaaatttgtatatgtagagaaagaatagtagtaactgtttcatagcaaacttcaggactttgagatgttgaaattacattatttaattacagacttcctctttctaagattttgtgaattggttgaatagttctatacaaatgaagtatggaggtgtgtatgtttatatgtatataacaaaatattttcattgtgaccactctgaagtaagagcaatgggaatggcattattgtagaataagtcattgtatttttaacaccagaaagaaccttgccgatcaccaggcataacctaattttatccatggaagaaacacagaaaggcatctaatttagagctggcaccagaactgagacctccagaaatctattccagtattttttccactacacaactgccttcctgacaggttctgagataagtgttatgtttgtagatagagtgaaatatatttatatatatataaatatatacagatacatatctgtgtattatctcaaggaatgtacaaactttagtttttgattataaggacttcactgcaagttttagttaagaggtttgtatataaatctgtatagaacaggctgaaatttcttgtcataagattatgaaaccacatgagaagtgatnaaatgttngttnaagctagatagaggttaagaatcaagatataatggataattttcatagctgccgtatcagaatttcccaaatatttagcatcttccntgnnaanangnatttncttcttgaatttnncnggnctaangganaanactcntatctttggnnctncctaaaattggttaaaaatgcanttggnttancaanganaaannctgnattagnanttttaaagagttcccaaaaaaatccccagccctcaaggcggcaattgttgaattttccaaaactttaaattggcccactttttttaccacggtgttaaaagtggaggagagaaaaaaacttccacattttcttagggaaattttccccggtgtcctaccgggcctttcaaaaaaacttttgcccctttttcctttttatcccaaccaaaaattttttcaaaaattttttccaagctatccccccccctataaaaggtttttttatctgcaccaaggggatttttcccagaattcaggggggttccactttaaaaa

SEQ ID NO: 688519 - DNA, 3268 bp, Homo sapiens
  misc_feature (683)..(683): n is a, c, g, or t
  misc_feature (691)..(691): n is a, c, g, or t
  misc_feature (693)..(693): n is a, c, g, or t
  misc_feature (3171)..(3171): n is a, c, g, or t
ttttttttttttccagtaaagactagaagattttatttccataattggcacatgcaggtaacagatcctcagaaaatatttgtacagtaattgaggacaaaacaggaaggcacctgaagcggttgggaaaggcttgccaagtcaaactgagtatgaaacggcacttgtatgtgtaagggtaatagcatttactgagtcatctacgatgtgccagttaccgagttaagtgcttcacatacatcaactcctttaattctggcaacaactctatataaactgtattgtcagtcctgtgttaatagatgaggcagagaaattaagaaacttattcaagctcctaacacttgaatcgagcagatctttcatgctcttagccatctcactgcagtctgaattcttaacttatgctagagtgaagtttaatgactgcttgtgctagaatgtggtggagactgtatggcgcacctacctcgccaacatgtataagaatataggtatccaaattactggtcagaaaatcctgcggccttgggtgatgaaaagctaatggcaacagaaattgggccaggaagcctcgtgtagggaactacctgactggtcacattttcgtaagttacttcctttttgtcccaaacgaagccatagttttcaaagggataatgggccctggatgttgctaagantggcagananagctcaggtgtcgtccactccggatcattccagggaaaggcatcctctacagggttgcctgctttgatgacggagattgcgggcggcagtctgacgcggtgtaaaccagatgattcctgctgtctaattggggcggggagcggagcttcctcctctgagggccgtgccgcgctgccagatttgttcttccgcccctgcctccgcggctcggaggcgagcggaaggtgccccggggccgaggcccgtgacggggcgggcgggagccccggcagtccggggtcgccggcgagggccatgtcgctgttgggggacccgctacaggccctgccgccctcggccgcccccacggggccgctgctcgcccctccggccggcgcgaccctcaaccgcctgcgggagccgctgctgcggaggctcagcgagctcctggatcaggcgcccgagggccggggctggaggagactggcggagctggcggggagtcgcgggcgcctccgcctcagttgcctagacctggagcagtgttctcttaaggtactggagcctgaaggaagccccagcctgtgtctgctgaagttaatgggtgaaaaaggttgcacagtcacagaattgagtgatttcctgcaggctatggaacacactgaagttcttcagcttctcagccccccaggaataaagattactgtaaacccagagtcaaaggcagtcttggctggacagtttgtgaaactgtgttgccgggcaactggacatccttttgttcaatatcagtggttcaaaatgaataaagagattccaaatggaaatacatcagagcttatttttaatgcagtgcatgtaaaagatgcaggcttttatgtctgtcgagttaataacaatttcacctttgaattcagccagtggtcacagctggatgtttgcgacatcccagagagcttccagagaagtgttgatggcgtctctgaatccaagttgcaaatctgtgttgaaccaacttcccaaaagctgatgccaggcagcacattggttttacagtgtgttgctgttggaagccctattcctcactaccagtggttcaaaaatgaattaccattaacacatgagaccaaaaagctatacatggtgccttatgtggatttggaacaccaaggaacctactggtgtcatgtatataatgatcgagacagtcaagatagcaagaaggtagaaatcatcataggaagaacagatgaggcagtggagtgcactgaagatgaattaaataatcttggtcatcctgataataaagagcaaacaactgaccagcctttggcgaaggacaaggttgcccttttgataggaaatatgaattaccgggagcaccccaagctcaaagctcctttggtggatgtgtacgaattgactaacttactgagacagctggacttcaaagtggtttcactgttggatcttactgaatatgagatgcgtaatgctgtggatgagtttttactccttttagacaagggagtatatgggttattatattatgcaggacatggttatgaaaattttgggaacagcttcatggtccccgttgatgctccaaatccatataggtctgaaaattgtctgtgtgtacaaaatatactgaaattgatgcaagaaaaagaaactggacttaatgtgttcttattggatatgtgtaggaaaagaaatgactacgatgataccattccaatcttggatgcactaaaagtcaccgccaatattgtgtttggatatgccacgtgtcaaggagcagaagcttttgaaatccagcattctggattggcaaatggaatctttatgaaatttttaaaagacagattattagaagataagaaaatcactgtgttactggatgaagttgcagaagatatgggtaagtgtcaccttaccaaaggcaaacaggctctagagattcgaagtagtttatctgagaagagagcacttactgatccaatacagggaacagaatattctgctgaatctcttgtgcggaatctacagtgggccaaggctcatgaacttccagaaagtatgtgtcttaagtttgactgtggtgttcagattcaattaggatttgcagctgagttttccaatgtcatgatcatctatacaagtatagtttacaaaccaccggagataataatgtgtgatgcctacgttactgattttccacttgatctagatattgatccaaaagatgcaaataaaggcacacctgaagaaactggcagctacttggtatcaaaggatcttcccaagcattgcctctataccagactcagttcactgcaaaaattaaaggttactaccttttctgtttatagctactaatggaaaactttatgaaactggaaacttattttggcatagaccatagatatgctgccttattattaaagtagagataaccagtctacagaaggtcctatcagtgaccctttttatatntctgtttccgatggtgaccagaggactttaattgtgtgcttaccctccagaatgctaaaaaattagtaccagagtatattcttttttctttttttag

SEQ ID NO: 688520 - DNA, 222 bp, Homo sapiens
ttgactgattgagcctctcgggattcccttctccgtgtcatctacgcctattgttttgagaagccactctgccgtccgagcgagctagccattctagccttgtatcaacgggttattatgtgacttgctcaagcccaatctgggactgcgaaaacggccacatttgccatatcgtattctgcggcataatcgaattacagtctaaaagcctaccctaggcct

SEQ ID NO: 688521 - DNA, 526 bp, Homo sapiens
  misc_feature (367)..(367): n is a, c, g, or t
tggaccccggggaaccttaatggggggacataaacaggggggggcccccaaggcccccccccttttaagggggtcaaattggaacgttggtgagggggggagaatccagtgggtgggggggagacgtgaggtggtggagagggaactcccccaggcagtgggagggttctctctcttcaccgtcgtgggtgcctctgggcgggggccaggtggggggccccgagggcgctctaacactccttttgggagcgccattgttggggccgagtgaaggttccaccacccttgtttcgttgttcgccaaaatcgctgtgtggtcaaaacccaggagaaaactgagagcgtcttagaacaaacgtgtggtgtnctgtagagagggcgacaaatgcgccacgcccccattggggggtaaaaaagtggttggcgacagagaatgtgggtgttgcacgcgctgtgatagagaaatcatacagagaggagagagaccccactctggggtggctaccaggtggttagccccaacgag

SEQ ID NO: 688522 - DNA, 2673 bp, Homo sapiens
  misc_feature (2137)..(2137): n is a, c, g, or t
  misc_feature (2145)..(2145): n is a, c, g, or t
  misc_feature (2149)..(2149): n is a, c, g, or t
  misc_feature (2236)..(2236): n is a, c, g, or t
  misc_feature (2239)..(2240): n is a, c, g, or t
  misc_feature (2243)..(2243): n is a, c, g, or t
  misc_feature (2245)..(2245): n is a, c, g, or t
  misc_feature (2247)..(2247): n is a, c, g, or t
  misc_feature (2252)..(2252): n is a, c, g, or t
  misc_feature (2265)..(2266): n is a, c, g, or t
  misc_feature (2268)..(2268): n is a, c, g, or t
  misc_feature (2271)..(2271): n is a, c, g, or t
  misc_feature (2276)..(2276): n is a, c, g, or t
  misc_feature (2280)..(2280): n is a, c, g, or t
  misc_feature (2283)..(2283): n is a, c, g, or t
  misc_feature (2288)..(2288): n is a, c, g, or t
  misc_feature (2298)..(2299): n is a, c, g, or t
  misc_feature (2302)..(2302): n is a, c, g, or t
  misc_feature (2325)..(2325): n is a, c, g, or t
  misc_feature (2330)..(2330): n is a, c, g, or t
  misc_feature (2334)..(2334): n is a, c, g, or t
  misc_feature (2338)..(2338): n is a, c, g, or t
  misc_feature (2341)..(2341): n is a, c, g, or t
  misc_feature (2345)..(2346): n is a, c, g, or t
  misc_feature (2350)..(2350): n is a, c, g, or t
  misc_feature (2356)..(2356): n is a, c, g, or t
  misc_feature (2358)..(2358): n is a, c, g, or t
gtcatgtgagaggcagaggagaaaatgaagcttattggtgtatacagaagtcccatgtggcaagtgtttgcttttctaacattttctttttaaaaaattatttttattggatattgacaagttataattgtatgtatttatgggatacaaagatatgctatgatgtacgtattcaatgtggaatgattgaatcaagataattccacatatcacctcaaatacttatcttttttcctaactgaaacattgtaccctgtgactaacagtccccacgctgtccccacccccccccagcctctggtaaccaccattctgctgggtgcttctctgagttcatttttattagcatccacatataagtgagaacatacagtatttgcctttctgtgcctggcttaacttctttttctatttttaaggtgtcaaggagcagaagcttttgaaatccagcattctggattggcaaatggaatctttatgaaatttttaaaagacagattattagaagataagaaaatcactgtgttactggatgaagttgcagaagatatgggtaagtgtcaccttaccaaaggcaaacaggctctagagattcgaagtagtttatctgagaagagagcacttactgatccaatacagggaacagaatattctgctgaatctcttgtgcggaatctacagtgggccaaggctcatgaacttccagaaagtatgtgtcttaagtttgactgtggtgttcagattcaattaggatttgcagctgagttttccaatgtcatgatcatctatacaagtatagtttacaaaccaccggagataataatgtgtgatgcctacgttactgattttccacttgatctagatattgatccaaaagatgcaaataaaggcacacctgaagaaactggcagctacttggtatcaaaggatcttcccaagcattgcctctataccagactcagttcactgcaaaaattaaaggaacatctagtcttcacagtatgtttatcatatcagtactcaggattggaagatactgtagaggacaagcaggaagtgaatgttgggaaacctctcattgctaaattagacatgcatcgaggtttgggaaggaagacttgctttcaaacttgtcttatgtctaatggtccttaccagagttctgcagccacctcaggaggagcagggcattatcactcattgcaagacccattccatggtgtttaccattcacatcctggtaatccaagtaatgttacaccagcagatagctgtcattgcagccggactccagatgcatttatttcaagtttcgctcaccatgcttcatgtcattttagtagaagtaatgtgccagtagagacaactgatgaaataccatttagtttctctgacaggctcagaatttctgaaaaatgacctccttgtttttgaaagttagcataattttagatgcctgtgaaatagtactgcacttacataaagtgagacattgtgaaaaggcaaatttgtatatgtagagaaagaatagtagtaactgtttcatagcaaacttcaggactttgagatgttgaaattacattatttaattacagacttcctctttctaagattttgtgaattggttgaatagttctatacaaatgaagtatggaggtgtgtatgtttatatgtatataacaaaatattttcattgtgaccactctgaagtaagagcaatgggaatggcattattgtagaataagtcattgtatttttaacaccagaaagaaccttgccgatcaccaggcataacctaattttatccatggaagaaacacagaaaggcatctaatttagagctggcaccagaactgagacctccagaaatctattccagtattttttccactacacaactgccttcctgacaggttctgagataagtgttatgtttgtagatagagtgaaatatatttatatatatataaatatatacagatacatatctgtgtattatctcaaggaatgtacaaactttagtttttgattataaggacttcactgcaagttttagttaagaggtttgtatataaatctgtatagaacaggctgaaatttcttgtcataagattatgaaaccacatgagaagtgatnaaatgttngttnaagctagatagaggttaagaatcaagatataatggataattttcatagctgccgtatcagaatttcccaaatatttagcatcttccntgnnaanangnatttncttcttgaatttnncnggnctaangganaanactcntatctttggnnctncctaaaattggttaaaaatgcanttggnttancaanganaaannctgnattagnanttttaaagagttcccaaaaaaatccccagccctcaaggcggcaattgttgaattttccaaaactttaaattggcccactttttttaccacggtgttaaaagtggaggagagaaaaaaacttccacattttcttagggaaattttccccggtgtcctaccgggcctttcaaaaaaacttttgcccctttttcctttttatcccaaccaaaaattttttcaaaaattttttccaagctatccccccccctataaaaggtttttttatctgcaccaaggggatttttcccagaattcaggggggttccactttaaaaa

SEQ ID NO: 688523 - DNA, 165 bp, Homo sapiens
gagaattgcttggacctgggaggcagacgttgcagtgagtcaagatcacgccattgcactccagcctgggtgacgagcgaaactctgtctcaaacaaacaaacaagctcctggacgtaggcctggggtttgatttctgactctgctactaattagctgtgtgact

SEQ ID NO: 688524 - DNA, 1287 bp, Homo sapiens
  misc_feature (258)..(258): n is a, c, g, or t
taaaatgggagatagggtcttaaactctggtccaggctgggaggagtgcagtcgtcacagtcagggctcactggaagtctggaccccgttgcctcagcctcccaaataactgggggccacgagggtgtgtgcaccacaacttcttcagcttaattttataaaatttttaatagagggtggggtttaactagtgcgtttccagaacgtggctcttaaacttcctgtgggcctcaagtgtgactcccccgtgcttggtgncctcccaaacagcggggtggagaattcacgaggcagtggagcgcaccaacaaaggtgggccgtgaaaaattctttaagaggcagtgggagaggtgctcgagtgacacgagccaccttggggccaactgcgtgggtgccttaaccgtgggaagacggggaagagaagcgcacgcgccattggggagaaccgtgtgctataccacctttgggggggcccacagtgtgcgcataagggtattattatggagagcgcccatatagggcccccttttgaggataaagatgggctacctttggcccttttctttcttgagaaactggttcttgtgcagaacatggtggggcactctggggcggctacagcgggttctgtgaacgcgaatatcaattataagtccaccccttcacaatttaacgaattttatacttccagtcctttactggggggcctgcaaccctccagagaattaccaaaggaaaaaacgccaatgtgtctggtggcccaaaagaagagtccccacaaccccaaggtcgtgttggcaccattggtacagtgggagcggccccattgtggcgtgcacgtgaacctgcatcgttggttcgtggtccccccaatgggccaaagggctcactcaaaggaacactccatcacattgggcaacaagagtacataacgccgacaacaagacacaagcgaaaggtctagcgaaaatgacgccatcctgtgcaggcggggtggaacatcccagaggtgtgagtggtacacgcacaatatcaccaggtgaaagttgtgcgcaatacaacaggacagggtggaggaaatgagacactcaaaacagcgaactacagagccagcccccgccccacgagtcaaactctggagtaggtgtcatcaaatactcaaagcaggcacaacagaggaagcgagttagagcaggtgcagaaaacacctggtgagaacaaaaaacggcaccatcagtagaaaaaaaggcgggcggctgaactaactaggagacgaccacacacgat

SEQ ID NO: 688525 - DNA, 2321 bp, Homo sapiens
  misc_feature (38)..(38): n is a, c, g, or t
  misc_feature (1785)..(1785): n is a, c, g, or t
  misc_feature (1793)..(1793): n is a, c, g, or t
  misc_feature (1797)..(1797): n is a, c, g, or t
  misc_feature (1884)..(1884): n is a, c, g, or t
  misc_feature (1887)..(1888): n is a, c, g, or t
  misc_feature (1891)..(1891): n is a, c, g, or t
  misc_feature (1893)..(1893): n is a, c, g, or t
  misc_feature (1895)..(1895): n is a, c, g, or t
  misc_feature (1900)..(1900): n is a, c, g, or t
  misc_feature (1913)..(1914): n is a, c, g, or t
  misc_feature (1916)..(1916): n is a, c, g, or t
  misc_feature (1919)..(1919): n is a, c, g, or t
  misc_feature (1924)..(1924): n is a, c, g, or t
  misc_feature (1928)..(1928): n is a, c, g, or t
  misc_feature (1931)..(1931): n is a, c, g, or t
  misc_feature (1936)..(1936): n is a, c, g, or t
  misc_feature (1946)..(1947): n is a, c, g, or t
  misc_feature (1950)..(1950): n is a, c, g, or t
  misc_feature (1973)..(1973): n is a, c, g, or t
  misc_feature (1978)..(1978): n is a, c, g, or t
  misc_feature (1982)..(1982): n is a, c, g, or t
  misc_feature (1986)..(1986): n is a, c, g, or t
  misc_feature (1989)..(1989): n is a, c, g, or t
  misc_feature (1993)..(1994): n is a, c, g, or t
  misc_feature (1998)..(1998): n is a, c, g, or t
  misc_feature (2004)..(2004): n is a, c, g, or t
  misc_feature (2006)..(2006): n is a, c, g, or t
atagctcactgctcctgggcatcaagcgatcctcctgnctcagccttctgagtcgctgggattacaggtgtcaaggagcagaagcttttgaaatccagcattctggattggcaaatggaatctttatgaaatttttaaaagacagattattagaagataagaaaatcactgtgttactggatgaagttgcagaagatatgggtaagtgtcaccttaccaaaggcaaacaggctctagagattcgaagtagtttatctgagaagagagcacttactgatccaatacagggaacagaatattctgctgaatctcttgtgcggaatctacagtgggccaaggctcatgaacttccagaaagtatgtgtcttaagtttgactgtggtgttcagattcaattaggatttgcagctgagttttccaatgtcatgatcatctatacaagtatagtttacaaaccaccggagataataatgtgtgatgcctacgttactgattttccacttgatctagatattgatccaaaagatgcaaataaaggcacacctgaagaaactggcagctacttggtatcaaaggatcttcccaagcattgcctctataccagactcagttcactgcaaaaattaaaggaacatctagtcttcacagtatgtttatcatatcagtactcaggattggaagatactgtagaggacaagcaggaagtgaatgttgggaaacctctcattgctaaattagacatgcatcgaggtttgggaaggaagacttgctttcaaacttgtcttatgtctaatggtccttaccagagttctgcagccacctcaggaggagcagggcattatcactcattgcaagacccattccatggtgtttaccattcacatcctggtaatccaagtaatgttacaccagcagatagctgtcattgcagccggactccagatgcatttatttcaagtttcgctcaccatgcttcatgtcattttagtagaagtaatgtgccagtagagacaactgatgaaataccatttagtttctctgacaggctcagaatttctgaaaaatgacctccttgtttttgaaagttagcataattttagatgcctgtgaaatagtactgcacttacataaagtgagacattgtgaaaaggcaaatttgtatatgtagagaaagaatagtagtaactgtttcatagcaaacttcaggactttgagatgttgaaattacattatttaattacagacttcctctttctaagattttgtgaattggttgaatagttctatacaaatgaagtatggaggtgtgtatgtttatatgtatataacaaaatattttcattgtgaccactctgaagtaagagcaatgggaatggcattattgtagaataagtcattgtatttttaacaccagaaagaaccttgccgatcaccaggcataacctaattttatccatggaagaaacacagaaaggcatctaatttagagctggcaccagaactgagacctccagaaatctattccagtattttttccactacacaactgccttcctgacaggttctgagataagtgttatgtttgtagatagagtgaaatatatttatatatatataaatatatacagatacatatctgtgtattatctcaaggaatgtacaaactttagtttttgattataaggacttcactgcaagttttagttaagaggtttgtatataaatctgtatagaacaggctgaaatttcttgtcataagattatgaaaccacatgagaagtgatnaaatgttngttnaagctagatagaggttaagaatcaagatataatggataattttcatagctgccgtatcagaatttcccaaatatttagcatcttccntgnnaanangnatttncttcttgaatttnncnggnctaangganaanactcntatctttggnnctncctaaaattggttaaaaatgcanttggnttancaanganaaannctgnattagnanttttaaagagttcccaaaaaaatccccagccctcaaggcggcaattgttgaattttccaaaactttaaattggcccactttttttaccacggtgttaaaagtggaggagagaaaaaaacttccacattttcttagggaaattttccccggtgtcctaccgggcctttcaaaaaaacttttgcccctttttcctttttatcccaaccaaaaattttttcaaaaattttttccaagctatccccccccctataaaaggtttttttatctgcaccaaggggatttttcccagaattcaggggggttccactttaaaaa

SEQ ID NO: 688526 - DNA, 867 bp, Homo sapiens
  misc_feature (38)..(38): n is a, c, g, or t
  misc_feature (717)..(717): n is a, c, g, or t
  misc_feature (746)..(746): n is a, c, g, or t
  misc_feature (749)..(749): n is a, c, g, or t
  misc_feature (764)..(764): n is a, c, g, or t
  misc_feature (770)..(770): n is a, c, g, or t
  misc_feature (773)..(773): n is a, c, g, or t
  misc_feature (776)..(776): n is a, c, g, or t
  misc_feature (787)..(788): n is a, c, g, or t
  misc_feature (812)..(812): n is a, c, g, or t
  misc_feature (817)..(817): n is a, c, g, or t
  misc_feature (823)..(823): n is a, c, g, or t
  misc_feature (832)..(832): n is a, c, g, or t
gggctccgcgcgcgccgggggtacgacctgtacagtgncctatgattacacaataccaccttatggagaaagctgttgtgaaaacggacattcagatagcgctcccttctgggtgttatggaagagtggctccaggtcaggctggctgcaaaacactttattgatgtaggagctggtgtcatagatgaagattatagaggaaatgttggtgttgtactgtttaattttggcaaagaaaagtttgaagtcaaaaaaggtgatcgaattgcacagctcatttgcgaacggattttttatccagaaatagaagaagttcaagccttggatgacaccgaaaggggttcaggaggtttggttccactggaaagaattaaaatttatgccaagaacagaaaacaagaagtcatacctttttcttaaaaaaaacaaaaaaagttttggcttcaagtgtttggggtgtttggcacttctgtaaacttactagctttaccttctaaaagtacggcatttttaacttttttttatgatcagaggaaaagatcattaaaaaaaaacaccaaagaagttttcctttggtggttgggatcaaaaagaaacttggttttcccgcaattgaagggttggtatgtaaatctggcttgggggtgacctgattgtaaacaggtgtcttcttaaaatcaaattgtctaattcaattacagatttaaaaaaaaaagncctggtattttaacctcatatgatctccnttnagcaacttatttggnttaatnggnttnaaatcttaagnnaatattttttatccagtaaacaanttctntcacanggtacaaantctgggcattaagtggacctaaatttaatgtcgag

SEQ ID NO: 688527 - DNA, 1320 bp, Homo sapiens
  misc_feature (38)..(38): n is a, c, g, or t
  misc_feature (717)..(717): n is a, c, g, or t
gggctccgcgcgcgccgggggtacgacctgtacagtgncctatgattacacaataccaccttatggagaaagctgttgtgaaaacggacattcagatagcgctcccttctgggtgttatggaagagtggctccaggtcaggctggctgcaaaacactttattgatgtaggagctggtgtcatagatgaagattatagaggaaatgttggtgttgtactgtttaattttggcaaagaaaagtttgaagtcaaaaaaggtgatcgaattgcacagctcatttgcgaacggattttttatccagaaatagaagaagttcaagccttggatgacaccgaaaggggttcaggaggtttggttccactggaaagaattaaaatttatgccaagaacagaaaacaagaagtcatacctttttcttaaaaaaaacaaaaaaagttttggcttcaagtgtttggggtgtttggcacttctgtaaacttactagctttaccttctaaaagtacggcatttttaacttttttttatgatcagaggaaaagatcattaaaaaaaaacaccaaagaagttttcctttggtggttgggatcaaaaagaaacttggttttcccgcaattgaagggttggtatgtaaatctggcttgggggtgacctgattgtaaacaggtgtcttcttaaaatcaaattgtctaattcaattacagatttaaaaaaaaaagncctggtattttaacctcaaaaaaaaaaaacaaaaaaaaaaaaaaaaaaaaaaaaaaaaaaaaaaaaaaaaaaaacaaaaaaaaagccaaaagagggggacaagaagaataaagacgaagagaagaaaggaagagagagagagaacagaaagagagaggcagaagcggtccaaagacacgtgccaacaaaagtgagacagagagtggaaaggggagaaaaagaaaagaggaagacataagtccgggtgagagtaaggaaccaatgaagctagaagaaagacgggaggacgaggaacatgaacaccacggagaacaaggaaaacacgagaaactatagagagagaaaaaagaccggagacagggagcaccatcaggaccacgttagatcgagaaagcatgaaaggagaagagagacaaaacaacaacaaggcagaaacgaaggaaggaggaatggtgggtgaggagaaagggaaggagggcggctgaggggaaaagagcgcaaggggagcgcgaggcgagggagaagccgccgcgatgcggacgaaggagaccaagagaggggagtggataggtaagaagagaacagagagacgaagtaggaaat

SEQ ID NO: 688528 - DNA, 125 bp, Homo sapiens
tactgaacatagagctgtctattatttggaactgacttacttacttaccttattgattgagacaggctctcactctgtagcttaggctagagtgcagtggcacgatcatggctctctggagcctc

SEQ ID NO: 688529 - DNA, 1201 bp, Homo sapiens
agcgggcgtggtccccggcactctcaccccgtcgtgcgctcgtagagttctgggaagatggcagaaggtctcaccagtctttacgtactgatcacattgaggcgaagttgcccaatgaattcgacggccatgcgctagcgatatgcgcgattatacggtaacatcattacgtatagaggctgcattgacatgaacataccagattattttagctactcacatgaacgtatagactagtgttatgctgcgaatacattgaaggtgatatgtctccaaggtctatacacattatatcttgccgttcatatgacaggaacattgatgatgactaatagatgaggaaaagtggatgagtaagagaatagttcaaggaaactagatatatgcatagaggttgtgagaagtttggaggaaggatatttaattcaatagcaataatgcattcctaatgcatggcgatgatcgcatatttggtatgcatatattgaatcgatgtgtgaatgattctgcacgtgcgtacgactagtgggtcgagcgaattgacattgagctagttgattattgatcttctcagagaagcctgatggaatagactaggcttcccttaggcgatgatcaacagaggtcaagaccgagttaatcatagcgccatgacgactcttgaagaccgagttgtgtacacagactacttgatttgagtagcctagtgagccatggcttatgagttgcattacgggattgcgtatccatacgaaagcgaatcgcaaacgtaaatctactttgcatggcctaagaaaaagccgtaaaaagaattagcccattttcgagacaaatggcgccgacggggggaacagacatggttgggaagggcccccattccgggaacgcggtgaatgtacgtatctccttgggaaatcgaacattttgtattgtcgaagaacgcatagggaaatgcccttggggggatttgacactgttggcgaaggaaaaccgtttttatcaatccaaaggttggaaaccagttgaacgttatttgcaaagagaagtgtaatggcccttatattggtttatatagaaccgggaaaccctaaaggtgaatcggagggttaaatttcggagaaaagaagacatacttttattacttggggtcagagcaagagagatgcgttggaaaaaggtttaaaaggtatattgccccgag

SEQ ID NO: 688530 - DNA, 687 bp, Homo sapiens
  misc_feature (565)..(565): n is a, c, g, or t
agcggactcgcgcccttgccgtgccaaccgagcccgtcatggagcggccgtcgctgcgcgccctgctcctcggcgccggtgggctgctgttcctgctcgtgcccctctcctcttcctcctcttcggacaccgtgcggccctgcgagctgggctccgtgcccggctgtgcctcgccggctgggactggctgcctgggcgagagccgcgacgcgtgcggggtgctgcgcctatgtgcgcccgcggccgagggcgagccgtgggggggtggcggcggccgagtgggggggatacatgcgacgccgggcatggagtgcgtgacagacgccgcgaaggaaggcggacggggtaagacgccgggggcaggccagccgtggggtcacgcggtagtaaaagccaggcgtgtcgccgtgtcgccactgaggccggatactcaggggtgcaggctgaagaccaggaaacaagactaagccggagcgggttgccaagactgccgcccgatccgccctaggctccacgaggggccctgacggaagactcggctgtggcgagcacaaggtcaatcaancccaagtgttacacggcaaaatgggggcaccctgcgaaaaccagggggttacgccttccgaattatgtagaacagccttccccccaaagggtagcactcttgggaaattgttcacttgggtc

SEQ ID NO: 688531 - DNA, 384 bp, Homo sapiens
tctctgcaggatcccctcttctccgaaaggcacatggccgccctcaagaccccttgtgaggcccgtgatcgttcaacagagaacccagaatgcttcatccggcaccagtcagaccgatctgtcagacattaaggcgtaactggcggaaacccagaggcattgaccactgggttcgtataagattcaagggccagatcttgatgccccacattggttatggaatgcaatcgcatcataacgtagcacatgctgccccgtggcttccggatgttcctggtccacaacgtcgaggagcctggaagtgctgctgatgtgcaacatatcttactgtgccgagatcgctcacgatgtcgccttgcggagaagagggtaccgagcccgaat

SEQ ID NO: 688532 - DNA, 974 bp, Homo sapiens
  misc_feature (751)..(751): n is a, c, g, or t
tccaggaggtggccaggtgcccgacgtcgtcagcgggggcgtttgatgcgacgcctggtatcgcctggtctccgccgctggggcttgcatccctcgaaccaacaccccggttcgggcctctgaggcagatcccaggtcacaccttctgctgctcccacttgaggaccgtagatggtgggacaggtccgaggtccctgtgagggcggggctcgttgtgtgtgtggcacagactggggatgcatggcacaccccactgtgcatcaaggctcccctcccatctgttagcacgtctccagcccccactatgtccctgacgccccaggggccactgccctccatgcccctagagccagtcactattgtctggagtggtgcaggctccatggaggccggtgtagccgagctgtggctccatggaccataccggagacccccctggagctcacacagcagtcctggtcctggaagatgacggacgatgtgctaatgttgcgctgattgagccggtgggtgttgggtacgctgaggcatatgatgagccactgttacctgaggggactgggggatctagtgaaggctctctctggggggtctactcatagtgggaaactttagaggtggggtaggttccgcttgaattcttcctgtcctggattaggattggtggcctccgtgggacctatgtagctgtaaaaggtaggccctaggcgggaggggggcaccagattccgctgggcgtgcaatgggggcncccaattcctaccaacgactgggcccagagccccattgggtgggtgtcaaacgaaacgctaacggggaggggggcccccccttggacttacaaaagggaaacgagggaaaatacaccccccggagtggaagaggggctgagaccacaggggcaagaagcgtacccaggcgaggaagagcaaaaagagggcagcgcgatagaagagagtcgagaaatatatgga

SEQ ID NO: 688533 - DNA, 235 bp, Homo sapiens
acgcctagcccgcccgccccaccatgtgccacagttcagcagctggaaagaagatggcgcctggtggacagcataggctttgatgactacattaaggagctaggattgggaatagctttgcgaaaaatgggcgctatggcccagccagattgtatcatcacctgtgatggtcaaaacctcaccataataactgagagcactttgaaaacgacacagttttcttgtaccctgggag

SEQ ID NO: 688534 - DNA, 700 bp, Homo sapiens
  misc_feature (155)..(155): n is a, c, g, or t
ctaagttgggagctccccgtaagcccatcaggtaaggcccccattgggcatttaattgcataacgaatttttacggggagggccaagagggagcccctgtctaaaatatggtctcaaaataaaaaccaaatgggccacaccatgtgaaggaaatncactttcgtcatctctcatgaaacacagtaaccggaccttgttacaaggttccataaatagaaagcccctgttattgattatgtcacagcttttgtaggtcacgacctttcagactcataagatatgtgtcttctgtgataccagaatgggtggattggataaggccataacaactcgtcttataattttcttcagtgtaatagtcatacttccagatgtcgaaagtcacaggtgtcttttatatgcatagtcgctatgtcccattctttcagcaggtccgggtgtgctgcctcaagcttgtaatcccagcagttcaggagtctcaggcaggtggatcttttcaggtcggaagtttacatcccttgtggcccacagggtaaatccccgtctataattaacagctgataatctgcccagtgtggtgccggctccctgtaatcacagctattcagttggctgaggcgctagaatcctttcatcctcggaggtggaggttatagttagtctggatcgtgttactgcacccagcctaggtgacatagca

SEQ ID NO: 688535 - DNA, 1255 bp, Homo sapiens
  misc_feature (1155)..(1155): n is a, c, g, or t
gcggccgtccggacgcgcgggaacacccgggcgtgatggagtctgcagtcgggtccgggaagccgcgcggtgatgggggaggccttcacttgagggggattaggtacagcagggggtcgtgccaagtattcccctgagacgatgggctcagcgtgtgcatagaacgaccggtgcattgagctcctcggacgcatggaagaagcccgctcaaggctagctccctaagggacgacttgtgacccgggcctgtcttagggtccactgcgccaggtcgcatatgatggtgctctgacagtagcatgacgagtggcgtgggccctgcgggaggccgtggggtcgcggccgaatgcaaggcggatgcgcgcagagggggagatgcggatcgaatttggctgccctctagctggggccctggggtaggtcgttaactgagccccctttggggtggcgccttgtggggcttgtccgggctcccatggacttcgcggttcagactttgcttggagagtcggtgggaagaataagggcgggtacgtagagaccggccagtatcgctctggaaggaattaattgccaaaaccgctaaaaagtggttccccaatggggagacgctctgggttgtcaaagaaacaatttttagcttcaagacagtagtggtttaggggcacctttctgtcgacgttcgggatagacgacaagcgaggaagcgacggaaagcaaggcgttatgagttaagtcgtggccaattggtctccccagatttggtccattggccccttggggaagcatgccacggcacaaggggtgactgaacccccaaggtgccatgtgtggggaggagagcttggggaatttccttccgccaaagtaaaagcgctgggttttctctttcccctttggtgggaagcggtgggaacccctccagtttggggggtttcccccgagaaagaatacgctttttttccccaattcgacacagggcgaatacaaaattgtaacctcacagaggcttttgggtttccccaacgttcccaagagttaagagaaagcccctttgggccaaaaaaggggcataaaagagagcgcctccccctctctttcaagaagaagggggttggacatccttctgtgggggaccgcagataagcttacgtnacattttttgcccggggttggtgggcctttttttaaaccgtttccaaatgtgtcttttcgccacaaggggaaagcttttcctttggaaatttcacccttg

SEQ ID NO: 688536 - DNA, 245 bp, Homo sapiens
gttttgggggggaattttgttccgtttggatttatttttttgaaaaggaaattccctgtttcgtgggttggcaataattttttgtttttttttcgggggaaaacggcaagctggttaggaggttttggggatttgcccttcctaaaaatttttttaacccttgattttttttcttggaaaggggggggccccataaacatattttggggaaagggatccccaaaaaaggggtttccttcctgcca

SEQ ID NO: 688537 - DNA, 1040 bp, Homo sapiens
  misc_feature (424)..(424): n is a, c, g, or t
caggagaggctgggtgttactcggacgaggtgttgatcttgaagaaactgggcgtgtttaagtattggtgatggtattgccgcgtacatgggctgaggaatgtcaaggagaagaaatggtagagttttcttcaggcttaaagggtatgtccttgaacttggaacctgacaatgttggtgtagtcgtgttggaaatgataaataattaaggaaggagatagtgaagaggacaggagccatcgtgggcgttccagttgggtgaggagctgtttgggtcgtgtagttgatggcccttgggtaaatgctattgattggaaagggtcccaatttggttccaaagacgcgtaaggcgaggttggtcctggaaagccccggctatccattcctccgaatttccagtgcggtgaaccacatgcaggactggncattacaggctggtggataggcttcgggtgcccaatatggtccgtggctcagccgtgacactgatttatttggtgaaccacagacctggtgaaaacgctcaaatttggtatttgacaccaatcattaaaccacgaaactgtttccaatgcatggactctgcatgcaccacgaagaaagctgtacctgtcatttactgtctgcctatttgggtcaacagaagattccactgtttgccccagattggttgaaggagaacttacagaatgccgatgccatgaagtacaccattgtggtgtcggctacggctccggatgctggcccacttcagtacctggtccttactctggtgtcccatggggagcgtattttcgagacatggcaacatgcttgtcatctattagggttttcccacggctgtgctacggcaggtgctctgtgtcgcgaccctggtcgtgggcttctgggagtgtctactcccccggtggggggggccatgacgtgttggggggccttacggtgcgctaaccgtcgcgtctggcccccctgtccctgcggggcttgcgatttcgtcccccgtcttccgcgcccgcgcgccctcttgggtcccccacttgc

SEQ ID NO: 688538 - DNA, 294 bp, Homo sapiens
ctccattgggaagaggaaacgaggcttagagcagatacttggtaaactaatgtggctaataaatggcatgtggcggggcaaactcatgtgtgcctgactccaaagtctttcccacgatgctggaaccttccacattttttccttagagcccttcccaacctgccatagctctgatggtatgtcagagctgagcctgacataccagggccagctgagccttctcgctccctctcgcctgacacggcactgctgctgtgtgctgtgccaagctggatcaccattccgtccggggta

SEQ ID NO: 688539 - DNA, 382 bp, Homo sapiens
cggcacgagggatatccaaacgcgcattcttcaccaagacctgaggcacagacacctggtgagtgaggcttcaagggagatgctctttgtcctgggagagagccctctcccctctcttccaccatctcctgctcggacagaaaccgtacctgcagcaaggcatacctcctgccaactcctggtgaaaagaacatgcctcaaaactactcttttgccactcgttaaccacttccgtttgtggggacctcctggtcatgagcagcatcatcccgaagccttcaaagtgttctggattcatcacaggaccctccagcctcagccagcaaggataccaccaggaatgaaagtgctttaataaagagacagggtgtgcaaaaaaaaa

SEQ ID NO: 688540 - DNA, 595 bp, Homo sapiens
gggtgggaaggacgtccacccaaccgaattaagttgtttgaggtgacccgggctgtaggtagccgtgagtcagaggtaatctaagttggggctcgcgtaaggtgagggcagcttaggttggggtgggagggttgtgagagctaagagagtgaggtagcaaaggcgctttgtaagttcattggatggtgccggcaggcagacatcaagctggtggggctggtaggttatttgtgggtgcgtgcgccccccgtgtagcgttcctccgagcgcaagcaatagtagcgctgccccacaacactggtcgtggtattatatagaaaagtatcatcatcactagcacgtcacagtgtcgccgccgtttcattctacagcagcagcatcgtggtggtagagaagagaatatatgtcatgttggtgtggtgtggtaatatcatggtctcgtgagatcatttgatgcacgtattctcgcgcgtgtgtgtaggtacaccgccgcgcgtggggatatatatgtgtgtatgtgtgtgtatctcttaagaatataccgtgtgttcgcgcccgtgtgtatacaatagatacaaaaaatactacaacagaa

SEQ ID NO: 688541 - DNA, 395 bp, Homo sapiens
  misc_feature (315)..(315): n is a, c, g, or t
  misc_feature (347)..(347): n is a, c, g, or t
  misc_feature (366)..(366): n is a, c, g, or t
  misc_feature (372)..(372): n is a, c, g, or t
gtgaccaaaaaaatggatcttagtgtcagagtaaacttcagtttgctagttaggaattgttaatatctgtcatgtttatatatttttttcaatattcccaataagaataggactctcatgtttatatagaacagaatcaattttatgaaatacatgaaaattctatgaaatatgtagaaaaatctcttaggaaaaaaatcagttttattattgaaatctcaaggccaatacttcagtgtaaactctgacgctacagttttctttggggtttctttcccaggaataagccctcaacatgtgttggctgcatgagtngggagagtgaggggccgggtccaacatctganggggagggtgctgctgggncccctnggctggccagcacaggtcccttt

SEQ ID NO: 688542 - DNA, 84 bp, Homo sapiens
ctagaagattcagcaaagtacttttgtgctcttggggaaccgacgtactgggggataggctcctgggacacccgacagatgttt

SEQ ID NO: 688543 - DNA, 262 bp, Homo sapiens
ccccaaaacctttgggtttttttttccccaaaaaaaaaccccccaagggggggcccccccgggccccgtttttttaaaccccgccggggcccggggcccaaaaattaaaggtttccccccctttgggaaaaatttcccccgttctggggttaagggcccagggccccccccccccggcttttttaaaaaataaattagggggttcccccctttttttttttttacggggggggttttaaacccggcccccccccccatttta

SEQ ID NO: 688544 - DNA, 416 bp, Homo sapiens
  misc_feature (416)..(416): n is a, c, g, or t
tggatgtagagaggctgtaactgtccaagctatacttatggcgtgatcgccctgctgactgtcggcaccgccctactgctgacagagacgaggcatgcacagctgccacagaccatccatgacgtggagagatagagtgcccctaccagtcttcatgagggagagatagcccatgaagcatgttcagaactaagtgggagtggaggctggccctccacagaagctctgcagcatatgctgggagagcagaatggcacgccctgcaactcaagctgggagtatcgaaccctctggctagggacggagtagctgtcacaacccgctctctctgctcatacatccttgagtattaggcttataggaacacgtgacgttccagtgcggactgctgggcacccctctcacggacggagggn

SEQ ID NO: 688545 - DNA, 275 bp, Homo sapiens
  misc_feature (4)..(4): n is a, c, g, or t
  misc_feature (10)..(10): n is a, c, g, or t
  misc_feature (55)..(55): n is a, c, g, or t
  misc_feature (57)..(57): n is a, c, g, or t
  misc_feature (72)..(72): n is a, c, g, or t
  misc_feature (82)..(82): n is a, c, g, or t
  misc_feature (86)..(86): n is a, c, g, or t
  misc_feature (101)..(101): n is a, c, g, or t
  misc_feature (105)..(105): n is a, c, g, or t
  misc_feature (136)..(136): n is a, c, g, or t
  misc_feature (148)..(148): n is a, c, g, or t
  misc_feature (164)..(164): n is a, c, g, or t
  misc_feature (234)..(234): n is a, c, g, or t
  misc_feature (242)..(242): n is a, c, g, or t
  misc_feature (271)..(271): n is a, c, g, or t
gggnccaggncgtctcccccgcagctcggctcccgcgcgctcagcaccgccagcngnactcagatgcaggcngacgagcganctcngggaggccgtgggcngccnccacggccgcggccggcctggcgcgagatcnccacaccgaccngcccggagccgcaccngccggctaaccagcaccgcgcgccgcgcgcgagagcgcgccgcgccgcggcgcacgcgcaggccgcgcancgccgccngcgcccgctcgcgcccgctgcggccgcgngcgc

SEQ ID NO: 688546 - DNA, 126 bp, Homo sapiens
agcaatttaatcaagtaatcattaattagttcccccctatatataaatatatgtaatcaatttcttcaaaaagcttgcttacatgataatcaattagccaaccccatggcctccatgactttttca

SEQ ID NO: 688547 - DNA, 267 bp, Homo sapiens
taatcccttttaagcagagatacacattcacagagagagaatgttttaaaaagacccacaaggggaagggaccaagtaagcacttttaattcattttgattacacaaaaataaggcaaactaaatgattcagaacaattcaatttaactgaagccttctagaaaaatactcaacaggcttcaacaaaaagacttagcgcacataaaacaatcacgaagatcacaatttcagcacaaatatctgaaggaatacacgcaaaacatcata

SEQ ID NO: 688548 - DNA, 207 bp, Homo sapiens
  misc_feature (48)..(48): n is a, c, g, or t
  misc_feature (117)..(117): n is a, c, g, or t
  misc_feature (119)..(119): n is a, c, g, or t
  misc_feature (125)..(125): n is a, c, g, or t
  misc_feature (159)..(159): n is a, c, g, or t
  misc_feature (171)..(171): n is a, c, g, or t
  misc_feature (187)..(187): n is a, c, g, or t
  misc_feature (203)..(203): n is a, c, g, or t
ggaaaaagaagaagaggaaataagagccagcgttagagacaagagccnggtgaaaaaggccaaagccacagccagagccaagaagccaggattcaagcacatgaggagccacgcctntngggggncacggtgcaaagatgggccttccctgggctgtgnctgcaggacagncgtgcccctgtccagncccctccacctgtgtnctga

SEQ ID NO: 688549 - DNA, 413 bp, Homo sapiens
tctagaggatctgctgatacaccaccaagaaagttagattctccaaggtcggaagtgaagacagcctgaccaagatggagaaaccccatctgtagtaaaaatagaaaaattagccgggcacgatggctcatctctgtcattccagctactcgggaaggctgaggcaggagaatcacttgaacctgggaggcggagggtgcggtgggccgagagccgccatcgtactccaccctgggcgacaagagcgaaactccgtcgtgcccacgcgtgtcatcacagcactccgggagggcgatacgggaggatctctgcgagcctaaaagttcgagatcacctcgacacgtgcagatgacgcctacacctctctgcggcttctatagcgataagatgttatggccagaccgcggaagctc

SEQ ID NO: 688550 - DNA, 219 bp, Homo sapiens
agaggattcaggagatgtcacggaggaccaggttggctatgagcagtatcttctgtgccctttgtctcaccagacccaggtccagaccaataagaaagaagggacaagggacattaaaatgaagccagagatatggacagaaacaagaggaaggagggactggaaaagacgttgagagggaacagaaaagaagtacgacaggtacgtgaaccatctccg

SEQ ID NO: 688551 - DNA, 106 bp, Homo sapiens
aatgcaggagtaagccctgagttctcctgactcagcaggaagccaagcccccctcaagtaggatatgggaaacttgtgtgctaccccatccatatacaggacatgt

SEQ ID NO: 688552 - DNA, 812 bp, Homo sapiens
  misc_feature (68)..(68): n is a, c, g, or t
  misc_feature (146)..(146): n is a, c, g, or t
  misc_feature (149)..(149): n is a, c, g, or t
  misc_feature (154)..(154): n is a, c, g, or t
  misc_feature (162)..(162): n is a, c, g, or t
  misc_feature (170)..(170): n is a, c, g, or t
  misc_feature (180)..(180): n is a, c, g, or t
  misc_feature (193)..(193): n is a, c, g, or t
  misc_feature (199)..(199): n is a, c, g, or t
  misc_feature (214)..(214): n is a, c, g, or t
  misc_feature (217)..(217): n is a, c, g, or t
  misc_feature (247)..(247): n is a, c, g, or t
  misc_feature (294)..(294): n is a, c, g, or t
  misc_feature (299)..(299): n is a, c, g, or t
  misc_feature (344)..(344): n is a, c, g, or t
  misc_feature (353)..(353): n is a, c, g, or t
  misc_feature (359)..(359): n is a, c, g, or t
  misc_feature (681)..(681): n is a, c, g, or t
gagaaactgggagagggaggaagggagaaagtgagaagggaaatcggaaagagaaaagggaggaaacnggcagagccagagagaaagaggaagagactgagtgtgaaggagagaggacacaggggatgactgagagacagagagangangagangagagaantgagacangagacttaanggaaagagacccntgtgangtctgacaataaaangantttggacagaacacagacaacgacttggangacgagagagagagggagagaagtgagtgagagacgagactggacangagancagagactcagacgggagaccacagaagacgtgacgatcgtgggngacgacgangggtanggtgtaaacaagggacacgacgacgacgacgacgacgacgaccgcgtaagacgacagggagacgcaaagacgaccaaaagatgtgtgatgtgacgcaggtgagcgacgacgacgagttgagacatctagtgacgacgaccacgcacgtctaacgacggaccaaagggagggcgggacgacctgcctagtgtgccgcagcacccacagcgtcctcttgcccccccgtcactgggaccccagagctggcccttgatggaggggagccgatctcgcaggagctctgagcctggacagcagcgcctccatcatctcctcgctcagnagctgagcccaagaagccacccggggcagtaaacaagatccacgccttgggagagaggcatggctcaggagggatcccacttccggcaatcgaggtggtcatagcggaagtgggcccttctggaccgggtc

SEQ ID NO: 688553 - DNA, 754 bp, Homo sapiens
atcccagcacttgggaggccgaggtgggtggatcacgaggtcaggagatcgagaccaccctggctaacacagtgaaaccccgcctctactaaaaattaccaaaaatttagccaggcgtgctggcgggcgcctgtagtcccagctactcaggaggttgaggcaggaggatggcgtgaacccaggaggcggagcttgcagtgagccgagaatgcgccactgtactccagcctgggcgacagagtgagactccaatcaaaaaaaaacataaaataaaataattagaattaagatttagataaggttccataacaggtcattacggcacagttaccagatattggattacatataaggtctttagttgtactaatgaaacctcaatattccattcacaaataaattcaacctcaatattccagtgcacaattaaaactttatggaaaatatgttcgatcaggtatacctattagaaattagtccattctctaacgggcattgtacgacagttattaaaatttgaagatttacatatattggacccaagaaatgccattctaggaatttattccctctgataaaatgtacacagaaagtattttgttgagatgatattttactcgtcaagactgaaacaacgaatgtccaaaaaggagtgattaattctggagctataaacggggaggcgcgtttatgtcgttggactacagaagtcccccgtgagtagggtctatcgggagggcagaacaaagtggag

SEQ ID NO: 688554 - DNA, 304 bp, Homo sapiens
  misc_feature (2)..(2): n is a, c, g, or t
ancggggattggatcagagttaaatatttatatagtaacttgcataccgaaggttaaaattcaaaacagaaatctcactatagaatatctagtactcccagacaggaaggagacaggtgtataagggtgggggatggaattgtatagggagcgtcaagagtgagggtatgtgggggctggttaggaagaggggcaatgctcattacgaaaactttccttctctgcaggaattgtaaccgtgtaacaagctgatggtcagtgatagcattcatccaaaatggaacaacagtacaaaaagacacct

SEQ ID NO: 688555 - DNA, 303 bp, Homo sapiens
aggaattctagacattgcgtttctgtgttgcaaaatccttcggacattctcagacatctccaagttccatcacgtcagatttggagctggtagcgcttacgatgccccacgtgtgacatctgtcttggtcacagagctgggtgctgccggtcacctgagctgtggtggctccggcacagagtttccggggttcggccatgtctcagccggcagggtggagcctcacaggcaaggggctttggattcattcagtggtttcagtctctatgtaattaacagatgaatatccatgacttggataag

SEQ ID NO: 688556 - DNA, 143 bp, Homo sapiens
ggtccggctccgccctgcgtcggctgacagcttgtcgcatcactgtgccctgcgctgggtcggtggctggcgcaccctggtcggcaagctggcacaccctacagtaccccctaccctagttctcctagtgacaatccctgtct

SEQ ID NO: 688557 - DNA, 362 bp, Homo sapiens
gttgcccgcacttacttgcagactgtaatggccgatgcttacccgcatctccacgtgactgccgaaaaattgttcgtttcagggctatgtgttaaactcgccgcccctgatttgcctgactactgtatgttactttatcctgaactacgcaccattgaaggtgtcttaaaaagtaagatgagtgggttaggcatgccagtacagcagccggcaggttttggaacttactttgataaacctgctgctcattacattctgaaaccgcaatttgcagctactcttagaccggaacagattaacatcatcagcacagcctatactttttttaatgtggaacgtcattctctgttccacatggaaac

SEQ ID NO: 688558 - DNA, 291 bp, Homo sapiens
agtcatattccaatcttacaatgtagtagaaaatcaattttctttccttttaaaaatggtgttctaggctgggtgcagtgggtcacacctattatcctagcacttgaggaggccaagggaggtggatcacttgaggtgaggagtttgagaccagccctggtcaacatggtgaaatcccatctccagtaatacaaaaactaagccaggcatggtggcgcacagctgtagtcccagctactcgggagcctgaggcaggagcactgcttgaacctgggaggcacagattgcagt

SEQ ID NO: 688559 - DNA, 134 bp, Homo sapiens
catcttactacgcggctcgatctgactacgcggctgaagcacccctatgttttctccattaatttctgctcgttttggaatgggaagcatgcccaatctgtccattcctcagccattgcctccagccgcgtagt

SEQ ID NO: 688560 - DNA, 121 bp, Homo sapiens
  misc_feature (114)..(114): n is a, c, g, or t
actttattgctactccacaaacaggcgaaaggttactcggagcgtagaattatggggtactcaatgcaggagatgcatgaggtggtgtccaacgtccaggagtatcgtgagttngtggagg

SEQ ID NO: 688561 - DNA, 322 bp, Homo sapiens
  misc_feature (217)..(217): n is a, c, g, or t
  misc_feature (279)..(279): n is a, c, g, or t
tggaaaaggggtttcaccacgttggtcaggctggtctcgaactcccgacctcatgatgcgatccacccacacctcggccttccaaagtgatgcaatttacaggcatgagccactgcacccggctgatacttggggcaagtttgtggccattcagaggcatcataagcagtgtggcaaaaaaatctgagttgcctgatgtggacgttctcagctacgngaagtaagcggggttctgcctttttgtgacagtgcctacaatacacaatggtcttctttttngcagtccgtttagctccacgttgctcgcattttaagattttcg

SEQ ID NO: 688562 - DNA, 869 bp, Homo sapiens
ggttgcaagacgaccaaatggttcaccccgccagttgcctagcagatggtttgataaaaagccgccgagaaacttgcgggccccacacaggtggtgggggattatccgccctcccccgagccccggggggcagcaatgcttgcaaacaagcgccccccgctcttgtggagtgacaagattgagaaccccgccgctccgcccgcctggccccgtgatggttcacaacacgcctgtggtcacgcggggcgcccctgacctcttccagctcgcaccccagacggatacccggtgggcacgtggcggacagccacccgcgcgagattaccccgccccccatttggcggatgcgcaacccgggaccttctttgcgtgacaaccacacgagctgttctagaggccccactctgcggcgacaacaccaccagcagagaactcctcgggcttgctcccacgaaaaactacgcactaacatcatcatcagcgcaccacagcggcaagatgatgttgcatgaacacacaccccactgttgcgtgagaggacacggggaccacacggggacaactaccgtctaggtaagaaagagagggctaatgtcccctcactcgtgacaacactggcgagtattacttcttgttccgactagatagctcgagcatttccagtcggggcttgttgtatgatgctcccacttcatgaagtgtgtgctactgtactcgattgataacgcagcagagtgggaggggtgggatcctccacgtgatgctcccaggagggcaccatcgtgtcgcctcacgtgcagggcattactgtccaccccccccctcccctcccggcggccccgcccaacccttccgccccacaaagacaa

SEQ ID NO: 688563 - DNA, 222 bp, Homo sapiens
gttgcggagctgaggagcataatcccccaggcgtaagaacatatacactctgtccttcccatggccatgtaactgggagcgacccacagaaggtagaggaggctcaaactgccgccagtgcccaggcttctcaggtcagggagttagggaggcacatgacagtgacatgcttcttagatacatcagcggctgtaaccacagggctgagggtgcctccttgat

SEQ ID NO: 688564 - DNA, 264 bp, Homo sapiens
  misc_feature (229)..(229): n is a, c, g, or t
ggcgcgtcgtcctcctcgccctccaggccgcccgcgccgcgccggagtccgctgtccgccagtctacccgacttttcctgccgccccgccgctgccatgctgcccgcgcgctgctccgccgacaccccggtgacacttggccgcctcgtccgcctacagcccgtgcctatgccagagcgtcctgccgccgccccgtgcttgccccaggcctctggccccaaccagatgntcctttcaaacccccttttttcgcctctcaccaaa

SEQ ID NO: 688565 - DNA, 290 bp, Homo sapiens
  misc_feature (101)..(101): n is a, c, g, or t
  misc_feature (103)..(103): n is a, c, g, or t
  misc_feature (177)..(177): n is a, c, g, or t
  misc_feature (191)..(191): n is a, c, g, or t
  misc_feature (197)..(197): n is a, c, g, or t
  misc_feature (216)..(216): n is a, c, g, or t
  misc_feature (248)..(248): n is a, c, g, or t
  misc_feature (275)..(275): n is a, c, g, or t
tactgccactgcttcctccgctgtgatgtaaggcccgtccttcaggtagttgtgctgccgctcctgttctgccttcagatagagccgggtgaggcggtttntnttttttttacaaacaggcttgtccacaggggcccctcggcggatccgctctcggttgtagcgggcagtgttggnccaccagtcagccntggccntcacgtatcgaaggatcanattctctatgggcgtcgggagcccagggaccncccagggaatgtaggcttcccagcagngccaggccacactga

SEQ ID NO: 688566 - DNA, 190 bp, Homo sapiens
gtagttttctgctagttgactcctagaggatccctttaggatggtgctgtgcgctgaagagggctttgtgcagtacagataacaataaggttgcatatgagctaacttgcatttttctatcagctgaggcaggagaatcacttgcaacccacgagggctggagggtgcagtgagccatgattgctgccac

SEQ ID NO: 688567 - DNA, 295 bp, Homo sapiens
  misc_feature (22)..(22): n is a, c, g, or t
  misc_feature (184)..(184): n is a, c, g, or t
  misc_feature (278)..(278): n is a, c, g, or t
ctcaaactcctgacctcaaatnatctgcccgccttagcctcccaaagtgctgtgattacaggcgtgtgccaccgtgcccggccatagtgtaaaatctttattcttcagtgtggtttatcccaattccaattatacattaggtctaaaacaaaactcaggccttgggaattccaagctttgcccnagagtgaagcccattcccttgctgggattgttctggggacagaagctgcatagctcactgtcctgtggagttgagggaagctatctttccacantggtcccagcaaggggt

SEQ ID NO: 688568 - DNA, 129 bp, Homo sapiens
gacctggctctgtccagttagctaagttgtgatgcaaaggaaaagtcctagaaagaaattaaaatgctattccagtaaacacatgaatgataaagcaaacgcaaaacaaccttattgcttagtttctca

SEQ ID NO: 688569 - DNA, 289 bp, Homo sapiens
ggtcgactttttttttttcccccaagacagagtcttgctctgttatcccacagcctcaacctccaaggctcaagtgatcctcttgtctcagcctcctgagtagctgggactacaggcagctgccaccactcccagctagtttttaaatatttttttgtagagaaagggtctcaccatattgcccaggctggtctccaactcctggggctcaagcaatactcccacctggacttcccaaagtgctgagatcacagatgtgccactgtaccctgcctggttccttttatta

SEQ ID NO: 688570 - DNA, 256 bp, Homo sapiens
  misc_feature (201)..(201): n is a, c, g, or t
actctctttccactccctcaactcccaccccagtgtgtgttccacctctatcacttccctccctctttccaataagctcatacagcaataaacggaaaaatcctaccagaatattcgacaatctggtgatgactcgtctggtcctcttaccctctgccctcagagcagcgaatagcaaagcgcccacacaggcaccctttngtagaattctcattgtcgccacgctagcaatgatgtgatagaggccctggattac

SEQ ID NO: 688571 - DNA, 320 bp, Homo sapiens
  misc_feature (36)..(36): n is a, c, g, or t
  misc_feature (41)..(41): n is a, c, g, or t
  misc_feature (45)..(45): n is a, c, g, or t
tagaggagctgtagaaaatagcgacgcgtgttgtcnttcgnaggngaaggctgatttggcatgaagaagccctgtttgcactggccttagcagccctcccatatccagctagggagctacgtatatagggcctatctccgacacggctcaaaacacgcatctaggagctgcattctgcaaacggaaactgtgcacggggaacacacctctgccccaatgcggcttgggtcaaggattgcggcgccggcctagttctcccgtagccctatgccccccatagggccaaggaggggctggactgccgtcgcaaaattttccgg

SEQ ID NO: 688572 - DNA, 468 bp, Homo sapiens
tacttttccacaaggttaaagctatgtgttttaccataaaggaaacatgtcagagtgcataaaacaaagcgagtcagaaagacactggcatagtacagaacatactaaagatgaagaaatacaggtatcacttacgtagacgtgaatacttcatttctactatcctactgtcagtggcctcttaattttcctctagaaattttctgtgcataggcaagcatgcatagcctacacatacacatgcaaagacagacctttaggaaacctgtaagtggggtcatgctggacatgtgttccctgcaccttccttttttctgttaatagtatgtctcagacttttttttgtaacagctcacatagagagctgcctctcgtttggtggctgcatgatgtgtcatcgaatgggtatgctttggcttatctgcccagtctcctgttggtgagcattcagagtctttccatttcgga

SEQ ID NO: 688573 - DNA, 452 bp, Homo sapiens
cagtcctatgttgtccatcaataggctgaaatacagtgttgcatacacatgtaactactgtgtggagcttgtgtggcagcagcatttgattcttgcttttaagtatttgaacaactttaaaatggtatgagtttttttcctacaaagttttgtagatttgggcagcattattcgggattctttgatgccctctagtataagttcatagtagcactgaactttttataagaaattaaatgtacttttaaaaaattacattgaaatagctttttaaaagcatttaccattagactcagcagttttccttctaataatttatattaagaaaaattgctcaagtattcaaaacactgttcaggggatctttgttcattgcaacatcattggtaacagcaaaaaaatcaaaattacttaaatatccatcagtaaaaaaatgattaaataaactgtcc

SEQ ID NO: 688574 - DNA, 174 bp, Homo sapiens
ggggggggggggttttttaccccccaaaacccctttggggggccccccccccccgggggcgcgggggtggtttgtttttttaaagccggtttttttttttaaaaaaaggggggggccccttggggcccccttttccccgtttttaaaaaaaggggttttttttgggggtcccca

SEQ ID NO: 688575 - DNA, 1211 bp, Homo sapiens
  misc_feature (403)..(403): n is a, c, g, or t
cgaaggagacccggtctccgacggctcatggcgatgctggtcctagtacccggacgagttatgcggaactctgggtggccaactttggcgcttcttgcctcggcggactcgagattctggggcccacgccgaggggactgcgaggagtcttgctgaaggcagttctgcgctgcggcaatgcggatcgacgtggcgtgcctcggaggcgccctgtggcgtattgccatgggaacccgtggccctcaggcacctgcgaggccgctcacccgcccgatgttacgcacgaagggggccccggaagagctgcggcacgacggccacctcgaaggccctcgggggcctgttgtcctgtgaatgcatctattatgacaactacagcagtttggctagttggatgagacgnctatatatctggtctggacactgacactgcagcgttcagattgcaatacgacaaatggcaacgagaaggattcatgagaaagggaactggagcgagcctggacaagcagtcgggcacagtccattttaagcatttggcggtgaaccgtagtaagtccgcttccacgagaggtcattacgtggtgcgacgctcgttgagactgagcaagggtacgtacctatgggggttcaggagcggtataccttgacgttgtactttatatggccttcaggcttctatttgtgctcgctttggagtaggttcatggatctcgatgagacgaaacgtacgaacagcgactgacttgagctttccaacgtgatctccgatcgggacttagacccacattagggaattaccggccattttacacgaaatgctatcatggcgccacgaagttccctaataaccttccacaacccgtattaaacaagtctccaacggcatagatcttgcagctcgccaaggaaagaaaagagggggaactcgcggaataaagtggaaagaggtcccaattccggacctacagaactgtcacgtgggtttgcacacatagggacacagttgtttggcgttcccgctcaagaaaagacttggtggttaggagcgttgtgaacccatgggggctgaggccgaacgtaaggaatacgtaagggggttccaggaagattcaaaaaggttggcgtgtcgcaccacgggaggtgccattttaatcaacggcaaggcgtggtataactttcatcgaaggaccccctggggctcccccaag

SEQ ID NO: 688576 - DNA, 223 bp, Homo sapiens
ttgcggtcacataacggaattaaatctgtcgaaatgcaccatgaagcttggagtgaagctcttccttggggacaatgtgggcttcaatgtcaagaatgtgtctgtcagggatgtacgtcgtgacagggaagatagtgacagcaaagatgacccaccaatggacgcagctggctacacagctcaggtgattatcctgaaccatccaggccaaataagcgccggc

SEQ ID NO: 688577 - DNA, 723 bp, Homo sapiens
gcgccggtccatgaccgcgcaccgttcctgagggtgccagcgccacccgtctcctgcagctcggcaccatgcgcgagatctgtgtcatatccaggtgggccagttgcgggcgaaccatgtatcgggcgcctacaggtttctgcgtgagtgtcatcaagctgatgaagcagttgggactcgaaccccacaggcagattaccatggagtaccgtgacttgtcgagctggagagaatcatgcgtgtatcgtacacagtgatggctgctggtaatcaaagtatgtagcctcggagaccactcctggatgtgtatctgtgcagtgcctggtgcaccatggaacctgctgttgcaggatgctggatccctgtcggccacaggatgcttgcagtacccagaacagacgtatgcgatgtttcgtgagcgcagaagctgggagaccgggggaactagagctggggccgaagggaccacatagctccacgtagtggatgcccgcaagccttgtggtctgacctcgggatcccttggcacttgttgtgtgatgggcaccacgtgcggctccaggaggatggcgttgctgaacttgctcccttctgaggaggccttgtccccaggcgttgcaacccacgacttgcatactttgtgcggcgtgggccggggcacgcggggcgattcgccgcgcgaatgggcctaagcgcaccgttggcgtttgccaagtcgaatgt

SEQ ID NO: 688578 - DNA, 126 bp, Homo sapiens
gcaacctccatctcccggggccaaggcaggaggattgcttgagcccaggagttcgagaccagcctgggcaacatagtgagtctctactatttattaaaaaataaaataaaataacacctacaaagt

SEQ ID NO: 688579 - DNA, 540 bp, Homo sapiens
  misc_feature (109)..(109): n is a, c, g, or t
ggtgtgtcgaaggtcacggcgcgctcacaatggagctctcggagtctgtgcagaaaggcttccagatgctggcggatccccgctccttcgactccaagcgccttcacgncttctccatcgcggggcggcattccagagtctgctggacgcccaggcggacgaggccgtgtagatcatccagattgaaacatatcgacccagtgcttttaaaacattgtcatgcagcagttgaatttacatactagaggcaggaaagcacggagttgacaagtcaattctaagcacttatctagaagatgtaatttgtgacagagagggaatagaactgtttcggcaggaatatcagaataataagaattccctagaaatcctactggaagatataggcagatctctccctcatataaggatgtttctgggcgcttgaatatcagaataagaccaatcaactccataggatgtacagacctgcatatttgggaccttaaggtccagaacagtgatccccatctatccagagatagttcagttgcgcatgca

SEQ ID NO: 688580 - DNA, 179 bp, Homo sapiens
atctagagttcccattccaaacagccccgacagcagaggctcatctttgcaggcagcagctggaaatggccgcacatctttctgactacacacatccatgaaaggagtctgaccctgcacctgtcctgcgcctcatgggtggctgttaattcttcagtcatggcattcgcagtgcccag

SEQ ID NO: 688581 - DNA, 185 bp, Homo sapiens
  misc_feature (67)..(67): n is a, c, g, or t
  misc_feature (82)..(82): n is a, c, g, or t
  misc_feature (163)..(163): n is a, c, g, or t
ggaagaccttgttgcagatcgcctgcgtcgcctagagagtcggcaggcgcgatcacgcgctgcgcgnagatcttgttgaccngatcgatgcacgcctggacgttgtccgaggagtacttgcgggacgtgccggtgacgccgcagagatccgtctccgtcgacncgcccgcgacttccgcgtcgac

SEQ ID NO: 688582 - DNA, 349 bp, Homo sapiens
tatactcacacacaggcatggatgcatgtgtgtgtaacaaacactttgaccctgggaactgggtatacctctctccatgcgagccagaggctcaggcatacgtgttcacgctcttccgttcttggggcctgaatcagcggattgccatagttgagtatgcgcgacagtcgcccagacattagacggtgacgttcacgttccggcctttgacttcctgcaagggtcatcagatcacgaggaattcagaaggctagtctgttgtccagagttggtgggatcaatctgtatgtatgatcatccacatgatattgaacatgaaggagccggtgtataagttagggcggccgct

SEQ ID NO: 688583 - DNA, 220 bp, Homo sapiens
ggtggaccataatacactccaaacaggtatggccatggtactctccttatcccagctatgctcgggcaggccaagaatgctgcccagtgaacacgccaatgcagatcaagatggcagtcacctgccccaagagagccaccggatctccttgggtgagatctcactgaggtacatggggagcacactgagggcgacgcctccatctatgcccagccgcggc

SEQ ID NO: 688584 - DNA, 121 bp, Homo sapiens
tgggggggggatttttttcccttttttttttgggggggggggtccccccccccctgggcccctgtgttttttaaggggttccaaaaaaaagggcccccccttcattaaagaattgggcgga

SEQ ID NO: 688585 - DNA, 369 bp, Homo sapiens
gaggatccccgacgagttgttcgagttacttgtgaggctgaggggggaggatggctggagctggggaggcagacgtccccttgaaccaagatcatgccagtgtactccagcctgggccacacagtgagaccctgtctcaaaaagaaaaaaaaacacatcttggtcataaaaataactcaataaaaatactgaaagaacatgatggacaatattttcataatctaggaatgggaagatcttaggaagacaggaaactcaaaaaccataaaggaagactgacatttatctacagataacaaaaaaatagatcagaactaaaatatggaccatactataaacaatggcaaatgattaactcggacaagtcgt

SEQ ID NO: 688586 - DNA, 623 bp, Homo sapiens
cacttccgtgactaggactacagttgtagtctctcgtcagggagagagacgtacaaactggagtgtaaaaaaatcagaggtggaggtcaggaggttaggtccagaagaaaacctcgtctggagcccagcctgcatcatctacgtcatggaagagtctggagtccagggcacccgtacagcacccgcccaggagcaagtcatccgtggccatcccagcccgagccccggccgtctgggaggctcatgaggcagacagtgggggcctgtgaggtggggatgggacttgagagaccaaggctgcagagaccatctatgtgacccaggagcacgcgactggatcccgtcatcgtgcgcacgagggccaaggaacgaccgcagagcactgcgctcagcaagtgctgtcgttgtgctgaaagacaaccaatgaatgctgattgacggctgccggatttatacgggtccagagtggcttccagcgatgagctagtgtcaaggaacagacattggggaatacgtgcgagccgagcaacttgtatcgcaggtgggaagtaacgagtatattcaacgtgtgcacccgattattttgagagcgagatttatcggagattcagcaggaaggggag

SEQ ID NO: 688587 - DNA, 740 bp, Homo sapiens
  misc_feature (18)..(18): n is a, c, g, or t
  misc_feature (20)..(20): n is a, c, g, or t
  misc_feature (22)..(22): n is a, c, g, or t
  misc_feature (713)..(713): n is a, c, g, or t
  misc_feature (726)..(726): n is a, c, g, or t
  misc_feature (734)..(734): n is a, c, g, or t
cccactctcctcttctcncnangcgccgagcgatgggcatctctcgggacaactggcacaagcgccgcaaaaccgggggcaagagaaagccctaccacaagaagcggaagtatgagttggggcgcccagctgccaacaccaagattggcccccgccgcatccacacagtccgtgtgcggggaggtaacaagaaataccgtgccctgaggttggacgtggggaatttctcctggggctcagagtgttgtactcgtaaaacaaggatcatcgatgttgtctacaatgcatctaataacgagctggttcgtaccaagaccctggtgaagaattgcatcgtgctcatcgacagcacaccgtaccgacagtggtacgagtcccactatgcgctgcccctgggccgcaagaagggagccaagctgactcctgaggaagaagagattttaaacaaaaaacgatctaaaaaaattcagaagaaatatgatgaaaggaaaaagaatgccaaaatcagcagtctcctggaggagcagttccagcagggcaagcttcttgcgtgcatcgcttcaaggccgggacagtgtggccgagcagatggctatgtgctagagggcaaagagttggagttctatcttaggaaaatcaaggcccgcaaaggcaaataaatccttgttttgtcttcacccatgtaataaaggtgtttattgttttgttcccanagaaaaaaaaaanaaaacaancaaaaa

SEQ ID NO: 688588 - DNA, 1019 bp, Homo sapiens
accaaggtccttctgtgatgctgtccactgaggcttttctgtatgtgggcaccatgctggatgggggtgacttgtcccggtttgtactgctaatgaccaactgctatgccacacccagtagcaactccacagaccctgtgaaatacttcattatccaggacagttgtccacgtacagaagatacaaccattcaggtgacagagaatggcgagtcatctcaggcccgattttctgttcagatgttccggtttgcaggaaactacgaccttgtctaccttcactgcgaggtgtacctatgtgactctacgagtgaacagtgtaaacctacctgctctggtactagatttcgaagtgggaacttcatagatcagacccgtgtcctgaacttgggtcccataacacgacaaggtgtccaggcctcagtgtccaaggctgcttccagcaacttgaggctcctgagcatctggctgctgttgtttccctcagccactttgatcttcatggttcaatgatggaaagcagaaaacctggtgtggctcccagctcacttcctgctggccaggagtggggatgcaggctggttatcagccaggagagagggagctcacactgcctccagcttgcacgtactctttctttaatcctcaccatcaaaaacaagttggcatctttcagtgctgttcttccttcaaatgtgatatgtatgaagcccctgtctcctgaaggaatgtggcaaaataataagtttaaagtatcagcttttggactcattaattcaagtcgttacagaacacacagttgctgtgagcactgtctgttgtgctgggcattacatggtgggaataaaacagatcctttctctatctttatggacttcatagatgctctaagaaactaggctcaatgcatgttctgctatgtgatctaagatgagacacacaatgtatatgaacttcacctgtctatccattcatgtatacatccatcctttcactcaataaacatttgccaagtcaaaa

SEQ ID NO: 688589 - DNA, 714 bp, Homo sapiens
  misc_feature (18)..(18): n is a, c, g, or t
  misc_feature (20)..(20): n is a, c, g, or t
  misc_feature (22)..(22): n is a, c, g, or t
cccactctcctcttctcncnangcgccgagcgatgggcatctctcgggacaactggcacaagcgccgcaaaaccgggggcaagagaaagccctaccacaagaagcggaagtatgagttggggcgcccagctgccaacaccaagattggcccccgccgcatccacacagtccgtgtgcggggaggtaacaagaaataccgtgccctgaggttggacgtggggaatttctcctggggctcagagtgttgtactcgtaaaacaaggatcatcgatgttgtctacaatgcatctaataacgagctggttcgtaccaagaccctggtgaagaattgcatcgtgctcatcgacagcacaccgtaccgacagtggaagggagccaagctgactcctgaggaagaagagattttaaacaaaaaacgatctaaaaaaattcagaagaaatatgatgaaaggaaaaagaatgccaaaatcagcagtctcctggaggagcagttccagcagggcaagcttcttgcgtgcatcgcttcaaggccgggacagtgtggccgagcagatggctatgtgctagagggcaaagagttggagttctatcttaggaaaatcaaggcccgcaaaggcaaataaatccttgttttgtcttcacccatgtaataaaggtgtcaattgtcctcgttcccgatgaaatatacctgagaaggggaaccaaaaggaaggg

SEQ ID NO: 688590 - DNA, 406 bp, Homo sapiens
ttattcccccggttaggtaactctggcaaattgattactttttacaacaaggtgttatcttagctaaatttgatgggtattattttgcatatatagatagttgaatgctatggcaggacgcagtggctcatgtctgtaatcccggcactttgggaggccaaggtgggtggatcacttgagaccaatagttccagaccagcctggacaacatggtgaaaccccatctctactaaaaaaaatacaaaaagtagccgagcgtggtggcacacacctgtaatcccagctactcgggaggctgaggcacgagaatctcttgaacccaggaggtggaggttgcagtgagcagagatcatgtcactgcgctccagcctgggtgacagagtgagactctgcctcaaaaaaagga

SEQ ID NO: 688591 - DNA, 462 bp, Homo sapiens
  misc_feature (435)..(435): n is a, c, g, or t
  misc_feature (448)..(448): n is a, c, g, or t
  misc_feature (456)..(456): n is a, c, g, or t
gggtccaccgccgccaccatgcctcgtgggaagccgcatgcgcgtacttcccgtgccagtcagccgccccgaacgggacgcctctgttgagctcgcactatgcgctgccgcctgtgcgccggacagaagggagccaagctgactcctgaggaagaagagattttaaacaaaaaacgatctaaaaaaattcagaagaaatatgatgaaaggaaaaagaatgccaaaatcagcagtctcctggaggagcagttccagcagggcaagcttcttgcgtgcatcgcttcaaggccgggacagtgtggccgagcagatggctatgtgctagagggcaaagagttggagttctatcttaggaaaatcaaggcccgcaaaggcaaataaatccttgttttgtcttcacccatgtaataaaggtgtttattgttttgttcccanagaaaaaaaaaanaaaacaancaaaaa

SEQ ID NO: 688592 - DNA, 946 bp, Homo sapiens
  misc_feature (18)..(18): n is a, c, g, or t
  misc_feature (20)..(20): n is a, c, g, or t
  misc_feature (22)..(22): n is a, c, g, or t
cccactctcctcttctcncnangcgccgagcgatgggcatctctcgggacaactggcacaagcgccgcaaaaccgggggcaagagaaagccctaccacaagaagcggaagtatgagttggggcgcccagctgccaacaccaagattggcccccgccgcatccacacagtccgtgtgcggggaggtaacaagaaataccgtgccctgaggttggacgtggggaatttctcctgtgggactcagagtgtgagtgagtgcccatttgggagatggcgtgggaaaacgcatcctaaatcggtcttaagattcatccaatgtggggcctggctcggtggctcacgcctataagcccagcacgttgggaggccgaggcgggcggatcacctgagtgtcaggagttcgaggtcctagcctgggctaaccagagtgagactctcatggttagaacaagaagattcaacgtgcgtattcaggcaagtaactcgtgtgggctttatgacccaaggcattttgaagctttctccgttgccatgacacgtatctcaaggtacctggggagttcattctccaggccaggcctgtcctgcttccaatcgtcgtcttgcttgacgattggtgtctctggttcgctcatgtgctggcatgtgccagtggggtgactctcggggttcccttgccagccatcctggctcctggggtcgaaggtgattctccgtggcctcggtcgctcgccatgaagtcgtgggattaacaggccgtgtgcctatctggcccggtctgcttcgtgctatagtcaggtagatgacggtggttcacacgcatggttgggccagggctggtctctcccattcttggggcttttagctgattccaccggctttgacctgcccatgttgctggggtaccggtgcgttagttccgtgtgtcggactgctcgcgtttccgga

SEQ ID NO: 688593 - DNA, 637 bp, Homo sapiens
  misc_feature (18)..(18): n is a, c, g, or t
  misc_feature (20)..(20): n is a, c, g, or t
  misc_feature (22)..(22): n is a, c, g, or t
cccactctcctcttctcncnangcgccgagcgatgggcatctctcgggacaactggcacaagcgccgcaaaaccgggggcaagagaaagccctaccacaagaagcggaagtatgagttggggcgcccagctgccaacaccaagattggcccccgccgcatccacacagtccgtgtgcggggaggtaacaagaaataccgtgccctgaggttggacgtggggaatttctcctgcgtgcgctcaggagctgttgtactcgctatacatagcatagggcatccatcgagtgatatgtgctacacattgcgatctaacttatagcgtaggctgtgcttctgtacctaatgcactccctgggtagataagcaagttcgcatacggtgctgcatctgacagtctacgaccgttagcccgactaggtggctacgacgctcccagctagtgccgcatgccccctgcggtgccgcacatgaagcgtgaagccaagctctgacgtccgtgcaggcacagacagagcatcttcgtactacatatgaataactgtatcttaacacacacaattccatgaagcaaacactatgcatgacacagggaacagacagatcattgcctgatacatcacgtccacgctctccctt

SEQ ID NO: 688594 - DNA, 1520 bp, Homo sapiens
  misc_feature (1119)..(1119): n is a, c, g, or t
  misc_feature (1305)..(1305): n is a, c, g, or t
gataagattcacagcggttttgccagcttggaagatatgtggcagctcaaacatccatcctgaacgcactgaatgacttcagtctgtgcagtctgcttactcaattgggcagacggaggagctatatgagtcggcaggtctactggcgtgcctggaagggctgacacagagcaatgatgtaccgccatgaaagtgcctggatccacagagcagcatcaatgactggaagcaagggggagaccgcatggacctcatggaatcagtacgactgcaatcatgccctgcttcgacctcgctcgaagcacgtggcgagtagcatggcaacaattacgaatatgatcatggcaatgatcaactatcgtcgttatccctatcgatcggcacttagtatcaaaaggctccagccatatcaatccatgagtacactccattgtacatcgtgtagaggagaaccttgtcatcgttacctacgcatcgtcgcgcagacaacggtggggactcatctcctcgaagtacggcgtgacgatgcggcgtatcataatagacgggcctgtagaatcatccttgggtgtcctggaagcacacgattgcactaagcgcgcgttcggctagaggtctacctgtggacctctagacatgcacagctcgaagctactaccgttcgctcggaactaacgctaataggactactggttagctagtgaatactctgcggaccttggggcactagagaactaggtgaaactatcgtaccaaaggagaagaaagccccccatatgccaagcagttgaggcacacacacagggataccattgtgcatccaggaagagtatcctgtcagaatggggggcgttgggccttaacggaacaagccaggttggccagaacatgagttacttcatactggggagtggccaatgctactattcaagggtatagctatgcaggggggacaacaaggagccccctatcccggtagcaagacaacacaagaaacccaaagaacagaggcatgtaagaatcgagagcggcgaatgacaggctgaaagatagtgcccgaggggaagcgtgccggaaatcctatcatacgcgaggaagatagggccccctgcggagcanagggtttgacgcagaaaggggaggtttaaccgggaaaatgggctagccggagccaaggggccaagggaggaaaagaagaccgctatataacacacccagaacagggaaaacgggttcatgtgcacagaaaaacaccatcgccgcgagaatccaccaaagaagaggtaggagatgagcgaacaaccnaacaagaatggacgcagtaagaggagaaacaaacagaacaaaagagacgatgccacaaaggacacacaacaaaaaggaagaaaagagaacgagaatcacccaaagccagagaggcgaacaacaaaagaaacgacaacagtaggagaaccacgaacgactgaccaactgagccagcagcatcatcaacaaaaaaagcacaacgagaggaggggggc

SEQ ID NO: 688595 - DNA, 304 bp, Homo sapiens
  misc_feature (18)..(18): n is a, c, g, or t
  misc_feature (20)..(20): n is a, c, g, or t
  misc_feature (22)..(22): n is a, c, g, or t
cccactctcctcttctcncnangcgccgagcgatgggcatctctcgggacaactggcacaagcgccgcaaaaccgggggcaagagaaagccctaccacaagaagcggaagtatgagttggggcgcccagctgccaacaccaagattggcccccgccgcatccacacagtccgtgtgcggggaggtaacaagaaataccgtgccctgaggttggacgtggggaatttttcgtcgcgggtcgcacagtgtggtgatcgctgaaaacaaggtagctaggctgttgtgtcgacatggtcagtcgtaga

SEQ ID NO: 688596 - DNA, 286 bp, Homo sapiens
catagtcaaacagtgccttttagttgagttttgagatagggtcttgctcctgtcacccaggctggagtgcagtggcagatctcagctgactgcagccgcctcccgtgtacaagcgattcttgtgcctcagtctcccgagtagctgggattacaggcgcgatctagcatgcctggctaatcttttttttttttttttacctttggcacttgtttgtggcctctgggggacccctctagagtctccctgtgcaggcttttcaagctttggcacttggcccgtccgttt

SEQ ID NO: 688597 - DNA, 376 bp, Homo sapiens
gctccctacgcctctatcgatgctcatgagaaatactccacggcctgcttcaccacttccgcgaggcagtccacctcgtccggcaggttgtaaaagtagaagctcgcccggctcgtggcgatcgcgcccagcttacgcatcagcggctgcgcgcagtggtgaccggcgcgcacggcgattccctcggcgtcgaggaaagtggcgaggtcatgcgggtgcaccttgtcggcggtgaagctcagcacgccgccgtgaagctcggatttcgcgggagcgaacactttgatcgtgggcacggcgaggagcttttccttcgcgtacttcacgagcgcgctttcgtaggcgtggattttgtccatgccgatctcggcgaggt

SEQ ID NO: 688598 - DNA, 405 bp, Homo sapiens
agccttgaatattgcaggacccaagaatctgccagtatgtatagccaggtgcacttggggtattgagtgtctcagacagccgcgcttgaagttggtctgccctcagggtccaattcccagactctcagagaccttgtccttagcggtgctccagtagtctttcagggacctgaagccttcgttcacccagcccgtggcttgttggcccacttggatctcgtgcacgttgctcagtgcatccttgccgtgtcttggtggcgtgcttcatgtagccgtgcatgaagttgagaagggaggctatcctcggcttctaagtctcggacagagcccaggagcgacaggagggccaccacaaggagtacccgggtgtgcatggcacctctgttcctagaacatctgtctcta

SEQ ID NO: 688599 - DNA, 966 bp, Homo sapiens
  misc_feature (18)..(18): n is a, c, g, or t
  misc_feature (20)..(20): n is a, c, g, or t
  misc_feature (22)..(22): n is a, c, g, or t
  misc_feature (928)..(929): n is a, c, g, or t
cccactctcctcttctcncnangcgccgagcgatgggcatctctcgggacaactggcacaagcgccgcaaaaccgggggcaagagaaagccctaccacaagaagcggaagtatgagttggggcgcccagctgccaacaccaagattggcccccgccgcatccacacagtccgtgtgcggggaggtaacaagaaataccgtgccctgaggttggacgtggggaatttctcctggggctcagagtgttgtactcgtaaaacaaggatcatcgatgttgtctacaatgcatctaataacgagctggttcgtaccaagaccctggtgaagaattgcatcgtgctcatcgacagcacaccgtaccgacagtggtacgagtcccactatgcgctgcccctgggccgcaagaagggagccaagctgactcctgaggaagaagagattttaaacaaaaaacgatctaaaaaaattcagaagaaatatgatgaaaggaaaaagaatgccaaaatcagcagtctcctggaggagcagttccagcagggcaagcttcttgcgtgcatcgcttcaaggccgggacagtgtggccgagcagatggctatgtgctagagggcaaagagttggagttctatctccgaaaatcagccgcagcaataatctgttgtctcaccatgtataaggtgttatgtctgttccaaaaaaaaaaaaaaaaaaaaaattgttggggctggcctggaaagtttaaaccaccgttggggcgcggcccgtgttaggtgactggccatgtgtccctagagaccccgggcctggactgggtgggttccacaataaaaaaaggcccgggggaccgaggtctggacaattccagtggggttcggggctttggttctacacgggggtccggggctcattttcaatacgcccgccctgtagnnagaaacacacaaacaacacagaaaacaacacaaaaac

SEQ ID NO: 688600 - DNA, 582 bp, Homo sapiens
  misc_feature (12)..(12): n is a, c, g, or t
  misc_feature (74)..(74): n is a, c, g, or t
  misc_feature (212)..(212): n is a, c, g, or t
  misc_feature (262)..(262): n is a, c, g, or t
  misc_feature (432)..(432): n is a, c, g, or t
  misc_feature (437)..(437): n is a, c, g, or t
  misc_feature (462)..(462): n is a, c, g, or t
acgatggttggnagctcccatgttggttaccatcttcttggctcactatctcctagttcccgcggccggacaancttccgtcaaagtattcgacgttgcttttcagctacgagataacccccgtgacatatctggccttgtcttggtcgaaactatccttgggctcaacgacaactcatgcatgcccgagtgcctacaacgaggatcctccntcgtcctctacctatagctcatggacaaggtcaagtgcgttcctaccgtncaatggggttatgaaatatgctacgacattcaaaaggcgcgtctaaatcaagcgaagccaagagcacttttgaatgatgacgatccaatcaacgaggagacactatggcacgactccaaggagatgatctactcaatgcatggcatgcctcgagttttcctatatggttnggtanagatgacgtgctactacatcaaaanccttacaaagcaattcggacgagataagatgccactgatggacgtagccacgacaccttatgatgtgcccatcacattaaagatgttcaacgggtatccctccttgtggaataatgccct

SEQ ID NO: 688601 - DNA, 787 bp, Homo sapiens
  misc_feature (18)..(18): n is a, c, g, or t
  misc_feature (20)..(20): n is a, c, g, or t
  misc_feature (22)..(22): n is a, c, g, or t
  misc_feature (760)..(760): n is a, c, g, or t
  misc_feature (773)..(773): n is a, c, g, or t
  misc_feature (781)..(781): n is a, c, g, or t
cccactctcctcttctcncnangcgccgagcgatgggcatctctcgggacaactggcacaagcgccgcaaaaccgggggcaagagaaagccctaccacaagaagcggaagtatgagttggggcgcccagctgccaacaccaagattggcccccgccgcatccacacagtccgtgtgcggggaggtaacaagaaataccgtgccctgaggttggacgtggggaatttctcctggggctcagagtgttgtactcgtaaaacaaggatcatcgatgttgtctacaatgcatctaataacgagctggttcgtaccaagaccctggtgaagaattgcatcgtgctcatcgacagcacaccgtaccgacagtggtacgagtcccactatgcgctgcccctgggccgcaagaagggagccaagctgactcccactatgcgctgcccctgggccgccagaagggagccaagctgactcctgaggaagaagagattttaaacaaaaaacgatctaaaaaaattcagaagaaatatgatgaaaggaaaaagaatgccaaaatcagcagtctcctggaggagcagttccagcagggcaagcttcttgcgtgcatcgcttcaaggccgggacagtgtggccgagcagatggctatgtgctagagggcaaagagttggagttctatcttaggaaaatcaaggcccgcaaaggcaaataaatccttgttttgtcttcacccatgtaataaaggtgtttattgttttgttcccanagaaaaaaaaaanaaaacaancaaaaa

SEQ ID NO: 688602 - DNA, 105 bp, Homo sapiens
tatccctgaaaaatttatttcaaaatcttccaggtacattgtctaactctctttcacttctcaggcagttcccccaccctcatagaacctgttgcatgcaactta

SEQ ID NO: 688603 - DNA, 189 bp, Homo sapiens
  misc_feature (40)..(40): n is a, c, g, or t
  misc_feature (162)..(162): n is a, c, g, or t
  misc_feature (175)..(175): n is a, c, g, or t
  misc_feature (183)..(183): n is a, c, g, or t
tcacctgccgtggccacgcaccgtacagtgtggcgagcangatgctattgctagagggcaagagttggagtctatcttaggaaaatcaaggcccgcaaaggcaaataaatccttgttttgtcttcacccatgtaataaaggtgtttattgttttgttcccanagaaaaaaaaaanaaaacaancaaaaa

SEQ ID NO: 688604 - DNA, 1351 bp, Homo sapiens
  misc_feature (91)..(91): n is a, c, g, or t
  misc_feature (120)..(120): n is a, c, g, or t
  misc_feature (139)..(139): n is a, c, g, or t
ggcacgagagacgttcgtggtggagtgagaggttcccaggggaggaatgtgcaaagtcccagctttggcttctactccctcttctacttancaggacagtgggggtctcctccgtcctgngcgtagttctgggagccgngccctcgctcctccctgggatggggctgccgcttctccgccggacttaagtcgggccctgttgcctcagtactggagtgcagagctgaattcgggccactttgtcttttccacagcctgtgctcactgccaaggggacaatgacggcctccagtgtcctcctgcacactggacagaagatgcctctgattggtctggggacatggaagagtgagcctggtcaggtgaaagcagccattaaacatgcccttagcgcaggctaccgccacattgattgtgcttctgtatatggcaatgaaactgagattggggaggccctgaaggagagtgtggggtcaggcaaggcagtccctcgagaggagctgtttgtgacatccaagctgtggaatactaagcaccaccctgaggatgtagaacctgccctccggaagacactggctgatctgcaactggagtatttggacctctatttgatgcactggccttatgcctttgagcggggagacaatccctttcccaagaatgccgatggaactgtcagatatgactcaactcactataaagagacctggaaggctctggaggtactggtggcaaaggggctggtgaaagccctgggcttgtccaacttcaacagtcggcagattgatgatgtcctcagtgtggcctctgtgcgcccagctgtcttgcaggtggaatgccatccatacctggctcagaatgagctcattgcccactgtcacgcacggggcttggaggtgactgcttatagccccttgggttcctctgaccgtgcttggcgccatcctgatgagccagtcctgcttgaagaaccagtagtcttggcactagctgaaaaacatggccgatctccagctcagatcttgcttagatggcaggttcagcggaaagtgatctgcatccccaaaagcatcaatccttcccgcatccttcagaacattcaggtatttgatttcacctttagcccagaggagatgaaacaattagatgctctgaacaaaaattggcggtatattgtgcccatgattacggtggatgggaagagggttcccagagatgctggacaccctctgtatccctttaatgacccatactgagacctatagtttctcagcttccctttcagttctcctgctaagcattgcctgctactccccagaaagaaggaatcaataaagccattgaagtgtaa

SEQ ID NO: 688605 - DNA, 177 bp, Homo sapiens
agacaggctcccacgatgaatctcaggacacgtgggctgcctggttgttagtctcactgcctagtctctagtcgtgtccctagagatgaattcccttccccacatccattggctggagtgggagactagacactggtggatagctgcagaataaaaaagaaagaacgaaggcggccg

SEQ ID NO: 688606 - DNA, 944 bp, Homo sapiens
gacaggcgtccgggagaagatggctgtcccagcattgtccgggctctcccggcccgcgtgcgatgctgcagtgacctctgaggtcagaccatgtgccaagcttgtgaggcctcctgtcaggtatgcggtcattggaaggtcagtcgaatgccatagcatcttatatatcgtgcgtgcagtcaatagactatgaatattgagagcctggcagcgagaagtagataaatggagtatgtgtagatgatgtagcactagaaatcctgaaggatgcccactagtgtgactggattacatgtcctgacgtccctattgtgaagcgttccattataagtgtgaaggctaatatgacatcacagcgaaagagaggttcgtctcccccgtcatctaacgaagtctgatcaattgtgcttgcttgatatatggtcgattagtgctatacccaagggagtcgaactgctggcctgatcttaccatgatgatgttggtccatctgccggagagatacctatgccgaccagtgactctctgaatctcctttagaaggatgtcacactcgcttgaatttccaaacttgttctcacggagcggtcctaggtcaagggtcaactgtttctgaattgcggaggccacagtactggtccgtgcaatctcggggtgggaatgatggagcgcattgggagaaattgtttgtcactgtctgttaagcccttgattcatgaaggtggaagggatgggggagatgtctaaagtgttggtagtggcgtcagtgaaatttaactgggggccggaataaaagctgctgaaagatgaaaggtgtggagaagcaaagaaggtggggggggcaaaaaatattacaaagggggggcgcccgattagtgaaggcaagagagaagggggtcaaaaaaccgggaggggtgaacaagaaggtgggtaaagaaaaaacg

SEQ ID NO: 688607 - DNA, 206 bp, Homo sapiens
aaaaaaaaaaaaaaaaaaaaaaaaaaaaaaaaaaaaaaaaaaaaaaaaaaaaaaacggcacgagccagagatgctggacaccctctgtatccctttaatgacccatactgagacctatagtttctcagcttccctttcagttctcctgctaagcattgcctgctactccccagaaagaaggaatcaataaagccattgaagtgtaa

SEQ ID NO: 688608 - DNA, 296 bp, Homo sapiens
ccagggaaggttgggcccatgccaacccccaaccagggggtttttttggtggtatgggcaaaaccagggcctgggccatccaccaaaggcttttgggcaggtttttccaccaaccaatttttccggttaatagggttccaaaattcaggtagggttttaaccttgctgaaggtaaagattgacccccaggccccgggggctttggtaatggcttttggttttggtttaaaggcaaccccggcttgggcggggcattttttgttttttttaaaataaaaggttgaccggcccggcca

SEQ ID NO: 688609 - DNA, 522 bp, Homo sapiens
ggacggagctccccttggtagccctacattatgactccgcgcaagagtaccagtgtctgcctcacttatgatatgggaccacggcggggtgaagagtgaaagacttagctgtttcgtcacctcaccgaccacttctgtttgtgacggcgccggatcgctgcgagagtgactccacgcacgcttgatgttcaggcggcggatcccccgctgcagggtcacaaccccaccgcgtggagaacactcctctcgattcgcaccctcgtgaggggccttcaacgatgctgtctttgtctatagcaagacgccgagtagtcaattagattagatttttcttcgggaggttgttggcagaacatcatgtcttttataacatacggacgaaactgcttcgtgtgtatatggcagaaagacccctcgccacgcaacacccgggggagtaccaaattcatgtggaggtcccacccccctacctccctccccgctcttattagtagtagcccctgataatcacccaacatgaca

SEQ ID NO: 688610 - DNA, 296 bp, Homo sapiens
  misc_feature (270)..(270): n is a, c, g, or t
  misc_feature (273)..(273): n is a, c, g, or t
aacacggtgcctgagacttgacatgcttgaactcagaatagtcccctgtacactgtcacatgcgtagtaacaggtgacccgctgtaattctcgagcgagggagacatagtaccgttgcagatagtgggtttccgtgaaactgctggcaatgagaccttcatttctttccagatttatgatcagttctttgctttcccgttgtagtcgaatattcagcacttctggatgattcttggagtcgaagctcttcactgggatccagaggtcccnacnccgaacagaggcacagatgcagt

SEQ ID NO: 688611 - DNA, 468 bp, Homo sapiens
  misc_feature (13)..(13): n is a, c, g, or t
  misc_feature (65)..(65): n is a, c, g, or t
  misc_feature (76)..(76): n is a, c, g, or t
  misc_feature (86)..(86): n is a, c, g, or t
  misc_feature (96)..(96): n is a, c, g, or t
  misc_feature (100)..(101): n is a, c, g, or t
  misc_feature (105)..(105): n is a, c, g, or t
  misc_feature (115)..(115): n is a, c, g, or t
  misc_feature (121)..(121): n is a, c, g, or t
  misc_feature (123)..(124): n is a, c, g, or t
  misc_feature (127)..(127): n is a, c, g, or t
  misc_feature (130)..(130): n is a, c, g, or t
  misc_feature (133)..(133): n is a, c, g, or t
  misc_feature (170)..(170): n is a, c, g, or t
  misc_feature (173)..(173): n is a, c, g, or t
  misc_feature (195)..(195): n is a, c, g, or t
  misc_feature (198)..(198): n is a, c, g, or t
  misc_feature (220)..(220): n is a, c, g, or t
  misc_feature (230)..(230): n is a, c, g, or t
  misc_feature (265)..(265): n is a, c, g, or t
  misc_feature (278)..(278): n is a, c, g, or t
  misc_feature (414)..(414): n is a, c, g, or t
atagcagcttagntatgtacaaaagcagttataaaccatttatattacacagaattattcaggtnttcattttatnttattttttnaaatttttantttnntttncagttatttntttatntnnttnttnatnataaggaatggtaaatccatagcaccatttcaaaganttnttgttacttatttctcatttanatnttttatgaatatacttcacctnttagggcaantttgcaaattccacaagccgtgttttttcaaggtntccattttgggcnttttttccgttttctcgttaagcttcatacagaggttcgtggcagcggctgtttcttttggatgcactgggtcatccacctagaaaagggcttttggacatttggggtttctacccacactttggttttctaaatnaggtggactgggagggaggtatcttctttcagatgaaagggaaggggcgagaag

SEQ ID NO: 688612 - DNA, 675 bp, Homo sapiens
  misc_feature (39)..(39): n is a, c, g, or t
  misc_feature (98)..(98): n is a, c, g, or t
  misc_feature (185)..(185): n is a, c, g, or t
  misc_feature (231)..(231): n is a, c, g, or t
  misc_feature (244)..(244): n is a, c, g, or t
  misc_feature (248)..(248): n is a, c, g, or t
  misc_feature (258)..(258): n is a, c, g, or t
  misc_feature (283)..(283): n is a, c, g, or t
  misc_feature (297)..(297): n is a, c, g, or t
  misc_feature (327)..(327): n is a, c, g, or t
  misc_feature (329)..(329): n is a, c, g, or t
  misc_feature (336)..(336): n is a, c, g, or t
  misc_feature (355)..(355): n is a, c, g, or t
  misc_feature (397)..(397): n is a, c, g, or t
  misc_feature (403)..(403): n is a, c, g, or t
  misc_feature (569)..(569): n is a, c, g, or t
  misc_feature (579)..(579): n is a, c, g, or t
  misc_feature (600)..(600): n is a, c, g, or t
taaaaaggtctatattttaatatgggggggagggagtanaaaagcaagcccctatacggggccctattcaggggcagcttctggtcccataggattanggaagactctgaggaaataaaagtggttgggaaaaatccaggtgtagtggcttggtatgtggtgaggggtagaagggatgaagtgangtgtgaaggcccctcataccctccatctggcctcagactatgtccnggaaccctggggngganaaagcgccantttcatccggcttctggggatggtngacggccacgtagngatagagaacgacaagcaaagaagagcganangcccagnatgtgggcagaaaatggcngagctgcacgtccgggatcatccggaccagtccgggctcggntccgangccaccagggaaccggggaacagagcccttggcgtcctccctcagaatgaacgggagaccagaatctcagagttgtttaggcccaagaaaagcggggattccggtcagcacttctcccagaatcgtaagggggctgacggaggatgagagggggcacccagagatnggagagtgcnatggccgcggctcaaggaggnccgggagtacaaggccactgggacggcacagtataaccggggttagacggcggcagtagcatccgcgacctggtg

SEQ ID NO: 688613 - DNA, 839 bp, Homo sapiens
aatgtagagctcgggctgtggcttcagagggtggaagccccaagctgtggcagcttccatgtggtgttcagcctgcaggtgcacagaagtcaagaattgaggttgggaacctccacctagatttcagaggagtatggaaatgcttggatgcccaggcagaagtttgctgcagggcagaggccctcaaggataacctctgctagggcagtgcagaagggaaatgtgggattagagccctgacacagatcccccactggggctctgcctagtggagctctgagaagacggcaccattctccagatcccaggatggtagatccaccggcagcttgcatcatgcacctggaaaagccacagacactcaatgccagcccgtgaaagcagccaggagggaggcttactctgcaaagccacgggggtggagctacccaagaccatgggaacccacctttgtgtcagcatgacctgaactgtgagagctggagtcacacaagagatcattctgacgctttaaacatttgactgtcctgctgggtctcagacttgcatgggccttgtaaccgcttcgtctggtcaatttctcccattcggcacagattcacccaatactgtacccatgtatctaggaagtaatagcttgttttgattttaacggtcatagggggaaggatgccttgcttagatggacttggagtgaggctttgagtttatgtgaaatgatagatttggggacgtgggagagatggtagaagtgcgctgaaatggggcggggacagaagtgtgcttgcaccaatcatatggtccaatcagtgggaacggggaaataggggccagtggtc

SEQ ID NO: 688614 - DNA, 141 bp, Homo sapiens
cgctatcatcggcaccagctgggggccagccagtctttagggaaggtggccttagtctgtgcggtacaggcccgggccaggagggtcttccccgctccctgggggccctatacactcagcacccacttttggagcgttgga

SEQ ID NO: 688615 - DNA, 845 bp, Homo sapiens
ggaggcaggtagccagccagctacacctgggaatggggtcccgggccggtaggcttggcctcttgggccgacctcgtctgtgtttttctattctgttgttctgtttgtttatttttaaaaggtaaacctctgtggtgccgcagatggcaaagggagtgtcgctgggcctggtgatcccagggctggatctcagccccatgcaggagacactgtggccacgtcaggtgttgactgctcacctggctctggagggctgccctgcagcgggcctggggacaggtcggcctgtggggcagcctcagtacccgtccctagaggcatcacggtggcatccgagcatgagcttcctgcctccttgggcgagacccagcagtggacagcacaggtcctcacacccagctccgctgcacacccacggccagccaccccctcccgctcggcacaggcacgcagatgcgctcacacgtacacacacacaaatgcacgcccacttgcacatgctccacgcacaccgtttcacacactgcacagctcacgctcacacaggctcgtgcaccgcatacacacacgcacagactccctgcacactgttccacatgcatagtgtgaagcactcggacgcgagcatctcccacgcacctctaccccaccccaagcacgctctgtccccccatgcacctctccccaacaacacacacagccgcctgcaccgcccgccccccgcccccaccaaggccccagcctctggccatgcagtcctggtgccagagcctttgcgtgaagttcgggccgcagagtggcccgctggactcccatggcgccgttaaggctgagatggctatcgt

SEQ ID NO: 688616 - DNA, 169 bp, Homo sapiens
gaggacggagatgtcgggcatggacaatcgatgcagtgcagaaagaatctggtgggagataggtccagcacatcatgcgtgagagtggacggggaagctgtgggaaatgacacgtgcgaggagaaggctgaggtgggacgtgcgagcaggggaaggctacggggaggtg

SEQ ID NO: 688617 - DNA, 371 bp, Homo sapiens
aggtcctttagcaagctccgttctcaaaaggctgtgggtatttatgtaagaacttattccaaagtgactctaagatccatgttcccaagatctagtacgggctattcatggttctgaggcatgtccagcatgcaggcaaacttatctgttcaaattgaggtaaaccagacaaagccgccttaatattatcagaagctatggaattagaccgagccctttactgcgtatttaagataatgatgaattctatgcatacagagacccgcgtagtcgatcatgtcagttgaagttagttccccaaatgaagagctatcgtttgttcagaccctgtcgtttgtagttaatatgatgcgatttcgaatatacgagtc

SEQ ID NO: 688618 - DNA, 689 bp, Homo sapiens
ggagagacagccagctcacgagcagatgtggggtgacagcctgctcacatgtgccgatgtggagtgcccgcctgctcacacgtgcccatgtggagtgcccgcctgctcacacgtgccgacgtggagtgcccgcctgctcacgtgcccatatggagtgcccgcctgctcacacgtgccattgtggagtgcccgcctgctcacacacatgccgatgtggagtgcccgcctgctcacacgtgcccatgtggagtgcccgcctgctcacacgtgcccatgtggagtgcccgcctgctcacacacgtgcccatgtggagtgcccgcctgctcacacgtgcccatgtggagtgcctgcctgctcacacacgtgcccatgtggagtgcccgcctgctcacacaaagccctggcatggtggttctgtaggtttcctgtcctgccggccgagtcagacgctgttaccgtacattctactcatggtggctttttaatacgtttttatgtcaaggatcccttttatatttctctgcacctcgagataacgtaggaatattagggatgagatggaagaggagagggtgtttttgtaaaattgaattcaggactgatttgttagcctggtgcttttcgtatcagaccttttaatgaattttcatggatgctgattaaaagacaaacctgtgaaaaaaaaaaa

SEQ ID NO: 688619 - DNA, 312 bp, Homo sapiens
attaatgctaaacagtgccgtaacgaaacccacaggtcctaaactaccaaacctgtgttagaaatttcgcttggagagaccgcggagcataatccaacctcagagcagtacatgctaagacttcaccagtcaaagcgaactactatactcaattgatccaataacttgacccacggaacaagttaccctagggataacagcgcaatcctattctagagtccatatcaacaatagggtttacgacctcgatgttggatcaggacatcccgatggtgcagccgctattaaaggttcgtttgttcaacgattaaa

SEQ ID NO: 688620 - DNA, 453 bp, Homo sapiens
attctagaggccgaggcgggtggatcaactgtggtcaggagtttgagatcagccaggccaacctggtgaaaccccgtctctactaaaaatacaaaaattagctgggcgtgatggtgggcgcctgtaatcccagctacttgggaggctgaggcaggagaatcacttgaacccgggaggcggaggttgcagtgagccgagatcgcaccattgcactccagtctgggcaacagagtgagattccgtctcaaaaaaaaaaaaggaaagggaaaaaaaattagctttatacctcttcctggtctcaaccgccatggaaaatttctgaacactccaaatttcagtggaattaattccaaaacaaaattttataaggtttaaaattaattttaaccttctatatagataatagtattaccttttaaaaagggcctcagggggtatattaatctttctaac

SEQ ID NO: 688621 - DNA, 1089 bp, Homo sapiens
  misc_feature (25)..(25): n is a, c, g, or t
  misc_feature (35)..(35): n is a, c, g, or t
  misc_feature (45)..(45): n is a, c, g, or t
  misc_feature (59)..(60): n is a, c, g, or t
  misc_feature (63)..(63): n is a, c, g, or t
  misc_feature (65)..(65): n is a, c, g, or t
  misc_feature (124)..(124): n is a, c, g, or t
  misc_feature (1043)..(1043): n is a, c, g, or t
  misc_feature (1058)..(1058): n is a, c, g, or t
  misc_feature (1064)..(1064): n is a, c, g, or t
  misc_feature (1073)..(1073): n is a, c, g, or t
  misc_feature (1085)..(1085): n is a, c, g, or t
attttttaaagactgacactttaanaatgtgctgngcaactctgnaaatcaataccctnnccncnagtttattgttgttctgttgctgttaccttttgtttagtgtgtgttctggactaatttnaagtgtccacctcatcagcttcatgttcagccagtgactggacagaggacccctttaagtgctttgcaccagtaactctcacggttctgccgacacgcagttgatgcgtggtgagtgtgccttcagcgctccatcgcggttctgctgacacgcagttgatatgtggtcagtgctccagcaggcagctgccaactgtgcctttgccttcacttcttacttgcacacagccacaaagccagccagaggtgagggccagggcagctcaggttcctctcgggcacacacacagctctgtgcctgtgtgggcacagccttccatgcctccaggagtgtggcagagcttctcagcggccactgtgggcatctcgttcctcagatcttcctttcatgagttatgtagttgaattatcaatctttcttggcttctaagttttgtgttctacttagaatgctcttcccccttaaagattatatttgaaatgttttccatgttttcttctagtacttttatgggtttcattttcatattgaaatcattgatctacttctagtttttgatacaaaatgtgagccaggaaacccagtttttaaatttcaaatagctgtccaggtgtccctgcacctcttatgcatgagccctcgctttgtgccaatgtggagtgcccgcctgctcacacgtgcccatgtggagtgcccgcctgctcacacgtgcccatgtggagtgcccgcctgctcacacatgtcgatgcggagtgcccgcctgctcacacatgtccatgtggagtgcccacctgctcatgtgcccatgtggagtgcccacctgctcacatgtgccgatgtggagtgccgcctgcttcacacacgtgcccatgtgggagttgcccgcctgcttcacgttgcccatgtgggagtgctcggnctggttcaaaagtgnccgatnttggagttntccggtttgttnaaaa

SEQ ID NO: 688622 - DNA, 1447 bp, Homo sapiens
actaccccctccccctcgcggcggcgtggaacaactaaaaagcagcgccttctgttatagcagccgccctcgtactatcgctcctcacgtgaggtagccgccaacacgaccacgcacagtcgggtttgttgttaggcttcactcctacgttaagtatataaactcaccgggcgggggtctgaatgattatcacacccactcctgccaggagctattcattataatcaatacgaccggcgcctcgcgggcgtagttaatacaatacatattatatcctatccatcacgaggagcgagcacgcagtttatatagtagcatcctagtttcgcgcgccgctctgattgtgtgggtgcgccaccacttagtagaacacaaacagagttgtatcctccacacaataaaaagaagcaaggggtggtgtcaatgccgcttgccgcagatatataattctcgccgatggtgtataatggacgcagcggaagagatagcgatgcacaccaaatgcagtactgatttttgatctctgctgagaacaaataagagggagggaggagagtttatttttctctccagctagaagcggacatactctactctggttgggatagatgatagactacactaccccgcctggtgcttgcctgtcatgtagctgttggtgtagtcatatacacaacacacagcggagggcgtcattgttaagttaggtgcactcaccctcacactcgcactgatgcacctcacgctggcggtggattctaaataaagagagtagagaatataatggcgcgcccgccggagcagcacaccaacctaatttttttagtccgccgccagttagaagaaagaaagatacacacaccatagagaatcgccccctagagcgacggcgaaatattacttaccatcgctccccgcgggcgggaaaaaaacacatacttctctctcagcggggcagtgaacatacacaccacagcagggggcgcctcactccacaactctggtgtcggccacacccaccgcgtgatatgaagacgacactatgatcacacgccgccgtcggcgggtggaggaacacaaaagagggggtcgcccccacaccacaacacacgcactgctacccagcggggagccaccccccggcaacatactgtgtggagaacacccacacaatagatattgatggagccgcacttttctctagaagagaggacccccgcgcccaccagtggcagacgatgtaggtggtgcatcatctcccctcctccggagagagaagaaatacccatcacgacgagcgtctcttagtacgtttttcatcgtgtgggggtcctccccccactcttcttgtttccgcagccacacaaaaaatagcgcgtgggccccccccccccccggcgaaaaaaggggggggggttttttaaaaaattttttttggggcccccca

SEQ ID NO: 688623 - DNA, 1160 bp, Homo sapiens
  misc_feature (25)..(25): n is a, c, g, or t
  misc_feature (35)..(35): n is a, c, g, or t
  misc_feature (45)..(45): n is a, c, g, or t
  misc_feature (59)..(60): n is a, c, g, or t
  misc_feature (63)..(63): n is a, c, g, or t
  misc_feature (65)..(65): n is a, c, g, or t
  misc_feature (124)..(124): n is a, c, g, or t
  misc_feature (1114)..(1114): n is a, c, g, or t
  misc_feature (1129)..(1129): n is a, c, g, or t
  misc_feature (1135)..(1135): n is a, c, g, or t
  misc_feature (1144)..(1144): n is a, c, g, or t
  misc_feature (1156)..(1156): n is a, c, g, or t
attttttaaagactgacactttaanaatgtgctgngcaactctgnaaatcaataccctnnccncnagtttattgttgttctgttgctgttaccttttgtttagtgtgtgttctggactaatttnaagtgtccacctcatcagcttcatgttcagccagtgactggacagaggacccctttaagtgctttgcaccagtaactctcacggttctgccgacacgcagttgatgcgtggtgagtgtgccttcagcgctccatcgcggttctgctgacacgcagttgatatgtggtcagtgctccagcaggcagctgccaactgtgcctttgccttcacttcttacttgcacacagccacaaagccagccagaggtgagggccagggcagctcaggttcctctcgggcacacacacagctctgtgcctgtgtgggcacagccttccatgcctccaggagtgtggcagagcttctcagcggccactgtgggcatctcgttcctcagatcttcctttcatgagttatgtagttgaattatcaatctttcttggcttctaagttttgtgttctacttagaatgctcttcccccttaaagattatatttgaaatgttttccatgttttcttctagtacttttatgggtttcattttcatattgaaatcattgatctacttctagtttttgatacaaaatgtgagccaggaaacccagtttttaaatttcaaatagctgtccaggtgtccctgcacctcttatgcatgagccctcgctttgtgccaatgtggagtgcccgcctgctcacacgtgccgacgtggagtgcccgcctgctcacgtgcccatatggagtgcccgcctgctcacacgtgccattgtggagtgcccgcctgctcacacacatgccgcgtgcccatgtggagtgcccgcctgctcacacgtgcccatgtggagtgcctgcctgctcacacacgtgcccatgtggagtgcccacctgctcatgtgcccatgtggagtgcccacctgctcacatgtgccgatgtggagtgccgcctgcttcacacacgtgcccatgtgggagttgcccgcctgcttcacgttgcccatgtgggagtgctcggnctggttcaaaagtgnccgatnttggagttntccggtttgttnaaaa

SEQ ID NO: 688624 - DNA, 1378 bp, Homo sapiens
  misc_feature (25)..(25): n is a, c, g, or t
  misc_feature (35)..(35): n is a, c, g, or t
  misc_feature (45)..(45): n is a, c, g, or t
  misc_feature (59)..(60): n is a, c, g, or t
  misc_feature (63)..(63): n is a, c, g, or t
  misc_feature (65)..(65): n is a, c, g, or t
  misc_feature (124)..(124): n is a, c, g, or t
attttttaaagactgacactttaanaatgtgctgngcaactctgnaaatcaataccctnnccncnagtttattgttgttctgttgctgttaccttttgtttagtgtgtgttctggactaatttnaagtgtccacctcatcagcttcatgttcagccagtgactggacagaggacccctttaagtgctttgcaccagtaactctcacggttctgccgacacgcagttgatgcgtggtgagtgtgccttcagcgctccatcgcggttctgctgacacgcagttgatatgtggtcagtgctccagcaggcagctgccaactgtgcctttgccttcacttcttacttgcacacagccacaaagccagccagaggtgagggccagggcagctcaggttcctctcgggcacacacacagctctgtgcctgtgtgggcacagccttccatgcctccaggagtgtggcagagcttctcagcggccactgtgggcatctcgttcctcagatcttcctttcatgagttatgtagttgaattatcaatctttcttggcttctaagttttgtgttctacttagaatgctcttcccccttaaagattatatttgaaatgttttccatgttttcttctagtacttttatgggtttcattttcatattgaaatcattgatctacttctagtttttgatacaaaatgtgagccaggaaacccagtttttaaatttcaaatagctgtccaggtgtccctgcacctcttatgcatgagccctcgctttgtgccaatgtggagtgcccgcctgctcacacgtgccgacgtggagtgcccgcctgctcacgtgcccatatggagtgcccgcctgctcacacgtgccattgtggagtgcccgcctgctcacacacatgccgatgtggagtgcccgcctgctcacacgtgcccatgtggagtgcccgcctgctcacacgtgcccatgtggagtgcccgcctgctcacacacgtgcccatgtggagtgcccgcctgctcacacgtgcccatgtggagtgcctgcctgctcacacacgtgcccatgtggagtgcccgcctgctcacacaaagccctggcatggtggttctgtaggtttcctgtcctgccggccgagtcagacgctgttaccgtacattctactcatggtggctttttaatacgtttttatgtcaaggatcccttttatatttctctgcacctcgagataacgtaggaatattagggatgagatggaagaggagagggtgtttttgtaaaattgaattcaggactgatttgttagcctggtgcttttcgtatcagaccttttaatgaattttcatggatgctgattaaaagacaaacctgtgaaaaaaaaaaa

SEQ ID NO: 688625 - DNA, 224 bp, Homo sapiens
cttcgagctcggacacccccgcccgggtataccctttttggaccttttttttaaaagtttttttaaattttccttaacggacctggtggataatcggcttgggcccggatttaacccttaaagggatttaaccacccgttttgggttgatttcccaaccaacccaactccggaaaaacccggccccgggcccccgggggccgttaccggcctaaaaccgtccac

SEQ ID NO: 688626 - DNA, 1059 bp, Homo sapiens
  misc_feature (999)..(999): n is a, c, g, or t
gcattcaccatctcacttctaggaatactagttatatcggtcacacctcatatcctccgctactatgcctagaaggaatcatactatcgctgttcattatagctagtctcataacgcctcagatcaggcagctccctcttagccaatattggtggctattgctcatactgagtctttgccgcctgtgtaggccgcgggtggggctagcccgtactagtctcattgctccaagcatatagtggcctagagcgtacgctacataaacctatggcctaggtctcaactgctaagttacataagtcgtcaccagacggattatattcaggtaccgactgactatgaaattttccaaaaagaaagacatagtttgcaggtcaacactagtcgggccacacagtccgtattttagttagcatcatcccttctactattctctttgtcgcaacatcaacataaaaatttctatttcagcgtgttcacgcagtcctttgaggtctggtgtccatctcaggcgcccgcgtcctagtactggattacctggatgttccctagtcgctcacaaatcatggcgccgtccagatgccacattgatccagtgaaccactagtgacggagcaaaaatgcgtaacctctctatagggaatctccctaaaatctccttgtttttcgattcacaggcgcccgaagtaaggcactattttatatcgccttggagagcacacgttattcccaactttggttttctgtgcccgatgaggcagcgagcctaagcgtgaacgcaggagatttagtgcctattctaaaccggaggaggccctccgtatttatacgcgctaggtaaatttcaaagcccaggtttagggtatactaacctatttgcgggaagataaggcctgcgaaacaaatggatgtcagggtgtaataaaaacctcttggccactttattctatccagggtcccccgggttatagtggctgcaagaggggtactcactctgcngccctctgtctctgatataatctgccacccaattacgtgggcactggccgggatgcaact

SEQ ID NO: 688627 - DNA, 165 bp, Homo sapiens
ttcatccaaccccctcgttcaatatgagtgttgctgagaactgcggaagttggaactcacagccaggcctcccggcctccccggctaagctttcttccttccaatccagaaggtgtttccaagcctgtctggagtcccctggggaaggatgagcccaggactctg

SEQ ID NO: 688628 - DNA, 493 bp, Homo sapiens
ttgattagacctgatctctggtgctcatttccagagtgtgcgattcgtgaagctgggggaggaagccggccatcctgaagtatccagcaagcccccaagcaatgacagggttgctggtatggaaaacatatgttgagaacaagttgtactagtccatactgctgccttgtgaagacctcatcctctatcctgatttccccaatcattctgaaaaaattccactgtgttactattgggcttcacacagatcacttacagtaactacatgatatgacgcatgttctaaaaggaatctatagtctgttctatgccttgagctctgaacacagggtctcacatttagattaaggagccatctgccaattctggacatctgttaaatcagttccagcctcgggagagtaggaagacctgttagatgccatggaactccacatacacctctgaaatgtctggaatgggacagagaatagaggcagcttctccctgattc

SEQ ID NO: 688629 - DNA, 1254 bp, Homo sapiens
  misc_feature (25)..(25): n is a, c, g, or t
  misc_feature (35)..(35): n is a, c, g, or t
  misc_feature (45)..(45): n is a, c, g, or t
  misc_feature (59)..(60): n is a, c, g, or t
  misc_feature (63)..(63): n is a, c, g, or t
  misc_feature (65)..(65): n is a, c, g, or t
  misc_feature (124)..(124): n is a, c, g, or t
attttttaaagactgacactttaanaatgtgctgngcaactctgnaaatcaataccctnnccncnagtttattgttgttctgttgctgttaccttttgtttagtgtgtgttctggactaatttnaagtgtccacctcatcagcttcatgttcagccagtgactggacagaggacccctttaagtgctttgcaccagtaactctcacggttctgccgacacgcagttgatgcgtggtgagtgtgccttcagcgctccatcgcggttctgctgacacgcagttgatatgtggtcagtgctccagcaggcagctgccaactgtgcctttgccttcacttcttacttgcacacagccacaaagccagccagaggtgagggccagggcagctcaggttcctctcgggcacacacacagctctgtgcctgtgtgggcacagccttccatgcctccaggagtgtggcagagcttctcagcggccactgtgggcatctcgttcctcagatcttcctttcatgagttatgtagttgaattatcaatctttcttggcttctaagttttgtgttctacttagaatgctcttcccccttaaagattatatttgaaatgttttccatgttttcttctagtacttttatgggtttcattttcatattgaaatcattgatctacttctagtttttgatacaaaatgtgagccaggaaacccagtttttaaatttcaaatagctgtccaggtgtccctgcacctcttatgcatgagccctcgctttgtgccaatgtggagtgcccgcctgctcacacgtgcccatgtggagtgcccgcctgctcacacgtgcccatgtggagtgcccgcctgctcacacacgtgcccatgtggagtgcccgcctgctcacacgtgcccatgtggagtgcctgcctgctcacacacgtgcccatgtggagtgcccgcctgctcacacaaagccctggcatggtggttctgtaggtttcctgtcctgccggccgagtcagacgctgttaccgtacattctactcatggtggctttttaatacgtttttatgtcaaggatcccttttatatttctctgcacctcgagataacgtaggaatattagggatgagatggaagaggagagggtgtttttgtaaaattgaattcaggactgatttgttagcctggtgcttttcgtatcagaccttttaatgaattttcatggatgctgattaaaagacaaacctgtgaaaaaaaaaaa

SEQ ID NO: 688630 - DNA, 227 bp, Homo sapiens
tgcgcaaactcgtggcagcgggagctacggcgctttgagttgccatttgactggccccggtgtccagtggtgtcccctggggggaacccagggcccaatgaggcagcactgcccagtgaggacttatcacagattggtttccctgagggcctgacacctgcccacctaggagaacctggaggtaagagaagggaagcgcgtttgcgcaacggcgcgtttgcgcgctg

SEQ ID NO: 688631 - DNA, 1290 bp, Homo sapiens
  misc_feature (25)..(25): n is a, c, g, or t
  misc_feature (35)..(35): n is a, c, g, or t
  misc_feature (45)..(45): n is a, c, g, or t
  misc_feature (59)..(60): n is a, c, g, or t
  misc_feature (63)..(63): n is a, c, g, or t
  misc_feature (65)..(65): n is a, c, g, or t
  misc_feature (124)..(124): n is a, c, g, or t
attttttaaagactgacactttaanaatgtgctgngcaactctgnaaatcaataccctnnccncnagtttattgttgttctgttgctgttaccttttgtttagtgtgtgttctggactaatttnaagtgtccacctcatcagcttcatgttcagccagtgactggacagaggacccctttaagtgctttgcaccagtaactctcacggttctgccgacacgcagttgatgcgtggtgagtgtgccttcagcgctccatcgcggttctgctgacacgcagttgatatgtggtcagtgctccagcaggcagctgccaactgtgcctttgccttcacttcttacttgcacacagccacaaagccagccagaggtgagggccagggcagctcaggttcctctcgggcacacacacagctctgtgcctgtgtgggcacagccttccatgcctccaggagtgtggcagagcttctcagcggccactgtgggcatctcgttcctcagatcttcctttcatgagttatgtagttgaattatcaatctttcttggcttctaagttttgtgttctacttagaatgctcttcccccttaaagattatatttgaaatgttttccatgttttcttctagtacttttatgggtttcattttcatattgaaatcattgatctacttctagtttttgatacaaaatgtgagccaggaaacccagtttttaaatttcaaatagctgtccaggtgtccctgcacctcttatgcatgagccctcgctttgtgccaatgtggagtgcccgcctgctcacacgtgccgacgtggagtgcccgcctgctcacgtgcccatatggagtgcccgcctgctcacacgtgccattgtggagtgcccgcctgctcacacacatgccgcgtgcccatgtggagtgcccgcctgctcacacgtgcccatgtggagtgcctgcctgctcacacacgtgcccatgtggagtgcccgcctgctcacacaaagccctggcatggtggttctgtaggtttcctgtcctgccggccgagtcagacgctgttaccgtacattctactcatggtggctttttaatacgtttttatgtcaaggatcccttttatatttctctgcacctcgagataacgtaggaatattagggatgagatggaagaggagagggtgtttttgtaaaattgaattcaggactgatttgttagcctggtgcttttcgtatcagaccttttaatgaattttcatggatgctgattaaaagacaaacctgtgaaaaaaaaaaa

SEQ ID NO: 688632 - DNA, 140 bp, Homo sapiens
ggatacagagagcaggagacgaggccagagtctccagctaggggtaggacgtagcccaccagctagccgaaaggccaaagacgccaggtccggtaggacagtagacaagcaggacatagacataggtccaggtagtgacg

SEQ ID NO: 688633 - DNA, 353 bp, Homo sapiens
aaatgacccttggctcttattgttcttgctggtgtggtatgttcccggctgaaaaaatggtcagaaggggaaaggaggaagtgagaaaaaaaaaacagggaaatgaccctgcatgtgatggatcagctgaccccatccagatcagtaaactggttcatttgattttgtgccccccccccaggaactgactcagcgcaaaaagacagcttcgactccttgtgttttcatccctaaccaatcagcactcctggctccctggcttccccccaccccccaaattgtccttaaaaactttgctctccaaacgctgggggagactgatttgagtaataataaaaccctggtttcctgca

SEQ ID NO: 688634 - DNA, 1060 bp, Homo sapiens
cgatccacgtaggctccgtgttgcatagtgtaacagcccatgacgactctatgtacgcctcacttactcttgagcgagcctcatgtgcttggctctactcgtgcccgtgccttgtgctgaacctcacatgcctcgaggggtgtcaaagggtgtgttggcaccacatgtgggagacggccgctccgactgcgggccctgctagaacgcagtgtgctgcagattgcgtctatgagacacaattgcaaagcagctcgacaagtcccttctgctgcaggacgatatgtgacgagatctcccacgacatgtagagactatggtgtacaagagaccaagttttcccactgacagtagggagcactccttgtgatactatgggacgaccagaccgtggcgaacgtgcgctccctggaatagacgcaagcatgctctgctttcactgcgactgcagattagtgtagttcgtcataagctcccccttgcttcaatcctggtatccctcatgactggtcaggaacaatgacagcagttgcttgcggagaggtagatgctcatgttgcaatcaacaactctgtccaatgttctacctccatgtaaggtgcatcgtacgttagcccgccttgtatgatctactctaaagataccgtaggtattggaagattgcatattacatagaatccccagggacgtcaagggaacacaatagaaccttgaagaagtggggtgtgccccgcacttttcagagatgggcactcaccatttccgccgttcgtcccctcccatctatatcacacatcgatatgacagcaggagccctacgtcaaagttaaagcccgtcccgaggtccacaaagttgaagtagatggggcggaaacgtctattgcgcacatgtgagctagtcgctagttccaggacttgcgttaaccatgaacgatcccaggaacgttgggtaggaaccgtggccaagcttccagccctttggtttcgagaggcccatcgcatagaaaacattgttgacatgtacgcccacttgttaggccgcccatatgtccctttcgaattg

SEQ ID NO: 688635 - DNA, 184 bp, Homo sapiens
tagcttatgtccactcagtttttccattctttttttctctttctgagttcaagaccaagaaacagaaacacaaataagttataagaacagttagtgcctaaactagaaatgctgggtgtctttcagccccaaatgaagggaggacaggcctggctgtgtctgtggcactgagacatgacgctgg

SEQ ID NO: 688636 - DNA, 250 bp, Homo sapiens
aataaacccaggttaaaatttctgagccaaccccccccttccatttaccaaccaggaataatttcaaaggttaattccagtttgaaatttccccagggaattttgaaagtaaggccaaggcagtttcccaaactgttcaactatagcccccagcttagtgaaaacagaacgtagcgcattgagcaactagagcactctcttctcccgagtcggggcagcatggctgggacagaagccttctagtcgacgc

SEQ ID NO: 688637 - DNA, 200 bp, Homo sapiens
gaccacttaacagtttctttgagacattgactttttgtaaggattgtgactatctatcatcccttatgacatgcacattggtctgccactaaccctgggatttcgctgtatggccacctaaatgggcacagccactgatgaaaacctctaggggataatcacacactttggaccacagatcccccacggctgaaggcttt

SEQ ID NO: 688638 - DNA, 643 bp, Homo sapiens
tatttgcatgttttgtgtgtgggtgtggggtgaaataatattcttacaaagtatttttttacctgtgtatgccctgtttgcaaaaacatatttatgaaaaaaacaacacagcaaaacctatcttggcaaaaaaaggaagtgagtcagagcccattttcaggaggcattggtaatgttagtgtagggggttgcttgcagacacacaagaaatttgtattgcccaggattggcactagctatgaagggcttggcgagccacattaaggagacctcacggaactggagagcactccccccattttcttagtaagaggaagccaaatgttattaaacacctaaatcctttttgtcgtccacttgtattatataaaattaaccctaaccatagccaaaatctcccaggactaaaactttttttatttcgcacatcttgagccttttacggagatttgaccaaactccctttcgttctctttattcacaacctcatggagttttcccacacacacgggtatcctgcccactgtctgtttctacacattactccaaccttcgtctcaacgcctcctttttcttttctctcctttttatcattttaatttctttacggccagcgagattccgccttatatattgcgtaatt

SEQ ID NO: 688639 - DNA, 273 bp, Homo sapiens
cagcgggattactctggttatcttcatcatcatcatcatcgtgtgggttgtctcttcatgaagaaccagcggaactcaaaactgctgttcaagaaacctcttcaatgacttttgacttagaacctgctatacttatcaatgcttaccttactgttatctctaacaatttttttttgtgttaattgtaaatgttgaactttctatggaaactgtgccttttgttttctatatatgcactccacaattagaaggccggccccgtccacatttttg

SEQ ID NO: 688640 - DNA, 318 bp, Homo sapiens
cctcacctcatgggtacgcaacgccacttatcagtgaaccaatatcacgaaaaaaactctacctctctatactacatctccctacaaaagctcctgagtccataacattcacagacacagaactaatcatattttatatcttcttcgaaaacacacttatccccaccttgggtatcatcacccgatgagggacacaggcagaacgcctgaaagcaaggacataattcctattctacaacctatataggtcccttcccctgcgcatctgcactgatttacaatcaccaaaaacctaagggtcactaaaacttctaataa

SEQ ID NO: 688641 - DNA, 231 bp, Homo sapiens
caacagaaacaatcatcataaaaatatactagtatatcaaaacgaacatatagtataaatcaatcactgattctcagtgactcaccaaaagatatcttcaatatatggctagcttaactacataagactacatacaagcaaaataagtatttcttgaaagactattatacttatctgggcaatctatgtatttggacagaaatcaaagacttgacaccagcccaagattga

SEQ ID NO: 688642 - DNA, 146 bp, Homo sapiens
accgggcgtaagatatgctcaaagtaccgatagcactccccggaaggctcggggataggtgaatccccggatactatcttacacaaccacctgtactatagtagtaactatatggcaacacggttgcaagtacagacccggggtga

SEQ ID NO: 688643 - DNA, 860 bp, Homo sapiens
  misc_feature (37)..(37): n is a, c, g, or t
  misc_feature (243)..(243): n is a, c, g, or t
  misc_feature (278)..(278): n is a, c, g, or t
  misc_feature (280)..(280): n is a, c, g, or t
  misc_feature (288)..(289): n is a, c, g, or t
  misc_feature (311)..(311): n is a, c, g, or t
  misc_feature (313)..(313): n is a, c, g, or t
  misc_feature (322)..(323): n is a, c, g, or t
  misc_feature (372)..(372): n is a, c, g, or t
  misc_feature (376)..(376): n is a, c, g, or t
  misc_feature (383)..(383): n is a, c, g, or t
  misc_feature (385)..(385): n is a, c, g, or t
  misc_feature (412)..(412): n is a, c, g, or t
  misc_feature (426)..(426): n is a, c, g, or t
  misc_feature (431)..(432): n is a, c, g, or t
  misc_feature (471)..(472): n is a, c, g, or t
  misc_feature (474)..(477): n is a, c, g, or t
  misc_feature (494)..(494): n is a, c, g, or t
  misc_feature (496)..(496): n is a, c, g, or t
  misc_feature (501)..(501): n is a, c, g, or t
  misc_feature (509)..(509): n is a, c, g, or t
  misc_feature (512)..(512): n is a, c, g, or t
  misc_feature (514)..(515): n is a, c, g, or t
  misc_feature (517)..(517): n is a, c, g, or t
  misc_feature (519)..(522): n is a, c, g, or t
  misc_feature (528)..(528): n is a, c, g, or t
  misc_feature (532)..(532): n is a, c, g, or t
  misc_feature (535)..(535): n is a, c, g, or t
agcggaacggagagaacaggaaagcgcgaggagccgncgccagccaccagcgcagcagtcctggagctgtgaggagattcgggccgtcaccctgcctcccctgcgtcccgccaccggccgcttctgtcctcggacccattccaacaatctcgtaaaacatggtggattactatgaagttctaggcgtgcagagacatgcctcacccgaggatattaaaaaggcatatcggaaactggcactgnaagtggcatccagataaaaatcctgagaataaagnangaagcagnngagaaaattcaagcaagtagcngnaggcatatnnaagtgctgtcggatgctaagaaacgggacatctatgacaaatatggcanaganggattanantggtggaggacggaggtggaagtcatnttgacagtccattngaatnnggcttcacattccgtaacccagatgatgtcttcaggganntnnnnggtggaagggacccatntncattngacttctntgncnngncnnnnagaggncatnctntagggactcgaaggggtccccgaggcaagcagaagccgagggacggggtcgttacacatctgacgttcagtggatttccgtctttcggaagctggatccactactaaagcatacagcgaaaacaacatccaacgggctcaaccacgcggccacaggcgggcacctcacgtaccaccactcaacccaacgaccactatggatgggcccctgcgccctgggcacacactacaaactcgaacacccacacccgcacaccacccaaaacggcacaggacagcacaagaacactagacaagcggaaccgacgcagcacacgaccccgaca

SEQ ID NO: 688644 - DNA, 899 bp, Homo sapiens
  misc_feature (37)..(37): n is a, c, g, or t
  misc_feature (282)..(282): n is a, c, g, or t
  misc_feature (317)..(317): n is a, c, g, or t
  misc_feature (319)..(319): n is a, c, g, or t
  misc_feature (327)..(328): n is a, c, g, or t
  misc_feature (350)..(350): n is a, c, g, or t
  misc_feature (352)..(352): n is a, c, g, or t
  misc_feature (361)..(362): n is a, c, g, or t
  misc_feature (411)..(411): n is a, c, g, or t
  misc_feature (415)..(415): n is a, c, g, or t
  misc_feature (422)..(422): n is a, c, g, or t
  misc_feature (424)..(424): n is a, c, g, or t
  misc_feature (451)..(451): n is a, c, g, or t
  misc_feature (465)..(465): n is a, c, g, or t
  misc_feature (470)..(471): n is a, c, g, or t
  misc_feature (510)..(511): n is a, c, g, or t
  misc_feature (513)..(516): n is a, c, g, or t
  misc_feature (533)..(533): n is a, c, g, or t
  misc_feature (535)..(535): n is a, c, g, or t
  misc_feature (540)..(540): n is a, c, g, or t
  misc_feature (548)..(548): n is a, c, g, or t
  misc_feature (551)..(551): n is a, c, g, or t
  misc_feature (553)..(554): n is a, c, g, or t
  misc_feature (556)..(556): n is a, c, g, or t
  misc_feature (558)..(561): n is a, c, g, or t
  misc_feature (567)..(567): n is a, c, g, or t
  misc_feature (571)..(571): n is a, c, g, or t
  misc_feature (574)..(574): n is a, c, g, or t
agcggaacggagagaacaggaaagcgcgaggagccgncgccagccaccagcgcagcagtcctggagctgtgaggagattcgggccgtcaccctgcctcccctgcgtcccgccaccggccgcttctgtcctcggacccattccaatcaactcttctgtaacaagcactcgtgtggtattcactattcgaatgtatcttatgggccgtgctatgacgtacactgcctctctaccacgtaggggattattcacaaaaggcgaatagtcggtaagcctggcactgnaagtggcatccagataaaaatcctgagaataaagnangaagcagnngagaaaattcaagcaagtagcngnaggcatatnnaagtgctgtcggatgctaagaaacgggacatctatgacaaatatggcanaganggattanantggtggaggacggaggtggaagtcatnttgacagtccattngaatnnggcttcacattccgtaacccagatgatgtcttcaggganntnnnnggtggaagggacccatntncattngacttctntgncnngncnnnnagaggncatnctntagggactcgaaggggtccccgaggcaagcagaagccgagggacggggtcgttacacatctgacgttcagtggatttccgtctttcggaagctggatccactactaaagcatacagcgaaaacaacatccaacgggctcaaccacgcggccacaggcgggcacctcacgtaccaccactcaacccaacgaccactatggatgggcccctgcgccctgggcacacactacaaactcgaacacccacacccgcacaccacccaaaacggcacaggacagcacaagaacactagacaagcggaaccgacgcagcacacgaccccgaca

SEQ ID NO: 688645 - DNA, 260 bp, Homo sapiens
cagtcctctttcaatccatgggtagtctttcaattaacttgggcttaaatttctgtcatcaatcttttataattttgtcgtgtctaagtcttacacttgtcgggttcagttagttccaaagtagttaatttgctactgtattttaaatttccctttcagacaattcatcgttagtgtcaagacatagcaatgatttaggtatgtcgatggtgtatcctacaactttagtaaatttattatatagtcagtccttcatatcc

SEQ ID NO: 688646 - DNA, 197 bp, Homo sapiens
tcacctcggttaaatcatagaggccacggacatgaggttagactttcgcaaagccgctgcctgtcagaacacgcccagctcccggcgccagagcgccacagcgagttcgtcaccagcgtgcagggcacaggtagaggagagcgggctgccacgctgcatcagggccagtgccacgatatgtcacaatggagggcaag

SEQ ID NO: 688647 - DNA, 661 bp, Homo sapiens
acacctacaaatccaatccaaggttcccaaatcggcccgcacatcctgagcggatgcttaatcgcggttgactcggggaggtccccgtttcttggaatactcgatcggtcgcctttgttttaggagtaatgatttttcggattgatgttgcttgctgactttcttagtaggtgtgggggtattatctccgtcgtgcgagactagacctcttataatgtgttggagtggatcccgttcttggtcgcgaggaggcgtaagtgttttgatttttaagatgcccgaggttatgggagttttatttcgttttattttgaagtgacttctctacctggtgctgtgaagtgtatcgtattcattgttatgaccgcctccctcgagtatttttcgctgtttttgggttgtgtggtagccgatgagttcgcgatgacgtatgcttagcggataccgtaagtgtttggaggaggaatgggtggttttggtgttttttactatggttttgtgaagacgataagctatggagagggtgtctgtgggtcgagagatgtttgaagggctttatgttttgtgaataatcgttggggatagtcttcgaagtgtggagtgatttgcgcgggctttgttctcctagtgaagggtttttgttcgttttcctgccgctcga

SEQ ID NO: 688648 - DNA, 710 bp, Homo sapiens
gcgggggcctgtgcccgaggcgccggcggggggtcctgtgcacgcctgtgacggtggtgacgcctgctggagaagctggcctccatgctggagactctgcgtggagctggcatgggaggcctggctcgaaggcagggatggcctggcatgtggtcctgtgctgcctgcatccatgatgctggcctggtgctgctcttgatgtctgcatgccactgacacgcaccatgcaaacacctttgtgctgcatgcttgcgtggccaatggctgggatggctgctgtgtagctctgcactgccaagcgccggcccaaggatgctgctgctgtgttgctgcctgaggcaggcccatggtggttgcatgcgtgcttggatgtgccagaccactgtgtgctgcttggttggctggctgctggtgaatgctcgcacggtatcttgcgtcttacaacggacgggacgtgggtgaaggttccctagcccatgctgctttccacggaaggtgcatcatgatgccgcttggggccctggcgggaccaagtcctggatgcttgtgggccgcgagaagccagcgttgggaggtgcctgaacgtctgcgcaggaggagctcggggaactgagcggacgcctggtggaagtccaatggtggccccatgacgggcttgctgtggtgcaaccggggatttgccagaatgggtacaagcagccctccggaag

SEQ ID NO: 688649 - DNA, 1593 bp, Homo sapiens
  misc_feature (1113)..(1113): n is a, c, g, or t
ctccctgtccctctctctccccttggggggaattatcttctcttcgtcaggctctcgtccttctatgttgttatttctctccctctcccgtcttgctgcttcttacatatggggggcgcccacctctttgttagggagtgtgctcgtggggccccccctgatctgcccctcgtgagaagtggttcttcctcccttgtaatggccccccttttttgtcgatagttgttgttgtatagaaaaaaacacagggaaaaaacgagggggttgttggtcccctctttttgcgggagaaaaattaccacacgatcctctgtgtggctttgtgtaagggaaacagtctgcgggcccacaacttcttttggggcctggggcccaacccggtggtgttaaagaaaaaaagggctgtgatattagttgtggccccccccggccgaatgtttttctagaacaaccccgtgtaagaaagaggggtcttttcccccataagaatggttgatgtttttaaaacggccgccaatgagtgtcttcccccgaccgcgttgttactctttaaaaaagggggggtacaaaaaaaagatacatcctcgcggagcacggtgctcagtaagaacaacccctgggggtaggagagatggtgtttatataatgggggagaaacaccacccgggggttcattagagggcgcccccccctttgtcgcgacgagagttgtgctgtacttctctccagggggccacccctggtgtgtcgcgacaatatttctctcgtgcgctctcgcgccgctatattattatcctctcgtctctgttgtgtccccccctgtccgagagatatatttttgtgggccctctttgaatatacagcagaaattatatgccgtatatcctgatatagagacacatattcccacacactccctcatatatagagacactcttatacacaccgcacacatttgtagaacacctcgcacaaatatctctttcttgtagagaaaaagggcggggggtcctttcttataaaaaagttataaggtgtgtgagatatcttttgtgggagaaaataaaagcgacacacactaaggtgttttcacacacaagtgagatttatacncacacagagattactacatgagcgtctctctttacacacatgggagagagactctgtgagagatatatgtgtgtgtgtgtttgatgagagagacacacacctgtgtgtgtctctctctgtgtgtgtctctctctccacacaagtggtgtgagagtgacacacacaaaatagtgagtgtacaccctctcataagtgtgtggggtcacacacattctaatgtctcatttctctgtgcacataaaattatgaggagattataaaggtttgagaaggtgggaaataacacatcttgagacttttaacacggcacttcttacggggggagactttttatatgaaataacacctgagaacctaataccacaagtgagttttatgagaaaacgtttaaaaatacacagagattttttttattttttcccaccaccaacgtgaaacaagatttttttaaataaaagagtttatgtgtttacctggtta

SEQ ID NO: 688650 - DNA, 145 bp, Homo sapiens
aaaaaatttttttttgggggggggggacaaaagggggccctttcccttttttccccccaaatttttggggcccccggggggtttcccccccccccttttttcccttttgggggggggggggataaaagggggcccccccggccca

SEQ ID NO: 688651 - DNA, 413 bp, Homo sapiens
gcaaaccccgttccgtagttacagacgaagagccagtagtatccttaatcttagctcagtgcatacatcagtgatactttccaaaccgatatctctgataacagagtgttacttcatcagctataagacactctggtacctctgtttcccatttccagattaccggatttctgggatacttcgtaaaaacactcaggcagagacagggcacgaaacaccggtgctcacagagtccagagtcataatccctgcaggtctcttgatcccctgggtactggtctctctatcactgactttttcttctgaatagcccacattattattttattttgtctggtgttcttctgagatggagtctcgctctgtctacccagactgaagtgtagtgcccgtatcatccacattagtaccga

SEQ ID NO: 688652 - DNA, 277 bp, Homo sapiens
  misc_feature (43)..(43): n is a, c, g, or t
gggggcaagcccgggcccttttgggtttttaaacaaagctccnttcccccccccccccgtgaaggttttttcctttttttattgtggcccgggcccccccctccccccttcccaattgggtgggtgggttggggcccccctttttggggttttttaaaaaaaggggggtttttttttttccccgcttttgggtttttgttggggcattttttccccccccttttttccccccaaaaatacatttttttaaaggcccaaaaacgttgggttgcattta

SEQ ID NO: 688653 - DNA, 265 bp, Homo sapiens
ttttagtagagacaggtgttcacatgttggccaggagttcaagactagcctgggcaacatggtgagacccctgtctctacaaacataaaaataaaaaaaattagcctggcatggtgcacacccgtagacccagatactaggaagactgaggcaggagtatccttgactcctgattgaggaggctgcagtgagctaagatcaggccactgcatttcatccagcctgggcaacagagtgagaacccgtctctaaataaataaataat

SEQ ID NO: 688654 - DNA, 380 bp, Homo sapiens
  misc_feature (113)..(113): n is a, c, g, or t
  misc_feature (203)..(203): n is a, c, g, or t
  misc_feature (275)..(275): n is a, c, g, or t
tctccctgaactggttattatatttcctcacttgaggaattcatactacaaaaatttggggttctccagtggagaagaatggaggaattagcctaggcaaaacaaaaacctcnaagtgctgtcatggagaatgtagcaggagaaaaatgactttggggaaaaaagacctgagagagaaagatatattaaatggggtaaaaganatacaaggagagatgatgtggattatgcagagggtctatcactgagctggtagggggcatataagcctgagnacaaaccttgaaagtaattacaagaagaaaagaatctccaataattagaaagagtctggtatttcatagccctaggagcaaactggttggtttgagccagcatac

SEQ ID NO: 688655 - DNA, 896 bp, Homo sapiens
  misc_feature (97)..(97): n is a, c, g, or t
  misc_feature (174)..(175): n is a, c, g, or t
  misc_feature (183)..(184): n is a, c, g, or t
  misc_feature (199)..(200): n is a, c, g, or t
  misc_feature (209)..(209): n is a, c, g, or t
  misc_feature (218)..(219): n is a, c, g, or t
  misc_feature (227)..(227): n is a, c, g, or t
  misc_feature (231)..(231): n is a, c, g, or t
  misc_feature (233)..(233): n is a, c, g, or t
  misc_feature (266)..(267): n is a, c, g, or t
  misc_feature (269)..(269): n is a, c, g, or t
  misc_feature (283)..(284): n is a, c, g, or t
  misc_feature (318)..(318): n is a, c, g, or t
  misc_feature (329)..(329): n is a, c, g, or t
  misc_feature (332)..(332): n is a, c, g, or t
  misc_feature (339)..(340): n is a, c, g, or t
  misc_feature (346)..(347): n is a, c, g, or t
  misc_feature (363)..(363): n is a, c, g, or t
  misc_feature (367)..(367): n is a, c, g, or t
  misc_feature (377)..(377): n is a, c, g, or t
  misc_feature (398)..(398): n is a, c, g, or t
  misc_feature (405)..(405): n is a, c, g, or t
  misc_feature (410)..(410): n is a, c, g, or t
  misc_feature (414)..(415): n is a, c, g, or t
  misc_feature (419)..(419): n is a, c, g, or t
  misc_feature (486)..(486): n is a, c, g, or t
  misc_feature (543)..(543): n is a, c, g, or t
  misc_feature (574)..(574): n is a, c, g, or t
  misc_feature (623)..(623): n is a, c, g, or t
tgctagtacgaggctgggtttaaatcggccgagggcgcaggtttccttagctgagggggcagctccgcggcggcgttcggggtctccagtagggctnacgctccggtgctcgcacaatcccccgcctcggctggcaacgggcgtcctccactccccgagtcccggcagccgccnncacccagnngcgccccgatctggnnccctgcccnggaagatgnntgccgtangccngngcccgcagttatagccgctgcctggtgcagctnncntccgaccgagaacnnctgctaagctccgcatgcagagacaggcaggagntagacacccgnganacaccanncacccnntcctccggggggcggngcanagggggcacnggagagcccctcgagcgcagnaggccgncccgncagnnatgncagaagctgaggaagatagtcattctgatactgtcagagcagatgatgatgaagaaaatgaaagtcntgctgaaacagatctgcaggcacaactccagatgttccgagctcagtggatgtttgnacttgctcaggtgtaagctctagcaatttanaaaatcgaccttgcagagcagcaagaggctctctccagaaaacatcggnagataccaaaggaaaacaagaacaaggcaaagaagacaaggctcgagaactcttcctaaaagcagtagaagaagaacagatggagctcttctatgaagacatccaagttatcgtaagggcaatgaacttgtactgatatagagtacagataattataccgggctcagatgtgatgcgtggaaaaagtcttgcggtatgaattggcagccaatggaatatagttatacagagaaacataagattggtactgttactattgaacaaaatataaga

SEQ ID NO: 688656 - DNA, 207 bp, Homo sapiens
gtagtctagggcgtacgtgtatgaatgacgaacggacataccaagggacagacgttgaaatcatatagaggttaaactctagcaagtatagaaatctgtttagtggaatggagtagcagctaatctttaagacccatggatagcattttagtagtagcacttaacatacagaaaagaaaaacaaatcatccagcttctgatcttcga

SEQ ID NO: 688657 - DNA, 137 bp, Homo sapiens
  misc_feature (30)..(30): n is a, c, g, or t
  misc_feature (126)..(126): n is a, c, g, or t
ttcctgtctgcatgaatgataacaataagnccaagtcatcaataatgcaatgaaaattttttaagtgaaagcaagtttattaagaaagtaaaggaataaagaatgcctacttcataggcagagcancctaaaaaaaa

SEQ ID NO: 688658 - DNA, 328 bp, Homo sapiens
  misc_feature (2)..(5): n is a, c, g, or t
  misc_feature (60)..(60): n is a, c, g, or t
cnnnntcgcatcctatcacctaaatatattatgctgtggaatatatactttggaggaganagtgtgctcagaacttagacgggattgggtaggccaagtatgctaagtgtacaagtatattttttatttttacaccttaaacaaagaaatgtggtcactaaaaataaaagtatatatataggaattaatgtactcttgctttgtcaagctgttggctataagtttccaaggtattatgttactctaactctaaaaagtgatgtattctgttagcaatgtagtatttcaaataaaggcttttacataatagatttagggttgatggggt

SEQ ID NO: 688659 - DNA, 170 bp, Homo sapiens
atgtatataacgttggaacacacagtaaccctgttgaagatattaactggatgcagctttagcacggatcctgatgaatttagagcgaatcatcagcctctggatgtcaaaagtaacaagattcatgtagtgcacagtgggctcacatttaacgaccgtatccgcaggaa

SEQ ID NO: 688660 - DNA, 234 bp, Homo sapiens
  misc_feature (232)..(233): n is a, c, g, or t
cccccccccccccaaaattttttttttttcccgggggaaaaaccccccctttttttggggaaaaaccccttttgggggggatttttaaaggggggttttttcccccccaacccctctgggaaaaacccccccggggggggagttttttttttttcccccccccccccttttcctttaaatttccccccccccccccccctttgggggaaaaatttttgggggtgttttcccnna

SEQ ID NO: 688661 - DNA, 868 bp, Homo sapiens
tgtacgatgttctaagaggtgattactacatatgcatgcctgtatcaaagtatttcataggccgcggtgtggtggctcacgcctgtaatcccagcacttgggaggctgaggcaggcagatcacaaggtcaggagattgagcccatcctggccaacatggtgaaaccccgtctctattaaaaatacaaaaattagctggggctggtggcgtgcgcctgtaatctcaacactttgggaggccgaggcgggcggatcgcctgaggccaggagttcaagaccagcccggcaacatagtgaaaccccatctctactgaaaataagaaaaattagccgggcatggtggcgtgtacccgcagtcccagctacttgggaggccgaggcaggagaatcacttgaacccgggaggtggaaggctgcagtaagcagagatcgcgccactgactccagcctgggcaacagagtgagaccctgtctcaataaataaataaataaataaataaataaataaacataaaaatacaaaaattagctggggttggtggcgtgtggctgtagtccagtactcgggagggtgaggagaagcatcatttgaaccgggaggggaaactgagtgagcaagacggcagtggatccagctgctgtagggattctgttccaaaaaaaattttgtaaaaatcggtcccatattatatactatatgactgggaatttaaatacattacaagaaaatgactgtggcgtcgccgggaatttaacttttggggggccgagaagaaggatggttggaacgaaaatgggtcaaaggggggggtaaaaggtggggaagacagaaacaggagagtgcaaggaagtcacttctgtctgcctaa

SEQ ID NO: 688662 - DNA, 430 bp, Homo sapiens
ctcctagctgttgttagtatgtgcgctgcatgtttccaaattcgttaccctgacaacccggagaaaatgggctttgtgagaggtctttgacagtatgggaaacccataacagcactttcggttaggcctcctctccatacttcttggttcttgactgcgttccaatttattacgggggttaaaaaatgaatagtgaataagtgagtgtgcccttctatgatgttgactacccacccagagtaagtactgatctgattgtgaggagagtggagaaggtggtatagaagctgaaagggttaaaaatatgggctccagtgaacctggggaagtaattaatcactctgagcatcagtttcctcattcataaaatgaagattgtagttgcacctagttcagaaggttgttaggattaaataaggtaatcagtgtt

SEQ ID NO: 688663 - DNA, 775 bp, Homo sapiens
gctggtacggcgggaatgtagggatcgcaccatcccagaagctgctgttagctcgccggtctcggcactgccgaccgttcagcccctgggctgtccgcccttcccctagcgttacttccggtccctcgcagatgggggttcagtgcggctcccaggaggcgtgaaccgcggaccatgagcgtgggcgttcatcggggccggtgcagcgtggacctatgactcgtggacgcggggcgtacaacggcgcgcaggcatccgtgtgggctcacaagataatagccagcgtccccagaagtgaacctgcccacggtgtccgcgctcaggaagatgggtgtgaaccgtgacacgcagcaacaaggagacggtgaagcactagcgtacgtcctgttctctggcgtgtgcaagccactgtatcatccccttcatcctggatgagattggggccgacgtgcaagccagacacatcgtggtctcctgtgcggctggtgtcgcacatcagctctgtggagaagaagctgatggcattccaggcagcccccaaagtgattcgctgcatgacgcaacacaactgtggtagtgcaggaaggcgctacgagtgtacgccacgggacacccatgcacctggtggaggatgggcagctcctgtgagcagctcatgagcagcgtgggcttctgcactgaggtgggaaggaggagctcatacgatgccgtgcacggggctcagtggcagcgggcctgcctatgcattcatgggtctggacgcattggtgatggt

SEQ ID NO: 688664 - DNA, 359 bp, Homo sapiens
ctggaatcgagcactcagcagactaaagctgaatctcaacaccagatatagggatctctgtgtacatcaataatctgtttgagactgatctcatgcctgctgcaatatagatttatcgagacacaaatgaaccagcggataccaagaggtctcatatctatgggagtagacagatgatactggagacagaggcatcagacgagctcaaacggtgtgaagatccacgcttgatgctcatgggtttcaagccgctggtactgctgaagcaccattacctgacgcactcaatgtgtgagcacccagagtagcacatgtggattgtgagcttccttgttcagcgctcagctgatcaggcggcg

SEQ ID NO: 688665 - DNA, 112 bp, Homo sapiens
aaaaattccccccctgtttttttttaaagggacaagaaggattggggttaaaaaaaaaaataagttttttcccccctcccccaaataaaaaccccaaagtgttgtgttggga

SEQ ID NO: 688666 - DNA, 174 bp, Homo sapiens
tctagaggatccgcgttatgtctgacccaccagttctcgttcttctagcgtgaagattttgcagagcagcccaagagaaggttatattcccagaggatgtcagtcccaaggaccagtagctgccatcaggtataggattctagaaaactaatctggcatcaagcactggagatg

SEQ ID NO: 688667 - DNA, 142 bp, Homo sapiens
acaactatgtgactatgctggaactctgtctttgactcaatggcagaagatggatgggagccagccttaggagccttccagaggaaggcccatctccagcagtcttctgccttgatcgaaggactgtggcgcagcacattca

SEQ ID NO: 688668 - DNA, 168 bp, Homo sapiens
aatgcagcggactcggagctcgtagttggactgggagcgggcgggcggtccgcgtgagagagccacctgctgtcccctgcctttgctctcggtgccccctcgatgctcttagctgagtgtccctgggcccgaagcgtaaactttgaaacaatcagagtgtccaaagca

SEQ ID NO: 688669 - DNA, 625 bp, Homo sapiens
ataatactagcatttaccatctgacttctaggaatactgagtattgatcgctcacacctcatatcctccctactatgcctagaaggaataatacgtatcgctgtgcattatagctacgtcgtcgaggtaacccgtcaacacccacgtccctcgttagccaatattgtgcctatagccaatactagtcttagccggctgcggaagcagcggtgggcctagcccgtactagtctcaatctcgcaacacatatggcctagactacgtacatagaccgtaaacctactccaaatgctaaaactaagtcgtacccaacgaagtgtatattactaccactgactatgagctttgccaaaaaagcacagtaatttgaatcaacacaaacacccacaggctaattattagcatcatccctctactattttttaagcgccaaatcaagcaatcatacctatttagctgttccccaagctttgtaccgtccgaccacctaaggaaacccgctgcgctaatacgtaactgacgtgattcctagccctcagaatcatgggaaagccaagccagtatccagtgaagcagtatcacgaaaaaagtctactgctctatactaatctcccgagaaatcgct

SEQ ID NO: 688670 - DNA, 369 bp, Homo sapiens
aggcgggggcccccccaaaccccgaggccccggaaaccgacggggcgggcggcaggcagcgctccttcaacagtaagccccccctttgggcagcaaaactgtgggtgacatgatttttgtaacggcctcggcccgctccccccccctggagttttcccaggcccccatttgtttttgagtggccaaaattatgccaggctgccctataccctggggggttttgccctgggccatgcccccccgtttttccattatggcaaaaacctcccgtcaggacctgacccgtttttgttttaggccgggtcaacagtgcagcctggtccctggggggtgggccccgggtccttaataaacccgccactccctcga

SEQ ID NO: 688671 - DNA, 860 bp, Homo sapiens
aggcggcatcgtcgatgcttgtgtcaggagtgacgtgccaccctcaaccccaatgagggattgcgcgcttcggcagttcggaacatctataacattgtttactctcaacgcggtagaaagtggaagttgccttctagactgatcattgctgtaaaagccgtgcagcaatggacggtgcttgtatctcgaagccgcgagaccctgggatctgtaccgaggacatccctgagtctgtcaggtcttcttgagttcatactgtggctgccgtgttacacaggcgcacccgtgtgcactgtaactttgtgtgctcaagaaattatacagaaacctacagtctgttgtaaaaaggatgctcgcaccaagtgtctgtaggcttggggagggatcgtttctctgtttgttaaatctggtgggtacctggatcttccacacgagtgggattctggccttcagagaccaggagggagtgtctgggccgcaggtgtggcactgtggtgagagtgtgtgtctttgcacacacagtgcagcgggaacggtggggctggctggtgctgaagacagacacactcctgagccaagggtcttgtcttcaacctcccccgtccgttgtcccattttgctccggtgagggtggccaattcccttttctttcccttccattctcaaggctctcctgtttccttcagggtccagtatgccttttgagtttaactgtaaaagggaccccgggaattgacacagtttacacagtggatgttaaaaacgggggtgggtgtaaccgtgtttgggtgggataaagaggccggagaggtggtacccgacaaaggtggtcgggggcgtccaggaaaagggcacagagc

SEQ ID NO: 688672 - DNA, 404 bp, Homo sapiens
  misc_feature (371)..(371): n is a, c, g, or t
aaatgccagaggggtttgacatgtggataagggaataaactcgctctttgaggtgtttggcagagctgggtggtgggctctggttgaatttgaggaagtagtttttaaaacccataggctgggtggccttgatgttggcgagagctctgtcactacaagtttaggcagaggttcacagcccttttctgatggagctgggaagggttagcagattaagctcagttaacttctaaatctatagttcccaaacttcagggtgcatcagaatcacccaggaagcttgtacaatatgcagattctgcttatttaagcagctccttggatgattgtgattcaggcctcactttgagaaactatgctttatttttttnatttttttattttttgagaccccgtctagggga

SEQ ID NO: 688673 - DNA, 289 bp, Homo sapiens
ccgtttccctaaatctcgtaatcctcatcgtcctcatctctgaggcagggaagcacatgcagcatatacatcgactgctgatatcaaatatacatcatcatcctcatcactcatcctcgatcaatcctcctcatcctcctcacatgacataccatcagaagacaggcaagaaggctgctgcaacctcagcaaagaaggtggtcagtttccccaacaaaacaggttgcagatgccacaccagccaagcacgcagctgtcactccaggctacaaggcagcagcaacacctg

SEQ ID NO: 688674 - DNA, 1043 bp, Homo sapiens
gaaacccgtctctactaaaaataagaaattagccgggtgtggtggcacgcacctgtagtcccagctacttgggagcctgaggcaggagaatcgcttgaacctgggaagtggaggttgagtgagccgggaccgtgccattgtactccagcctgggtgacagagcgagattccgtctcaaaaaaaaaaaaaaaaaagcccacctgaaaccttgatctctttccacttttgttgggcccttcgcagggggaattactcgagcttgtgggttgttgtacatagtgcctttcccctctatttcaggggttgctgtctgagggggtgtttattttgtatgtcataacttggtcttggtttacaatctacggtttaagagagcggcccagagtttctgcagccatttggtctcctacttcgtgggttgaaatttttttccccccccggtggcacgggggaccccaggtggttaagaccgcacatcgggaagacaccgcgggatgtgcggaagggggtgacgggcgtcccccccgtgctgtgatacaataagcgccagggaggggtttaaggcctccagcttttaaggggttgtgacgccccttgtgggggggttcagggcaacctgtgttttgcccagcggttccacgttgttgcttttgtgattgggcgcccaccgggcggcaaacgaggcagggatgcccgcccaacgttcttccccagaattcgcccgtgtggatctcgtgggccttatacagggggcggctcgaaaagccttgttccctcaccgcggtctccgcgggttttggtggcccccgggacccccttcgcgtttattttttgcccccctgttgggcaaccggggtagttgtccccaagaacagcaggaggaggcggcagcggagagcacgttctttggggaccggccggtctccatgttgtgcccggcgttccatattcccttttgtgtggggtaaccccggtaaagagtaccccccttttcacgtgggtctggcccttaaattggggccatggtttccatccgtgggtcc

SEQ ID NO: 688675 - DNA, 132 bp, Homo sapiens
tatgagctgaacattgggtggtgcccactggttagctcagcttgtgggtgtgacctgagtgaacttcagtgtcagttggtgcatgaatagtggttactgcagtctgaaccagtggctgactctctccgcttg

SEQ ID NO: 688676 - DNA, 156 bp, Homo sapiens
aatcctgacgggttaaaaaaagtaaaaggaactcggcaaatcttaccccgtcctgtataccataaacatcacctctcagcatcaccagtactcagaggcaccgcctgcccagtgagccaagattacaccactagcaccccagccattggcgtacaa

SEQ ID NO: 688677 - DNA, 279 bp, Homo sapiens
  misc_feature (8)..(8): n is a, c, g, or t
  misc_feature (50)..(50): n is a, c, g, or t
  misc_feature (62)..(62): n is a, c, g, or t
ttttgtanaatcttgctgtttcccccaggctagagtgcaagtagcgaaancatagctcactnagtcttgaactcctgggctcaagggatcctcctgagtagctgggactacaggcaaatgtcaccacacccaactaattttcctatttttctgtagaaatgaggtctcgccatgttgcccaggctggtcttgaactcctgggctcaagggatcctccaccttggactcccaaagtgctgggattacaggcatgagtgactgcgcccagcccaccccacc

SEQ ID NO: 688678 - DNA, 1348 bp, Homo sapiens
  misc_feature (1348)..(1348): n is a, c, g, or t
gagttgcgctggtgaatagcgggctactgtctgggcgacagcagctgccgcggaccagagggccggggccgtggggcgggatccgcagtcgggagtcgctacctccgcttcctcggcttctgcgcctctggggctgccgcctttgtcgggccatggtcccgaccgacggctcgtgctcggagaggcgtcacatgaggccaccagagcgtcgcgcgagtcctggtggagcacagagaccggctcgagagttcgcaggcggagaccgacgaatgggtcgtaacaccggggcattgccttagcgattggcgcgatcggcaggaccagatgagcccatgtgtcgggtaagagagattcagacactaatagtactcggtaagggcatcaatctaggctcgcggggcgcagacagaaagagcccgggcaagggatctactgagcatgaaactgggcctgggttggagccatacagtgtaaacctaggaacggatctcctttggtagaaggacgtgcttgaaaacatctccgtggatatttgacatttgatacggtgggtaccccaggaggtcgcacgtaggaaaagcccatgggctcttggggatagcccctcgagctttatcattcgggtttatcgggacgtttctagtgaatttgggcgggcccacaaaggagggacaaagccaaagagatcactgcggtgcgtcgtcaggaataccgtgaagagcgtccctttgggaccattgtattcaagcaatgagtgctcgggagacaccttgctaaactcagcaactattactgggggggcctaaaaattccggctaaggaaagggcttgatagggaatcttccgattcccgttggaatggaaaaggagtgagtcccgtggatttgtgggagatttatcactcaagatctaactcgaagcttcccctgtggaaaggcaataagccaaggggcaagaaacaccagaggacacggagaaaaaacagcccttttttataatcaaaaaagccccaagttatcatttttcacagaattgttcccttggtcggagggtatcccaaggtaagtaaccgggaagcaaaggttgcccccctggtgtgcccagagaaggccaactgaggttgtggaatcgggtccacacggaacaaagtgttcccttggtgcgataccacgacgggccagcggcgcaacatggctttgggcccacagctataccacacgaactggagagagatcttccatctccaggaaagcccacaggagacacagaggtggcacacagcatcctgggggactgtctggagcaccattttttccacgaacaacatacctcgtcacacaaagaggcn

SEQ ID NO: 688679 - DNA, 941 bp, Homo sapiens
acggcggcaaattctgcagctgctcattgaggacatgagctggcatctttcccggtaggactgcggtcacgtctgtagccacgcactaaggacctgggtaggcgtcatgaccctgggagcagcggcacagctgcgactgcgtatggaggacccaggcaggctcctcactctgccgatctgcagcgcgcctgtggtttgtgcaccaaggacccacccagacaggcgttcttaccctgtggacagcggcaactagctgggtgctgtgcaccccgagagatccagctgggtcattcttatcctgccgcaacgtgtggtctacgctctgtgcgtctagcgtagtttctgatgcgtgtggtacatggctagctacagctgcggctgaccactacggacccagacgggcgttcttgccttgtagacttgtgtgccacggggcgtgttggcgcggggcaacccacgaatgcagtgctgaagtgtattaccctgcgacttggcccaacacattgctgcgcagccaggactcaggctgggagtccttactctgaggtggagtccttaccctatcggactgtggcacaactgtggctggccaagaacccaggtgggcgtcttaccctgcagaccagtggcaggcctgcgcatggtcggaactccggttgagccgtctcatcctgtggggccgtgtttactgttgcctgctgtgcccttcaggaccctgtggggatcgcggtgttgtgggtccccctctttggcggacctgtgaatcccgtggccaggtttcacggcggaccctggccaggtgtcttgctttgtccccaacgcaccggcctctcgtgcagaaaccaactggacggtaaaggccccccttgatgaacactcccctgactgaccggggacattgcccggccactgttggtacccacgaggcactaccagggccc

SEQ ID NO: 688680 - DNA, 225 bp, Homo sapiens
cagactgcgaggaattatgtcggggagaacatgtcttggaagaagcagagtaggggtaactcaattagaaaatattaccattacgttcgccatggaagttgtctcacctttgcagtggaatcacagtaagagaggctgtgaggatttgtttgccttccaagccacagcaaaaagcagagtttacagggcctggggagcaactgagttacctgagggcacggaaga

SEQ ID NO: 688681 - DNA, 494 bp, Homo sapiens
  misc_feature (64)..(64): n is a, c, g, or t
  misc_feature (121)..(121): n is a, c, g, or t
  misc_feature (182)..(182): n is a, c, g, or t
  misc_feature (226)..(226): n is a, c, g, or t
  misc_feature (443)..(443): n is a, c, g, or t
gacattccagaggtcgcccagctccggcgctgacggttgtggaccgcggacgtcgctgggacanccctccccgctgctcggcgcgcacctggcccggcgtcctcgctgcgcttcgctccgnctcctcggactcggactcgggtttatatcgcgcctcacttcatcccagtccgggcgagcangttgggtttatgtctttatttgacgaaaacgagctgttcacagnattggtacctgtattggggaaacatagcatacaagcaagaagcttacagcctcagtggcgaaaattttttcatgtcagagacccgagaactcttgcagtccgtttatgtcatcccttcttctccaagacagaaagataccaaaaaagttgcaatcaaagatctcttcatcttattgataaagcactaataagcaaaatgtctgtaatgtcaccgcancgtgtcagacagtctatggtacaagatgcccgtctgattgcaaggtgaggc

SEQ ID NO: 688682 - DNA, 129 bp, Homo sapiens
aagaactctcaggacgttgcacgttactgtggggcgcacagcacagatggacgcaggtgctggggctccagtgcagttgctgccacacccgccggggtcctaccacactacacgcagaacgcgcctaat

SEQ ID NO: 688683 - DNA, 764 bp, Homo sapiens
tccaaaccattggctttaatggggttatatactttctgggcagctgtaaaatcaaaacctggggggaagccaatcggaaaccccgagaggcccagcgaaggagtccatctgaggtacagaacctgtggtgcttctgccatgtgttccctgtggggcaggggcattcccatttctccccctgtagtgctttttctctccgtgaagagaagctccaacagacgtgccagcccaggctctgaagtgtgcagagggtgggacctccgtgaacacagctcggggggattggggcagaggcaaacagcccctccgtgtgtttcacctgtgcagaacggggttgggccaaaggtgctagtggagcaaactgtgggttgtggtggaagccctcgtgtgtgtgctgaggaactcagctcccgtgcacacaggagcctgtgtgcgggggccagcaacgcatcgcagccgtgggaagaacagccggggctttcccatagcctcgggtgccaacaccccgcaggtgcaacaccaatggttccacctaacatgctcaggggcacaggctcaggcagcaaacgtgttccacccaccggggcaggagaacttgtgggcagaatctgatgtgcctggggagaccctttggttgagaggtctcattcaaaccaacaatgtgtccccattctggtggaagttccagagtcctgggatggtcttgccggaatctggggcggtccaggtggcactcgtgccctagccggtgcaatggtctgtgc

SEQ ID NO: 688684 - DNA, 146 bp, Homo sapiens
  misc_feature (64)..(64): n is a, c, g, or t
ccttcagaagctggtggtggcgtcctggaagagagactgcagatggtaatggagttatagccanaagatcgtatgtaagtaactttagaaatgtgtcatcgtgtgggtgtcacagttatgtgcttaaggactgctgagcgcccctg

SEQ ID NO: 688685 - DNA, 675 bp, Homo sapiens
agcggagtgtgctccccggcccctgccggaggcctcgcctcccggctcacctcccacccacctgccgctgcggctctccgcgggagatctcacagtctggagacagggtcgctcgctctcacggtaggctggacagaacgcgggctgtctggggcctctaaggaacagtgcccatgcatgtataagggcatggcgcgacaggaaaacggcaaagaaaggcaacgacacaacgaaggagggttccaaactgcaagctgtcctgcacgggcctgcagtgactcgcccttccattacagcactgcagactgaacggctaacgctactcccattgggcacatcgaggggcagggagagacgcccaagggaagcggccatcacgacggggctacaccaacaaatactggcaccagcgacggaaccacgcgcttcccacaagcagaaaaacgggtccccatagcgcgcaacccagcccacatcgcaataccacaggcccattccaccgctggggcacaaacctggcgccacacaaacccgtaacaacagaactcaccacatcggcgaaccaacgaccccaacagaccgccaggaccgccaccaacggccgacaacaccgccggccagtctggaggagacagcacggaaccaacgcagcccccactcaacacacgagccaac

SEQ ID NO: 688686 - DNA, 490 bp, Homo sapiens
  misc_feature (396)..(396): n is a, c, g, or t
aacgatggtcctcagcttcactagaagctgatggacaacagatttaaatccatattctttttttaagcagggctcagaagacctactctgtctaaggaaactatgggttccacatctattttgcacattccccaacacacacacacacacacacacacacacacacacacaaattcagagcatcaagagtgctaagtgtatctaagcacgagtgctaagtgggggatcccagagccactcagaattatcctaaccttagagcagggatagacggggagtgtatactatatatatatatacgtgaacaaatatatatattcctagagtcataccctatgctcaggtggggggacatttttctctctctctcttttcaacacaaagtctcactctgtngccgagggtggagtgcagtggtacaatcatagctcagtgtaacgtggaactcataggctcaagcaatcctcttgcctcagtctctcaagtagct

SEQ ID NO: 688687 - DNA, 613 bp, Homo sapiens
atcccagcatttgggaggccgaggtgggcagatcacgagatcaggagttcaatgactggcctgaccaacatgatgaaaccccgtctctacaaaaattcaaaaattagctgggcgtggtggcgcatgcctgcagtcccagccacccaggaggctgaggcaggaaaatcgcttgaacccgggaggtggaggttgcaatgagccaatattgggccactgtgctccagcctgggtgacagagcgagactctgtctcaaaaaaacaaaaaaaaatgttgggtcttcagaaaagcagccacagtatattcttagaccagggggagccattggggatctccctcttgggaggtgcagtcccagttctgggttggcacgtcccagtaaagtctccaggcagaagctctatatacaacttttccccacaataatccccggaaatgggggggactagcgctttcaagaaattctgggggggcgagtagaccccatccagttatttctagtatcccggggtgatgcccagcgactttcagcccatttggactgtcatatcggcttctccaaggcggctctgtgtttccctcaacgtggcttggcctccattggtttgtcctctg

SEQ ID NO: 688688 - DNA, 186 bp, Homo sapiens
gggaatggaacacacagctgagttaaataattctctccttgtgcctaagagaaggcatttacacacaggaaaaacaagagcattagaacgttcggggcaaaaacttatcaagttggaatatatctcccttcttcttgagaaacctacgcagtgtactacctatacaattccatgttctaacacaag

SEQ ID NO: 688689 - DNA, 487 bp, Homo sapiens
  misc_feature (445)..(445): n is a, c, g, or t
ccaccttggccttgccaagtactggggattataggccctgagccgcgtgcccggtcctcacccggcttggtagacacagttaacaaggtgtccccgatatttggggtatgtcctttggttctttcctattggaatgtatagtgcatgatgataagtgccagttaggtctggggagtggtttctaattgggcagaccagggtttttcatcttggcattaactattactacctttttcagcaggttggtaaggaaggcaggtctgactactagtggcagggatccggtacaactagacagggtacctaagcaaatccaagctttccctaggtgcctagaggggggagacacttcagatctggtgtggtatccagggtttttccaggtaaatggtctcaccagcggggagctgggagtagggcttgcaaagggagtttcctcaacagnttctttccacctccagcctgaaatatggggttgcaaactgtt

SEQ ID NO: 688690 - DNA, 184 bp, Homo sapiens
tgccatacagatgttgtgctcaattaccccatgtgagtgcgtgactccttgggagctcctgctccctacagggggctgcaactcctgtacttgaagctgagacctcatatgaggtggccttcgtgtggtcagagagtgtctggaagctgctgtggccatcttgaacaattcaccaacctccaag

SEQ ID NO: 688691 - DNA, 365 bp, Homo sapiens
  misc_feature (94)..(94): n is a, c, g, or t
aagggttttttccccccacatttcccgttggggtggggaaccatgggccgccgggaaaaaaattcaaaacccccccccccggggtgggatcccnggggccctttttttttttttaaaaaaccccccctgggcaaaaacagggggggggggggggacctttttttttttcccggggtgggttggggtttggcccacccccccccccaaaaaaacctttcccttttccccgggtaatttgttgggggggcgggaagccccccccccccggggtttttgggttgcccgaggaatttttggccggaccccctttttattttttcccgggcccccgggtgggaattaagccccccccccccccctgggga

SEQ ID NO: 688692 - DNA, 400 bp, Homo sapiens
taaagcatttgtgatgcgctgcttcagtgcctccggatatcaccgcatccactctcatgtagacagaaatctttatcttccccgttccaggtctctctcgtcatgccagtactgaccttatctataatcattaacacataataaagaaaatgcgatcctgtgaacaatatattatcatagagaatttgtggagtactgaacaggtccctcatccctcacccagagacttggtctccttcttccatgcttgatgtgtcctcgtctccttcaaagtcgtggctgtttcgttcagcttactgcagccctggtgtcatcagccgtcgggtcgtcttcatcaatacccagaccaagtttgatcatcctgtagatcctgttagcatgtgtctggggatcttccaga

SEQ ID NO: 688693 - DNA, 257 bp, Homo sapiens
cttttccaaagccccacagagtagcacacagtgtatcccgagtccagaagaaaaagaatgagaacacctaacttcaccgactagatgaagaagaatgtatgtcagggtaatatgcctgctttacaagttctaaatgaagattgtccatcaataatgcccatctggttgttcagccttattcttcaagaccattttctttaacaaatcacaaggcttcatctgcaccagatagcgatgtaggactgataccagcagat

SEQ ID NO: 688694 - DNA, 976 bp, Homo sapiens
ggtttccagcggtgtactcacggcaggttcttaccgtatgcttaagcgaggcttcggtctcctgggatttctgtccgggctcctgtgcccttcgtccttctgcgccagagcaggttgcggtgagcactcctcagagctctttctgcatgccctgccggctgctttaccgacagcgggctgagagccccgaggtatccataaatgagcctgctcttggaacaaactcaggttgagggagaccccgtgggaaccagcgatgtgaggcagatgacaactaccagacaactcgacaattccgcactgagagcgatatagcaagtaacatcgatctccgctgactgaatagccagttggataagtactggtactccagagggcacaccaattcttgaccggggagaactttcttaatagcagggatcactgggtctaatgattgttacggaaatgtctgggaagcttgcaagacagagggtaccatgaccaattccctaaatagtccccagtcatgatttgccacttcttggtggactgttggcttgaatagtacttgcttgggaacgtgacggactcggtgagcacaagttgtgttagcgggcattcgctagttgaatcagaagcagattgtccctagtagaataggttggggaaccgtcaagtcacggaaagcgcgaaggacgtaataaccaggagtcagcaacaaggcaattgacttgcatacgcatggtatgataaaaacccaattccaattttgggacattcaaagaggagattacccaaagatttatcaaggcctggtgcaatgagtaggaccttaggacgaagacatgggggcataaacgaacttttaaaaaggcatctaatggagaatggctgcgaattcggttccaccattcgctaattgactgcgtaatcgggaacattcgccgagagacggagtttaacatgtgctcagctgtgaatatacaggccatgg

SEQ ID NO: 688695 - DNA, 128 bp, Homo sapiens
  misc_feature (50)..(50): n is a, c, g, or t
  misc_feature (85)..(86): n is a, c, g, or t
  misc_feature (120)..(121): n is a, c, g, or t
gcgctggggtgtacagtctagcatcactacgtggtggacatcccgagctnggtgtctcgtctcctacaatggcctgtccttctcnncgtcaggctgccctacccaccggtttggcaacannacaccaa

SEQ ID NO: 688696 - DNA, 352 bp, Homo sapiens
  misc_feature (38)..(38): n is a, c, g, or t
tcctcttcaggcatgggatttccaaggctccgttttantgcacccttcagaatcgattcttctgcactcttgtttccttcctctgttaacttgatgccttcacttactgctatgtagttcactaaatcctatcatctgttcaagactcttagctactcttaaggtaaattaaggcttcctaaattcatatactttctaccatagacctgacagtgggttaaataacaaacagctccaggattattcaattcttcttaaatagccatgatttaaatgacaaggaaggatattaacttctgagaatcattaaaattgcacttcccccttaaatcaataaaaatatatttggtga

SEQ ID NO: 688697 - DNA, 436 bp, Homo sapiens
  misc_feature (285)..(285): n is a, c, g, or t
tagatgggagtctggctctggtcgccaggtgggagtgcaagggggcaatctgggctcacggcaaccggcacctccaggttcaagtgattctgctgcctcagcctcccaagtagcggggactacaggcacctgccaccacgcccatctaagtttggcatttttagtagcgagggtttcacctgtgtgggccaggcgggtttggtgggccaatggtctctaaactggcgtgtcaaaaaaagggggggcggatagggggcgccctttttttcacccaaagcacccggntcccatttggtcgggtaaaacatcagttacatttatataacaccatataattttaacgaacatttcacacaatgttatttcatttggggctccataatcattcagcttaaatttatcactcaggctacttaccagccaagagtaatctggg

SEQ ID NO: 688698 - DNA, 113 bp, Homo sapiens
gaccagaccagactgactgtgagttacgttgacacctccaagctggtgtttgatgggctgatggaagaaggtgacagcaatgcagctctaagagtcttagtttcttcttcctt

SEQ ID NO: 688699 - DNA, 186 bp, Homo sapiens
tatctatactgacctatctatactacctatctatactacccatctatactgacatatctatactgacgctcgggcgaggggggttcatagtagaagagcgatggtgagagctaaggtcggggcggtgatgtagagggtgatggtagatggtcagtatagatatgtcagtatagatgggtagtatag

SEQ ID NO: 688700 - DNA, 214 bp, Homo sapiens
tgtgtctacacaaacatcaagtatattataataactattagctttctgatcattccaacatatgtaattaagcgctcagattactctaaccagaaatataatacttgtataaaactaaccttttcagccaggtgagatggctcatgcctgtaattctcagcacttcagggaggctgaggcagggaagatcgcttgaggacaggcattatagggt

SEQ ID NO: 688701 - DNA, 252 bp, Homo sapiens
  misc_feature (160)..(160): n is a, c, g, or t
  misc_feature (240)..(240): n is a, c, g, or t
  misc_feature (244)..(245): n is a, c, g, or t
gctgactgggaccaacaagccacgcatgcgtcaagagtgagagtccgggacctaggcaggggccctggggttaggcctgagagagaagagaacctcccccagcactcggtgtgcatcggtagtgaaggagcctcacctgacccccgctgttgctcaatcncttcccaagaacagagagaaaagggaacttccagggcggccgggcctccgggggttcccaccccatttttagctgaaagnactnnggcagag

SEQ ID NO: 688702 - DNA, 456 bp, Homo sapiens
gatgatcgcaatcttgttggcaacatctagggcatcataatcaggagccaagcgaacatacgccttcttctctccgtcgggccttatcagggtattgactttggccacatcgatgtcatagagtttcttgacagcctgtttgatctgatgcttattggccttgacatccacaatgaacacaagagtgttgttgtcctctattttcttcatggctgactccgtggtcagtgggaatttgatgatagcatagtggtcaagcttgtttctcctgggcgcactcttccgaggatattttggctgcctccggagccgcagggtcttgggccgccggaaggtgggtgacgttcggatcttcttctttttgtggctgtggacgcctttcagcaccgccttcttagctttcaaggccttcgctttggcttcggctttgggaggggcaggagcttccgtcgacgc

SEQ ID NO: 688703 - DNA, 458 bp, Homo sapiens
gctaataaaaatacaaaattagccgagtatggtggctagtgtctgtaatcccagctactcaggaggctgaggcgggtggatcacttgaggtcagaagttcaagaccagcctgaccaacatcgtgaaatgccgtctttactaaaaatacaaaaaattagccgggcgtagtggcggacgccggtagtcccagctactggggaggctgagacaggagaatcacttgaaccggggaggtagaggttgcagtgagttgagatggcatcactgcactccagcctgggtgatagaacgagactcggtcttaaaaaaaaaaaaaggtgggatctaagtaagacgggatggctaatctaataagcaaggggatatggttcccaagagtattcacagacggtcagtgggggtccctgggaacaatatttacgtgggttcctggaaatttatctaaatatgaccctttt

SEQ ID NO: 688704 - DNA, 182 bp, Homo sapiens
caccatccaagcaatcaaagtgcactggtcccaagcaaaatccccagtctatctcagcagtcacttctcttgggcagcccattgcaagtggcacatcatcctggtcctgtacgttcacaaatgtccgcaccagcatcatttcacattgcagtgcaaacatcacaggcatgctcaagccgctt

SEQ ID NO: 688705 - DNA, 478 bp, Homo sapiens
acgcggaacaaattgcaatataatgtgataagttctttaaaagaggtaagagcaccgtgctttgggagcgtggaatagggacaaagcatcatcttgcctgcttgagccaggggacacagaatagaaccccactatctcatttaatctttacaactcttttgcaaggttccctggttgtgaaaatacatgagataaattatgaaggccactatcatcctccttttgcttgcacaagtttcctgggctggaccgtttcaacagacaggcttatttgactttatgctagaaaactgaggcttttgggatacgcccagaaattcctgatgaccgcgactttcagccctccttaggccaagtgtgccccttccgatgtcactgccatcttcgagtggcccaatgttctgatttgggtcttgaaaaaatgcccaagggatctttcctctgacacaactcttgttgaacttgtcaactcctcgtc

SEQ ID NO: 688706 - DNA, 362 bp, Homo sapiens
gtttttttttccattaaccaaatatccgacagaaatgcttgtgggaagataattccttttggctagagcttatactccacattgtgagctttttaattttctttccttggtggtgggttgggacccaactgtgcagttgcgggagctcatcacagtcctgttgctgggcaagttctccctgtgaatctgtgttttccccttgtacctacctaatgaaagccaaattagataaatttttaatcaaggagatgaatgatgagtttttccttagaaaagaaaccacaaggccccacagtactggatacaataaaatgtgaagtttttgtttgcatgtatgctgtttggcatggctttaatgtcag

SEQ ID NO: 688707 - DNA, 377 bp, Homo sapiens
ctgtaattacttaggaagaccaaatggcaccagagataagactcccttagatccccacttagatcaccaccctttctcagggggtaataaagtcatcttccttggaatgtagcaatctataaccaatcaaagcactgtaacatatgcactggtcttgtatggaaaatgttgtaatcctgctaaaattcctctctctttgcctgtggaagtgaaaccttaacttctccagtttggaatgctcaccccattcctttggagtcaatgcttactgggtggctattctcaaactttgcactcaaagaaactctatacttagtcttattttctgaatctcattatttaaggttgacataataaacaactaatagtaagtaaaa

SEQ ID NO: 688708 - DNA, 218 bp, Homo sapiens
gacctatgtggataatcgccccagccaaatttttgtataatagttactgcgcgacttttgataggcccgtgacgatcaccatatgagccacgaccccctgcatagtaataatcatatccggagccaccttgtggatcataagccatgccgccattgtgatgcactccatgtatctattgcagagtcccaagttgcatcagtactgaaaccaaccatgc

SEQ ID NO: 688709 - DNA, 473 bp, Homo sapiens
tgaaagacgacgaaggggctacataatggtaaggatgaatgcacaagcagagctaactattctacatatatatgcacccatacaggagcccccgattcataaaggcagttcttagagacctaccaagagacttagattctcacacataataatgggagactttgacactccccctgtgtcatattagacagaacaatgagaccgaaaattaaccagaatatatcggacttaaactacagctcttggaccagcagacctacagaactcagaacttgaactccgctttggaccaagcagacatctacacaactctcccacttcaaatcaacagaatatacatttcttagcagcaccacatacgcacttattctaaaattgaccccataattggaagtaaaacactacacacccggagtgccaaagaacggaaatcacaacagtctcttcagaaccacagtgcgatccaattagaa

SEQ ID NO: 688710 - DNA, 170 bp, Homo sapiens
catgaaaattgtcaaacccaccagacttttttccctcatctgcttcaactgttggctgcccgggacacgaatgaccacttcattctctccaaaaggcctcaacttttttttttttttgagacagagtcttgctcttttgcccaggctggagtgcaatggtgcaatctcca

SEQ ID NO: 688711 - DNA, 201 bp, Homo sapiens
aggtcttaccagtcaggatctatcacgaagatctagcatcccaggctctgagacggagcaccaggtgcaaggtggactcttactggatagttgtagtcagacagggtacgaccatacttccagctagttttccggcaaagatcaacctactgctaggtcaggaggggatagccttcctatgtcttggatactttgccttga

SEQ ID NO: 688712 - DNA, 403 bp, Homo sapiens
ctatttcctggtgtaaaaagcctatgataagactaaagtagggatctatttgactaaaccagttctggtataaccaaagagttatcctcacagtgaaccgtgcaagctacaaaatgggagaaaatattcgcaacctactcatactgacaaaggcctaatatccagaatctacaatgaatctccaacaaatttacaatgaaaaaaactaataaccccatctaaaaagtgggcaacggatataaccagactcttctcagaagcaagatcatttatgcagccaaaagacacatgagatagtgctcatcatcactggccatcagagaaatgcatatcaaaaccacaatgagataccatgtcaaaccagttggaatggccatcattgacaagtcaggaaacaacaggt

SEQ ID NO: 688713 - DNA, 190 bp, Homo sapiens
ccaaaatataaagaccaatgacaccatgaagaaattgcatcaactagtgtgtgagataacaagatagcatcatgatgataggatcatattcacacataacagttattaaccttaaatgttaaatggacctaaatgccccattgatggagacacagatggaaccgggcacagtgggctcatggccattaat

SEQ ID NO: 688714 - DNA, 433 bp, Homo sapiens
agcgggacggacgcttcggcgacgtaacgaatcgctgtcggacgtgctgatatcggggtgatagctgaaagacgtggagatcagacaagctcgtctgatcaatacagactcatcgatgcattcatctcatctgatgactcaatgttgacaaacgaactcaagtcatctgggtgaagtgtcgcgagtctgtgcactcagagctgattaaccctaaaggcttaaggaacgggcactgtaacagagacaccagcccctgtatagacactaaatgtacaagagtgtgagctatttctggtgaagtgtccaaaaaattggacgtgtggttaaggaatttctcgctgaccttgtaataatgttggagcatctgtcagtgcgatgaagattatattggtctggacagtctaactggttcgattgttgataggattgagtg

SEQ ID NO: 688715 - DNA, 570 bp, Homo sapiens
ccataattaacgcttagtcatagacgtccaaaagcatttaagactgattgtgcgttgaagtttataataaattatattacacatgtcttgcctatttggaggtaaagatatatgcttcgtcaagatatcacttgtgtcatccctctaaatataagatccaaatagctcagcctagagtgattctattttattattttgtacctgtatatgtactgtttattaaatcgatattgcttaggacagtataggctactggcactttagaataaaaagtccgccaaacccagacaaatggtttatgaaccagaggtatcctgtggaaagagtctatatgcatgagtctgtgcctctgtgtgcactcgtgaatgcttcttggtgtgcctagattttattgcacaaacctgagtatatctcttctacattgtcagtcatgtgttctgtaccttcttttcgtttccattgggcatgctatgggaaatcggtggattgcgtgtgtccatgcatcagtctttaatgaaagcttgaagaggtataggtcatagtcagagtatgtgggccaatggttgatat

SEQ ID NO: 688716 - DNA, 701 bp, Homo sapiens
tcgcaggtcaagagcaaggcctagaagtccgtggacaagcacagcgacgagtacaagatccggcgcgagcgctacaacatcgccgtgcgcaagagccgcgacaaggccaagatgcgcaacctggagacgcagcacaaggtcctggagctcacggccgagaacgagcggctgcagaagaaggtggagcagctgtcgcgcgagctcagcaccctgcggaacttgttcaagcagctgcccgagcccctgctcgcctcctccggccactgctagcgcggcccccgcgcgcgtccccctgccggccggggctgagactccggggagcgcccgcgcccgcgccctcgcccccgcaccacacggacggacgtccggtcaaaactattggcaactggggcacttggcagacgacggggagccacgtcggcgccgggcgggaccagggccacaggtttacgaagattgatgcaaatcaggtattaaaacaatggctgaacgcgtgatgtacacgggactgacgcaacccacgtgtaactgtcagccgggccctgagtaatcgcaattaaagatgttcctacgggcattgttgctgttgatgttttgttttgttttgttattatggtcatatatagtaatataaaaaataaatcataatttcataatgagaaaagaggcagtcagattccggagttctccgtcagcatcag

SEQ ID NO: 688717 - DNA, 366 bp, Homo sapiens
gtctagagtgatccctctctgactgaggacagatgcaagaagaggatggctactttgcacgtcagggagtctgctcggcgaacttgttctcctcagagaacgtgcagactgtgagagctgcctgccttacagggacttcagtatcagagttcttaacctgggtcctggaatccataaccccctgaacactgcttgcaaatgttataaataatacggacattttctggagaaggagttcaaagcttcctgcagatatcccaataagtcctttatctgaaataaattaagaacctctgccttacattcctcccgagatgtcgagtctcggtgggggctctgagaggctgggggtgaccccggcctttt

SEQ ID NO: 688718 - DNA, 425 bp, Homo sapiens
ccgtggatgtggggctttgtgagtgggcacggtcactgcttcatgtctcactttatcattcgcagcaacttcgtgtacgacgacgggaaccaacccctcgccatggacacgtcgtgtcctccatagaagccagccatccttctcctcgtggatgagcagagtgatgacatctccctgtgcaaagctggagtaaggtcttgtaggagcccggcagtgtgcgggaaagatgagtcttcacttgtctgctatctctcatcatgttcagtcccgttgcaaccgaaactgatcgcagtaaactgggatcttcggaagtacctgttgaattatttaccctttgtgaattcggggcaggcgtggctgggtcattacagcatatcgatcaagggactggtatatgctctgcctgaaggagcggggggcatctt

SEQ ID NO: 688719 - DNA, 310 bp, Homo sapiens
gggcgggggagagacgatcggctctgggagactgtgaagtgttttcatcctctgatgaacctggtgctggtaatgtcttgttcagtgtgaattctctctcatacaaaacgttataaatattctctattcagaagtctggtccacatgacacccaggaggcaatgtccttaaagacgcttgccggccgggatcacccatgggtgcgagggcccagtctgtgagactctgttgtggcgccattcacagcaagtccatcttgggtctgtaagtgcacgcaggagcggtgccttcttgaatctccacctagtga

SEQ ID NO: 688720 - DNA, 337 bp, Homo sapiens
ggtgtgaggaggagcaggctctggatcagaaccctctacgccttgctagctcagcatcccacagaggggtcttcccgctcacagccacagagggtttatcatcgcttatagagtaagagttacctacccgtgcctgtaggccatcaggtacatcccgggtgctgccacctcacacctgcgatgtccacattgtgaaccgggttgaacagaacgcagcctctagaggctggagaaaatacaccaagcatctgacacagatcacccttggactgtgggactataggctatcttcatttttttcttcatacttttcttggtttctaaatcggggatcctc

SEQ ID NO: 688721 - DNA, 219 bp, Homo sapiens
ggggccggcctttaaaaggccttttgggggttttttttttcccggcccggggtggggccccccccggggggtttggtgggggttttggggttttggaggccctttccccccgggcttggggttttttccccttttggtcccggccccggtttttggggggggggggttttttgctttcccccccccttttttttttttgtttttttgggggtttttgga

SEQ ID NO: 688722 - DNA, 454 bp, Homo sapiens
taacagattaatctatatggtggattccattatattaaatggtcatctctatagatgcggaaagcagattaatggtctcctagggctatgggagaggagtaaggaatgttaatggatatgggttttttggggggatgatgaaattattctaaaattagattgtggtgatagttgtacaattatgtgaatatacttaaaagacaattgcataggaaacatacatatacacacaggcacagacacacaaacacaaatcaaccaaaccaaatgtatttacagattgaatttgccatacaggtcactgattcatgactgctattagtggtggaaaaaagacaagaccaaatattcttgatatgactaaccttcagattagtaggaaagatgagaaacatacataaattataacaacaaaaaggaaagaattctgaaagtaaaaaataaggcccacatc

SEQ ID NO: 688723 - DNA, 390 bp, Homo sapiens
tttcaacagagacaggtttattttgggaataaacctgagaggggcttctggccgatttcggtcagggacattctcttacagactaagggcatttaagggtttaggaagggggagcctaccgcaggctgcgaatgtttctgtgtgaaggagagttttattgcagagttggaatatctctggctggaggggaggttattctcaggattggcatgtttctggtcagatgggggtttatctcatggttgaaatgtttctgctcatactgacatgagccattaggctgatgttttgggctggtttttaatcacggagaacttaaaatggccatgtttgtccaagatggcaatgctcctgctgcacacccacccacccacagggtacttgggtcgc

SEQ ID NO: 688724 - DNA, 319 bp, Homo sapiens
ggcagacggggagttaggacactgaagatggtggcctgctccgaagccctctcaggactgggtcattctgatcctcgccaggtgcaagtagcagtggggcctgatcccgagacgtgagtcacagggcccagctgtccctgtgcttctgtcaagggcggcacaatatctgtccttcaacgcatcagtaccatcccctcaagcatcatccccacatcatgcctgaaggaacataatgtggtgcaggatcccacccctcagcctggaagttgtgaagccagaccatgatctcctttaacagatcagaattccatctcccatg

SEQ ID NO: 688725 - DNA, 171 bp, Homo sapiens
  misc_feature (8)..(8): n is a, c, g, or t
gaccccgngatcgcccaacacagacatgcaagatggaaagattacaagaaataagatggtacttggcaaacaaaaaaccccatctgggagggagaaaaaattcccttacttcttaaaaactcccttaatacttaaacagttctaggggaatcagcgttggggataacatca

SEQ ID NO: 688726 - DNA, 731 bp, Homo sapiens
  misc_feature (182)..(182): n is a, c, g, or t
  misc_feature (185)..(185): n is a, c, g, or t
  misc_feature (193)..(193): n is a, c, g, or t
  misc_feature (197)..(197): n is a, c, g, or t
  misc_feature (199)..(199): n is a, c, g, or t
  misc_feature (223)..(224): n is a, c, g, or t
  misc_feature (274)..(275): n is a, c, g, or t
  misc_feature (284)..(284): n is a, c, g, or t
  misc_feature (294)..(294): n is a, c, g, or t
  misc_feature (304)..(304): n is a, c, g, or t
  misc_feature (307)..(307): n is a, c, g, or t
  misc_feature (319)..(319): n is a, c, g, or t
  misc_feature (503)..(503): n is a, c, g, or t
  misc_feature (514)..(515): n is a, c, g, or t
  misc_feature (522)..(523): n is a, c, g, or t
  misc_feature (539)..(539): n is a, c, g, or t
gcacaggcatccagccaggcacatccctgctcaccctgatgggcttcaggctggagggcattttcccagcggcgctgctgcccctgttgctgaccatgattcttttcctgggcccactgatgcagctctctatggattgcccttgtgacctggcagatgggctgaaggttgtcctggccccncgntcctgggncccngntgacctcacagacatgcgtaggcnngcggaaccaagtgatcgccccgctgacagaggagctggtgttccgggacnngtatgctgnccatgttagnaccgtgcatnggncctgggccctgntgtgttcacctgtcccgctctttcttaggagttgcccattttcagccatacttattgatgcagctgcgtctccgccagatgcagccgtggggaacatcttcttgtctgctgcgttccagttctcctacgacaggtgtcttcggtgcctacacatgctttcctctttcatccgcacaggacaccntgattgggccnngtttctnngccattccttctgcanttacaatgggttaccgcagctgtttgtgcggcttggagcacacccacagaggcggccctgcatgcaggctattgcctgggtgtgggatcttcttgcttctgtccaggccctcagggaaccagctctacgggcagctaccctttgttgctttgtacggcagtgaccaaaggtcctgtgccctgactatacatg

SEQ ID NO: 688727 - DNA, 243 bp, Homo sapiens
aacctcccaaaatcatgggcccatgtgaaagcactgaaccactgctggaccagggtgtaagctcactgtgaccatagtgaaggtgtttttgttagacatgggtccccaaagaaagtcaagtaatagtagcagagatggaaatgaagatgcatatgaaggtatttgtacctgacccggaaaatggaagtattgtccagcatatggagtgaatatgtcatgtccatgtgtgaaaataccatatga

SEQ ID NO: 688728 - DNA, 333 bp, Homo sapiens
ttcctttaatctctggtctcctataatctctatcggtacagcttggtcaccattttttttaatttcctcactggaggtagtcccagaaaaaaacacaaaacctcaaaacggtaacctggaccttataattccctctctcttccttccttccttccttttccttccgtccacacgggtaagacctataacaccaaatggacaattacacccaggttaattcgacccgggaggggaggtagctgaattcggtctcaaagatttatttccaccaaatagtatttaggcttgggccaggaggggattaagaccaggagagccgtctaggcggtgact

SEQ ID NO: 688729 - DNA, 132 bp, Homo sapiens
tactgccgttgcctctactccggttcctctactctgccggttcctctactccggttcctctactctgccggttcctctactgagcaggattaccatggcaacaacacatcatcagtagaggcaaccggcagt

SEQ ID NO: 688730 - DNA, 427 bp, Homo sapiens
tgaacacacggaagaaataaatacacacaataacacataagataacaaaaaagataaggagatagaaacaaataaccctatatgaaattacctgaccaacaaatagaggcaggctatattaattaaacatatactagcaaatgaaaaaactccccgaggtgactaactcaaactccatcatttcatgcacatgaccattggcttctgtgttctaataccatagccacatccaaatccagaaaggctcctgcaccccatgctcaaaaatgcaacctcaagtccctgaaggtcctcagcacagactgacattaacaagcctgtgttcagccttcatccagaacctccaggaaaatcaggagcacaaacacagagcaaagcaccgtttctttaaaccatggctttaactgtcgaatgagactctgccaag

SEQ ID NO: 688731 - DNA, 704 bp, Homo sapiens
cgggatcggcacacttgctgagcatttgatgcttctggaagctgataatcatgtggtaacttgcctgcagccatcatccgtgtgacccaattttagcctcatctggcatagattatgacatctaagatctggtcaccattagaagagtcaaggatttttaaccgtatacttgctgatgaagttataactcgaaacgaactcatgcctggaagaaactagatcacaccattacagttccagcctctttcatgttgaggatgttggcttcacttaatcatatccgagctgaccggttggagggtgacagatcagaaggctctggtcaagagaatgaaaatgaggatgaggaataataaactcttttttggcaagcacttacaatgttcttgaaatttgtataagacatttattatatttgttttcgtttacagagctgctagtgcaatttataacggttatggtgtctttggagtttttccctttttttgggataacgctaacagtgtggttgtggatatgattgatgtgtcatgaattctgggagatttgtagtaaaacaaaaacgtagtcagaatgttgtataaaacttgtttgtccgtgtatgaggagtgatagaataatgctataagtgcaatattcttccctaaccttcaaatgtgggaggcttggatcaatgttgaagaataattttcatcatagtgaaa

SEQ ID NO: 688732 - DNA, 418 bp, Homo sapiens
tccataattccatctacccaaatcacggaataggaatgataaaagttataacaaaaatttgataagggtgaaattggaaagattcctaggatatatgtgatgcactgggttataaaataaaattccattaaaaagcctaggattgtctcccactgacagtacagcaagcagaagccaaccagaagaagaaacttgccttattaattcatagctctggtaaaattcccctgcgaggcaaccaatgccccatcccatgtctgtgcacggttattctacctctgcaatttgggactcaaatctctggtcatctctgtaatttcaattcctagaaagagctcctaaactgatcattgtgttcctagtaattagaagagtaactgtgacacagaaagggttaacaaataagaattataaatga

SEQ ID NO: 688733 - DNA, 855 bp, Homo sapiens
  misc_feature (855)..(855): n is a, c, g, or t
agctgatgtcatcactatgactactaagcagagcgtaacctcaagagaatctttttcgaccccgccgtaggtggagaccccattctataccaatgacctattctgatgggcggtcgccctgagcttgatatctaatcctaccgggctccgagaataatcctcccatatggtacactgtaacgtgactgccgggaaagaaaatgacgccagtgtgtgattccatagggtatggacgtgagctatgatatcagtggggctctcctagggtaaatcgtgtgagcacaccatatatttacagtaggaatagacgtagacacacgagcatatttgcacctccggtaccataatcatcgctatccccgaccgggtcaaagtatttagcgtgactcgccagactccacgtgaagcgaatatgaaatgatctgctgcagtgctctgagccctaggattcatctgttcttttcaccgtaggttggcctgagtggcatggtattagcagaactcatcactagacatcgtactacaggacacgtactacgtggtagcgtccaggttccacttatgtcctatcgaataggagcttgtatttgggcaatcatagggagggttcattcacttgatttgcccctattctcagggctacacccctagacgaaactagccaaaatccatttcagtatcaatatccattgggtaatctaattttcttcccacaaacactttctgggctattcgggattgcccgaggtactccgactaacccgttggttacccaattgaaatctaatatttggggcatccaactctaacacgagaataaaatcggttgggagccgtgacagaagccatttgacn

SEQ ID NO: 688734 - DNA, 997 bp, Homo sapiens
  misc_feature (997)..(997): n is a, c, g, or t
ggctggagctggacttcttcgccttctcctcggctgtggatccctggatgagggggtctgcgcccggtcacctatgacgacggccggtgcaatgcccagaatgggcagacactacacgtgtgtgaactagacgatctgctatgagctgcaccgcgaccccgcgaggtaatgctcataattggcatggtcacgagagtattgctgtttcccctcggatcggctgctgttcagaaccttcatggtgccctatcgtgcctgggacatgctttaatgcaagtacgatgatccgaccaaggtagtgcctccacgaggattcgtgtctcgtgactgcattgtcgcagcgcctacggagcgggaagcaacgggagctgtcactaccctgcgctgaagagcaagtcgtcggtggtcgcaagcctgatcgcctacgggcacagggaccaccgagacttcttgatttgcgcgcgtggaatcgtctatacgcagtcgtactcccctagtcccgggagggaagtagctgagggtcccaggtctaacgatcccgagatgggttatcccggcctgaagagccaggctctggcaacccaaacccagattcaggacattgaagtgcttcccaggcattggcaggaagggcgcgcttacggcaattgctcagaggccattgcaccgagggtgaccccaagctcgtgatgaagggtcgcgtgcgaaataaccagagggttcagaaatcatttaacctagctaacccgatagtagttggggggggggaggaaaccggagtgacgcccctagttgcgcaaggcgggcacgtacacgcggggtgcactttgcgggggaaggcatctgtgtgaacgcttccccgagctaccccgcgcgccttgcctttctagaccctcgattggcctctttggtccccggtttgccggacctccctgtggggactgcggtggcacgccgcggggtggggggccctttggctcgggggccagtgggggan

SEQ ID NO: 688735 - DNA, 393 bp, Homo sapiens
gtattttgtaaaaactaaaagaggtgatgtaggaaaatcacccaagaagaactagataatcaaaatagacctacacagcaagtgctatgtgcaaattaacactaatttataattattgggagatgccagggaaggcggtgaatgccaggagccccttcctacaggcgtgctccatcagcgctctggacttgatacatttacggtagccaggtaggtcgctggcacccatattgacccccactgtgggagaagtccctgaggtatggggacccgcaggggagggggaggctcagaggctgagcccacacgtaccttctccccgggtgtgacagagatgcgccacacgcagtgcatgtgagcagagtagccattggggtattcagcggaggagaa

SEQ ID NO: 688736 - DNA, 932 bp, Homo sapiens
tttggtttgtgtgctgtggttgcgggcggggtgttgctgtgggttggtggtggagcgcgtggcgggggttgcgttcgcggtgctgcccgtatgcggtcgtacgatccgttcgcgaggggtcggtgggcccgcctttcgctgtgttccgctgattgggtcgacatgcggttgtgtgaccaggtggctccctggagacttgtgcggcctcatgcctgtgctcccgggctgggctgctggggaatggcggccggtggtcggcctccgtgatgcgcccagtgcggcgacgctctccatgccgaccgccgtccctgtcccttgggggagcccctccgttttcccctgggccgggtgcaccaggcctcttgcctgctggggattactcgatctgaaccgtccttcctggtagttcgcgtcctcgcggggccttccctttgaggagctggaggggtggggagctagaggccccctatgcccgtgctcaaggttactgggagtttgggctgccctgtgttgcctgcacccttccctcttccctctccctctctctgggacccctgggtacacagagatgggatgctccgacagcgtctcccattatgaactaatcttgaccctgtgctgtcagataccccgtttctggagtcacatcacgtgaggagggatgtgggtaagagagcagagggcacagggtgctgtggacactgtgggtggagaagggagggtggcccgcactagtaaaggaggaatagtgcttgctggccaaccaggaaaaggaggaggtgtcttggggtgagggattagggagagagaacaggcagataattggacaagggttggtcaaggccacctctgcctttagtcccccaggcctctttctgcctgaaagttacacccatttaacaggattttaccagtaatgaaaaagaaaaaaa

SEQ ID NO: 688737 - DNA, 254 bp, Homo sapiens
  misc_feature (33)..(33): n is a, c, g, or t
gcgatgagccggtccgctgtgcggacatcctcnagttagaaaaagtttagatcacataagataaaatttctgctgggtaaaagtttcatagtcaaacaataaattattaagtactttcaaagaggcttttttcatcagaagtgattctatatactcattgattttgcaagaactcaaattaagggactactgaccacaagatacaacagctagttacaagtaaccactgtgagggttgaggatggtccgcacag

SEQ ID NO: 688738 - DNA, 648 bp, Homo sapiens
  misc_feature (413)..(413): n is a, c, g, or t
gcacgaggacagttgagcaaggaggagagaggtggactgtttgtgctgcagctgaccggttgggagcagctgagaaaagaatgggcagcgcatggatgagctctttgtgctgatccggatggcttctgctcccaactggctagctccctggccagctgctgtgctgggatcattgagttccgggcggccggctggaagacaacgccagctgcccacaagtattactacagcgaagtctccgactaggcctccagatcagggctttctcaccagcactggcctttcttctacccacctctaaagctggcagtggagtctctgcctcacccaaagacttttcccttccagactttgagtgtcttcccttctagactttcccatctcctggggagatgatttccacttatgcccgnggtcctgccctgagccccttttcccaccacaacccaccacgggcaggcagagaagggcaacttccaagagccactgccctgtgaaccattagtgcaactactaccttgggggcctcagttacacatctggaaaagggtaagcataagccacggtgggtatatttggatgcaaaggggtgggggcggcgcccaaggccccacgctttttatacaattttgataaggcccccttgcc

SEQ ID NO: 688739 - DNA, 933 bp, Homo sapiens
ggggaagatggcggtggctggggcggtgtcggggtagccgctggtgcactggtgcacccagcagttgcggaagactttcggcctggatgtctagcgaggagtatcattgcatgtatcgttttgttcaatggatagtgctgcaagagatacgagaagtatgttactgagtctcctccagggaaaatgagagggaaagaaaggtcaatgctatagaagaacttataacctagatatggtaaggagaatgatcaggatgttgatttcggatcctttgcagcagtgctatcacacatagatagatgaaattttagatcgggtcacgaaatcatggtgactatctaatatgctggggtagggaatgaataggtgacgtagaacagacaggaagttccgtgcatttactgaaactgatacgactgctgaggttaacatcgacctttagggatctcgggccgaaggcccagaggaggaacagttgcaagctgccggtacgagaaggagagaccaaaggtgttgtccactgttatacaacaagtagaggggaccggaacaggacttgcagtaccgtgcatccctgggtacgtactcacgccattgtgtcaatatgcctgggcgcccagcaagctactaagctcaatctaatcaactggtcttggatctgtggggcgccattgtcatgtggaaccaagaatggccttccagagcccggtgtgactttatgtctggtgcgctactcgtgggtgtgtacctcgatgaaggaacgaagatagttttacaagtggtgagatcaaaacagggagtcgcagaaactggcttactggaacacttcatgttcaggaagtggggagcattcgtggtaaaagggtggacattgtctagcaaagggaaccttccttgcatcattaagaattgcgaattaagtttgggtctggg

SEQ ID NO: 688740 - DNA, 232 bp, Homo sapiens
aatttcccttttttggtgttttggggccacccccccttggcaaaattttggcaacaggaaatcatggcccttttaatttttccttttattgggacaaggcccctgcatttccagggggcccttagcccctgggttttttttttttccccggagcttagggaacaaaaaactttccccctttggggtgatggtgccaggcctttttccctccaattaagccctttggtgtcca

SEQ ID NO: 688741 - DNA, 393 bp, Homo sapiens
  misc_feature (184)..(184): n is a, c, g, or t
cttactagaacttgaataatgcacctttggaatagggcttttgtcatttctcttccagaaggagagtcatgctatgtggtgccaagaggaaatttgatggctcagctcactaataaatcttgtggacaaacttaatttcttcattccatagataaagaactgtgaatcctattgaagggtcttnttatgttctttctggcttcccaagtcagtaaggtacctcaaaccagggagataaaagtgcctgctttgagcattgctacccaggtgctgaaggtgaacatgggtgggaatctagggattttgggaagcagacaatgggcttttagcttaagcgcattcttcaagcttcagtggacatctaggtctcaggataggactttgaggcccttg

SEQ ID NO: 688742 - DNA, 333 bp, Homo sapiens
cgaaagctcattatcctcacctaatttggcatttttatgcttattttacaaagctgtgcaagcttgggaggctaggggtgtactatggagtataaagctctaaacagaaagctcttctatcagattttggccgctttcagatagagaaagtgctctgaaatgctgacggtaccttggaggagaaaatattagatgtcaccattttaggttaaattattggacacactaatttcaccagaatgtccttatagaaataggtattggttaagacaagatgagagtgtggtatgcatagaacgggtgcttgaaagtgaatgccctaactaaatcctt

SEQ ID NO: 688743 - DNA, 199 bp, Homo sapiens
caaaataaccttggactgcagtgtaacaatgcaattagtacaactaaccaagctacactgaaacaagtccccctaggcaggggtgtccactatttcatcttccctggcaccgacattgtcatgacattcttcttggcgccaccatgttaaatgacactaatcactacaccatagtctcgtatgtagcttacacaaagaa

SEQ ID NO: 688744 - DNA, 113 bp, Homo sapiens
  misc_feature (36)..(36): n is a, c, g, or t
tgaccttgaggactccctccgactagcccgacaggntgagcaggaggactagagctacaatctggaccagtgagaaacgcaggtcgcacagcttgctgtcgggctagtcgggg

SEQ ID NO: 688745 - DNA, 309 bp, Homo sapiens
agaggatcctcattggatagcggataggggctggaagctgtaggataagtgctgcagagtgaactgtggcctttgaaggatttgcacaggagacacgggaacccctgtcaggacactaagcaggcaggtaccaggacagagccatcctgggagaggcatgggtgctgctagccacaggagagcaggggctgtgtgctgagtgcagggagtagggagcaggtctgaggggtcaccaatgcagggtgacaggctgaggaggcacagtggggtggagggatctgggactcggctttggtccttggctctgag

SEQ ID NO: 688746 - DNA, 247 bp, Homo sapiens
acataaaaatcaccaaattacaaattacccttttgtgaatccttggtagtactgaacaatatctatgaggctttttctttcatgggaagagggagggaaaggagcaaggtgacatcctactaaaaatttgaattttgatcccaaaatgtaaatacaatattcatatgatacttttttgtggtaaatacccgagatgaatattataattagataagttatatgaaaagaaaaattccatgtctaaata

SEQ ID NO: 688747 - DNA, 367 bp, Homo sapiens
  misc_feature (19)..(19): n is a, c, g, or t
actagtccacggttggctngtgggatatgactgtacgctggaatgtgtctcaaaagggtgtatgttcaccaacatttgtaaattatatgacatgtttctactgatttacattataatgtaatagattttttacttttaggttaaaggcatgttaaactatcaatcacttttgatgccttaattgtattttttttcctattactgggtttttttcaggggcagggtctcgctctgtcatctacgctggagtgcagaggtgccatcttgtctcactgtaacctctgcctcccaggctcaagcaatcctcccgcctcagcctcccaaataggtgggactagccaaccgtggactagtgggtaccgagctc

SEQ ID NO: 688748 - DNA, 373 bp, Homo sapiens
ccgtcgtgctcaggtctacaaataggaaactatgccatgatacctgagccttgacatcatcacgttctccagtttgtgtttggtattggaagttaaaacatgattcccttttcaagtttggttcttgagagactcacatggtgttgctcaagtacgttttgtgacaggcaatagcatcttaagaattcttaagtccaagaagggacttgctcctgatctccctgaagatctctaccatttaattaagaagtagttattgttcaaaagcatcttgagatgaacagaaaggataaggatggtaaattctgtctgattctgatagagaggtagagtcaccctttggctcaatattgtaagacctgagcaagccagg

SEQ ID NO: 688749 - DNA, 1240 bp, Homo sapiens
  misc_feature (575)..(575): n is a, c, g, or t
  misc_feature (600)..(600): n is a, c, g, or t
  misc_feature (621)..(623): n is a, c, g, or t
  misc_feature (625)..(625): n is a, c, g, or t
  misc_feature (634)..(634): n is a, c, g, or t
  misc_feature (770)..(770): n is a, c, g, or t
  misc_feature (774)..(774): n is a, c, g, or t
  misc_feature (1133)..(1133): n is a, c, g, or t
tggtgattagtgtgtgtctgctactaataccatggctgcctgtctagccatatcgctgaaggactattgtgctgggtgggggcccgaacttctgggatgggacaaaccattacaccatatagggttctgttcccgcattgcattgtacgctggtggttgtgtatattggtctaccgtgtggcacgtacgaaggcgcattcatggggtgggccgctgtgtacgaacgtgctaatgtccagacacttacacggttgaaccccgcagggtccgcggatcccccaaacattgcgcgtgtatggtcctgcgtattcctagggtgaatctgtggacatcgtatcgctagcatgccaacgccgtgtaaccccagggaacgcggagaccaccgagggctgacctagcggcgccgctgtgtaactgagctgccggtttagcagtgggaagaggggaacagagagggccgctccctctctgccctggactttccacaagagcctgcctgggactggccagcgccactcgcttgtcacactgttccatcctgtagcagtctgacacacagctaaggagcctcatancctgcgggggctgcagagccacacnccaagtgcctgtgcccagagnnntncagtcagcngctcactcctccagggcacttttaggaaagggtttttagctagtgtttttcctcgcttttaatgacctcagccccgcctgcagtggctagaagccagcaggtgcccatgtgctacatgacaagtgcctcagcttcncccncggcccgggtcaggccgtgggagccgctattatctgcgttctctgccaaagactcgtgggggccatcacacctgccctgtgcagcggagccggaccaggctcttgtgtcctcactcaggtttgcttcccctgtgcccactgctgtatgatctgggggccaccaccctgtgccggtggcctctgggctgcctcccgtggtgtgagggcggggctggtgctcatggcacttcctccttgctcccacccctggcagcagggaagggctttgcctgacaacacccagctttatgtaaatattctgcagttgttacttaggaagcctggggagggcaggggtgccccatggctcccaagactcntgtttgtgccgaggtgtattaataaatatctgtggggggaagatgccccgcgcctggagaatgctgtttgtggaagacggaaaataaatgttttttctctattcaca

SEQ ID NO: 688750 - DNA, 377 bp, Homo sapiens
attccacttccttttcaaatccttatttcataactccttaaattgaaggtatattttcaaacttctagtaaaatatctttaacaacccagtctttttcatgggtagtttttcagaatatagaatattaaaataataaatatccagaaaagattagccattttctatcttgaattcttacttcaatgccccataagaaagaaaagaaattgaaaacattacttgaaaataaattgaacatttgatttgatttaatatcattgatttcgatatgaaacacatatattacaccctatatcagtgtatataaaactgattcatggattctgagggaatatagacagattaaccaaaatgatccctgatataagagtgttta

SEQ ID NO: 688751 - DNA, 1114 bp, Homo sapiens
ctgcctgcgcgcacccccggggcttcgtgctccgtgcacggtgtcgctgcccagctttcctgcacctgatgtgcctgcctgtgccagcctgcctgccatggtgtgcctacctctcccatgcccaacactggtgaatgtgctcctgtgtggactggtggtctggctgcccctgctgccatgcctgctgtccctactgtgcttctccgaccatgcaacggcttggctgctgtctccactggagtgatgctcacaacttgtattacctgatgctggacatgtgagacatgccagtgtatttcttgtctactgatgtgacattgtgatgtgtggatgtgacaggtttgcccttgatagcttggtgcacaagatcatccgttcgcttgcataatccatccaaaatgaatcgaagaaatgtgccgtaacgacatgtggaatgtggcaaatgcctaaacaaaggcacatggggcgtatttaaagtcaacatcgcaatttggcaccttatacctattgtgcccttaaagtattggcaacttggcccctgaaaacgaagtgcataagggaacaccacaaccgttatggcaacagagtggaatacaatcggtttccgagaattactccaaacacaaaatcgcaataggcggtttctgggtggccatagaccgagaagttggccaaatttatttggggcccaaaattgtgtgtttagggcctctgtgggagaaggacgagccaatacacaaatatgcgtgttttggtggcacgacagcagtcagtagaaagaattattgggaaatagtcatagagtgaaaaaagtttttgtgggaacagtaatagaagacagataataatggggagaaatgagacgtacagaagaacaaaaggggatatttatagaatatggtcgtaccaccgtctttagtgtgggatgaaacgttttatgggcgggacatgcagaaagtaggcaagaaaacttttgttgtggcagaaacagtttagaagggagattattaggggagaggaagaaagaatccgcagacgagaacaaaagtttttgggggggaaaacacatgactgtgtgcgaacacatgagtgggagggagaccccactttttga

SEQ ID NO: 688752 - DNA, 113 bp, Homo sapiens
cggatcagcgccatggtggccacagaggacacacaggggtcagcagaggacatgtgggtgaagacagagggtcttggtttctctctgacgactggaggttgaggggtaccgag

SEQ ID NO: 688753 - DNA, 246 bp, Homo sapiens
  misc_feature (2)..(2): n is a, c, g, or t
  misc_feature (27)..(27): n is a, c, g, or t
  misc_feature (60)..(60): n is a, c, g, or t
  misc_feature (92)..(92): n is a, c, g, or t
  misc_feature (190)..(190): n is a, c, g, or t
  misc_feature (219)..(219): n is a, c, g, or t
  misc_feature (225)..(225): n is a, c, g, or t
gntcagaatcctaaattcagggcgcanagacctttgacgaaaatcaggcgcaaaattttnccccggccacgctcgacgaagcgcaggaagangaggggcaagtcgaagcggtaatggacgcagcgttacgtccgaaacgcagcctgtggcgcaaaatggtgatgggagggctggctctgtttggcgcaantttgtcgggcagggtgtacagtgggacantgaatncctgggcaaacccaggacttg

SEQ ID NO: 688754 - DNA, 192 bp, Homo sapiens
tgggagctcattactacatgagctgggctgatcgcctcacactttcatgggttctgctgcacacatgtgccactgtgcgcttgcaagctcatgggcccggaccctctaactgcctgtggtgtgaccagccggagcacgtcttggagctgttcttgtggggagtgcagagggccactgcactggccgaggctg

SEQ ID NO: 688755 - DNA, 510 bp, Homo sapiens
ctagaggatcccctccagtaatgtgtgccaggctggagtacagtggtgtgatctgggctcactgcaacctctgcctcctgggttcaaacgattctcctgactcagcttcccgagtaatagggattacaggtgttcaccaccacacccagctaatttttgtatttttagtagagacagggtttcaccatgttggccaggttagttaatgttactctctggttgggggggcagtgatatgtttgggcttttttcccacccagatctcttcttgaattcccatgtgttgtggaagggactcggtgggaggcaattgaatcatgggggcaagtctttcccatgctgttcctgtgaagtgaataagtctcacgagatctgatggttttaaaaagaggggttcccctgcacaagttctctctcttggcctgctgccatacatgtaagacatgacttgctcctccttgccttccaccgtgatggtgaggcttccccagccatgtggaactgtaagtc

SEQ ID NO: 688756 - DNA, 742 bp, Homo sapiens
gaggaggtgggtcggaggacacggccctttgtggcccggtttggatttgacgtggtgacgtgctgtggatacctcccccaggtgaatgactggcgtgaggactggtgtcgtgttctatgcccggcagcgcattctgcccccgatggacatggtgtagaaggagtctggggacagtggaggccctccagcttatggtctgctctgcagttaaagatccctgacctgttccgtgacctggagatcatcccagtcgcttacgtccactggggacctctggggtggaaactgtagcagaggattcctctgggccggtgatattatgacgccagtcttctttctagctgtgccactctggaatatgagctggcaatagctggcatgtttgggggctttaggcagctccttttactccgcctaccactggtaaaatccccaaggacccaggattcgagaagcgccttcagaccgtatcagactctttgcactacttgaaccacctggaatcatttcggatcggggtacagaggatcctccctgaacatcatgaggaatctggttcagtgagcggtgccttactctggaagggaggcctcaggaggtttctccacagtcctcttctgggcaaattcttgtgtcttcacatgccggactagcttaagaccaatgcacgtagctaatttcagagccttgcaacagctgtatatctaaaaggaaggtttggcatccaacgatgacacatgag

SEQ ID NO: 688757 - DNA, 393 bp, Homo sapiens
ctaatgtattaattcccagtcacttattatagtttttaaatttgtccttttcaatattctaattgtctctactctggtaggtagttatgttacattaagatcattacagtggtctcctggcaagtcctgctgctggcagtatctccctaaaataacttttattaggacaatattctgcttaaggtccagaatgcttatgggttaaatcagttgagtgttgtgttcttgatctctcaccaatgagccccaatgttgagcttgctttgtttccctgccccctccattctgacccctgcacctggataaaacttttcttgactccatgccccatagcgtgagatgttctcccctctgctctgctattataatcccaccagccaggcgtcgacgcgg

SEQ ID NO: 688758 - DNA, 471 bp, Homo sapiens
tcgcaatacactgctcaacacccaggagtccttggctagtgaactcacacattataggatatatcacacgcgtggctagtgccttcaggacggtatatcaagtaggtggggtgaccgcctatttccgaggggtgcaggccagagtaatttaccagatcccctccacagccatcgcatggtctgtgtatgagttcttcaaatacctaatcactaaaaggcaagaagagtggagggctggcaagtgaagtagcactgaacgaagccaggggttcagatgacactgctgcatcctggtcacattctctgtctcctggaatgctcccacctcaagtggagttagaaggaaggtagaggggctctcccccaggattttggtgttttgactaacaccagttcctgccaacctctgttgccaccacctttccttccaggccctaagcacgtgcagcaaagcacaccacagcacctttg

SEQ ID NO: 688759 - DNA, 152 bp, Homo sapiens
acgtctaactcattgtataatagcatgggatactaacttttaaaaaattatggtattctcctgcttaaagatatcacagaaaacttatataaaaatcaggccctttttgtacgattttaaaatttgtatctttactagaacatgagaatctt

SEQ ID NO: 688760 - DNA, 414 bp, Homo sapiens
cacggcgggtgtactacattcaggagtcagcaggttgctgtagtgtaaaaaatgacagggtttgttttattaagggtttcattgcattaagagaattagaaagtttcattttattaagagaattataaagtttcagccagagtagtcgctcacgcctataatcccatcacttggggaggccgaggcagacggatcacctgaggtcaggagttcgagaccagcctggccaacatggtgaaaccctgcctctactaaaaatacaaaattagcccggtgtggtggcacatgcctgtaatcccagctactctagaggctgaggcaggagaatctcttgaactccggaggcggaggtggcagtgagccgagatcacgccattgcactccagcctgggcaacagagcaaaactccgtctc

SEQ ID NO: 688761 - DNA, 620 bp, Homo sapiens
tacacctcaggcggcacgaggtagatttttactctcatatcagtgacaaattgctctgtatttatgctttcactctatattaccaaggtatccataccaattatataactggttataccctcatgattataaagatgaccttttttaccctaacatccttaaaatagcctacaaacacatcataagttgctctgctccacaggcagcaacgccacctgaggtgtatactacttggggatccgtgcacgttaacgattactaggactatgcagaaaccagagagtttaagaataccgcatggcctttcctctcggtctggctgtgtatgatcttgttgggtcgcgtccgagacgggcgcgcgtaccctatgttgtgcctgttgcttaggtctattgttggctttgcttgacacattctttcgtcggtccgcgggcctcgctctttcgtggcctgggtgccccctgcgttctctttttttgtttggttctcggttgtgcttagtgcctgggctcttcttattgtaggctctacctgtatacggagttattcttttgcttgctgcgtttggtaaattgtactgaattatgtgcgtagtttttttagcaagagttctctgtgtg

SEQ ID NO: 688762 - DNA, 415 bp, Homo sapiens
tttgggattagtagaaaagtgttgttttattctccaaaaaaataaaataaaaaaaggggagtttttttaaatgtattattacccccccccgcttaaattgtatgagatggatggtaatatataggaggttggtaattacatattgggtgatatataagtaatgtggtatgtaaattgtgtgaaataaaaatttatggggtgttaatttttagtggttttatataagaggagttgtaagttatgttaatgataaagtgtatgtttttaattaagtatgataattttagaaaagatgtgcgtatttattgtagtgtgtgtgaataagattgatgtatttggtagtgtgggtaaaatatggatgtatattagtgagtggtttttattggatggttgtttattggggggtgattggtgt

SEQ ID NO: 688763 - DNA, 174 bp, Homo sapiens
  misc_feature (21)..(21): n is a, c, g, or t
  misc_feature (51)..(51): n is a, c, g, or t
  misc_feature (55)..(55): n is a, c, g, or t
  misc_feature (76)..(76): n is a, c, g, or t
  misc_feature (90)..(90): n is a, c, g, or t
  misc_feature (107)..(108): n is a, c, g, or t
  misc_feature (112)..(112): n is a, c, g, or t
ggtttcgcttctcttctgcangttcctcttctgtggcatcagagtgataancttnttaagtgagagagaagagtgntaccccctctctgnctcctcctcacacggtnntgtnaacaccacggcttcagcaggggagctagtccatgctgaggccttctccagcctttctagcga

SEQ ID NO: 688764 - DNA, 182 bp, Homo sapiens
aacgataaacttgattgggaagggcggggtaggaattaatagaaggagattggggacagctcagatagctccgcggatgtctggaaacaagactctgcctccggtaagccccccttctggccgtaggctcgaccttcctgccatatccattggacagcagcccccgaatcccggcctcccca

SEQ ID NO: 688765 - DNA, 220 bp, Homo sapiens
agtctagcactttgggacgcgaggactggagtgatcaacgttgccccggagctcaacggccagcctgggcgacactggtgagatcctgtctccatttacaacgaactagaacaagacacacaacttgaatagagaagatcactcattactcccactgtcatatatattgctggttttgtacatatgttcattcatgtgttttaaagcagtagtcacagga

SEQ ID NO: 688766 - DNA, 370 bp, Homo sapiens
tgtattaccatctaagaggaaacaagcggatgcatgtacgtgtggttctccccttccacgatctcggcctcatgggtcttgcccgatgggctggatcacctgggactgtcatatcctggatgctaattccagggacttcacaggctgaggtcacaatgactaccaacgttggccactgaaggagcccgacgcctgcgggtgatgctctctttcacccggccctcgcctgtcaccttcacagagaaggggctgccaggcacgtgctggtcggcaaacttgatgttgatgatgtagttgcctggctctgtggggcagtaggtgaccctgcacgtcccgtcctccaggtcctctgtgttgatgtccaccttgc

SEQ ID NO: 688767 - DNA, 624 bp, Homo sapiens
ggccctgaaggtgccactccagtgcccaccagccttgtccctaataaacattaaggtggtatcaaaaaaaaaaaaaaaaaaaaaaaaaaacaaaaacaaaaacaaaaaacaaacacaacaacaaaaaacacaaaacaacacaaaaaaaaaacaaaacaaacacacacacagaagcaacaaacaacaacacagcaaaaacacaacaacacagacgaggggggcgggcgcgcgcgcgccgcccggcgcggcgcgcggaggggcacagaacaaacaaacaacaggggggcgcgcgggcgcgcgccgccgcgacgaccagaagcgaggtacaaacaacgaaggagcggcgaaaagacgcagcgacaaacaaaacaggaagagcgcggggccaacaaaagagaagtaaggggaggagcagacaccacaacaagacaaagaacaagcaggccgggggggggagcgaagagacgatgatcgttaagctagaaaaaccaacccaacagagaaggtggagataagagagaggaaccagacagcgaggcgggatcaaaccacagcaaggagaagcagcaaaagaagcgaacaagaaataaaaaaaaaagccccccagcacgcggagggggggac

SEQ ID NO: 688768 - DNA, 107 bp, Homo sapiens
ctttacgtagtgagcttggcactgctctacgacctcagagatatagaggttaataagacagatcagatgctactttttgatttgtaatttcttcatattaggcacag

SEQ ID NO: 688769 - DNA, 119 bp, Homo sapiens
atgtgacttagaggatccctcagccatcaaaccatagaatggactttagaggccgggcgtggtagctcatgcctgtatcccagcattttgggaggccaaggcgggcagattcacaaggt

SEQ ID NO: 688770 - DNA, 91 bp, Homo sapiens
acggccgtgtattactgtgcgagagattcgggtagtggttcatcctgggggtggttcgacccctggggccagggaaccctggtcaccgtct

SEQ ID NO: 688771 - DNA, 1046 bp, Homo sapiens
tctcgtgagaataggcaaaaggttcgtcgaacagacgcgaaggtctctgtaaacctctttcaacagctcacagataatgtcgcctactcgcgctttcccaccctcctccaagttgtggcccccctgttgccaatcgttggggggactaatcatgtccagcctgttcctatggtaggtcccttcggaatgtgaacaaattaccccctctggtgcccgttttcaacgtggcctgggccccctttgtagcttgggcccaacttaccagccccgatcgggggaggcgggtcccaattgtcgccgcggcttccaaaagccccatgcgcttctaaatcgcccgtggcctaccctgtgtccggttgcagcccagcaacacatccacccgctagcactttgcctacggcggcatggacgacatgcccttcgtaccctagcaagagtggctacccatcctagctttagcgtgctcaagcttgctaagttcctccagcctttgctccatcccccaagtcggaaagtagaccggtcactcttgtgcccgccccactgtgtcgcggatcggcggtccatgagtggtcgacgcaccaacgatgggttgcctcccctactcgacgacgatctctaccgaaggtggacgactttcgataacgtggatactagcggcggactataacgacggcgtgaacacgtatgacgtgctccggcaaattcaggtctgactttgtcagccctgccgtttccagcgagtcagaaggtccttctggaacagtgtgaatgcccgctgtcagaacgatgatccagttttcacgcggaaagcagaatcaccgcacatgagcgagatgatcggggaatacagcacattgtcttgctcaggtgacaagtcacagtacaactggtcttctctctgactcagtctgtggagtcgtggttggagatgaagtggtagcttgataaacccggtacctggtggagcgaggccttgcccagtgggtagaacagctactacacaagcgctttgacccccatgctgcttcttgagagtccggtta

SEQ ID NO: 688772 - DNA, 211 bp, Homo sapiens
atctagaggtcgtttcgtgtgtgtcatgcactacggggcattgcgtcagctcccccaatgatgatgctgcagccccccagagagagctctgaatgtcaccaagtaaccatggcccatgctccaggccccaactccgcccagactctccccgctctggatcctgcactctaacactcgaatctgctgctcatgggaagaacagaattgctcc

SEQ ID NO: 688773 - DNA, 277 bp, Homo sapiens
cacgtgcacttggcacccaccacacacacacacacacacacacacacacacacagacacacagacacatacgcacacacgtgcacacatgtacacacggatacacacacacacacacacacacacacagtgtatatctgagcacgcccctcgctcgtggtcgtctccaactcgttgacaccgttctacagagattatatgtgtgaagagatttatatatagattttttccctgttttgtcccaacacactatatactttacaaacacaaaaaaaaaa

SEQ ID NO: 688774 - DNA, 372 bp, Homo sapiens
  misc_feature (222)..(222): n is a, c, g, or t
atgacgaactgacgagaagtatttgtggaaggacctgaccctggaccatgcctatagctatgctgtgtgagaatgccaaggagcatcatcgccgtgtggctttgacaatcaagcaagactttcatagttctctgcacctaggactacatggcggatgatgctcagggtttctacaaagaatgtggtgaatgattcaaaaagcaatgttaccgttcaaccaangtgaaaaggcattttcaggcttcactagacagcagactgcattagggaagatcagttttcctgccatccaggctgctccctccttcagcaactcattcccacagatcttccgagacaggacggatatccagtgccttatcccatgtgcca

SEQ ID NO: 688775 - DNA, 488 bp, Homo sapiens
caggactctacgcttgtctttactttaatctcttaatccatgtcatcttagtaagctgagacatgtatgtcgcctcagcaccctgtgatgatatgcgttaactgcacaaattgtatgtaaagcatgtgtgtttaaacaatatgaaatctgggcaccttgaaaacaagaacaggataacagtaatgttcaggaaacacgggatgcttgaccatcaggtctgactgcctgagagcctgtggctggaacagagccatatttctcttcttacaaaatgcaaatatgtgagacatattgatgaattctttttctcagcaaggaacagacctgaagaaagagaattgctttccttaaggggagtgtctctgacaatgtgccactctgggaatgtctgtcttatacagttgcagctaagggacgaactaatgcccccggtctcccataagtgctcccagtgcctcatataggacgaggaaatacctgcactagta

SEQ ID NO: 688776 - DNA, 496 bp, Homo sapiens
ccctggagggagagtcggagctcagccccaactgtgccagcagcttgtcctggacgtcatactggctttcagagttgctgacccctcactcactgtggggatcattctctctgagggcatgatgaggcccaggaaaatagtcttggtaatgttaaatatgatcgggtacaaatacaagttttaccacattctacctaatatgttttctgttgtaacacaactcttttctgttcgatgtgtattatggttgtccgaaagctaaatgacgatttaggaaaattttttttaaaaagtaaatcagtttaatgtgggaagtacttaagtggtattataattttacattttcaagtatattgcataaagaatgtttgaaaagtaacggtttttcatggattcttcaattagacaagcctagaataactagagtatgtggctttaacataataaaaaaggacggccgctcgcgatctagaactagtcactagttctagatcgc

SEQ ID NO: 688777 - DNA, 157 bp, Homo sapiens
cgctggctaatgaaaattgatgctcatgcgctgcattcaaagcaggttgatggtctgtcctgaccagtccacagctggatgctctgtacctggcgaaccactggtccaccctgagagccatgtctcatggacatccccatagaaaccctccaggctt

SEQ ID NO: 688778 - DNA, 122 bp, Homo sapiens
tcagattcctacttacccagttactacatgtccctccattggcttctcctattctttgggtgaagctgcttgtgtctacgtgggggtgacacagccatgccctaacttaacttcttattgga

SEQ ID NO: 688779 - DNA, 467 bp, Homo sapiens
cggaaggataatccaaaaaaaggaggatgctgaaaagtgacccaagaagggaccccagtaaataagtctggactcaagtccccaaataaaaaaagattcaaaggcaaactctaagacaagctctgtttttggtcttgtttcataaagtcatatagaaaaaaaatataaagacgtttccaactgtagttcataactgctgtattcatctgtgaaggattgatgacttgaggctctctgaccagggtgtccaataagaagtgcttagtaaagactcatcaggttggtttccaacacacagcccacattcagtctatacccaaaatagcaaagatggtgctacaccaactgctagtgaagatgcttcaaatgggcagtaagatagtaaatgtacacacccctgcaggtctgcttcacttttattttctttccaagtacagtttcaagaacagtttattaagtaaagcaaa

SEQ ID NO: 688780 - DNA, 839 bp, Homo sapiens
  misc_feature (100)..(100): n is a, c, g, or t
  misc_feature (116)..(116): n is a, c, g, or t
  misc_feature (120)..(120): n is a, c, g, or t
  misc_feature (124)..(124): n is a, c, g, or t
  misc_feature (132)..(132): n is a, c, g, or t
  misc_feature (137)..(138): n is a, c, g, or t
  misc_feature (152)..(152): n is a, c, g, or t
  misc_feature (164)..(164): n is a, c, g, or t
  misc_feature (169)..(169): n is a, c, g, or t
  misc_feature (173)..(173): n is a, c, g, or t
  misc_feature (580)..(580): n is a, c, g, or t
gtaaatcatcctttaggtcgaggagtaacaatacaaatggatttgggagtgactcaagaagtgaagaatgcacaagaatggatcacaagatggaatttancaaaccctagcctgcntgtnaaantttttttnttttnnagaatatctgtaanggtactgacttngctgncttngaagatagcctcttttttttttttttcttttttttgtggcagaaaacggtgtgttttaaaagtcttctcccgcggggggtgtgtaaacagtgttcaatgcggcgagaaataccggggcgtaccagcaaattttcttctactctttttacagaagaatttgggcgtcataccgggcgtgtgtagcaacaccctcatactttcaatataatctaccctccaacatcattaagtctgtgggcactccgtcgagaaaatataggtgtgtgtcacccacttgtggtgtgaccgcacccctttcttgggtctataaacaattgcgagcgaccatgtgagaaaagatgtggtcgctccaccaaattagaggtctgtccccattttaataaaagactatagtgttgctatatcanaaaaattacaggcgaggcggggggggcgagcacacttaatctactcaacagtgtgtgttctgtgtgcggacgcacaaaacaaaacatacttttttctgtggagcgagactatacttgttggatgtcgtgcggggaacaggggagggaacaaatcaacctgacgtgcgaagcaaaagaggggggcggtgcttactgatggtggagacccccccttgctgttctggcggccaaacaggttcccttccccaacgaggtgtcg

SEQ ID NO: 688781 - DNA, 357 bp, Homo sapiens
ctacaggatctcagttactggcatttgtgggacggagtctaaagctaactgaggctaactgggtgatcaagaacatggagatggcatagaggaaagaaagcactaagaggaaattttttaggaaagaagaaaataaattcagcttttaagtgtggatgatgagtagtttgggatatacccaggggtgttattaaaatattgaatgaggtataaaatggcatcaaccaatcaacacagatgccaatgttagcttatataggcacttgtcagttcaggatatatgatgtgggctggagggagctggcagaacaaagtactggaaggtcacagtgctctttagcctgggccagagtcaat

SEQ ID NO: 688782 - DNA, 244 bp, Homo sapiens
actcatccactctcggctcaggctctgtgcgagtctcctcacttcaaggtctggatatgactctacttctagcggagaatctgataaataggtgtcagacttgctgttgaccctcttctcctcttcctttatcttccttttcgtggtggtctctgaggcgtccaaggagacccttcatttccgtgtattcctgtcgtagctgctgtctgttacagattgcagtcatccttcccatggtgctaga

SEQ ID NO: 688783 - DNA, 342 bp, Homo sapiens
ttggtcgtctctgaggttcccccgggttcagctactcatcttcactcagcctcccagtcgcagggattacaggtgtgcactacataccaagctaccttctgtatttttagtagagacggggtttcaccactgttggccaggctggtcttttacttctgacctcaagtgatccgcctgcctcggaatcccatggtgctgagattacaggcgtgagcaattgtgcccagccgagttatctatatttgaattgtgtgatatcccgtcaatagtaccaaagaaaacacacatttcacatatagataacttggcacggcgcggtggctcacacctgtcatcatagca

SEQ ID NO: 688784 - DNA, 569 bp, Homo sapiens
tggaggaaaacgcggtcgtaaggggctgaggatttttgggctccgcacgctctcctgtgcctcctgtgactctcaccgcttgtttcgcttcttcgccgaggacccaagttcggctcaggaacgcccgcgcgcagaagccagtggttttaaaggataccggaaaaacccccgtgtggacccggaggtgtggcaatttcaccgaatttcgaattcacccttaacaagtccgacaaggttaaaatctcctttggaaaagggtgttgtgtgcgtgacttgaataagaggcccaaaagaaaagagattctctcaaggtgtgaagaggcaccagttctcgattgcctataccagagaactttgtgaaatctcacttacagagaaaaaacctcctttgggggtgaagggttcctaaacacggtgggcactccgttccccaagatgtgagaaattttcaacaacgcagactcattgtgcttttgtgcaacagccccttcttgacaaattgtgtgaacgcaagattttactttcccttcagtttttttgacccagggattttgagggtgaattccccc

SEQ ID NO: 688785 - DNA, 259 bp, Homo sapiens
  misc_feature (122)..(122): n is a, c, g, or t
gaatagattaatgccactatgaaaagggttgctaaagtgtattcactctcttctgcttgcttgccatgtgaggacacagagttcacccctctcttgccttccaccttctgccatgtgaagancagtaagaaggccacaccaggtaccagcatattgatcttggactttccagcctccagaactgtaaaaggatacatttctgttctttacaaattgctgggtttcaggtattctgttagagcagcagaaaacgaactaa

SEQ ID NO: 688786 - DNA, 253 bp, Homo sapiens
taggagtaagtccaatggagggtgtgaagacagacaatgaccaccatcaacctgaaggtggccgacgcagtgactggctccgtggtgcagattcaatgatcaagaggcacacgccgctagagcaagctgatgaagtgcctacagcgagaggcagcggcttgtcaaatgagtgcagatcaaattcagtgttcgactgtggcagcaatcaatgaaactgacactccagcacagctggagatggaggacgaggaca

SEQ ID NO: 688787 - DNA, 94 bp, Homo sapiens
  misc_feature (21)..(21): n is a, c, g, or t
  misc_feature (86)..(86): n is a, c, g, or t
  misc_feature (89)..(89): n is a, c, g, or t
cattatgtcattttaacttanaattcaagtagttttaagactcttgtaactcaaaaatgtttctttaatacacattttcaaactanagncaaat

SEQ ID NO: 688788 - DNA, 470 bp, Homo sapiens
agcagagacctgagaggcaccaggcccagccgtggcaccacacacctcccagctctgcagacgagatgcagcgactatgtgtgtatgtgctgatctttgcactggctctggccgccttctctgaagcttcttggaagccccgctcccagcagccagatgcacccttaggtacaggggccaacagggacctggagctaccctggctggagcagcagggcccagcctctcatcatcgaaggcagctgggaccccagggtcccccacacctcgtggcagacccgtccaagaagcagggaccatggctggaggaagaagaagaagcctatggatggatggacttcggccgccgcagtgctgaggatgagaactaacaatcctagaaccaagcttcagagcctagccacctcccaccccacttcagccctgtcccctgaaaaactgatcaaaaataaactagtttccagtggatc

SEQ ID NO: 688789 - DNA, 593 bp, Homo sapiens
gggacaggcaagaaaacatgccatgttggtaaagacaggaggtgtaaaacacctaattggggctattaataagatggatgatccaacagtaaattggagcaatgagaaatatgaagaatgtaaggggaaactagtggcatttttgaaaaaagttggctttaatcccaaaaaggacattcactttatgccctggtcaagacttactggagcaaatctcaaagagcagtcggatttctggccttggtacattggattaccggttattccatatctggataatttgccgaaccttaatagatcagttgatggaccaatcaggctgccaattggggattagtacaaggatatgggcactgtggtccttggaaagctggaatcaggatctatttgaaaggccagcagcttgtgatgatgccaaacaagcacaccgtgaaagttcttggaatactttccgatgatgtagagactgatacccggaccccaggtgaaaaacccctttgtgaatctaataatcttttgcaattctggacgcacatttgatgccccgatagtgattatagagcacaaatccataatctggccaggctataatg

SEQ ID NO: 688790 - DNA, 139 bp, Homo sapiens
ctgatatgtgtgtgcacgcgaaacagtcctgctgtcgtagctggccaccgctgataatcgtcccaggcgcggttgtaggccgactgcccggcattggtcaggcagaagccatatccctggccaggttgcaggccctcga

SEQ ID NO: 688791 - DNA, 835 bp, Homo sapiens
  misc_feature (530)..(530): n is a, c, g, or t
ggctgcgagggcaacgccaagcaatttctacacctgggaggctggctgatgatgcgttgcgggggagagtatgagaatagaagtgctcgcatgagttagcgggggttggcagggtgagtagtggtacgaccgatgtgtgaggggtccatagataaagtgtgtcgttggaagtcgtaagttgctaatgacgatgtgtaagtaattcttttccggttgggtggtcatgggagaacggattcgaccaacaggtttccaggatgaaggctacttgtatggtgcttctgtcgctcacaagagaagcatgcgcatccatcgttgctatcagtccaatgaggatgagggactgagcgctcgccatggtgactcgctcttatgtgattccaagatactgaccctgtgatgctttcacctataactggtctgtggaggggagatgacaataccgtttgtatacccgggaggagttgcaaaacgtgcaatgtggcaaacagctttgagaacaagaaaagagaagatgccaaagcttcgcntttgccacgtgagaatccggaaaattcggaagaagcgaattttaaacattcttaatatgtcagtctgttagtctgtatggcttattgcctttatggtgtatctgaagaataatatgacaggatgaggaaaacaaatcgtggtgatttatgcaccagttttgattaatacaagtcacgttttcaaaaatttggattacatatataactaggtggtattcgagatgtgagtctaccatctttaattatggttcactgtgtgtgagactgaattgctgcagtggtaagatattaaagcatttgatcac

SEQ ID NO: 688792 - DNA, 368 bp, Homo sapiens
ttatggggacagggcccccccccccccttttttttttttcccttaattggacaagggggggcccggccgggggttttttggggttggggcccattttaatttttttggccccccccccaaaaaaggggggggcgggtttttttttcccctttcccgcccaaaaaaaaaaaaccccgggggttccttttccccccccgcccggtggggaggggttgccttttttaaaggcccccccccccctggggggggccccttcccccccggggggggggccggggtttggcctttccccccctttccccccctgggcccccaaccgggccctttgtttgggttttttttaaaaaaaaattggggggggggggcca

SEQ ID NO: 688793 - DNA, 372 bp, Homo sapiens
cagcaggcttgattagtcttgaaaagataaacaaaatgactacccttagctagactaggagaaaaagactcaaatcagaaatggaataggagacattacaactgttatcacagaaatacaaaggatcacaagaaactactataaacaattatacgccaacaaataggatagtctagaagaaatggatgagttcctagacacatacaacctaccaagactaaatcatgaagaaatagagaatctgaacagaccaataatgaggaaggagattgaatcaataataaaagtctcccaccaaagtccaagaccccatggcttcactgctgaattctaccaaacatttaaagaaccagtaccaatccttcttaagct

SEQ ID NO: 688794 - DNA, 731 bp, Homo sapiens
gagtatggatagtgtgcacgttctggactggcagatgccatgtcgtgaagcagcaactgtgttgtagagttcctggactcgcatcctagccacacaatctcagtcacacactagacgagatgcgcctatgcgtcctgctctctccaggatgtctacaaaattggtggtattggtactgttcctgttgggcgagtggagatctggtgttctcaaacccggtatggtggtcacctttgctgccagtcaacgttacaagcggaagtcataatctgatcgtaagatgcaccatgtacgctttgagtgaagctcttccttggggaccatgtgggcttcaatggtcaagaatgtgtctgtcacggatgttcgtcgtggccacgttgctggtgacagcgaatgatgatccatcgattggtagagctaggactgggctttctatcgtggtcgtcatggtgattgatccttgaaccatccaggtccaccagtaatgctgccagtgacttatgaccactgtatgtggatttgccacaacgggtcacattgtatgcaagttttgctgatctgtggacatgattgatcgccgattctggtaggtggctggaagatgggcctaaattccttgaagatctggtgatgctgccattgttgatatggttcctggcagcccatgtgtgttgagagcttctccgattatccagctatggggtcgctttgctgtcgtgctatgagacgca

SEQ ID NO: 688795 - DNA, 858 bp, Homo sapiens
cggctcggaccgagcagggctttccttgccagtggattgtgtagagtatacagccagtctcttgtcttctgttcgacatggcatcttctgatattcaggtgaaagagctggagaagcgcgcttcaggccaggcttttgagctgattctcagccctcggtcaaaagaatctgtccccgatttccccctttcccccccaaagaagaaggacctttccctggaggaaatccagaagaaattagaagctgcagaagaaagacgcaagtctcatgaggcggaagtcttgaagcagctcgcggagaagcgggagcatgagaaggaggtgctccagaaagccatcgaggagaacaacaacttcagcaagatggcggaggagaagctgacccacaaaatggaggctaacaaagagaaccgggaggcgcagatggcggcaagctggagcgcttgcgagagaaggacaagcacgtggaagaggtgcggaagaacaaagaatccaaagaccccgcggatgagactgaggctgactaagttgtcccgagaactgactttctccccgacccgtcctaaatatccaaagactgtactggccagtgtcctttactttccctcctgacagatagtctagaagccgatgtaggaccgtataggtagatccagaccgtgagatgttttagggggctcaaggggagaaactgaaagtgttttactctttttaaagtgtggtcttctaatgtagctatttctcgttgctctttccactcggccatcgggtgcgggtaaggtaatccgttgacgcggaaagtttggacatttgggcgttctcaccctaatgtgtttttcccttgggccattgccattcc

SEQ ID NO: 688796 - DNA, 284 bp, Homo sapiens
tgagccatatgtctggtatattgatcaccataaagcgggtctgctagaatgacgctgctgagagaatcagttcgtgttctgcacaggttcaatgtgaaatgcgttgactgcgaaatgtgcgagttccttttgtacatttacaaaagctttatttactctgttaacttttacctcattcataatgtttatcttcttaagattagtggtaactggttttgctttgtttttagccttaaagtttttttggctggctatgcgaaatacattcctggacttcggccctc

SEQ ID NO: 688797 - DNA, 458 bp, Homo sapiens
tgctgtagagttctgtgtatagcttgtagaaatgtatagcatctgtcaattaaggaaacaaaaatcactactatgttgccccacttatagagccctgtgtgccagcctgtgtgcctgtgattgcaatgtgagagcgagtgtaatatggaaaacctaccagaggggtgtggttagtgccctgaagcgcgtgtgtaaaggcactggggaggcgtgtcttgcaaaagcaactgcagaaattccttatgatgattgtgtgcaagttagttaacatgacccttcatttgtaaaattatataaaatttcttttcataatatgctttccgcagtcctaactatgctgcgtttaataatagctttttcccttctgttctgttcatgtagcacagataagcattgcacttggaaccatgctttacctcatttcaagaaaatatgcttaacagagaggaaaaacatgt

SEQ ID NO: 688798 - DNA, 1003 bp, Homo sapiens
gaagcctcagatgtaggagtctgccgatcatgccctgttgtgcagttcgagccagcacctgtttctggacctgcctaagctggaggaagcgactggagagagtggtgggcggaggacattgcctggcagtgacgtggagcacccatatgcccagttttatcacccgtgcttggcgttcgggatggcctcaatgctcaacgctgactagtaactccgagaacgctcagacatggggatacccctgtacccttagaaggttttgaagacaaggtattcgtatgtctggtttgatgccactattggctatctgtccatcacagtcaactacacagaccagtgggagagatggtggaacgaaccaaatgtagtggatctgtttcagttcatggtcactctataatgtgccttaccagaggttagtcttttcttgctcaatccctaggagctgaggataacaataaacttggtgatgcataatttcaattgtctatcggatgtagctgatactatgaggatgaggaaattcatctaacgagaggggtgtgggagtgttgggggacatgggcaggacatcggggatccctgttgaaatctggagcgagctatctgatagtacttcgggctgaggggcggagattgggtggtctccgaggaggggatctaggtgttgaagaatagttgctgtgcctggtatagtgatcgtggggaaggttcattgaagaagctgggaatgttgtgtgtcctacgttcttggggggctatgtgcctgagatggtggtcaccctgattgaattagggcctggtggcccattgttaaccctggaagtccaggtttcacacgtacttgacaaggtcgggatccggaatcgtggacggattctaccaatttcctgggaccacaatttcgtggatagagccggaacgataaagagggggtgaagacagggagaaatggttggagaaacgagccttagaaacggggaggaaacgagcacccacatag

SEQ ID NO: 688799 - DNA, 365 bp, Homo sapiens
tggccaacatggtgaaaccctgtctctactaaaaatacaaaaaattggccgggcgtgatggtgggcgcctgtaatcccagccactccagaggctgaggcaggagaatcgcttgaacctgcgaggcagagattgcagtgagccaagatcaagccattgtactccagcctggacaacaagagcgaaactctgtctaaaaaaaaaaaaaaaaacacgcacacacgcaacacaatgttttcacgcctgtaaacctagcacattgggaagccaaggtgggaggattgcttgaggccaggagttcaaggctgcagtgagctatgattgcacactgtactctagcctgggatacaaagtcaccccctgtctc

SEQ ID NO: 688800 - DNA, 324 bp, Homo sapiens
  misc_feature (113)..(113): n is a, c, g, or t
  misc_feature (153)..(153): n is a, c, g, or t
  misc_feature (178)..(178): n is a, c, g, or t
  misc_feature (214)..(214): n is a, c, g, or t
  misc_feature (245)..(245): n is a, c, g, or t
  misc_feature (251)..(251): n is a, c, g, or t
  misc_feature (270)..(270): n is a, c, g, or t
tttgcttttcatttggccaactttgtccaaagtctccgaaaacaaaaacccaaccccggagctgactctgtgggccaaacactagagatgtaaccaaacaactccctagtaancggacttgctttccattgccaccaccccaactcggggtcntttcctcgaagaactagtctctacntatttccttcacccaggacctctcagacttcccgcnccatcgttgtaaagtccagtgtcccaatacntgggcntcctggagcactttgcacntatattaatattgttgtccatcacattgtattattgttctggttctcatttctg

SEQ ID NO: 688801 - DNA, 353 bp, Homo sapiens
tcccagggaatggtccatattatcagagggaaaggttatttaagtatgccagttaattgtcctgctgggctgaatttccatatagtttttactgggtatggggggggtgtggtatttattatagcattttaaataaggggaattcattttttattaaagtcattttcacgttagagcccaattttgggatgtcctactctaaagaaatataacacagtttcttttttaaaagagttcatttgttgaagcgctaatgaaaaataaatgttattaaatagtttgcaaatgactacttataccagtatgcatataatttttaaatatttgaaaggagagaggtggaatgaataaaa

SEQ ID NO: 688802 - DNA, 102 bp, Homo sapiens
gtcggactgcatactgggcgtattggcatgacctgcagtggaagctgcagctacgctaccaggagatctccaagcgaactcagcctcctcccaagctcccct

SEQ ID NO: 688803 - DNA, 258 bp, Homo sapiens
cagttatgaataccactcatacacgtcgtcaatattttgcagctatgtcctctgtgagctcatagccagtcccgcagctgctgtcccgctggacagaggaaagagcccactgtgatgatgcagagattctccaacgccagcagctgtggctgcccgatgatgcattcattgaccatcttcacaggaaaacaccatcagaacagacagctggatagcccacgaaagcagagagcagaaccacctcgatcaccctgtgtc

SEQ ID NO: 688804 - DNA, 282 bp, Homo sapiens
cgattctcagcacgggtgctcgattctcagagggtgctctctctaagctaaccgtgactatagaagctattacctaacacaattacatcagcaccatatctccacctccatctatcacctcaatccaaaaaagcataataaaactttacttcctctctttccttcttcccactcatcctaaccctactcctaatcacataacctattcccccgagtcaatctcaattacaatatatacaccaacaaacaatgttcaaccactaactactactaatcaacgcc

SEQ ID NO: 688805 - DNA, 345 bp, Homo sapiens
  misc_feature (190)..(190): n is a, c, g, or t
  misc_feature (242)..(242): n is a, c, g, or t
  misc_feature (268)..(268): n is a, c, g, or t
tggaggaatactgctggctagcagagtctggtggcgctctctgagtgcatcatgtacaaggtccccctcatcagaagagaagtcctttaggcgcacctctgttctgagcgttgccctggtgtaagacttcctgaagaagcacaacctcaacccagccagaaagtacttcccccagtgggaggctcccacnctggtagatgaacagcccctggagaactacctggatatggagtacttcggcnctatcggcatcggaactcctgcccanatttcagctgtcctctgttttacacacggtcctccaacctgtgggtgccctcagtctactgccccagagtggagaag

SEQ ID NO: 688806 - DNA, 238 bp, Homo sapiens
tccctatccaaatatcccaataatcagccattgctaacttttttttttccaaattttctcagcataatggcctcaattctaaacttggtttaagtgactagctcagtgggcaatgccagtgattagagaagaacataatcttcatggttgtggccctgttttctgagaaatgtgtgtactcctagcttgaggagggtccagctgatctgggaatattctcatgtcaacaaagaaaagc

SEQ ID NO: 688807 - DNA, 1353 bp, Homo sapiens
ttcagttccctttaatgacccccatctccctgaaagggcaggtgcaggcagctaggtgatgggcaagaaatgttcacttgaagacttggcccgtgattgaaggcttgtgcccacatgtgcgtggaaggcccccttcccaggaaaagatactctcaaaccagcgctcgtgggtctccttcgcgtgccaggattccagttttccgccagtggtgttattgactctcgtatagttccacctgtgccaattctgtggacttcaggcggaagaggcaagctctcctgtggcctcggaaagacccagaacttccagaaaagtggagcgtgcatattgggtgggttctccaaacacagggattgaccaccgtggccaacagggcatttcttctccttcaggctgtgtgttccaagttcggctgtgagaaccattttccaaggttgattgaagatctgtgcaccgcctcaagtgaagcggctcctgacagtgtggacgttctctatctcgaggggacacagccgaatatacttccgagaaagtataccccaagggggttaaccaagacgcgactccttttatttcaacaggtggcttccccaggaaacatttattggagcagtgggccccaccaagatagaaagcgtgtgttgactcccctccatttttgggcgaggtttaacgtgttgggcgcccattataacaatttctccattctccccaacaccgacacaacagaggggagataccctccttgggagcgcacaaggcgtgtgaaagcccgaaaacggaggggggtctccccaattgtgggccccctttttgcggcgcctcttcgcaggcacaaggtctccgagtgcgggccctgtgttatccacccgtcttttttcatctccgcgatatctttcgcggttccctttcaaggggaatgccaatggggggggccatgtcccggccccattatatgttccttccctttcgctttttccgcggcttcgagccccgtggggggggctctacacatggcatatcaatcattttcccgcgttgtggaaaaaccgcatttatactaccttatcatccgcggttgaatgatagttggcctcccatatacataaaaggtgattgtgggaggctccctccttgtacaaaaacttttcatctacagcgcccattcttacacaacgctggtggggcccaacacatcattatcttcaaccacaacaaggttttacaacagcttttctcccccccaaaaagaaagaagtgccccggcgatacactctggaggcgtgtggtgctataactgtcaacgtgtctcaacgaagacccacataggtgtgtctgtggaacaacattgg

SEQ ID NO: 688808 - DNA, 331 bp, Homo sapiens
ttgcaggagagagaactgcttgaaccaggagacggaagttgcagtgagccgagatcataccactgcactccagcctgggtgacagaaagaggctctgtctcgaaaaaaaaataaaataaaataaaataaatgggctgggcatggtggctcactcctataatcccagcactttgggaagctgagatgggaggattgtttgagcccaggaatgtgagaccagcctggacaacccagtgaaaccccaaaagcccatctctgccgaaaaaagatacaaaaattagccaggcctcatggctcctgtggtcctaagctacttgggaggctgagatgg

SEQ ID NO: 688809 - DNA, 1910 bp, Homo sapiens
  misc_feature (488)..(488): n is a, c, g, or t
acgccatgcactccagcctgggtgatgagaatgagactccatctcaaaaaaaaaaaaaaaaaaagaaaaaaagaaaaaaaaaaagatgaaacttggttaaagggtagttatttaattcattggtgtacattggcttaaatttctaacatatctagaaattataaaccccgggaaagccaggaagtgttggtatcccttagggcttcatggctgacactagatgcaaagtaagcacacaacacatattggtgcactgaatgaatgtgtaatgaattgagcaattctggactcttacaaagggcttttatcatgatcaagagactattcaggggaattggcgaacatgggatttgggggggaagagcctcctttggtccaattatttatcttctcctccatcttttcctcctctatttcttcctctcatccaaataatacataaccatatccagccaaacccatttaaaaaatatggtccctaatgtaanggtggatttccagccaaaatgctggtaactggattctactgggccaactcttacgacaaaacaaaccacaacccaaaaagggggcggggacaaaaaagcataccgcagaggggcccaaaagaataagcggcacccacgtttcttgcgccacagggccccatatagaagacaccgaaataagagaggacagagcggagagttacaacggtcgcgcgcgcgacactgcgccctcggacactggggaagaccgtacccgggggtgggcactgggcacacaagaaaaagccgggaataaactacgggtcgcggacgcgcagtagcgcgccgataggcgtactatatagcatacgtgctgacaaaaacaatgcaacagacacacaaacagagacatacgcacacgcgtaccagactagacactcctacgtgcgctatcccactcaccacagcaccacaaaacaaacacatagccacgaaaccagcaaacgagcacacaaccaacacacacacactaacaaaatagcacacacacaagcagaccgaccgaactagaccatacaaccagaagcgaaacgaataacacaaacacaacaacaaaaaaagaaggacgcagaagcaacaagagcagagaaggagcgagaacagcgggcagggacgcgagagacaacagaaggagagcagcgagagagacgaagagaagggggagaaaaaggagagcggagcaacgcgaagagggagaaagagcgcagagaggagaacgaaggacgagaccgagacacgcaaggagacgaacaagaagaacgagcacagaagggaggcagacagaaaagaacagaccagagcaagcagcagagagggagaaaaagagaaggaacagaaaaaggagaagaagcgagagaaagacaggaaggcaccacgccaacagaagaaaaacgaaaagacaagaacaagcaagaagcagcaaagaacaaaagatgagaagacacaagaaaagagaaaagaatcgaagaacacgcgtgagaaaaaagacaaaacgacaagaaagacacgtacgtaaagatacgggaggagagtgaaaagaatagaacgaaaacgaacacagacacgacaacggaaagccaacacaaaacacaacaaacaacgagaggcagaaaggcagaggagcgagagaaagagacgagcaagaaacacagacagagaagagacgaaaagacaagagaagaagcagcaaaggccacagaaggcagcgcaggtgcgaaagaacaaggagagggaacagcagccggcagagaagcgagcaaggaacaacagacagaacaacgatcgaaagagacaaagcaaaagacaacaagaacaaaaagacacaacaggaacaacgaagacgacgacacgaagaaaggagcgaaggaaaaaacaaaaaaagcg

SEQ ID NO: 688810 - DNA, 404 bp, Homo sapiens
ggtacccaggcatgcagcgtggcacgttagcctacacagttacccaaataaagcataggcgatagaaagtgaacacctggcgcaatagcatattgtagcgcaagggaaacatgaaaaattactagccaagcactaatatagcaaggactaacccctataccttctgcatattgaattaactagaaattactttgtctggagagccaaagctcatacccccggacaccagacgagctaccttatagcagctaatagagcacacccgtctatgttgcacaatagtgggaagatttataggtagaggcgacaaacctaccgagcctggtcatagctggtgctcgaggcataattcttagttcatcttttaatttgcccacagaaccctctaaatccccttgtgaatc

SEQ ID NO: 688811 - DNA, 206 bp, Homo sapiens
  misc_feature (15)..(15): n is a, c, g, or t
  misc_feature (90)..(90): n is a, c, g, or t
  misc_feature (99)..(101): n is a, c, g, or t
tgccttgctacttcntgcaaaagtgattagaactaagatgcaggggaaattgctaacattttcagatatcagaaaccgcctcggtcattntctactaannnttcatgtatcattatttttacaaggaactatatataagctagcacataattatccttctgttcttagatctgtatcttcataataaaaaaaattttgcccacgac

SEQ ID NO: 688812 - DNA, 201 bp, Homo sapiens
  misc_feature (5)..(5): n is a, c, g, or t
  misc_feature (79)..(79): n is a, c, g, or t
  misc_feature (136)..(136): n is a, c, g, or t
tgcgncactccggccctcactgcacgcgccagcccttctttgtgcggtacgggtaaacagagggcggagccccccttgncctcgcctcccgctaaccattgttgcctccatctcttccgtagggcttctatttcgnccgcgatgatgtggctctggcagccgtgagccacttcttccgcgaattggccgaggagaagcgcg

SEQ ID NO: 688813 - DNA, 329 bp, Homo sapiens
tccactagtgtaggttaactttgagtaaaaaaaaaaaaaaaaaaattgtcccaaaacagggttaaaacaggggccccgttcccctctccctttccttttaaggggcataagggggggggaaaaccctaatttaagggtccaggattgaagggccccccctttcgggttaccttggggggccacaggtttccctttcccgtatacccccgggaaaatggccctgacctccttgttctgggccagggcaagtatccagcgcccattgccaagggaataaagtttgcccgggtttatttgcccaacctcttagcctgggttgcccccttttt

SEQ ID NO: 688814 - DNA, 115 bp, Homo sapiens
tatttactctaactggtagcacaatactgaccaacttcttcattcgctcatcatagtctgtccaatcacagacaatctgcaggcaatgagccaagttacaataagcatcaggaag

SEQ ID NO: 688815 - DNA, 120 bp, Homo sapiens
gcggccgcctactactactactactgctcgaattcaagcttctaacgatgtacggggacatgtaatcctcaagaaataaaaggaagccaaagagtgtatttttttaaaagttcaaaaaaa

SEQ ID NO: 688816 - DNA, 476 bp, Homo sapiens
gctgggaccggggcaatcgggcctccccgatgtcgggccagagggggctacggtgctccgccctccgcccctccaccacctccgacacacctcagggaggctcccagctgggccactgcatctcggagaacgaggggggtgctcatggctatgtcaacaccctggctgtggcctctcagaattgagggtgaagggcacgggtccattgcttcacgcggttgagagtccccaaagcccctttgtcttcataccgttctgtcacctagatttgatcagggtcgtacttcaggacagcaggtaacccttatacagggctaagcggccagggatgatcctatctgcacccatggggctgaggacggacttgagagggagacctagtcagttaacaggctgcagggaggtcaggtgcaccataacccgtctacctctcgttctccctactcctacccctaatccgtgacctccaaagtgga

SEQ ID NO: 688817 - DNA, 179 bp, Homo sapiens
cgcatgctttgggcagatgcgtggagcacccacagtgaggagtgcacagggaggactcaggtgagaggtgatcggagttgggcgggctgcaggagagaatgagagtggttcggattcgggatgcgtatcagggtagacccataggatatgcggcgttggatgcagtcggtgtccgaggg

SEQ ID NO: 688818 - DNA, 130 bp, Homo sapiens
aggcgaacattttgccaaagagcgtgtttccacctcgtgccctgggaagacagatgggcccaagcctggattatcatgaacagggcaatgcccagacaccgaggaagctttggagggttgagccagttat

SEQ ID NO: 688819 - DNA, 232 bp, Homo sapiens
ttagaggatcgcttatgctttgggacggcgctgcggaagcggggtgcctgaaggggagctgcttatccggcttcttcaactccttcaatgaggccaccagggttctggtctccgggatcatgtggtatgcccctgtggccatcaggttcctgggggctggcaagatcgtggagatggaggatgtgggtttactctaagcccgccgtcccacaagcacaggcggtaccgagct

SEQ ID NO: 688820 - DNA, 308 bp, Homo sapiens
cgatttttttacaagatacgagatttcgcccctcctcctttcacccaagcgccgataaagaatgcatctggctatgaccgacgataggaacaagcctgcgcctctgggtgagcccttcaagtgctcaaaaccttagcccggaggaagtcactatggcaatgccagttcccgtctccaagccgactgttggtattgatgtcgcaaaaaatgaattggtgatttatcacgccgatctcgatcttttggaagcaatcccgaataccaaagccgctatcaaaaagtggctgagggctttgccaggtagcgtt

SEQ ID NO: 688821 - DNA, 902 bp, Homo sapiens
actacaaactatcaatagtaccatgagcttggtcaaactactacatgagcgaggcatctctgccaaagtgtaccacagccaatttcggagcaaaccccgcgtccagcctcgtccgctaaattcccatggatatcggacttccatcaccaacaatgttcaactatctcaatcagcttggcctcttctccttcacctctttgagcctcgagttgcattctctctgagaattgagaggcctctcgacagctgagacattcctccaggagatgtatggcttgagacctcgccggagaccatcctgatggttggccagttgaagatgaacttaggtggacaggctgtaacgagactgtgcggatacgccagagtggtcaagaaccctggtgcccaagagaatggaagatgccaggaggcagaaattggtcctcaaaaatcagattctgctgtttatttaaattcaggtagcagtttattaggtggactaaggaggactcagagtcttccagtcataatgggtagctttgatgacccagtttgcacatctcaccccaacaatgggtgtccctgaaggggaggactgagcgtcagccaggttaacttgatctcttaatacaagtgcagccacatgaaggatagatatgccggacgacatgtggtctggtctgacttgcggagcaaaggatgtcgcaccggttgtgcatgtgcacgcgggacaggcgatggaactcacatgggatgagcccaagaggaatcgggagaagtttcaatgatgggccgacgtcagaggcgaaaaagctaaaaatcctcagagtatgttggagtaaggacaaagaacaacacaagcggaagaacggcttctgtactaacaaccacagtgcaaagtcgttaccaggggcacaaac

SEQ ID NO: 688822 - DNA, 860 bp, Homo sapiens
ggcagtcgctgcagccgccgggagggtccgtgacaagatgaagctcatcatcctggagcactattctcaggcgagcgagtgggcggtaacatacatcaggaaccgtatcatccaagttaaacccaggccagagaagtacttcaccctggggctccccactggagtaccccatgtggttggctacaagaagctgatgtgaatactataagaatggggaccttgtcctttaaatatgtgaagaccttcaactctggatgagtacgtgggccttcctcgagaccaccgggagagttaccacttccttcatgtgggaacacttccttcaagcacattgactatccacccagaaaaaacccaaattctgatgggaatgcaggtcgacctacaggcagacgtgtgatgccttgtgaagagaagatcaaggtgcaaggtgggatcgagctatttgtgtgaggcatcggccctgattggacacattgccttccaacgagccaggctccaagtctgttgtcccaggaccgtgtgaagacgctggccatggataccatcctggcaaatgctaggttctcgaatggagaactcaccaaggtgccaaccaatgcctttgaggttggggggtgggcactgtcatgatgctaagagaggtgatgcatccttatcacaggtgctcaaagggcattggctctgtacaggcatcgaggagggagtgaccccatgtgacgggttgctcagagatcccaccggttgtttgcgggagccctgggtaatgaacgcacgtataaggtagtggctcaagtgggcccgtagtacgaaaagaaagctttaacacggatctggggagtacagaaggtgaatgaaag

SEQ ID NO: 688823 - DNA, 127 bp, Homo sapiens
cggatctgacttaaggcgtcagtcataatccacagatgtagttgccccattggtctcagcagaatacacaaatgttgaactgcgtctcctcgtactgagcaggattaccatggcacacacatcatca

SEQ ID NO: 688824 - DNA, 124 bp, Homo sapiens
agggcaagccgagggccgacacgggggggcctgacacgcagcaggagggcgccgggcagacaaggccgggggcgaggaagccctgctggggcgctccaggagaccaacgaaagccgcaggcgca

SEQ ID NO: 688825 - DNA, 927 bp, Homo sapiens
aagatagctccttcatgcttttctcatggtattatctagtaggtctgcacacataacacacatcagtccacccccattgtgactgttgtgcctgtgtcatctgtcagcttcccaacaatactttgtgtcttctagttctctctctggtctctttctttccaaaggttgtacatagtggtcataaggtggctctaactccttgatgtcttgagtttcatttactcattttctctcctcggtggcatcagctgccatacacaacaatacaggaatgcatcaatgtgctgttgcttctctcaatccacagtcatcgcacttgtaacactgtgacattccacagagttactgccaccggtcctttgagctgtccaggctctgcactctctcacccatgtgccgcctccggtacctcactggctgccatcctgccttcatgatatcctgattcagcacaacgtggaccttaccttaacacggcatagcaactaaccgtgacgtgctccatgcctccatgcatgacacctaccccagactccgagcatccctacctaccaccacacagctcaccatgcaacagctgcctaccggcgagaccccacccaaccccaaaacccacagacacaccacagcaccacacccccgcacgccagcaccccgccccaccggcacggaactaacgggagtagcggcgacacgggcgagcagtggacacacccgaccggcaacaacacgcggcctccaccatccataaacaccccccacagccaccgcaccgtcccccagccggccctgcccacaacccaaccacgatgcccgcagaaccagacgggaccacagccacgcgccggacaccgcgtgcagccacacgaacaccggggcaccgaccgcaaaaccgcgacaacaaacagacaacacaccacacacgaa

SEQ ID NO: 688826 - DNA, 229 bp, Homo sapiens
catgtggtcaactggaccgcgactctggtcgaacggctgcgccgccgttatggcgaccgcatgacgatccacgccggcgatgcgctggccttcgatttcgaccagctgaagcagcccggacgcccgcttcgcatcgtcggcaatctgccgtacaacatctcgagcccgctgctgttccatctgatggagttcgcggaccatcgtgcggccaacaatgggggatcctcta

SEQ ID NO: 688827 - DNA, 560 bp, Homo sapiens
aacaaacttgtactgtttgcatatccgatagtaacattttagagtgcttcttttttttttggaaacagagtttcgctctggttggcccaggcaggagttacatgggcaggatctcggctcaccacaacctcgtgcctccccggtttcaggttgattctccgtgcctcagactccgtgagttagcgtgggatacacaggcgtgtgccaccacacctagctaatttggatattttaagtagagacggggttttcgccagtgtgggctcaggcgtggtctcaaactcccgatctcgggtgtgacccgcccaccttcggcctcccaaaggtgcggggattacagggtgtgagccatgtgcacccagtgtaagaagtgctctctttactatatcacgtgccttctttatagggatttatactagtctctaaaaattaatttttcattacagaacttttgggaaaattacttcagtaaatagagtagatatttaaaattcaccggcaggcctactttccagaagtaactctggttattaccattttgggtttacttttcccagtcc

SEQ ID NO: 688828 - DNA, 171 bp, Homo sapiens
cggccaccctcggcatcgaatgcaaggcactgaccgggttgaacgctctaagaggctgaaggctgcttcttggatgccaagctgggccctaacacggctctgtcacagcccagctgaaataggggaccccgtcggactggacttaaccaaaactccttgctgaactttccc

SEQ ID NO: 688829 - DNA, 468 bp, Homo sapiens
  misc_feature (468)..(468): n is a, c, g, or t
tcgcaggtcttattcacgttccgactgatgtgtatccgcaactcgccgaggttagttgggtcacggtgccagccgtgctgacaagaggactctcccgggagacgaatgaggaaccatctactactactgttcaagtacaggagcctggtccgaaagggctagaaaagcatacgacgagaactggctaacattcgagatccgtccagccactgacgccgagtgcagagacatactggggatgatcaaggagctggctcactatgcatggacgaacaaggaatattaactgctaacgatctgctggaagacggttttggagagcacaggtttcaccagtgtatggttgcagaaatgtcgaaagagcactggactccggaaggtaaccccaagccctttacagaagccagagagaccaagtgctatgctagaagatgctgtaggctgtgctgccactgacgacacggccgn

SEQ ID NO: 688830 - DNA, 120 bp, Homo sapiens
  misc_feature (56)..(56): n is a, c, g, or t
ggtcattaaaggtgaagagatcagcgtggtccccaatcgggggctggatgcccagnctgtcccccgtcatcctgggtgtccaggttggaagccagtgcctgtcatgtggggtggggcagg

SEQ ID NO: 688831 - DNA, 225 bp, Homo sapiens
aatgttgagctggtcagctgatcacagagttattgatggtgctacactgtcacgcttctccaatttgtggaattcctatttagagaacccagcttttatgctactagatctgaaatgaaggctgattaggcattcttgaactttttgagcttccaaggggattgtgaccctgctgtccagcacatgtcatcttccagttatatggacagcttggacgatgttagg

SEQ ID NO: 688832 - DNA, 1286 bp, Homo sapiens
  misc_feature (346)..(346): n is a, c, g, or t
  misc_feature (428)..(428): n is a, c, g, or t
  misc_feature (525)..(525): n is a, c, g, or t
ggccctctaccaactacattgtacacatgcacaccagccgctgcagggctcccatgggactgagtggggagcagttttcccctgggccatcagttcccagactcccctccgcccaccgccacgcatacatcagcagtgccgcatcgcatggacaagggctaaacatctcccagcgtatatgctcggcgaccactgtcaaccctggcgtgcgggtccctctactgcccattggggtgtgctggggacattaggcgtctctgggctctttggatcttcgcgtgcggcgcccctcgtcatgctccttcacttgtatcccatctggctttcacccataggtggggacctnggcgctagggattgccgcactgagcactatgagagacaggcgggcccagataggcccacggatactacgatatccttgggcnacggaacctttaatcgcacatagtctccttgggccgaatcaagtccaagggtggttggaatcgaaatcgggtagtgtgggcggttgacttggacgcncgcggcaaaggttaattgcccctttcttagctcagggactccgttcctgttttgtgcgagcgcgaacgagttgggggtgcgtgaccaactgtttggtgcgatatcccctttgcgcacgccaatctgtttccccggtgaaagttcccccgccggttagcgtaacgcgtttaggaaccaacgcgcccccccttttccgagggcataaacgaagggggaaaccgggcaaccggaacacggggggtacgacggttccccccccttaaatgtccccacttcggttacaatcctatgttggtcgcacgaaccaaggtgcccgcaccccttttggggacaccttccgcaggggcctggggggacatacctaagagaggttaacccattgacttttggtagggggtggcaacttggcggcacgaaaattgcgccaggttccccacctttacagttctggtccccaaagagggttgaacagaggggccccacgaacggacagcctcctttggatgggagaccaggctccccacactctttgcaccgcggttggggcgtcgtaggtgggcggcttcgatagtcaccccgcgataaaaaaccccacgatacaacattttatattggcgtcgattaccacggggggcaccacatccgaatggcgccaagattatatcaccgcccgcccgttgccactatccagggacaattggcgcgtgggcaagcgcgaaaacaacacacacatggagaaagacgatccaacagcgccaatg

SEQ ID NO: 688833 - DNA, 707 bp, Homo sapiens
  misc_feature (707)..(707): n is a, c, g, or t
ggacagtgttgtgggaagggacagttagatttacgccgatgaatatgatagtgaaatggagttgggcgtaggtttggtctagtggtgtagcctgacgaataggggagaatcagtgactgacagcctcttatgatggcaggatacagctacctatggataggacctactgagaagtcgcaatgctacagcgtgaggactgtgtcagggtaaaatcacagattgatctacgtagattgaatgtggggtacattgagcaataggctagtgcagtgccaatagaccgggagagttacatgaagtgagttaagagctacctcaagcgcgggttctacatagagcaccatgggcgatggcatgatcgagaaaaccatagttggcctgtagcgagagggcaagatagtaggagaggatcccaaactacaaacacacgtcttggaccgcgccggtgtggggagtgcctaaacaagaagtggattctgaatagaaggacaggaccgggaaggcgtaagtaacagcactaggtcctcggatagctgagcccccgttgagcgatgctcatttcacataacccgtaaagacaatagtacatagagtgtgcaagttggtacttaaacagaagatacacatccgggtaaatttgagaagagacacgtagccgacttgaaacaatttacgcgttcaaggagaacacatatggaccaagatan

SEQ ID NO: 688834 - DNA, 418 bp, Homo sapiens
ggggggggcccaattaatgcacaatatatgtagtccaaaatagcccctgatataactagaatctttaaggtattataacatatgatgaaaagtagtaacacttgtagtatggttctggttagaaagcactttaacaccaaagaaagttaagtttacaatgataaaataatatcaggaggtaagagaggttaaagagatggagaacacttattctgtaagccacacttctctgaatgtgccataacatcgtttgtctaaggccgtgagtgtctgtgattctgagtggaggttgaccatagtcggccgaaaaatcggtggttccttcatcaatagtcaagtcatgtcgttggcagaattagaagtcacgataaaaccccctggatctccagaaatgcatgtattccacgacaaacttggc

SEQ ID NO: 688835 - DNA, 198 bp, Homo sapiens
atcagaaccattctgagcaaatgagtgtcctaggggaagtggactgagaattgagcttcagtcgctactgagataatatgccatgcccagacgtacttcgctgaggcagactatattgtgtatagaggaaccggctcattctcctctgtgcctagccacagcaatcgtggtaggggcacattccttggcctttaggta

SEQ ID NO: 688836 - DNA, 1215 bp, Homo sapiens
  misc_feature (182)..(182): n is a, c, g, or t
cgttcgtccgtaaagacctgagatcctgtgctttctactctccaccgtgaacttgcatgatgcttcagccactcgctagcatgcttctccatccatacctacacggttcaccatggggcatactgatccgagaggctggccgcagccataacgggatgaccactggccaggttcacgagatncagtcgggtcagtaggtactatgcacgtggcgctggtaggactcatggttcccaggatcttcactgttgctcacctgctactcatcagagtcttcatgagaggcggagcatatggaggtcgcggtggtggccttgcgctaccagggatgagtcctggcgggtctagtgcgtggacattgcgtgacgtgcaatccatgaagcggaaacaaaggagagatcgcaattgtccacatgtcgctagagaacgcatccaggactagtgtcgcatcttgtatcctctgcgcacactggaagctcgtagtgtatggcttgcgaaggaccagaatcaaatcccagtgatgggacattgagcatcaagacctaaaaggccacgtgagaggctccattaaagtagagcaacttgaacggtggaaccacgaattagtccaagaatcaccttggccgttgcaccaatttacctgtcgagttgcattccattcccgaggtgaccctgtgacgtggactcaacgaattctttcacgttattagtgaccttgttgagcgcaaattaggccccctgtgaactctcctttcattgtcacagaaatttgggggcccttcttggcccccaggttccttggtgcataggcatgtatctagcaactttttcacagtgagcatcaaagcctaatggacaaccatcgggaagcgttggggccctaggggccaagcccagggcgccttggttggcatggtaaaaccggaaccctattcccaaattgggagccaacgcagattgacactggttgcaaccttaggaacgtgtaaaccacgcccaaacataagttccagcaaacggaataccatggctatgtccttgggcagcacccacggcacgcagtccgacggggttcattaaaagggtcacacgtaacactgtgtgtgcgtctctccatgggacacggcacagaaaagccctgcctgcaacacaacacggggacatcgggcctacagacgctgtgcttacaccaaaggccctccgcagacactggag

SEQ ID NO: 688837 - DNA, 582 bp, Homo sapiens
  misc_feature (440)..(440): n is a, c, g, or t
acgctctctctgtggggaaatggtttttcttcttgagacagagtctcggtcaaccaggtgggaatgcaggggcacgatctcagctcactacaacttctggtctccccagttcaagtgattctcgtacctcagcctcccgagtagctgggactacaggcgcccgcaaccacgcctagctaatttttggcatttttagtagagacggggtttcatcgtgtgggccaggaggggctcgatctccggacctcgtgatctgcccacctcggcctcccaaagggcggggattacaggcgtgagccactgcgcccggccctaggtgttatatttctaaagacatttttaaaaaatataaatcagatggtgccttctcggcataaaactttctattggctcccaatgccctgtggatggcttatgcggcttccacagctcaagcctgnttgcctatcttaagctcttacttctgtgaaggcacctccccctattcccttcttggctctgtcttctccatgtctgaagcactgactggctagtggactccactatgccgatatttcaccattactccatagttacgtctaa

SEQ ID NO: 688838 - DNA, 151 bp, Homo sapiens
gtctgtgaagtgacatcgtctttaacctgcgtggaatccctgacgaacgcgtgatgccaggaagacaggcgagctgaagtgcaactatttcttaagataatccactattgatgattatcgaatgttcattgtggagagcaattggttcaag

SEQ ID NO: 688839 - DNA, 351 bp, Homo sapiens
tcagcagacacagcatgtattgaatattgagcctattatgtaaccctacagtgacctccaagtgtttaaatgacaaggaagatttgcgcatctctcattttaaaccaaatgttaggcatgatttagcttagtaaggaaggcttgtcaaaagctgagagaggccaatagctacgtctattatgccaaacagctaagtcgtgaatgctaaaaacctcttcgttcagggaagttaaaagtgctactccagtcgacacacaaataataagaaagcaaaacaaccttattgctgatatggggaaagcttgattggtatggaaagcagatcaaaccagccataatattctgcaaagc

SEQ ID NO: 688840 - DNA, 131 bp, Homo sapiens
aatagtagtggacctgggactggaactcagatttgctaaggaaccaggcaggtttattcctgttttctgcacgggagcattttaaccagccattaaagaagcctcctttttaggtaaaaaaaaaaacaaaa

SEQ ID NO: 688841 - DNA, 1025 bp, Homo sapiens
ggacacagaggacagctggtcaccagtaccacgtatcctgtaaaattggagggccttcaaggctctcatacgctgctcagttacagacggggctcacgtacgcgctgctctgcgaacgaacccacttccatttaggcgagaccaaccggacccctgaatttctccgaaatctcctgccgggccgtcccatcattagaggggtgatgatggattcatgtgtgtctgagagcaatgcgcaataggctgagttagtgtgagccgaggtgaggaggctgcgtgtggaaagttacgtccgggaggtctgggagtacaccaagggtggatgctgggcggtgagcgtttgttgatacactgaatatagtgcctccgggaacatttacgcatgaggtgtccccactctttgggcatcatgtcgacgagcaacaaaaggacactgattaatgcaaaggaggactctgaggccgaattcctcggggctggctggatgcgtcaactaagtagaggacggagggacgtgtgtcttggtgagcagcgagacagacgggatcatccgcgcatgaaatgcgacagaatcgctctaggaccctgctccgtgggtctatacagcatggttgctatgaaacccttcttatctcggcaggggcttaacccaaataaggcatccgattgggttcctccacctggtaaacaagctccagtgccgggtgtcttggagcgaagtgaaactgtgtgaaaatgtggtccacgccgatgctaaaagttgggagacccacctaggaaggcccccccgtgcgagaccgctccccggcagaacagggacagccagggaagccgcgagggagaaagggctggcacgccccggtgggatggagatgtgcaccccaggctgtcgagcaaagccggcctcgctccaggcgcaaactggggtggacgcccccggccagagagcagccagcggagagagcacccaaacggcgaagcagaccccagaaaacaagaggctataccaagcacacagaacaagc

SEQ ID NO: 688842 - DNA, 1072 bp, Homo sapiens
ctccctagatgttaatgtttagggttgcgtgttatggctttaagccgggattccggtggtttcgtgccatgtgctatcgccagggtttattcgcgccagctgccatagattcctccggttacgaggagtgtgtggataggttgccttcacaggaaacagagtctttcgcttgaaggcaacacttctgtggtaatgggaaataaacgttgttaccaatgccatggctgagtcccctggctgcgtgattggcatcttatgctagctgaccgtctgagaccagtctttctgacacaacagtggaagcgcaagagtgccatcagagcagactttcagctaagatgggatcctttcttcgtcctccagatgtgaactttatagatcggcttagattttttgtccaacattggccatagcagatatcgttgaacaggcaggacatttgcagcgttgtcttactggactttttctcccaacaggacaatcccaggcagggggctgacatgtaagaggaatggaacctggagcctagtattaattgcccactctcccaccctacccagttgcagcccggtaagggcatggaattgggaggcctagggtgtgcatgaaagcttgggaagcactgtcgtctctcagacaggcgtcctaaagacctctaggctggaagcattaggtttcttgcaagtggatccaggggaccgaggggtaggtctcttgcactaccgccaggaacttggaccaaggcagagccaatcttgcaaactggcccatggatgggtaacctgcccggtagccagcatgagccacactaggaaagaggaggagggtgcagccaaacttaaggcaccggcaagtgttggtcagcactggaggagaccccgccagtggggtgaggccagccaagtcccatgtgttacgaatggtgggccaaggggctgtctgctaggtcaacatgtaggacatggcagagcgtccaggctggcaaccatggaagcctcaggaaagagctgggaggcaggaatggcacactgtcaggctgcccattctgactggaatagccggctcagcaagc

SEQ ID NO: 688843 - DNA, 869 bp, Homo sapiens
cggggtcggagccgtcggggccaaaggagacggggccaggaacagtgcagtctcggcccaactgcggacgctccctcctaccccctcgcgcaaaaagacccaaccggagttgagtgctgctgcccctgaaggccccaccttacacttgtgctggggtgccgtgagccatggctcccaggactgctccagaaccgagggaagctcgggtccctccaagctagccatggtgaggcgccggaggccccggggccccatccccccggcctgaccacactgccctgggtgccctcctccagaagcccgagatgcggggggccgggagacaacactcctggctccccagagaggcgtgggtctggcggctgagggccagggcccggatgcccaggttccgggactagggccttggcagccagcgcgggtggcgaccacgggcacccagagaaggtcctccacacatcccagcgccggctcccggccatggcagccttgcacgagcctcttcctcaagagccctctagggtcatggcatggccgtggcagcggggcgtggtggcgggccggtggcaggaggccggcctgaggggtctccaaacggccgcgcggttatgccaacccggtgtggacagccctgtccgactacggagcccagctgcggcacggatgagctggccctgaggcccgggtgaccgtgctggaggtcgctgtcccgcggacgccacccatctccggacgacgacgcctgtcgcccggcgccacggcgcgtgcgcctgtgcgcatcttcccgtcgaactatgtgtctcgcgggtcgcggcccggcccccttgcgaggtggccgcttcctggcactgccagttggcgaccgtgcc

SEQ ID NO: 688844 - DNA, 1078 bp, Homo sapiens
gcacgttagagcgtccagctcatgagtcgtgttgataacttgtcagacacacacacttttccgcgcgaatgcgagctcctaaagaaatcaaggactgtggaatctatagagctgatcaatcagcgggcacgatataggataagaaatagtacaggatgtgttaggtggcacccagggtccactatgaacgaacgtgagcctgtgaacgcatccaatgagtgccaccaatccaggcgtaccgtttccagacagcagcgttcagaaggggcacgagacacggctgttgaactaagcacagagacttcccacaaccacaagcggccccgcgtgaggagcgacgccatgacccccttcgatcgcctcaaaccgatgaccgcgaacgaagcacacccaatccatgatggaacgagagatagcgaacccgatgatgacgaggaaaagcgaaagcgggaagccatgcacatgcatgggccagcagagtgtgagagcattgccaagaatatgggagagccttcaaaccgttagtggcagaagggcaagaggaacaaacaagtagtaaccgagctgaaacaaagggagtgtatcgtacgaaaacgagtaccagaagcgcactaaaagaaagaatgcatcgagaaacaaggccgggggcaaggctgcagagacagaccccaacacatcggaagcgaacagtcatagcggaagacctgaaaacaagaccgaaaggagaggaacgcaaaacagtacacattggacagtgctagacccaagataaaccgagggaaatcggacagtagacaacaaggttacctaaagaccaccgagagttagctaagccctgaaactaatagaggaagactaccccaagagacagggtacacctaacgaagatataacaacaacacattggaaaaagaggcgccagaggaggaaagccaccttggacacattatagcacacaagagctagaaaaaaaaacggagataagcaccattgagagaaggacagccttaggcaagggcccaacgaggaccagagccacaagagataccatcaacaaatgctcgcgcaaacggatggg

SEQ ID NO: 688845 - DNA, 768 bp, Homo sapiens
  misc_feature (713)..(713): n is a, c, g, or t
ggtacccgggtcaggacggatgtggattggaggggagcatgggcagcatcttttaaaaatgcaaacatgatgatagtgcttcatgaaatgctaccagagccaccgtacctcctggccggtccattcctctagaggttgcactcctctgggcctcagggcctttgcacaggcagctcctgcttggagtgcctcctctccctctccccttgaccttgtcattgatcccgacccagtcttcagagctcagctcaaatgtcactcccttaaggaaagacttccttaactgtccccacttaggggtcccagttagctgttcttatacccccacatgccccctgaagtttggaccccagctgagtgcagtcactgtggggcactgcgtgacatctgtctgtcttctgtaaggtcaggggcccttcgacctgagtcaccgtggggtcccaggacctgccgtggcgctcactctctaaagactaaacagttgcagagaccagtgaatgaaagtgtcagggcctttcacacacatcagcttactgcatcctcaaagcatccctgtgaaagagggccctgctttaccaggaggaagctgaggcttggggaggccagggtcatgtgtcgatgaagagccactggtccacactgcccagtccccagcactccctccctgcagcgcccagtgctgacttggtacggctttcattgcttgttttccntgtgtttggatctttcatccttgatgtggcccgcacatccgtactgcccgggtac

SEQ ID NO: 688846 - DNA, 335 bp, Homo sapiens
tcacggagatttgcttctgttaagataattaaaatgactaatgggccaggtgcagtgtctcacgcctgtaatcccagcattttgggaggccgagacgtgatccacctgatccacctgaggtcaggagttcgagaccagctgcgccaacgtggaaaaaccccatctctactaaaaatacaaaaatcaaccaagcaaggtggcgcatgcctgtaatcccagctactcgggaggctgaggcaggagaatcgcttgaacccggaaggcggaggttgtggtgagccgagatcgcgccattgcactccagcctgtgaaacgagcaaaactccctctcgaaa

SEQ ID NO: 688847 - DNA, 797 bp, Homo sapiens
gtgatttcagtcctcgggactgagcgtttacgtctcgaacgttacctggtcccgtcggcctgtacaattaacaacgcctttatttccattgttctcgcaaataaaactcggtaggattagtgtccgcttattgggtgatatagtcaaagagaccaaatcccatatcctcgtccgactcctccgactcttcctatggcttcaaccttagctggggctgcagcagcagtcatggagcatgctgtggtggcagcagccacaggggtcatgcgagtccacaaaggcagatggatcagccaaaaaggccttgaccttattcagcaagtgggaaggtagtaatccgtctccacagacaaggccaggactcgtttgtcacccgttgatgatagaatggggtactcgatgcaacagttgggtagccaatctgcagacagacactggcaaccattgcggacaccctccaggaagcgagaatgcagatgttccctctgtgatatcaagcacttacagggttgtagatgctgccattgtcgaaccacttgctggatagaccagcccaaaggacgaagtggggagatgttgagctttgttcagcagcgtggtccagctggctcccattttgtctccgtcttgatcaagttgcgcatccactcaggattcaattggtgcccctggagatttcgtggtgatacctaagcctggcaaagggggtcttctcggccgagaccgtgttcgggctgccagtgacttcccttgggcaagggcccagcacggcaggttggccttaatggcgcactgtc

SEQ ID NO: 688848 - DNA, 104 bp, Homo sapiens
tacaggagctgattatccccaacactatgtacaccagctgtatgagtacagtgatatcttgaaggacacttgggatctctatgaagtttgactggacaagaaaa

SEQ ID NO: 688849 - DNA, 813 bp, Homo sapiens
  misc_feature (284)..(284): n is a, c, g, or t
accaaatctaatatagttacagaataactgcataagggcttcccttctggagactcttacccagcatgggaacagtgatctgcccacatgacaaggtggtatgccaggcaaagataactgcttttggttgtgaggtactcactcttcctttagttacccttagttatgtggcacacatgtgccttgatggctagtacgtcatccaaactggggatctggtgaaaaggctgtaaggtatccaacgcttaaaatatattagtatatgggtgcatgaacaacgaatnacttggaattctatttaccttcactaatgtgactacacggaacatttcattgcagttaaagagaaattatatcagtctattaggctggtgtgcagtggtatcatgcctgtaatcccagcagttgtgggaggccaaggcgggtggattaccagagtccgggagtttgagaccagttgacaaatggagaaaccccgtctctaataaaaatacaaaattagcaggtgtggtgggcatgcctgtaatctggtactcaggaggctgaggcaggagaatcgcttgaaaaccaaggagaccgagttggcggtgagttgagatgcgcattgtactccaggcgggaagaacagcgaactctggctccaaaaagaaaaagaaaaacaaaaaatttggggggcacggcccaaaactaaaacccacgtttggcgccgcccaaggtataaatggcaaggtccagaacccgcccgcagggggtttcccaaaaccggggcgggtcaaacccggtggcctcgtccacggccctccccccgcgcgg

SEQ ID NO: 688850 - DNA, 999 bp, Homo sapiens
agcgggtcgggcgcggttggctcacgcctgtaatcccagcactttgggaggccgaggcgggcggatcacgaggtcaggagatcgagaccatccgtggctaacacggtgaaaccccgtctctactaaaaatacaaaaaaagaagaaaagagcggcctccgcaagtagcggggattacaggtcccaaatctgggaagcacgggatcatgggaaccgatagaatcatcggggatatgaaatccagacttggaggaggccataaggggtcacaaagccaaaccttcatccagcccaggcgagacccacttcgtgacaaggcatccgagaaagcacactcgtggacaacacagggggagacagcatcactcgtggtagacgccgccggtcagacaatcatcccaagaggaacacggtgagtcatcaaacgtgacctacgtggtggaacaaaagaaagaccgatccgaggggaaggcccaaggcgtccacagagacgcaacgcggggatcacacgttacgttatccccagggggcgctgcggtgataccaatacgatccacgtggcacaggaaaacagccaacagtggggaaaacaaaggggccacgagggctaggaaacacagacacatcagtatcggggcacacaatcattacaagaggggcaccacaataaggggaaagcacccgatgtacgagtggatagaaacaccgtgggcgtacaacccgaattggggatcaatccaagaagagggcaccatgaagggaaacaagcgggaccacatgagagaaaacacagaaaagcacaattcaagtgggaccgtggagaaatacccacgaggcgacagatcccccccaacaacggggccgccaaaaaaggatatcaggagaaggatcccgtaggaaaaccaccgccgtcataggaacaactaaaggcactggatagccaacacacatccctagggggcaacacacctagcgagatcagcacatcctagtggaagcac

SEQ ID NO: 688851 - DNA, 132 bp, Homo sapiens
tcttctctatttatccccttgattcttttatcttttctcttctctttcttttatatctttgtctattatgtcgtttattatttcttgtctcttctcctctctgtgcttcttcctcctcttcttccgttctta

SEQ ID NO: 688852 - DNA, 398 bp, Homo sapiens
gcccactgcacagggcctcgtcagccatcttcttgcggccggtaaagcacagctcgttgcacaggctctggttcccaatgcccttggccaggcttcacagtgttcttacatcgacagccaaacccgcgtccacttccttcactgtgaaagaaagctatcctgggcacagtcgcgaatgtcacagccggtcacaaggtccacacttccgccaatccagcccccatgggcgccaccatatcacgggcttggggcacctctcaatcacgttaagtgtctcctggtatcagagtgatgatgtcgcggaggtcacatctgatccgggccacatcatctcctgtggtctacagatatgtccaaacccatgtccatcaggtcaatacccacagtgcacatttctc

SEQ ID NO: 688853 - DNA, 919 bp, Homo sapiens
  misc_feature (8)..(8): n is a, c, g, or t
cctttatnctctgttagacgacgcatctagcgatcgcacaatgagactgagagagagcagagccaagccacctcgttgtcaccttttgtgcgcaacttatggctcactctgtttggaagctttataatagaaggggtataacttataaagagcccgtgctggaaaaggaatttggtttttgccaacggtgtctgggtccggaatccccctggtcggcctcgttgtgccccattttttcggtgtgcccccgcccgcccgttctcaagggtttggccgcgcccggtgacctctgcggggacctctccgtcccccccgcccccctcgggttctgacgttcccttcccccgttttagtactcggggccaacgccgtgccctccttgttgcccaccaaggactctccccgaggttcttcaacgccgaattttcgcgccccgtgcagtgcacatacggaccgttcttcttgggacgacggtgaagttaggcccaccatacaccaaacatggcgcctgcttctcccccgcgatggaacaattctctcacgagggacgccgcgggtctcccccatgcacccaaaaggcgtgtaatgcacctccccatgagtgccaccctcggacgccagcggcccgcttccgagatacacccagaagggccaccaatctcgccctgtgctacaagagagacggtcctgagagcatacacaccccatgagaacagggtccccctgggcgacccctcggttcgaaaaagctcgttacccccgctgccccaacttttcggcgtacaaaaccgccgctaccagaagccacaagcggtaataggaggagcccccccagaagactgcacacccgacgcaggatggccagcggacacaagggacaacccgggtgggaaaaaaaaaagttcccccccccaaaaaa

SEQ ID NO: 688854 - DNA, 318 bp, Homo sapiens
aggtagctgttatgagctcctatggagtgtcagaatcatggaagtaaacatcgtgagaaacctgtgaagattatctcattcgtcttgtcgttatcgagtgttgctgttattatattcgacatgggtattatataatgttgcatttcactttcactgccactccttaaatatgtgaaaggaacattttttaccaaagtgtcttttgacattttattttttcttgacaaatacctcctccctaatgctcacctttatcacctcattctgaaccctttcgctggctttccagcttagaatgcatcccatcaacttaaaagt

SEQ ID NO: 688855 - DNA, 1097 bp, Homo sapiens
gagatgtggctttgggtttcatccttccccagcgatgggtctctacgtacctgatatccctggatatcaacgacaccgttcctcagacttccatgcctttggatcttccatgtgcctccccatattcctggacttcggagatggacctctcccaagccaggtcaaggaggtttgaggggagggttgccccatcatgcccctctgcttctgtggctgagcactttcccagctccagggcacgggacaactatcggccctatcgttgacccccaaatccagtgagctccagatgtcttccaaggcaaaagaggtaagcacgatcacaccatctttctgccctctacatatggcctattctggcgctagaccagatttggcgcggccaggagggacgaactccatatgggatggagcaagggaatctacatttctaccacatgtcacaacaacacacctgactggctcactcccagacctagacacacactagccagaacaaatgataaggggctcggcatgcggtggcgctaacgacaccaggaacacggcacaatgacaccaatcccaatcccttaccactgctaattaccacaatcacataccccaagcgatcaccataccaccttcacacaagtcacctacccaagcactgggttcatgtcgggagaaaccactcactaacaacatacgtggctgtggcccaaggaggagacaatcccccgaaccaagagtacaccccccgaccaacaaaatagacccaccctcaaccaaacccacacactacgcaaccaccagagacaccgcaaaacgcccacacagaaaccacacaggccaaagggcgaggggggcacacggggaaaaaacaaaagacgcaacggcaccgcaaagaacggcccactaaaatacagggcaccaactagacacaccccccagcgatcacaagcaggacaccccggcgaaatctcccgacaacccacccgcgagcacacacaccacacgggcagagagcccagaaaataccccacggcacaaccacgaccctccacggacaccgcggcaactgacaacaagcactcgcaagcgcaaaacgcgcctcc

SEQ ID NO: 688856 - DNA, 393 bp, Homo sapiens
  misc_feature (232)..(232): n is a, c, g, or t
  misc_feature (248)..(248): n is a, c, g, or t
  misc_feature (251)..(251): n is a, c, g, or t
  misc_feature (266)..(266): n is a, c, g, or t
  misc_feature (347)..(347): n is a, c, g, or t
  misc_feature (377)..(377): n is a, c, g, or t
ctgtgaccatcaaatgcacggttatttttaaagacttcagctaaccattcgaagaatttaactttcgataataaggagcttaagccgataataccgccgtaccagattaaggtattccagccgcctttatttttaaccacgtcttcccaggtaacgatacccagcagcagcatggttgccataacaacgattgccacggtggattcatcaacccccagagacttactgaaantccagcccagcagcgncanacaaagacaccgagnagcattttttcgcggattttcatcggtcctagttcggcaaggcccgcttttagcgatggttttgttatccaacttgtttantttctggtgggatacatggtgtaaattcanccagcgggggtgacca

SEQ ID NO: 688857 - DNA, 123 bp, Homo sapiens
ttgatactggctgagtttaacaatttgtgccggttgctgtcctggtgggtagcagaagttaaactttcctgtggtatccttatgttcatatcctctgttgtccttgggtttccctagagacaa

SEQ ID NO: 688858 - DNA, 1102 bp, Homo sapiens
cagtcaaccaaggtgtctgtgaagtgtcagcgtgggatcaggcagcagagcattttttcccctttgccttgatccttcgcaaggctgagaccactgggctgtgagagggaatggggtctaacggcacatatccacaattacgttgtagggcagatgggtcccatgtctggcatcattcagtgcatgctggctcgggaacgaagaagaacctggtgcttgagaaaggaagccggtcccctgacggtttctctgtgttgcctcgtcctctgtccctccattttgtcatgttgagtcagatttgtgtgtattcatatgcccgcaagatttcatgaagtattcacacagagagataaaggtagctatttatgtcccccatgtgggtggaggcacacggacagcgtgtgacgatgagttgctaagtgaaatgaagtccccttcgggataggtgacctgggccgtgatgttaaatatctccgggctcccagaagtgactggatttgccatacggaccgttcatgatcaatccacgactgttcacgacccttcaagaccttgcccctgggcgccaggctgcgatagacacgtgagggcctgtactaggaacgtgatagattcgtgaggttcgtaggggggcttataggccgctttgacgccaccatcttctcaatgcataccgctcgatcaccaatctgcaacattctgggacctacagttaaccatttttccagtgtcaagtttcgtgggatttgtttgcgcgcattgactgtgagctgccaattgggacgccattactgtgggtataccaactgcgacacttgcctaaccttattcacggttgacctcaaaagcagaagttctcccaagatctacatggtcctccatgaggtaagcttagtggactgacgatgggtgcttcccgacccatcggccccgtgggtaaagtcccggtggtagtttatacgacggttacgaagaactgcggggttttccccccattggtttgggcccaggggctgggattcttctaaacttccttgggcctccacgggtgttgaatccggccccggccttccgggtcgtccccaaagcgcttgagaatttc

SEQ ID NO: 688859 - DNA, 186 bp, Homo sapiens
tcagcaagctgttagcaaagcacttgcacgagaacaggctatgaacgaaaataacagagttcttaactaaaccctataagcattctatatgtatcaaggctaactttagccaacacagggcagcagctaggtaggcaaacgagtatagctatatataatactaaagctactaacgactagccctat

SEQ ID NO: 688860 - DNA, 342 bp, Homo sapiens
  misc_feature (2)..(2): n is a, c, g, or t
  misc_feature (137)..(137): n is a, c, g, or t
  misc_feature (176)..(176): n is a, c, g, or t
  misc_feature (186)..(186): n is a, c, g, or t
  misc_feature (188)..(188): n is a, c, g, or t
  misc_feature (194)..(195): n is a, c, g, or t
  misc_feature (197)..(197): n is a, c, g, or t
  misc_feature (204)..(204): n is a, c, g, or t
  misc_feature (207)..(207): n is a, c, g, or t
  misc_feature (211)..(211): n is a, c, g, or t
  misc_feature (245)..(245): n is a, c, g, or t
  misc_feature (256)..(256): n is a, c, g, or t
  misc_feature (260)..(260): n is a, c, g, or t
  misc_feature (342)..(342): n is a, c, g, or t
tnatcgttgtgtaaacaatagaatggaatgaaattacatgtgagaattgtattcaaatggctctagaacaccttaacaattatgacaaagcaattataaataactttttttccttagtaatatatattttctttttnaagtacattaaatatctgccatatctagggttagctagnaaagaccaancntaccanncngggagcncanctcnttgaaagattagactccaattttcaaaaatcctnaggtttactantttnataatatacagtcaagcagagggctaacttgggttgaaaagtattgattcttgaaacacattaaacaagcgttttacacttn

SEQ ID NO: 688861 - DNA, 256 bp, Homo sapiens
gaggaggtatgatcgagcgaggagcgggactctgagctggactcgagggtgaccgcttatagtggtcataggtggtgcttgtttgacgggcatagctgggtgggctgatcttgcgacccctcagccgcttctccctgaaactctctccgactggctgtcgagacgcggcgtccctgagtacatgtgccttctcctacctcaatgagccttgtgcatgccttgattggcctacttcctacctcgctctgatcttact

SEQ ID NO: 688862 - DNA, 237 bp, Homo sapiens
gtcactcgtgtaggatccctggttcaagggctatggttttgtacactttgagacgcaggaagcagctgaaagagctattgaaaaaatgaatgggatgctccttaaatgatcgcaacagtattttgttggggacgatttaacgtctccgtaaagaacgaggaagctgaactttggagctaggggcgaaaagaattcaccaaatgtgttacattcaacgaaattttggagaacgacact

SEQ ID NO: 688863 - DNA, 627 bp, Homo sapiens
gctgggtacctagaggatcctgaatcgaggtttctctgggcatttagtgactcggctggcttgcctcctccatatcagtgaggaagtgcagcgggaaggtttgtcatctgcagtgagtagaaagatgaccaaacacgattcgggccacaggtggattctggcacatttttagattggattggttaaaaatgtcatgttgtacacaagatgcaggcaaaggagtttttttttgagggacataatgcctataggcagcatgaacggtccgatctacccttggggaggagctccctgtgtagggacggagaaactagggggcctcgaggaaggtgttggttcggaagatggaggagacaatctttccggtgccattgatggtgccttcgctgtctgagctggactcggagtcgctgctcccagagtaggcactcaggcctgggaggatgccgatacatactgcagcagaggggcagtggatggaggggccactcagggaggtgttccggagagacttgcaggatgagggctcttgattcttgtcatctggctcagtgtccggtttcagtcttttcacactgatgccactctctgagctcttatgcttcacactccttgccaacagttcgc

SEQ ID NO: 688864 - DNA, 449 bp, Homo sapiens
  misc_feature (15)..(15): n is a, c, g, or t
  misc_feature (76)..(76): n is a, c, g, or t
  misc_feature (185)..(185): n is a, c, g, or t
  misc_feature (441)..(441): n is a, c, g, or t
aatctcccaaaatcnaccttcctctgtaggcctcctgaatcctgtgtgccttgtgggatccatggatcaggggccnacttcctgtgaccatgaaaaggccttatgatctgaccccatcgagcccagcctacccaagcaccctgcagagaagcctgctcaagaggtatggtcctgccgggcgcggntgtcacgcctgtaatcccaacactttgggaagccgaggcgggtggatcatgaggtcaggagatcgagaccatccctggctaacatggtgaaaccccgtctctactaaaaatacaaaaaaattagccgggcgtggcagcaggcgcctgtagtcccagctactcaggaggctgaggccagagaatggtgtgaacccgggaggcagagcttgcagtgagccaagatcatgccactgttctccagcctgggcgacagagncaagctgc

SEQ ID NO: 688865 - DNA, 150 bp, Homo sapiens
ttctcactgcggctggcgtgtggtactgcgggaacgctgtcgtttccattgagcctgactgatagggtgaggtcgtagattctccaagaagaactgaggttgtggcgcgagcaggtaggactattgttcccgtggcatcccccgagactt

SEQ ID NO: 688866 - DNA, 617 bp, Homo sapiens
cggaatcaagattgcagcaacaatagaagctaggagagagacgtgaatggattctccctcagagcctcaggaggctcaaccctgccagcaccttgatttcagacatccagactccagaactgtaagggaatacatctctgtcattttaaggcacctactttgtggtattttattacagcagccctgggaaactaatacaagttctattttatgaaagaggagatgaaagttccaaagaggtgacatggctctcctaaggtcacctggcaaaacgtcggcatccctgaacccatgtcagagaatatgcttcccccactcagcacctgtgaagggtcaagtgcactattagaaactcagcttgcaaatgacttagtcatgccctacagggacccatagtccacggatgagacaggcagaaaattgagcaaagagaatgagatgctgacaccaaggtactaggaaaggtccgtgggagtatagactgagggagcattctgatttgtgcagggtcaagaatttgacaaggcaggtgaaagaatggctggatgtggagcagcagatgtaaggagggacagttcctgtaagacttgggaaagagtcagacacgtgtactgttt

SEQ ID NO: 688867 - DNA, 276 bp, Homo sapiens
tttaaagcatttcataattcaatatgagcattttgtacaatgaccattacactttacacacatcaacaaaatcatactacaaaaatgctggatctgatttacaacactaattatggtttgaaatcacgcttacatcagtctcaaatttacaaaacctctcgtcggttctgggctagctgttgtactgctgaagttctctgatgtaatcattctcacccatgtcatatccccttccttaaagttgaggatggatgttaaaagtttcaacaaagttga

SEQ ID NO: 688868 - DNA, 204 bp, Homo sapiens
gcctctccccaagaggaactgaatcagcatgaaaatgcagtttcttcatctcaccatcctgtattcttcaaccagtgatcccccacctcggtcactccaactcccttaaaatacctagacctaaacggctcagacaggcagatttgaggtttccccctgtctccttattcggcagccttatgattaaacttccttctatgctgc

SEQ ID NO: 688869 - DNA, 262 bp, Homo sapiens
ttgctgttacggtgagctcaagtgttacaagtatccacttaaaatgctgtgtttaaaacgctctgtgatgctaattgtctctgagctattcgtctctccagtaaattgtgtatcacagtaaaaagtgatctctcgtggttcttgcatagttttcattgtgtttagtgcaatacctaagtcctccgtaacaccatagcacctatacagagttacactaggatgctggaagtgctcccaagaagcagagaaaagtcatgacatg

SEQ ID NO: 688870 - DNA, 379 bp, Homo sapiens
gtcggcgacttcatctcaaaaagaaaaaaaaagtacatcgatgatcacggatcacagatcttcatgacagataacaattttaaaagtttaaggctgggcgcgggggttcacactagtaatctcagcacttggggaggccgaggcaggtggatcactggaggccaggagcgtgagaccagccaggagttggagaccattcagcctcggtaagaggctgaatggaggtccttagatgtaatcacttcacaaagtgctctacagtttagattccgactctgcaggaaccgtgactgaagggatcgggtcggggggatggtattcatccggtggtatctcgggaccagctcatcctgggagggcatcctgtgctgtccttttc

SEQ ID NO: 688871 - DNA, 474 bp, Homo sapiens
gacctcagagggtgctcatcttcgattccgtctgccatataaatgcccgacttcaacgcagcagccatgtccaccacaccatctttatctaaagatggtgtgggcacccaggcaaattccgccttcaaattaccttccttaagcgagaaagacatttcgccattttcaatacgctcagccacattcagcaggatttgaccagcctccggcccttcgttgccgttttcaactgcaccgtttgaaatgccttcaatcaccaagcgtaagccaccttcaggaactggatcagatggtttttcgattgagtacttaaacgaacccaccgcattaccattgacatcgcggagacggagactgtagtccttcaagaagtcatcggctgcgatgtcgctcgcctgttctttcaaaatacggctaacttcgagcttgcgaccaacatccgcaaaagccgcattgtcagtattgtcaatggtc

SEQ ID NO: 688872 - DNA, 898 bp, Homo sapiens
  misc_feature (406)..(406): n is a, c, g, or t
  misc_feature (418)..(419): n is a, c, g, or t
  misc_feature (437)..(437): n is a, c, g, or t
  misc_feature (439)..(439): n is a, c, g, or t
  misc_feature (446)..(446): n is a, c, g, or t
  misc_feature (455)..(455): n is a, c, g, or t
ggggcgggccggtgcgtcccctttccggccggtccccatggaggcgctggggaagctgaagcagttcgatgcctaccccaagactttggaggacttccgggtcaagacctgcgggggcgccaccgtgaccattgtcagtggccttctcatgctgctactgttcctgtccgagctgcagtattacctcaccacggaggtgcatcctgagctctacgtgggacaagtcgcggggagataaactgaagatcaacatcgatgtactttttccgcacatgccttgtgcctatctgagtattgatgccatggatgtggccggagaacagcagctggatgtggaacacaacctgttcaagcaacgactagataaaggatggcatccccgtgagctcatgaggctgagcgcgcnatgagctgtggnnaagtcgaggtgacggtgntntgacccntgactcccntggaccctgatcgcttgtgatagctgctatgggtgctgagtgcagaaagatatcaagtgctgtaacacctgtgaagatgtgcgggaggcatatcgccgtagaggctggcgccttcacatgaaccacagattactattgactcagtgccgagcgcactagggcttcagccagaatgatgcagtgagcagcaatgaatgcacacgctgccagggtgtatggctttcttgcgaagttctctactggtggccgtgacacgttccacgttttggccccttgggtaaagaggcttccagggaagtcccaatgttgcacggttccagtgacctttccagaaagcgtatagagcccttggacaaccattccaacgattggacccactacaattcaaggcaccttgtcactatgggggaaggacgtatccagggctttagtgaacccccatg

SEQ ID NO: 688873 - DNA, 400 bp, Homo sapiens
ggtgttgcacggagttgcagtcggctgagatggcactgctgtactccagtctgggtgacagagtgagactctgtttcaaacaaaaaaacaaaacaaaacacaaacagtgcttctcaaatattggcagcatcagaaacatctgaagctggctaagttcagattccagagactagttttgtgggtctgggctgggcccgagattgctgctgctggtttgccgactgtactcggaggagtcatccttttatatttatttatttattttgaataaataaataaagcacttactgagtgcttaatgagccaccacgcctagcctgagtagccaccctttgcagaaatgtcctggaccattttaatgattccctttccaagaacccacttaaatagaggtctgctg

SEQ ID NO: 688874 - DNA, 901 bp, Homo sapiens
  misc_feature (406)..(406): n is a, c, g, or t
ggggcgggccggtgcgtcccctttccggccggtccccatggaggcgctggggaagctgaagcagttcgatgcctaccccaagactttggaggacttccgggtcaagacctgcgggggcgccaccgtgaccattgtcagtggccttctcatgctgctactgttcctgtccgagctgcagtattacctcaccacggaggtgcatcctgagctctacgtgggacaagtcgcggggagataaactgaagatcaacatcgatgtactttttccgcacatgccttgtgcctatctgagtattgatgccatggatgtggccggagaacagcagctggatgtggaacacaacctgttcaagcaacgactagataaaggatggcatccccgtgagctcatgaggctgagcgcgcnatgagcttgggcaacagtccgcatggtgacgcgtgtttgaccctgatctccctggaccctgatcgcttgtgatagctgctatgggtgctgagtgcagaaagatatcaagtgctgtaacacctgtgaagatgtgcgggaggcatatcgccgtagaggctggcgccttcacatgaaccacagattactattgactcagtgccgagcgcactagggcttcagccagaatgatgcagtgagcagcaatgaatgcacacgctgccagggtgtatggctttcttgcgaagttctctactggtggccgtgacacgttccacgttttggccccttgggtaaagaggcttccagggaagtcccaatgttgcacggttccagtgacctttccagaaagcgtatagagcccttggacaaccattccaacgattggacccactacaattcaaggcaccttgtcactatgggggaaggacgtatccagggctttagtgaacccccatg

SEQ ID NO: 688875 - DNA, 946 bp, Homo sapiens
  misc_feature (406)..(406): n is a, c, g, or t
  misc_feature (486)..(486): n is a, c, g, or t
  misc_feature (499)..(499): n is a, c, g, or t
  misc_feature (505)..(505): n is a, c, g, or t
  misc_feature (507)..(508): n is a, c, g, or t
ggggcgggccggtgcgtcccctttccggccggtccccatggaggcgctggggaagctgaagcagttcgatgcctaccccaagactttggaggacttccgggtcaagacctgcgggggcgccaccgtgaccattgtcagtggccttctcatgctgctactgttcctgtccgagctgcagtattacctcaccacggaggtgcatcctgagctctacgtgggacaagtcgcggggagataaactgaagatcaacatcgatgtactttttccgcacatgccttgtgcctatctgagtattgatgccatggatgtggccggagaacagcagctggatgtggaacacaacctgttcaagcaacgactagataaaggatggcatccccgtgagctcatgaggctgagcgcgcnatgagcccttgcgcgaacaaaaggcttccggaaggggggctgggaaccggggtgggtttttggaacccccctttgggggnaaacctccccccnttggancnncctgatcgcttgtgatagctgctatgggtgctgagtgcagaaagatatcaagtgctgtaacacctgtgaagatgtgcgggaggcatatcgccgtagaggctggcgccttcacatgaaccacagattactattgactcagtgccgagcgcactagggcttcagccagaatgatgcagtgagcagcaatgaatgcacacgctgccagggtgtatggctttcttgcgaagttctctactggtggccgtgacacgttccacgttttggccccttgggtaaagaggcttccagggaagtcccaatgttgcacggttccagtgacctttccagaaagcgtatagagcccttggacaaccattccaacgattggacccactacaattcaaggcaccttgtcactatgggggaaggacgtatccagggctttagtgaacccccatg

SEQ ID NO: 688876 - DNA, 414 bp, Homo sapiens
aaggtctaggatgataataggtggcaagtggagacactcaatgctgtgatgagtgcctcactagtggaatggagtgagtaagctttctgacctctataaactgaaggctatcttcagtcattgtttcatatattttacgtgcattaatcttcatataaacccaagaggtaaataagtataattatccttcattgttggtgactcatgttgcgacacagaagaatctgtaaactcttccagcatcaaccagtaaaaggcagaccttggatttcaaccaggcaacatggctcagatatcagttttaattactacactctactgtcaaagatttgtaaacactttgacaatgcatgccaatttcaagctatgaagaaacaaacacaatttttcacaacatctctcaaatctaatggg

SEQ ID NO: 688877 - DNA, 233 bp, Homo sapiens
aaatacagccaggtccagccaagtggtctggacagaacaaggctccggtgaagacctggaggcgacgtgaaagaagaagttcgggccacatagagggctgcgtcaccagtgtgctggggccttcgtggtccgagggccagcaccacccaagaccacacctggccgccgtggccgccccgtgggtgtgtccaacgaaagtaattaaggtcgtgtaggccttgtctggttataat

SEQ ID NO: 688878 - DNA, 204 bp, Homo sapiens
accttaagaggttccaccgctatttgatgcatcttttcctacccacatcttcatctcttaacgcatttgctaagctcctttcgaagttttctagatcttcagttcttacaagtagttagtattaacacgaaagcatttagaagggcttctagtatttacgcacacggtccaacacttagtctgatcatagagctagccgtgact

SEQ ID NO: 688879 - DNA, 160 bp, Homo sapiens
gggtcaagatacagcagcaagtgtcagtgactcaagacaccaccccctccaactactggggcccatgagcctctccctgactacaggaggtggagagtattgatcaacagggtaagagtaggttggttttagagtacttagatacaccctacactacagt

SEQ ID NO: 688880 - DNA, 359 bp, Homo sapiens
gattgttcatacgccttgtttgtgcgcgacaatacacagccctttaggtttcaccatgcctgggcaggttttcaagttataacgcggcccatcggcaaactccttgaacttaccgccgcctaccgagacgccgcccttcaggttcaggttaccgatcagcgcattgagcatcatcacagcccaactgttatagaaaccgttaccgctcatcatgccaccgtgagcaatcaccgacgcttgcagctggtaagacgtgaactctttggcaagtgcagcaatggtctcagcattgacaccacaccggctgccgtattcagtacacgtaaaacgctcagcagcctgttgcaggcaaaggaaac

SEQ ID NO: 688881 - DNA, 154 bp, Homo sapiens
ttcagtagcggagcatcagtaagcggtcagtaagcggagcggtcacgcctgctgggggtatgttgtgttgcgtgtgctgtgttcgtgtgtgctgtgttcgcgtgtgtgtgctgtgtgtgcatgtgtgtgctgtgtctgtgtgcgtgtacatgtg

SEQ ID NO: 688882 - DNA, 137 bp, Homo sapiens
ttcagtagcggagcatcagtaagcggtcagtaagcggagcggtcacgcctgctgggggtatgttgtgttgcgtgaaggaagaagaggaggcgaggaggtggcatagatctgccgcttactgatgctccgcttactga

SEQ ID NO: 688883 - DNA, 222 bp, Homo sapiens
ctgtgtctgttacaaagtttacaaccgaggccgggcgcagagacgtcaaaccggttatcccagcacttggggaagccgaggtgggaggatagcttgaactcaggagttcgagaccagcctgggcaacatagagaaacccagtctctactaaaaatagaaaaattagccaggtgtgatggtgcatgcctgtagtcccagctactagggagacaaagggaaaca

SEQ ID NO: 688884 - DNA, 558 bp, Homo sapiens
  misc_feature (6)..(6): n is a, c, g, or t
  misc_feature (98)..(98): n is a, c, g, or t
  misc_feature (105)..(105): n is a, c, g, or t
  misc_feature (139)..(139): n is a, c, g, or t
  misc_feature (336)..(336): n is a, c, g, or t
  misc_feature (485)..(485): n is a, c, g, or t
  misc_feature (501)..(501): n is a, c, g, or t
tggatncattgccccccgacgccttgaatgagccccaaacacaatttgtaaccttccctaaaacatgagattttttgtgtgtaattttttttttaaancctcatnagttatcgttagtgtattttatgtgtgccccccngacaattccttcccagcgtgcccccagagaagcccaaaagattgaataccccctgttatagaggaataagcagcaaacaaaaaatgaaatgggaagtccctctgaaactaatctgcttctgggacttccccaattaaaaaaaattaaaaagggctgggcacagtggctcacacctgtaatcccagcactttggaagnccgaggcaggtggatcacctgaggttaggagttcgagaccagccagaccaacatggaaaaaccccgtctctactagaaatataaaattagctggccgtggtgcgcatgcctgtaatcccagctactcaggaggctgaggcaggagaatnacttcaacccaggagnagaggctgcagtgagtcgagatttccattgcactccagcctgggcaacaagagtgaa

SEQ ID NO: 688885 - DNA, 515 bp, Homo sapiens
  misc_feature (55)..(55): n is a, c, g, or t
  misc_feature (176)..(176): n is a, c, g, or t
acatttttgaacaatttacctgtcaataaagcagaagacggcagttttaaagttnaaaaaaaaaaaaaaaaaaaaaaaaaaaaaaaaaaaaaaaaaaaaaaaaaaaaaaaaaaaaaaaaaaaaaaaaaaaaaaaaaaaaaaaaaaaaaaaaaaaaaaaaaaaaaaaaaaaaaaaancccccctccctgggccaaaatttaaaaaaaattttaatccccccccccccccgggggggggccccgccacaaaatccccaaaaaagggggggaaaaaaaaaaaagggggggggtttaaaaaaacggggggaagaaaaaaaccggggggaacccaaaaaaaaagttgtgaaaaaaaaacccttttttggaagggggaaaaaaaaaaaaaaggccccaaaaaaagcttttttaaaaaagggggcccccttagggggaaaagggaaaatggggcggaaaaattttttaaaaaaaccgggaaaattttttttaaaaaaacttttttttaaaaaaaaaggggcg

SEQ ID NO: 688886 - DNA, 164 bp, Homo sapiens
gtgacacagactccaagtattacaagggttctctgatcctacctgaatgtcacccgacaagggctactggcaggtccacctgagaccaggtggaggtggccagcagagctgaccctgatgcaaaaggaggagctagatgagagccattgtggacacgaggcact

SEQ ID NO: 688887 - DNA, 396 bp, Homo sapiens
ctccacagactaggagatcagagaattttaatgtatgttcaatatgatcactcttgatattcttatggaaaagatagggaaatgcaaggaagagaaataatggtaaatagttgagtgattttacccaaagatgacagggagctttacaaaaacatgccagagggttctgtcttgggccttgacctagccactgtttttgtcagtggccaggataaaacagacacagtggtcatcccctcaaatctaggcagacagaaaatatattgactgccaaaagtaccataacaagatctgaaaaagtgggtcaaaagatgactcttaatagggataaatgtaaggtttaagaaaacttatggaacaagtccaaaagaggaaagaactttcttagctatagaa

SEQ ID NO: 688888 - DNA, 745 bp, Homo sapiens
gctgatgagccatctttgcgattgtccctcgatccgcctccttgactcgccgtagccgcctccgccgcgcgcctcctccgctcggcgcggactccggcagctttactcgccgagtagtcccgtgacactctcggctctactttctaccaagtcccctgtcatcagtgcatcagcgtgcgttcacctaaacatggtctggacgcagctcgatatgacaccgagctccgaagatcaccaccaaggacttaaaggagaagtaaggaccagttgtggaagaaggcagacaaattgggaagtagacggcgcccttggttaagcgtagaatgcataactgcaacgtgcacaaagtgcgtgcgcagcacgcgtatgcgcctgacagatcgtagggtatgaacgcaacatacgaggacataaatggcgcgcgagacggacgtcatcgaatacgagaaataggacatgatgatccgtacaggacagcaaccagacatttacacaaagatacttgcaagagaaacatggaccatggaaacgcaagagaataagaaaacggaaagaaaacataggaaaaaaaaaaagagaaacagtgcacagccaagacaagatgacaagaaaagctaacgtaaacaaaagcacaaaaacccgaggtacaaaaagacaccaaagaacccgaagaatgacacaacgaaaacagacagacaagccgacacaaaaaaaaaaggcaccagccctagaagccaagacacca

SEQ ID NO: 688889 - DNA, 156 bp, Homo sapiens
agctctgccggatagcatctcggagcttctatgattcacctccaggcagcgctggagggtactcaggagcgccctgttctgaaggcaggtgcagcatgggtatgctttcccagaggagactcttcgcccagtacgtcctgatctgctgccgggcca

SEQ ID NO: 688890 - DNA, 469 bp, Homo sapiens
cacgagggagagtaagaaaatcaatcttggctgggcacggtggctcctgcctgtgatcctagcactttgggaggctgaagctgaaggatcacttgagctcaggagttggagaccaaccctggcaacataacaagaccctgtctctacaaaaaaaaaaaaaaaaaaaaaaaatttagccgtgtgtagcagtgagtgcctgtggtcccagctacttgggcctgaggctggaggattgcttgagcctaaaagttgcagtgagctatgatcatgccacactgtactccagcctggatgacagagtgaaaccctgcctctaaataaaagaaaatagaggcagactgtggtggctcacgcctgtaatcccagcactttggtaggccaaggcgggtggatcacctgcagtcaggagttcacaaccagcctgaccaacatggtgaaaccctgtctatactaaaaatacaaaacatta

SEQ ID NO: 688891 - DNA, 332 bp, Homo sapiens
agcggagctgttttgcggtgcctttccatcactacctttatactcatttgcctgcatatacattttcaaaagatcctgctctagtgcaggtgctgtggctcacacctgtaatcccagcactttgggaggcaaaggtgggaggattgtttgagcccaggagtttgagaccagcctgggcaacacagcaagacctcatctctaaaaaaattttttttaattagccaggcatggtggtgcatgcctatagtcttagctactctggagttagaggtgagagaacagcttgagcccaggagtttgaggccgcagttgagctatgaccacaccactgt

SEQ ID NO: 688892 - DNA, 896 bp, Homo sapiens
  misc_feature (252)..(252): n is a, c, g, or t
  misc_feature (281)..(281): n is a, c, g, or t
  misc_feature (305)..(305): n is a, c, g, or t
  misc_feature (309)..(309): n is a, c, g, or t
  misc_feature (346)..(346): n is a, c, g, or t
  misc_feature (365)..(366): n is a, c, g, or t
  misc_feature (370)..(370): n is a, c, g, or t
  misc_feature (372)..(372): n is a, c, g, or t
  misc_feature (377)..(377): n is a, c, g, or t
  misc_feature (389)..(389): n is a, c, g, or t
  misc_feature (400)..(401): n is a, c, g, or t
  misc_feature (413)..(413): n is a, c, g, or t
  misc_feature (422)..(423): n is a, c, g, or t
  misc_feature (425)..(425): n is a, c, g, or t
  misc_feature (431)..(431): n is a, c, g, or t
  misc_feature (434)..(434): n is a, c, g, or t
  misc_feature (441)..(442): n is a, c, g, or t
  misc_feature (444)..(445): n is a, c, g, or t
  misc_feature (455)..(455): n is a, c, g, or t
  misc_feature (460)..(461): n is a, c, g, or t
  misc_feature (469)..(469): n is a, c, g, or t
  misc_feature (481)..(481): n is a, c, g, or t
  misc_feature (484)..(484): n is a, c, g, or t
  misc_feature (522)..(523): n is a, c, g, or t
  misc_feature (527)..(527): n is a, c, g, or t
  misc_feature (549)..(550): n is a, c, g, or t
ctgacatttctggattttgctgttttataatttacccttgttattcagaggcatgcttacttatagaaactaaatggtctttataaaagtaattacttaaaaagaaatcaggggaagaaagatatctatctaatctattaaatctttataaaacattacatgcagagggggagctactcctaaatatttgtcatgattgcatggtttaatcagatttttttttttttatagcagccatattagctacctttncaatgggagaagagacagttcacacaatnccctggttagcacagatgtggacngagngcttggtcacctgcagggtagtaacccagtgatgttncttacagaagccaatatgnngaananctccnggggtgtgaccnatagtggatannaagaagaaggcngaagagagnncnattgancantttcacnntnngtatatccanttttnnaacatttngcttgacttttnaantttaggaagtccgtttttacctgagaacaatgtttaanntccngcgtcactctcagtactctcanngcccctcccaaacctataggtccttacgctggaaagctggttttctagaagactactcactaactttgcaatcttattaggtgtgcgtttaaaatgcgtaatgttgggcataatggtacagatacgcgaagacgtattgtttaagtgctgggcctttatagtattttttgttataagtttttaaacaacggtcatgggggttttcaaagggcggatgttgcaagaggctccacggggtatcgccacttggggcaagatggcgcgtttaaaaaatcggtttaatttgggaacaacgggcttttttgacatatatgcgtttttcattgtaaaaaacggcgctgcgatg

SEQ ID NO: 688893 - DNA, 515 bp, Homo sapiens
tgaattacatagcctagtgaggtcatagctgtggcaacgtcatagctcaatgcattactcacaggtttgcggtcatgctgatgtaaactaacctactgcgctgccaggcttataaacgtctagcacatacaattacatacagtgcataatatacttaataacaaatgactatatgactcctttgtgtatttactatactatacttttcattgtcattttagaatgtatttcttctacttacaaaataaaaaagttaactgtaaaatggccttaggcaggtccttcaggaggtattccagaagtcactgttatcacaggaggacagctccatgtgtgttattgcccctgaagacagtgggacaagatgtggaggtagaagacagtgatactggtgatcctgaccctaacgtgtgtaatgtgtgtgttcgtgtcttcattctaagaaaacgttttgtacagatgtacagtgtgtttgagtttaagctaagtgttatttcaagagtcaaaaagttaaa

SEQ ID NO: 688894 - DNA, 318 bp, Homo sapiens
ggaagtcccttgccttcttaaaagcccccccctttttttttaaggggaagggcccggtcttttcccaagtccccccagggggggggatagcattgttttggggtaaattatgaaaggcaaaatttttttaattttcccccaaaaacttttttattttgttttattttgaagaaggagccttggggcccccccttcccccttttttgtcccccaacttgaaaggtatgaggggttttggtttccctgggggggggggggggaagccggggtttacttgtacattgatttgagaccggttgaataaaagggcccccctta

SEQ ID NO: 688895 - DNA, 936 bp, Homo sapiens
  misc_feature (3)..(3): n is a, c, g, or t
  misc_feature (189)..(189): n is a, c, g, or t
  misc_feature (192)..(192): n is a, c, g, or t
  misc_feature (205)..(205): n is a, c, g, or t
  misc_feature (280)..(281): n is a, c, g, or t
  misc_feature (284)..(284): n is a, c, g, or t
  misc_feature (286)..(286): n is a, c, g, or t
  misc_feature (297)..(298): n is a, c, g, or t
  misc_feature (301)..(301): n is a, c, g, or t
  misc_feature (309)..(309): n is a, c, g, or t
  misc_feature (313)..(314): n is a, c, g, or t
  misc_feature (345)..(345): n is a, c, g, or t
  misc_feature (365)..(365): n is a, c, g, or t
  misc_feature (403)..(403): n is a, c, g, or t
  misc_feature (457)..(457): n is a, c, g, or t
  misc_feature (510)..(510): n is a, c, g, or t
  misc_feature (522)..(522): n is a, c, g, or t
  misc_feature (532)..(532): n is a, c, g, or t
  misc_feature (542)..(542): n is a, c, g, or t
  misc_feature (546)..(546): n is a, c, g, or t
  misc_feature (549)..(550): n is a, c, g, or t
  misc_feature (552)..(552): n is a, c, g, or t
  misc_feature (558)..(558): n is a, c, g, or t
  misc_feature (562)..(562): n is a, c, g, or t
  misc_feature (572)..(573): n is a, c, g, or t
  misc_feature (582)..(582): n is a, c, g, or t
  misc_feature (588)..(588): n is a, c, g, or t
  misc_feature (634)..(634): n is a, c, g, or t
  misc_feature (638)..(638): n is a, c, g, or t
  misc_feature (643)..(643): n is a, c, g, or t
  misc_feature (700)..(701): n is a, c, g, or t
  misc_feature (705)..(705): n is a, c, g, or t
  misc_feature (754)..(754): n is a, c, g, or t
  misc_feature (811)..(811): n is a, c, g, or t
  misc_feature (830)..(830): n is a, c, g, or t
  misc_feature (836)..(836): n is a, c, g, or t
  misc_feature (840)..(840): n is a, c, g, or t
  misc_feature (846)..(848): n is a, c, g, or t
  misc_feature (854)..(854): n is a, c, g, or t
  misc_feature (861)..(861): n is a, c, g, or t
  misc_feature (870)..(870): n is a, c, g, or t
  misc_feature (887)..(887): n is a, c, g, or t
acnagatggcattgtttggggttgggaaggtggacgatgaaatgttgagtatcacgcctcttacatttgaggtatcaatcattattggctagaaagtcttatttagtgagatggtaatggttgtagatgtcagtgatttgttccaggggacaatgagtaaactgagaagagcaaaaatctacaaatggngcnatgaaggtcagcnttccatgaagaagcagaaattgatgagagaggaagacaagagtagtcagagaagttaagacctggcagctaagtnnggngngggcgtgggcnnctntgatgganaggnnataaagcaaagattgagaagtatgcactggnggccattgtttctggttgtnagggtggggaagagtaaacggtgacagttggggtctcnttgcagtggattggggcatgaatatcaagtgaaatagtgcacagagtctgtttncaaccctttggccccgcctgattgacaagagaaagatgagatgcggcgggggnggcattcaaaanatgctagttnccgcctcttnttgnggnntntcaggncggngttgggcganntgagtatgntggcgnatggtagggttgggagtaaagtaaagataaaagaatttaagggttngggnggtgngatgtatgaagaagtaaatagttgggggttaagaagggattaaaaaagggaaggatnngggnatggaatgaaagattaagggaagggggaaagaaatatataatgattggnaagggtaaggggttgggttgggtattaagaaaagatggggagttgggtgttaaaaanaatgtttaaggataaaagnaagggnaagngaaggnnnaatggnaatattnatattaatnaagcaagggataatggnggaaaggggttaataaaagggtaagaaaaatgatgatggttggaattgg

SEQ ID NO: 688896 - DNA, 585 bp, Homo sapiens
gtgcgcctcgtttcgctcttcatcggcacccatgtgtgacgaacccgatatggctgagatcgagaattcggataagtcgcagctagaagaagacataaacgcaagagaaataatccgctgccttccaaagaaacgattgcacagtcgaagcgagcaggctaatcgtaatgaggcgtgcgccgccaatatgcactgtacattccacaagcattgccttgtcattttacttctattagctgtttaactttgtaagatgcaaagaggttggatccagtttaaatgattgtgctgcccctttcacatcaaagaacttctgacaacataggccgcgcccgcctttcccatcatgtctatctcatgtggctggcagggaaggaaaggacttgcatgttggtgaaggaataagtcgggtgtaacaagtggggtggggcgacagtgaaatctagagtaaaaccaagctggcccaaggtgtcctgcaggctgtaatgcagtttaatcagagtgccatttttttttttgttcaaatgattttaataattggaaagcacagtttttttcatatgcgcatttaaagtttaaaaactt

SEQ ID NO: 688897 - DNA, 440 bp, Homo sapiens
aatccctggcggctcaacgcatgttttatgggcgttgcgggatcgcgcgtgcgcctccagacgggagctggcgtgtcgggggttgcagcatcagctctagccttcggtggacaagcctctctcagctacgccacgcgaatacagagttctggtcactcacccccacccatgctaacacacaaggcagcgtcgggtgggagagagaaggccgtttctccttctgtagcctgggtctcccacgggccttccccgctgctgagcgagacaccagtagccaggtgaagggccacagcgggccaggccccgaccctgttgtgacccacctgggcaccttcccggaccagctccgcctcccctgccctcctctctccaggaaggagccagaaccctcacccctctcccaccctccccaggggtaaccccaggccaagcacagatag

SEQ ID NO: 688898 - DNA, 120 bp, Homo sapiens
atccggcggatgatggctgtgatgaacaaggtgctggctgtgaaagatggatggctgtggaatttcttaaaataagaaaacaataaggccggggctgtggtcacgcctgtaatcctaaca

SEQ ID NO: 688899 - DNA, 191 bp, Homo sapiens
gtgaggagtcactggtttaactgccgaatgtaccacatagttaaagaagaattaatactaatcctactcaaattattccaagaatggacgaggagagattacattccaagattccttctacaagaccagtaaaccaaagacacatccaaaaaaaaaaacggggaaaaagaaaagaaaattacggggccatt

SEQ ID NO: 688900 - DNA, 867 bp, Homo sapiens
  misc_feature (254)..(254): n is a, c, g, or t
gcagacatcaggtaagccaagatgggtgcatacaagtacatccaggtaactatggagaaagaatcagttctgatgtcatgcgctttcttctgagagtccgctgctggcagttaccgcccactgtctctgcgtctccagcatgggctccccgtccccagcccgtgtctgatcaatgcgcgccgtatctggcttctacacatggcccacagtcgacgcgttcacgttactattattacggagttcgctgcttcgcncgtggttggccgataaacgtcaccagttcctcaagggttgcatactttatcgcgtacacgtcctgttccattcgatagcgtagttgaaacaggctcacaaagtcttgctctggatagtcctttcaggatccgtttgcgagcatggcaccgcgacctggcatcgcctagctgtggggcctctgaggagtctctgtaattgctatacttgggttgggtagcaagattgccagcgatacataattctcagggagtgttcatttcctcaattgatctcattcacagtaacagctgaatcaggagacgaaatactccttgtacaaccccaagttggcatcatccataaactcaagtccgactagtctacagtggaagattgcgtgcgcgcatggacactactgcaggttccgaaaagacgccgtgagccttggtaatagcgggcagtaagttcgcagccacgactagttgcatggtctctcgccgaaggcacgcatcggatgaacggcgcaatattctccagtcttcaaccgttcaccgctgaattatacatgtaaaagttgtgtagcacattccatactttaatacacaccagagtttagtgacagtcccatgtctg

SEQ ID NO: 688901 - DNA, 129 bp, Homo sapiens
ggcgctgggataggagacacggaatgtgaaggcccagtcacatgactgaccgatgtggacctggggaccctgtcgcggctactacaaccagagcgaggccggttctcacaccatgagccccccaatgag

SEQ ID NO: 688902 - DNA, 708 bp, Homo sapiens
caggagctgctgttggcctccggcactgggaagaccctttggcccggcttgctcatcatacggcggtgaccttattccgtctctggctttgaactggtccgagattcataggggaagggccagaatggtgagggagctttttctcctggcaccggggacctgctcccatctatcatcttcatggacgaatcgactccatcggctcctccaggcttgaggggggttcttgaggggaccgtgaagtgccgcgcccgatgctggagttgctccacccgctcgacggctttgaggccccccaggacctccaggttatcctggctactaataggattgatatcctggactcggccctgcttcgccccgggcgccttgaccgaaaattgattcccacccccccatgaggaggccccgctggaccattttgaagattcattctcggaagatgaacctgacccgggggatccacctgagaaaaattgctgagctcatgcccggagcatccggggctgaagtgaagggcgtgtgcaccgaagctggcatgtatgcctgcgagaaccggcgagtccaagtcactcaggaggactttgagatggccgtacccaggtcatagccgaaggaccgtgagaaaaacatgtccctccagaaattatggaagtgagtggaccaacccttgtgtgtatctctcccataaagctctgtgggcccaga

SEQ ID NO: 688903 - DNA, 158 bp, Homo sapiens
agcactcttgtagtaaaccagtttaactgggcctcatctccaccttgtatttcacgtccagcagcaattcgtgcttgctgagtgccggacacacgctacgtctgtgtccccatcttctgtgcctatatctcatgctaacttacattgtgagtccagct

SEQ ID NO: 688904 - DNA, 387 bp, Homo sapiens
  misc_feature (47)..(47): n is a, c, g, or t
  misc_feature (69)..(69): n is a, c, g, or t
gcccttgaggctgaaggtcaagaaccagtggcaggaggctttcgggngtgctgacgacaggacatcccncggtaccgcattgtggagatccatcatcatgcagaagcccgagtctgtggacaagttcttcaagcgtgtcaatggcaaggacatcagctccccagccttccaggctcacatccagcgtgtgttcggtggctttgacatgtgcatctccatgcttgatgacagtgatgtgctcgcctctcagctggctcacctccacgcccagcacgtcgagagaggaatctctgccgagtacttcgatgtgtttgccgagagtctgatgctggctgttgagtctaccattgagagctgctttgacaaagatgcctggagtcaatgtac

SEQ ID NO: 688905 - DNA, 1311 bp, Homo sapiens
tgtgttatgaaattcacttagaaataaatgattctattaaaatataaaaacatccattaagcttgtcctatttccagtgactttagaatatcaaatctattattcgaaggacaataatgatttgatgtttagaagatcagcgtggtaaagtagcgacatagttatgttgggactgtgttctatatatattaaagtaggaagtgctattatatttactatgtgttaatgaagattgcactgtagttgatacattggtcaagatagttgccattataacaatcaaggtatggcttcagtgtactaattaggatatctggactattaatattcgtgatttggaggattaatcctatcgcgtttttctgtgggacagaagataaaagtagttgaattacttaatgctgcatgttggcttgcccgtgcccaatccaacatgtactcgtaggctggttgggcaatcagacgagctcgtaagtcatgaagccaatggagtaatatgactaaggttatcgaagagcatgtcctactgcacagtaatgtgaaggtaaatctgtcatgattagggaatctatagatattttagtaaggttgaggatggtggataagtcatgactttaaacgtatggtgagagaaagaactgattgagacgtaagagatatggcatcaatgtacatgcagggatctttctgagaggatctcgagaaaacaggaccatcgaagtaatatatggatatttatactcaccattcataggaggatgtttggatgtaagtatcgagtttataagatgtgaaataaaatcatgttagtgaaaatttatttggtgcttgttggccgttttggatttgagaatgaaagtattgaataaaaggtgaggttcgggtccatatcagatttcgcttccaagggatgacccgcatcagctaaaagagactggtaccccgaggttttttgtgataaaagaaccgcggagtcctaaaagacgtgtgagcttcagtaattttaaaaattcattatgacaattgcacggggagttgttgagacaggttggtattcagaagttggtgaaagagacacaggtaaattctcagaggacaactttgtggtgaatggagggcctatttgcctgaggggagaggaaaataaatgggggggagacggtaactaaaagagaatcttaaagggggaaagggggataatatagaatcacaaaagtgttttaacgaggttagggtcagatagaagatgtgttgataagtagacaaagtatgcgacagggggtatttaaatggggagcatcttgtacacgc

SEQ ID NO: 688906 - DNA, 131 bp, Homo sapiens
  misc_feature (55)..(56): n is a, c, g, or t
ggcaatacatactggagagaaaccgttacaaatgtcatgaatgcggcaaggtttnntggcacaatgcatacgtagcaactcatcggcgaacttgatactggaggagacaccttacaagtgtaatgagtcgt

SEQ ID NO: 688907 - DNA, 266 bp, Homo sapiens
  misc_feature (5)..(5): n is a, c, g, or t
  misc_feature (117)..(117): n is a, c, g, or t
cctanaggcaggcactgacaccagagaggattgccaagtcagacccattttctagagcagagggaagccacggtggtgacagttacatgggaaaagacgtggtcttgtgggatcttnttagaaacggtgaactttgggccggggtgttggtgggctcaacgcctggtaacccttccaacaaattttggggagtggcaagggcagggaaggggacttggctttggggccccaaaggaagtttccaaaaaacccaaggcccttggggc

SEQ ID NO: 688908 - DNA, 269 bp, Homo sapiens
ctcattcctcatctgctaaagaagtggctccaacagtgaactggtacagagcagccgcagtgaggtgacggagctccggagggtgctccaggtcctggagattgagctgcagtcccagctcagcatgaaatgcatccccgtgagaacagcctggatggagaccaaagtgccgctactgcgatgcatgctgtcccagaatccatgggactgtattggcacgtgtggatggagcatgctggcccacgctactggggtacctgagctctgaa

SEQ ID NO: 688909 - DNA, 596 bp, Homo sapiens
  misc_feature (1)..(1): n is a, c, g, or t
  misc_feature (513)..(513): n is a, c, g, or t
  misc_feature (559)..(559): n is a, c, g, or t
  misc_feature (568)..(568): n is a, c, g, or t
  misc_feature (595)..(595): n is a, c, g, or t
ngaaatgatttttaagacctttttttgcactgaatcaacattttgttgtcacaaacctgattagatttctaaaaagtatcatactgtcccttgctcaagttaagtacaaaattgcctaggaaattttttctaaacccaatgccatgttccattctttaccctgccgtttcccagcccgaggattggagtgagtggaaagtatgttcctgttttttcaaaacggtgctcgggacacatttgtgaccacaccagcttccatctcactgccacttctgctcttccggttctgagcagccgtcttagaggtcaactcttggagcagtctgttgatgaggtgagagccgcctgctcaggggagataaaggtagaggtctccaggctcttctctgggggcaggactctcaccccggcagctgcggctttgattgaaaaggtatgtggccctctggagctgacttcaaccaaatggcattggtctttgaaaaaatgtactttaggcacagcccctgtggnacggtggtttactttaagggattttacccccttgctttaagaaagngaggaaatntgactacaggatgggacttgccccccna

SEQ ID NO: 688910 - DNA, 270 bp, Homo sapiens
attcgcggccgcgtcgacggggttctgcttattacaatgaatgttctcctgggcagcgttgagatctttggcaccttcgcgactttatgcaatgcatcatgctattccatacctaatgagggagtttcaggagattcaaccaggatgtttttacacctgtgggttatgacaaagactactgcccaataatcttcacgaggggggactgcaagtgtatcatggcggagaagaaggacccaaaaaaaaccttccctggcggtgaatggatca

SEQ ID NO: 688911 - DNA, 306 bp, Homo sapiens
cgcgcgtccaggcctgaccagctctgctgtcgggccctgacggtttattcagacaaaccatgtccactgcaattagggaggtaggagtttggcgaccagaccagaacacttctactgaagaattaccttaattaaatgcagaaccaaaaagagtagtgttcaggaaacttctttttccactcttttttttttactttgggcttaatacttacattacgcatgatgcatccacaactaccgaccactactgaccgacacgtgcctaaatactagacacctcaaatcctacgtggacaacgtttacct

SEQ ID NO: 688912 - DNA, 1265 bp, Homo sapiens
ccgatgaggaggcgcggggtggaacccggccccgggcccctaagagcgatctgagtggagcgatcgtgcgtcacgggcccggtggagtcatggtctccactcacccaatcatccagtgcttcgacgttcgctgcatctctgtttcacgatgctcccacatgcatcaggacatgtcataggctcttgcatgccatgatcgccttcctagatacatgctcgctgcatggtttgagggcccatgcgaaaatggtgcgggaccagggctgcttgtaaggagagtctcatgtgcaggatccatggtagcagaggacctagttaagccggtcgtttcattggcaaccaggggctgaagcagggccgctggagggagcttgggctgcacggcatgggctggggcctacgcatatccctaggcaaaggagcgcgccccagccacttacttcgtggagcctgctatcgatctgatctggcgcacacgtctcattggtgggatcgtcggcgtccaacgaacctctcgcttccatgttgagcaaggccaggggatcaacacactgtcgagagaacctttgaatgctccaagtaattcacttcagtccggaagaggtggccccacccttccgttctgaacgaatatacagcacgccagttccaaggatgatggtcatggcgacctttggacttgggtgcctttaagttgggcgtgaacacaatgcgtgaatgaggtccctcatggaatgttgaggccaccttgtggaagcaagggaagacgaacagggattcgcgaccatctccattcccggaaaggcccaaccgatacgcaccctttttgtgccagaacccaccagtatctcaggggcaggatgagggaaaacgagggtttggaaaccgccggtgaatacttaacgggtgttgccccccccgagttaaacatggcgcgataaatccgaacggggcaggccattcttggcattcccgacaacgacactaggacggcaagagcaaacgggccagagaagcaccaacatgacgcatcagccccgaacggtgtgaactagtagtagcgtcacctgtggcaccgagtcagcaccttggcccctgtgacaaccagaggattggccaggggggagcaccccaacagccattcatggggcaaacgcgccgaatggaccgcacacattaacacggggtcggggatacaacagggaacaaccgcacaaccgttaccaggcagagcagacagggcggggcgacagaggaaacagata

SEQ ID NO: 688913 - DNA, 185 bp, Homo sapiens
gagacagagtctcactctgttgcccaggctgaagtgcagtgctgcaatcttggctctctgcaacctctgcctgctgggttcaagcgattcccctgcctcagcctcctgagtagctgggagtacaggtgtgcacctgtagttaaaccacgccctcaggtgatccacccccttctgtcgtcatatac

SEQ ID NO: 688914 - DNA, 690 bp, Homo sapiens
cctcttaaagaatgttctttattagcttactttaggccaaaagattagggagatccagggtggtcagttcccccgtccctcaactctcattcttcttggtaagatcacattctgggccaggcgcggtggctcagtctgtggtccgagcactttgggaggccaaggcgggtggatcacaaggtcgggagattgagaccatcctggctaacacggtgaaaccccgtctctactaattcttttttttttttggtattaaagacggggtttcgccatgttggccaggctggctttgaactcctgacctcaagtgttctgcccactttggcctcccaaagtgctgggattacaggtgtgagccaccatgccttgctctgcttcttctcccttcctttttaggaattataaattatgcgttcttttcgcttgttcgtcttcttttttgagacggagttccactcttgatgcccatgctgtagtgcaatggcttgatctcgggtcactgcaccctccggcttgcaacgatgctatcctccctgcttacgccttcctaagtcgctgcgatttcagctctgtcgcacccatgccgcgggtaattcagcatttttgcaacagacggatcccttccctgcacgccagggtccgcctcgcttccgacttcggggtgatccccctctctggcttccctggtcc

SEQ ID NO: 688915 - DNA, 579 bp, Homo sapiens
gggcgtggtgcggagggcggtattcagcacagcagctgcttggagaccggctaaaggtggcttgaacactccccccgtaggagaagcagcggtcagtcctgggagggcagccacagttgctgtaggaattgtccacacggccagcccctgctgaccagccacttgacctgcaatacagttgcctctgcagaggagcccaggttgtctggcccagcttcaccagcagcttgactggcttcagcagggtctccgctctgggagccctcggcggccacaccctccagtcctttgctctcttcctcagcagggagttgggcatccactccgacttccagcactcggatggtctcatgacctgacatcacgatgacctgctcattgacagtcagagatgtctctgacccggctccaggatccatggtcacttgtcagggtcgggtgggggccggcccacacctagcacatccggagcccgagcccgagccgccttcgccgcgggtgtctggcggccaccgattagagattcatctcacagcccggccagggggccggggccggggccggggccacggcggccgc

SEQ ID NO: 688916 - DNA, 193 bp, Homo sapiens
aatctctactaaggggcatctcgatcgcacaagagtacaaaaacaactcgcatggacggggcgtttccaggagttaatagcatacagtaccatgggtagggtgtggttggcagaagctgtccactttttctaagtgcaggggtgcgatggctgacggatcgtgtgctcctccgtccgcgtcgctcatgccaaa

SEQ ID NO: 688917 - DNA, 146 bp, Homo sapiens
tcggacgatattcccacacacctgcagctaaagacttattgtgatttggttctctctcatactcaggattttaaagccggaaaatcctcaccttcaaactgtttgcgttctctcttgtcttcttacctacctatttcacaatcggg

SEQ ID NO: 688918 - DNA, 1043 bp, Homo sapiens
  misc_feature (255)..(255): n is a, c, g, or t
  misc_feature (270)..(270): n is a, c, g, or t
  misc_feature (274)..(274): n is a, c, g, or t
  misc_feature (276)..(276): n is a, c, g, or t
  misc_feature (280)..(280): n is a, c, g, or t
  misc_feature (302)..(302): n is a, c, g, or t
  misc_feature (310)..(310): n is a, c, g, or t
  misc_feature (334)..(334): n is a, c, g, or t
  misc_feature (358)..(358): n is a, c, g, or t
gggcgtggtgcggagggcggtattcagcacagcagctgcttggagaccggctaaaggtggcttgaacactccccccgtaggagaagcagcggtcagtcctgggagggcagccacagttgctgtaggaattgtccacacggccagcccctgctgaccagccacttgacctgcaatagaagaggttgagtaactgcccctgctggaaccataactcctgtcagaactgtggctaagttttcctgagtcaagacctgnggggcagcttgtacngccngngggntcagggtctgcgatgcctgagnctggcttngggcttggctgaaggtggcaatgncaggggcagggctcggagggatcnccgggggtgacttcacagttgcctctgcagaggagcccaggttgtctggcccagcttcaccagcagcttgactggcttcagcagggtctccgctctgggagccctcggcggccacaccctccagtcctttgctctcttcctcagcagggagttgggcatccactccgacttccagcactcggatggtctcatgacctgacatcacgatgacctgctcattgacagtcagagatgtctctgacccggctccaggatccatggtcacttgtcagggtcgggtgggggccggcccacacctagcacatcctgggtaagatgggattggaaaggcaaagggtgatgtgacacagtaatacaatttctataccatctagaaaagtcagaatagaatcacagaagacagagaagttaggttctcccaagtatctgtagaggttaaaaaaaaaaaaaaggattctttttttttgagacagtttcactctgtcgcccaggctggagtgcagtggcacgatctgtgctcactgcagcctctgcccctcgggttaaaccaattctcctgcctcagccactcgagtagctgggattacaggcatgtgccaccacgccaggctaatttttgtatttttagtagagacagggtttcaccatgttggccaggctggtcttgaattcctgacctcaagtc

SEQ ID NO: 688919 - DNA, 777 bp, Homo sapiens
  misc_feature (255)..(255): n is a, c, g, or t
  misc_feature (270)..(270): n is a, c, g, or t
  misc_feature (274)..(274): n is a, c, g, or t
  misc_feature (276)..(276): n is a, c, g, or t
  misc_feature (280)..(280): n is a, c, g, or t
  misc_feature (302)..(302): n is a, c, g, or t
  misc_feature (310)..(310): n is a, c, g, or t
  misc_feature (334)..(334): n is a, c, g, or t
  misc_feature (358)..(358): n is a, c, g, or t
gggcgtggtgcggagggcggtattcagcacagcagctgcttggagaccggctaaaggtggcttgaacactccccccgtaggagaagcagcggtcagtcctgggagggcagccacagttgctgtaggaattgtccacacggccagcccctgctgaccagccacttgacctgcaatagaagaggttgagtaactgcccctgctggaaccataactcctgtcagaactgtggctaagttttcctgagtcaagacctgnggggcagcttgtacngccngngggntcagggtctgcgatgcctgagnctggcttngggcttggctgaaggtggcaatgncaggggcagggctcggagggatcnccgggggtgacttcacagttgcctctgcagaggagcccaggttgtctggcccagcttcaccagcagcttgactggcttcagcagggtctccgctctgggagccctcggcggccacaccctccagtcctttgctctcttcctcagcagggagttgggcatccactccgacttccagcactcggatggtctcatgacctgacatcacgatgacctgctcattgacagtcagagatgtctctgacccggctccaggatccatggtcacttgtcagggtcgggtgggggccggcccacacctagcacatccggagcccgagcccgagccgccttcgccgcgggtgtctggcggccaccgattagagattcatctcacagcccggccagggggccggggccggggccggggccacggcggccgc

SEQ ID NO: 688920 - DNA, 782 bp, Homo sapiens
ttggatgttgatttttatttaatataaaaacagaaaaggggtcaggcgcggtggctcacacttgtagtcccaacactttgggaggccgaggcaggcggatcacttgacgccagcagtttgagaccagcctggccaacatggtgaaaccccatctctgctaaaaatacaaaaattaaccaggcatggtggtgcctgtaatcccagctactcgggaggctgaggcaggagaatcacttgaacctgggaggcggaggttgcagtgagccgagattgcgccactccagcctggacgacacagtgagaccctgtctcaaaaaaaaaaaaaaaaaacagaaagaaggttaataattgcgggaatgtggaattctttcaaagtggcttaaggtagaattgaccctgtgctacctcttggatcactttgtaagagcaaattggtaaaaaggtagaacttggaagaagatcatctcttgtcccttttcccatttttgggcgttctatctttcggcctttagccttggcctgggtcactggcataaggttatatgagactatatgggcgaactggtccttatacaggattccaaagggtcaagaaatggaatttgggaaacttatttcccattttggagagaaatattcgtggtgaggggctaataaagtggtgcatggtattctcttgtccgtctttcttcccggagactttaagggaaacgtggtctcgcaggaaaggaagcaaggggtggtccataggaacgagccaacgagcgagaattgacaaaaag

SEQ ID NO: 688921 - DNA, 224 bp, Homo sapiens
cttggtcatttgcattggtgcaaaaatacagatttctgtcggtctgaagtacacaaaaagttgtgtcataagcttatccccgtgtgtgtaattctatcatttgaaacctttttagctactgtttgttttcattcaactaacaaacatattccaataataaaagcagtatatacatatttcctttctacagttacctctgattctcaacattttgtggggtagtg

SEQ ID NO: 688922 - DNA, 1504 bp, Homo sapiens
taggaggactttgtctctaatgttaatactcttgtacttatcgtgatctggcggttttttatttcacaaacacgccacaagcattatggacgctcatacagacacccaggctatgcagaagaagaactccaagaacgggctgctctcttcacctctatgtgtaccacacatcagcgtatccccgcgccatcagacggcgttgtagtcagacacacggtgtatctgacgccgaccgatgcggagtgacaaacacacacacaatgtgatgccagacgtgcctgtgtcgcctacgtcaatctgtggacacaacatatatcatttatcctctgtgaggcctcagtcgaatcacatgttctcgtgccaaacttactagcccatattttaagaatgtactctatcgcgggcgggcctacacacaatgtcacaccccacaagatgctggcgtaatgtcacaaagcaatctcgaactacaaagacgcctcccccacaactacctgtggcgcaaagtgtttatcattctagcgcgtgggccagccctgtgtgtcgtcttgcaccacatcgaccaacaccactgtttctggcctgtaatatgattcgatcgcccatcaacatgtgggcgccacacatcataccccccacttgtcaaaagacgagctataaccaagtagaaccgacagtcctcacaaaacgtcctataggtgtggcacacaacaatcatatcgtctcgtgagctccacagttgtgtgtaaacacaacggacggccaccaccgacgtgtagcagatactacacacacacttgtcaaccaggactattctaagaaagtccaaacattgcgcgaccgaacctataccaagacaaacctctgctaggcagaccaccattaatttaggaagacccgacccccacaactatctataccacggtcacctcttacccacaacagacgacacgtacgtggcgccactacaacaccgaacgaaccccaccccgccagcataacaaacccgcaccgacacaatatcaccaaaggatagccacctccctcccaccgctgcggcctgcctacaccaacgacgcacccccaccagcacgcggcgagacgaccaagcaaacacctgcacaacaccgccccctcagcggcgacgcatcaatcaacaacgacgagcccctcgcacacgccactacacaccacccacccaggagaggcggggccactaccaaaacagacacaggagtcacgtggggcgaacaccactctgcacccccaccaggactggaccaaccaatcaccgagacgcacgactgccccaccaacagaacaatatacgaacaagcaacgaacacacatgaacatatgtaaccaaaaaccacaaggcgtcccgacacccacgaacacggtctcacaccacggcggggtggcgccaacacccgcaccggggcgcggacacacctacccagacaacagacaccccactgacgtacaaactgttacacgcacacac

SEQ ID NO: 688923 - DNA, 145 bp, Homo sapiens
  misc_feature (17)..(17): n is a, c, g, or t
tgggctgacgtactctnaatctgtctcagatggaactcttaacttctcgtaaagtcatatatctatataataaaagctactgatttcctttggagcctttttctttaagaaaatagtttacctgtagtagtacttggagatctag

SEQ ID NO: 688924 - DNA, 1386 bp, Homo sapiens
  misc_feature (1)..(1): n is a, c, g, or t
  misc_feature (7)..(7): n is a, c, g, or t
  misc_feature (844)..(844): n is a, c, g, or t
  misc_feature (862)..(862): n is a, c, g, or t
  misc_feature (864)..(864): n is a, c, g, or t
  misc_feature (1032)..(1032): n is a, c, g, or t
  misc_feature (1174)..(1174): n is a, c, g, or t
nccccgnctgtgtgtgaatacccccgctcgtcgtgtattatgtttcacgcgctgtgttatttaatttctctcccccccagggggtatgtattcgttggggcccacaagagagtgggctcttggtgtgcttgtgtaaaagtgtgttgtgttgcgttacgcgtgtgctccccacccatgtgggagtatagctaccatcatcggtgctccctcagactatatttgtgctgtgtgctcctcgcgctcgttgtgtcaatcaatcgttcttcgttgggggggaaccccggtgtttctcgctgttttatgctctcggtagagtctcccacggggctcgacatgctcctctgttccccggcggggtgtccccccctcggcgcctttttctcttttgttgtggtgttatctcgtggtagatccccccgcacgggggtcttgtgtgtccacttctcccgcgcgccgctgtgtttcccccggcggagggcacatcttctttttttaggtgtgtttatacacgcttcatacgcttatgtccccctttttgtgcgcgccgtgtggtgtgaagaaacacaccacagcagattttttgcacctctcttcgtccgcccttataattgtgtggggagaccactttgtgcccacacattcccaacatggtcacgacacacatcaccctcattagtgggagagtcttttcacacatccccacagctggggtttctttgtaatatatgtggcgtgtcgagatattgtacttgggagcttctctggggagataggtgtttctcgtcgccacatgccggtcgcgcgacacgcacactgtgtctctcccgttgatgatacacactcncacactgtggtgatgagngnctcacatcgtcccctgtagagtctctgggaaccgcctgtgtgtacacacagagagagtatctctctgagaagagagagtgtgtgtgataatacagacacagaggccacaggtctcgtctctcctcgagagagaagagacacagtggactctccacagagagaggatantgttctcacaggggtggagacttggagactcggtgtcgcccgctctcctcgagagtgtcacctcgctatactccacaccctcgagaggtgtccacagagactcgggttctgaaaggtgtacacacggtggccctctctgtgncctaattcacgccatttccctatctgaaagacctggaggccgcctccacagccctcgccccggaaagacctggttctgcacgcttccccctgccttacggccccctgaaatgggtaggacaccacccctgacgtggttttaaaccgctttttgcataggctcttaacccagcatgggaaaatggttgatggataaattaacatccgtttctt

SEQ ID NO: 688925 - DNA, 718 bp, Homo sapiens
gctcttcccccttgcagagcgaccagatcgcgtagagctgatgccgctgcctccctgtgcagcctggtgggctgagaacttcaccctgagctgtagggtccccggctgccgggccccgtgctgatgcctcactgctagaccctgcatgctgtgtggctgcccatggagcttgatcctgcctgcaagcttctgcctgtgtgaacacacccctgagctgctggtggctgcggttgctcaacatgccactggtacattggctcggatgggaggaccagtggatgccagatttctcgttgtcgcgcccgagcttggacactgccgggcctgcactggacctgggaccttgttttgaaaacatcgcctctgggaccaccaggagacgctcctgaaccgttcgtccactgtttctccgtgatgcgccccgctgccatcgcacatgccatcccccgagacttctttgggaaggtttgagcctcggaaaagtgcccgttgaggcattgcaacctctgtcgactggaccttgtttcccagcctccagcagtgccacgtggttctaccgtcggcacattgtgaggggacccagaaatctgaggtccctgaattgtcacgcctccgacacgtggaccgccacttcagtgggccacattgcacaaaaggcccacatggctaggctgcacgagccacggacgcggtgcacaggggcacagcttgattctag

SEQ ID NO: 688926 - DNA, 398 bp, Homo sapiens
ctgtgttcatacctgtcccaatcttcccctaaatgcgctcctgcttatcaatacctttcagccggctatttagtatatcaggcttcgaacctccgctgggctactttctgaactcatcaaacaaactagtgactatttctaattaattactagttttatcatagatctgactgggaagtggcggggagagaggactttcccaccaaaaaaagaaaaggtaaatgaaagaatttattcgctgggtgctgtggctcacacctgtaatcccagcactccgggaggctgaggtgggtggattacttgaggtcaggagtttgagaccagcctggcgaacatggcaaaaccctgtctctaccaaaaatacaaaaataagccaggcatggtggtgcgtgcctgta

SEQ ID NO: 688927 - DNA, 240 bp, Homo sapiens
atatataactatctaattcatacaagtgatatattcaccatcccatcgataattcattttaaatatgctatgtaaaacataaacatactatatataactataaacgtatgaatatgataactattaacaaataatccaatcaataatacattttataaattctcattttggaaacttgtgttccaatgtgccacgcgagaaaattctgttcttgtaccataagccgtgtggtttctccct

SEQ ID NO: 688928 - DNA, 289 bp, Homo sapiens
ggctgaggatgcgaaggagatcagcgccctggtatccagcacaatgaagatcgagatcattgctcctcctgagcgcaagtactccgagtggatcggcggatcgatcctggcctcgctgtccagcttcgcagcagatagtggatcagctaagctggagtatgacgagtccggaccctccatcgtccaacgcaaatgcttctatgcggactatgacttagtggcgttacagcctttcttgagaagacctaacttgcgcagaaaacaagatgagattggcagaagcaggaag

SEQ ID NO: 688929 - DNA, 336 bp, Homo sapiens
gggtggggtggctgggagcgaaaacccagattgacaggttaaaaagaaaatcctggctgggcacaaggctcactcctgtaatcccagcactttgggaggcctaggcgggtggatcacctgaggtcaggagttcaagaccagccttgccaacatggtgaaaccttgtctttactaaaaacaaaaaaattagctgggtgtggtggcatgcacctgtaatctcaactacttgggaggctgaggcagaagaatcacttgaaccctggagttggaggttgcagtgagccaagatcacgctactgcactccagcctgggcgacagaatgagactctgtctga

SEQ ID NO: 688930 - DNA, 347 bp, Homo sapiens
tgagagtgccagaaatcctcctatttaaaccattggcccctgaattcgatttcttttccaaatatgctcataaattattgcagagacaatgttaaactcgagagcattattcatctgtataaatcagtctcatctttaaccgtaactcagagcttccatgtaggaatacgcaccgaaacacaggctaccgtctgcgttctcatggagcttacgatttagctgcactgataggatatttacacatgaagaaataacaatgtaagaaaattcatagacactaatttttagggacaaagcaaacgtcttttttttttttttcccaaatggattctctttctaatggccaa

SEQ ID NO: 688931 - DNA, 468 bp, Homo sapiens
gtctctagcgggggctgatgttatagccccactcataacacctcaaaaaaagggaatggaacgacagtacttcagtccaaaatccaactcgcctccgagaagcatccaaaagcagagtccagctattagaaagatgacccaaggtgaatgtctgtagtcagttgtttacaaactccctctccggcacaattcatggagaggcttcaatcatagaatccggcaaagttaatgacaactcagtgctttaatttggtatgtggaatgtacacgcatgctgaagctaagtacctttaaactcaaagaaataagagtggtattaggcaaatcttactatactagggaaagcattacctggccttatttgttaatacttattcaagcctttctccttcagtagtctattttcttagaataacaactcttttatctatcctgcactctattttttttctttttgacgagacaagg

SEQ ID NO: 688932 - DNA, 105 bp, Homo sapiens
ctggttcgacgtccaggcgaggcgccctcacagcgtacctttacggtcacacgaccgatgggctgggcgagagctttccagaagtggctgtcaacttcctatgtc

SEQ ID NO: 688933 - DNA, 1213 bp, Homo sapiens
ccccaatcagagggacaggacgaggctctgctatctccgtgccagatgattgcgagaccggcttctgacatattgtacacaagtcaacgacgttgtaaaatcccagggactacgactaggatgtgagcccttcagcacccgtgggaagatgaatgttaagatgccccattaaggaagatattgctctgaccagcgatgaatgggaggtatcggcgaggcaacggttccaagatctgggtcaatgtaggagaccaagctggtgtacttccagtgacaccaaggacacgccgctggagcaccacctctacgtggtcagctatgaggcggacggcgagatcgtacgccatcaccagcgcccggcgtactcccatagctgctccatgagccagaacttcgacatgttcagtcagccacgtacagcagcgtgagcacagccgacactgcgtgcacggtctacaagctgagcggactcgacgacagacccccgtgcacaagcagacccgcatactggactagcatgactgaaggcacgccagcatgccccccggattatgtaccctccaagaagaatcttccagtatccacaacgcagcatcggaatgtgcgagatcataccgggaatgatctacaaggcccagaacgcctttagcaagcccagggaaagaacgcaacccaacagtccatacttggtacataatcaccaggaccccaaggatgcagactgtatggactacacatccttatcaaaaggcattcacaagaaacttgccagaatcacaactaaatgagacttcactggggacatacgccagaggaaaagcaaaaggacgtgccaaagacaacatcgaaatacgaagacactacccgaacacacaaggaggcccatgaagagacccaagaaggcgcccaacggcgggcgcaaatcagcgacaccaacgtagtgcaagacccacgccataacgccgagccccagcaagataaggaccccacagacaccacactgaacacaagacagcacaacaagagagatgccaccaaagagaagaccaccacaaacacgaaactagcacgaccaaaagacagaacaccgccccagtatcaaatggtcgcacgacagtagcaccagctaacaaccatcgaatgcaacaacacaatcagatcacatacgtcaacacagacgatcacaacacaaaaaatccataatgagaccaca

SEQ ID NO: 688934 - DNA, 1048 bp, Homo sapiens
ggtatccactatgcccccatccaagtgactcttagtacgcagagaggctcattgactgcccatccgagtgcaagccgaatatacgtgatgatggcgacttaaagattgataacagggcgcaatgaaagtatagtatcgacggggaagacgtatgaatcaataactcacatctcaatgcaataatcacttcacatagggactggaaccgggtagtatctctgctgacataaggaaattcgcgctagaaattattgtcgccggggagatgcacgcggtaaaactgccgcaaaggcagatcgcagtctacgctaaataagccagactacatggagacacaaccgcgatcttatgtgaggcgaaaaatcaggtggaagagattcataagtaagaggcgaagacaaccgtaccgatcctgggtgactgcgcatggattgtccgaacgatagaagagtcttaggagaaggttccaagattctggctctgagagacccctcctagagtcaccttgtcaaattctaagtggttagatccagaacgaggatacaaggatccttgggcacagcgtaagtgaagagaatagcgggttgttagagccggaggtataccacattgaacagccaatagtagggtctaaggagcagcaccaagttcatacatggggttcaagctacaacaaccagtacctagaaaatcccaaacagtttaacctgaactacctcagacgcaatcggcaccattaatattcggctagagcagacgtacggtagggaacgtagcgagaggagcctcccctcccgactaaggccgcgcagattaatacgtgatcgccacattagcggcgacatgtaagccaggcgaacgggtgataacacaactgctaccgagaaaggggcaaagaagggacgaagcggaattggaatgccggcgtatagcaaatacctatacagactaacacacccggagtagaaggaccaaaaagaaaccatgacatcaccacactataagagggctgacaacggatatgtacaactgtgagaacaaacacacg

SEQ ID NO: 688935 - DNA, 211 bp, Homo sapiens
ggacagcagaagagagtgacaaaatatcatatgagaagaaatgaagccaccgaacttagaagtcctggaaccgtgcaaaattatccttcaaaaagcaaagagaaataagaactttctcaacaaacaaaaattaaggctgggcacggtggttcatgcctgtagtcctaatgcttcgggaggctgaggcaggagaatgtcgtgaacccaggag

SEQ ID NO: 688936 - DNA, 470 bp, Homo sapiens
cggcggatgcaagcgtcccgtgctagtgagtgcacccgtctaaatcaccacgaatcaaggagggacacgcatcaagcacgcagcaatgcagctcaaaacgcttagcctagcccacacccccacgggaaacagcagagattagcctttagcaataaacgaaagtttaactaagctatactaacgcgccaggataggtcaatttcgggccagccaccgcggtcacgcagattaacccaagtcaatagaagccggcgtgaagagtgtattagatcaccccctcaccaataaagctaaaactcacctgagttgtaaaaaactccagttgacacaaaatagactacgaaagtggctttaacatatctgaacacacaatagctacgacccagactgggattagataccccagtatgcttagccctaaacctcgacagttaaatcaacatgagactgctcgccagaattgaattgag

SEQ ID NO: 688937 - DNA, 101 bp, Homo sapiens
  misc_feature (18)..(18): n is a, c, g, or t
ccattttcacccgatccngggctctcccttccaagctagagggctgggctatgactgtggtctgggctttaggccctttccttccccttgagtaacatgcc

SEQ ID NO: 688938 - DNA, 114 bp, Homo sapiens
gctcggcccccccgacgacgagtccgacgactaccacgccgacgaccatcatgaggccgtaactgcgcacgtagccgttttggactttgcggatgatctgggaacaagccgtgg

SEQ ID NO: 688939 - DNA, 96 bp, Homo sapiens
tgctcagatgctctggaccttgccccagtaccccttcatgtggctgttgttcatctgtatcctttgtagtagccttaaaataaactgttaaacaca

SEQ ID NO: 688940 - DNA, 144 bp, Homo sapiens
ggaagagagaggttgggggagaaatttttttttgttaagattttccacagattgttttataatattgacaaattgggttagagaaggatcttacccttttgtctttggaacgaacaccttcagggtctggatctttttttatcc

SEQ ID NO: 688941 - DNA, 258 bp, Homo sapiens
aaaaatgcccttgcccctctgtggagaggcgcagtttaaagaataaggaggaggagggagaagagaaattgtaagggaggagagatctttcccgggccgcaccatttctgtcactcatattggccccagataaaagattggccaaaccttcacaacccttgattgttgagagatgtcccagtgttgagggacaccaaagcattgtttggtgtgtgcagagaggggtggtctcaaaaaagctaaaattaactttctttt

SEQ ID NO: 688942 - DNA, 550 bp, Homo sapiens
ggtgtatatcgatgccacataagaagaatagagcagggatccgcaacccctgggtcacggactggtaccagaccatggcctgttaggaaccgggccacaaagcaggagatgagtggtgggcgagtgagcattactgcctgagctccaccttgtcagatcagcggtggcattggattctcatagtagtgtgaaccctattatgaactgcgcacgcgagggagctaggctgcacactccttatgagaatctaatgtctgatgatctgtcactatctcccatcaaccccagatgggaccttccagttgcagaaaaacaggctcagggctcccactgattatgcatttggtgagttgtatagttatttcattatttattacaatgttataataatagaaataaagtacacaataaatgtaatgtgcttgaatcatcccaaaaacatcccccactccactgtctgtggaaaaattgtctggcatgaaactgttgcctcatgccaaaaaggtgggggaccactggtttaaagggagcagcatgcccatttggggca

SEQ ID NO: 688943 - DNA, 718 bp, Homo sapiens
  misc_feature (4)..(4): n is a, c, g, or t
  misc_feature (8)..(8): n is a, c, g, or t
  misc_feature (564)..(564): n is a, c, g, or t
tccnccgngctgcaggaattcggcacgagcgttactgtcgccatctcttctgatcacgcgacagctaactgatgctctagtgcgtagcctcttgagtgctatgcctggatgattcatgcccacacctctgtgacgatacaatgtcacagtatcaaggtgccatattacatgctagcagtacagcttgaccagtacaccttccagcatgcgctatgagctagaacaccaagactgcacaactggtgtcaactgcatctgtatgtactggactctacgcgatcttggacgtgccttgcagctagctgcacgtatcgacttgaactgtcacgaatgcggtgtgcatcagactatgcattcgtaggccttaatccagaatgctggaatgctcgcgatattgcatgcacatacatagtcatcgtatgcatgacaggatgcattgtagactacgcaccttgctataacctctagatgcgatgttcatgcgtgctaacagctgatgcagctcagtctgttacatgtgattgtgcatcttatatacgtctgcgaatcagctccatctagctngagagctgtgatcacacactgtgttcgatattcggtctgaatgaactatgactgtgcagactgtgctgtgtcatagcactgtagtcgtgagcatacgtagtgactatgatctagctattactggtgctcagctcgctcaggatgatactcacgt

SEQ ID NO: 688944 - DNA, 847 bp, Homo sapiens
agcggactgggcaggcgttccagctgtatatccatgagcgccgttggcatccggggagctgcaggaaccagactgggggctgagcgtgaccacctggtagtcgattcacacgcagtcttgtgtaggtttgtttgaataagagatcctgacctgaccggccgcagagcgtgatacaactgcttcaaggacaaattcagtatttgctaaggtgggacagaatacatgtaacattgactcagaggatgaatgcgcatgctggagacgtcccgtatacttcgcccaggccggatgatatgtaatgagagttgagagctggcatgcgagtggtctgcatgtgcatgtacagttgactctgctctctggatgctgttgaacctgtggacacgagcctccacagcctccaactgtagcatctacatgtgccaggactcgcgcggcttctcaccgcattattctgctcaagtcctggtgcccttcttactgtacctacatagcacatgactagttcccaacagttggatctgggcgtggcaataacgtaggacgagcagtccgagaccggcgcttgtgcttagtggagaaggattgtggcaaggaggttgaaggtctgaccattatccctatactgggcgatcccggtaagattcattcaacttagtagtgctagaggtggagctcacattcataacgatgtctgatccgtcttcgagctccttgtgctcgagcacatggtcgtaggcacgatcgatatctagcaatgggtcgttcctgacctgagtaaattggcctgatcatcagcgaggaagcattacatccggcattttcgatagatctatgcccagtagaa

SEQ ID NO: 688945 - DNA, 180 bp, Homo sapiens
accctataaaagtactacttctgcacatactgtatttttggatactctcctttgagcttccgggtctccttctgccatattcaccatacacaccattgttgctgtatgggacaagacacaattcccaggtaaaggcaacctgggaccacaacaaaaatgtaattgcaattaggaaacaaa

SEQ ID NO: 688946 - DNA, 128 bp, Homo sapiens
ttgattcgtgttcaggtacgttagggctcagccggaggagggagccagagcggaactgaacccggtgctggtctaccccagacagagctgcaccctcacctgtcccaagccaccctgttcccagacgc

SEQ ID NO: 688947 - DNA, 120 bp, Homo sapiens
ggcgaggcttctctgcaggatatctggatagacgaattcggtagcttcggccgtgacgccactccggttgtagaggcatgctgcgaaccgcggatcgggacgtccgccgtgatccatggt

SEQ ID NO: 688948 - DNA, 475 bp, Homo sapiens
cagcattctaaaacaaaattagacatgtgaagtacagtcatctgctacataacgttttggttaacgagggacttcctatatgatggtggtcctataagattatgatactgtatgtttactgtaccttttctatgtttagatatgttcagatacacaaatatttaccattgtggtacagttgcctacagtattcagtacaataccatgccgtataagtttgtagcccaggtgcaataggccatactatatatagcctaggtatgtagtaggctataccatctaggtttgtggaagtacactctatgatgtttgcatgacaaaatcacctaacaatgcatttctcacaatgtattcccatggttaaaggacatttgactgtattgaggaacttttattttcagatttgttaatgttattgtataaaagagtcatagaatgaatagcttatattgaaatgaataatcttggaaaatca

SEQ ID NO: 688949 - DNA, 156 bp, Homo sapiens
gcgagaattgaagactatttttcagcaatcagacttttcgacattccagaaaatttcgacattactctgtaagggacggacagttatcgtgaagggccccagaggaaccctccggagggacttcaatcacatcaatgtagacctcagccctctttg

SEQ ID NO: 688950 - DNA, 346 bp, Homo sapiens
  misc_feature (23)..(23): n is a, c, g, or t
  misc_feature (63)..(63): n is a, c, g, or t
  misc_feature (82)..(82): n is a, c, g, or t
  misc_feature (102)..(102): n is a, c, g, or t
  misc_feature (150)..(151): n is a, c, g, or t
  misc_feature (153)..(153): n is a, c, g, or t
  misc_feature (170)..(170): n is a, c, g, or t
  misc_feature (174)..(174): n is a, c, g, or t
  misc_feature (181)..(181): n is a, c, g, or t
  misc_feature (195)..(195): n is a, c, g, or t
  misc_feature (207)..(207): n is a, c, g, or t
  misc_feature (222)..(222): n is a, c, g, or t
  misc_feature (224)..(224): n is a, c, g, or t
  misc_feature (227)..(227): n is a, c, g, or t
  misc_feature (230)..(230): n is a, c, g, or t
  misc_feature (234)..(234): n is a, c, g, or t
  misc_feature (236)..(238): n is a, c, g, or t
  misc_feature (240)..(240): n is a, c, g, or t
  misc_feature (245)..(245): n is a, c, g, or t
  misc_feature (269)..(269): n is a, c, g, or t
  misc_feature (341)..(341): n is a, c, g, or t
tgtgtagcattgagctggggatncttgagattgaggttgattttcagatcagttctatccatnatctggatagaatgtgtanatctacctagtatgtaacanctgccattcttattcctcattttaagtatttctgtttctcacaattcnntntttttgtttatttgagntggngtctcantttgttacccaggntggagtgcagtnccgctatctcggctnantgnaanctcntnnncntcctnccgggttcatggaattctcctgcntcaggcattcgagtagctgggatatagtaggcatagcgccatcatgcgctatgactaatttttgtatttttngtaga

SEQ ID NO: 688951 - DNA, 510 bp, Homo sapiens
ctatggctctcacaatagtctaaggtcaggttatcgacttagggtagttactatcattttcttctggatcttttggatactcactgagaacgaccttcccttcatcgtcttctagatccttgaactgtattgttggcttgcaaagttcctcacgggtgtctcttcttgtaacattttcttcagagtttcttctgtgtctccacctccagtagaaatccaagtgtatttaatttcaggcacctgtgatgcttcgttcttctcgtgtctcttttccaggtatttccacaggcactccatcaatgatataggtgtatacttgaatacttggctctccatggatcacttcagttatagtatcaccttctttaatcagtctgaattcaggtgcaccttcaattttgactctggtaacgtgtgggtctatagacagtcaccgggatttctttgaaggtgctaccacgaacgaactctatttggatgtatgtgatgtatttataaagtatatcccgc

SEQ ID NO: 688952 - DNA, 259 bp, Homo sapiens
  misc_feature (12)..(12): n is a, c, g, or t
  misc_feature (43)..(43): n is a, c, g, or t
  misc_feature (75)..(75): n is a, c, g, or t
  misc_feature (95)..(95): n is a, c, g, or t
tacccccaggcnggagtgcggtgatgagtgatcatagctcacngcagcccttaaactctagtgatcctcccgccntggccttcccaaagtgctgngattacagatgtgaaccaccacacccagcccagtcaatttgtttttagaatgttcccaagaatatagttgtgttgctaaataagatactaaaataatcccatactatatttcttgacagaaaaactattaaaatgtatacatgataaaaatttcttttatgaag

SEQ ID NO: 688953 - DNA, 814 bp, Homo sapiens
taaggcacgcgacccacggccgcccgcgggagccgcggggcgaggagcatgggcccgggagagcggggcccagctgcggcggatggcggacgacccaacgcacagacgagcggcggagacaagaggagcagcagcggcaccgcccccacccggagggcctgacaatccatcatggagactcctgcccttacccagtgtgccacagagcccccgagatggagcccaattatggtgcctgcaccctgccctggtggacgtcagtggactcgtgtggtggcattgcccctcccacctcctgacaccctggccagctgctggttgtgactttctctgcaccatgtagcatactggactcccagccctgcctgtcccggtgttgctggtgccggggcagccactccagacccagcccagcctggtgtgtgcactgacgtgagattgcggactcctgggtccctggccaagaagccaggagagggacggctgatggactcagcatcggaaggtggctgtgaccgagggggtggggactgatcctgccgactctgacgaccacacacatctcaggaaaggctgtatagtgcatagttgcaagattaccaatattgcaagagagtgacaaaatgaaaaataagaaaaatagaatacataacatcaatagaagagaacacatacaagatacattaataatatagactcataaagacacaatgtgtatatacccaaaacaatacaatacatagtaatataaaaaacctctaaaaaaaataaaattgagtaaaaatatataaaaaaataacctccgtaaaacaca

SEQ ID NO: 688954 - DNA, 493 bp, Homo sapiens
cgcgcacgctctgcgtccctcagacgcctgcgctcttgtactagtgtttgtgtttgttctgtcagcagcgcgctgctttattctcagcgcctccgtctagttggtttcagttttggttggcgctgagatgtagcatgcgtgttgcttatgtgtgagcgcacggtaaggtgtttatctatcgtgtgctcgtgtcttgcgtctcttttcaaagcacgtggcttggtgtttacattgtggtcacgtgctttgtcgtgtggtcaagtgtggtgtttgttgtcatgaacatgcggttaatgagttctctcattggctgcatgttcttgttctgttaagtgagcgcatggcttgtgttgtctacactccccgtgttcctgctccagtcttgccttgtcttgtcagcccagctaagtttgtgtgttttgttaatgttttccccctcggggtagttttgttttgccttttatttttaataaatacccattgtttctttgca

SEQ ID NO: 688955 - DNA, 391 bp, Homo sapiens
agatttttgaagtttcagggaactggaaaaatctttaacttttgctttaagtgtttggggcaggataaaaccacatagaaaatataaaaccatttttgctttgaaaaaaacagggcaggtggccctttactgcttattctgtaatccctactgtctataattaacttcaggaaccctgaaacttgatgaaaagtttttaaaaattatttctcgtaggggcaaagttatatggaaagtttgttattttttatactatttgaatgccctgccagtgaagactgtaaaaacagaaccccctattttggagggaggaaactaattgtttaaaatttttcatcctttgtgagtgataaaaagtttggatagtttttataataaatcccttttttga

SEQ ID NO: 688956 - DNA, 197 bp, Homo sapiens
ttactatacaattcagcttgtaccggcagtgctggaggaaagttttatagggtcctgctgaaaggtgctatcgtgaaatgaggtcattgtgcccgcaggttgtttgtgattagctgtctctaacaatttgttcatacaataattgttcattattgttctcaacttggggctctccccaacctggggacccttcctta

SEQ ID NO: 688957 - DNA, 289 bp, Homo sapiens
gcgcgtgggttcttgcagatccaggccaagatagcaaggcagcatctcctcaggccgcagggtgctcagtgcattgtccaacattgagctacaagcgaggagcaactcatggctgctcatggcacaagccacccgccctgccagcttcacagtgcccgcctcgtccacgtaacccagggttcggagcacctctactcgctgatggtactcaggaagcagcagcaatgactgatccgacagtaggaagcgcagccgctccatctccttctgtatctgcaaggaacccacg

SEQ ID NO: 688958 - DNA, 350 bp, Homo sapiens
gctaacgatttcccatccataatttatctgcgtatagtaagttaacttacctatattccacttgaacacatcttcagaaggcattccaagacagtgcctttccaccgtgagcctgggagtagggtcaagcacatcctcgtttgcccaggacagtcctcatttatgcttgtcactccagcgtaattattaatagtgcgcccttgcctctcaccagtacctggatgtggatggtcatttatacagtactctttgtgcttttctgggagacacagagagatccagggtagaactgctccccaagagcttggcaaggtggtatggaaccaggagagctgtgataactgtcttca

SEQ ID NO: 688959 - DNA, 984 bp, Homo sapiens
agcggagctccggccggagcatcaggtggtggcccaagacacccgcagactagtgctgccgcggctctcacggatccgacgggtcatcccgacagcgttgtccacacatcatggtttgagtgagtcccacgcacagtcccccttataccgacagcagactacctaagtatatgtaaagtaagagattaacaactactactcatgtctacacaaacagaagcacaccatagcagaaacctatgacacgtactgaccagaggacacagagatgaccaccacgacaatcgcggagggcgaaccgacaacgcggcggcgtcgggcacgaaggaggcagggcgagtgcggcgcagcggcccgcgagcagagggcgcggcggaggcagagggcggggcggaacagggggggggcgaagcgcgcggcgcggggcggcaccgcccatcgctgagctggagggaccaaggaacgtgccacgagagggagagcaggaggagaccgacggcacggaagagcacacgcggggcgccgcacgggcgcggcgcccgcagcgaaagagagaccacgggatcgcacgcgacggcggaagacggacagacgccgcgagagcggagagagagcggccgcagacaggagagcgggcggcgagagcggcgcacacgaagcacacagaaagacggggacggcgcaacagagagcggacgaggcgacagggcggagggagatgcagcgagggtgagccgcgacgccgaggcgcgaccgggcgcagcgcggcggagaggccgaggcgggcacatgcggggccgcacgagcagagcagcagcacccgagagcggggggaggggcgtggatgccgagcaagcaggaagatgagcggacgcccgcgggagcgccacgagagagaaagaggggaggatgcaaacgaagtgcggagcagcgacgtgcgagcacggagggccggaaagacagagagcacgagagagagcgagc

SEQ ID NO: 688960 - DNA, 321 bp, Homo sapiens
tcttgtgcgcaaggtcgtagaagtaggtgtcgttggaccgcatgatggcggtgtccaggtcgacccagccatcaccggaacggttccagttacggtatttgtgatcgtagttgggcaactggtagtagcccgggtcgaacacccggctgcccgcattgaccacaccactgtccaggccagcaatggccaccgccggcttgatggtcgaacccggtgggtacaggccgcgcagcacgcggttgaacagcggccggtctatcgagtcgcgcagttcggcataggccttgaagctgatgccggtaacgaacaggttggagtcgc

SEQ ID NO: 688961 - DNA, 143 bp, Homo sapiens
tcggccttgttgtaaacgcgtgtgtcaaaaataaatgtcggactttccgtccctccttgtcttttgaacggagcataacgggccgtgagcatgactagtgaattaagagaagaccgtaaacaattgatatgtatgttgctgga

SEQ ID NO: 688962 - DNA, 380 bp, Homo sapiens
  misc_feature (214)..(214): n is a, c, g, or t
cggggcggctgtgcagagaggatcacctcccagacggggtggcggtcgggcagagacactcctcagttcccagacctgaagctcaacaccaccttcttcgaccccgcacggagtgaggagaccccatatctataacaacaactattcttgatttttctggtcaccctgtaagtttatattcgttatcctaacaaggcttctggaataatctccncatattgtaactttactactccgtgaaaaaaagaaccatttgtgatacataaggtatggtcttgagctatgatatcaacttggcttcctcagggtttatccgtgtgtagcacacccatattattacagtcaggaattagacgttagacacactgagcattatttca

SEQ ID NO: 688963 - DNA, 292 bp, Homo sapiens
tgcttggtaaaaaatggggccaaaaaagcttttttgtgtgggtcaagtctgtttgtttttccaataaaaaaggaaagccttagccccatggaatggacatgtgaggatgaggagacaaaaaaccagtagccccttccatcaaaaaaaagggttttttgggggtgctggctaattaatgtcactcctgatttttctttcccaggccctggaccccccccccactgagattgggtgggagctttcatggggggtgtatttccctgatgaaaaaaaattttttgcctaatgtgga

SEQ ID NO: 688964 - DNA, 1907 bp, Homo sapiens
  misc_feature (1)..(2): n is a, c, g, or t
  misc_feature (732)..(732): n is a, c, g, or t
nncctcgttggctttcatgtatttggttacagaaagctatgagtacgtattgtacgacgatgttggtgcatgttgctagctagttgcaggctgcgctttgtatgtggtgcgagcgctgttcgtgtcgatcctgctggcgcggtggatgctccctcgatttgttcttgtggtgatggtggtttgttttcttctgtctttcttactgggttttgctgtcgtctcgccgttgtgtcgttccccgctctggttgggattgccggtggcatcacctcgcagtcactatgtggttctcgatcgatgtgtgtcgacggagccactctgtattttcccttgggggtgtcccacattacatggtcactactgggtatgtctcctgatgttggcatcagcctcgcttggtgggctcttgttgcgacattgatgtctgggtgtgtcttcttcgatttgttggcgtgcagcctattggtgtgtgccactctcgtgtcgccgtcattgtaccactgttgttgttgtgtgggtcatcttcaacaccgtggggattgagcccctcacctggtgtggttgtgttttattcgatcgccgggctggtggtaatttgtgggtgacccacagtctgtgtactaaagatggctcactcaattgtggttcttatatgcgcatttgtggggaatcactatcttctgatttggtttagttgcttcacgatcgtgggaacacagtgtgtgttaaganacttgtgtgcacacaccacgtctgtagtgttgtcacaaaagaaggctggtgtgtagacgttgcgacgccggattaaagggtgtgaaaaccaaaggtgcatcgctgtgttggagtacgagtcccgcaacactttgctgtgggccacatgaagcgtttaagtggacaatggttgaagctgtgaaaaggggggtcccctcttttaatgcggtctatatcctttgttgtgtgtgtccaccaggcatttgcactgattttcccctcaatgggggcattatcggcggtgatatatttttggggggaaagagcccccaccctcatatgccgcaaatgtcccccagttgggagggcgtgttttcaaaaggtgggtggtaccaaggccgcaaacccccagacacatttgtgtgtgaaggggaaaggagattctttgtggtagagatccaccctagtggtgagaggggaagttgttaattgaggccgacttgttcgttggagtagtgaaggaggaatgtcttgtgccgcaaaagcaccccacacccagggggggctcagaaaggttgcacacctgttgtcccccagagccttgttgttagggagacacttgctggcccacacacagaaatgtggagtctctggatctatttagcgcacacatgtgaggagacgtggggaatgtatactgttctcccagagaagtatctgtagagtgttggtcgcatcgcatgggtgcaccaatattggaggtgaaacgttaacatgcgtgtggatagaggtatagagggtttctcctttctcaaaagtctcacgcagcgtgttagactggggccaccagatggcgtcaatagcccgtatgaatctcccacccaattgctcagaaagactgagcgccaggagagattacttgtaggcccagactgggccaataattagccaagacccccatctctttgaaaaattaggccatggtggtgccaagccctgtattccccagcttactccaggaggttgaggtgggaggatcacttgagccccgaaagttcatagcgctcccatgagcccatgattacacctacggcgactacaaccttggtggcacaagtgagaacctgactcttaataaaaagaaaaaaaaactgcgagcattaagtcgggcgagaagagtatagctcccttgttgc

SEQ ID NO: 688965 - DNA, 391 bp, Homo sapiens
ccaggccgatgggagaccctgtctcaaaaagcaatggctggtccctgaggaacaagactacaggttgacctctggcttctttgtgcctccacacacacacacacacttagtttagcagtttgaagaccaggagagtcaaaggaagggacagtgggtgggaggcgtcctgcaggatcggaggcctagaagcctgactcctgtgaacacggaacaagggtcaggattccccagcttgtggtaacccgagacactggttctcacctcatagtgcagggactgaccagacaaatttcctttcttgagtctgtcttgcatgttaacctaattgttgtctttgcattgtaggttattggcggagttcccagcaacgggtggcgtggtacgtcgacgc

SEQ ID NO: 688966 - DNA, 422 bp, Homo sapiens
  misc_feature (39)..(39): n is a, c, g, or t
  misc_feature (420)..(420): n is a, c, g, or t
tggacgctcggtcaccccggccgcctcgccctgcgttancccatgctcgtgccgccgcccgccctcagagaaccatggcgtctggcagtatggcaaccagtgaggaagagcggagtctccgggaatgcgagctctatgtgcagaagcacaatatccaggccctgctgaaggactccatcgtgcagctgtgcactacgcggcccgagaggccaatgggattccttcgggaatactttgagaggttggagaaggaggaggcaagacagattcagtgtctacagaaaaccggcatccgtactgactcgagggaggacgagatctctcctccaccccccaattccagttggtgaaggggccgacggggccgaaggtgctatcagtgctgaagtttacactgaaggaaggattgctgcctcctangt

SEQ ID NO: 688967 - DNA, 812 bp, Homo sapiens
atgagccaccaatcacatgcctatcatatgagtaaaacccagcccatgacccctaacaggggccctctcagccctccgagtgacctccgggcctataccgatgtgattgtcagttccactccataagcgctcctcatactaggcctactaaccaatcacactaaccatagtaccaagtgatggcgcgattgtaacagcgagaaagcacataccaatggggcaccacagcagcacctgtccaaaaaggccttcgactacgggatagtcctatttattagcctcagaaggttgtggcctcgttcgcgaggatttattcgtgagcctgtttaccattcgcagcctagcccgtaccccccaatgaggagggcaccgtggcccccaacaggcgtcagcccggtgaaatcccctagaagtgccagctcctaaacacatccgtattactgcgcatcaggagtatcattcacctgagctcaccatagtctattcagatccatcgaccgagatcaagtaattcaagcacgtgttggtgtacaatgttactgggtctctatgtgaccctcctactacgccttcaggagtactctcgagtcccccttcaccgttgcccgacgggttctacgcgggcagcgtgttggtagccacagggcttccacgggccttcacgtcggttatgtggggcaactttccgcggtaggtgctcaccgccgactatagttccttactcccccgtccttggctccgagcgcgcgataggggctgggctggggtgctatcggtgtccaccttgtggggctccccacccctcggggggc

SEQ ID NO: 688968 - DNA, 401 bp, Homo sapiens
  misc_feature (202)..(202): n is a, c, g, or t
gtaccctagaggatcttatagacctaacaggactgcgctcttgtaacgcgcgacatgcggtcagatcaccagcgcaagtggagacggccatgaggcggagcagtggagagcctacctggaggccggtgcgtgagtggctccgagatacctggagaacgggaaggagacgctgcagcgcagggacgcccccaagacgcatatnactcaccacgctgtctctgaccatgaggccaccctgaggtgctaggccctgagcttctaccctgcggagatcacactgacctggcagcgggatggggaggacccagacccaggacacggagctcgtggagaccaggcctgcagggaatgggaccttccaagaagtgggcgtcctgtggtgggtaccttcttgttagggg

SEQ ID NO: 688969 - DNA, 201 bp, Homo sapiens
  misc_feature (73)..(73): n is a, c, g, or t
taggttggggctcggctgtggccctggggtttcctgctcagctcaaaaaaaccttttggaaaggacagtcaantgagcccctcccatcctggtcacacgtccttccccataactatggaaatggccctaatttttgtgaaataaaaactttttgtatttttggggctgagggtcagcaacagcccctcaggcttccagtta

SEQ ID NO: 688970 - DNA, 846 bp, Homo sapiens
  misc_feature (7)..(7): n is a, c, g, or t
  misc_feature (73)..(73): n is a, c, g, or t
  misc_feature (107)..(107): n is a, c, g, or t
  misc_feature (191)..(191): n is a, c, g, or t
  misc_feature (201)..(201): n is a, c, g, or t
  misc_feature (212)..(212): n is a, c, g, or t
  misc_feature (222)..(222): n is a, c, g, or t
  misc_feature (234)..(234): n is a, c, g, or t
  misc_feature (306)..(306): n is a, c, g, or t
  misc_feature (327)..(327): n is a, c, g, or t
  misc_feature (332)..(332): n is a, c, g, or t
  misc_feature (341)..(341): n is a, c, g, or t
  misc_feature (361)..(361): n is a, c, g, or t
  misc_feature (363)..(363): n is a, c, g, or t
  misc_feature (372)..(372): n is a, c, g, or t
  misc_feature (398)..(400): n is a, c, g, or t
  misc_feature (417)..(417): n is a, c, g, or t
  misc_feature (421)..(421): n is a, c, g, or t
  misc_feature (426)..(427): n is a, c, g, or t
  misc_feature (435)..(435): n is a, c, g, or t
  misc_feature (459)..(459): n is a, c, g, or t
  misc_feature (464)..(464): n is a, c, g, or t
  misc_feature (481)..(481): n is a, c, g, or t
  misc_feature (486)..(486): n is a, c, g, or t
  misc_feature (541)..(541): n is a, c, g, or t
  misc_feature (562)..(562): n is a, c, g, or t
  misc_feature (579)..(579): n is a, c, g, or t
  misc_feature (604)..(604): n is a, c, g, or t
  misc_feature (662)..(662): n is a, c, g, or t
  misc_feature (666)..(666): n is a, c, g, or t
  misc_feature (677)..(677): n is a, c, g, or t
  misc_feature (690)..(690): n is a, c, g, or t
  misc_feature (695)..(695): n is a, c, g, or t
  misc_feature (700)..(700): n is a, c, g, or t
  misc_feature (722)..(722): n is a, c, g, or t
  misc_feature (729)..(729): n is a, c, g, or t
  misc_feature (763)..(763): n is a, c, g, or t
  misc_feature (771)..(771): n is a, c, g, or t
  misc_feature (812)..(812): n is a, c, g, or t
gcatganagaccaccattcttaaaatctaaaccctttaaaatcagttacggcaattcacttaaggagcttganggccgtgttaaaaggagccaggttttcacaaganctcatccacctctgcacattggctggcactgtcacactgcagcctccgatctgctggagtacagaccacagcaccacgtctgcnacggtgagtncattcccagcnagccaaggtntcttcccaagancagagttcatggagcggaaaacagcggctttttctttactgcttccctcttttaactgaaaaatcgcaatanctacccagctatctataaggnttgcnttgacagcnttatgcttctggccaaacananagaacaagncacgtgcaatgttcccttcgccttcnnnggggcacaacgtctggntgcngaatnncatctgcnttttcggcacattcttccaaattnaagtnaattccagccgatagtnttggnggggctgttttttattctgttctccaaagcacttaataaggttttaaggcacgcncttgaacgaggagtgcgtgtncacagtggacaggaccntgaagttctcaaagagcagcctgtncagcacaagcagggagaggggaggggaggacgggtttgcgttgatcacgatgtttttnagcnccccgtaatcnttcccaagcactnaattnaagtncagcgcattggtggttaaagtngtgggcncatccgcttggattatgttggttacatccaagtntgcatctngtgtttgaattaacttggagaggccatcaactgcagctttnaactcatacagacgttttaaaatatcatcttggc

SEQ ID NO: 688971 - DNA, 136 bp, Homo sapiens
gccctgggcgtatccgagctgagggcttccacggctgctatctacttgctccagtcaaacgtggcatgactgtgttggagagcagcttagtggcttccagtaaccttctctagtgtagactcctgagctcatagtt

SEQ ID NO: 688972 - DNA, 402 bp, Homo sapiens
  misc_feature (73)..(73): n is a, c, g, or t
  misc_feature (112)..(113): n is a, c, g, or t
  misc_feature (132)..(133): n is a, c, g, or t
  misc_feature (352)..(352): n is a, c, g, or t
gggatgatgcagaggggcagattgccggattgaggcgacgatcgactccggcggcggaccccagggggcaggnacggcctacgttcgactgggatggctagggcccatcaanngaactattcattaataagnnagggcctcgggccctggactcttattaaatctggctggcgcttccggtatggtggcgtccgctaatgtatctgcggctgccaggcctgcgcattgctcgctgataatgaggctggttcttgagcgatgaggcggcctctgcatatgggcggacgaggccgagtgctccgggaggactttggattaaggaaaggatgagctttccgcagctgctcttttnaaagcaagcgatcttaacatttgcttccagccctttgctcggaagcgaca

SEQ ID NO: 688973 - DNA, 699 bp, Homo sapiens
  misc_feature (11)..(12): n is a, c, g, or t
  misc_feature (331)..(331): n is a, c, g, or t
  misc_feature (511)..(511): n is a, c, g, or t
  misc_feature (605)..(605): n is a, c, g, or t
gcgacactctnngttgacatggtgaaacccggtctctactaaaaatacaaaaattagccgggtgtggtggcaggcgctgtaatcccagctagttgggaggctgaggcaggagaatcacttgaacccgggaagcagaggttgcagtgagctgagatcttgtcccccagactgggggacaagagtgagacttcgctcaaaagaaaaagagaaaagaaaactccatgaaaccccctaaataatagggtatggaaagcttcatagttggtgaaaaaatgggtgttaggagggtgccacccaggagaaggcatggaaactctatatcttcctccancttctacccccacccagggcatactttgctcggtgcatctcttccacttagctgttcctgagttgtatcctttacgatgcattgctaaaatgtaagtaaagtgttttcctatattctgtgaattattctaacgaattattaaacctgagggagattggagggtattctcgaatttacaantgttcggtggcaaacctggcacttaaaatgggagcattttagggaactgagccaagagaattgattaattgtttgacacccaattcctgttagnaaattggagaattggtgtttggtgtcagaaaaaaaccttacagaatagttatgtatggtatagtacaaccttgacataattaacttcatcttag

SEQ ID NO: 688974 - DNA, 247 bp, Homo sapiens
caccagttccgggaggcaaggtggacaggactgctatgagcacaggagtaagagagcagcctgggtaacacagcaagagcccatctctacaaaacataataaaaattagttggtcatggtggtatgtgcctatagtcctggctactcaagaatctgaggcaggaggatcactggagcccaggagttcgaagttgcagtgaacctatacatcatgccacggctactatagcccgtggacgcacaacag

SEQ ID NO: 688975 - DNA, 392 bp, Homo sapiens
  misc_feature (25)..(25): n is a, c, g, or t
atacagctacagccacgtgaccaantgcagaaacaggattgtaattgtcacgactatttcctccttattttgttaaaaatgtttgtgcatgttacacttgtactaagaaaacatcttcattaatttcctttctttttccattatcatgtgacataagatttattgattttatatcagcatttaaatgttgttaactttatgtaatagcatttaggttaaggattagtgtgcttctggttgtatgaaggatagctgtattacgttaggtgtaattatgaccttattatttcctttatttggagattaaatatgatttcaggagatgtgtatgggttcaagttgacaaggggttcaagttgacaaggacttgtgatgttaatatatcaacctga

SEQ ID NO: 688976 - DNA, 146 bp, Homo sapiens
acttgaccttctggcatacctggacccttctggcagactggccttctgcatatgaattacctagaaatagctttggctctccttgcaaagttatttctagttaattcattatgcagaaggtccaggtatgccagagggcccatgtg

SEQ ID NO: 688977 - DNA, 141 bp, Homo sapiens
tgaggacagacactcctgcttccgagcccaaatgttgcattttccaagaccaccctggtctgccatgtccccatcctgggcctataaaaacctgagactagcgggtacacacactatctgctggacatcatgagaaacaca

SEQ ID NO: 688978 - DNA, 260 bp, Homo sapiens
caggaaggaaagcctttttaaaaaataaaaccagggttttccggcttttgtttttcaaaaaagaaaacccaaaacccaaaaccgggggcccataaattccctaacatccccagggttttcatttacttgggtggtttttatggtgggggaacctttttaaaagccagtgatgcccgcccgccttcataaagcaaagggggtctccccccccgcccaatgatatgaaaaaccctcgttgtttttccactcccagaccccca

SEQ ID NO: 688979 - DNA, 203 bp, Homo sapiens
tctcctccttttcctgcttgggcctggtgttgacacagaatggtgcccatcatcaaagtccccgctgacactgctgaacggggaggtagctcttcttctcttggaacccatacgaatccaacttcttccagccgtccgccgcctgcagccccgtgccggtcaccgaccgccgcgcctcgccccgtggtcgccacggctgctgc

SEQ ID NO: 688980 - DNA, 802 bp, Homo sapiens
ctccctttcacggccacagctgaagaagtggtggccttctttggacagcatagccctattgactagggggaagaggaaggcatcgctcgttgtcaccgtacccgagatggtacggccatacaggaggacggctttggtacctcgtttgcccgtgtgacggaatgatgcgactagaattgcggttggaggacagcgatcaaagacgttgtcgggctacaaagaatagcattgacacgtcccttcagtgagtcgacgagcgagcgtggaacgttcgagcgagtgtgcgtgaactcagacttgctccgtctggccccatctacagttgccagcttctcagacgcctctcccgatttattgccagttacttacgctcacgcacagttggtgccccgctacgaaatgtttagaagagctgtattacgccgttctgcaggtctatcctctatagcagccagacaattggagggacattcctggatttcctgggggagttcgcgcacagattattctgtactccatggaggttcacagtgcgttttggaattcacctagggccgccccatcagggagactgccatttaatcgcagatgacagtgctgcgcgacgagagccatttatgcgcttgcacaggaacgtgtcattaaagacaaaaccattgaagcgaccagcatcatgtggacagtcatttcaagtgcttcagactgcaggagactgacacttgtgtggttaactggggggagcagcttgtaacactcgcaaaaggtttaattccacaccgaccatgttaagttctccatggct

SEQ ID NO: 688981 - DNA, 519 bp, Homo sapiens
gagcgggctggaggagggagggggggacaccgagctgcggagagcgcggagagcgcgtgagggaggcgcgcgcgggagcgaacaccctcccggatccagagcccggcggcggcgaagcagcagctgcgggactgcgcccttgcccagagccgagtgcagtccgagcatagccccagattcgcctgaggcctgacagaggctcccgaggatggaagatttccccaagagacatcagacgatcatcctaagagcttcactcggagggaagctcaagctcttgatcctagaccattgtaccaaagggtgcaattggtcgacagccgtttaccgaacggaaaattaactgcagcgaagcagccagagacaaagagaatggaatgcagtggggaaacattgagttccctgtggagcagaaaattgtcaacacaggcataaattctggccaggaaggggctgtacctccagatgggagcacagaacgtgaacccgaagcatatcgccactacccagttgaaggca

SEQ ID NO: 688982 - DNA, 472 bp, Homo sapiens
  misc_feature (140)..(140): n is a, c, g, or t
  misc_feature (261)..(261): n is a, c, g, or t
  misc_feature (289)..(289): n is a, c, g, or t
  misc_feature (292)..(292): n is a, c, g, or t
  misc_feature (349)..(349): n is a, c, g, or t
  misc_feature (354)..(354): n is a, c, g, or t
  misc_feature (360)..(360): n is a, c, g, or t
  misc_feature (395)..(395): n is a, c, g, or t
  misc_feature (454)..(454): n is a, c, g, or t
  misc_feature (467)..(467): n is a, c, g, or t
  misc_feature (472)..(472): n is a, c, g, or t
caagaagcatcagccatgaaggatcccatatagatgatcaggaaaaacaacgagatcatagttagagtgagaattccacgtatccaccaagtttttccaccttgaaagataaaccagatagagcttttttgagaatctcnaggggttctatctgaggatggtggaatttccggaatatcagaatctgttctggaatccaaatctccatatctgtcatcaatatctgtttctttgatgctggtgctctcggtttcgtggtcncgccggcgcctctccctcgcggtgtggnggngacaccgcttccctggggcggggcagcttccccggtgcctcagctccaacatcgttnctccngcgctncgtggcggcctcctcaagcaccccgaaacctgagngcaagcagggttcttgcgaggggcgccccgccacgctgcagccgcgccctggagtcccnggtagcctgtctngactn

SEQ ID NO: 688983 - DNA, 199 bp, Homo sapiens
  misc_feature (76)..(76): n is a, c, g, or t
ttttttttccccgggggggggggggccccccctcccccccccccgggcccccaaaaacccttttttgggggggggnagagggggccccgttttctccccccctttttgttttttttttttttgcccccccccaaaaggggccccccccccctggggcgggggcgggggggggcccttaagggcccttttttttttttta

SEQ ID NO: 688984 - DNA, 990 bp, Homo sapiens
gcttcccgtctgcgcgagtccacagcagctccccagcatcaagaagctgaggccccaggttacacacataaagtaaatggcagaggcagaaagtaacaccgtatggtccatccatgaccccaaggcatgttcttaaagttctggaaacctcctggaggcttccttgctgctcctctggtgactgccacacctgggcagggctgataacatgatcggcccgctcactcatcgtggcttatgaaccacaggcccattcaccagacacagcagcagcaggcatggcagcaagcgtggagcagcgcgagggcaccatccaggtgcagggaccaggacccatcattcttccgagaggcccatgaccggcaagatgggacaggcatcgcattctcatgatactgcatgctagcaatggaatatacagcattcatcacatccgaagacctggcagatacactggagatacacaacagcacaggactggcccagtgctggactaccagggactgatggcacatagacctgccaagagattcatggaggcacataccaaggcaacgcagacagcaccactggcaaccctactaggccgagagcgacatgcacgcaccatggaagcattcgctcggacaggcctggggatgagatgcccataggacgcatgaggtaccaccacggaattgctgaaccaacaccctccacatgaagttggcaatagctaccttccccttgacacatttcacttaacgggccccctgttatgcacaaaatatcaccgaagaccacagatgcccaaacggaaccaccccagtcatcgcaccggaccaacacaacccacggcccgagccacaccgaaactcccccagaaggacgcaaaacaacatcacaaacaccatcacacacgccacaactagccaagaaccacacacaaacccccgaggagacacccaaacaccgacatagcacacccaacacgaagaccacacggcccca

SEQ ID NO: 688985 - DNA, 179 bp, Homo sapiens
agacatattttttaggtaataaattcttatgctaaaacattatttctgcattggaaatcttataaaacccttgaacataaacagtctcttttttacaaagcctgtgtcagcgcacagatttacctagccttgacgattcggaagaaataatatgtaagaatggcctcaaggcagaccac

SEQ ID NO: 688986 - DNA, 426 bp, Homo sapiens
ttatatacgaagtttactttatacgttgatgactggggagcatttttcgtgaaggaccagatagcaacatattttaggtttggcaggccacatcagtctctgtcatatatccttcgttgtctaaaaccttttaaaaatctaaaaatcattccgagcttgccaggcgccgtggctcacgcctgtaattccagcactttgggaggctgacacgggtggattacttgaagtcaggagttagaggccagcctggccaacatggcgaaacctcatctctactaaaaacacaaaaattagccaggcatggtggtgcacacctgtaatcccagctacttgggaggctgaggcaggagaatctcttgaacccaggaggcagaggttgcagcgaaccgagatcgcaccactgcactctagcctgggtgacagtgc

SEQ ID NO: 688987 - DNA, 251 bp, Homo sapiens
aggtccctctaccagtactagcattagtctgcaggtagtcagccagtcagtaggtagcagtcagcctgccaggtagctcagccagtagttcattggtcagtcagctagttgtcagccagacagacgctcagcctgtcaaaattcagccaccagactgttgctcagctaagcatctcattgcgggttctgccagcaggctgcttcatcttttgtctcctctattgatacccagttcctcgtgggtaggaggt

SEQ ID NO: 688988 - DNA, 143 bp, Homo sapiens
tcgcatcttgctcccatcagttggaattacaagtgcaaacactatttttatttcttaaagcaggttagagttttttttttttgagatggggttctcatcttgaattttaactccgacaactatccacttttcctgagaggagc

SEQ ID NO: 688989 - DNA, 174 bp, Homo sapiens
tgcgggggcgcgcggcgcgcgtagcgtcggctgcgcgctgaggcatggtggtgaccgtggtgttcccccgtcttgactagtaatccaaacatgagctgggcctggtgtgctgtgtgcctgtagtcccagctactcaggaggctgcagcagtgaacatcgcttgaacccgtgagg

SEQ ID NO: 688990 - DNA, 5619 bp, Homo sapiens
tccgcgccactgatatcatgcaacaccagatggtgtcatttgatcaaagaattttgctaacagaaatctcagatttctctctaagcgaaatgccttgactttgtgactgattgtgcaagaatctcaggaattgagaaaacagcgtctgtgttgctacaagactgcagctttggataatacccccctgcttttactttcttctctgtctttaacttcaaaatgtattttacaccccaaataattgtttactatttgtttcctagaacctcaaaagtcattaatttttaagaaaagtcactgtgctttgttggaaaacaacctcaaacttgaatggcttcacgccagtagttgaaaatattttacaataggccactttctggaaagtctaataaaaatcatactgagcatttttattcctgtttacacttgtagagcattatcacaatttaaattatcttcagcccatatatagcttcatattttgcagccagcaatgaagttctgcccacagtttacgtttacgactttcttctgaactgccgtatttatgttactgttttcatcactactctttttttgtacattttaccacttaaacagtaaatctatgtgttttgacaaatgtgtacagttgactaaccaccaccaatggtcaagatatggagtatttctattgccatagaaatattcctccatagaaatatttcaatttctctcaagcccatttctgctcaatcccctctccccatccccagggctagcaactgctgatctgttttgtccttatggttttgccttttcctgaatatcatataaatggaatcagatttgtagcctttcaattctggcttcttgcacttagcataatgcctttgagattcttctgcttgtatcaagaattcattcctttgattgttacccagtattcagtcatatggatgtatcacaatttatttaccagttgagggacactttgattccagtttggggcaattatgaatataactttgatgaatagctattcactactgggtcatctagtaagtgtgttttaactttaagagttgccaagctgttttccaaaataactatactattttttttctttttccttagcgtgtctactttttcatgtttttgtggtaaaatacacataagatttagcatcttaaaaatttttaagttcacaattcagtggtattaaatatattaataacactgtgcaatcatcaccaccttccatcatcataactcttttcatcttgtaaaactaaagctctattcccattaaacaacaactctccattctcttatcccctcaagccctgaaaacagccattctactttctgtgtctaattttgactaagtatctcgtataagtggagttatacagtatttgtcgttatgtgattggcttagttaacttagcagaaagtccaccgtggacatgttgttcatccattttgtagcatgtgtcataatccccctcctctttaaggctaaataataatccatcatatgcatatactacattttgcttattcattcatccataattggacacttgggttgcttccatgtttcagttattgtgaataatgctgctatgaacatgggtgtacaaatacctcttaaataccctgctttcaattcttttgggtgtatccccagaagtggaattgctaaaccatatggtaattatatttttaatttttaaggaactgtctcactcttttccacagcagctgtatcatttcacattcccatcaacaatgcacaagggttccagtttctccacatccttgttgacacttgttattttttgttgttgttgttgttgttttaatggtagccatcctaatgggtgtgaggtggtaacctattgtagttttgatttccatttcccttataatttgtgatattgaacatctttctatgtgcttactgctgatatgtctacttaagccctttgctcattttaaaatctatttgtttctttattggtgagttttacgagttctctatatattctgggtaataatcccttatcagatatatttgcaattattttcttccactctgttggttgcgtttttactctgttgatattgtcttttgatgcacaaacttctaactttcatgaagttcaatttgtttcttttacttttgctgcctgtgcctttggtgtcatatccaagaaatcattacagaattcaatattataaagatttcctgatgttttattctaagatttttgtagttttggtcttacatttaggtctttgatccattctgagctaatttttgtatatggtgttaggtgagggtctaactttattctttttcatgtggatacccagtttcacagcaacatttgttgaaaagactgtcctttccccattgaatcatcttggtacccttgtcaaaaatcatttgaccatacatacagggtttatttcagggctgtctattcaattccattggtttttatgccagtaccacactgttttgagtattatagctttgtagcaagttttgaaaccaggaactgtgagtcttccagctttcttctgctttttcaagattgctttggctattaaaggtccctgagatttcatacaacttttaggatggttttttctacttcctcagaaacgtcattgagattttgatagggaatacattgactgtgtagatcacttcgggtagtatggacatcttaacaacattattgacatcttaagaacattaagtcttttaatccatgaatatacttaagtatatcccatggatatacttatgtcttctttcattttttaaattaaagctttgtagttttaagattataatatagtaaatgatggaaaaaaaggcatatagaaaataaatctcaaaatgacagaagtccccacttaacagtaattactttaaacgtaaatggattaaactgtccaatcaaaagacagattggcaaaattaggggaaaaaaacatgattcaactatacatgatctacaagagactcacttcagatccgcagacacaaattgtttgaaagtggaggatggaaaaagacattgtatgttaacagtaatcaaaagagagcagggtggtattctacaaatttatcttagcactagtttcactacattgcataagttttgttatgttgtatttttgtttctatttgtctctaagtattttcttctttaaaagtttatttttaattaacaaatgataatagacaggagaaatacattctggtgatctactgcacaggatggtagccatactttaataataatgtatcatataattcaaaattttgaaaatagtggattttaaatgtcaccacaaagaaataagtatgagaggtgatggatatatttattagcttaaatatatcctttggtgatttcttttgtgatttctttggtgatttcttttttatctatttgttgtttaagagtgtggtgtttaattttcacaaatttgtgaattttccaatttacttctgttactgatttctaacttcatccttttgccatcggagaatatattttgcatgatatctcaaataaatctcaaagtgacagaagtcctcacttaacagtaattactttaaatgtaagtggatcaaactgtccaatttttaaatttatttatacttaatctgtggcctaacatatggcatatcccagaaaatgttccgtgtgcacttgggaagaatgtgtatgctgttgctgttgaatagatgattctgtgtatatctgttacagctagttgactgtgttattcaagtcttctatttccttctttatcttttttgtcattctatccattattgagagtgtgcttttgaagtttccaactattactgtagaactgtctatttcttccttcaattctgtcagtttttgcttcatatgctttagtggtctaccattaagtatgtaaatgtatatcacaggtatatcttcttggccaagcttggtatgagagtcttagggagacagacttttcattctagttaagattcatttcacaaaatttagagtttatgtacagttcatatggcattgttggattgacatagttcttgctgacatgttttatcttggttggttggttgatttgtaatatttctttaccaaaacacagagtcagtgttaaataacaaaaacaaaaacaaacctcagttctgaaagagctacagaatgctaatctatgggattttggctacgtcaaaaagttggtagaaagtagcctcaaattctgttccacatggcactatctgaaagagagggcataattttttgttctggaaggatctagggggcatagtatccaaaaccaacctcttgatggtatatttcttccctctgagtttgattgtgaacaactgacctccaagggaggctcaaatcaagattctttttattctttcatttcacttctatcctgtttcttctaataatcataggtctctgctagtattcatatctggcaaaacaataaaggactatcatttcttgggagaaatggtgttgctgcacagtacaaatttagttataaatcatgagggtttagtatttgtcccatggtttcacattttgaaatattcagtgttcatactgaattttaatatttgtagtaatgaaatagtgaacatttatagtattgttttcatatttgttattttggactctttgaaacctaggaaaagcaaacacataataatgtctcatcatcctgtttcctgcaaaaacctttcactgatattcttcttatcgtttacatataaactatttacttatgggtagaattcacaacaacttcagaaatgggttacttgtggagagggagggaatgcagaggaaagaatgagtatcctctggctatatctgttatattgtatttttctacctaaaggaaatatgaagtaactacagcagaatgttggattaattcaactctggcgttgttaacaaaatcatatccatcctactggatgatggtttagaataaacttgctaaagaagaaattcacacttttccctaagtgagtcttctatgcaacaacagggaaaagagaatttcagacatttctttgctttttaatttataaagtgaagaatattttatttggattttgtttcccagaagagaatagtaagagaaggttcatattactcaaatttgaaacactctttattgtattatgattatttgacatcactatacatcttaacctgagtccctctcagaaaacagagctaagacaaggcttgtatgcaaatagttagatcagagatgtgatcccaggtagcaataatagataacagagtagagtgaaccagagaaagagggaaaaccaatacaggtgagattactaagttgctcaccattatgggtaattagaatttgatctaactagattcttctgagaagccattagaatgggcctcaggattgtctgctgaatagatggatagcggtattatgcatcagctctcattccctatgggtcaagatttcctcctggggatgttaactcatctgcacttccaggttgaagcaaagctgaatgccaggcacccacaccttagccctgtggca

SEQ ID NO: 688991 - DNA, 131 bp, Homo sapiens
ctaagatccccagctccacaagagaggtctcggtatactgtgctcctgacatcttccttattgttttgggaactggtctaagatgcatacctatatatagactttaatccctttaacaagaagattaattt

SEQ ID NO: 688992 - DNA, 350 bp, Homo sapiens
cccacgcgtccggtgttggaatggattccagagtctcccagcattgactatttatttataataaggaaggggaggctgggcacggtggctcacgcctgtaatcccagcacttgggaggccgaggcaggcggatcacgaggtcaggagttcgagactagcctaacaaacacggtgaaaccccgtctctactaaaaatacaaaaaattagccaggcgtggtggtgggtacctgtaatcccagctactcgggaggctgaagccggagaattgcttgaacccgggagatggaagttgcagtgatctgagatcactgcactccagccttggtgacagagcgagagacttcctctc

SEQ ID NO: 688993 - DNA, 791 bp, Homo sapiens
  misc_feature (7)..(7): n is a, c, g, or t
  misc_feature (40)..(40): n is a, c, g, or t
gggaaantcccaaaagggaaaaggaattgagggtttcccntccggggccaaaaattccgggttaaaaaatgggaatttttttcccccccctaaaagggaaaattattgaaggtaacctcccagccagaatgttggattaattcaactctggcgttgttaacaaaatcatatccatcctactggatgatggtttagaataaacttgctaaagaagaaattcacacttttccctaagtgagtcttctatgcaacaacagggaaaagagaatttcagacatttctttgctttttaatttataaagtgaagaatattttatttggattttgtttcccagaagagaatagtaagagaaggttcatattactcaaatttgaaacactctttattgtattatgattatttgacatcactatacatcttaacctgagtccctctcagaaaacagagctaagacaaggcttgtatgcaaatagttagatcagagatgtgatcccaggtagcaataatagataacagagtagagtgaaccagagaaagagggaaaaccaatacaggtgagattactaagttgctcaccattatgggtaattagaatttgatctaactagattcttctgagaagccattagaatgggcctcaggattgtctgctgaatagatggatagcggtattatgcatcagctctcattccctatgggtcaagatttcctcctggggatgttaactcatctgcacttccaggttgaagcaaagctgaatgccaggcacccacaccttagccctgtggca

SEQ ID NO: 688994 - DNA, 368 bp, Homo sapiens
cttcggcatgaggatagctgcaaatgccaacatttaaaaagatgcgacatcttggctgggtgtggtggctcacgcctgtaatcgcggcactttgggaggccgaggcaggcagatcacctgaggtcagaagttcgagaccaacctggccaaagtggtgaaacctgtctctactaaaaacacaaaaattagccaggcgtggtggctcacacctgtaatcccagctattcacgaggctgaggcaggaaaatcacttgaacccgggacgccggaggttgcagtgggctgagatcatgccattgcactccaagcttggggtgacagagtgagactctgtctcaaaacaaccaaccaaaaaattccctagaaag

SEQ ID NO: 688995 - DNA, 269 bp, Homo sapiens
tcatcgaacgggtctggaggatcatctaagtcgatcaggtgtccgatttacacgatattgagagggcagcacgatactcacgtgtcgacggaacttgtacaggcaggcatgcaccgcagtggtgaatacacgtcgaccaggctccatgtttacgatatttggaggtgagcacggagctcatgtattgaaggaacttgtatagggaggtatgcatcgcagtggtgaatacacgtcgagctggaggcatgcatgcatgctcgggtactgga

SEQ ID NO: 688996 - DNA, 213 bp, Homo sapiens
ggttatatgctgtctcaggtatgctggtctcaaattgatgttgggggtacaggttcagcaacttcctcacagcactggcaggaacaacccatccccaagtttcatggatggttgggcctggtgggacaggcagtgaccctggcccctgccccgttctggggtgggcaatagtcaaagggcgaactctggcaattccgcgtgagacttgggctc

SEQ ID NO: 688997 - DNA, 496 bp, Homo sapiens
agcctgcgtcacgtgccgtctgcctctgcacgtggccatctcccaaccagctcactgcgttctgaatgaactcagaaattgcctgcctcaattctgagattttcagctcataagcactgggagagaacgttcagacccgaggtgctgtatcaaccttccgctaagcactcctggcaacatattcaatgtcgacattgttcaccgtgtctccagatcaccagagggacgtgggcaccttgccgcagcgcctcaccaatcacgaccaaaacataaaggggctgacttaggggccagggctcgttccacatgcaaactcaaattacaccccggaaagaggcagcacagtcattctccctgtgcctgggaacacacagtacagagggccgggcttccagcgctgctccctgcagtggggcctcaagacgaatggccagcgctcctgtgcacggctcccataaataccccagtgtgatgttcccatttctccttcccagag

SEQ ID NO: 688998 - DNA, 119 bp, Homo sapiens
ccggtacttaagctcctatgccactgcctgctggtgaactcggtggaggaggtcggcggccaggctcaccagcaggcagtggcttaggagcttgaagttgaccgggtcacccgaagctt

SEQ ID NO: 688999 - DNA, 348 bp, Homo sapiens
ccccgtacgccaatgtagcggcttgtaaaaccgagaaagggaaaacagaaaatcaattaacacattaaccttccatcttgatgcaatccatagtaacactctgataagttattactagatagtttaacacccataataatgtatcacgtagagttgttcaccacgtatgatgtactcccttgattgtttttcactaatgtacccctattacactctataaaacttgcaaacatcatactataaaattgcataacttaatgcttagcattatttggtaagcatgtggatgtttgatacccttgatatgcatgtcatacggtgatgatgtggatagagcgtacgcggagt

SEQ ID NO: 689000 - DNA, 607 bp, Homo sapiens
gctctgtaagtgctcccaggagaaagccatgttcagtgtgagcgccaagatcgcgaaacccactgtcgagaagccggaccagatcgagtccgcgatctcccaggctcttatggagctggagatgaactcggacctcaaggctcaactcagggagctgaatattaccgcagctaaagaaaatggaggtgcaggtggacggaaagctatcataaactttggttccggtgctcaactggaagctttccagaaaatacaaggtcgggtaggacgcgaattggacaaaaaggtcagtggcaagcatggcggctatatcgctcagaggagaattctggctaagacaactttaaacagccgtacgataagcgcaagcgtcccaggagccgtactctgacaggtgtgcgcgatgccatacttgaggactctggcttcccaagcgaaattgtgagcccgagaattcgcgtgcaactagatggcagccgtgtcataaaggctcatattgacacaggacagcagaacacagtggatcacacagtttgaaactctctctggggtctataagctcaccggcaacgacgttgatttctgaatatcagagcctcaatagtgc

SEQ ID NO: 689001 - DNA, 286 bp, Homo sapiens
agagacggggttttgcgatattggccaggttggtctcaaactcctgacctcaggtgatccacctgcctcggcctcccaaggtgctgggattacaggtgtgagccaccgcgcccacccgctcctgggtgtctttgcataagagaatggaacacacagcgcacggaagacctgggaacattcacagccgcatctgtaacagccaaacagtggaaaaggctggaatgtgccccaaggaatggatgggtcagcaccgtgcagccacccacacacgaacacgactcaggag

SEQ ID NO: 689002 - DNA, 365 bp, Homo sapiens
atccccgcattctgattgcggcgcatgcccaatgcgttgtgactaggaaaaccgtgccgattggaatgccaggtgtcgcgtgtcctctctgacttcaagccctgactcgtctcccacagaccacccctccacgtgtgctggccctgcttgcacgaggattgctggttccccaaatccacggaccattctttcgtggataagctgtgcacggagcagggcatccaccccaggttccagaagcccatgcagctcaaggacaagactgcgttctccatcatccattatgctgggaaggtaccagccacagggcccaggggactctgtctcaggggacccccagtggctgctcagcgccgagatcagat

SEQ ID NO: 689003 - DNA, 430 bp, Homo sapiens
  misc_feature (19)..(19): n is a, c, g, or t
  misc_feature (63)..(63): n is a, c, g, or t
atccagcctaacacttttnatcctttgtgtccccatgtaaaaactgttaaataattaagtttncacccatgcccagcttgatccaaaaagtccagtccccagcacagtggcctcacaccctgtaatccctagcactttgggaggctgaggtgggaggactggttgaggcccagaagtttaagacccagcccgggcaacatagtgagacccccatctttacccaaaacaatattttaaactagttgggcatggtagtgagctcctatagtccaagctactcgagaggctgaggcaggaagactgcttgagtgcagaagtttgaggctgcagtgaactatcattgtgccactacactccagactgagtaacaaagtgagaccttgtctctaaaaaaatcataataaaaagtcagtgaaagtattaaaaaaaa

SEQ ID NO: 689004 - DNA, 1068 bp, Homo sapiens
agcagtgactcacgccggtaatcccagcactttgggaggccaaggtaggcagataacctcagtcaggagttcaagaccagcctggccaatatggtgaaaccccgtctctactaaaaattcaaaaattagccagtcttagtgacacgcgcctgtagtcccagctactcgggaggctgcggcaggagaattgttcgaacccaggaagcagaggttgcagtgagctgagatcacaccactgcactccagcctgagcgacagagcaagactgtctcaaaaaaaaaaaaaaggggggtacaatttttgctttcttccagctaaggtaatggcttttctagaaaaaaagcaattcaggggaaacattttagagcaagagtgattagtcgggtgactcgtaatggtgtaataattaaaagctttccttagacaattaccacaaaaaaaaaaaagagaaagaaaaaaaaaaatttggggggcgaaaggaccccgaaaaagccttcaaaccaccattgtgtgggggacggacgggaccccagagacatcacgacacacgtggcacagcaggggtccccgagagaaaactcggcggaacgacacaaagcgcgggggactcccacccaaatataaaaaacgcccggggagaacacgcggtgtttcgagaccaacatcacaaaaaagggggcatcagcagaggcacaacaacgggaggaccaacaaacacaggaggtgcacaaaggagcggcgccagattaaataattatccgccggcgcgcctgcggcgaggacaaagcacgacacgagacgaagaaacgagagagcaaaagagaggagagagcaacaaacagcagacacgcagagcagaacaaagagaaggaaaagaacaaaaaaagaccaagacaggagcgacaagacgaaagaagagaagaagaaacaaaagagaaaacgaaaaaaaaaagagagcaacagggagaaaaaaaaatagaagaaaaggacaacaaagagcaccacgggacaaacagaaacagagaaagacaagaacacagagcaaacggaaaaagagagaagagaaaa

SEQ ID NO: 689005 - DNA, 150 bp, Homo sapiens
gaggaaaccgtgtactattagccatggtcaaccccaccgtgttctcgacattgccgtcgacggcgagcccttggccgggtcttctttgagctagtttgcaagcaaggtccaagcaagcgaaattttcgggttccagcactgagaaaaagg

SEQ ID NO: 689006 - DNA, 386 bp, Homo sapiens
ggagagagagttttgctcttgtcgcccatgctagagtgcagtggcacaattttggcttactgcaacctccaccttctgggttcaagcaattctcctgcctcagtcttccaagtagctgagattacagacatgcgccactacgcccagctaatttttgttatttttagtagagacagggtttcaccatgttggccaggctgatcttgaactcctgacttgaggtgatccgcctgcttcagcctcccaaagggctgggattatagccatgagccatcgcacctggctaaacacatttttttactgtagaaattaagatcaaatgctgctctgattttctaaaaataataatgatgatggtcgacgcggccgcgaatttagtagtagta

SEQ ID NO: 689007 - DNA, 89 bp, Homo sapiens
  misc_feature (16)..(16): n is a, c, g, or t
gaattcgagctcggtncccctatcaatgaggcgattccgctatcaactgaggcgattccgctatcaactgaggcagatccgctatccgt

SEQ ID NO: 689008 - DNA, 404 bp, Homo sapiens
tctatggcgcctctctccacaatcacttggagatatttattcatctgctattgcattctctactctattatcattaacctagtgtatatcccccagactggtactattttgtcgtggtcactatcagcgtgtaataagctttgaaatccgctgcaccgatgatggccccttcagttatctttttcacaatagtttctggttattctagtaccttcgtctgttcagataacttttagcatacacttttctgtatctcgacatacaaatcttgctgtgatatataacaggacttgcatcaaatctttggcagaatcgacatcttcactgtgtagagtcttccaatctattaacatggtatgtctcaccatttgttgaccacagatagtcagcagcagggtaccgag

SEQ ID NO: 689009 - DNA, 503 bp, Homo sapiens
tacttctcgcaggctgtggtgtcactgctggctttccgagcctcaggaggaagagtgtgctattgtagtgaaagctccagcctgcttgttagtctagtcttaactctataaattatggactctgagacttagtctaattacaattgaaacgattctgaagcattgtaatgcagtgaagtattcaaagtaatatgaacattgcattgacatttttctaaatgtcaaattgacatcattctgggctcctaccatggcacaagttggaccaaataatagctaatctgacaacaagtggtacactccagtattttgttttccattctatttcattccatcccactccattccattccagtctgttaaaaaagaattatttcacaaaccatttgaggaagccttaacgtgagataactcacagtttgagaaacacgggttcacttaataaccacctacctgtatacagcactcttccaaagaagcagtctttgtcctttataaccgta

SEQ ID NO: 689010 - DNA, 346 bp, Homo sapiens
agtagtcgagaccaccttgggcaacatggtgaaaccccgtctctactaaaatacaaaataattagccagcgtggtggcatgcgcctgtaatcccagctacttgggaggctgaggtgggagaatcgcttgaacccaggaggtggggggttgcagtgagtcaagattgtgtcattgtactccagcccaggcaatagagcaagactcaaaaagtgcaaaagggagtaaccagcgaaaaaaaaaagtttctcattccttcaagccacggtcaacccacaagccacggtcaacccacaggccacggtacacccacaagccacggtcaacccacaagccacggtcaacccgc

SEQ ID NO: 689011 - DNA, 266 bp, Homo sapiens
taccccccagtctatctccccgtcaacccgaggctggcttcagtgagggcgcggagcagccattctaccagtgccccgtggttgcccctggcacgtgtgcgtctgctgctccgggatggagctggggtgtgggatgcacggcctcgtgggggccgagccgacctccagaacccgcatgctcccatggccagcccccttgtcagactgacgtgacccgtctaaccatgactgccttcacctgtggagtgtaacgtgggtgcctcact

SEQ ID NO: 689012 - DNA, 147 bp, Homo sapiens
acagcagctttagtgtgattcagatgttgatgtctagtggccttgggcttagtgtggtatccaataacagttgggtcttagctattgtgtgttcagatatgttaaagccactttcgtagtctattttgtgtccccgtcacgacttga

SEQ ID NO: 689013 - DNA, 161 bp, Homo sapiens
tgggaggctgcagtgcattccagcctgggaaacagagcaagaccccatctcaaaaaataaaataattaaccaattcattaattaaaataaaatgggaggccctgtgagggagcaaggtgggagttcatgcttcagccctggattgaggacagctgtgaggg

SEQ ID NO: 689014 - DNA, 92 bp, Homo sapiens
aagcaggctggtacggcggaattggatggcggaaggtgtggctagttctctagcatccaggcatcctcgtcgctgcagcgacacacgctctc

SEQ ID NO: 689015 - DNA, 502 bp, Homo sapiens
  misc_feature (251)..(251): n is a, c, g, or t
catgcgaaatggacgttattggtttaacataaaacttatggtatcctaccaagaatacatgtcggatcaaagacattgatcgagccacctaacacatgggtattttaatctgtccatggaggtggaaatgatcgaaagatgttgtttcttttataccagctaaggccgagtgaacgtggctgacacgcggtgggggaaatagaaccgtcagaagttgaagcaccaaatctacctgctgacacagtgtcggncacattcaccatatgaccaggcttaacactctgcactgacacagagagagcataatgcgtcttcagaacactacctgtgtatgcgagctattgagggaagcccatattgacttgggcgatgtattgacaaagttctttgaagcttatggcgttctcaatgccagagcgctggatgaggaccaccaacgtcctttggtacaattcagccagacactctgggaccacccttgacttgaagcttataactacgt

SEQ ID NO: 689016 - DNA, 206 bp, Homo sapiens
gttgcacaggctggtctttgaactcctggcctcaaatgatctgcctgcttcggcctcccaaagttctgggattacagacatgagccaccatacccagccaaaggtcagttttcttaatggagaaatcccaagagaaagaggcaatcccatctttcatgttgtactatcaagttcagacatgctttgtctgtatcttccttcaggca

SEQ ID NO: 689017 - DNA, 843 bp, Homo sapiens
  misc_feature (282)..(282): n is a, c, g, or t
gctcaggagggttccgtgctgctgccggtgtctatgggaccctcgccctcgcttctcggttctatctgccccaggagccgcggcgggtccggtgatctctccgtctcgttgtccggctgtcggcgcgccgtgccactgtggcttgtgcgacgagacccacgtggcgtgcctccttggtgcacctcttctcctttcctgcatgtatacgctgctgcatgcttggtgacgtcggacgctccggtcgactagctctgcactccttcaccgtgcagcctcttcgtntctactggcgccgttcttgcagcttttgacgcctggtgcccctcttgtccatgggcctctgcactagtgctcagatgctccctgggaccagcatttcttgccattcgcccatccgtgaccggacagcccacctgacgctgcccgagacacagcgctgagcggccacttctcgcagcctacacgacatggacgcacacacgcgcgtggacgttggaccatcgacgctttaccttactgacgtgggattcctggatcttcaatgccacgaagtaacgaccagtcagcaataggcacgcactgcatgggcgactggagccgcaatagcagctgcactttggcacccatgcggcgaacctacactcttacggaaaggctgtaagggcgttggccccggtagacgccccagggacgaatttccacgccgcacctcgatcctgtccggttgcattcgcagcttaggaatccctcctaaccccttaaccggcaacagcctcgcccggcgcgacggggccttgaagcccactagaccctccacacatcttccctcccgacagtcagccg

SEQ ID NO: 689018 - DNA, 348 bp, Homo sapiens
ttagcgatcccttggcagacactagtgtcgcctgcgtgagcgctaggacctgcttcatctcagccgattggtcgaacgcctgacccatgtagtttctggtcccggccgagaagggaattaaagtcagaggtgaccgtctgcttgattttctcttggttgaaacggaaggggtcgtgaatcttagaagcctagcgggccgtctgggagcacaaagtcctgcgtgcaacatcgctagatgaccgggactgggggatgcaaccgcaggctctccttaatgcacatggtcaggaagggcagctgggccaggtcgtcccattcaatctctataggttcacggtccctcagaag

SEQ ID NO: 689019 - DNA, 564 bp, Homo sapiens
actatggtcatagctgattcttgaggataaaccacagtaccgacagttggataggctttgcgtagatgattttgcccaacagaagtctaatgtaagtgttctgagcatgttgaaggtaggctaggctaagctatgatgtttggtaggctagatgtatgaaatgcattttcaactcgtgatattttcaatttaaaatggattcattgggatgtaacctaataaaaacttgagcagcaactgtatttgaataaattacagtatacagaaaaggcaatactcaaaactcatcacgtcataataactgtactatgttttaccattatctatgctttggcagctatttacatgtattgtgtctgtatgatgacaactatataatgaggtgctactgcacatctctttccaaacctgcattctataatgtgatgttggtggcttgaaattggctttccgctacagtaaccaaaacagcatggtactagtacaagaacagaaacatagaccaatggcacagaatagagaactcagaactgagtctgcacacctacaaccatctgatctttg

SEQ ID NO: 689020 - DNA, 556 bp, Homo sapiens
cctcaccggtcagtgtgtacttaggcgtggggtctggagctccagcatcatggagtgggagtcacaagatgtcatagaacagagttgtccagcatgacggaagcaaccacgtgtataaatgctcaggaaagagcagcacagagagcagtgaaattggtggcaagctgctgaagaccagctcctgaatacctttgttacctgtgtcacggcgaaggttccagtcctgatgcatcatgcgcacgcttggtgggtgcactcactcgcagaggtggtatgctctagtttttctcctctggaatgttaacttatcggggagcattttcatcaataattgtggtgagaccataagcacaaagactggcccgccgttgcccaattctcgcaacagaggaagtggaggtttcagttgagatccaagtagcaattgtgttgctttgtaattacgtacgcagaacatggaattctagagatcagtcaactcctagttgtgatatacaactggatttaggaccttgaaaggatttttcaaagcctctgagcctcattttctcaccag

SEQ ID NO: 689021 - DNA, 663 bp, Homo sapiens
aaacaagaattaaacggtattttaacggagacatgaagccttccattctgcaatcaacaattcagctggagaaatggttggacaatgcatgcgtttgaggccttttgaatataacgccatctgtcaaaagggggattcagctaagtcaattaagtggggtaacgcaacagtttcgcacgcatagctgatgtaaatattcgggcaatgtgatttgtaatatgactcgttataggcatcatggggactgtgtcccccccctgagttcttgattgttcttgttcgggaatcacataatacctgtatttcattgtggataacgtccgcatgagcagcctcagaacgtctgtaactgcttgttgatgctgcaagctttgcttaccttgagcacgttgaagcacactgtcttgcgcacaggccggcactcgtccactgtaatgatgtcaagactctggacgtccctcaagcatgtgcacagatgtacaaacatgttcatgtggcgcttctttaagcggttgtgcttgcgaatgtagtggatatagtcccgcagtatgacaatggtccgctgaatcttcatcttggtaaccacgcaatagagaaccgccctcgaatgaacacattaccagtcaagggacatctctagtcaatgtaggtgccctcaatagc

SEQ ID NO: 689022 - DNA, 148 bp, Homo sapiens
gactctagaggatttctgtgcgcgggattctcatagcctctcggtctcaccatagcctcacctcggctcctccttaggcctgcctgagcttctatcaccttcctggtctgcctctccaggcccggtgcacatggcttcggaggtggtc

SEQ ID NO: 689023 - DNA, 1100 bp, Homo sapiens
  misc_feature (172)..(172): n is a, c, g, or t
  misc_feature (608)..(608): n is a, c, g, or t
  misc_feature (610)..(610): n is a, c, g, or t
gctttccggcggggctcgcgagcgaggcagacatgtcttatccctgctgatgattatgagtctgaggcggcgttatgacctccttaggcttatcccagtcgtactatgatattgcacaacatggagatccataagacaggaccttagcttatgaaacgtcagtatgaacagncaatagctatcaaggtgatccgctgagagtgagtcagaaagacttgcatcgcagatcattgtcacacgaagagacgttgtcgtcagcactttgatgtgactcgatgcaaatgctgtactgaggcatacggaggccatgtcctgtgttctccatgttgagtgtcgatttagacctagagagagtagtagtcgagagtcgcgatggagctctctagtgatgacactggagctggtagccagacgcctgatctctgcaatgatatcgatatcatagatagtaccaccgattgggccccggagcggctgtgacatgtccacatatgcttcgctaactaagtgattagtcgctaggagtgtagtggcagtggtccattgcgcatgaagattcctacttgcaccattagatgagaggtttactaagcggtaaacgaaggggncngcgagtgattgagtagacgcaacagaatggtgcgaggttgggggagcggaccctgtccgcttatggtgcagacgcagatgaggttcccgaaatgccttgagttcaccaagcgtgagctccgtcgaatcgtgcttgccaatcttggcacagttccttttaactggcagcgggatggttccctgggctccccctgtgaaacttgagctctaatcacatgttgtgtcgtcttgtgtgcatatttgattcggattgaaggtttcagtcttaacaccaagattgttcaaggtcaatcgcacggtccacgtaacccgctgtagaagaacttgccacaggaaggtcaggagcgacggagcctttggacgtttcacttcggttccgaagttcccgcagaaatgctgggaactgttccatcagtggtccctccaagtgtgcctgtcagttcccgtggttagacagaatccaaacttcaagcgaccagttgggcagggta

SEQ ID NO: 689024 - DNA, 275 bp, Homo sapiens
ggagagcgcgtgctccaccagcaggacggacaggttggcagcgtcaatgtgcagccagccgataaagttgcggccttgtccatgctctccaactccacctccacctcacgctgaagcgccagtaccttggttgaaaaagtgtaagctacatcgctgaaaggctctccttcctgcaacaagcctgggagggtacgagctcctctggggcattcactgcctgcaagcaagaaggtgatcaggcaagttcccattggcaaatagagtatgagacgaga

SEQ ID NO: 689025 - DNA, 1293 bp, Homo sapiens
gcaaagaagctttctggacatccgttgcccggtccgctgtaacatcaaagcaaagaggtgttatatacgtgcgagtctgatctccagagtgccagcgcatgcctgtggcaaacacatctgcgctcatgaaacatggctgatcgtgatcggccgagaggcacctgaccagtaacactggtagacttacatttgccaagaccatgtgccgatgaaaggcaaccatcaccaatccacgtgtatactgtgtatcagtgcgtatgatcacagtgacagagactgagtgtccaagcactggtggactgcatttgctcacgagtcggtgggtcagaaggcacttcctggcatgtctcttgcaagagaccaggactgtagggcccagtcagtcaaggatcgtatctggccacgtttgggcacgtcgggttatgctgacctcaagctttccatcgtgttggcttgtacagatgtcggacggtctgattcacccgctcagggacgcccctcggggagcgctggaggtatgacccaatgatggcgctttgtcaagtaattggcttcctaggcacgctgtcttcgagaattcagcacgtacagcttttcggggccgcttcgggagaaccggtgagcaaacaagatcactctagtccagccctgaataagtccgaactggcgaacatggaggtttatcccagccgtagggcccctgcggattgcagattgagtgtcgggtaaacgagagatacagcaaaacttccgtcaggctttaccccgcttgttactttcgaattcgggaagcgctggatttaactatctttgtcaggccccgtcctggaactctattgggaaccgccaaagggattgtccccgtagaagtgggcaaacattgaaagcagttcttaagcggctacgttcagcgccagggctcaccggaacaaggccccggataaagcccctgaactataaagacgggacgccagccggttcaaattcgggagcattcttctaaagatgccccgacgtttgaaaccggtccatggttttgatttaagcccggggaagctgggctcccaacgttgatgtaaaggccgcagaaagagtgtcaatcccagaccacagggcacggacgaacccttcgccaaggggtgggctaatcccaaggatgggggcaacggaggaaatcccgggaaaacaaccagagacaggatgaaggaaccgccacagaaacccgcgcgtatacacacgtgataactttcaccacagaaaaaacataacacaagtctgacaaagacacaacag

SEQ ID NO: 689026 - DNA, 358 bp, Homo sapiens
  misc_feature (314)..(314): n is a, c, g, or t
cagctgccttatccaatcagagctatgctgtctaactgcattggtcatccttaaactggtttagttgactaatgcattaaaccacacattatcatgaagttcggtcactagctccagacggacctattttcttcatcctctggctccttttgttcgctcccctggtttaaatttttttcccaaaaatgccgctgttgttcttcctccagcactggctggcctttgctctgctccatctggaaatccccactcactttcaaagaccagtttccatataacacaactcttaattcctcagttaattgctccctatnttgtgtccctaaggcactttgtacatggtgatattttagtactt

SEQ ID NO: 689027 - DNA, 125 bp, Homo sapiens
taaactcaggagcgagctgcaggaagaaggtgaagatatagatatgtccatggtaaatgttgagggctccaaaaatatactcctcaggacacagcgagttggcgtcgttaacccattcagcaact

SEQ ID NO: 689028 - DNA, 161 bp, Homo sapiens
tagaacacagaggaggtggacatgcatgaggagggggcagagaggcggctcagtgttgccctggctctgtggcctcaggactctctgcctcaccctgcttcagcccagtgacccctgtgagactagatccccgtctgtgctagtccacctacctctgtagc

SEQ ID NO: 689029 - DNA, 496 bp, Homo sapiens
  misc_feature (56)..(56): n is a, c, g, or t
  misc_feature (73)..(73): n is a, c, g, or t
  misc_feature (127)..(127): n is a, c, g, or t
  misc_feature (133)..(133): n is a, c, g, or t
  misc_feature (146)..(146): n is a, c, g, or t
  misc_feature (162)..(162): n is a, c, g, or t
  misc_feature (169)..(170): n is a, c, g, or t
  misc_feature (180)..(180): n is a, c, g, or t
  misc_feature (188)..(188): n is a, c, g, or t
  misc_feature (201)..(201): n is a, c, g, or t
  misc_feature (289)..(289): n is a, c, g, or t
taagatggtacagtagtagggaagcggccccagacaaggaagctggcaaccagccncagagcagcgatgggancacctcgtcttgaatctgaccttgtccaagaaggctggacgagagaccttctgncccctnccagagggggaancctggcactggcccancagcctnntctctgagcnccatgtcnccagataaacagnccagactgagaaggctctccagaggcctctgtggcctccacttcgggaaagccctctgcccaacccacaggcttcacattcccaccancttcgcaccgtgcccaggtacactttcaagacactgtaaccacaagatggtatttattgagctggcgccgggacttgaggcggggcctgccattcagtgatcagctcacagcaagaacgctcctatcgtgatcgcacgggtagggttacagtccacccctttatatcctgcgccagcgctatcatttggcttcagatctataatcac

SEQ ID NO: 689030 - DNA, 420 bp, Homo sapiens
  misc_feature (56)..(56): n is a, c, g, or t
  misc_feature (73)..(73): n is a, c, g, or t
  misc_feature (213)..(213): n is a, c, g, or t
taagatggtacagtagtagggaagcggccccagacaaggaagctggcaaccagccncagagcagcgatgggancacctcgtcttgaatctgaccttgtccaagaaggctggacgagagacttcgcgcgcctcttctctgagctccagaggcctctgtggcctccacttcgggaaagccctctgcccaacccacaggcttcacattcccaccancttcgcaccgtgcccaggtacactttcaagacactgtaaccacaagatggtatttattgagctggcgccgggacttgaggcggggcctgccattcagtgatcagctcacagcaagaacgctcctatcgtgatcgcacgggtagggttacagtccacccctttatatcctgcgccagcgctatcatttggcttcagatctataatcac

SEQ ID NO: 689031 - DNA, 101 bp, Homo sapiens
acggacggacgagtcggggggaaaatccgaagggctcccttcggcaacccaaagaggtacgggtgttggatttgggtagtgaagtttacgtatggcagggg

SEQ ID NO: 689032 - DNA, 465 bp, Homo sapiens
  misc_feature (412)..(412): n is a, c, g, or t
ttttatggacagaagttcaaaccagccacattccctaagccaaagactaatccagagcaaggccctaagtctctgcaattctatgaaggccgagagaggtgaggaagttttagaagaaaagttgaaagctagcagagggtggttcatgagtttatggaaagacgttgtctccatagcggaaaagcacaaggtgaagcagcaaatgttgatggagaagctgcaacaagttatccaaaagatctaacttagataacggctgaaagtagctacactacacaacagattttcagtacgtacagccttccattgggaattaatattccatatccagattttcacttgcttaggggagaagttaaatgcctagcttccaaagggcaggctggattattctttgtttaggaggattgcnggcttggttgacatggaagttgccagcccattgcttcacttaaccctttcttg

SEQ ID NO: 689033 - DNA, 350 bp, Homo sapiens
acatgccaacctatctccattaaaatacattagccaggcatgttggcacgtgcctgtaatcccaggcactcaggaggttgaggcaggagaatcgctctgggagacggaggttgcagtaagctgagatcatgccactgcacctccagcctgggtgacagagcgagactgtttctcagaaaaaaaaaaaaaaagaaggtgaggggtgagtctgtgagtgctgatgtgaaggccgctgaagaatattgggaaatggaacataagcggatggtgcaggaacattatgggccagagaaaatctccaatagggttgaaactcccctattctgaaactggatgcctaagaacacttc

SEQ ID NO: 689034 - DNA, 108 bp, Homo sapiens
ctggatcctgacttccgccactgttctatggtctcaccatgataaatcaaaatctggaagaatgtgtccatgagaagaatacgatctgcaaggaacccaatccccgag

SEQ ID NO: 689035 - DNA, 107 bp, Homo sapiens
ctagaggatcccgcggatggacgagagaacgcagaatatgtggagcaatgctattagagaaatatttgctacctataacactgtgtactcttgtaagtccacaacaa

SEQ ID NO: 689036 - DNA, 687 bp, Homo sapiens
  misc_feature (35)..(35): n is a, c, g, or t
  misc_feature (275)..(275): n is a, c, g, or t
aataggagttacaccgtcgtccttcgttaagaacntagttccgaaggtctgttcctgttacgatatgcatacgtcgcatccgaaaagtgttgctagaaattctcataagccctcctagaagtctctggcatgtggtccctataaaccaaacggtttggcaataattttttcaccgtttaggaagcctcacacgcatttcaggccgaattatgtatcctggcaagatgaagcatttctctcataccgctactgtacagggcacaagctggttcctnacatttggagttaaggatgttagaggctgctcacggtggccccctcctgctatcccagcacaatgtgagcctttggaggttggatgctctctggtcacgtgaggtataacagtatggccgacatggcgatacagtgtctccactcaacatacaagagttagctgcgccgttttgggcgctcatgggacactagctgctgtggagtctgaggctgtagaaggtcctcgtccctcgatccacaggttcactttgctgatatattgacatttgcattccacctcgggttatagagcatgcctctctcctctccataataaagcacaaacgtgtgtagttttgtcttgaaccagaccaagcgttgatttttggggccgattatttcaagcttagtcaatacaatcggatgttgatc

SEQ ID NO: 689037 - DNA, 157 bp, Homo sapiens
gtacccggctgcaggagaagaatgcacccacagctccaagtagcaggaggaacaagacaacctaggcagcatgactgaggagcgctgtgtgatcgatgctggattcaaaaagcaaggatgtcagcgttgcgatgccgaagagtggaaagagaggatg

SEQ ID NO: 689038 - DNA, 221 bp, Homo sapiens
caaaaagttggctaggatgaattcttctgtccattgtgaacaaaaagcaaggggacgcaaagttagatattctatctacagtgaaaatctagaatgtgttagtaaggtgtaggtttccacgggcagtgccgtgggcaacaaaaacccagagtgattatgcaggagccagccatagttgtacatgggcaataagccatacacaaatgaatattttcttcctg

SEQ ID NO: 689039 - DNA, 84 bp, Homo sapiens
acatctgtgtacttctgtgccagcaatttaggaggacagacttatggctacaccttcggttcggggaccaggttaaccgttgta

SEQ ID NO: 689040 - DNA, 177 bp, Homo sapiens
cctccccctttggggtcttttgtggggtgggggggggggggggggagcgctttgggggatttcccttatgttaggtggcgggtttgggggggccgcgcccccgcggggcccgtgtttacatgtgtttctcccctgccccttgggggcgtggcccctaaaatttagggttttattata

SEQ ID NO: 689041 - DNA, 802 bp, Homo sapiens
  misc_feature (8)..(8): n is a, c, g, or t
  misc_feature (70)..(70): n is a, c, g, or t
  misc_feature (72)..(72): n is a, c, g, or t
  misc_feature (76)..(76): n is a, c, g, or t
  misc_feature (106)..(106): n is a, c, g, or t
  misc_feature (117)..(118): n is a, c, g, or t
  misc_feature (121)..(121): n is a, c, g, or t
  misc_feature (128)..(128): n is a, c, g, or t
  misc_feature (132)..(133): n is a, c, g, or t
  misc_feature (140)..(143): n is a, c, g, or t
  misc_feature (162)..(163): n is a, c, g, or t
  misc_feature (174)..(175): n is a, c, g, or t
  misc_feature (178)..(178): n is a, c, g, or t
  misc_feature (182)..(182): n is a, c, g, or t
  misc_feature (187)..(187): n is a, c, g, or t
  misc_feature (201)..(201): n is a, c, g, or t
  misc_feature (209)..(209): n is a, c, g, or t
  misc_feature (211)..(211): n is a, c, g, or t
  misc_feature (217)..(217): n is a, c, g, or t
  misc_feature (220)..(221): n is a, c, g, or t
  misc_feature (232)..(233): n is a, c, g, or t
  misc_feature (240)..(240): n is a, c, g, or t
  misc_feature (269)..(269): n is a, c, g, or t
  misc_feature (273)..(273): n is a, c, g, or t
  misc_feature (275)..(275): n is a, c, g, or t
  misc_feature (280)..(281): n is a, c, g, or t
  misc_feature (283)..(283): n is a, c, g, or t
  misc_feature (296)..(296): n is a, c, g, or t
  misc_feature (303)..(303): n is a, c, g, or t
  misc_feature (330)..(331): n is a, c, g, or t
  misc_feature (781)..(781): n is a, c, g, or t
tcccacanggaagggatttaagggctgcccccatgaatttcttcaggccacgacacctacttcctcctcntntatntggattttgttttaaagtttcctcctcgtntctggtggggnntgncttactntttnnttttttnnnnggtaggggcatgctcgatnntgttttagggnnttnttgnttgtnttggtgtgttcttnattaaatncngatttnttnncctgcttttgnntcttggngggggctctctgtgggtcctcctcggggnttgntnggggnngnttgggtctgcggntgctgtngggtagcggttcagcaaacatctgcgnngtggggatttcaaactgagacctttcctctgctgtcatctcccccttttttttggcatccttcataaacttcttccttttcttctttcctctttaggccaagtcaaattcctgcagagctttggcaattttctccttcttcctctcttctttggtctggaaccagctcctctcgggctcttggaccactgcctccttccccttctccaggagccgctttgctgtattgatctgggcttctgactgctgcatctctttttcctccgcctctagctgcagaactgcatacacatctttctccattttctcaatcttgtcccggaatttgaggatgacatcttgggggaagtatcctggccttcacaggggccttggcagcttttacaatctccttcagcatcttccgctcatcttctcccaccagagagactgagcgcccagccctgccagnacgtgctgttcgcccacccgg

SEQ ID NO: 689042 - DNA, 349 bp, Homo sapiens
agcctacattcagttacctaatgaatgggcagacagttgtgttattggcactattaagccatcctttttcttattaccgataaaaactactggtactatctgtaaattccagacattgtatgagaaagcactgtaaaactttttgttctgttagctgatatatgtagcctccagtcacattcctcatgcttacttgatctatcatgaccctttcacgtggaccccttagagttgtaagcccttaaaagggctaggaatttctttttgggggagcttggcatcttaagacatgagtctgacaatgctaccggccaaataaaaacatataacttctttaaaaaaaaaacaa

SEQ ID NO: 689043 - DNA, 1258 bp, Homo sapiens
gaatatgtctcaagatggcggccaaatgtgggatcgatgtttcaatattcggaagcgctttgatttacagcagctgcagagcagaactcgatgccaccgcaacggtactggcgaaccggcaggatgaaacgtgagcagtcccagacacgcggacttatcgaacagagccgggagcttcaagaagaacactccagaggcattgccgccagcaaggctagcgccagctgcctgcaagcagctcttccacaggcagcagcatcgcactgcactgagctcaacacagcaagccacaggcacacgcgtgcacagacaagccttcctcgcacatgctcctaccaacccagcatcgcactcgcacgctccccacgcatcccgctaccagcctcctggcatcctcgcgaccagcaccactccagcctcaaagctgccacgcgccttgcaccgactacccgccacaccagcagcaacccacgacacccttagcggcaaacctctgcgacacgacataccaacccacggaactctcgcctgcacgcgtgccacacactccaagcagcgtccccgactcccacagccaccttacacagacagaacacatcccgcccacatactgcacccagacccctcgcccgcaacccccaaggcccgcacaacacccactaagcctcctcggccgcacaccggccacccaccacccgctccccacaccctgaccccctcgccccgcacacccaccgcagcaccccccagcctcgcaccgccccccgccccgcactcactccacccgacccctccaccgcccgccacccgcacgacccggcgccactcaacaggcaccagaagcccctacccaccaccgcgccccctgagacgacaacacccgacacaaacaaatcacacggaccccgcccaccccacaaccacagcaccgcagcacaaaccacacgcccaacggcccgcccaaccaccggacacctcccccctccaccggaccctgacaagggacaaaccagaagccaagcgatgcctaaaacccacagcgcaccaccccccggcacacccctcacccacaacaactccccaaacgagaacacaaatccaaggccaaacgggccaggcacaaagcgacgcccacaaacatacaacacgatgcgcccggacagcaacaacagcacagcgacacacccgcccccaccggaacagcccgatcacccactacgcaacaaaacacaaacaccagaacacccccccccccaca

SEQ ID NO: 689044 - DNA, 196 bp, Homo sapiens
atcgcgcgttccgctcatcaaatgaaatacagctttcgcatctattcacagaggcgcgccctatgcttcttagcgtcgcttgtcaaactatggagctcatctattctctagctgaggtactctggcagtccgttcatgtcattgtggtaataccgtacatactgctgtttccccgtaccgtccactccatctaccg

SEQ ID NO: 689045 - DNA, 1277 bp, Homo sapiens
  misc_feature (1277)..(1277): n is a, c, g, or t
tgtgctggccggcagttagggtgctgggcgcctggatgtggcgagatgccagctgatgctgagctgagcgagcctgagccgagcctccctgccgtcgccatggtgccagaactgacctgatgggcactgtgctgaggacattcgatcgaccagattcctccgtgtcacaaatgcatgtacctgccccactgtggctgctgcctctgtctgatcagcaccttcctggaggactggcatccgtatgtggttccagtggagcgagcagcgcgactacatcgacaccacctggaactgcggctacctgctggcctcgtccttcgtcttcctcaacttgctgtggacagctgactggctgcagtcctggttgtccgagcaggaacttcgttgcagtcactgcctgcttctgggcatcttatggcaatcatagctctgcatgactgatttgcctacatgcatttccatgggacttgacagtctccgatgacggaacctggccctgggaggaggcctgtctgctgctcctagcagaatcccgttctgcagggaagagcatgtttgcgggcgtccccaccatgcgtgagcagctcccccaaacatgtacatgcagactcggaggcagggtcttgctggctctgatgttcatgaccctccttcacttctgactgccagcttctttgctattgtccagaacatcgttgcgcacagctctgcatgatttagtggccattggcttttaccacccaagctggctggtttgactcttggtgctgtggctctttggccatcaccgtatatctcaacgccttcctggaccatccagctctcaaggccatgcttgactcctgacactagacttcttacagcacatgtcgggaatgggggcatgtcactggtgatggcctgtggcatggcgtgcaccagggcgtcacacagactagtgtcgtgtacgggctccgcgtctcctagacgtcggttgtggttaaagcagcaagaggcacgatactaggactcgtttggagtggaccgacatacccgaccagcgccaggtcacatcggctcccaacactcagccatccgttagcatcaggcacagattttcgacagacaatagtcagaaccaccagacacgcagactagcagctatcagacgcatgctaggtcgcccgtagccaccgacacgccagcacctccagcgagcagtctagcgctagagcccaacttgtagtaccgtcgcacagacacaatcagtagctagatcacgttacagttctagtgan

SEQ ID NO: 689046 - DNA, 184 bp, Homo sapiens
cggccattccctggcctccctggaggatcaagggaaaaggaggcactgatccagaacagagggagcctaaatcacccagatctgtatccctagctgggccctgaaccagagacgggagaggctacaaaagaatgtcaaaggagaaacgcaagcaacagatgatagcatcaaaggttggtgcagt

SEQ ID NO: 689047 - DNA, 351 bp, Homo sapiens
  misc_feature (120)..(120): n is a, c, g, or t
  misc_feature (281)..(281): n is a, c, g, or t
  misc_feature (328)..(328): n is a, c, g, or t
  misc_feature (334)..(334): n is a, c, g, or t
ttcggagtgtagtgttccctagtgttccctacctgatacctaacctctgcttggtccagggaagtgtctttcacactgcagttaattttgccctgatggcctggagtctggtggggcctnatgtggctcccactccagagcactcaatgacccagggaactctggatcgtggcttctgaggaggcccttgggtctggctcctgtcctttctccaacaccagctctccctctacgggcgggtggtgtgtcgagccctgtctgggtattggataggcacactnacatccctgtgttccccacaccttttggctctgcaattccctccctnttcttnttcctttttcatccttc

SEQ ID NO: 689048 - DNA, 293 bp, Homo sapiens
  misc_feature (59)..(59): n is a, c, g, or t
  misc_feature (218)..(218): n is a, c, g, or t
atcacgcaatattgtgattcgttcaccatttgcctgtcgaaaggtcttgggacgccagnggtgtcattactcgtcggtaatcgtgattacattaaacgtgccattcgctggcggaaaatgacaggtggcgggatgcgcagtccggcattctggctgccgccgggatatatgccctgaaaaataacgttgcgcgcttgcaggaagaccacgacaacgcntgcctggatggcggacagcctgcgtgaaacaggccgcggaatgtgatgcgtcaggacaccaatatgcttgtttgt

SEQ ID NO: 689049 - DNA, 257 bp, Homo sapiens
  misc_feature (146)..(146): n is a, c, g, or t
tcggataatctagaggatcccgaacgggtgatgcggttgaagaagccgggttgcgccagtgctgtcatagtccttctcgtggaacactggcggcgcggtcacccagtgctgagctgtggtgagcactgtccatgtccacgtctgcntgcccaaggccagcacggtgggtaccatgttctgcttgcgcatggagtgcgccgagtcgtgcagactgtcgttgcccgtgacgccgtccgtgcagaacacgaagggacagc

SEQ ID NO: 689050 - DNA, 130 bp, Homo sapiens
tgtttcccatttattactttggcattcactccaaaactgggtgaattattttacttcccactatggtcagcacccctccttgcattgaccatcatccaaattagagaggagcctgatttgaattttctca

SEQ ID NO: 689051 - DNA, 158 bp, Homo sapiens
ccccaacctttttcccaaaaagaaggttttttaggggcgaacctgttgaaaaagccaaatcccccccaaaccccttggaaagcaattttggggtttgccctggcttggcaattttaaattttccccaaaagaaaaaaagtaaaagggggccgagggga

SEQ ID NO: 689052 - DNA, 429 bp, Homo sapiens
agggccggtttttcccccagccccaggttcccggccccgccctggaaacaaacgggttttttcatggagggccaccccccccttaaaccgggcgaggagatttttggcccccctggccttgggccccacccccaaaaccacccgggcctgggtttccccctcgacctgggcttccagggccccctgtgcgaactttcctgcccccccccccaccggatgcgcttaggccccgctcccccccccccccccagccccgggggttagcgttcctaggcggttttgggggtcccccttcccctccccccccccccccaaaaggggttttttgggcccgggcttgggggatggggagggccccccctgcccgtgtttttcctaacctttttttttttttgggtgcctttcccccccttaacccccccctgggga

SEQ ID NO: 689053 - DNA, 1170 bp, Homo sapiens
gacaacaaatgaggcaccccatgagcgcatacttcctgcagtttgaccatctggactcagcagtggctggggatgccactcgcctgcctctcgccccgttgcctctttgcgcctgcggagcacgctctcaactccatctacgctgcctcgcgctgcgcacgaccccactcacctgcgcaccggcgagccgccgccctgcgcacctcgggcccctgcctgctatcgacagcgcctgtctctccccccctgcgcgcgctgccctcgtcgcccctgctgccctctacgtctgcctgctcttggccctccccacctgccttctccccacactggcaccctgtgtcctaccgctccctcgccgcgttgcccctcgctcgctgcccccgtccacgtgcccctgcactcccgtactgcgcgctctactaaaccacccaaccaacgcctccgcaaccgccacacgaaagctgacacaccccagtgccaaaaccgacccggccccaaaccaacgcgacacccaccctgaccccacacaccgccccgccaatacaccgccgaacacccacgaacagaacaaccgcaccacaacagcacccgacaccacgatcacatgccgaacagcccgtacgcagccactacacacacaacccaaatacaccctgcgcgacaccgcctacacgaagagcccctaacacccacagagcagaaagcaagccataaccacaacgccccggacaaaacccccgtgacagaccaacacccctccaactgccccactacgatcggaccttgcccccacacctgtcaacaccaccccccagcgcaccaccagtgaccaccaaacacaaagagcaacatcccctcctgcacgactcataacgaagcgcccaaaacaaaaaatgcaaaggctcccccacccataacacaccgcacacccaccgccaagttaccacctctctacccccttcacctaatttcgctccaccatacctaaaataacacccccctacatatttactaccactcctcatactcatccacctaattccacatcactccatccaaactacactcccacccctccgcacccccatccaacaaattaatctaaaaaaaatataaaaatccaataacccataacacaccccatcacacacctatcctccccacccacct

SEQ ID NO: 689054 - DNA, 926 bp, Homo sapiens
caccactccctaatctcaagtaccgagggacacaaacacgtgcggaagcccacagggacctctgcctaggaaagccaggtattgtccaaggtttctccccatgtgatagtctgaaatatggcctcgtgggaagggaaagacctgaccgtcccccagcgtgacacccgtaaagggtctgtgctgagaaggattagtgaaagaagaaggaacgcctctttgccgttgaaacaagaggaaggcatctgtctcctgcccgtccctgggcaatggtgtaaaacccgattgtatgttccatctactgagttaggggaaaaccgccttagggctggaggtgggacatgggggcagcaatactgctctgtaaggcattgagatgtttatgtgtatgcatatctaaagcacagcacttagttctttaccttgtctatgacacagagacctttgttcacgtgtttatctgctgaccttctctccactattatcttatgaccctgacacatccccctctccgagaaacacccaagaatgatgaataaatactaagggaactcagaggccggcgggatcctcgtctgctgaatgccggccccctgggctccctttttttctttctcaaaaaaaaaaaaaaaaaaaaaaaaaaaaaataaacgacacaaagaagagaaagaaacaaaaacaacacaaaaaaaagagaaaacaaagggaccagaggacagagcggagaacagggaggacaaagaatgaaaagaaaaaaagaggagaagacagccggcacgagaaggcgagggaaagagggagcgacacgagcaagggaggagcgaggaggagagaggaaacgacaagaaacgagagagagaaacagcaagaaaaagacggaaaaaacaggaagaagaaacaaaacgcgagacaaacagaaataacagaga

SEQ ID NO: 689055 - DNA, 215 bp, Homo sapiens
ggatatagtaccgcaagggaaagatgaaaaattataaccaagcataatatagcaaggactaacccctataccttctgcataatggattaactagagataactttgcaaggagaaccaaagctaaggaccccgggaaccagacggagctacctaggacagctaaagggcacacccgttattggcaaatagtgggaggtttataggtggggggccaa

SEQ ID NO: 689056 - DNA, 442 bp, Homo sapiens
gatccccatccttacccttactgtcaatcttcctacctttagttcatggtaggcttgacaactattagatctctaggcatcgtccttagttatgtaacatatctatattgatccaggctaaggtggaaatatgagttgttaagacagccccatgttgcttctgggttttttcttttttctttttttcttttttttggagatgagtttcactcttgttgcccagtctgcattgcaacggcatgatctcggctcactgcaacccctgcctcccgggttcaagtgattctcagggctcagactctcaagtagctgagattacaggtgcatgccaccacgcctggctaatttttgtgtttttagtagagacagggtttagtcatattggtcagtctggtctcgaactcctgaccccaggtgacgtgcctgtctcagcctcccaaag

SEQ ID NO: 689057 - DNA, 216 bp, Homo sapiens
  misc_feature (1)..(2): n is a, c, g, or t
  misc_feature (25)..(25): n is a, c, g, or t
  misc_feature (33)..(33): n is a, c, g, or t
  misc_feature (35)..(35): n is a, c, g, or t
  misc_feature (51)..(51): n is a, c, g, or t
  misc_feature (54)..(55): n is a, c, g, or t
  misc_feature (83)..(83): n is a, c, g, or t
  misc_feature (102)..(102): n is a, c, g, or t
  misc_feature (106)..(106): n is a, c, g, or t
  misc_feature (108)..(108): n is a, c, g, or t
  misc_feature (120)..(120): n is a, c, g, or t
  misc_feature (136)..(136): n is a, c, g, or t
  misc_feature (138)..(138): n is a, c, g, or t
  misc_feature (179)..(179): n is a, c, g, or t
  misc_feature (193)..(193): n is a, c, g, or t
  misc_feature (196)..(196): n is a, c, g, or t
  misc_feature (201)..(203): n is a, c, g, or t
  misc_feature (208)..(208): n is a, c, g, or t
nnaaaaaaaaaaaaaaggcaacatnaaagtttnanaaaatcatgctttgtnagnnaaagaattacagctttgcaatataaccnattgtttcgcataattctnaatncnatagatatgaanaatcagcctgtgtttncnatgaacttatttgtattttcccaatcattttctctagtgcnatgtttgctggganaanaaaannnattcnaatctttc

SEQ ID NO: 689058 - DNA, 210 bp, Homo sapiens
ctcaggctggagtgcagtattcacaggcacgaccgcagctagcactcctataacctccaacttctgggctcaaaccatcttcctgcctcagattcctgagtagctcgagatgggactacaggcatgtgccaccacgccctgctaattttgtatttttagtagagacggggtttcaccatgttggtcaggctggtctgggtaccgagctcg

SEQ ID NO: 689059 - DNA, 116 bp, Homo sapiens
cgagagaatggagcatctagtagagaaagtccattactttagacttagactgactccaagcagtaagatcagatttcttcacccaagtacttatctgcaatcacgcaggcacatgc

SEQ ID NO: 689060 - DNA, 494 bp, Homo sapiens
caactgcgccgacactggtgatactaacctatgtggaaaggggctaaaaaacactgtgtagttatttgacaatagaaaggagcagagtgctgattaaattcaaagctcacgcttttaattatcacttagagttggtttgtatagtaaggggaaaaaagaaaaaaaggaattctctagcttttggaacagcaaactgggcaaactgcaattcatccaagcacactggtgatactaacctatgtggaaaggggttgtaaaacactgtgtcgttatttgacaatagaaaggcatgaagcactgtcacaggctaccacctggatgagccttgaaaacatgacgctcagggaagaagtcagatgaagaaaacacacacgatatgataccatgtggatgagctgaccagaacaggtgcatccacagagtgatcacagatgccttggttgccagtttttgtcaacagagggatgcagagtgacttgcttaaggggcacagg

SEQ ID NO: 689061 - DNA, 126 bp, Homo sapiens
gttctaattgtggctgaggactttgattgcgcattgttgtttatctaatagtcattccaactatgagatgcattgttacaggaagtcccttgccatcctaaaagccaccccagccccaccagatcg

SEQ ID NO: 689062 - DNA, 511 bp, Homo sapiens
atggggtttcaccatgttggccaggctggtcttgagctatttttctaaattgatccgcccgcctcggcctcccaaaatgctgggcttacaggcatgagccaccatgcctggtcaacaccaccctttaggtacttgctgaatacacaggattgatggggttgagaaaggatcaaggttgacttccaggttgctagatcggtggtcccagatgttgagagagagaatgcaggacgaagagccgttgtagggggagcagggggagtgtcttcgcatgatgggtagggggtacccgtgagtcacatacaggtggatgtgccctgaggggagagggacgcgagtctgcagattaggcaagaggctacagttgcatctattgtgtcaataacctacaggcggactagggcagtcatgtgcctaaagctcgggcaacatttttgccgagagagggggatcttctattgtccagcatgctatgaagctctatctagacgccatcttatacctggaggtt

SEQ ID NO: 689063 - DNA, 108 bp, Homo sapiens
acgtatgtgcagtaggatggatctgtaagcgacacacacgtgtaacactaaatcggatgcggggcgtggaggcaccgctgtaataaaggaagtggcagtgtgctggga

SEQ ID NO: 689064 - DNA, 84 bp, Homo sapiens
  misc_feature (21)..(21): n is a, c, g, or t
tttccggccgggggccatttnccgcccccttgccctttgcagagcttgttttgcccccgcagcaataaaggtcctttgccccga

SEQ ID NO: 689065 - DNA, 81 bp, Homo sapiens
  misc_feature (48)..(48): n is a, c, g, or t
gttgacgacacggccctatattactgtgcgaaagacccccacggttantacgtgggagccttcgactgctggggcccggga

SEQ ID NO: 689066 - DNA, 237 bp, Homo sapiens
ttcagggggatgggagttatccctgagcccttccattcccctctaagagaggcagcaacggagagtggggaagtggagcggcagttcccttgtggggcttagcccaggtgcttcgtaactgcaatcggaagtgcagtgacgctggtcagacgccaagtgagaatggaaacctacatctattgcatatgcccattgcctacatggagatggtgacatcataccattcacatagcttct

SEQ ID NO: 689067 - DNA, 609 bp, Homo sapiens
  misc_feature (211)..(211): n is a, c, g, or t
gcatggggtctggacgcgacggcggcggagcatgaacgcccctccagccttcgagtcgttcttgctcttcgagggcgagaagaagatcaccattaacaaggacaccaaggtacccaatgcctgtttattcaccatcaacaaagaagaccacacactgggaaacatcattaatatcacactcctaaagaccgcaagtgctatttgctggtanaaagtcccccagccccgttggagcacaaagatcatcgatccgagtgcagactcgacgcctggtacgtacagctcgcctcagggataggcctttgaccaaagccatcaccgacctcatcagtgagctgtccctgctggaggatcgctttcgggtggtcataataagacaagcaggaatggaacttgacgtaggggccacgagggaggctctgttcgagcctgtgagccccgttcctatctgtgcctgaccctccgctccagtgtacctacatgcgaggagagctggtacgcgtccacaggccatggcccagccgttgtggtcatccgcctcaccctgacaccgacgtgttctgtacatagatgaggttttatattcctaatgaaatgtataggcggaag

SEQ ID NO: 689068 - DNA, 1354 bp, Homo sapiens
  misc_feature (435)..(435): n is a, c, g, or t
  misc_feature (864)..(864): n is a, c, g, or t
gcctggagcgggtggcggtgtcctggatgtgacgtcttgtgacatcgcggtggtctgcaacaactcaccagcgcggatcacacatggagtgtttagcaagttaactgtcagtaacgtgtgaagtcataagatgcaggactggatgactgggcctacccatcaaaaaggccataggagtcattcctgcgtagttggcacttatgtatagtggggacagggtctgaacagtctgccgcatggtgaagcacttcaaggtgggatgagtgaggtctccgtcccaacgagaaaccccgagtcctcagagacgacctggagataccttaagcgcccgcgggttgcccttcaaaatgtacacgcttggggcgcagggcaagagtgggcaacgacaggcacaaagcccagggagacagcgaggagggccaatagctggtggcnggggccgggacgtagggggaggcaaggtgggtaaatcgcctttatggtggcacgggatatgttacgtccacggattgggtgctgtggatcttacacagagggtaggggggttcacaggcttcaagcttttaacagaggagaaacaggaagagtttctatgaagattgggtaggctttgggagtaaagagggggaatggggtcaaatttcctccggttatattgcctcacaattatttcctttgtgaaaacggtgttcccccaagtgtgcggcgggaaacttcttgcccctttgggaacatcacagccattaacaccaccgctcgtttcccccagaggagtaaaaggaacaccttgggtggtggcgccttaatcatccggccgcattgggaaggacaccggatgggagggcattcaaaggccccacggcnacagggtggtgtcaaacagcccggccaaagacggatgagggcggcgcttacctcagaccgtgtgtggcctcgcttggcgcccaattttcttaccgcctaaagagcatcttggggctgctggtgttagtgccgcattgaggaaagcttggttacgtcccccaaaacttagattttgagcctgtgctcgtgggcgatcagacccatagaagacgacatcctagccggacgatgcccgccaccacccattgaggccatacagaggaggggccgggcacaggtggggaaaccaccaaccagtaaaggcgttccgagcgggcatcccactgaggagttatcccattccacaaggggggaaaaggcgtctttgcgcacgtacccgattatggggcgcccacaccgtatgatagatatgggcacacatcgcgcaaacaccgaggggtatcccgccacgggccgggggaaaacatagggcggacaacaagcctagcag

SEQ ID NO: 689069 - DNA, 258 bp, Homo sapiens
gagtgaccgggattacaggtgtgagccatctagacccgggacttttttttacattttattgagacgacgtttcactcctgttgcccacgctggagtgcaatggcacgatctcagctcactgccacctcggtcctcccaggttcaagcgattatcctgcctcagcctctcgagtagctgggattacaggtgtgagccactgcaccctgcctcagtacctccattcttcccactacccaggtctcctcaggctcatgggc

SEQ ID NO: 689070 - DNA, 113 bp, Homo sapiens
tgcttgggattacaggtgttgagccaccacactaggcactgtgtcaagcagtaggggattggcggtggagtaagaatgtgtcctgtcctcaaggagttcatggtctagtggag

SEQ ID NO: 689071 - DNA, 274 bp, Homo sapiens
  misc_feature (211)..(211): n is a, c, g, or t
gcatggggtctggacgcgacggcggcggagcatgaacgcccctccagccttcgagtcgttcttgctcttcgagggcgagaagaagatcaccattaacaaggacaccaaggtacccaatgcctgtttattcaccatcaacaaagaagaccacacactgggaaacatcattaatatcacactcctaaagaccgcaagtgctatttgctggtanaaagtcccacccttgagcaagtcatcatccggtcagccacgcggctcaatccaggagcttaca

SEQ ID NO: 689072 - DNA, 190 bp, Homo sapiens
tgactgggagatcccatcaattcgctgacattgagattgtgttggcgctcagtgaagtgccattcgagctaaggacacagagacagatttgtgggatttgatgctttttctagcagtgcctgaactgtaggtctctgccagaagtagcgctcgcccatgtgcataagcctggatactacacatcgtctgc

SEQ ID NO: 689073 - DNA, 606 bp, Homo sapiens
ctgtggtaaatgatttaaaacactagtatagtgttgtgtagcttaatccttctgaagtctttttgtcatgtagctattaatctgtggctatgaaatgatcagaaatgctaagtgagatcaatatttgtttggaaaaaaaatcttgggaaacaacccaagggttttcgctgttgttgtttttctttttctatttttgtttacttagtcctttagctagtggatttaattttgttgtgcctgcttcattttgcaataacaatgcagtagaatttaaaacttggatgcttaagaggcctgcatatagataagaatttcaggcaaaactacatttattgttaataacagcttgttcataggctcctgtattttatggacctgtaataataacctaactaagttccctgaggatattgtcagtcggccagatgttaggcacagtattttcaaaggttcgctcatactgttctgatgtaagctgtgtaagcctaggacacggtctcaattagggggagctgtcttgtcctctcttagagtaaggtattctatcaacatatgcaaacaccccccagttcatccgcagtcggatgaataaggaaacccagttcg

SEQ ID NO: 689074 - DNA, 116 bp, Homo sapiens
  misc_feature (29)..(29): n is a, c, g, or t
  misc_feature (54)..(54): n is a, c, g, or t
  misc_feature (91)..(91): n is a, c, g, or t
gatccaattaacatgtggggttcttggtntgggtctggggagctgaaggatttnatggagctggtgctttggaggaatcttaagggaaagnagtagaagctcaggcctttaaagga

SEQ ID NO: 689075 - DNA, 691 bp, Homo sapiens
gacccttttatttctttctctcttgagaagggatctcactctgtcacccaggctgagtgcagtggcctgtcatggctcactgcagtctcaaatttctgggttcaagtgatcctcagcttcctgagtagctgggactacaggagtgcaccaccacacctagctatattaaaattattttggtagagaggagggcttgctctatggaccagtctgactcaaactcctgaactcaagtgatccttctgccttggctcccaaagtgctgggattacagatgtgagccattcgcccagccaccgttttatttttcagagaccacacagaggctgcttggatcacgtccaggaagtgcttcccccaattccagaacctataagttacttccacagtgcatcagtgagatcaatatacacgaatatcccggggcaagtgggaccgagcctttggaagaatacctcagaagtttatttggtgaatgagtagacgtggaaaatgtggtgtccagctgaggatgcacagtttggaaagcaggaggaatgttgactggttgatgaaaacttagttaagagcatcattcggtcaatgagatcaaggggaacaagagtgtttggcagaagcattatgagtcatggaaaaaaagttgatgaaacccatggaaaaagggaagagaattccaatcttctcttctaaa

SEQ ID NO: 689076 - DNA, 157 bp, Homo sapiens
tctagaggatccggaatgtgtggtgttatggtggacaggtttcctatggagttaggcagcatgcgcccagtttatgttgtccagttgtgggagatttaagatggtacaattggttaaagcggggatgaacttccaatcggtggggtgcttagcttcc

SEQ ID NO: 689077 - DNA, 1178 bp, Homo sapiens
atagtgaaatcctgaaccatcacccagggagtcatcttcatcaagtacccggaggaaggtggactgattcaccgaaagatatgcttgctcaaaatttcattgtatccgacatgcatggtcgatatgcgaccatcataggcatcgagatggtgattataaggcgagtatacgtactgcgttctaacaaagtctctatgatttacctagtgcacctgcttgtctccatagtgcgattgcactcgtgccacgcaagtatcctattagtccatcagactatcgacctatcctcaccgaaaaagaggaacagctatatctgcacaggaaactcgagatcgtaggatgcggactcgctattgggcctgggttaggactgatggtctagtttcaccactgtgatgtatcaggaaacgaatgaccaatgaaggaactgttttcgacggacatttgcagaaacccttcgtaccaaagaccattccagtctgcatgggacaattgccccgtcaaatgattgcttgaggcgtcgctcatggaggtaagctgggtccctggagcgaggccgagacccgccaaggaccgagaggtctccaacatcttccttgggggcgcttgagtggacgccatgcacgtgacgcgcgggggacagggccgcaaagggtcaagcccacacacgtgaattgggaacaatcctctggtacattattataagcctcttggaattaaacattgttccacttttatttcaacgtgcaccacactagcaggcacactagagacttagacgaattttcataaagcgcacttctatttgcctagaagttggggtaaagtcacaaagcacggccatattgcaacgtggcgcacctatgaggtcaataaacgtagatacattgtggacccaagagttttctttgtggccacaaaagtttgcgacgactctctgcccgtcgttttctcatatatgactcgagcccggactcaaatacgggaaaaaaggcccaggtttacccctggccttatggcgtgcggcacacaaccactcagcaacgaccaccgggccacccacaccaccagacaccacaactcgggagacacgacactgcatgtcatcagcaagcaagtgagcgcgcagacaccaccccatgatcacaacggagcgagcctcacaatcacacgctccg

SEQ ID NO: 689078 - DNA, 215 bp, Homo sapiens
gttggtgttgtcttgtccagcacgaacagcggcttccaggtgtcatgaaggcccccttcttgtacatgagtgccctcgtaggacctgtactcactctctgctgtcgggacatggctgtacaggttgctggtgctgcggtgggcagcctgaggggagccgaatgtggttgagccaatactctggtcgctgtccaggctgaggctcagggtggagcc

SEQ ID NO: 689079 - DNA, 262 bp, Homo sapiens
agtcgggtatcgatgcacgtctcacttataagtgaaaaggtggtaatttggttttctgtttctgtgttaatttacttaggattatggcctccagctccatccatgttgctgcaaaggggcatgatctcattcttttttatgactgccattgtaacattctaataggtgtgtagtggcatctcataatagctttattttgcatttccctgaaaaagaaaggcctactgttttccttttgtgtgtgtgtatgtggcatcgataa

SEQ ID NO: 689080 - DNA, 149 bp, Homo sapiens
  misc_feature (22)..(22): n is a, c, g, or t
agtgactctgaggatccccctnaatgctgttacaaaactgctgtgagacagagtctgagagatacagagattgcagagacagatgggagagacagatacagagagatacagagacagccagagaccaattgggagagagaccaattggg

SEQ ID NO: 689081 - DNA, 592 bp, Homo sapiens
  misc_feature (40)..(40): n is a, c, g, or t
  misc_feature (72)..(73): n is a, c, g, or t
  misc_feature (75)..(75): n is a, c, g, or t
  misc_feature (84)..(84): n is a, c, g, or t
  misc_feature (93)..(93): n is a, c, g, or t
  misc_feature (119)..(119): n is a, c, g, or t
  misc_feature (134)..(134): n is a, c, g, or t
  misc_feature (142)..(142): n is a, c, g, or t
  misc_feature (157)..(157): n is a, c, g, or t
  misc_feature (165)..(165): n is a, c, g, or t
  misc_feature (171)..(171): n is a, c, g, or t
  misc_feature (175)..(175): n is a, c, g, or t
  misc_feature (191)..(191): n is a, c, g, or t
  misc_feature (198)..(198): n is a, c, g, or t
  misc_feature (234)..(234): n is a, c, g, or t
  misc_feature (315)..(315): n is a, c, g, or t
  misc_feature (360)..(360): n is a, c, g, or t
  misc_feature (367)..(367): n is a, c, g, or t
  misc_feature (421)..(421): n is a, c, g, or t
  misc_feature (475)..(475): n is a, c, g, or t
  misc_feature (483)..(483): n is a, c, g, or t
  misc_feature (576)..(576): n is a, c, g, or t
cccaacgtaccagttaacaaagggacgtttgggatacatnaggtcaaacttgtggtccaggcgagcccaggnntnagcaatggntgtggtgtngctcagcatgcacacagctctttgtnccttggccaggtctncaccaggnaccacagtggggggntggtagtngaggcnaacnttgaagccagtggggnaccaatncacaaactggatggtacgcttgggcttgatggtggnaatggcagctttgacatctttgggaaccacgttaccacggtacaacaggcggcaagccatgtttttaccatggcgagggtnacatttcaccatctggttggctggctcaaagcaagcattggtganctctgcnacagaaagctgttcatggtaggctttctcagcagaaatgaaaggggcatatgtngccagagggaagtggatgcggggatagggcaccaggttggtctggaattctgtnaggtcaanattcagggctccatcaaatctcagggaagcagttatggaggacacaatttgacctattaacctattcaggttagtataggttggacgctcaanatcgaggtttctacga

SEQ ID NO: 689082 - DNA, 168 bp, Homo sapiens
gttgggtacagcccggttttaagcctctgttctagggaccacgttgagtgacagagtgggaaacacgatgcatcaattaggaaatgtggcagtgttgaagagggacccagcgtgtggacagtgcaggagggacagggtgctgaacacgcctgagagaattcttccagg

SEQ ID NO: 689083 - DNA, 118 bp, Homo sapiens
gaaatcgcggcataggctgggtttctatatgcataggcatgtgattggtgggtccattatgtgttgtcgtgcaggtcgcggggtactagaagtgtgacaccgtggcttggattcaggc

SEQ ID NO: 689084 - DNA, 305 bp, Homo sapiens
gtatgctaagatttcgcgtagcttggtttggtttcatccacctcatctgcctgctatgatggttaccattgatgagagtgaggagaaggcttactgtcccgtgggggccagctttggtctatcatgcagatgggggcttgtttttgtcatgtgagaagaacgcagcgccgtatcgtcataggggtgccttgggtcacctccgggcaccacaatctgcatcgggggctttccctagattttagtcgctataggccgttttgaatctcttatccgatcaagtctttgattcggtactattggctcct

SEQ ID NO: 689085 - DNA, 329 bp, Homo sapiens
cccgggaaaacccttattttttgggggcccggggggggaaaggggtgcggggattcccccaaaaacccccgggggggttttttttgggtttttttttttcccccccgggggggttttgggcccccccccccccaaattgggttccgcccccccaaggggggttttggggttccccggttacccgggccccccccccggggcccccaatcccccccccccttcccccctttggggtctggccttttacccccggtttttttgtttttggggggaaccaaattgttcccggcggccccttttttctttaaacttttttttggggtttttta

SEQ ID NO: 689086 - DNA, 142 bp, Homo sapiens
aatgggcctgcactcgtcctggcctacatcgtgttcggctggttgccgtcgctcctgactcggccgtggcctgacgtgccccacgacggcgggacttggcgacctcacggtgtgtgtgaggggactccatctacgacgtcga

SEQ ID NO: 689087 - DNA, 435 bp, Homo sapiens
  misc_feature (67)..(67): n is a, c, g, or t
  misc_feature (266)..(266): n is a, c, g, or t
  misc_feature (279)..(279): n is a, c, g, or t
  misc_feature (418)..(418): n is a, c, g, or t
  misc_feature (434)..(434): n is a, c, g, or t
gagttcgagaccagtcaggccaacatggtgaaacctcatctctactaaaaatacaaaaattacctgnggcgtggtggtgcacacctgtagtcccagctactcaggaggctgaggtatgagaatcgcttgaacctgggaggcagaggttgcagtgagcaaagatcatgccactgcaccccagcctgggtgacagagcaagactccattttgaaaaaaaaaaaaagtgacttaattataaaaaaagagactgagacttgaatataganggacaggataganataatctaattaggctgggcaaggtggcccacgcctgttaatcccagcacttgggggaggccaggcaggcagatcactgggaggctggtcttcaaactcctgactttcgggtgatccacccacctcagttttccttttnaaaaagaatttttttnt

SEQ ID NO: 689088 - DNA, 978 bp, Homo sapiens
  misc_feature (704)..(704): n is a, c, g, or t
  misc_feature (951)..(951): n is a, c, g, or t
cgggattcaacctggccatgtggacatgagacggccagcacaccattggtttttgctggaaacactggcgaattgattttcctggtgcctgggccccccgtatggccgcaacgtttggttcaagggcgccttgtgatgcctgtatccaagctgtgggaacgtgcgggattccaatggtgccgacaggcccttcatcggacatggaatccgacagtcaatgcagtgggctttcttcccctacggctacgccttcaccaccggctctgacgacgccaacgtgcagcctctttcgacctgcgggccgatcaggagctcctcatgtactcgccatgacaacatcatctgtggcaatcacctctggtgccttctcgcgcagcaggacggttgctgctcgctggctacgacggacgttcaactggcaacatcatgggatgccatgaagggcgaccgtgcaggaggtcctcgctggccacggacaacccgccgtgagctgcctcgggggtcacggacgatcggcaatggctgatggccacagggctctctgggacatcactgtccgtcaacgatcatggaagctaactggcccgcagcccccagctgggccaaggccaggaggggccgctgcccatgcaccacgactacaggccagggctgcggggctggcgcaatcgccagcccccttcccaccgggcacacaggggcanttgggtgcacgtgccctccgacaccaggtcctggttcctgaccgggggccgcaccagctgtggagataagaaggggatggaatgggggaagtaggaggagcaggaggccctcatccttctgcatgcactggtggttgaggcctcacccctcttggagggccggaggcaggaggtggaaccccagggctggcttttctaaaactgttttatttaattcttctacgttattataaatctagcaggggtntccaataagaggagccaagtcccactt

SEQ ID NO: 689089 - DNA, 166 bp, Homo sapiens
ccgacgatcccactcgatccgctgatccagcaaaaagcttatgactcactagaaggctcagatatcactagcatttttagcaataaaaacttttaaattaaggtatgtacattgctttttttttttttttttttttggaaaaaaattctcgctttgtcccccgggt

SEQ ID NO: 689090 - DNA, 456 bp, Homo sapiens
tcatggaaccccagtggagagctcattctcatgttcagaggaagatactcttacagccaaagaacagatttgtaaaagaaggcagaggagtcctttttggaggtagcagagcctagtggctgagaacatgacatctggaccaagactgctcagaatcctgattttatttggtgtgttattatgtccagttaacaaacacaagcaaaatctgacttctcagacagctatgggtggtcatgggagcttcccatcccatgtggaagacaatgcctggagcagagaaggcatcttgctctttgctttctccttatctcttttcttcctgcttgatcatatgtcatgcttggagatgcagcagtcatcttaccatcagtaagaagaaagctgcatgttaagaattgtggagctgtaagatggaagaagcttgaatcctagggccttccttgatttgctgca

SEQ ID NO: 689091 - DNA, 132 bp, Homo sapiens
tgaattaaaagattgcttatccaagtataaacaatattaagaaaaagaaaagcagtaactattaccgatggaaaaatatgagactagtgtggaggatagcaatgctttccggaccagggaccccaatagtag

SEQ ID NO: 689092 - DNA, 469 bp, Homo sapiens
gatggtgagaaggacgtgctcttggtactggtgagaaggaccgtgtctggagtggtgagaaggactgtgctctgatagatggtgagaacgattgagttcggactgtgtgagaaagaccgtctttggagtggtgaggacatgtgttttcagagaaatctggcaagagggatagaaaagaggtcacaggatatatgactatgattataaagagaaagtgaagacacggcagagagaaatacctgatgaacataggtcccaaagaggcctgagaagccaagaataaagaagttatttggagcagggcatttcctaacatatctgagctggaagcaaaagtgaacaaggggagtgaaaaatatggagatttttcaggtagagaacgggcaagcagaggcaagttatgtcagagattttacttactttgtaaagtgtgagccaactttgagttaattccaaggcctgggaatca

SEQ ID NO: 689093 - DNA, 131 bp, Homo sapiens
gatgcatgtgcctgggtgcatcatgtgtactgagatgcaagaatttctggacttcatagcccaggaagtgaaggtgtctcgaagaagctctgtctcattgccaatgcaatcgattatcaggcagattccta

SEQ ID NO: 689094 - DNA, 460 bp, Homo sapiens
  misc_feature (306)..(306): n is a, c, g, or t
  misc_feature (379)..(379): n is a, c, g, or t
  misc_feature (392)..(392): n is a, c, g, or t
  misc_feature (420)..(420): n is a, c, g, or t
  misc_feature (446)..(446): n is a, c, g, or t
  misc_feature (458)..(458): n is a, c, g, or t
tatttatttatttatttatttatttatttattttgagacactctcactctgtctcccaggctggagtccaatggcgcaatcttggctcactgcagcctccgcctcccgggtttaagcgattctcatgcctcagcctcctgtgtagctgggattacagacgtgcgccaccatgcccagctgatttttgtatttttactagagacagggtttcaccatgtcagccaggctgatctcgaacttctggcctcatgtgatccatccaccttggcctcccaaagtgctgcgattataggtgtgagccaccgnacccagcctggaatttttatttattaggccactctttttttagtggacataagggaactggaatgtaggcttnttcacctcgtttncagtaaatggggctcaaatgtttaactnaggaagattcctcccacaatattatncaatttcagganca

SEQ ID NO: 689095 - DNA, 390 bp, Homo sapiens
cacatagtcagtcctatgcaggtctcagattccattcgcagagcgcggtcagccgctcatcgcatacatgcatgtgcacgcgccctcatggtcagctgtgagtgctcatgctccatagcactgggtaatgttgtgagagatgacatagaccattgctattcagggttaggctgacggctctagcgtctaataaggaacttcctggaacgaccaagacaaggtaagcaaaggtccaaagtaggttaagctctacatatgagagtcacaaacacataatggctcatttctctgatatgtaataaggatgtttatcaggcagtgcacatgtgtgcatgtgtgtgtgtgcatgcatgcatgtgtgcgtgtgtgtgtgcatgcgtgtaaatgtgt

SEQ ID NO: 689096 - DNA, 429 bp, Homo sapiens
ggcccatcccctttatgacccgggccgcaagtggatttatataggcttttccgcttttaagatttaaaaataggcctcttagcgcccacttcttgttacccaccaagagccaccacacttaccacccctttatcccccattactaatttatttatcgaaacccatccagcctacatcattccaacccaatagccctggcccgtacacgcctaacccgctacaccatttctcgccaggcccacactactccatagcacctaattggaagccgccaccctagccaatatccaacccattaaccttccctctacacttatcatcttccagaattctaattctactgactatcctagaaatccgctgtccgccttaatcccagcctacgttttcacacttttagtaagcctctacctgcccgaccaacacata

SEQ ID NO: 689097 - DNA, 151 bp, Homo sapiens
gattccggagcttatctatacacccgtatcccacgctgatgttaccacacagcctttcagcatgacgaaagtcattgggtcacttcaccatagtgggacaaagccacccagagggttgatgctcttgtccagataggtcatagtcacgtgg

SEQ ID NO: 689098 - DNA, 542 bp, Homo sapiens
  misc_feature (1)..(1): n is a, c, g, or t
  misc_feature (12)..(12): n is a, c, g, or t
  misc_feature (54)..(54): n is a, c, g, or t
  misc_feature (96)..(96): n is a, c, g, or t
  misc_feature (538)..(538): n is a, c, g, or t
naacccccccangtatcccaggaagaaaccaactgcctttgaattttaaccagnccccaaaagccagaggtacctgcccctgtccctcagttgaanacctgggacctgtggaccttttgaagttaaatgcctgaaaatgaagttaaagacctttggggaggacctgttggggaaggccataaattgggttttgaaaatatgagggaccataaagatttggggagaggcccaacagtggaatgatatgggtttggctgtttccccccaccccaaatcctcatcctcgaattcccacatgttgtgggagggactgggtggtgggagttaattgaatcatgggagtaggtctttcccattctgttcttgtgatagtgaataagtctcatgagatctgatgggttttaaaaaatgggagtttccctgaacaagctctcttctcttgtctgccaacatgtgagatgtgcctttcaccttctgccatgattgtgaggcctccccagccatgtggaactgtaagtccattaaacctctttctagnaaac

SEQ ID NO: 689099 - DNA, 952 bp, Homo sapiens
  misc_feature (689)..(689): n is a, c, g, or t
tgcccctcatttacataaatattatactaccatgtatcatctgacttctaggaatactaggtatatcgctcatagctcatatcgtccctactatgcctagaaggaataggtagctatcgctgtggcattgatagctactctcataaccctcaaaccggaatccctcgtagccaatattgtgcctatagcgatactagtctttgccgcctgcgaagtcgcggtggggctagacgtactagtctcaatctgccaatcacatatggcctaaactacgtaaataaactaaacctaatcaatggtgaaactaagccgtcccaacaattatattactacctctgacatgatttgcacaaataagcgcataattggaatcaccgaggaagcacccaacaggcctaattatgagcatcatccctctactattggccaacgcaagatcagcatagtatcctatgtaggttgtacctcaacccttattctgcagagcacacttaaaaatcccctctaataataaggtagctggattctaccccctgcagaatcatggcaagacacacggcagcttatccagtgacccacgtatgacggaaaaaaactctactcttctataactaagtttcctgtgaaatcctcttggttgttacattcacaggcaaaagaactaggcggtgtactctgtgtcgtcgganacaaacgtatccgacatgggattaataagccgaagtaggagcaggccgacgctggagcaggcaatcccgtgtgattggacctgtgtaggtctctacattcatgggatattgtatacacctgggtcttgattatattcggcgaataaactgggctatgtgtgttccaagagtagaatgagatgacacgtgcccgggattatgagaaagggtgatgcccagctccgtaacgcccccacccccttctcttggatcgtggacagaag

SEQ ID NO: 689100 - DNA, 201 bp, Homo sapiens
  misc_feature (34)..(34): n is a, c, g, or t
agcaggtccaggtggagctgctgttcctaaagcnaagcttgcaactcacggatctcctcttcatgaacagcaggtccaggtgggagaatggacatgtctaaagcaagacctcactgccgcgctcaggatatccgggctcagtatgagaccatcgcggctaagaacatttctaaagctgaggagtggtacaagtcgaaggtg

SEQ ID NO: 689101 - DNA, 373 bp, Homo sapiens
gtacagagtgaatgtatcaacctgatgggcgttgtcaaaggctgcaaggcgttcctgccgctgctggaaaagagccagggccgcatctatcaacatcgcgtcaatggcagcgctgatgcagggccccgccatgagtaactacaacgtggccaaggcgggcgtggtggcgttgtccgagagcctgttggtggagctcaagcaacaggaagtgggcgtgcatgtggtgtgcccgtcgtttttccagaccaacctgctcgactcgttccgtgggccaaccccagccatgaaggctcaagtgggcaagttgcttgagagttcgcccatctcggcggcggatattgccgactacatttaccagcgcgtggccgaaggc

SEQ ID NO: 689102 - DNA, 177 bp, Homo sapiens
ttttgcgtacttcgtcaacgatacgacgttcttcacgcacgctaccttcgctatccggcagtaacggcagcatgttgaacgccagctgacgcccgaagaaatcttcttcgtcaatcggaatgccgttgagcaatttcgcactctgccccgctaacgcatcgaccgcttttttgccct

SEQ ID NO: 689103 - DNA, 172 bp, Homo sapiens
aactttatttttaaagaataaatcaagtaagacacagctttcgtttactaaacatggcataaccaaactggaatataaactggactaaattggtgaattacaccatgaaataccaagggaatgccattttaccttatgtaaaatggattggtaagctaatagccaatttaac

SEQ ID NO: 689104 - DNA, 123 bp, Homo sapiens
aaaatgaacaaataactgtgtatatctgcacagtgataacttagattgtgtaggttgagtctgaaaagcaaagggatcttggatgatggaacgtctaaatcagatgatgtggtgcgcggtacg

SEQ ID NO: 689105 - DNA, 273 bp, Homo sapiens
gtaccgggtgatactactcacgctgaaactccagcaccacgatcgctactactatctcgcacctgaaacaagctaacatgactaacaccctcatgttccatccaccctcctctccctaggagggctgcaccccgcgtaaccggacttttggcccaaagtgggccattatcgaagaattcacaaaaaacaatagcctcatcagtccccaccatcatagtccaccggtcaccgctccttaacctctacttctacctacgcctaatctactccacc

SEQ ID NO: 689106 - DNA, 663 bp, Homo sapiens
aagagaaatgaagctaagaaaaatttaaaaaaaaaaaaaaaaaaaaaaaaaaaaaaaaaaaaaaaaaaaaaaaaaaaaaaaaaaaaaaaaaattaaaaaattaaaaaaaaaaaaaaaaaaaaaaaaaaaccttttggcccccttggcccaagtcatttttaaattggacaaggtttttccttgcgccccaatttgggcctaattggccaaattccccttatggggggcggttttcaaattaatggcccgggttttaaaaccgttggacttggaaaacccttgggtttcccaaattaaaccccttggaagaaaatccccttttccccagttggctaaatagcaaaaggccccgacccattggcctttccaaaaatttgcccaccctaaagggcaatggaaaattgaaggcttaaattttttgtaaaaattcgggtaaaattttggtaaaaccacttaatttttaacccaaagggccaaattgggaaaaaccctttataattaaaaggattcccccgaaatgggtttaagttttgtcccatttggaaccaggggccccttttaaagaaccggggtttcaacgttaaagggcgaaaaacccctttttaggggcaatgcccaaattcgggaaccttacccttcttttttgggctcgggccccgcctt

SEQ ID NO: 689107 - DNA, 272 bp, Homo sapiens
  misc_feature (75)..(75): n is a, c, g, or t
  misc_feature (81)..(81): n is a, c, g, or t
  misc_feature (87)..(87): n is a, c, g, or t
  misc_feature (91)..(91): n is a, c, g, or t
  misc_feature (106)..(106): n is a, c, g, or t
  misc_feature (115)..(115): n is a, c, g, or t
gtgcagagagaatgccagcaggaaggcggggaccggggcaaggtgcagccaccaagcaggcccaacgtggttctncaacgntctttncatntttaacagcccaganacaggagtnaaagaagccttagctgtttgaccagaatgtgatggcatatttgcaaggcagacctagggagacctctccagctgggaggtagttccagagaggagctgacgcatctgcaagaggcaaggcccataacttacgtttctacgttttggagagctaatgg

SEQ ID NO: 689108 - DNA, 278 bp, Homo sapiens
gagttatacggaaggaaaatgttacacgctggaacacggtatcaggagctagtgctgtatagcagcgacgcccagcctctcccctccacacattgcacctggagacaggcggtgacgcggcagaccggtgctcgtgtgagcgcacacactgcacgtgcacaccccggcgccatgcgtgcggcgacacacacccgagggccccagggcggctgcgtcctcagcagatgagcgtccaaggaggttcctgcagccaagtgaacatggagccccagcgccag

SEQ ID NO: 689109 - DNA, 895 bp, Homo sapiens
gcgtccctgccggccgtcccgccgagcgcatgagctccatcgcatgttcaagcaatgggccccatcgtacgggctgtcggccgaggtcaatgaaccggctcctgtccataatatgacgcccacagataggaggcagagctccgcacctggatcgagggactcaccggtctctccatcggccccgacttccagaagggccgtgaaggatggaactatcttatgcaacactcagtgagcgagcttatagccgggcatccagtccccaagatcaagcgttccatgcagaacgtggctagccatgctagaaatagctgtccgaacttccattctacgggccatggtcaggctactgggcattgaaccctggtggacctgttcgaggccaaggacctgtttgagaagtgggaacatgacgcaggtgcaggtgtctcttctcgccctggctgggaaggccaagacttaaggggctgcagagcggggtggacattggcgtcaagtactcggagaagcaggagcggaatttcgacgatgccaccatgaaggctggccagtgcgtcatcgggctgcagatgggcaccaacaaatgcgccagccagtctgggcatgactgcgtacggcacgaggaggcatctctatgaccccaagaaccatatcctgacccccatggaccactcgaccatcaggctccagatgggcacgaaacaagtgcgccagacaggtgggcatgaccgggtcccggggaaccggaggacacatctatgcatacgcaagcttgggaaccggacaagtgttgaccaactcctcccatgttccctgcagatgtggttacacgcaagggcggcaaaccaggagcggccaggtcttcaggcctgtggcggcagattatattgaacac

SEQ ID NO: 689110 - DNA, 199 bp, Homo sapiens
ctcctgggttcacgccattctcccgcctcaggctctcagagtagctgggattacaggcttgcaccagcgcgcctggctaagtttttgtatttttagtagagacggggtctcgctatgttgctcaggctggagtgcagtggctattcacaggcgcgatcctactactgatcagcacgggagttttgacctgctccgtttc

SEQ ID NO: 689111 - DNA, 204 bp, Homo sapiens
ggcgctgggcggtgacgcctatgctacaaagctggagtgagccttctgcggggccaggagggctggttctcctctcagtggtcggagctccgtgctgtctttccggaggggccctgggaagagccgctgggagtaccgaaactgctggagctttacatcccgtgggtgaccgtgagaaccaggtggtggtgcttgtggagcgaa

SEQ ID NO: 689112 - DNA, 447 bp, Homo sapiens
cctcgtctttttataactatgaggtctgattgacaaaacaagaagcattaccattgtggataagcgcctcattttaaaattcaccttaatcaaaaactgcctaaatccaaagggcatcagcctaatggctaaggtcagcatgatcacaaaccacaaataacatctccaaccaaaaacattccagacacctcccacagagaaatgctagcctcgggataacccctctcctgccggaaagatgtcacccccaagataaccacccctccgcccagaacattccaaccctgccacaaacttctcccccacacagaaacattccaagcttgtaataagctccctcaccctaaaaccaacgtacattcttagtctgcaaggaaaagtgctcctgactgaccagccagaatcctctctcaggtcttttctataataaacctgtctttgactgtc

SEQ ID NO: 689113 - DNA, 277 bp, Homo sapiens
cggcaggcagcagcagtgtgctcagaacttcagacgggatttggtaggccaagtctgctaagtgtacaatatatttgttaattttacaccttaaacaaagaaatgtggtcactaaacataaaagtatatatataggaattaatgtactcttgctttgtcaagctgtttgctatagttaccaaggtattatgttactctaactcttaaaagtgatgtaatctggtagcaatgtagtacttcaaataaaggcatttacataataaatttagggttgatg

SEQ ID NO: 689114 - DNA, 450 bp, Homo sapiens
ggcacatctgacccagaggggagataaacggcacaatcatatgggaaaaccatggggcacaatctactagagctgaagatacgtacattctctggacgtaattctactcctcagtttctactcaacgtgaaatacctaaaaatctttattaagaaacgtatgaaagtgcttcactcagaaacctagaaggttcatggaacacattaactctaatgttcccaaactgaaaattactgaaaccaacagcaagagtagataaactaaattcaacacttatataatggaatacctattgggcattaaacacgaacaaactgcacccacatgacggtacagaatgactctacaaacataactgttgccaacgacgcccccacatgtacatatatgattctatttctataaagttcaaaattacggcaaaaccactccggttcgcgtcatgggcag

SEQ ID NO: 689115 - DNA, 151 bp, Homo sapiens
atggtagagtggggaaagggaagtgttctaggccagaatgttcctatttagaagacactcaaattacagtctgtgttatgtatgtataccatttattcaatgccactgcgacaggcctgtttacactttttaacacctagatagactagat

SEQ ID NO: 689116 - DNA, 113 bp, Homo sapiens
tgtgtgagtgtgtgtgtgtgtgagagtatgtggggtgtaactgtgtttgatggggttttctttgggcagctggatgtgagagatcaatgcctcccctgtttggaagaggagag

SEQ ID NO: 689117 - DNA, 508 bp, Homo sapiens
agcggaagggggcgcgccgcctctgccccgcggcgagggtgtctatggagaggcggcggcgcggctgctgaggcggaggctgaggcagtggcgatggcgccctttcctgaagaagtggacgtcttcaccgccccacactggcggatgaagcagctggtggggctctactgcgacaagctttctaaaaccaatttttccacacaacatacgagcagcgcctctcctgcgctcattcgtgtgctactctctcaccggcagctcccaccactgccctgcacgcacgcacccgccaaccgtgacattacacctctcctcgcgtctcgcgcttccacccaacgccagccacgacccactctcatacatcgtccattccttgaccactccacacttctcccgcgcatccgtaccccctctatctgtaacagcggcactcgaacgccatgcttcacaccctgacatctggacactgcctcccatcactgccccaaccacacgcaccccaccagcc

SEQ ID NO: 689118 - DNA, 89 bp, Homo sapiens
gaacgttgggcttataccggaactttgcttagagccacccggaggacacattatatgcccttggataccactgtaacaggttacctacg

SEQ ID NO: 689119 - DNA, 375 bp, Homo sapiens
agcggaagggggcgcgccgcctctgccccgcggcgagggtgtctatggagaggcggcggcgcggctgctgaggcggaggctgaggcagtggcgatggcgccctttcctgaagaagtggacgtcttcaccgccccacactggcggatgaagcagctggtggggctctactgcgacaaggtaacggagcgctgagcctcccgctgtgggcggtgcgggcggcgatggggagcgggctgggttcttggggcggcctggcctgcgccgcgcccgcagccccgtgccgtcgccgcgcgagtagccgcctgcgcagctgtcagtggcccgcccgcttcccgagcctgcccgccccctgcgaggccttcgcagagccggcct

SEQ ID NO: 689120 - DNA, 126 bp, Homo sapiens
tttgaacattaatgtaatagttggttagcctcacgaagcctcagttcccatatctgttgaaaaaacaaacacgggcggggcgtggtggctcatgcctgtaatcctagtacttggggaggctgaaag

SEQ ID NO: 689121 - DNA, 1285 bp, Homo sapiens
ggacatttgaacgtttacttgtgtccatgtgccaggcaatcgtgatgagaaccagagatataaaccaccaaatggctcaggcacagcatgctcagcgtcatctatccaagctggtgcaggggagcactcagggcaccgcatgaatcattgctttcaaccatgatccttgccacaagcaagctttcctccagctgagagctcacccatggcaggcttattctaggcatggctaatcgcagacttgtcccaagccagtgtgcagcccgtgcagtctttccaggcatcatgtcagccaagatggtttgcaagcaccatacttgccagtgtgccactgcaaaccgcgccatgccattcatttagctcgcagcaggctctcactcatgctcatgcaacaggtgcctggccaccagcatgcactaccaccctggctccaggctcgtcgcgctccactccgcacgctgagacttgaccattgttaccaactcacaaccagcatgtttcgcctccacactgctctcagcacagacatctgggacaacaaatgactagccaggctgacacacagcagtgcgcagattcaccagaaagacattctactggactattgtgcagaccagaacggacgggacacttcacacaaacaactcaaacatgaaccacgaaaacagaccatcaaaacatcagcaacacaacagacccaaaccccacgacccaagagagacgaccacacaacacacaccacccacacacaacaaccaccgacaacgaccgaccaacgagccacaacgacacccaaccaaaagaaaaacacagaagaccaggacaagacggccaaacatacaggagccagaggagacacaacacgcaccacaaggaccgaagcaagaggcacatccacaagagacacagaccacaggcaaacagcaaataatccgcaatgcataaaagacaacaagagaccgatcagatcagaagaccgaccacaacagcaaaacgaaataacacaagcacacacaacgcaggatcacgaacggcacaccaccacacccaacgccacaacccggaaaagacaagaggagactgcaaagacgcacagaaaagatgaagccaaggaacaaggagacaaacacgaggcacggggcaagcccgaaacaagatcgaatagaacaaaaggagaaaacagagtgaccaggcggaacagaacaagagatcagtaaaaagcacgacacataggtagcaaacacagaaaaaatagtagcgagactacaacgaagacacaagaaga

SEQ ID NO: 689122 - DNA, 220 bp, Homo sapiens
agcaatataagaaaagaagttaaaaggatggggaggcagggcacagtgtgtgaatgtaagaaactgtgtaagcaggccaggctccctaagaatcagcttccttagtgatttttaatttgggtggtggagtcacagatcctttggagaatatgttgaaggctacgcactccctccctggccacacacgacccttttgcttattattttatggaattaatgg

SEQ ID NO: 689123 - DNA, 178 bp, Homo sapiens
gcctgatcactctggcagcaactttgtttacaatgttgaattgcagtggtgaaaagtgggcatccttgttttgttcctgatcttagggggaaggcttcagtcttttaccattaatatgatgttagctgtgggttttcagatgctctttatccattaagttcccttctgtcgtcttctc

SEQ ID NO: 689124 - DNA, 1233 bp, Homo sapiens
agtgttagcacactcacgcgtgcgtcacgatgtgtagccgcctttctgctcctgactgttgtggtcgtagtgtgttgcgcggggtggtaggtcacctgtttcagttgcctctgtctatcactgtctaggccccccgttgattgcggccttccccatgccccgtaggtagtgagttgtccgcaccacgctgtggggtggccgcgcttttgtgtttagcgcacgggggctgttcattactaacttggggctccggggttgcctcccagggtgccgtgaacgcgtccacagtgtttgtgcgttggcgtgctggcttcttttgtgttcaaccgcacagtgtgccttttggtgtggacggaggttctttcttccccccccttgggggggtcgtggggggatcatccgggggggttccatatgggggggcctcttcctctgggaaattttgtgggttttttttgtgtgagaggcgtcctggccgtggatccgcaccacacatgcgcccccctcccttgtttctgtgaccccttcacgggtatatgtcccgggcccccctctcgcgttgttttctgagcggctgattttctcggggcgaacacactcttcgcaggggttttcgcctcggttttgcttgagacgcccactgggccccccctcggtaacccacgagaacactccccgcggtgtttccccagagtctatggccccctttctgtgggagtgtaccttcgtctcctcatgaggcttcttgagagaccacgcgtttcacacgccctcggccctcgccaccactatctctctcgttttccttctcacgccgcgggaacacaatggggacgcctcgtgttcgagaggggaggtggaaggacgagcacttctcccctctctcttgttcacgagttaacacatccctggagggtcccgagatgcacgcgctgtggtcacccacatcgtgcacattttcttccgctgtggttgtggaagcgctgaggggcccttctctattcgccctccacccccccgttttccctgcacgtgcaccgcctggcacgccccccacgctatggaagtggccacggagtttgcccggcttgctttgtgaaggggagaaaattctttttttcacgagttatgccacactaaccacgttaactatctgctttgagactgccccaaagttttcctatcgagtggtctgcttacagttttttaaaaataaaacttttaattaaggga

SEQ ID NO: 689125 - DNA, 334 bp, Homo sapiens
cacaagtgggagctacacattgggtacacatggacacaaacatgggaaacacaaacatgagactatgagagggggcagagagggggtggggtgattgttgaaaaaacctatttactatgttcactacctgggtgatgagaccaatcgtcccccaaacctcagcgtcacacagtatacccatgtaacaaacttgcacatgtaccccccgaatgtaaaataaaagttgaaattatatattcaaaacaagtggccaggtgcagtggttcatgcctgtaatcctagcaccttgggaggctgaggggggcacggatcacttaggccaggagttcaagaa

SEQ ID NO: 689126 - DNA, 1178 bp, Homo sapiens
  misc_feature (342)..(342): n is a, c, g, or t
tggccttttaaaaaaagtaacccttttatttctccttggtttgtggcaaattaaaacgtggcataagagtggggtggctttgtggggtgattatagctcaaagaaacaccaaattcccatattccttcgactccgatctccctcgcgacctacttccttgggttttcacacctatagcgagtggggcgcgtgcaccgacacgacacgcagagagagcgcagcgctgtgtgtgggtgcgcacacgcgagcgcacaccaggggggagccaagcagcgcacaacaaaaaagtgcgcagagaggtgagactatcaacgcacaagagagagcgcgcgcttgagagcnctattatacagacgcacaggtgtgcgagaaaggagtgagacaactcgcgggtctctcccacacaagcacacagacgggggcccacgaggacctctcgaatatgtgtagtccccccagtgtaggaagtagatatcaagtacatggtggggagaatcacagtgtaaggtgacaaacacaaggtgtggggagtataccaacacaagaaagtgcgtgacaaaaaaccagagacatttgtgggggccaaaccaatgtgtggagggagcaacacacaccacactcccacgaggaggaaaaaagtgcagcaacataaatggtggaccaggcgaagattgttaaccctctagctgttgagtgagcaaataatcaacaagccacagcatctaagaggggagcagcagcgaagaacagaatgatgagggtgaacccacaagtggtgtgcttcgagaacaacaacacgccgctggcgcgatggggacggtagaaaacaccaaagaaccccacaaaaacgaggaggaaaaaccaagcagttgggggcgagcaacaaaagtaagtatagagagaagcacgacaaggatgggtatcgacagcgagacaaagcgaagcggtgtagaaggtaatagatcagcgagcaggtgagagcactaacccaaacacaaatagatgatgtggcggtgaaccgacaagcaagaagacgcatgtagatagagacatccacgacagatcgtgtgagcgcaacacaagaacgaacaaagcaagcagcccgaaggaggacagttaatagcaccgagaggagtgatgacgctacaccacctctattgtgaggacagaaaacatac

SEQ ID NO: 689127 - DNA, 1023 bp, Homo sapiens
ggagtctagtataactgttcaccgcgtgctgatccatgggtgatctaccatactttcttgccaccatcattgcccagcagcaatggccacaagtatgtccacgtgttccctggcttagccgtttaaggcccgtagttaatagatagacccagcctctccaagggataagttgtattccctcggagttttctcccatactccctcggcctgcaacctcttaggtcagtccacactaagctaattgtcgtagatactcgctcaatctgctctaccctctgccttctcgttacgacggtctcctgagctcgtacaccacattaattacacggcatagtatagtccaagtcgcactcgggaactatgtctatcagtgaagtaaccaaggtcaggaattaggaatgtgtcctgtggacaattagcgcacgacaacatattgtggctctgtgcccacaaagtctgctggtcttccttaaacctagtccagcgggtcatctaccaccatccatatagcactcccagtaacataaagggacgctcactgatgaccagccatggaacattcacccttattactttgacccattctaggagtctggggcaagcttaaggagagcacacacacagacaagtaggtagcacggcacatttccaagcgtacggtgtccctggctttctcgtggccaaagctacgtgttattggtcaagagacagggccagggtgctgtgcgggcatctgaccctgtgaatacgtcggcaaaactcggaaggtcttcacatggactagtgcgggagcaggacggcattgcgttcatatgaacaatcgtgcagtgttcctttaaaaaaagaaagaaaggaaaagatttcataagacaggtgtcagtggacagtttaagtacattaaccatttctctgttcgttcttagtggatgtgaacctgtgctgtggataaatcatttgtatttctggaatgttcttctatgagctaagcagttattaagtcggaatgtgtataggtgtaagcta

SEQ ID NO: 689128 - DNA, 127 bp, Homo sapiens
aattttaagggtttgtcagaatcaagcactaagttgatttttttttctggctatgcatatggttttaatgaagagtgtcatgccagacccctattgacttcaatagggaacgtgccaggttcaagag

SEQ ID NO: 689129 - DNA, 246 bp, Homo sapiens
aattcctggaagagctttcaacctgaggggatgttatccatcctggacctttgtgaagcttatcatccacgtggaatggaccggaaagcacccgtatcgagagactcaggggcatcactctggccaaggagagtccgagaccagcgtagcgtgaagggcgcacctatgtaggcgtggtgaacggagcagaatgaattggcatccccgcgagttaaaagaaattagagctgatcctctacagtcgag

SEQ ID NO: 689130 - DNA, 172 bp, Homo sapiens
agaacaaaaacatctaattctgattatcacttatactgtttattattcgatcataacttggcttttatgcagttgtatttatttcccttaggaatacagttgagtattgttctgatgtacggggcaaggctctagaaattcccctttatcccggtccctgccatcagattgt

SEQ ID NO: 689131 - DNA, 371 bp, Homo sapiens
tatccccggcctcgtcagcctgacaacagtgggaccccgatagcctgttccagtgagcgcatcgcctgactcatggcggactgactgacgtgcagctccttcgcggccgcactgaagctcagtagccgggccactgcggcaaatgacggcagggttttgagaggcaaatcgcgtgacgacacggtcgatcctcaatctgcttccgttcatgcggtgacttaagtgtttcttatgtgtcgcatcatgaatgaccgtttgtcaaggctggcgggtgcgctcaaggtatccacgccccgaaactcgctaccgaccaatgaatttcaagctctggccgatcacagccgacatcaacgacctgcggcacctcaggg

SEQ ID NO: 689132 - DNA, 308 bp, Homo sapiens
acctggttctccacttagcaggtatgtcgttttaaatatctttgccttcactttgggaggctgagtcaggcggatcacaaggtcaggagcttgagaccagcctgaccaacatggtgaaactccgtctctactgaaaatacaaaacttagccgggcgtagtgcccctcacctgtaatcccaatcccagctactcaggaagccgaggcaggagaatcgcttgaacccgggaggtggaggttgcagtgggctgaaatcgtgccactgcactccagcctgggcgacacagcaagactccgtctcaaaaaaaa

SEQ ID NO: 689133 - DNA, 321 bp, Homo sapiens
ggactttgagatagggaagaggtttaaagtcagttgttctagcaaatatggtttggaatttatttgtgatgcttaaaaatattgctgaagagaagtgaagtctaccctagagttggatggtgagattatttagcggaactaccagatccatgttgtgattctttccagtatcattcagctgcccttgggcagttgcgaggcaagtcatcagtggggtatggagattttccaggtgggtgtggttgaaggaagggaagaatgagttcaggagcacattacaaaaagaaggtgactgtaaggtctaggctgaacaggaaggta

SEQ ID NO: 689134 - DNA, 853 bp, Homo sapiens
ggacgcgtgggtcgaggaaaaggttgtaacaataatacccaaaatctgattggtcatattgttccacagagtaatgcagtctggatataaatgtatattctagacttccttataaggggattctcccagctgctaaatttaaacagtaaatatcacatttagtcattaacacagctataacttgccgtggttctcagattatttggactatttagatgccaagtgaatataagagcttgtactgaaaccatttatttctttctatattgctattagcaacatgctatgtgatcttccctacatgaagtggcagtaaccattgtcacatttaacagacctacccttctacctatattgaagtgattatgcagtgtacatacatctgagacagcatcagggattatgacctaaatcatagagttcacacacgctgacatagtcttgtacttatagtaggcactgaaatcctaagctcttgaggccatatcactgccaaccgtgaccatactgatgttcaaacagtctttatctcatcaagtcaacgaactctatttaaggtccaaccaactcaggtcaagtgcaaacgcatgtaacaccatacaaggagaagaaatgttaaccgtaaggacaacaccacgatcccgatgtacaacggtacaccatattaacgtcagagtgaatccaagcgacaaggatccatccagcaaacagaaggctacacgagatgagctcggtactagaaaagaccgtgacgagcccagaggcatcgagcacatgataccaaaagtatgagcaggtgaagccagcaaacaacacgaaaccaagaatggaaccagactgaaccaaggagaaa

SEQ ID NO: 689135 - DNA, 402 bp, Homo sapiens
  misc_feature (107)..(107): n is a, c, g, or t
gttccctatcagctaccccttatctgaatgaaaggattttgtccttggcttaatcaaaaggctgaggcgaattggtaccccatgcagatgaaggcatggtctgtgcnttgccacggccactccaaggcactgtccttttctatcagagaactggtacaagggggagggttgtagtgacagtcgccttcgatcctttgctactcgggtgtagatgaggtttttccttttggtttagttgtaggaagttcacgttaactggctttaggttccctgctcccagaccttggtgttttttcttgtaggaagtcagcacgaattggccttaagttccctgtctccagaccctattctcctgcctcacttctgtataagtcaataccatcttaaaacaaatctaacttt

SEQ ID NO: 689136 - DNA, 690 bp, Homo sapiens
  misc_feature (50)..(50): n is a, c, g, or t
aagaaaaaattagctgggcgggtgcggcgcctgtggtcccagctcttcgnagggttaggcaaaagaatggcgtgacccaggaagcgaagcttgcagtgagccgagatcatgccattgcactcaagcctgggcgacagagcaagactccgtctccaaaaaaataaaaaaaaaaaaaaaaaatccatccactccatccacttagtagcagagcgaatagacattcagtatagagctttcacgtcagaaagcactacagaagtagtggcatatccccggaggctgaggtgggagcattgctgagaggtggcacgtgaccacatccatgtcattcaacaacagaaaaacaagtcatcgagggtgtgaggggccggtgagaaacccagtatggaagaaaacacaactgggctgagcgtggtggctcacgcctgtaatcccagcactttgggaggccaaggcaggaggatcacctgaggtcaggagttcgagaccagcctggtcaacatagtgaaacctcatctctactgaaaatacaaaaaaattaactgggtgtggtggcgcgtgcctgtagtcccagctactccgtaggctgaggcgggagagttgcatgaacccaggagccgagaccacaccactgcactccagcctggggcggcacagtgagactccgtctcaaagaaacaaaaataaaaa

SEQ ID NO: 689137 - DNA, 128 bp, Homo sapiens
ctgtgtgccatcctggaatgatactagctgattaattgttcctgataacatctcatgaaaaggagaaggacagtgtactggagaatgtactttcacatcactgagaatctgcaagtcacagaagtgac

SEQ ID NO: 689138 - DNA, 380 bp, Homo sapiens
gcgtcgacgaccaactgcacggcgtagtagcggtagaattcgatcctgggcagggtcaacaccaagggctcggcccaagaatcgagacagacaaaggagttgggagtgtccgggttgggggtggggatagctgtatctttaggggttatcgcttggcagtgttgccgaaatggttgaacggcgccttgaagttcggcccggctttgtcgacggcctgggtgtagagagtcttgtacatctccaccaccgggaagccatagaggtaggcttctttggcgatgacccgtgcttcactcggcgtggcggtgaaatcggcccaggcgccggtactcatgagaatcgagaggctcgcaacagcaggcgcgtcggtgttcgaatca

SEQ ID NO: 689139 - DNA, 1344 bp, Homo sapiens
  misc_feature (430)..(430): n is a, c, g, or t
  misc_feature (642)..(642): n is a, c, g, or t
  misc_feature (844)..(844): n is a, c, g, or t
ccacccccccgcctctccgctgcgctgtgagtgatgtgttagtgtcgcggctcccccaattgtgttaagagacgacagtgtgcgacccccctttgttaagtaggggtgagttcctaaagtagaccacacccacagttaaccgcggaaagattttttttaaggaggtgtgcgacccacaacacctaagtattagggagaaaccttccttcgtagtaaggggaagctcctcccacacacagaagagtgttgtttggtgcaacgaccagaaaaaattacgcccacaaaaggggcgcctttttggggtgatataaaacaccccgtgagtcctccggcgccccccacacaggtgtatgatacccgcttagtattagtcaccaccggcggctcctcctctaataaaaagggttaatacccaccgaaagggcggccnatcttgtcgtgttttgtgcccgaaaaaaattttcttcggcgccccccacgaagagcgccgcccaaatcctcatctcccgtagaatagtctcggggggagactcccgtgccccccaaacatatggtagaagagttttttataagtctccccctgttttgtgtgaagacccttgtctcttcgacgctcctggagaatcgccacacatgatgatnttcttcgccccgacacatagcggcagacaatgtttctacaacaatgtcgacgcgcgctgtctcgcacaccacacttgtctcgagaagaggggagagaagatattaaatagtgttcctctttctcccccgctctcttgtgttccccccacacaagaggagactttgtggagacacccagagagagatcacacacaacacggtngcgcggattctcacactagcgccccctactactccgcgataaggagagatagagtaaagtgacagatctctcagagttttgttctacacgtgggcacacacacttatataaaggagtgccacgcccacacatatggcgccacacagattagatctcccacgagtgttctacacagaggaaagagaaattatatatttttatatccacccactatggacacacgggtgtccacgaccgggggaataagagcgttaataggcgccccaacctgtgcccaccgtaaggccattctacaccccacgcacaaggtggttaatccactaaggcgttaaactggcaccaaagacccgcccaaaaagatcccctcgaaccggagaaaccccaatctctcgcccaattaaggaaaaggaaaagggccaaaacacaggaagaaacccttgagaaaatcccggaataaaataatcttatataccagcctttgatttaaaccttggaaccca

SEQ ID NO: 689140 - DNA, 470 bp, Homo sapiens
  misc_feature (39)..(39): n is a, c, g, or t
  misc_feature (279)..(280): n is a, c, g, or t
agattaaggttttgttctggacaatgatataaagaaccncaggagggttgtgttcactggcaaagggtaataaatgctggcagcagcttcctgaaggcacttacctccacctttggcccactgctggaaacagctgtcccctggcttgcctccttggctcggagacttgctggcaagtcgaagttggctgttcccagagcttttgctgcgttggcttttgctatttctagtagctccattcgatctttctcactcaggcgaaatggggttctactcctnntgcgcgacctggttctggatctttccctccacctggggcgatcctcggggtacaccgtccggccgaagccgtagtagcgccgccctctagtgatcgcgtagtacgaccaccggtgctgcgacctcccgcgggagcgcgacctgctccgggagcggtagggcgacggcgacttgtagtacctccgcggccg

SEQ ID NO: 689141 - DNA, 118 bp, Homo sapiens
aggatcgtgaggtggagcaggaaacaagatacccccgggaactgggcatcgtgtcgggcccacgctgcttcggccacggccacgaggcaccgtgtcctctcctccctggtggattatc

SEQ ID NO: 689142 - DNA, 162 bp, Homo sapiens
tctggccgtcgtttaacactggccgtcgtttaacactggccgtcgtttaacactggccgtcgtttaacactggccgtcgtttaacactggccgtcgtttaacactggccgtcgtattaacactggccgtcgtttacactgccgtaagttaactgccgcgtac

SEQ ID NO: 689143 - DNA, 251 bp, Homo sapiens
agtctgacagtgcaagatatactttgggatgaacatcagaagtgcacttatagttggataccgtggactaccggcctcagtattatgtgcatccggactatgatagacgtaacatgaaccaatgtgaatttgtagactgtgctatcctgagttaattatatacgtgcagacaatgttgcctattgcattgagatacgttatatcctagttaatgctaactagtctcagaacctgttgtcagccatgtgtta

SEQ ID NO: 689144 - DNA, 212 bp, Homo sapiens
  misc_feature (33)..(33): n is a, c, g, or t
  misc_feature (35)..(35): n is a, c, g, or t
  misc_feature (70)..(71): n is a, c, g, or t
  misc_feature (113)..(113): n is a, c, g, or t
  misc_feature (152)..(152): n is a, c, g, or t
gcacaggtctgtcatgcggcatgctgataatcnancaaaaggcctctccttctttgcgtttgagcacagnngaggagtaccagcaggctcagcacaagttcctggtggccgtngagtctatagagccgaacaacatcgtggttctgctccanacgagcccttaccaggtttgattcgctcctgtcagcttatctagtgtccgtccgctactt

SEQ ID NO: 689145 - DNA, 336 bp, Homo sapiens
  misc_feature (11)..(11): n is a, c, g, or t
cgctaccgggntttcgagtgaagagagggcagatcggagtcgaacctgccccattcaggcgcccccggcagtggggcgcagcgcaggcagaatggcccggaaccccgcgcggtgtcggggaacccggaaacgaaaacgcccaaccggcgagggttgggcgtggaaggatggtggtgcagacgcgaccggaatccaacccactctctcaacgattgagcaatcccgggccctcagtgccgtggtcgagagcattccaggcctcgatagggatcaggtgtccaacgtcgggtggcaaccgatacgacagacttcactcgaaacccggtacgagctcga

SEQ ID NO: 689146 - DNA, 106 bp, Homo sapiens
gcggctggtgcttgggaccatctggtcagagtccatctgggaataattccattgttcctgggatcccacatggactctgaccagatttctgccaagccccagctcg

SEQ ID NO: 689147 - DNA, 192 bp, Homo sapiens
gcaggcgatctagaggatcccagtccggtcccccactcttagggtagtatgatgctaatctgtccctaagtaagtttcttcctgctcctttgtatcttcctttcttgtctttcctcctacctttgtctcttgggttttgggacttttttttttttttttttttttttttttttttttttttttttttttttt

SEQ ID NO: 689148 - DNA, 344 bp, Homo sapiens
agctccaccattatctcccccgcggattgtgcgagcatccttccgatgtcatcgtctctaagggcgagccacgactctgaactgcaaggcggacggcggccaacgcccaccattgagtggtacaaagatggggagcgagtggagactgacaaggacgatccccggtcccacaggatgcttctgcccagcggatccttattcttcttgcgcatcgtgcacgggcgcaggagtaaacctgatgaaggaagctacgtttgtgttgcgaggaactatcttggtgaagcagtgagtcgaaatgcgtctctggaagtggcatagtctcattctgtcacccaggatgtgtg

SEQ ID NO: 689149 - DNA, 134 bp, Homo sapiens
ggaggaggagtacatccgccttggttctacagataaggttatttgcctgagtatcaactgctgatctcttttttaacaggtccaggtaagcagggcgtagggtttttattcactttatacagcaccaccagggc

SEQ ID NO: 689150 - DNA, 955 bp, Homo sapiens
  misc_feature (211)..(211): n is a, c, g, or t
  misc_feature (955)..(955): n is a, c, g, or t
ggcaaagacaaatggacatctgcccaagtgatccagctgcccttccttagcacgcatcacatgcactcccctcaattcacagtgttttagacaacttgactgtccctatgttagtctataaggaccacatgaaaacatgtagtaccctgtgattctctatttggtgtcgatgtaaattggttaactgcagggatggtgctatgagagctcntggtcacgccacacgtaagaccaaatccatcagcaaattctactggacaatcctcccttttagtagcagagttggaccggcttttcccattgcatgataggtttctttccctcattctgcctagtgtgtaagttttctatttccccagtacttttagccaaccttaccaagtggtgtgtaaagctagtatgtatgtgctttgcttactttttaaagaaactgtagttagactgtgaggagttactttatgtacgttgcatattcaaactgtgatgttttatccttcaaaacaagtctgcattagagaagatatggtgccctacgtagacagctttcattcactttattactctctcatatatgctgtgagaagttgtaatatcaattgggctctttgggtgggactctaagcagcgatcgcagaaatattgcttctggtccaacttgtccatccagaacagaagggcgctctagtagctgtgtgctggattattccggacctggattaacgtcaagttgctccattgatttcaccattcagtcccacttttattcccagaaaatcaatcagtgcgcaaaacttcgcaagggcactctaatggccgggtgcggagaacaccacgttcctggacatggcccatgggccactacgctgttccctgacccacgtttctttttacacggggggaactctcgcggtcccctatagggggccgaaaaaattccagaacccgttacctgtgn

SEQ ID NO: 689151 - DNA, 294 bp, Homo sapiens
cggctgtagtgaggcaaccggatgggatgtgttgtgtggtggggcggggacatttatgttctatggtgcgcacgggcaaaggtatgtactggaacattgcgattgggaatgtaagtaatacttaatggtaattttggttttctctttcagatatggagaatgttgccttataaggattggagtattagaaatggatcaattcactaagttagtttattaaattaaaaaagtctatgcttcattattatagctatttcctaataggtctctggatatgtcctcactacatgccat

SEQ ID NO: 689152 - DNA, 315 bp, Homo sapiens
agaaataaagctgcccaactacagccatgtcatcttctacaaagtcaacaataattaaaacaatatagaaaggattccctattcaataaatggtgctgggataattggctagtcatatgcagaagaatgaaactggactcctacctttcactataaacaaaaaattaactcaagttggattaaagttttaactgggacagggcatggtggctcatgcctgtaatcccagcactttgggaggcgaaggcaggtggattatctgaggtcaggatttcgagatcagcctggccaacatggtgaaaccctgtctctact

SEQ ID NO: 689153 - DNA, 227 bp, Homo sapiens
ttgctcggtacccctgctctcgatggccatgcgctacgaggggtgggaggtccggaccgcaggaaccggcaacgccgctgtccgggaggccaaggacttccagcccgacgcagtcgggctcgacatgatgctccccgacttcgacggtctccaggtgctgcggcggatgcgcgaccatgacgagagcgtgcccgtcctcttcctcacggcgaaggacgcggtcgagg

SEQ ID NO: 689154 - DNA, 392 bp, Homo sapiens
gcgggacgagcccggctcgactattaacacaaatttagccagaggtgcaaacctgtaatcctagctatttgggaggctgaggcaggaggatggcttgaacccgggaggtggagggagcagagagctggcactgagccacgccacggcactccagcaggggagacagagcaaaactcggggccagacaaagaaaaaaaaaaaaaacccagaccagaagaaagaaacacagagatatcgaacgggtcatacgatcggaaaacatcgtcgagcaattcaagaacaaaagagctcaagaatcccttatttccattataaggagcacctctgctccctgtactcacaaccttggatacaaggggtaagtgcatctgcaacgtgtggcccctgtgggc

SEQ ID NO: 689155 - DNA, 531 bp, Homo sapiens
tatgtcctgctccattgctgactcctcatcatccacgctgttgactagtgaagttgtttagctcaagaagcccactgggctccaccaccacattggagctggagtgacacggaatagcatactgaggaatagcctggatgataatttctgctggactctcttcagctttcttttggcctacattctgaatacgcatgaactggcctgtcgcaggcactgctggtggatcaattttccttgtcgttagggaagagccaacagtggatggactcgaacaggactctctacatttctgttgctggggagtggaattcgccatccctgccaccaccatgttggttgggggtaatgagcctgctttaccagtgagcatgttcttgggaagagcctttttttgtggatcccatatcatatgttctacctttgaatcaaacctgacctttcatcaaggacaattttaaaatgtccgacaatggtgggttcttagaagccctgaatgggagaatcgccttgaaactgggggagaaaagg

SEQ ID NO: 689156 - DNA, 120 bp, Homo sapiens
cggcacgagggcggccccggctgaactgctcatcatcggctggtacatcttccgcgtgctgctgcaggtgttcctggaatgctgcatttactgggtaggattccaggaacacctgcagca

SEQ ID NO: 689157 - DNA, 220 bp, Homo sapiens
actagtccacggtggctgccaggcctggacgaggggaagtcaggcagctgtcaatggggacagcagtttcagttttacaagatgagaaagttctggatatgggtttcacaataatgtgaatatacttcacactactgaagtgcacacttaaaaatggctaagatggtaaaacttatgtctattttaccatcttagccaagcgtggactagtgggtaccga

SEQ ID NO: 689158 - DNA, 612 bp, Homo sapiens
ccatcgccgtgcggtagctgcagctgaaccattcgaatctgaggccctggttactaatagagttcgtttaaaatttataatcattcttaggagagcgaaagagggtgcgaactagccggtcggaccgggcgggagagctggggcggcgggaggagacagccggggtgtagcgtgttgctgctcgtgacctagtgaggcagtccgtgtggcagtcctgtgtgctggcgtgtgttccgcggccggtgggggacggtgagtagcggctcgcgctgcggtgcagcggcgctgcactcactcgccctctccaggggctgggggttcgtccggctccactggggaagactcagcttctccccggggtcccgggttgtgccttactctccggagtgggcagggtatcgagggcaggggcctcccggcccggctcccccatcccccggttcggaccgcgagcgccggtctcccctccctgagcaccgatcccaagttccagctagagaaggtgggcggagcgccagcccgggccccctcccagtcccagcgattttgagagggaagatctgatctcctagaattagagttggtacagaaaccatttcagtccaaaaatgg

SEQ ID NO: 689159 - DNA, 231 bp, Homo sapiens
ttcacagagggggtcattttctctttaggcaacaagtactctttacggcactagtctacacggaggaggtgtgggcccctcttcccctctgggctaaaatatcctatctgaaccgttaccacaagctgggatgtatccaggacttggtctccttggaagacaggtctgatgtttggccaatcaattccttcacaccctgtctgaaacttgtatcttacgtgaacttaaaga

SEQ ID NO: 689160 - DNA, 1049 bp, Homo sapiens
tggaagtgacatcgtctttaaaccctgcgtggcaatccctgcacgcaccgccgtgatgcccagggaagacagggcgaccctggcaagctccaactacttccttaagatcatccaactatgggatgattatccgcacaactgtttcattgctgggagccagacaactgtgggctccaagcagcatgcacgcacgactccgcatgtcccttcgctgggaaggctgctgcgtgctgcctggcgcaacgaatcaccactgcatgcgcacaggccactccgcagggccaccctgcgaacaacaacccagcttcctggcagtaaactgctgcctcactactccgggcgcgaaatgctggcgctcttgctgctctcaccaacaggcgcacgcgcccctccacctgccccactcacgcggaccactgctctgccatggccccaagctcaccgcgcttgccagtcctgtcctgccccgctcgcctggctgcccactctgccccctcacctgcctgcacccgctcaccttgctgtccagatccgcaggcacagccaccttgcgccttcctccggcgtcccctgccgccccaggacacccctccccgatttctcactcccatcgcggtcgttgctcacgtcgcttacttccccgccgaccttccgtcccagcctccctcccgtgtcgggtgtcccctccctctctctgcacccacttcccccttgtcacgcgtcgaccttggcttcgcctccccctcctcgccgcctccctcacgcctacccttcggtgcaccggacctccccctcaccgcgttcggtgctcagtcgtccctctaccgctcccgctccaccgtctcgccactctcgctctccttggtctcactctgaacaacgccactcttgctgcccctctcacactcccgacacctctcctttctccacccccccccgctttgctccctccccccactctcctctgcctgcgctcctctcgtcgcgctccactctcttccacacctcacacttgtgccttgcctcacccccacgacctcagctctcgc

SEQ ID NO: 689161 - DNA, 177 bp, Homo sapiens
actatactatactgccctacaggattcatactagagaacctcgtgtactctggataaaaagatccatctgtttattccccccatgctctccattcagaccaccctacagataccctggcagatggctctgtccctctatgccataccagtaggcaaatccttatacagcaggatatg

SEQ ID NO: 689162 - DNA, 355 bp, Homo sapiens
attcggcacaggaaatgtctagtcaccgtttcagacagtgcaaatcataggagtgaagaccacaaaaactccggattccggccaaccggaaacactttgggcacggaggctctgccaagtcttccttctccagcagcatggggcatacgcctaactattctcagggtaaacatggaaatcctaatcgcatctgcctcactcctgccaggcggtggctgctccgaattttccaccacccggtgcgcttggccaacgtttctggggcatttgcgctcaaggccagagagcgtgcaggagatgagaccatcagtttcggcctgctgaagggaccaccgtccgagctgaaatgagcaga

SEQ ID NO: 689163 - DNA, 123 bp, Homo sapiens
atggaatcccatcaccatcttccagtgcagcgcacactcccaactcaagtggggctgcatgctggcgctgcagtagttgtgtcagtccagtggcgtgttcgcaccaccatggcagactaaggc

SEQ ID NO: 689164 - DNA, 683 bp, Homo sapiens
ggggaaataaaaaaaaaaatataaaaaaaaaaaaaaaaaaaaaaaaaaaaaaaaaaaaaaaaaaaaaaaaaaaaaaaaaaaaaaaaaaaaaaaaaaaaaaaaaaaaaaaaaaaaaaaaaaaaaaaaaaaaaaaaaaaaaaaaaaaaaaaaaaaaaaaaaaaaaaaaaaaaaaattgcggcccccctggcccaatgaaatttaaacccaaaaaagtttaataaatgggcccaaatttaggcttaattggcaaaatcgccctaaaagggggcgtaataaaaataaatggccggcttttaaaaaactttgaactggaaaaaccctgggtttacccaaataaaacgcctttaaaaaaaatccctttttcccaagggggcaaaaaagaaaaaagccccaaccgaaggccctttcaaaaaagggcccaacccaaaagggaaatggaaattgtaacgcgtaaaatttgggaaaaaactcggaaaaattttttgaaaacaaacttaatttttaaaccaaatgggccaaatttgaaaaatcccttttaaaacaaaaagattacaccaaaaaaggttaaagggttcccaattttaaaaaaaaaccccctttaaaaaaaccggcccctaaaagtcaaaaggcgaaaaaaccctttataaggcgagagccccttttgagaaaccatcccctaaaa

SEQ ID NO: 689165 - DNA, 114 bp, Homo sapiens
cggggagtagctgacaagatcgtagatctcatgccaggtagcatcaggggctgaagtgaagggcgtgtgcacatgaagactggtagtgtatgccctggcgacaaacggcgagat

SEQ ID NO: 689166 - DNA, 196 bp, Homo sapiens
  misc_feature (166)..(166): n is a, c, g, or t
cactcgagacgtaaattatggctagaatcatccgctacctatacacgccaataggcgcctcactatatctataatactagcctactatcctaacacatacggcgcgtgggcctaatatatcacggatacataatctactaactacagaaacacctagacaacatancggcatatatacctacctgtctatagcaac

SEQ ID NO: 689167 - DNA, 537 bp, Homo sapiens
  misc_feature (59)..(59): n is a, c, g, or t
  misc_feature (224)..(224): n is a, c, g, or t
  misc_feature (226)..(226): n is a, c, g, or t
  misc_feature (231)..(231): n is a, c, g, or t
  misc_feature (242)..(242): n is a, c, g, or t
  misc_feature (306)..(306): n is a, c, g, or t
  misc_feature (341)..(341): n is a, c, g, or t
  misc_feature (346)..(346): n is a, c, g, or t
  misc_feature (349)..(349): n is a, c, g, or t
  misc_feature (356)..(356): n is a, c, g, or t
  misc_feature (358)..(358): n is a, c, g, or t
  misc_feature (365)..(366): n is a, c, g, or t
  misc_feature (373)..(373): n is a, c, g, or t
  misc_feature (376)..(376): n is a, c, g, or t
  misc_feature (386)..(386): n is a, c, g, or t
  misc_feature (391)..(392): n is a, c, g, or t
  misc_feature (396)..(396): n is a, c, g, or t
  misc_feature (400)..(400): n is a, c, g, or t
  misc_feature (407)..(407): n is a, c, g, or t
  misc_feature (411)..(411): n is a, c, g, or t
ggaggctcggtcctgctggaggccacgggtgccacacactcggtcccgacatgatggcnagcatgcgagtggtgaaggagctggaggatcttcagaagaagcctcccccatacctgcggaacctgtccagcgatgatgccaatgtcctggtgtggcacgctctcctcctacccgaccaactccctaccacctgaaagccttcaacctgcgcatcagcttcccgncnggagntatccgttcangcctcccatgatcaaattcacaaccaagatctaccacccaacgtggacgagaacggacagattngcctgcccatcatcagcagtgagaactggaagccnttgcnacncaagacntngccaagnncctgtgnagngccctcaatngtgcnnggtngaantagaccngaantatcaggggagcccctggcgggatgggacctcgcttgacctggctgacacagaatccggagctgttcagaaagaatgccgaagagttcaccctcggattcggagtgaccggcctcctaactcatgt

SEQ ID NO: 689168 - DNA, 306 bp, Homo sapiens
  misc_feature (36)..(36): n is a, c, g, or t
  misc_feature (38)..(38): n is a, c, g, or t
  misc_feature (77)..(77): n is a, c, g, or t
  misc_feature (224)..(224): n is a, c, g, or t
  misc_feature (259)..(259): n is a, c, g, or t
  misc_feature (267)..(267): n is a, c, g, or t
agagagagagattgagatacaggcagtcagccagananagagagtaagacagaagataggcacagacagagagacanacagacaggcagacagacaggcagagaaagagagtaagacagaaggcagacacagaaagacggagacaggcagagagaaacagacagaaagagagagagagagagaaagagacaggaagggagagagagagacagacagacagaganggagagttagacagaggacagacacagtgagaganacaagcanatagagagagagagacagagacagatacagacagataga

SEQ ID NO: 689169 - DNA, 472 bp, Homo sapiens
atttattgagccacgctctgaatccgcataatacacatgggggtttgtgttatctagaaagggagtttgataaaaacttactaaaagccacttgaagtaacaatgcacatgcaagagattttcacacatttatctctaaggagtattgagcactacttcctgatcagctgattctaattaactggaatccgactatcacaacgtattatgaaccactccgctctatgtcatttgaaacaagcgttaactgaccagtaatagttttcagtagatgctacgggatacttctcagatttcgatgcttccatatcatccaagccaaggagccatgaggggcaaacgggtggattcagagatttgaaatgaatctaattgtacacctgggttcaatattaactgcaatgggatcttgttactcccaacaataatgtgggaacaaaaaatgatcaaataacatatattcaggcgtgtt

SEQ ID NO: 689170 - DNA, 209 bp, Homo sapiens
ggatagagcggtctggcgaatgaaaaacaaatgtgctttatccatacaggggaatagaactctgcaattttttattacagtgtagttgatttacagtgttgtgtcagtatcttcacacagcaaagtgactcagttatagctttatgtacattctggtgtttggggtgatcaaagctcaggtagggattgggaagcactatatgtgcctg

SEQ ID NO: 689171 - DNA, 100 bp, Homo sapiens
agcacgatagctcctaccttacatggcactggtggtctgcacacaatgcgacttcgccggtctgcacgacctggcccatcgaaccaaaggcggggtggat

SEQ ID NO: 689172 - DNA, 267 bp, Homo sapiens
cgcgaccactaattcccgccatggactcaggcggacccagcaggagctgtcgctcgcggtgcatcaccactgtctgtgataggctggtccaggaaggccatcagctcctcattaatgatcatttgctgatgatggagtgcccagtgggcacgatccagctcaaacatgtctagacagcgtctccatgctgatggagtcatagacactgctgtacgtgaagaggtaagtcctcagtgactcttcctgcaattaagaagtgaccatacg

SEQ ID NO: 689173 - DNA, 963 bp, Homo sapiens
accaggcgtgtcgtgcgtcgtgggaaagcggctgagtgagcatggaccactcggtgtccgagtgtcatccctggtcatgacgagctgcttggttgctggaccgaggcaggaacatagtcgtgggggggaaaggatctgtcgggacctacccatcatggattgacagtaccttgctgggtcggctccaagtgaggctcatatggaaggggtgcgtatgctccaatgggggtggctactcataattgcataattgacagcacaccgtgtccaggaagatttcatccaaggtggtggccggattgacaattttgcccctcttggtagggcctattgtctttttgtggaccaagttcccattgaagaattttgcccttaccagaaggggctacacagcccttcggggaaaaccgtgggcctctcgtggattattgtcaaattggccccagtggcaaaactacacggttggacaacgggtaagccccaaagacttcaatttccccagggtgagacgggacaccgtgacattatatattatcaaaacaccacgggaagtagttggacgctaaaagacagcgcggacctttcctggcacattacaaccacatctgtgcgcacacacggcgacaagccaaaccgaacgggcttcctttggagcgggtggcaccatggcaattttgggccacaagacgttgtgctagggccgtagaagactcacgacggaatttagtcacatttacattacacagtaggcccgttccccttaagagggacacaaagttccctcctgggacacttgtgcctataatattcgttcaacacttacaagcgcaagattgcggtaacttgtgtgagctctatcgcgagaccagagacatctcagacgccccctgtgcgagacaggccagtgctagttgttcttcgcgcatcttaaacacgacgcgccgcgatacagcgcactgtcct

SEQ ID NO: 689174 - DNA, 905 bp, Homo sapiens
attcagctcttgtgccgcagctgggcccaacggtaggtagagttgcaattactggctctgtcagctcgttggcttgcaggcattagtcgtgcgtcatgagtagctgcgtctgggttcatcacctaattgagaaacgcgccggctggagagaagcagcatgcgttacgtcgtcagcaaaattcgcgacggactcggaagtatctctgcaaggtcaatgtgacccttgcgaatcatattgcagaacaacgagagtcccaattgctgaggcttctggattagtctagagcctttgagccggccgcgcagtgcgctatgcttgataggggtgcacagatgtattaacaggaacgtttcaaccgcacgaggcccagttaaccaaacctaagcctatagtaagctctacacacaccttagacctggcaaccaaatgcgccataaatctgagtgaacaccgtagccaagggggcaccttagttcccacaactggcatgacgcacacgtcacttccagcggaattccccacggtcaatccactggaaccagagcggccacaacacaaaaacagttcaacacgctggccacacatactacagcacaccacaaccaaccacgttttgacaagacccaaaaggcctatggatgcaacacacttggcgcaccgccgcactttcggaacaccgcaactctaccctcgaacacctgctggacacacatggaataggactaacccacgaacaccacacggccactacagccacatcgcggcgaggacaagactgactcgtcaacacattcaaccgcttcgcctccatacgcacgcggcggggctcaccagcagccgttggcacctctcaaccattcactatacactatcctcacacggcacaaaccacttcgcctcgata

SEQ ID NO: 689175 - DNA, 284 bp, Homo sapiens
gtcgacaccagtgtttagtctgcgggtctgtcgggtggacacgtccaagccgtaggagccagtttcctttcttagctgatgtcttgggccagaacaccgtgggctgttacttgcttagagtaggacgcggtttgcatttaccgccagtaatgtattcattcttaatttactgtaacggtttttttggtacgcacttctcgattcttggaagagatgacaacaaatgtgggttatctactgttatgtgagaacattaggccccaggcaacacgtcattgtgtaag

SEQ ID NO: 689176 - DNA, 1634 bp, Homo sapiens
tttaattatctcaaaatatttattttatatctctggacctctcttttcaaatctcttgatttcaaatttcacaggtgtgctcaaagcaaatacaatgtgcaaagggggaaacgtgcaaccaaccaacacaaccaacacaaaaaatgtgtgtcccctatagaagggattaaaaggggctcacgtggggaccaaatctcattgtggtgatgtgtgtgagaccttaaaatctacgtctcgctagcgtgtgttaattataacacatgtgtgtctccacagagaacacacaccacacaaccaacacacactctctcacactctcacagtctctctctccttaatcacacacaaatatactctctctagtgacacaacaacaccgtgtcacacccaagtgaaaaagtatctctcttataatacaacctgtgtttcaccaaaaaaacacactgtcgtgtccagagtgcggcgcgtgtgtgctgtttataaccaacttttttattatacacacagcagagagtctattataaaagaagtatatacaacgtgtgcgaaatcacacttcttaccgaagacaaacatgtgtgagtgcccaagaacaccaatttttctatacatctccccgagtggtgtcctcatatatgaggcgtgataaggcggctctcaccacagaagacaatatttgagacaccccccagagagcgactattctcgtgttcaccaacaacaaacaacaacaaagagagggagagcgccgcccgctcctcttaaagaagaagtatttatctccctactctgaggagggggagccccccccaagaaacgctttatcacgacgctgttttaaccccccggagagtttattcttctcttgtgtgatcaccaaaaggagtggtggggcctccccccctattaataattagtagctgacaaagttctacgacatcttaaactataagacgcaccaataagaagcacacctgttggtgcacgcagcacaccgtcttatctcacaccaaacaagacgttatttcagcaaagaacacccggtggcggcaacacaacaccgcttggtcattaacacatgttttggggggagccaactacactttagtggcagtgaaaacaaggtggacacaccaccatctaaaccattatccagtagtaccgaaggggcatgacacccacacatacattgcgggcacacaacaatcactaataccccctcagccacacgagaaatttcttatcaacagggcctcccacataacaggggcaacaacatttatttaaccacgatctcctccacaaaatggtgggcataatcactcgccatgtgtctcctaccaactcattcccccttgctccacattatatccacctcaacaccacactatattacacaacattatctgcgcacaacaccacgacacattatataaactctcacttccaaccaccctttatttcctcacccggacgccctctcacatctacactaaatcctactctaaatacactatcataatcaacactctaaaacaaacaacaaacacaaacaacatacatatacaacacacacacaacactacaacataaaaacacaatactacacaataacacacaacataatcacataa

SEQ ID NO: 689177 - DNA, 1111 bp, Homo sapiens
tctcttggcttcttgtgctacctgtgctgtttcttttcacttgttgttctttattatctctctgggggatgttttatgttccttggtgtgggatcctcccccccctcatgtttgttgtgttgtgtgtctgaacccgctgcttgtcggaaactccttgcgtgttttgtgagaagattttgaccccctgcgtgtgtgtgggtttcccgccgctggggttgcccccccccacgcggggccctttttattcaattttgggccaccacccgcgccagggagaatttccggtgcctgaaagattgcttattattaccaaccccagggtcccatcagaagttgagggacattcgagagtgacctacacagaatggccctaactggcatagagatctggtacgatgtgtgagaacatccccattgggttgtgtggccaccagagtggatattaaggacaggaaagtgaaggcgagatcccttgtcgttcccccgtaagaagaatcttccgtactacgacctttctgcccaaagtaactaccactttgaaaagcccttcctctggcttgctaggaagctccattggagaccctaacttgggaatttgttgcccatagcctgctcttcgcgcccccccagaaagattgtccatggaccccagctttggccagccaccagttatgagccacgacttagaaggttgcctctcagaccaacatgcccttccccggatggaggatgatgaccctgtgagaatgaagctggagccccagcgtccagaagtctagttttatagcgccaactgtcccgtgatgtccaccggtgcagcgtgtgtgcccacctcattattatctagctaagcggaacatgtgcttcatctgtgggatgctgaaggagatgagtgggcttcggagtgaatagtggccagtttaaaaaataacttcattgtttggacctgcatatttagctgttttggaacgccagttgattccttgagtttcatataataagactgctgccagtccaccatccaccataattccagtggtgaaatcttgtttgttactgtcattccccttccttttcgtttagaatcagaataaagttgtatttccaaata

SEQ ID NO: 689178 - DNA, 1094 bp, Homo sapiens
gccgggtagggctgtgacgctgctgctggaggtcagaatgtcatacccaggctatacccccaacaggctacccaccattaccctggatatcctcctgcaggtcaggagtcatctattatcccccttctggtcagtatccttatcctagtggcttacctccaatgggaggaggtgccatacccacaagtgaccaagtagatggctacccagagagctggaggctacacctgacgcactggaggttatccagacccactggaggctatcctggatgccccaacagccagggaggagctccaatcctatcaccggagttcctccaggccaaggaattatggagatccacaccaggtggagcaggcttaatctggagtatccacagcacacactatcacagtcttataggagagaggataccaagacacaggattccacataaccatggatggcattatcctggagagacagatgccgttcatcagatatcctggacggacaacactaacttaccctaggtcagacctgcacacagatgaactcagagtacactcaagggacactcatccagacaccagactgccacacacgcatgctactacagacgactgcagcacagtacatatacgacaggcaaccgacaggggtacaagggacccgactgaaccagggcaaaaagaggactgggggaaggacacaacaccgccacacaacaaggcatccagcggcaccacacaaatacacacagacaccacaaccaaggacacagtccaatacatgccaaaggaataacaacaaaaaaatccaaacacaaccaaaccgatgacacaacgcaaaaacgaaccacgccccaaaaagacacccaagcaaaacccacaccggaaccacgacacgccaggcgaaccagaaccaccgaacgcgaaggggcacatacgacgacaaaaacaacacaacaaccgaaaaagaaacgacccaacgaacgcaacacaaacaaaaaaaccaacaacagaaaaaaaacgcggccgcccggatagaccaggacaacaccggcgcacaagaccacacaagacgacgaaaaacgagacaaaagggaaaca

SEQ ID NO: 689179 - DNA, 120 bp, Homo sapiens
gcggccgcctactactactactgctcgaattcaagcttctaacgatgtacggggacatggagaaatatattaaattgtacagttttatgtgcttaattaaagactgtaaaacgcaaaaaa

SEQ ID NO: 689180 - DNA, 107 bp, Homo sapiens
tatacatcagctcggccgtgttttcctctgtatctacccaacatctgtcatgcagaattggtcccctcctctctgtggaggatccgccgtgcccaagacacaatgag

SEQ ID NO: 689181 - DNA, 155 bp, Homo sapiens
agcagaagaaacagttagcgcaagacacaggactttacaattcttccaagttaaacaactggattattaattgccagaagaagaattagttacagcccatgattgtaccagtcaatcgtagcaggtttcttctttgatccgtcagtgagccaagg

SEQ ID NO: 689182 - DNA, 85 bp, Homo sapiens
  misc_feature (40)..(40): n is a, c, g, or t
  misc_feature (44)..(44): n is a, c, g, or t
ggtataaaacagattaaaggtgggagctgcaaagggtaanaatnaaaaagtgttcctcccgggaaacagcactgttggtctgatc

SEQ ID NO: 689183 - DNA, 1512 bp, Homo sapiens
  misc_feature (1046)..(1046): n is a, c, g, or t
  misc_feature (1128)..(1128): n is a, c, g, or t
  misc_feature (1166)..(1167): n is a, c, g, or t
gtgggtaaaagaagggagagaggtttagacatatggcaggactgtgatccctggcccagcacagccaaagactgtcactgtttgcctttgcttgtcctgtctggatagaggcacctgccatgtgcagactagtggaggcttctagaggccataggtctcaatttgtgcctatttgggttctaacggttttcagggtatttgttttgcatagtcactttcctgatgttgacataggtggctgctgtgaaaatgctgtggatggtgtgacattcttgactgagctgggtggctgtggagagaccacttaaatcttctggttcagatttcacttacagacttagtaagatgtccacttcagagcccgccctctgtgctacttactctgggctaatcacacttctttagggtgagaacctgccttcctagaagtgactgttggtgcttgtcagtggccatacccttcatcatcctcattcagaggtatggatcgtgagttctgcttgtgaatactgtgagacagctgctgtctgcttcaggtccagagttccatgggtggagagagtaacccacaaccagctcactcctctgggcctctcctcctgcttaaagattctagttctcaacctctccaagttcatgagccaaagatcagaagtgagtcttctgaccagcccgcctccaggctgtctacagccccaaaaaagccaacacttttctggcagccctttttgttggaggttagagaaggcctcagggaccaacaggggccagatctagacattcctgggggaagtttgtctaaggtggacagggggaaaaatcaagaggcaaaaagccagtgtcctttggtgaccatgaagcaacctcagagccttagttctcctagaatgcagagagaagcattctggaagccatgggaacaggagctcgaggctgcatcctgaatgcatctgcatggccctcgcagggtgtttgtgaggatactggaggtcaggctacctcccaagcaagggcttggttgagaaggaacccattgctcatattgntgggggagctatgaacctgacatgtcagtggccaggactgagacagctctccctggtcctgtcattgcatggctaatttcangggagtctgaggtcatggctttatttttgctaagagannaagttcaaggatgttcttgttgtagggcctttgctaatgagcagttttttaattagaaaacatttctttctctctttgtgacgtgatggtattgctcatttccttctctacccaaactgaaagatcatcttcactttaaagcagaccatgcccttggcttgcccattctttcaggcagcacattgccacgttctaagcagatggccttccgtgatcccgttttctagttggggtaaccgagtcttgaatgccttactagtccggcaatctttgcactaagcttctggcctttgagactacaatgagttctggaaggggacaggtcattccctttcaatttgaatc

SEQ ID NO: 689184 - DNA, 212 bp, Homo sapiens
aattcccccaaggggggggggttaaacaggggcggggcctttcccctttttcccgggttttttttttcccccccggggggaggccttttgcctcccccccggggggggggccccctgaggctttcccccgagggcaagcgggggccggggcccggcttttgggccggccggcggaccccgggggtaaataacccctttttttttttaaccta

SEQ ID NO: 689185 - DNA, 152 bp, Homo sapiens
gcacgagaaaaggggaaaccccttttgcttggctctcattctctcttccctgccaccgtgtaagacgtgcctttcaccttacaccatgattgtgaggcctccccagccacgtgaaactgtgaatccattaaacctctttttcttgtaaatta

SEQ ID NO: 689186 - DNA, 279 bp, Homo sapiens
gacgtgagatgggtaatgtgctgacctcagaacaaagtttgagggaggcacattgtatgtgagaatttgaagtgcttatgaagtacaaaagcggaggccaggtgctcacatctgtaatcccagcactttgggaggccaaggcacacagatcacttgaggtcaggagtttgagaccagcctggccaacatggcgaaaacccctctcttactaaaaatacaaaaattagctggatgtggtggtgtgggcctgtaatcccagctactcgcgaggctgagggc

SEQ ID NO: 689187 - DNA, 152 bp, Homo sapiens
ttatctacgtctgatcttatgagcaacacagtaggatgacagaggaggctgagcatgtgaatgagtattgtgcatgctatgactgcatcccagggcgcactgaagcgggcggcggaaaacggaacatattgatggccgagaggaatatactt

SEQ ID NO: 689188 - DNA, 415 bp, Homo sapiens
actgcatccaacgtacgcagcggcaaacgcggggtccccttccatgctgtggaagcttgttctttgctcttcgcactaaatcttgctggtgctcactctttgggtccgcgccgcctttatgagctgtgacactcaccgagaaggtctgcagcttcactcctgaagccagcgagaccatgaacccactgggagggaagaacaactcctgacgggaggaaggaacaactctggacatgctatcttcatgaaccgtaacactcaccgcgaaggtctgcagcttcactcctgaagccaggaagaccacgaacccaccggagggaacgaacaactccagatgcactgcctttaagaactgtaatactaaccacgaaggtctgcagcttcactcctgaggccagcgagaggggtaccgagc

SEQ ID NO: 689189 - DNA, 338 bp, Homo sapiens
cgatacatgccttttctctcctgtcacaacatcttgaagaggatgagtcacttccttaattgccacaatacacaggccaagggcaactggtcacccacaacccctacttgtatgcctaatgccataccaattgccttcttcttcatctgtaccaacgtaccctacagtctgcacggtgcaagcctcctgggcttgacctatctgtacccacagctgggggccaggcatgccccctctatgcttcccatcacctcatccctctccacgtacacaacaaatcctctaagggctgaaaatcaagcccccacctggacacagcgtgcccacagatggcatac

SEQ ID NO: 689190 - DNA, 139 bp, Homo sapiens
ctagcgtaggcactagtgtaggctgtgtgtggtgtgtgcgtggtgtgttatatggtctgtgtgtgtggtgtgtgtgtgatgtgtgtgtggtgtgtgatctttgtgtggcgtgtgatctgtgtatgtgtgtggcgtgtgc

SEQ ID NO: 689191 - DNA, 174 bp, Homo sapiens
agacgcgagcgagtaagagtaatattagggatcattacagaaacgtgcaacaatgagaaacaatctggtcttacctgcgcctctcctaccatggtaacagctaggagctcgcactatatcaggatttcagtggttttgtagtactagtcacatcccccacctccgtggcgattc

SEQ ID NO: 689192 - DNA, 975 bp, Homo sapiens
  misc_feature (10)..(10): n is a, c, g, or t
  misc_feature (77)..(77): n is a, c, g, or t
  misc_feature (85)..(85): n is a, c, g, or t
  misc_feature (104)..(104): n is a, c, g, or t
  misc_feature (129)..(129): n is a, c, g, or t
  misc_feature (144)..(144): n is a, c, g, or t
  misc_feature (177)..(177): n is a, c, g, or t
  misc_feature (184)..(184): n is a, c, g, or t
  misc_feature (187)..(187): n is a, c, g, or t
  misc_feature (240)..(240): n is a, c, g, or t
  misc_feature (246)..(246): n is a, c, g, or t
  misc_feature (252)..(252): n is a, c, g, or t
  misc_feature (256)..(258): n is a, c, g, or t
  misc_feature (261)..(261): n is a, c, g, or t
  misc_feature (270)..(270): n is a, c, g, or t
  misc_feature (289)..(289): n is a, c, g, or t
  misc_feature (314)..(314): n is a, c, g, or t
  misc_feature (318)..(318): n is a, c, g, or t
  misc_feature (325)..(325): n is a, c, g, or t
  misc_feature (329)..(329): n is a, c, g, or t
  misc_feature (336)..(336): n is a, c, g, or t
  misc_feature (349)..(349): n is a, c, g, or t
  misc_feature (353)..(353): n is a, c, g, or t
  misc_feature (355)..(355): n is a, c, g, or t
  misc_feature (360)..(360): n is a, c, g, or t
  misc_feature (370)..(370): n is a, c, g, or t
  misc_feature (379)..(379): n is a, c, g, or t
  misc_feature (387)..(387): n is a, c, g, or t
  misc_feature (406)..(406): n is a, c, g, or t
  misc_feature (409)..(409): n is a, c, g, or t
  misc_feature (420)..(420): n is a, c, g, or t
  misc_feature (448)..(448): n is a, c, g, or t
  misc_feature (472)..(472): n is a, c, g, or t
  misc_feature (538)..(538): n is a, c, g, or t
  misc_feature (751)..(751): n is a, c, g, or t
  misc_feature (784)..(784): n is a, c, g, or t
  misc_feature (786)..(786): n is a, c, g, or t
  misc_feature (814)..(814): n is a, c, g, or t
  misc_feature (821)..(821): n is a, c, g, or t
  misc_feature (823)..(823): n is a, c, g, or t
  misc_feature (827)..(827): n is a, c, g, or t
  misc_feature (838)..(838): n is a, c, g, or t
  misc_feature (852)..(852): n is a, c, g, or t
  misc_feature (862)..(862): n is a, c, g, or t
  misc_feature (864)..(864): n is a, c, g, or t
  misc_feature (874)..(874): n is a, c, g, or t
  misc_feature (891)..(891): n is a, c, g, or t
  misc_feature (919)..(919): n is a, c, g, or t
gggaggaggnacaggaagggggggaccctcccccagactctactcagattccaatgagcaccagggagggaaaaganggaaaacnaaaaggaaaaacaaaaggnaagccagaacaatccgcctagcccngcaggaggatctggngtgacagccaagggccagggaaggaaggaggancactctncanccgacgaagccaccggccctgcctgcttcaggcttccaggagcttccccaggnagcggngggggngggnnnggngcggcgcancaagggccagacggacaangccatcctcaccatcaatgcgcagnaggncgcccgnggcngcccgancctcgcccaggancacntncaccngggggtgctnggggggggngagaggcnccaggggcgcactggaaangcngacaaccttcncactgtccttcagggacacagagcacangccccccgtgacactgcggatganaccggtgtgtgccaccacctgtgtatccaggtaggtgtcccgcacctgcacctgaatgtcagtggntacccagtcgctggagttctgctcgatgcctgagcctggcgtgtgttggttgtagccaccaggggagggagctccaggtgtcataggactgtagccaacggggctcgggctggggctagcctgaaaggccatgggcgacggtgtagggtggtagctggctggggagtgggtattctggtagcctgctgggcttggcgccacctggtggtagcnctgggggctggggctgggctggtaggaaccttntngggagggggcagcatagggagagaactngtctgtntngtanaaaaccggcgnccctggcgtctgcnggttgtattntnggttgacctntggggacgaggggtctnggttgccaggtgtttggggattgggggntccccataggcttccggggacggggtgggctcatcatcgaaagcatactcatattc

SEQ ID NO: 689193 - DNA, 468 bp, Homo sapiens
  misc_feature (32)..(32): n is a, c, g, or t
  misc_feature (89)..(89): n is a, c, g, or t
  misc_feature (115)..(115): n is a, c, g, or t
  misc_feature (127)..(127): n is a, c, g, or t
  misc_feature (130)..(130): n is a, c, g, or t
  misc_feature (138)..(139): n is a, c, g, or t
  misc_feature (151)..(152): n is a, c, g, or t
  misc_feature (158)..(161): n is a, c, g, or t
  misc_feature (166)..(166): n is a, c, g, or t
  misc_feature (185)..(185): n is a, c, g, or t
  misc_feature (217)..(217): n is a, c, g, or t
  misc_feature (220)..(220): n is a, c, g, or t
  misc_feature (224)..(224): n is a, c, g, or t
  misc_feature (226)..(226): n is a, c, g, or t
  misc_feature (252)..(252): n is a, c, g, or t
  misc_feature (254)..(254): n is a, c, g, or t
  misc_feature (271)..(271): n is a, c, g, or t
  misc_feature (276)..(276): n is a, c, g, or t
  misc_feature (278)..(278): n is a, c, g, or t
  misc_feature (304)..(304): n is a, c, g, or t
  misc_feature (315)..(315): n is a, c, g, or t
  misc_feature (322)..(322): n is a, c, g, or t
  misc_feature (327)..(327): n is a, c, g, or t
  misc_feature (341)..(341): n is a, c, g, or t
  misc_feature (391)..(391): n is a, c, g, or t
  misc_feature (450)..(450): n is a, c, g, or t
ggttaagtgggcgtcttgcggctttgttatgnatatattcttgtgcctccgaaacatggcttttaaattttactccgtgttacgggaanggtattggggctttcttttttttccnttttcccggcgngcncctttaannaaaaacaaaacnnaacggnnnngggcngccttctctggcatgctcnggccggggggggtaccgtgtcctcttccaaangancaanangctctgcaggggctgtgcctgtgaananatcttggtattggaaanatcancnctggcagggtgggggcagcagaaaantaggggtctanacttgancaggnggttccagcctctnctggccggctaccctcagacccctgctgagcttcaccatccttggggganaggctaggctgaaggtggtggctggggctgtccacctgcccagcctcccggggtcagtntgcagggctgtggcagaa

SEQ ID NO: 689194 - DNA, 516 bp, Homo sapiens
tatcctcactaaagatctcgacacatcgttaccttgaaactgattataggatcatgcccacaatgatccaagctactggccgtctctatataaggggtgaagggtctgtgctagatcaaaaggcacggggtggcgatgtggcagagaagttgcttgtaggggagaccttgcttttaacaggcttctggaaaagctagggaaaagtggttgcccgctttccccctttccctccccttcaagcaccgattgagatatgggctttattattaagagctgctataaaaacagcttgctcaaatgttaagagaagcccaggggtacttcaagcattccttcggatgcttcactccagaaagagggagttgaggcaagtcctcattactaataaaaatcaggtgaggctgacacttctcttgaccttaggataatagcgctttgttgtctctcctgccacaggaaggctccatggttgtcctactttaagccttcggtgccttaagtgagggttacttgggg

SEQ ID NO: 689195 - DNA, 129 bp, Homo sapiens
ggatgcagtagactgagggcaccacagctttggtggagcggtgtcaaagaggacagtgaaatcctgggcaggagttcctgatgccgatagtgccgaagtactccatatccagtgtagttctccagtggt

SEQ ID NO: 689196 - DNA, 1070 bp, Homo sapiens
cgcggtcgcggcctgctagtaatgtccgtgagttgagtgtcttgcgggcgctgctagcgtggacgaacaagctgggggctctggagagtttatgcgacgcaacggtctagaaggaagaggcgtggtagagaggtggtaacagtgcgtgagggtgatgatttgtcgtcaagtgctgtgtggtgtcgtgtatatattgtgtacgtgatgcgcataatggctcttcgtgcggtgtaggcgtcggtggttggtgcgatggaggaggagcgtggtggcgggcaacgtcgattgtgacgtgttgatatagtgggcagtggaattttgttatttaatgtggtggtaagatttgttggtttagtggtcgctgttagcggtgtggcatttggaagacagtatagttggcgttagtagatcatggattaggcaagtaagtatgtgttgtgcttcggtttagtggtgtgtttgcaagtgatctctgttgtggtgtgttggattgatgaatgtggcaggggagaattgttggctcttggtgtcgtctgtgtgtgtgtgcgtcacacgggcctccaacaatgatgtgatggcgcgaatgtgttcgttgatgattttcatgtcaccagtgttgtgagaaaatagatgctgggtgtgcagtgcatggcttgaacgtgacaatctttaaggttgtatgtctcttatgctttggcttctgttgtgagatgaatggcttgcttatgatactacaaggagctgcagaagcatgcccttgtggaaatgagctggatgtttacaatgatgctgtggggcgttatgaaagcccggtagttggcctgtggggagcttagagcagggacaaatgtccacacttgctctacggatagcaaagtattcaggttaggaggaatgaagttctggtgttctacttgtcatcagcagcagtgtctatagttaatagtaatgtattatatatttcaaaatagctacaccaaagagaatctttaatgttcttaccgcaatcgatataagttgtttcagctctaataaatatgctaatgtagcctgatttgctcattccacag

SEQ ID NO: 689197 - DNA, 806 bp, Homo sapiens
  misc_feature (1)..(1): n is a, c, g, or t
nacgtgtatgaattcagaagaataccctctgtgcgtttaaaggaaacagggttgtcccccccgtgtggtgtgtaaaaaccgggtgagagggcgccccctagttctgtggcgggtccggtgcggtagccccccaccacagtgtgaagaagcgggtctccgtcgcccagcaccaccacgcgcagggtaggaagccttctcatccatagctcacactcggtgagcagggtcccgttcaagcagttttggatcgataatatgagcccaccccggtatctcgcgaggcgggaggtctgcacacaaaccacagcgcgggcacaagaggaccctcgaggtgctgcgaccacaggtggctcaccaaggggtgctggccacgaagacccacaaaagggcgcgtaagacaattctcttggcacgccgggcaaggccgccacgccccccctgcctatggaaccaacgagtgtgagatagatcacgcgcattgccagaaaccatgatgcgtcctaaaacaggcgcgcgccattacagcatggcatagcctaataaacacggggtgagagaggtgaccacggacgccgtgtgttcaactcctcctgccaggagcaaatatgagactaacattcattgtgggccacccacttggcgattcatgtttttgggcagcgacgcactatctgatagtagattgaattgtattacaaaaccgcgatcatgttagtggcgagaaccatctgtgaccaccaatacttgcattactctacatctgggcggtacgccgctgtgaaaagtgtcacgaccaaacagtagca

SEQ ID NO: 689198 - DNA, 1423 bp, Homo sapiens
ccaggagagcttcccggagtcgaacttcctgctggctgctctgtgaccgcttcccggtctctgaccctcttggccgaagtgcccagctaggcgggcgcgggcctcagacaatacaatgtgtgggtgaagagaacatgtctctaacgaaaccggctgtcaaagtccagtggaaaatcctgaggagagatgaagaccagtagatacaccgctgcgcacgggagtcccttagagcacacctagtcaatggtcgacattgacatagaaacgagttgatccgccaaaggacatcgcatcacgtgttcgcacaatgccagagggcgtagcagtgcaatttgcagagcgcccagtcttcttcaattgcacacgcgcacacgttagcgcgaggctctacatatctgcataggcatttcttgtgacaccaacaatccgtctccattctgaacacagacgctctagggcgaatcaaccgtttacgcaacttcacctgcgtctgcgcgcctagccatgccttcgttcacagcaaaacctgcgtcgttgtgaccgtggataatcccttgcacacggcggaacgtacagcacatatataggcaagagcccacgataaggaaacggccagaaccagcgggcattttttgaaggacatggcaaaccgcattccctatgcaatacccacacgtgggacaccacgaagctcatctaaaaaaattctcggcccaacggacggcaggaccgtccataccgtaccgttcatcacggcacctgggcagacccctatggccgcttttcggcaacgggtttgtcgggcacaccccaagctgcaaattccagcgacaacaagcctagagtctcgaactttaagtttcccaacctgcagtttgacgcttatccgcccaactcggcgggagcacaccgcacatgtgcggcgtctgaccgacattattcgcgcgtccccgtacatgtcgcacacttgcccctcaatccacgaggaccgcaaacaacgcacaccattcatggcgccattcagcacggcactcagacagagcacacctttgtgacagcggacgacctttcgcggcgcaccctgcgcacaaaacagatgccgggcaacaacgagcggggcacgcattggcgactatcagctgcgccactcagtgccaagcgcgccttactaccaaacggactccgacgctacaccaccaatgggcatcaacgattatagaaacaacttcgaccctacttatcaacttaatcggtcgcaccaccataccaagcctcatgtattccgacactatacacgccagacagcacgcacatgatcagcacactcaatgagttggcagcagaacaccccacatataatatagcatctcactgtagctgcaccactcactcaagcactgagacttacgcctcccaccatcgc

SEQ ID NO: 689199 - DNA, 232 bp, Homo sapiens
cctcggtaaagccaacatcacaataaagcaggaagcgcatagttatagtttcccagtgcatctaagtcatgtttactgcatattgcagtccactaaatgtgcaatagcattatgtctaacaaatatacaaaccataatttaaaaatatttactgttcaaaatgctgacacagaaacgcaaagtgagcacatgctgttggaaaatggtgccaaatagacttgcctgatggcag

SEQ ID NO: 689200 - DNA, 371 bp, Homo sapiens
ttcatgtccaggcctcatgcctagaaaaggaatcccaggattttccctcctgtgtgttttcgtcttgctcttcatggtccatgatgccagcgtgaggttgtcagtacaatgaaaccaaactggcgggatgaaagcgctggatatgaatcatgtccagtgctttcatgccagtaagaaactacgaaccgcataagtttatagaatgagctgattcccgaggcacatacatctaacagattacggatgaacacgagtatgaaagctcccgcagtggctcagtgcgttaaggacctggtgtctctgtgaggatgcaggttccatctctggcctccctcagtggcatgaaggccctcgacatgaagggtaccgag

SEQ ID NO: 689201 - DNA, 98 bp, Homo sapiens
  misc_feature (57)..(57): n is a, c, g, or t
  misc_feature (65)..(65): n is a, c, g, or t
ggaaacctgaaaattctacccacctccccccacccccgattataggaaaagagagtngatcactnccagggtctctgacttctgtgacctggaaatca

SEQ ID NO: 689202 - DNA, 152 bp, Homo sapiens
cactaggagcgcgggcggtaacgccgcggggcgcggggtgggcgcggccgacctggtccctgagccggacggcgaccccggacctcccgcgcgccccgcacccgaccggcgcagccggtcggtattgtagcactccctacgctcgcttgctc

SEQ ID NO: 689203 - DNA, 230 bp, Homo sapiens
cagcatctagactgttggacaagattggagaatatacagagcaggatagaagagggaggagtcaagatggctttgaaaatttcagcttggcttctctatgggtaagaagaatccattaacttgtgataaggagcactgaagaaggatcaactttaggataaagttgatgaattttgctttgggcccatggcatttaaagtgcttaggtgaatcatccatttatccatcca

SEQ ID NO: 689204 - DNA, 270 bp, Homo sapiens
  misc_feature (133)..(133): n is a, c, g, or t
ggggggcccaggttttttttccccccaaaaaaacccccccggggaaaaaccccttaaattttttagggggggggggcccttcccagaaagtttcgcttttttttgacacccaagaatttttccccccaaaaancttttttaaaaaaacgggaaaatcaaaagttttttgggccccccggccccactggttttcaaaaaattttttttaaaacccctgggtttccccaaaggggggaaaggttccgtttccctttaatttttttgggccca

SEQ ID NO: 689205 - DNA, 312 bp, Homo sapiens
taagcaacatcagataggcccactatagaactgtatttaaaggataataggttaattaagaaactaggtaccatgtctcggccgggggtggtggctcacgcctgtaatcccagcactttgggaggccgaggcaggtggatcacgaggtgaggagatcgagaccatcccagctaacatggtgaaacctgtctctattgaaaatacaaaaaaattagccgggtgtggtggcgggacgtgaagcaggagaatggcgtgaacccgggatgtggagcttgccaggagccaagattgcgccactgtactccagcctgg

SEQ ID NO: 689206 - DNA, 894 bp, Homo sapiens
  misc_feature (1)..(1): n is a, c, g, or t
  misc_feature (69)..(69): n is a, c, g, or t
  misc_feature (72)..(73): n is a, c, g, or t
  misc_feature (77)..(77): n is a, c, g, or t
  misc_feature (79)..(79): n is a, c, g, or t
  misc_feature (81)..(81): n is a, c, g, or t
  misc_feature (92)..(92): n is a, c, g, or t
  misc_feature (123)..(123): n is a, c, g, or t
  misc_feature (126)..(126): n is a, c, g, or t
  misc_feature (131)..(131): n is a, c, g, or t
  misc_feature (134)..(134): n is a, c, g, or t
  misc_feature (139)..(139): n is a, c, g, or t
  misc_feature (144)..(145): n is a, c, g, or t
  misc_feature (170)..(170): n is a, c, g, or t
  misc_feature (176)..(176): n is a, c, g, or t
  misc_feature (179)..(179): n is a, c, g, or t
  misc_feature (201)..(201): n is a, c, g, or t
  misc_feature (221)..(221): n is a, c, g, or t
  misc_feature (265)..(265): n is a, c, g, or t
  misc_feature (277)..(278): n is a, c, g, or t
  misc_feature (280)..(280): n is a, c, g, or t
  misc_feature (294)..(295): n is a, c, g, or t
  misc_feature (298)..(299): n is a, c, g, or t
  misc_feature (307)..(307): n is a, c, g, or t
  misc_feature (854)..(854): n is a, c, g, or t
nggttgatacaaaatgtcaaaaaaaaaaataacaaaaaaatagaaaatagaaaaatgtatttacaagtnagnnacgntnanttatgatgagnaagagcacaagggcgcctggcggctataatncangcgtnggngcggncggcnnctacggcgccgccctgcgggggcgncgcctnganaagaaagaaagggccacaaggnttgaactcttcatccgctantgctacactgatcaagaaccaagtaagggctcctgaagtgccangagtctatgcannantcagcacaaatgcnngannagtttgtnactgcggggtcagttgtgaaggggaaggacagcagcttatccatatacaaggaagccacagtaaactgctcgacatgctcaaaacgacagcaagcccctgtcagctacacagcgtgatcttagcaggatttcatttttgtttattcatatatatctatgtgtgtgtttatatatatatatgtacgtatgtataaaaaccgtgcccttgttcactgccaacacaacatctgggtggacatgaactcattacaacaaattcttatgtggatgttgtaagaagtcactcaatgtctgtggatttaataagtcacttcacaccacagaaaatatttaataaatccaaaaaaaggaaagaagaatataacgacagaagagcttctgtctcagttctctgaaactgagtcccctataggaaactggtcccaaagttctcgaggggtcattgaagaaacttcggtttgctaatttttttcatccttttagtgttcaaaagttctagaaagactcctcgctgttttcagtttttaaacagtcaaatctccatctncccccagaaggtaacagtctggtgcagatccataaaaacg

SEQ ID NO: 689207 - DNA, 1415 bp, Homo sapiens
  misc_feature (1415)..(1415): n is a, c, g, or t
taacaagcttaagaatgaacttattatagtatcaatgcggtgattcacaaattactcaatatttcctaaagaaccagtgaagaaactccagaaacccattcttacacgaggcccgtgtgtggaaaaaatccaagcgaggaataatgggattattaccagccaggtgactttcaggaggaccaccattattcttacaatggtgtcttccactattggttattctgagaaaaatggttattctgagaacgacactccaaaaacaccaatgttctacctccaaatacggcttaccacaagcagagtcttttcctggtagacattctactgggtggcttccagaaccaaatcagcgtgcgtgagcatttattgccaaggacctatacaagtgaagtgatatttcgggacaccctcgaatagtgccaatataacttctcttgggggggcataatgggatacgtggtgtggcccaaaagaatataatcaaccgtaccgtggtgtaatcacaaaagtgtgaaaccctccctggaggagactcagagtgtgaaacgaaaacaatattcgtggggattaacaagtgaccatataacactgcggggaaacgcccagaacaaatttaaaacacccaaaaagaaagaaaatgtcccaagaaagagtagcatcacatcaaagggccacaatttcaataaagcacggacgtagacacaacaataagagatgagtaggatccccacacgaagtgtggagccaaaggggcaaaaccgcgcgatgaacagacacgaaagtgtacgcggaaacaattagagagaagaggaaacaccacacagaaaagtgacaaagaggacgaaagggccccaacaagaacatagcagagagcccattaatacaaacaaaagccccgagaaagccgtgggacacccccaagggatgcaggacgatattacataaggaaatgcgtgcccccaagataaaaaacacgaaaataaatctgatataaacacaagagacaaccacaacaaggcggcaggggccagcaagaagaaaaatcaccaccgacgaagaggccacaaaagaaaaacgagagaacaccagcgatattataggacacaagaggggccccaaatagagcgcgcagaaaacagaacagaagaccgagacgcgacgaaatccacagaaccgacatagggaaacacgacgacgaagcaaacaggagcaagacaccaaacgggaggaggacaaaggacaaaccacacaacaaaataagcccagggaaaaacagtcagagatcggagacagcgaaaaacgacgaaaaacacagaaataacatagacaggaacagaacaaggggagagcgcgccacaaggcagtcagcagagcaagaaagaagaacaagcagcagcacagaacgagaacacaan

SEQ ID NO: 689208 - DNA, 103 bp, Homo sapiens
  misc_feature (56)..(56): n is a, c, g, or t
gacagacgagcactcataaactgtctgaaaccccaggcagtaaagcagagtttcantccctgtctttaaactgggggtatgtccactctagcaagtagacgtt

SEQ ID NO: 689209 - DNA, 838 bp, Homo sapiens
  misc_feature (194)..(194): n is a, c, g, or t
ccgcggggtcccgccccgcattccaggggtgccacccaagggtcgccacaaaaggggaaatagggggcagcgccctctgtcgaccccgcgcgggccaacgaggtgagccgcccccctcatggatccctggggaggatgctctcgacccatcttggaaagatgggaacacgtcttggccgcgtccccaaaacatngtgggggagaggatagcgcccaaggacgggggtcccccaaagggcggcgcccgccaacacggccacggctcattgggcaatacagactctctctaaagagcggctccaggccgcttatatgtcccaatatctgcgggcaaacaatcatcgtagagtccactctattcaagggaccctccctccccctcctccctgtgtacaccgcagtttctctccataaaaagcccgttctttttcaccaatacaaagaaaagtctccccccaagaaattacaatttttcttcgcccaaacaatttgccaaggaacttcatagaacgcttctctaagaaatcccccgaggtgaagagatttgtacatatacacaaacacgattttgtcccactcacatacgccacccttattgagaatacgcccctctgaacagcactcctttcctgaacccacggtgggagtgtctttaatattgcattgccggtagcacgaccgcgccgtgaactctgtctatgttcgggtggagatcgcgccaccaaagaggctctgtgaccccctcgcactatacaccacggaagggggtacattataccattctgagacccccccggggggagaacaaaataaagctttcccccagcgtaacaaaaca

SEQ ID NO: 689210 - DNA, 706 bp, Homo sapiens
gatttcggggcggtaccaagatggactcctcgcgggccgacagcagctccggcggcgattcctcctcctgccggacgccgaggcccagctggatcgcgagggtgacgccgggccggaaacctccacagctgttgagaaacaggagaaacctcttccaagacttaatatccattctggattctggattgtggcatccatggtggtgacctattatgttgacttctttaaaacccttaaagaaaacttccacactagcagctggtttctctgtggcagtgccttgtgcttgtcagtttatcaattgcattttacttgcatagtctacctggaatggtactgtggaatcggagaatatgatgtcaagtatccaagccttgatacccattaacatgcctcatttattgcagcaggaatttgttcaacatgtgctttatggcatgtgtggtcggtatatcagtccattgtagtagtaaccagttaatggggagtgtcaatgtctatcaacactccttggattgatttccgacagagcacagagtctcctatgttgcccaggctgtctttgaactcctggggatcaagtgatcctcctgcttcagacttcgaagaaagttgggaaatacaggccacgcaacgtgacatggctggacctcgtcacttcgaacgtgactggttcaacatccaggtaactgaaaggctgggcaac

SEQ ID NO: 689211 - DNA, 372 bp, Homo sapiens
  misc_feature (66)..(66): n is a, c, g, or t
  misc_feature (74)..(74): n is a, c, g, or t
atcctgtaatttttcctgtacatacatgcctatgatagagtttaatttatcaattgggcacagtangagattancaacaataactagtaatacaatagaacaattataacaatatgccagcatcactgctgtcgcactttggggtcattctcaagtagagttagggttcctggaaaaccaacactgtgaaactgcaacaggcatgcttggccatgcttatgtctctaagaactcatcattagtattttcagtttgtagaaaacatacagaaaaacttctgaaaacattactggttctgctgtttacattagggaaagattatctgttgatggttatattggtgtttgagtgttttaatgataactgagatgg

SEQ ID NO: 689212 - DNA, 470 bp, Homo sapiens
cggcacgagggttttttttttctttctataatggacttaaagacaatgaaagtttatttatcaagtccaaaatgagcactacgcattggagttggctttcctccaaatgatgtatttggaggaaaatacatcaggaaaccggatgtattccatcttgtggtccttttatcttcaacacatggcttccaagtggctgggttcctctgcagcaagctgtgggaggggaaagagagggtggagaagatgcacccatttcttaattgctgttgcccggaaataacacatatcacttcctgtcatgttccattcattggcaagaacttgtcacatgacttgatctagaagagaggagtacaaatccatcaagggtcagcagagatctgtgctcctcgttgtcctcaatctgggacccaggctgatggagcttccaacatcacgtacgaggagaaggcggcggcggcggcggccgc

SEQ ID NO: 689213 - DNA, 451 bp, Homo sapiens
  misc_feature (10)..(10): n is a, c, g, or t
  misc_feature (400)..(400): n is a, c, g, or t
  misc_feature (420)..(420): n is a, c, g, or t
attcggcacnggaatgacacacaaatttgtgaagcattccataaaagaaaacctaaatagacttataataagtaaatagattgaattaataatttaaaaacttgtcacggccgggtgcagtggctcatgcctgtaatcccagcactttgggagtctgaggcactcggatcacttgaggtcaggagttctagaccagtctggccaatttggtgaaaccccgtctctacgaaaaatataaaaattacccaagtgtggtggtgcacactggtaatcccagctacttgggaggctgaggcaggagaatctcttgaacccagggaggtagaggttgcagtgagccaagatcgcaccattgcattcaaacctggggcaacgagcgaaacttccatcttcaaagggnaaacccaaaaacttgaaaancaagttcttgttcacaagattaagcttttgg

SEQ ID NO: 689214 - DNA, 1265 bp, Homo sapiens
gttctagatcgcgacggccgccctttatttttatttttaagtaaagacaggatttcactatgttgcccaggcgggtctcgaactccgggcctcaagtgatgcgtccgccgtatctcaaaataataagagctatttatgacaaacccacagccaatatcatactgaatggacaaaaactggaagcattccctttgaaaagcgtggcgcaagaacagggatgccctcatctcaccactcctattcaacacaggtgttggaagtcgggccagggacaatcaggcaggagaaagaaataaagggtatccaattaggaaacagaggcaagtcgagataatcccgtgtatggcagaatgacatgatggtcacatgtagaaaagtccataccgtctcagcccaaaatctcctaaagctgactaagcaacttcagcaaagtctcaggactacaaaatcaactggtgcagaacaccacaagcaatcacctataacatcaaataaaacagacacacggagaagagcccaaatccaggcaggtgaaccctcccattacaacaaatgggcacacacaaacacaacccacacaaacacgggcggagcgaaacaaaaaagagtactccccctagaaatggaccccaaacaataccacgccacaccacagagaacacatgtgacacacaaagcggggaaccaataatcaacaacaccccacacacacacgccacagagacacacgagacccaacgacaaacacacggcacaaagaccgtgcgaaacacacgcggcaccaaagaacgacaacactaatcggacacgccgagcaccccccaaccacctacgagcggctgcacacacaacaacgtgaggacaacaaagatacccacaccgaactatacgacccacagaccgacaccagaacaaccacaaccagcactcaacagcagcctcacaccacgaccacaacagacgcaacagaacgacgaagacttcaggcaacaagagcacaacgaactgccgaagaacgatatacacgggccccccccggtaacacacgcgcagccgagatgacacgcaaccacccgcaacaagacccacacgacgcacacacacgaacacacacccacgcacacgcccccagcaacacaaagccccgagcccacaaccaccacaccgacggagccacgcaccaaccacaagcacacgcaccccgccacacacagtcagcacacacacaaacacaccgaagcacaagtgacgcagcgccagacacc

SEQ ID NO: 689215 - DNA, 362 bp, Homo sapiens
ggaaatcttgaagctatagcatgtgtgacccaggcatacacacattcacttgttaattaaacattcattgatatataatgccgagcgcattggttctacacctgttattccagtactttgggagatggaggttggccaactgccttagcccgcgagtctgagaccagcctggactctgtgaacactcctgccgtcttcaaaagtaaaaaaaaatagccaggcatcgtggtgcctgctgtagtcccagctactcaggaggctgagaggtgggaggatcacttgagcatgggtggtcaaggctgcagtgggccatcatcgtgccactgcagtccaacctgggtgacagggagatcctgtctcag

SEQ ID NO: 689216 - DNA, 392 bp, Homo sapiens
cggcacgagggttttttttttctttctataatggacttaaagacaatgaaagtttatttatcaagtccaaaatgagcactacgcattggagttggctttcctccaaatgatgtatttggaggaaaatacatcaggaaaccggatgtattccatcttgtggtccttttatcttcaacacatggcttccaagtggctgggttcctctgcagcaagctgtgaaagggggaaaccgtcccctcgcccgtcccgctcgaccccagccccgcagctgagcgggcacttctgggccgcccgccacccgcacggtctgagatggaacgttcataatttaatcaaatccaaagaagagatcaatgcgcaaatttgaaggggcagagaagaagacggtgact

SEQ ID NO: 689217 - DNA, 908 bp, Homo sapiens
ccttccgacatgctggctagacatacgtgtgcagcgcggccgcagttagataatctgaactgatggtcaatagccagataggctagcgatatctggtacatgactaagtgcattggatcctcaggaataaaaaatggccgggtgcaatgcgatgcgtgctagaacatatatctcaagaaggcaagtctccgacgaggcatagagggggagtctattcaactaggactcacgaaagtcagaagatgcgatcatcaacattgaccgtcgccccggaactggaaggatctgaacgatcaggtcttaattaacagagcccggtgacctgggtaatagcagatttttagcatccaagaaacacaaatttcctttaaattttgaccacttaccggaaagaaagcaagtgagccccagccagaaagaagcagatggaggtctgaagtctttggagagaatcctgtgaacaggtgctttaagagcctatgtgaacagaccattattccaacggttctgtactgtttatgctaaaatatcgatgggcaacagactattatggcatgtatttgaaagccaccagtttccagcctaaaaaacttctgaatggtcgtggagatcagagtgaagttcaccatcaacaccactacagccaggggttgcgctgcttaagaattcaggttccctattaatgcacgatggcaatgttccaggggtaggtcatcaacgatgtcaggcattcatcactggttcgaattgaagccaaatgccagggttattaatcctcggcttgcaaatggttccccccgcattgtgaactttaccagtcgatcccgcaggctgcgcggttccatacccccaacgtgacacattcctcaatgcaaagcagtacgggggccctgcaagcgggcccacag

SEQ ID NO: 689218 - DNA, 451 bp, Homo sapiens
gtgcctcatgcctgtaatcctagctctttgggagggccggggtggggggatcgcttgagctcaggagttcgggaccggcctgggcaacgtggcgggaccttgtctctactaaaaattgaaaaaattagctgggcatggaggtacaaacctgtagtcccggctattcaggaagctgaggtaggaggatcacctaagcttgggagacagaagctgcagtgagctgtgattgcatccctgcactccaccctgggtgacaaagtgagaccctgtctcaaaatcaaacaaaaaataaacaaacaaaaaaacccataattcaaacacatgggggctacagaagtttaaaaaaaaagatagtcaataagagaaaagtaacctctaaaaggctatcattaatatcctcaaagagaaaatagatgatacaattatacataaaacaagaagagagtgcaat

SEQ ID NO: 689219 - DNA, 504 bp, Homo sapiens
gtgcttaaaggttggggacagttactccgcagtgttaagacgtacatatggaagccatcatctgagtagcataatatactccctatagtgccacaggaacagtctttcttcacgtagaaaggtagtctctcttaaccacagcataatattctttctctagaaatctttcttattaggctcaatttcgctctctgatatggttaggctgtgtccacaccaaatctcatcttgacatttccacgtgtagtggcagggcacccggtgggtagtcactgcaatcatggggcaggtctctcctgtgctgttcttgtgatagtgagtaagtctcacaatatttggtggttatcactaaggggcagttttcctgcacaagctctctttgcctgctgaaatccacgtaagatgtgacttgttcctccttgccttctgccacgattgcaagggctcctcagtcatatggaactgtaagtccaattaaacctttttcttatggaaccaatcact

SEQ ID NO: 689220 - DNA, 225 bp, Homo sapiens
  misc_feature (86)..(86): n is a, c, g, or t
atgtacagctcacatatgcatccatacacttgtgtgtggctggtgtatgggtgagcatgcacatgtgtatggatgcatatgtgagncgtacatgttagaggacatggcacgttcgatcgcacagggactggacgtaatcgccagtaaaagtgagaggatgctttgtttccttcttttttctctcttctgcgtttttctcttttttctttcgttctttttccttgg

SEQ ID NO: 689221 - DNA, 313 bp, Homo sapiens
ctagacatacaatgaactctacaataattctatccttccaaaattcagagtaaaattcatgtcctagaaggtataccttttcattcagtgcgtgggtatattccctggtaaaactcatcttagtcaagaagttatgcacttgagaggcatgtaaactggcaattctgaaaagtagatcttattatgcccattttacatatggaataactggggcatagagaggtaaagtattcgagatcaggaagagacaggattcaaacctaggtccatctgattacaaagccacacgctctttccactacaacctgccggt

SEQ ID NO: 689222 - DNA, 194 bp, Homo sapiens
aatgggccctttgggaaaatggcccaatctttccccgcttttttatagttaatattaaaaaccctttaaaagttttcccttccggttgggggcttttttctgtccccccgaaggggccctgttttttgtttgaaggccgggcctgatccccctaattttagggttttttttaaaaaaaggttgcctttccctta

SEQ ID NO: 689223 - DNA, 220 bp, Homo sapiens
gtgagcaaacagcagtacaaccatttacatggaatttgcatcgtactgagtattgtgactaaccaggaggtgacttaaagtgtacgggagaatgtgcgtatgttgtctgtacgtactacacgattttatgtaaggggcttgagcatcctgggagtcttggaaccaatcccacacagatactgagggataactataccacatgaggagcgatactccgccg

SEQ ID NO: 689224 - DNA, 129 bp, Homo sapiens
tctagagctcccgatggatcacggaacttttttggtggtgtcccttgaagtacaaaagcttttaatttcgatgaagaccaatttatctatttttttctttttttggcttgtgcgtgtgggtgtcatacc

SEQ ID NO: 689225 - DNA, 202 bp, Homo sapiens
cagtttctgcaccaccctgaaccagaccttcagccgtcaaaccaaacaggttggtgaccagcacaccgaccagcgccgcaatcagcgtggtaaacaaaagcgtaccgatggtcagaaaactgattttgcctaactgagatgcgttatgcagacgggcaaccgcgctcagaatagaggcgaagactaacggcataacgatcat

SEQ ID NO: 689226 - DNA, 714 bp, Homo sapiens
tgcgttctggtgccgccgtaatgccctggcctagtgggcagctttgactcgagagcctggctatatgtgctgcatggaatggttccctgtgaacgggagtgcgccagctgggggcgctgtgcctgccgtgctaaagcacagctcgactgttgcctgccctgaaatgcacccatgtgtcctgtgtggctacgacttcaacctgctggtgtgaattacctgctgcacttgctgtgatgtgccttctggcaaccacctgtgcttccaatgcacaccacacttccgggctgctgctgtacatgcaatgtcaactgccatgatctgaggaagaatgctgtgaaccacatgtcacagtgatgaatgaccatgcactgctggactctgacccatgagcctgcctgcccacttaccatgctgcaccattttccttgggatatacatccaacctcatcatgttcatgtgcatcctgtgagaccattcgctacctatgtgcatgcacaacatggttgtgacgtatatggttgaccacatgctggctggcgctggagtgaagacctcatcaagtgccttggcgcccacatactttgtggcgagttttagcctcatgtggtggaagggagctcctgggagaactgggatcaatatgtgatctggaaacctgctgggtgcccaatgataattaattggcagttttgattgactggctgatgcccata

SEQ ID NO: 689227 - DNA, 106 bp, Homo sapiens
gttattattgatatgacagttggtaaggctatgatgaaaactggcatgaacggaagaatggtgaaacagaccatgcagcattcagagacgggaatcaactgggtgg

SEQ ID NO: 689228 - DNA, 132 bp, Homo sapiens
ggattcggcacgagaacttctgacctcaagtgatccacccacttttggctcccaccttggggctgggattacaggctttacgtgcccagccctggcctggtcctctttagtctctcaggccctcttacaaat

SEQ ID NO: 689229 - DNA, 161 bp, Homo sapiens
gcatagatccggtcagattttacacacacagcacacactcactcaacgctgctgcatagatccggtcagattttacacacacagcacacactcactcaacgatgctgcataaatccggtcagattttacacacacagcacacactcactcaacgtcgacgc

SEQ ID NO: 689230 - DNA, 603 bp, Homo sapiens
ccgctaccatggcaaccgggagagggacgctgttctccaagaatctgctactcatgaagtttatacacaggggactgtactcagaaaccacgaatcatctaccagacgaagaaaagaaaatcatcagtgaagacgcacgtggactcggatttgccacaccttaccaagaacgacagcggggtgggataatagcagagctgcttactatgagaagatcttctctatggaagaatgtcattcagaggattcaatcctgaggctgcgaaattgatgcttcagatgaatgctacgcacaaagctagaagaagttgaagatgaaacactagagcttgatgcagtcaaatgaagagatgcctagaagatatcagaccttggcgaggacaatgggcaaaaggttggccagaaagagagaccatgccaattatgaagaagatgattaagatggatgcctcaagcgaaggcccaggagtgcttgtggcaatccatgagcgcatctggagctcatcccaatggtgcctatataagtattaatactgcaacgtttacttgtaaagagattatgatgttagaaacatgctgaattcgaaacagatgtgtgatcgg

SEQ ID NO: 689231 - DNA, 107 bp, Homo sapiens
cgtacagtctgagagcttgtaccgtccatgatcaccatctcgatctcttcatctccccatcgtcttgatgccttttgaaccacctctgtacttaagccttctcggcg

SEQ ID NO: 689232 - DNA, 113 bp, Homo sapiens
tcggtacccggtgtacggcgagggcatatcacggccgcaccttctcggcgcgagggcgtcacagcgatcgcgagcaccagcgccgagtcgatgccacctgacagaccgacgat

SEQ ID NO: 689233 - DNA, 171 bp, Homo sapiens
gatcgaggtcgacctttctggtacgcagttcttgctatcacggtctggtttctactatttcattcactttatctattttgcaggtagtctcccggcaggaataaacctggacagttcctgatcaatgaattccacaccaacaccaaacgcttctgccattgggccagcggg

SEQ ID NO: 689234 - DNA, 281 bp, Homo sapiens
gcgtcgactgtctatctgtatttctctctgtctcttgtctatctgtatttctctctgtctctgtctcttgtatatctgtatttctccctctctctgtctctggtctatctgtatttctctttgtctccgtctatctgtatgtctccctctctctatctgtatgtctccctctctctgtctatctgtatttctctctgtctctgtctctgtctcttgtatatctgtatttctccctctctctgtctctgtgttaaccaaccctgcactgtctgtgtcgacgc

SEQ ID NO: 689235 - DNA, 172 bp, Homo sapiens
cattggtccgagagaaattagggtgagcatcataacatggccgtgtggtcagtttgcagagccttcagcccacagggatgacagaagggaagtgaggtcggcaatatgttgtttttctggaacttacttatggtaaccttttatttattttctaatttctctcggaccaatg

SEQ ID NO: 689236 - DNA, 922 bp, Homo sapiens
agcgggtggggcttacgccaccgaagtaacctggacgcgggcccggcccggcgagatcactgactacatggccatccgagctggggcgtgctgaaggtgcgtggacgaccattcgatggacacatgaccaatacatcatataagatgatatcaataaaatagacacacataagaatgataaccaacaaaaacggaacggaacacatggaagatggtagcgatggcggggtgtacagcccaatacagaaattaagaagcatgaacgagaacaataacataatacgtgaaatgaaacaaaatggaggaaaatgaaaacaaaaaaaatgaatgacacaatacagaatatacaacaagatataacaatgataggaagcatggaacatatgaatgaccagatacatcaataataatgacaaaatggaaaaatagaataatcttgagacacaatcataacaaagatatcaaaaaaaaaaaaggataaataggaagataaaagaaacacatggcaaagaaagaaaagaagaaatgatgcagcatagaaaggagaaaaaaaaaaaaacacaatgccatttcaaaaaataaagtaagagacttgaatatacatggggaaaaaaaaaaaaaaaagaaaaaaaacaagaaaacaaaaacaaaaacaaaaaaaaaataaaaaaaaaaaaaaaaaaaaaaaaataaaaaaaaaaaatatcaaaaaagaaaaagaataagaaaatgggaaacaagagacagaaaaaaagatggaaacccgagagaacagagcaaaaaaaaaaaaaaaaaaacaaaagaaaaaaaaacccccaaaaaaacaaaaaaacaaaaaaaaaaaagaacaaagaacaacaaacaaaaaccaaaacacaaaaaagaccaaaaaaaaaacaacaaaccaaacaaaaaaaaaaca

SEQ ID NO: 689237 - DNA, 507 bp, Homo sapiens
  misc_feature (184)..(184): n is a, c, g, or t
ttccccgtaggaaaccggaaaaggctggattgcttgaaaaccgttggtttaatggcagccgatcacgcggagctgtcacccgtgcgggacttcaaaaaagcctgctcccgccagtattaaatgggaaaaagcccccaaggcggcttttgcaacttcatgcatttaaagcccctttccaaaaagntgcggggggagcggtatggcccccgtcccaaaaaaaataaatcaaaatcccgatcccgggagggtggttttcggtttaaaaacccggggtcgtgccggggccggggccggtggtgaaggtgcccccccccggaagcgtcacaaaaggcggtcaaaaaatcgtaaaaaatttgggggattttgaccccccccctttttcccttatgtttgctaaaaagggtgggggttgattgccccaccccgttcataagggggattttttttaaaaacccccaaaaaaaaaaacacccaaaaaggggtttttgaataaaatttgtggtgata

SEQ ID NO: 689238 - DNA, 225 bp, Homo sapiens
  misc_feature (29)..(29): n is a, c, g, or t
  misc_feature (79)..(79): n is a, c, g, or t
  misc_feature (90)..(90): n is a, c, g, or t
  misc_feature (129)..(129): n is a, c, g, or t
  misc_feature (163)..(163): n is a, c, g, or t
  misc_feature (192)..(192): n is a, c, g, or t
ggctggtgcagttgtggtccaggtaaggnaggttgccccaaaagtaggcagattcagtaccatttagaggtaggatttncaccacctgtnactgaggaatttccaggcaggaggaagaaagtggaaaantcaagggtaacttcatgtttgtggggtgtctgtntggggcagaaaaggacgaggaaatttttnccaagagtcattcattaagtggacaagcgatga

SEQ ID NO: 689239 - DNA, 511 bp, Homo sapiens
tagaatattacaaaactttgttgataaagcaatggcagggtttgagagtactgactccaattttgtaagaagttctatgggtacaatgctatcaaacaccatcacattctacagagaaatctttcatgaaaggaaaagtcaactgatgtggccaacttcatttgttgtcttattttaggaaattgctgcagccacctaaaccttcagcaaccaccacccccgcttttttttctgtcacccaagtgggggtgcagtggcactaccatagttcactgtaacctctatctccccagctcaagtgatcctcctgcctcagcctcccaaagtgctgggattacaggcatgaaccactacccagcctatcagtcatcaccctgaacagtcagtagtcatcaataccaaggcaagaccctctataagcaaaaagatgatgactcactaaagactcatatgagcattagcattttttagcaataaagtatttttaacttaaaaaagaaaaaaggaagaa

SEQ ID NO: 689240 - DNA, 1002 bp, Homo sapiens
atcccagagagccctgagcagacccacctgtactgcctgcactgtgcctagttaccatcgacaccccgggaggagcctgcagctgccgcagccggccccagtcaccatcaccgcaaccatgatgcagctgaggccgagacccagcagccgaccctgactgaccaaaccaccagaccgaccctacccaacaacactacatcacactcaccccactcacaccacatcctcaacacaagaccaaccacccaactactacaatcccaccacaccctcacaactacctacacataccacacacacccatactcctcccaactcatatccacactccccgcatcaccctactacccatcacccctccgtccgacacgacagggtatactatttctaatccgaagatccacaacagcctactatctacgggtcttggttatctgcttcataatctcgtggcacccccgctcaacctgggcacactcatagaccttatgacccttacaccgccctcgtactccagctcactcgcctcgcgcgatcagatgaggctaagcacccgcacaagccgggcgccaatggacgcggcccttgggtcccgagcaccgctgaaactacgagaggaccgctacaagaggtcatcgacagagcagccaacccgcggccgctccgcgcgcaccgcctgacgagcaccagcaggccagcgcatgagtcagaactcacttcgacagctaccgcccacaccgacacaatgaccccgtagaaggcgcatccggagacactacaacacaccatagaacaaacaccaactacaaaacctccttaatttctctactcacccactcctacactctaccaaaccactacccacacctcaccactcaacatcctaccctaacaccacctcacccacctaccacctacatctataccatttcatacacccttcactcctacaaccactaccactacactaccgccgccatacgcatttaatccaatactata

SEQ ID NO: 689241 - DNA, 828 bp, Homo sapiens
gatatacccttcattttagctgcttccaattgttttatagtttttttctatttgtgagattgtgtctcttaagtgcgtgcatttctgttcttaatcgctggtctacatttgtcggggattacttttagagtcgtatactttgggcctattacgatgactaccatgattcgcaccaattactctgtccttttcccattatttgacgtattgatgtcgtgtgtaacatttatggtatgtccacagctaagcttgagattgttgaggcagttaatacattgacagtgaaatatccttgtgagggggcaaggtgtcagaccagcacaagttcttggttccacgctgcaactactattttaggggaagcacgaagggatgcaaggacttttgtctctcgaaaagcaggatcattctataatgttatatagagaataataagtcacactaaccttagcttactgtaaattttctagtttagaaacttagttacaaaacaagttctggacctcttctagtaataacgtagccttaaaacacacattgcatagctgtacaaaaatatgttcattatatccttattatataagcttgttatctatatttaattctttgaatttgttctagactttttggtcgaataccaagacaaacacagctagcctaggcctatgcagggctcaggatcatagacatccctagcaggtgacaggaatttttcaactccattataatctgtggggccaccatcatatatataatgtacattgaccgaaacatggttaacatgacatatataatttgcgtcaatactgcatcagtgtgccatattta

SEQ ID NO: 689242 - DNA, 693 bp, Homo sapiens
ggcagaagcctccgagacgcggccgccattccgggcctcaagcccataaagaagaaataccggagccggttctggcaccaatttcggggtgccaagagcagccatggaacgagcctgcagctccgctcagaagcccacgacggcagccggggacccaggcacggtgactgaggcaaacaacggagacggcgtagtgctcagggcccaggacctttcccgatactgttgagacccatcacgaagcgaactactagctagcataccacgagttcaagcacacttagaccaccaatagctgagacaaagagagagctagtgaacacccaactatcacacttgataatgcctacacaagaaccgcattgacgcccgagcacctaccctgacaagaacgcgcacgggccccttggacgagacccatagcccccccacgacagccttccaggagcaagcgcaaccgcgaaagccacctcgagacccccaacaaatccccggtaagagccccacaaacgaaaacaacaaccacgacccacagcccgccggccccagctcacctggacgaaacctaaacagaccgcccaagcgaaacgatccacaataccacaagggcacacagagaataaaactaacaacgtaagaatagccacaactacgcgcgagcccaaggacacgtcccacccatgctgccaatac

SEQ ID NO: 689243 - DNA, 147 bp, Homo sapiens
aacacccaggctttatcttctgcttcgccatcctcaacctattgtatttttatcctgatgtttaatggttctcaaagtgtggtccccagacaagcagcatcagtgtcacctggcaacttgttagaaatgcatattctggccaggcac

SEQ ID NO: 689244 - DNA, 999 bp, Homo sapiens
ctatggagtctcggtgcggagcttggctgcctctggtgctctttaggtggggcaagaggaatcgatagcagagtgtgagtgtatagagggtggactgtatgcatgacaagatgtagctaagaaggaattaaatgaccgtgttggccaaggtagggcacgaccgatcggagaagtgtgacgccggaagcctcgacgtacgtgagtgcgccagaatctcctgtggatcatctaagtagccgtacaggacgctagctcgaaggaacccagtgaaaatgactttctttaacgagcagacccgacaagaatatagtaaccaacgcgcattctactcatgcgtgagatgatggggctatcatctgcatgagagttgacttttggaccaactccctgtaactgctagtttgcccttgggataatccaaagtcgcattcctctacggctcgcggggaactttacactgagacaggactcgtgtacacgaatacagggttccaatcatctttcaaactaaggaccctttgattgcgtacttaaatatcaaaataccatgatgcaaagaacctgaaagtgtgcactcacgcataatgagtgcagactgggcgcgtatattttggaattcaaacacagacatcaaagacaaactgtgttatcaatggaaaactttcccatcattattggttgatatacgcaaaatcccctttgtttaccagttaaattaagtgccttcccctgtcaccccattgcttaggacgagtcttacttatgatactccgagtagaacactcgttaactttgcgcaactatgaacaagtccattagaaaacgttgagggagtgggaactgggtcgcgtgggcaactattggtgataggtttccaaacaggtagcgttcgtgacatattgagtcgcgtattgccaattgggacgattatttggtccccagggtcttggggggaaaataacttggagctaacagtatgaactccaaaatcccacagtc

SEQ ID NO: 689245 - DNA, 401 bp, Homo sapiens
cgcacgaaccgcatgccggtgtaagttcagcgctcaaatcgggcctgcggcgctagttagctagcagcggaggcgcctgagacctgacgtgccgtcgcttccgccgcattgcgccgcgctgagctgaacttgcacgtacgtagctggctgtggtggctagagcggccgacatgcttgccgtgtcctccgcgaggtgcctcgccgccgcggacgagcagcgcgccgaggccgcgcccatggagacggttgggggtgcagcggtggtggcggacctggacatagacttcgacttcaccgtcgatgacatagacttcggggacttcttcctcaggctagaggacggcgacgcgctgccggacctggaggtcgaccccgccgacatcttcaccgatctggaggcg

SEQ ID NO: 689246 - DNA, 386 bp, Homo sapiens
agaacaacagcaggaggcattatgtgaaattacagaaccagaacattggagactgaagagaagatatcaaaggcttcccaagagaagcaagcaggtcacctgcaaaggatcaggagctcggaatctggatggcaggggacttctcaatagggtggagggagcttgttttttaaagctatatatttttggaagctaagaaatgagagcaacaccttcacaattccaaagggaagagaatctaaatcctaaattcacctgactgataaagaatctaaatcctaaattctgctgagtgatcaattaaatttgagggagatttaagatatatttttttggacatgcaatatttcaaaaacatttttttcctatgcactctttcctggaaa

SEQ ID NO: 689247 - DNA, 804 bp, Homo sapiens
  misc_feature (804)..(804): n is a, c, g, or t
ggtctgcgattcctccatttactgcagacatgccagggtctcgcacgagtctagtagctggaggctccatactaacttccgatcactcaggcaaccactatcatacaccctgggatgcactcggaattagtgcctttcaaggattagccatataagaggagctgtctaatgacaccatgctagatcgctgataataatgcatgcgtaataatcgagagtgcgacgccagaaggctcacacgtaaatcctttatagacacgcccctatatatcaatacagtgattgtgtgctgccatcactatcaaccgattatcgcctgagagaatgtagagaggagggaagcgcctgaatatggtcttgcaccctagtcctagccataatgtccaattgtaccctataactttgggctggcattcaattgagccaatcggatcattcactgacttttccgcgtcggtaggccctactataatagcaccccatgactcagatacatcatagtcggaggaccccaagagtctcaaagactccgcattgtcgaccccagacatagctccttagctaggcataggaaggaggcgactccacttatgccctaggtcaaaatgggaacggccctgaggtcccaaaagccagagtaagcgcgctgcagagacatgctcgcagcactctcagcccaactggggctaaaaacactacaagtggggcctggccaggcccctgggtaaggatagcagaagcgacgaaacgcggggctaccgcacaagaacacagaccagaggggcacgaccatgcgtaaaaccn

SEQ ID NO: 689248 - DNA, 438 bp, Homo sapiens
  misc_feature (103)..(103): n is a, c, g, or t
ctaaatatgttagctgtagataggaggtgcttctggtgaactgaaagtgtctgactcgtgaggaacatggtaggttcctcacttatccactgtagatgattcnatatggacacaacagtaagaagaatggggcctcgtccctgtcgacttgaatattatccctatgtattgcatgagaggggtctccctcattccatcagagtaatacacttgctttaattcttaagccttaagtgatacaaacatgccgaattacctgtaaagaatgcatttaaagctattctaaatgggtttttatttgtaagacattatttactaggaagctggtgatattaatgcttactgttctaatccagtggccaaggtattaagaatttgcaagtattttagattttcgaaaatgaatgagagaactgtgtaaacaccccgctgttcctt

SEQ ID NO: 689249 - DNA, 388 bp, Homo sapiens
ctgctgactgctattagataaacggagcctgcatggctaggtgtaaagaatatcactattcggcttacaacaatgcgtgtttatcagtacatatggttgcaacagcccttatgaaagatataaacatccctgccctgactgcataaatgttgaaggtagacctagtactggatacctgagtcagaatctatccagttgatccacaacctcacaaggccagagaagcgagaggagattactatactgaaaaggagtgagtggacagcacaaactggttaggaaaacacgacaaactgcgcctgcatttaacagaagcaatgcacacagaagaacgtcctaaagctatctggtctcgcacacacgcttggaactcacgggcggggcctta

SEQ ID NO: 689250 - DNA, 506 bp, Homo sapiens
  misc_feature (50)..(50): n is a, c, g, or t
  misc_feature (79)..(79): n is a, c, g, or t
  misc_feature (81)..(82): n is a, c, g, or t
  misc_feature (87)..(88): n is a, c, g, or t
  misc_feature (107)..(107): n is a, c, g, or t
  misc_feature (307)..(307): n is a, c, g, or t
  misc_feature (461)..(461): n is a, c, g, or t
tcccccccactgggttcgagttcacagtctgataaggacttaacgtcctntcctcaattgtattaaatagcattggggngnngcttnncctttttaaaaaaatcccnggattttcctccctgcttaaaagatttcaccagaaaaccttcatataaaaattcaggccctttttggacaatttttaaaatttgtatctttactagaacatgagaatctttttcccttggaagcttgaattataaatgtggtgtttggcctgcctcagcagcaccagttgactgctcgtgtgccagcggtgtggggaggncggggcaggacgctgcagctctctccagccctgttggcatcctcagtgcctgcaggcctctcgctgcctgttgggctgtctggggggtggccatttagggatcgtggggacggggtccaccccaagaagaaagaaaggcccgtccacaggcccngctctgggccacgtgccccggaagcaggtgtgtccagagtcagct

SEQ ID NO: 689251 - DNA, 357 bp, Homo sapiens
  misc_feature (77)..(77): n is a, c, g, or t
  misc_feature (165)..(165): n is a, c, g, or t
aggacatattttgattctttcagtattcttacacccttttaaacaaagttcttgatagtacccactattattgggtntgttttatgccattattgattcttgatattcaagcatttacaatgtagcatatttgatttcttttttctttctttttttgggcatcantaacatttcatttgaaatgcatattgttctgaaaggactttgtttttagcataaaggtgggccatttattctaagggttggaataaaaccattggggtgtttaaccttccattggcttggaaaattaaaaaaggacccttaatttcccggaaggccaccttttggtatggcccattaaattttttttaagtt

SEQ ID NO: 689252 - DNA, 464 bp, Homo sapiens
  misc_feature (4)..(4): n is a, c, g, or t
tggnttgaggaacgtcactgtttattgcttcctttgttgtgcagaagcttttaacatttagcatggtcccatttgtctatagtagttttgttgcctgtacttttgaggtctcaggcataaaatctttgcccagaccaatgtcctgaagagttttccctaggtttttctccagttattttatagtttcaggtcttatgtttaaatctttaattcatcttgatttgatttttttatatggtgagagatacaaaaatcatttcattcttctgcatatgcttattgagttttcccagcaccatttattgaaaagggtgtcctttccccactgtattgctgttggtgcctttgtcaaaaatctgttggctttatttatttatttacatggctttatttctgggttctctattcttttccattggcctatgtgtctgttttcataccgacagcatgctgttttgtaatat

SEQ ID NO: 689253 - DNA, 117 bp, Homo sapiens
  misc_feature (38)..(38): n is a, c, g, or t
ctctcctacctcgcatctcatcccctgtctcctgcatntgatacacagatggcattgtactgtacatttcgttgtgttgcttctttttttttttaaccaaaagtttaatcctaaaag

SEQ ID NO: 689254 - DNA, 667 bp, Homo sapiens
gatcgtgacgtgagcgcccgtttcacacgccggccgccgccgccgccgcatagccttctcgccagacagcacaacgcactgaagctggcttcccggccgaggacgagttccccgacctgacccacaaaacaatggccaaggtgctgaccccgcgagcgtgtacgcggagctgagcgccaagagcacgccgagcggcttcacgctggacgacgtcatccagacaggcgtggacaacccgggccacccgtacatcatgaccgtgggctgcgtggctgggcagacgaggagtcctacggaagtgttcaaggatctcttcgaccccatcatcgaggaccggcgacggcggatacaaagcccagacgatgatcacaagagcgaactcaagcccgagcaacactgcaagggacgagagactgaccatggaacccaactacgtgctgagctcgcgggtgcgcacgggccccgcagaaatccgatggagttcttgcctcccccgcgtcaaatgaaagacagagggagaggcgcagagaccatcgatgaatgctcgatagatagaatgccctatacaggcaggacggactagctaggagaggccgagtactacgctgcacccagagcatgactagtcggagcagcaagcggacatgacgagcaatactctcaagag

SEQ ID NO: 689255 - DNA, 285 bp, Homo sapiens
aggggaattttgtgaagggggtccggggggttttttccccccaccagcgggttcttcaacggaacctggggcaggaaccccccccccaaggggtggggggggtttggtttccccggggtgggcccccccaggagtttcaatattaggcccccccaaagattggtttccccttttttggcggggggccctgggggctttccctgcccccccacatgggggggggggtttttgggcccccaagggggggcccccccccttttggttttccccataaagcctttttta

SEQ ID NO: 689256 - DNA, 401 bp, Homo sapiens
  misc_feature (274)..(274): n is a, c, g, or t
gcaggtgtcaccggatgaagtagcttaagtcaagggctgcgttgtgtgaaatctgttaatgcctgggattagacccaggaacaggaagagaagaatgaagaaactgggagcagttaggaagtgaataacccacttcctcataccagctcacaatgacaggccctgttcccagcactccctctgcaaagggcttttcattaattctataattgcatgtatgtgtcacttgtaccgtgtggtgtattctcaccttaaggtgtgcagcacagaagtncaatgctaaactttcaaaagaaaccgactaagctccacctctcactgcctttgcctctgcttgccctccacatcctagaagctgtgactcttctacctttcctaggaagtcattggtttgtccgtgt

SEQ ID NO: 689257 - DNA, 731 bp, Homo sapiens
  misc_feature (54)..(54): n is a, c, g, or t
  misc_feature (99)..(99): n is a, c, g, or t
  misc_feature (124)..(124): n is a, c, g, or t
  misc_feature (161)..(161): n is a, c, g, or t
  misc_feature (163)..(163): n is a, c, g, or t
  misc_feature (165)..(165): n is a, c, g, or t
  misc_feature (167)..(167): n is a, c, g, or t
  misc_feature (175)..(176): n is a, c, g, or t
  misc_feature (182)..(182): n is a, c, g, or t
  misc_feature (253)..(253): n is a, c, g, or t
  misc_feature (286)..(286): n is a, c, g, or t
  misc_feature (291)..(291): n is a, c, g, or t
  misc_feature (296)..(296): n is a, c, g, or t
  misc_feature (311)..(311): n is a, c, g, or t
  misc_feature (349)..(349): n is a, c, g, or t
  misc_feature (353)..(353): n is a, c, g, or t
  misc_feature (357)..(357): n is a, c, g, or t
  misc_feature (390)..(390): n is a, c, g, or t
  misc_feature (395)..(395): n is a, c, g, or t
  misc_feature (399)..(399): n is a, c, g, or t
  misc_feature (418)..(418): n is a, c, g, or t
  misc_feature (424)..(424): n is a, c, g, or t
  misc_feature (431)..(431): n is a, c, g, or t
  misc_feature (480)..(480): n is a, c, g, or t
  misc_feature (482)..(482): n is a, c, g, or t
  misc_feature (494)..(494): n is a, c, g, or t
  misc_feature (547)..(547): n is a, c, g, or t
  misc_feature (592)..(592): n is a, c, g, or t
  misc_feature (620)..(620): n is a, c, g, or t
  misc_feature (625)..(625): n is a, c, g, or t
  misc_feature (627)..(627): n is a, c, g, or t
  misc_feature (647)..(647): n is a, c, g, or t
  misc_feature (653)..(653): n is a, c, g, or t
  misc_feature (660)..(660): n is a, c, g, or t
  misc_feature (664)..(664): n is a, c, g, or t
  misc_feature (668)..(668): n is a, c, g, or t
  misc_feature (682)..(682): n is a, c, g, or t
gctgccaaagaaaagagacaagaggaaaaccacggcaaacttgatgtcaattcnaactgtgttaaatgaagagcaaccagaggctgaagtaggtatctntcaaaaggattccaaacctgaagantccggggaaggaaagaaagaatctcttgaaagcgaantnanantggaaggnntacagnatgctcctgcagggccacaagtgtctaaggagtaaaaaccagagcaagtcccagatttggatggtcctaancctgcaagaagcatggaaaactcctaggaatgnatatntcctnaccttgttacacctncgtggcaccatggcaggattccacatttcatagaatanaggntttnaagcaaacccctagttagaccatgcactaattncctantganttctgtactatgattgaanggatanacctatngaaaattttttgtttcaaaatacagagaaaaacattcctattacctttntnaggctggctttncagcaattgtttcaaaggaaaatagatccccttaaagaaaaaatacaggcttnagggaacaaagggacaagcagaacaggtgtagaagagagattttnaggaagggaaaaatttatagctacaganggtgntnagaaaaatcataactaatangtaaanaaaatanatanaagnagcatttacggtantagcattctacttattaaagatgcaatgaaatgaagaaaggctttatgt

SEQ ID NO: 689258 - DNA, 199 bp, Homo sapiens
  misc_feature (126)..(126): n is a, c, g, or t
atcaaaaggatcgttttgttttgtttttaaaaaaaggggagattggcttggtttttcatgagcccctttgaaaaagctctttttttgtttttccccgcccatttcgttttggggaaaaaatttgtnctgtattgggattgtaaaaaacatttttgcccccagcccgtttcaaaaaataaatgttttttttgtttttcca

SEQ ID NO: 689259 - DNA, 143 bp, Homo sapiens
cgggggcccccccccccggggggggtttttttgaaagggttttttttgaaagggaatttccccttccggggggggggaaaaaccccccccgggccccccttttcccccttttgggggaaaaaaaaggggttttttttccccca

SEQ ID NO: 689260 - DNA, 318 bp, Homo sapiens
gcaacattaaggaagggtccccaggttggggagagccccaagttgagaacaataatgaacaattatagtatgaacaatagttagaaacagcgtaatcacaaacaacctgcgggcacaatgacctcattccacacgtagcacccttcagcaggaccctataaaactttcctccagcccttgcctcttggcaggtagccccttctctgctgagctgcccactggcaacatattttcacaatggctcgtagtaaagtctgcccttctttacctacaactatcttggtaaatggctttaccacctgcaaaactgaccctagg

SEQ ID NO: 689261 - DNA, 330 bp, Homo sapiens
aatttaaatggtggttgttgccgtaattgtattttgcctgtttttttaccttttgtaatggggcttttttggtgggttttaatatccttggggctggggaagttcacaagttttttttaaaggaaaattgtttactttgacaaaaattatccgttttgggggattgtttatgcccctgaagtgggttttttgggtgtggaacaaattgtggggatttgaatttgtcccccctttttttgttttggaattaagtttaatttatttttcaagtcattttcatgccctggttttttttacttgtttttttcaattaacattttggtacttgga

SEQ ID NO: 689262 - DNA, 204 bp, Homo sapiens
tgttcatcctgccgagtaacccttgaacccctctttgaacagtatcaccgatattctgatcaataacagtgattaatttgatacaatattgttgtgtgttatgagatcacttgaatgtgatcttactttgatatctgcaacaccagggtcactcatcgcatgttgtaacactcacactgtgtgacggcgggtaaccgtcactat

SEQ ID NO: 689263 - DNA, 291 bp, Homo sapiens
  misc_feature (20)..(20): n is a, c, g, or t
  misc_feature (291)..(291): n is a, c, g, or t
atcccccctcctcttcccanataaagatgagggactaaagttgtcttgggttttattttattattatttttttctttttccagtatactagcttgtcttttaagagaggggatattaaaaaaaaaaaaaagacaaaagggtttttaaaaaaaagcaccccccacccctgggtctgtatatagccagcttatctggggtccaatcgttggatctttacagagagaaggggaaaaggctgtatcaggggggggcttagctgggcctttccaataaagaggggagaggcttccn

SEQ ID NO: 689264 - DNA, 352 bp, Homo sapiens
  misc_feature (114)..(114): n is a, c, g, or t
  misc_feature (123)..(123): n is a, c, g, or t
  misc_feature (198)..(198): n is a, c, g, or t
  misc_feature (269)..(269): n is a, c, g, or t
  misc_feature (272)..(272): n is a, c, g, or t
  misc_feature (279)..(279): n is a, c, g, or t
  misc_feature (306)..(306): n is a, c, g, or t
cccagagataagactcccctagatcccccacttagatcaccaccctttctcagggggtaataaagtcatcttccttggaatgtagcaatctataaccaatcaaagcactgtaanatatgcacnggtcttgtatggaaaatgttgtaatcctgctaaaattcctctctctttgcctgtggaagtgaaaccttaacttcnccagtttggaatgctcaccccattcctttggagtcaatgcttactgggtggctattctcaaactttgcacncanagaaacnctatacttagtcttattttctgaatcncattatttaaggttgacataataaacaactaatagtaagtaaagtg

SEQ ID NO: 689265 - DNA, 110 bp, Homo sapiens
ccgtaacctagatggctattgaggagctatccttgacgcatgggggtcaggcgttgaggtcttgtgtgagtgcttttagtgcaggttcagcgatggaggtaggattggtg

SEQ ID NO: 689266 - DNA, 568 bp, Homo sapiens
  misc_feature (2)..(2): n is a, c, g, or t
  misc_feature (24)..(24): n is a, c, g, or t
  misc_feature (37)..(37): n is a, c, g, or t
  misc_feature (62)..(62): n is a, c, g, or t
  misc_feature (142)..(142): n is a, c, g, or t
cnagaccgggccctcagaattaanccaccatggtttncacccatttgatctttggccaaccntgccaaaaccaagaaatgggaaaggttctcctattccagtaaatggtgctgggaaaacttggctagccatatgcagaaanctgaaactggaccccttccttacaccttatatgaaaattaactcaagatggattaaagacttaaatgtaaaactgaaaaccataaaaatcctggaagaaaacctaggcaataccattcaggacatagggatgggcaaagacttcatgatgaaaacaccaaaagcaattgcaacaaaagccaaaattgacaagtgggatttaattaaattaaagagcttcttcacagcaaaagaaataatcatcagagtgaacaggcaacctacagagtggaagaaaatttttgcaatctacccatctgacaaaggtctaatatccagaatttaaaaggaacttaaacatatttacaagaaaaaaaaaaacaaccttatcaaaacataggcaaaggatatgaatggacacttctctaaagaagacatttacatggcc

SEQ ID NO: 689267 - DNA, 529 bp, Homo sapiens
gctggaatttggagaaagtcagtgactgaaggtaagacagtagtgtgtggtggagttcggaattgcaattggctgtccatggcttttctagcctttcaaggctgccctgttgtgcctacctttggtctaagctcaagtgtcattctttacatctccttctgttttctgtttatgcatgtcacaaacatataactatgtgataagattttgatcgctcagacagcttcacttctcacacagcaagagcattgctataccgatcctcttggctgactcccatctgcaaggtagaggagcagatcatcccctgggcttccccgtcacacatgtgacatgctccatgtgtggcagatgacactgaaagggagagttcaaggacagacacctggtgaattcatgctggtgaagctccaggagatgtcagagggcagctgttgggagtatgaggcccagtgtaaccttctgcaagaatgtttgcaaccagcctattgtgggagagatgttcagactggggccagattttttttta

SEQ ID NO: 689268 - DNA, 117 bp, Homo sapiens
  misc_feature (7)..(7): n is a, c, g, or t
tgtcgcncgcgtgatagaggatcccatcattgcttgctgtgttaagatataccaaaataaaaatgattacttctaagtaatagagcacataaacgttatgatgaatataattattgt

SEQ ID NO: 689269 - DNA, 687 bp, Homo sapiens
agtttttttttcaataaaagtttagaaagaaaaaagtgatgcctgatctttcaacagacaggtggggctctgtagctgccactaccacagatgcacacaaaaacagcaccctcatttccagggggagcctcaggccccgagataaatgtgctccatggacctggaagcgggtagttccaggtccaaaaagttcctcctgaggctgctcacaaaacagctgactatagctatagctatggctcttggggtttcagtctcacactgagcatctgactctggctcccaaggggtcaaagaacaagccctgggactggcatacacagggcatcctgctagcccatagcttggccatataggaccaggtcaacacacatatatattccctaacttgaatctctctcggccaggcacattggctcacgtctgtaatcccagcactttgggaggcaggtggatcacttgaggtcaggagttcgagaccatcctggccaacatggtgaaccctttctctactaaaaatacaaaaattagctgggcgtggtgatgcatacctctagtcccagctactcaggaggctgaggcaggagaatcactgaaacccaggaggcggaggttgcagtgagctgagactgcgccactgcactccaccctggcgaaagagcaagactcatctccagaaaaaaaaaa

SEQ ID NO: 689270 - DNA, 372 bp, Homo sapiens
ggtcgacgaaaaacctctggcccatttggataaatacttgtacaaacctccagctcactcagataaaggaacaagaacgacctagcacagaaatgcctttgtttgaccagccacggtggatcatgcctgtaattccaacaatgtcggaggcagctgtgggcggatcatctgaggtcgggagtttgagaccagcatgaccaagatggacaaaccctgtctttactaaaaatacaaaactagccaggcatggtgctgcatgcttgtaatcccagctacttgggaggctgaggcaggagaatcgctagaacccaggaggtggaggttgctgtgagccgagatcgcaccattgcactccaggctgggcaacaagag

SEQ ID NO: 689271 - DNA, 477 bp, Homo sapiens
cagactccaactatgtaacactagtaatttttatcatctttgcctcgggaattataagcaaagtaaaaaagggtattcaaatatctgtgctaagatttttaatgccgtaaaaaaaaatttgcaggctgatagcaaatataaaattaaaatattaccaactgtagtaaatttcctctaaaaaaaaacacatgcacactaacaaatcaaaaagccctgttatttcaaagtgaaaaatgaacaacagtagcagaacttattaagtattttaatgccagtatctttaaagaggaaaggaatacaacatgctggaaataagaataatttctaaatcacaattaattctttcacatttcactaagtgtgagttttgatattctctataaggaagcagatacttgctaaagaaacttttgtgtatgtatatatgtaaagacaaaaaaattattccctttccaataaacgttctttcaatatttt

SEQ ID NO: 689272 - DNA, 468 bp, Homo sapiens
taggaaatagcgtgaggtgggtccaggagtgatcactagcccatgtgtgtgcagctgagctgtggatagaactaccaagttgcagcaaagatggtgatcttgtgcgagaggtggttagagagtcaggtgtagtttgtggtgggctttaggaagtcaggctgaggatattgttcatgtccatggcagtcttgagtgtagggaaggcaggcccgctgtttcccctactagtgatctgttgaatacatcgcatggtcctccattgtcctaagctcccatcgtggttgcatctaggactagttcataagtaggctcaggtgtcgaaaggcgtggttacccagaagggcaaatcagtcaaagcttcaagaagctgagtttcgtttttttcagttaccaaagcggggccctatcttgttctaaaatatttggccctatatctgactttggtcaagatttgagtgatcacaacct

SEQ ID NO: 689273 - DNA, 1075 bp, Homo sapiens
  misc_feature (759)..(759): n is a, c, g, or t
  misc_feature (791)..(791): n is a, c, g, or t
  misc_feature (836)..(836): n is a, c, g, or t
  misc_feature (917)..(917): n is a, c, g, or t
ggcgacgcgacggtgggggtttcggcctgcgttcgggccgcagacagagcctgggcctgggcctgggcctgggcctgggcctgggcctgggcctgggcctgcgcctgcgcctgccctgggaacgggttccggcagacgctgaggttgcgttgacgctcgcgccccggctcccgttccaggtgctgttgcacgtgctgtttgagcacgcggtcggctacgcgctgctggcgctgaaggaagtggaggagatcagtctgctgcagccgcaggtggaggagtccgtgctcaacctgggcaaattccacagcatcgttcgtctggtggccttttgtccctttgcctcatcccaggttgccttggaaaatgccaacgccgtgtctgaaggggttgttcatgaggacctccgcctgctcttggagacccacctgccgtccaaaaagaagaaagtactcttgggagttggggatcccaagattggtgccgcaatacaggaggagttagggtacaactgccagactggaggagtcatagctgagatcctgcgaggagttcgtctgcacttccacaatctggtgaagggtctgaccgatctgtcagcttgtaaagcacagctggggctgggacacagcttattcccgtgccaaagttaagtttaatgtgaaccgggtggacaatatgatcatccagtccattagcctcctggaccagctggataagggacatcaatacctttctctatgcgtgtcaggaagtggtacngggtatcactttccggagctggtgaagatcantcaagcgacaatggccacatactgccgtcttgcccagttttattnggaaaccgaagggaactgaatgaggacaagctggagaagctggaggagctgacaatggatggggccaaggctaaggctatnctggatgcctcacggtcctccatgggcattgggacatatcttgcattgactttgataaacattcgagagcttctccagtcgtagtggtgtctttatcttgaagtaccggcaggagcctacacaattaccttcgcttccagattcaccaagtagcccca

SEQ ID NO: 689274 - DNA, 527 bp, Homo sapiens
  misc_feature (433)..(433): n is a, c, g, or t
  misc_feature (443)..(443): n is a, c, g, or t
  misc_feature (517)..(517): n is a, c, g, or t
gctaaaacaccaaaacgaccaaaagcaaggacttctgcacagaacaagttagcaaggttgtaaatgcaaagaaaagtctttgaaaaaattaaaattgctagtgaacatacaattgataagaaaggaaaacagccttatttctgatatagagaaagttttagggtctagataaatgatcaaagaagacacaacattcccttaagccaaaaccgaattcataagaaggccttaactccaattctacaaagcttgagagagatgaagaagctgatgaagaaaagttggaagctagtagagattgtctcatgaggtttaaagaaagaagctatctccataacattaaagtgcaaggtgaagcagcaagtgctaacaccagaagctgcaacaagttgtccagaatgtcctagcctaagtgatgaaggtggctatatanaccaaccagntttttaatgtagacaaaggagccttctgctggaaggaggatgctatcttaggactttttgtagctaaagaaggngatgtccatg

SEQ ID NO: 689275 - DNA, 924 bp, Homo sapiens
  misc_feature (5)..(5): n is a, c, g, or t
  misc_feature (608)..(608): n is a, c, g, or t
  misc_feature (640)..(640): n is a, c, g, or t
  misc_feature (685)..(685): n is a, c, g, or t
  misc_feature (766)..(766): n is a, c, g, or t
tttcncgggtttggcagctggcgccatggtgctgttgcacgtgctgtttgagcacgcggtcggctacgcgctgctggcgctgaaggaagtggaggagatcagtctgctgcagccgcaggtggaggagtccgtgctcaacctgggcaaattccacagcatcgttcgtctggtggccttttgtccctttgcctcatcccaggttgccttggaaaatgccaacgccgtgtctgaaggggttgttcatgaggacctccgcctgctcttggagacccacctgccgtccaaaaagaagaaagtactcttgggagttggggatcccaagattggtgccgcaatacaggaggagttagggtacaactgccagactggaggagtcatagctgagatcctgcgaggagttcgtctgcacttccacaatctggtgaagggtctgaccgatctgtcagcttgtaaagcacagctggggctgggacacagcttattcccgtgccaaagttaagtttaatgtgaaccgggtggacaatatgatcatccagtccattagcctcctggaccagctggataagggacatcaatacctttctctatgcgtgtcaggaagtggtacngggtatcactttccggagctggtgaagatcantcaagcgacaatggccacatactgccgtcttgcccagttttattnggaaaccgaagggaactgaatgaggacaagctggagaagctggaggagctgacaatggatggggccaaggctaaggctatnctggatgcctcacggtcctccatgggcattgggacatatcttgcattgactttgataaacattcgagagcttctccagtcgtagtggtgtctttatcttgaagtaccggcaggagcctacacaattaccttcgcttccagattcaccaagtagcccca

SEQ ID NO: 689276 - DNA, 589 bp, Homo sapiens
  misc_feature (170)..(170): n is a, c, g, or t
tggtccaccccttgccgcgtgggggggcccctcctagaggaacaatgaaggttcttcccttatgtctcttccgctgtgggggggggcgaccctctcgtctctcgtgggtgctgtggtttgttcccaccccgcggtgcggtgtgaggaggatggcgggctcatcccccgcngtggacctgggtggggtgtgggtgacgcagggggggggccctcttccccccaaggccctcccccccccccggggaaaaaaggcgccttttttttacccgggggtttggggggccccttttaaaaccgcgggttttggtgggtgcccgcggggcgcccccccccccaggggtaaaacccggggtttttttggggcccccttttttttgtttttttttcacccccccccccggggtttgggggggttggggtttttttccgagcccattttttggggcccgggggggggcctttttttttttccccgccccgccgcgcgagagagggcccccccctttttttttcccccctttttttttttgggggggggggggaacccctgtggggtttttttttttgggttttcccccccccccccggt

SEQ ID NO: 689277 - DNA, 902 bp, Homo sapiens
gtctagataaaaaaagagataaagactacagaaggaaagagatcttgccttttgaaaagatgaaggaacaaaggttgagagaacatttagttcgtttgaaaggtgcgagagcaatggaattcgacagacgaagagagattgcagagacgacgacgcgtcgacgacgcgacgaaccgcattacgaactacacttcgtgaacgggaacgacaccgggacaccgcttaccagacgacgacgacgacgcacgcgccctacgacacacttgacacacggcacaaacactacgacgacgacgacgagacatggacacgcgaacgcttggacccgggacacgcattcgtattgaaccacggaacgtcgtacaggaacgctgacaccggattgctcgagacaagacgaggaactcagacacggcaacaacagcacgcttcgtatatgacacaagaaaaaaggaattccttgaaagagcccacgtgatgtagatcataggcgagatgatccttactggagcgagaactaaaacagttgtctcatagaatacagatgcacgaatttggccatggatccgactaatctcgaacaacagaacaagatataatgactgtgatcaccgagagaggggcaggatacctgagagtcagcagtacagtctacatctttcgaaaggcgggaacgcatagtggtcaaagtgaggggacaaaaagcacgaactactgcacgaagggaagatccaagcttcgaacagatatcccacaaattccagaggaatccagaagaaactgagacatcaagcaccaaagacatgcacatgagagaagccaaacaggggaaaagtccgaggaagagcgcagagaaacggagaaacgggacaatcactgacaggctgatatcaccaccaaga

SEQ ID NO: 689278 - DNA, 170 bp, Homo sapiens
tagctcggtccagagctgctattgacttctctgccatgacgtaaggtcctaattgaaaaaaaggtaggcaaataaacagtaccatcataaggggtccgcacctactgcgggtaattccatggcagagagaggcagcatgtacaaagtgttcacgtgcttgagatgcaggg

SEQ ID NO: 689279 - DNA, 1106 bp, Homo sapiens
  misc_feature (292)..(292): n is a, c, g, or t
gtcctctatttcaaggcaccaacactgaccctggaacagatgaatcgacaactgcctgtctgtctgtactcagtgggcgcactactcactaagacttgagcaggaccatgatgctgcctgagtccctgatcatccctgagtctgagagagtcccccaggcgagtatgctgcgccctagaacgatccgtattcaagtcccactcgatggatcgaggatcgaccacgacatcctttctgagcaatagaatcacacctctctagagcttggcttgatgatagcccttcgatgtcntcattcccggtctagtctggccagcaacctaagatcacaacatggaaactcaaataatcttttggttcatcccctcaatgttggatcaaatctgcgtaatcgacgtcgcctttgcaacatgcttggtcctctggagaaccgaaggcgtctgagagcttcagcggattgcataatccacctaggatgtgtgccttagaatatgtgctatatcctacaccggatgaatgtctcgggaaggacttcacgatatccatgtatggtgcattcccatgggacctctctcttcccatgagccccttcaggtgtaggccatcacggcctgactcctatatgaccacacggacaagattggccttgttaccatccagctgcatgggcctggaaatctagtggaatcagacctagagcgtgggcattgttaacaaccacagtttggttaccaaatcattacatgccctttcaaatgttcatctctcgggtcaatcacccgaaatgtagggcctaggacaaacagtgatcgaaggaagttagaagtgggaggcgcggggttactcaagtgggaccaccttgtgcgactttgggtcctagggatcttgcctaatgatgaccatagcttttgtgggccactgtgctgaagttaccatcttcacttttgggagtggcatagcttggagacgagaacccttttgaagctcggcggccccagcccgtgggaaacgtaggtaccttcacacggtgcgttcacaagttggaccaccgctgccggtggcctaatgacttgaagggtttagagcctgtttggaatactccaggc

SEQ ID NO: 689280 - DNA, 157 bp, Homo sapiens
ccgggggggttttttttttttcccccggggtcccccccccccggccccccaaagggggggggtttcggggggttccccccccccccgggggggggttttttgggccccaaagtttttacccgggtttccccttttttttttttttttccccccccca

SEQ ID NO: 689281 - DNA, 193 bp, Homo sapiens
taaaaaaaaggttttttggcaccccgggaaaaaaggggaaaaaaggccaaaaaaaccccccaaaaaaaaaaaagggtaaaacgggaacccaaaaaaaatttttcaaaaaaaaaaaattttttttttttcccaaaaaaggtttttttttttacccccaaaaaaaaaacccgtggaaaaaaaaaaattttttttt

SEQ ID NO: 689282 - DNA, 169 bp, Homo sapiens
cattctgtggtcgctctagagatccccgctcctaggcggggtggttgccggacggaggtcgctcctcacttctcagacggggcggttgccaggccgacgggtttcctccactttctcaccatcggcaatcggccgtcgcggacgacgcctccccactctcccagaacag

SEQ ID NO: 689283 - DNA, 826 bp, Homo sapiens
tgcatgccgccgtctccgcctcgtgggcctgcctgtgtggtgctgccctgcttgatgctgctacccacttgtgctgtcctgctgccgatcctcgctggtgctgacccctgcggccaatggcccccgtgctggtgatgctggctccctgggctgccccgaactagcccccaactttgggctgaagtttgcctgctgcctctccccgcccccactgcggcgctgcctgtgttgtgcctgctggacggcatgctgtgccccctggggatgcgccttcccggggtaccccgtggctgcgccctgctgctgctgctgctgctgccgctgctctgcgccgctgctggtgaacagggtgctgcctggccgagctgcgggtcctgcgtgcggcttgcctggacgagcatggtgtgacctgaggatgagcctgcatggcggacagctgacgcggacagcatcagcctcgagctgcgcaagcccgactggcaccctcgtctccttcaccgacgacttcaagaagggatgtgaagggttcttaccgggccctgatcctgggggagctggagaagggggcagaggtcaattccaggccctctgctttgtcacccagactgcaagcacaagttgagatcatccccaagtgatagccatggccaagctccggcagaaaaatccccgggcagtggcggaagggcggacggaggtcggggtctggagcatctgcacatgaatgtcgctgtaactatcagccagggggccatgtgagtcccatctccaacgtttttcctagccggaatcgattaccccgcagaagattcgatctgctgcgagt

SEQ ID NO: 689284 - DNA, 171 bp, Homo sapiens
  misc_feature (53)..(53): n is a, c, g, or t
  misc_feature (67)..(67): n is a, c, g, or t
ccgccgtacagttgcggagtcattacaaaagatgaatcctgaattcaaacatngtcgtagaaatgtncacatgggtttattgtcatatgccaagacaggggaacttgcttcattcatcatgcatgcatatttacacatccgttccacctacagcgcaactggtacggcggg

SEQ ID NO: 689285 - DNA, 889 bp, Homo sapiens
ggaaagaatataccaccatttcatctggctagttcaccatcacaaggaggagtgcttaagtgctttcaaatattggtgtcaatatgtgtcacataagattacaggtagcaaatgtattggaaagcgacttaagcacttcactccgttgtggaaagaagtataccatctagttatcatcgatggacctagtagcaccagtcacacactgacaatagccagaaaggggattctagaaaaacgaggagttgaccaaaataaataatcgtgcaaagaatgatagcttttaacccgtgaagtgaccagcttgagtctgagaagtgcttagatgacatgggcccaatatacgtcagtagcaatagaaggaaacgacttgaagtgggacattgtagacgccttcaaaatagtcagaaaatcataataacacgcacacataagaaaccgagagcgcgaatgaccgtagacacacaataaatcaagggaatagccccagaaggaagggtaggtacataactacggcgaaacctgatcgcccaagagaacacgtggaacaatggctacataaccaaccaaccaatcagcaaagaaacgaggaagcatttacaacaacaaacaacttgcatagtagccgtacaacaaaagactggggaccatccgagcaacgaccacagaggtaagcagcaataacacgcgaaacgctggaaatacgaaccatcaaagaaacacacaccaaaaatataggacagaagaaagagaaaccaaagacccatggaggctccaccagtaaacagaatagagaagcgggatgaacataaagacgtggacagagacagaaataagagacttacaacagtaggagcgtcgccaaatgaacacagacgatcttccaaca

SEQ ID NO: 689286 - DNA, 1100 bp, Homo sapiens
gagtccgagtggagagagcgatctgagtggttgtgtggtcgtcgtctcggaatccggtagcgctttgtccagcatgtgcttgagccaactgactgtaagagcaggattgcgatggaatttcaaaggagagcttctatctcactattctgacaaagatggtgatggcacatctcatgaatcatacataatggaagttgggaacgtgtgatatggagatctcattgtgcgccatgaaatccaccacggtaaagcaagcaagttaccacgtgacattgacttcatctcgaatggtaggattgcttgactgtgatcatatcgtgccacagatatgactttccccttggaattttccggcgggcacacttgtggtgtgcggcagacaaaatagatgagcatcgcaccggccaaggacctgagatggaaccaacatgtaaacctttgatagacgtatagctgtgtccgtgggagtgatatcgcgaactcacagcggcctgggcgctacatcggcctatgtgatatagtgtggctgcaagaaaaacttttctgccccagtgatcgatttgtacaaaacccctttggggactgcaagcatagtttattaacgaggacttgcaatacgacatgcgttgattcgtacccacctcgactccatggtgaatactgctaagaattattcgcattgcggtgcattggtcgcatagttgagaacttatgtaaaggatgttttgtgaccatatattggattgacacgtcgatagaggttgaaaagtacccttatgttaatcatgaaattggttgttaaataatccttccttgggttggcttaaagaattgggtcttaattattacgcgcattgttctacctttaatggttcatgtgtacacagctttcagttcttgtaacaacacgcgtttgtcctcccccttcacttgggttccacacaagacaaacattaattgcacttgttaacttaggtcacacttataaggggaactttcaatttccccttccccagtagcttttatctttcgcccattaatcctttaactggtccatttggtcccctaaagaacaccctgtaatcttctaagaaaaaaaa

SEQ ID NO: 689287 - DNA, 112 bp, Homo sapiens
gagtctcatgctcaccctccagagtagctggcactacagtgtgtgcaccatcactacccagctattttttttgtattattacgtagagatggggtttcaccatgttggccag

SEQ ID NO: 689288 - DNA, 167 bp, Homo sapiens
acacaaagctggctgtgctctaggagtggtatccctcccaggcagctgtgtctcccttctggcgggaccacggctcgggccaggcaactggatgtcttttcccttcagacacgtgcgtggcgcagaggaattcagtcaggtcttcctccgggctggttccgtgtacc

SEQ ID NO: 689289 - DNA, 387 bp, Homo sapiens
  misc_feature (42)..(42): n is a, c, g, or t
  misc_feature (77)..(77): n is a, c, g, or t
atgggatggcggccgggcaaaaacactcctccctttccagantgggcagccaggcaaaggggctcctcacatcccanacgataggcggccaggcaaaaacgctcctcacttcccaaacggggtggcggccgggcaaaggctgcaatttcggcattttgggaggccaaaacaggcggctgggaggtggaggttgtaacgaactgagatcacgcccctgccctccagcctgggccccattgagcccctcttttagtgatttttaaaagctctttacaaattgttgatgtgagccctctgtcagttttatgggttcatagatctgttccccctttgcaacttgccctgtcccttttttagttttttaataaacagaaatttttaatttga

SEQ ID NO: 689290 - DNA, 195 bp, Homo sapiens
tggctctagttacccagacagcgatcgcctggaggacatgccaaacatcctgacctaggctgataagctgctcacgcagcacgagtaacatcaagaacgagatcgatcatccttacgtagtgaggactaccagagagatgagggacttggtgcgagattgtcaccctatgggtcagacctgtattgcccatgttc

SEQ ID NO: 689291 - DNA, 169 bp, Homo sapiens
tgcctgtctggatggtgctgaatcactttgccaaagcatcatattcttggcgattttttcgtattcgtttgcttgaagaattgcttttgcactcagcaatttttttcatgtgctccagctatgctacattctatttccttgtaaattttttcataattttccatttctc

SEQ ID NO: 689292 - DNA, 147 bp, Homo sapiens
gtgcacattgaggatcggtggcgcacgctcgtgcctgctgttggtctgacggcgccgagctgaaggtctacgagggcagcggcacgcgttgcccgacaccgaccgcgaccgtctccacgccgagctgctcgccttcatcgactcctg

SEQ ID NO: 689293 - DNA, 756 bp, Homo sapiens
cgcagaatggcaagaacagccagactgataatacgatacggtcctccttgtgctgactcaccgacctcgactgccgcaccatggacgcccccaggcaggtggtcaactttgtggcctggtcccgccaagctgcctgcactcagtgttgttagatgatacaaaaggaattattatgactacaaaggagttggcataagttgttcttgaaattgatgtcacagtgtcatccagatttttgccaagattattaacaatacatgatgaatcttgtgctgtgtgaatttgctatgcttgttccagaacaactataatgtgttgatttttcttgccaatgtgcatgtgtgtggtgctgtgccatgttcatgttgtcttgtccctcttaacactctcatttgtgctctgaaaatgcatgtgaatgtgttgttgcttgacctattgttgtgttgatcatgtgatgcttgtgtacatgctaatggccgcatgaagaatgccaacgacatgtttctgggactataaaatatccgtatcaccctaaacttgggagttatacaataaattccatgatccaaatgcacctggaacctcaacccagatgcctcctcacttgtattatttgtgcaaatgatgacgtgtgcatggttgtggagtattgactttatacccgatgtcactttgagcagtactggtttgtgacatgtcctcaacttctgtcaagcagtggattttccaagttggtgtgatattgtgtgccgattc

SEQ ID NO: 689294 - DNA, 316 bp, Homo sapiens
  misc_feature (59)..(59): n is a, c, g, or t
  misc_feature (231)..(231): n is a, c, g, or t
agtgcgacggagactctctgaaaagtccagaggcccccagaccacactttgaaaataantggtataattattcccactgatatgatcaatggcactataaacaacttcttattatttttttttttttttttttctgaaagggattctggctcggtcgcccaggcgggagtgcaggggagcaatcccagcccacggcaacctccacctcccagattcaggcgattctccggnctcaacccccggaacagtggggactacgggggggagagtctcggtcgaacttgggcttccaaattttaagcgggagagtctccgt

SEQ ID NO: 689295 - DNA, 563 bp, Homo sapiens
  misc_feature (31)..(31): n is a, c, g, or t
  misc_feature (73)..(73): n is a, c, g, or t
cttccccttatgagagagaaactgacgcagntacgccacgactgggagcggcagaacaatgaattccaagtgntgttgggcatcaaaaccacttggagaaggaaatcaccacgtcccgccggctcctggagggagagagtgaagggccccgggaagaatcaaagtcgagcatgaaagtgtttgcaactccaaagatcaaggccataacccaggagcccatcaacggaagattagttttttgtcaagtgaatgaaatccaaaagcccgcatgagcccaatgaaagtttccgcctgttgtaaaatttattttcccccaaggaaagtccttgcccagaccccagtgagtgagttttaaaaaatacccttggaattatcagactcagaaacttttattttttttttttggaacagtttccccaggcttttcataaaggcttttaataaatggcccttttttaatcaaagggggggtttatgagggtaaagctttcctttcctactgcagccttcagattttcttctttttgcattttttttgtagccaataaaactccgccctagca

SEQ ID NO: 689296 - DNA, 436 bp, Homo sapiens
  misc_feature (1)..(1): n is a, c, g, or t
  misc_feature (117)..(117): n is a, c, g, or t
  misc_feature (143)..(143): n is a, c, g, or t
  misc_feature (145)..(145): n is a, c, g, or t
  misc_feature (153)..(153): n is a, c, g, or t
  misc_feature (158)..(158): n is a, c, g, or t
  misc_feature (282)..(282): n is a, c, g, or t
  misc_feature (314)..(314): n is a, c, g, or t
  misc_feature (327)..(327): n is a, c, g, or t
  misc_feature (436)..(436): n is a, c, g, or t
ncagcagctgtggctgggtgcatggggtctgcttctcggccagtgggagccgagttgcttgggtcagccatgacagcactgtatgcctggtagatgctgacaagaagatggccgtgnaaccctggcctctgagacattaccantnctggccgntaacnttcatcacagaaaatagtctagtggcagcgggccacgactgcttcccggtgctgtttacctatgacaaatgctgcggtgacattgaacttcggtggccggcttggaatgtacccaagcaagaantcccaagcgtggcaatgacaagccccgagaancgcttccaagaancttgggacaaagaagggccagctcttgaaggggggttgcaagccacttgggggcccggccttggaattcaattgcaacaagaacaagttgttaagccaaattcttgggn

SEQ ID NO: 689297 - DNA, 465 bp, Homo sapiens
gcacccaggcgcacttctggaataagactccagcactgggccaggcgccgtggctcacgcctgtaatcccagcactttgggaggccgagacgggcggatcacgaggtcaggagatcgagaccatcctggctaacatggtgaagccccgactctactaaaaatacaaaaaaattagccaggcgtggtggcgggcatctgtagtcccagctactcgggaggctgaggcaggagaatggcgtgaacccgggagacggagattgcagtgagctgagatcgcgccactgcactccaggctggtcgacagagcgagactccatctcaaaaaaaaaaaagttaaaacaatgaggctgggtgcggtggcttacacttgtaatcccagtatgttgagaggcagaggcaaaggcgggctgatcacctgacatcaggagttcgacagcagcctgggcaatgtggtaaaactctgtc

SEQ ID NO: 689298 - DNA, 461 bp, Homo sapiens
tggatcatgtgctccaggcgcaggtcaagctgctcgtcgtcgaacaacgcctcccatgcccgagacgccaacaccatcgcgaaggtgggcggagcaatggggtcgtcgcctcgataggccggggcgttatcccccaaagcagtggcaagctcccggattttctctgcggtaacaagatacgggtctgtcgtcgggtaggtgcgcccaacgtcatgagaactgatcgacatgtcgtcaggctatcccagacccccaccgccacagaatacctcggagcatcttaattgctcacacaggggaacgcatgagcgtacagctgtcggaggggcagactttcggcccgcgagccatcaacgttactcggactactctggtccgttacgcaggcgcatccggcgactttaaccccatccactacagtgatcgagctgcccgcgaggcccgcatggacggagttatcg

SEQ ID NO: 689299 - DNA, 797 bp, Homo sapiens
  misc_feature (38)..(38): n is a, c, g, or t
  misc_feature (40)..(41): n is a, c, g, or t
  misc_feature (43)..(43): n is a, c, g, or t
  misc_feature (47)..(48): n is a, c, g, or t
  misc_feature (53)..(53): n is a, c, g, or t
  misc_feature (76)..(77): n is a, c, g, or t
  misc_feature (79)..(81): n is a, c, g, or t
  misc_feature (84)..(86): n is a, c, g, or t
  misc_feature (90)..(91): n is a, c, g, or t
  misc_feature (93)..(97): n is a, c, g, or t
  misc_feature (129)..(130): n is a, c, g, or t
  misc_feature (133)..(133): n is a, c, g, or t
  misc_feature (139)..(140): n is a, c, g, or t
  misc_feature (159)..(159): n is a, c, g, or t
  misc_feature (196)..(196): n is a, c, g, or t
  misc_feature (201)..(202): n is a, c, g, or t
  misc_feature (206)..(208): n is a, c, g, or t
  misc_feature (211)..(211): n is a, c, g, or t
  misc_feature (303)..(303): n is a, c, g, or t
  misc_feature (586)..(586): n is a, c, g, or t
  misc_feature (761)..(761): n is a, c, g, or t
ccccaagccgctttcacaaactcctttcttaccgtagngnngncccnnccgcngcccgggcgagcgacacggctgnngnnnccnnncccnncnnnnncccccccccccccccccccccgcccccggagnnccnccggcnnccgaacccagggcaacgcnccccagtccccccacccccgaccccggaatcatgcangtagnngggnnngcnccccctgcggataagaaattgatgtgatttgaacctgatctgcgctctgaacaacaaatactgccccatgtgtacgtgcaggtccataaaanccggccgctgctgagcatcaggtctgacaaacacacttcaagacattgtctacaaattggtccctgggctttttaaagatgagatgaaacggcggcgggatttctatgcagcgtaccccctgacggaggtccccaacggctccaatgaggaccgcggcgaggtcttggagcaggagaagggggctctgagtgatgatgagattgtcagcctctccatcgaattctacgaaggtgccagggaccgggacgagaagaagggcccctggagaatggggatgggganaagagaaacaggggtgcgcttctgcgatgcccagcagccatgaccgtcatgcatcttgcaagtttctccgcaacaagatggatgtgcccagcaagtacaaggtggaggttctgtacgaggacgagccactgaaggaatactacaccctcatggacatcgcctacatctacccctngcggcggaacgggcctctccccctcaagtaccgtgt

SEQ ID NO: 689300 - DNA, 313 bp, Homo sapiens; identical to SEQ ID NO: 614636

SEQ ID NO: 689301 - DNA, 149 bp, Homo sapiens
ccgcagctgaaggagagtctaccgacgcttgatgacggttgcggcccacaacttgattcagaccactaacatcgacaatggagaacacacggagaaggccgaaggacattttcaccgagttagagcaaaatggcgccgctgcgggtaac

SEQ ID NO: 689302 - DNA, 535 bp, Homo sapiens
atcaagggcggtacgggtaaagtgaggccagtcatgtcatcgctcattcagagatgctcatctagactgccctgagactccagaactaaatccttatgtatgaaattacctacaaggaaggttatgatgatgtatacaaaggtaaccagacagctctccttaagcggctttcggtcagtatttggtaccagtttatcttctacatattcagctcatggaaattacaagttatatatttccttccccattgtttttcaaaatgtattttcaacagagcatgcttaaaaatcatgtaactcattaaaaggccagagagcagagctaacacaacttgccttatcttgtaaaggccttaaaagtaaggcttcagatcgtttttttcttctgaattctgtcaatttggtatttgatggtgcctgcagttctcttaatgcacttttaaagcttcacagttctgaaactggaaacgcataaaacttttaaaattattaatattctaatataacagattttcattatctttgtaagatttcat

SEQ ID NO: 689303 - DNA, 1093 bp, Homo sapiens
gcttcgctctccgccgtccgaggcccgcgcgctcgccatgtcccggccaccgccaccgtcgtggtctgccctcgcgtgctgggcaccatgtgcagtatggggcgccgcactggacagcgccctgcctagcgctcgcggcctgtgcgctgcctgttctggagcgcggacatacctgaactgtgactcgtgccttcatgtacatgcgacgtggccagtccgagaccatcctgggcggcctggggctcgggctgtgtgtgtggctgactgcagagtgaaaattgtcactcaagggccatacgccttgggactggagagaatcactagaaggccgtgacagtgtccggtcccagactaggagagctgtcattgaatgatgtgctgcacttgtccccaatgtggacctcttctagctacacgcagcatgaagtcacgggaccccggatggaagagacgtctgcatgctctgccaagcgagctgctaccaggagggcagagtacgtgggatgcttgggcctcttccaacatattgcttagctggtcagagttggcctgagatctgtaacccatctgcaacgcatgcaaatggcgtagcaatcccttgcccatctgtgttacccagggccatttgtacaaagcgccaaatccaacagcggcaagggtgcgaaaacggggaagctcttatccccttgccttcagtgcacatttagagacttgagggttcataatgaccttacaaacccgtcttgggcttggcggggcctgtcttgaactgtgacaagttcaacaagtattgcaggaccaagggacgggtcaaactcaggccttgtggggcccgacttcttttggggaaatagccttggccctgaagaccctacagcgaagatccggctatcttggcaacgggcatgcacccaactatcggagggcccattggccgcttgggtggcaggaagggccctgccggggcccggcctattggcgcccaagggccccccagttgtgacccttcgggttgccctcccggtgggaatgtacaaccattcaccgggtgcagggtgcccacggggcacgcgggccaccctggggattgtca

SEQ ID NO: 689304 - DNA, 281 bp, Homo sapiens
tatgtctgacccaccaagtatgcttaatccacaaattctttttttttttaagacaaggacttgctggtcgcccaggcgggaaggtggtgggcttggtcacagctcacgcatcctcgacctccggggcccaagcgatcctcccatctcagcctccagaatagctgggacaacaggcaggcactaccacacccacctgattttattttaattttctgtagagacagggtgtcactatgtggcccagactagtctcaaactccggggttcatgcgatcctccag

SEQ ID NO: 689305 - DNA, 137 bp, Homo sapiens
cctcccaaaatatatacaaatagtccccattccgtgggggcacctggacaatgaccccggttggagatgggcatggaggagtaggaagacccagccctatttaacttgggataaggaggacctggagtcctccaatc

SEQ ID NO: 689306 - DNA, 108 bp, Homo sapiens
agtctccatgcatgattttaaaaccttcccttcttgcaggctgcatatacttttcttataatccatgatggaaatcaaacgatggtatattttccatcatggattaaa

SEQ ID NO: 689307 - DNA, 331 bp, Homo sapiens
gagctcgctacctgtttgtccatgttgtgctgcccactgttgttatgtcccagtgttgtgctagtgtcccagtgttgtgctgtgtgtcccagtgttgtgcctggtcccagtgtatgtgcttggtcccagtgatacttgtgtgagtgagtgatgagtgggctcaaatgtgcaatgatcatgcgagtgcggacaacgaagaatgtatctttgacaatatgtcagagagtgtcatactctgtggcatggactgccaaacaccttgtgcctgatgaagtgactgacgttttgaagcaccaaggagtgaatgtgatgcttgtgagcagtgttgttg

SEQ ID NO: 689308 - DNA, 1477 bp, Homo sapiens
  misc_feature (1353)..(1353): n is a, c, g, or t
tgtcctccgccagcggaagccccgcggggtggattatacacgcttcttgcggttgttatctgccgtaggtgcccgctcgggtgcgcctgagtgaccacgttgtgtcccacccaccgagggaacccctggtcttgtggccccctagaggccgtcatatttttaaggggtgacaacagctgatataggaagaacacaggttgttgacccccacaaaaaaacgcaccgggcgttgggtgtaccgccggttgtcccccgggaatgttttccccccggcgaaattattctccgtttggacggcgcccacaccggcgcttctcccggggtttgtgggaaacaccaatttgccgcgccctgttttccgggttcgcagtctgtccaaccgcgattgtgtgccccccatgaggccccccactgttaatattttcccgcccgtttatatgggccccccctcacgggttcccccccggaatgttgtctcgcccgccgcaatgacccccaattaccgtggtgttgccccggggacacctgttggtggcgtaccacacacacgaggggcttgtggttggtctcggggccgtacccgctagaactgccctatttccgaggggccacccccaaattgggggccgccgttttttggtggacccgcagaaaattgaagagggggctcttatccgctcgcgaaagaagggtctttcactttcggaacccataatttgggtgaaaatctcttgtggggagagacacacccttatagtccgtgatatgtcggcatagctcccatatggccgcacacatgggcctagaagactttcttttgggcgttcacacacggaagagaaaaggagattttgagatccccccacagagccttgtttgtgtcacacaggtatacgttgcgcgcgcccctcgggtacgcacaaaggaggtcacacaccttggggggcatatacacacacagagaaaatttcctcgcacagatgtccccccacatttcggagagttttttggaattcggggccccaagattggcacagttgagtcgagagtatatataaaggggagatattgcctctgccacaccccctgcccttctgctcttcccacagagagaccaccgctcaccccttatacacacgtgcctataaaccacggctgctcgacacggggttttgccggcacggaccctccacggcacaagccccacggaagcccacgcacaccaccacgtcttcccacacaccacgctcacaaccacccacgggatttaaactcggattctgaaagagtctgcacgcccttaactccgtacccactgagtcaccacggcctttggagcaccttttaacttcnctgagaagaactggagctaagagaatgtaaaatggacacgttcttgaatggggttgagaaccctttctggggagccagatgaccctctctttgcaccatagataaaactccttatatgaatata

SEQ ID NO: 689309 - DNA, 936 bp, Homo sapiens
  misc_feature (935)..(935): n is a, c, g, or t
aaagatatctgctcctaaatagtgatgtggcctgtgtcagctcgtttcaatgtttctgtgagctccagcttgaccttatctgtgtggtaaagagaatatgagactatgtattggctctctttcagataatcagtctctataaatgtatgcgaactcagaatgttcccatgggttgatttgcaccggatagttctggtcccatcttcatgcaatcaacgtgtggttgcatctaaagatcagaatttactgaatgtgcatatcgttttagacgttagttagagatggttagtcacagaattcgtttcaattgctgagatttccaatatattgcaaccatcgtagaggaccattcttgagatataccactatgagcacatgatagcgtaatgcggagggtagcagagagtagatagaggtgaatttgacaggtacagtctgtcgtcggcaaaaagagctaatatggtctgagtttaaaaatataatttcaatgtcttttgcatggaaatacaggtccaatccagtagaagcagtaagggaggaaacatttccaaatatttcatgaggcactgtggaattgaatgtgtcaattaccgtaaacttgtaacctttcccgtcgacataacagtaggccttcactgttgtcatcctaagctaaaattatggacgagtgtgctatcactgtctggaagtaccctcacgacgcttgaagcacttggccagaaaggcgacgtggtcactccaaattgggggcatggcgcctcacatggattggccatggtatgtcctcaaaggctggagaaccagggaatttacaataacaaggcaaactggctgcggcccgcacacatatgaggggcgcttctacaaggtgccgacgcaggcacagctcacactagagcaaaacgcgaggtgcaactgtgagcgcacttatttgnc

SEQ ID NO: 689310 - DNA, 200 bp, Homo sapiens
  misc_feature (2)..(2): n is a, c, g, or t
  misc_feature (5)..(5): n is a, c, g, or t
  misc_feature (7)..(7): n is a, c, g, or t
  misc_feature (22)..(22): n is a, c, g, or t
  misc_feature (25)..(26): n is a, c, g, or t
  misc_feature (30)..(30): n is a, c, g, or t
  misc_feature (35)..(35): n is a, c, g, or t
  misc_feature (40)..(40): n is a, c, g, or t
  misc_feature (45)..(45): n is a, c, g, or t
  misc_feature (52)..(52): n is a, c, g, or t
  misc_feature (54)..(54): n is a, c, g, or t
  misc_feature (59)..(59): n is a, c, g, or t
  misc_feature (77)..(77): n is a, c, g, or t
  misc_feature (80)..(80): n is a, c, g, or t
  misc_feature (82)..(83): n is a, c, g, or t
  misc_feature (90)..(90): n is a, c, g, or t
  misc_feature (119)..(119): n is a, c, g, or t
  misc_feature (145)..(146): n is a, c, g, or t
  misc_feature (155)..(155): n is a, c, g, or t
  misc_feature (159)..(160): n is a, c, g, or t
  misc_feature (162)..(162): n is a, c, g, or t
  misc_feature (168)..(168): n is a, c, g, or t
  misc_feature (171)..(172): n is a, c, g, or t
  misc_feature (193)..(193): n is a, c, g, or t
tntancnacaggcttccacggnctnnacgncattnttggntgaantttcctnantatgntgcttcatccgcgaagcnaananngcaacantacatccaaacatcactttggcttcgaanccgaccgcctgataaagagcattttnnaaatgtggncttnncncatccnctnnatgtccccatctattgatganggtcttg

SEQ ID NO: 689311 - DNA, 464 bp, Homo sapiens
ttcgatgtgggactcagagtgggactatggctgcggagtggaggattacgacgcggcagatgacgtgcaggtctccaagacagctggagctgcgtgtggcttatctggaccccctggagctcagtgagggggaaggtgctttccttacctctaaagagcagtgcagtcgtgaactgctccgggcatgaggctgccaaccctgtcctatgctgtagcaaggactccactcccgtgggcgatggccactatgctgtcgctcagttctatcatcttcgattccaatggcacctacgtatgtgcaggctctctgccgacagtcgcggtcctcagccgtgaccagaagttcacgctgctggtccaaggctcgcctgaggtacagacagcgtgaacatagagcccaaggcagatggcagctggagggaaggagacgaagtcagactcatctgctctgaccgtgggcttcc

SEQ ID NO: 689312 - DNA, 297 bp, Homo sapiens
taattctgtaaaataaaactcaaatttaacaggtttatcaataacatcatcaaaccttaaaacaatatataaggatatgatcagtgaaaacaagcagtgaatggggagctgaaacactgattctagctctcaggactaaaattacctgttaaccttgggtgaacccattaaacctgagccctcagtttcctcaggtgtaaaactcaggatacacccgttcagcaaggattctgtgagagcatccacctacaacagtgattcccgcaggcccagggctggaaccgtgctaatctcaat

SEQ ID NO: 689313 - DNA, 129 bp, Homo sapiens
aagaagtcaccacagacccactggtgcattatctgtggtggagctgggcagtgtatgagtggagggcaggctaggtcccactgttgtcttgcatgtcctccccagcaactccgagtcttcttctcgaaa

SEQ ID NO: 689314 - DNA, 679 bp, Homo sapiens
agcgtgtgtgtgtgtatatatatataagtgtgtgtgtgtgtgtgtgtgtatgtatatatataatttttttttttggagatggagtctcactctgtccctaggctgcaagggcgtgttcttggctcactgcaacctctgcctccgtgggttcaagggattctcctgcctcagcctcccaagtagctgggattacaggcgcccgccaccacacctggataatttgggtgttttcagtagagacgggggtttcgccatgttggccaggctggtctcaaactcctgatgtcagatccgcccttctgggcctcccaaagtgcttagattacaggcgtgagccaccatgcctggcctatatgtctagattttatcattccctttgcgtggccttttttttttttttttttgggggaaagatgtaaaatgttccacggttcccagagagaatccagagggtgtttttttttacaaaggggtcccggggttctactgggggctcctaaaagaagggtttcccccgggatattcctatattaagaacggtttcacaggaggtggtcgcgctttatagaaattaacaaaggcggggtcaactttttcctaatttgcggaggagggggttccccactcgtgtgggccccaggggcgggagcgccagggggggcaccggggcccccccaaa

SEQ ID NO: 689315 - DNA, 715 bp, Homo sapiens
tcattctccagatttatgaacattttttcttgagcaattggtaaagtatacttttgtaaacaaaaattgaacacatttccttttgctctctatctgagtgccccagaattgggaatctattcatgagtattcactatgtttatggtaataaagctatttgcacaagtccaaaaaaaaaaaaaaaaaaaagaacaagaacaaaagtgtgtggcggcgcgcgacactgcggacaccacggagaaaaagactctttctgagaacaactggcgatggaggcgacgcagggcgaccccacagaggagagcaagcggaacaccggtcggcccacaagcgggagtcccacagggagaaaaacgcgggcccaaagcaaaacagcgcgcggtggaatctttgcccaccaaaacagaaaaaaccgcgcgcgggagagaacacaagggaagcggcttcaaggacacaacaaactccaagaagcgagggaacatcccagaggagacaccaaaacaaaggggggaactataactctcaaaacagcgagagaaggaaaaaaacaacagaaaaaaagatcgcaaagaaaaaacaacaaagcaatccagaaaagccccacaacacagaaggggcaccccaaacccaccacaagaaaaacacacacaccacacgagaccaacaaaccacacccaacacagaccaacaacacacacgccaacaaacaacaaga

SEQ ID NO: 689316 - DNA, 372 bp, Homo sapiens
cgcaatttgcaggatccagaagagcgtgtctttttatatccattcctgtgcatgtcattggtctctcccaccgatttcattactggtgccacggcatggtcatggatctgggtagtccggagaacaaagggagggaagacagcctggtagtgaataagatgcttaccacagctttctcatgggaaatacgtgatagaccctgttcatcgtttttcgtattcctgtacgaatcagaacggggagatagaaacatgaactgaaaagtctggcaatgacaagaggttccagggtcttaaaaagatactttatgtggttgaagatgaaatcattcctaaattaacctttttttaaaaaacaaaccaaggtatctcg

SEQ ID NO: 689317 - DNA, 353 bp, Homo sapiens
tagattcaacagcgaggggcctataatatcagcagtttcatacaaatcgggcagaagtaaaggcagatgtagctctgagccaaatataaacgctgagagcgacagcgagacaggtaccattcaaaggccagcctctaccgactaagcaaactctgaaaactctaaatctaacctaggccgggtgccgtggctcttgcctgtaatcccggtgctttgggagggccgatgcgggaagaatgcatgaggccagaagtttgagaccagcctgggcaagatagcgagaacctgtctcagcaaaaaataaaaaaattagccgggcatggtggtgtgtacctgcagtcccagttacttgg

SEQ ID NO: 689318 - DNA, 426 bp, Homo sapiens
tacggtggctcacgcctgtaatcccagaattttgggaggccgaggcgggtggataacgaggtcaggagatcgagatcatcctggccaacagggtgaaacctggtctctactaaaatacaaaaaattagccaggcgcagtggcacgcactggtagttccagctactccagaggctgaggcaggagaaccgcccgaacccgggaggcggaggttgcagtgagccaagatcacgccaccgcactccagcatgggcaacaaagcaaaactccgtctcaaaaaaacgaaaacaaaaactcgaccaccctccacctagaatattttagtttttttttcgagacggagtcttgctgtgttgcccagactggagtgcagtggagcaatctcagctcactgcacgccagcctgggccacgagtgatctccgtctc

SEQ ID NO: 689319 - DNA, 246 bp, Homo sapiens
  misc_feature (209)..(209): n is a, c, g, or t
gtggaatttcaccttatgaatgtgtgagtcaatactccttaataaactctccttcatatatacagctatcctattagtcagggttatctagagggacagaactaataggatagctgtatatatgaaggagagtttattaaggagtattgatcaagatataaggtaaatccaagtgaggggccatcttgcaaagcctgaagttttccaanagggaagcctcagtgtgaaggttccccaaaaaccttc

SEQ ID NO: 689320 - DNA, 119 bp, Homo sapiens
  misc_feature (117)..(117): n is a, c, g, or t
atgcttagagaggagcagtctctttggtaaactcaggcagttatgatgaacagaaaatcgccgactgatactgtaatagagcatagacctaaggccactccgtagctggcatcaatnca

SEQ ID NO: 689321 - DNA, 2504 bp, Homo sapiens
cggcttcaagaggcgcaggctgctgcggtcggtcgggaaagccccgtgggccgctggcacctcctccagtggtccccaggcgcagcagcaccgagggggcggccccaggcgcagtctgcatggtggaggcccgcctgtcggatcccccggggcgagccgctcccccgtgacgtgggggaggagcgccggggagggggcgggacagagctgggtccccctgctcctcctcgaccccgcaatggctatcagtccccacctggcacctggtgggtgtggcgtggggccaagaggagaaatagctgtagctgtagggggaggcgggggaggcttcaaacatccggccttcaagaggcgcaggcgggtgaattcggactgtgactctgtgttaccttccaacttcctcctggggggcaatatctttgatcccctgaacctgaatagcctcctggatgaggaagtgagccgcactctcaacgcggagacccctaagtcatccccccttccggccaaagggcgagatccggtggagatcctcatccccaaagatattactgacccgctcagtctcaatacttgcactgatgagggccatgtagttcttgcttcgccactcaagactggtcggaagcggcatagacaccggggacagcaccaccagcagcagcaggcagccggagggagtgagagccaccccgtgccgcccacagcccctctcacccccttactccacggggagggcgcctcacagcagccgcggcacaggggccagaaccgggatgccccccaaccctatgaactcaacacagccatcaactgcagggatgaagtggtgtctccccttccatctgctctgcagggtccctcaggctccctatcagcccctccagctgcctcagttatctctgcacccccatcttcctcctcccgacatcgcaaacgtcgcaggacttccagcaagtcggaggcaggggctaggggtggaggccagggttccaaggaaaagggccgagggagttggggaggccgccaccaccaccaccacccactgcctgcagcaggcttcaaaaagcaacagcgcaagttccagtatgggaattattgcaaatactatgggtaccgcaatccttcctgtgaggatgggcgccttcgggtgttgaagcctgagtggtttcggggccgggacgtcctagatctgggctgcaatgtgggccatctgaccctgagcattgcctgcaagtggggcccgtcccgcatggtgggcctggatatcgattcccggctcatccattctgcccgccaaaacatccgacactacctttccgaggagctgcgtctcccaccccagactttggaaggggacccgggggcagagggtgaggaagggaccaccaccgttcgaaagaggagctgcttcccagcctcgctgactgccagccggggtcccatcgctgccccccaagtgcccttggatggagcggacacatcagtcttccccaacaatgttgtcttcgtcacgggtaattatgtgctggatcgagatgacctggtggaggcccaaacacctgagtatgatgtggtgctctgcctcagcctcaccaagtgggtgcatctgaactggggagacgagggcctgaagcgcatgtttcgccggatctaccggcacctacgccctgggggcatcctggtcctagagccccaaccctggtcgtcgtatggcaagagaaagactcttacagaaacgatctacaagaactactaccgaatccaattgaagccagagcagttcagttcctacctgacatccccagacgtgggcttctccagctatgagcttgtggccacaccccacaacacctctaaaggcttccagcgtcctgtgtacctgttccacaaggcccgatcccccagccactaagtggccccctaaacagaaagtgtgaagaggctgccctcgctgctcataaggacctgggggaagaggaaagtgtcccaaggtctttcctttctgactccaaaaatagtttcctttcttggatctgcaaagaaagcttttcttccgtcgctgcctcagcctcctccctatgcctctggcacctgcgcagcaaggctggctgtgctggagtcaccatcatcttcctctcccccagcctcccaggctggatggcatggactgtttgctgacctctgttctcttagggcatgggaggtgggaggatatcaaattctctagccctttcctcctattctctagcccttctattctcccaaggagagagattcccatttctcctcggccattgtacctagctcttgtccctagctgcatttcagtggaccatggatagagggactgagggttagacggagaagactggcagggaggcacgcaggtactgtgaaaatccttccctttgccctcccccagtgggagagggggttgggttttcaatgtgagaacagcacaataaacttgatgtctagggcagtggcccccaaaaaaaaaa

SEQ ID NO: 689322 - DNA, 251 bp, Homo sapiens
tcaggtcactctagagatcccctaccgttcttataaccaacaaattaatagagataaaacataagaatgtgaattggtatttctggaggtacggattggtctctggaccactttactagaagtgcctagttatgctttttgcacattcatactcctcggccctaaatcagacttaacaagtcttctgtcgagcatcattagcaaccctcttagttgtcttaaacactgccttgcatcctatggtcatagaa

SEQ ID NO: 689323 - DNA, 157 bp, Homo sapiens
cagacacagactggacatgggacgccagaggcatgcagagggggcagacacaccagagactcggggcatgggcatggagctctgcccgctggcgtgcccccacctccaactactcgcccctgggacttgcacggcagagactgtggcggccagagca

SEQ ID NO: 689324 - DNA, 506 bp, Homo sapiens
  misc_feature (20)..(20): n is a, c, g, or t
  misc_feature (90)..(90): n is a, c, g, or t
  misc_feature (93)..(93): n is a, c, g, or t
  misc_feature (103)..(103): n is a, c, g, or t
  misc_feature (117)..(117): n is a, c, g, or t
  misc_feature (140)..(140): n is a, c, g, or t
  misc_feature (159)..(159): n is a, c, g, or t
  misc_feature (175)..(175): n is a, c, g, or t
  misc_feature (199)..(199): n is a, c, g, or t
  misc_feature (220)..(220): n is a, c, g, or t
  misc_feature (232)..(232): n is a, c, g, or t
  misc_feature (236)..(236): n is a, c, g, or t
  misc_feature (336)..(336): n is a, c, g, or t
  misc_feature (500)..(500): n is a, c, g, or t
tttaaattggtaagagaggngggacagagtggtagaagaaggggaagagaagtggtaatttaaagtgatttggtagagaaagtgcgtggnatnggtttttggntggttttggttggnaggaacccatttaagctccaggngaggggagagatgagatantgggatgggggtgggngtttttagaagggacccagggganattgggtggagaaatggggtngttgattttgcnaganaatgtgcttgctgttggtaggttggcctgagaatcccaggggcagcttcagacattgtggggactcagacccaccctctcagtctgcagctgtggcagtnagaggtttggcaatgtagccatggtcacctggacatggcccaggggcagggtccaaacaagaaccctggtgcctcccgcccctcctgctgagccatggtgccacctaagccatctagaaaggctcaactttttgggagacatctgcggcagggccactggaggnaggaga

SEQ ID NO: 689325 - DNA, 491 bp, Homo sapiens
tggcttgcgcatctactgtgtttcctcctgcactgttgtctatggttaatcacacaatagatctcttctactcatctcttcatagatacttcctttataatttacacaacatttagtaaaagacacattactaagttaagtacctgtgcttaatgtgtatacatcgtttacgcattattaactgtaatagtagcaccgtatcttgtatattcacttaaatcaaaaactgagctatgagacctggttccggggcgcaaagcggacaatatgcaaagcaggaagttgcagttgttggcgcgccaggatcttgtgtcccaaatgaaactactgagtacaaatgctgacagacaatacttacaagaggctcttcagcaccttcttctgtgaaaaaccagtcatgctaagatttaaaaaaggtgagaagagaaattaaacaagcctttaaatatactgagatcttggaggatagtatagaaaaagggtaattttct

SEQ ID NO: 689326 - DNA, 1003 bp, Homo sapiens
gatgccctgacaggagcgatagctgcagttgggtgacacggcgtcctggctttgccgcgtctgggtgttagtacgccgataattagagacgcacctatcgtgcgagcgtccatcatctgccatgccgcgctttatagtaatcgaagaactgaccgcagcggtaagtatcttcgggtagtcgccgcgcgcatcgatccacggctggcgtagttttgccagcccttcgctgcacgttacagtggccttctgtctgcgagtcaccgatacgggccggaggtgtctggttgaccggaatcgcttcgttcttcttcggtactgcggctgtgctttgctaccgccaggtttatcgtcgggctaatctggatctcacgcatcggctcagcgcgactgccggggctgtgtgccagtgatataagatgcgtttcgaagttgggaaaggcctgttgcccttccagggggtgtcggatctagctgtcgggcccgggcgcgtctgttcgcgagcggcggtcgaagcttgtgtgtcgccgcgaccgtacgtcttcattcctaagaaaagttgcatcgcttggtggtctcgtccggaccgatctggatgcatccagagactgcctcgcctgcacggggcgatgcgatgcgaacttaggtctctgtcccttctgcggtattccctgatcaggtcccgcgtattccgaatagacggactcagtcgggtccaggcacctccgtactttgagattagactcgaaattgggcgttcagatgtgtattaagcgtcacagcctgagttaaccaggtcgtttgatgcgggctggttgagagcggagaaacgcttgttttccgaaaaggggtccaggctcgcgttttgctaactccgtaacccgggatatcacgcctgcgctcacagagcctatcaatctggttgttccttagcaaaccggggcgaaagcgccctctataaacacaaggtggaggcgcccacattgtaaggaacctaccattgatt

SEQ ID NO: 689327 - DNA, 441 bp, Homo sapiens
tcgccccgggttgtttttaaaaaaaagaattttaaagtcccaccctttcaaatttaaacctttttgattttttaaaaaggggtttgtttttaaaaaaaatttcttttaaactttttccagaattggggaaaatgggtttttcaaaacttcaaacgtcaatccgtttttgcttagggtgggtctttgaaacccctttttgttccctcgtaaagggcccttttgttagaagtaacccattttttgcccgaggaaaaatagatctcccacagaaccattcccaaactaaagataaaaacctttggggctggggtgtatgttttattaagaaaatatactgtttaaaaaaaagggcctttccattttatagccggggggggggtaataaaaaaaccctggctttagtgcaacacttgtgtaaaaacctatgggggaacatatatg

SEQ ID NO: 689328 - DNA, 881 bp, Homo sapiens
  misc_feature (1)..(1): n is a, c, g, or t
nggttgctgaggtggtcccccgttgccgcggaggttgtgtttcgcgggggctggggcgccgtaagtgtgggccttcgtgcgtccccccgtcagtgtggcgctgggtgctctccaggagggcgcgtcccgccaatttcctctttgtggacgccgggggcaacaagcaactgttcgaccctcctgggtagtcatgcgtagtgtcagggaggacgggttctccgcgaaaggctagtcataggtggtgcgcccatctcgccctgtcacggtgtccgtgagacaagagatgtccccaccgtgttttgtcgacgaaagcaggtggaggccccactttccagcgcgatgagccgcacgctgcgccgcataggatgggatcggccggtcgtggtggcactcacacaagtcctcctcccgggctccacgcaatagagtgccacgcttgagttagtgctcgatctaaatgtgagtgcaaggttttgacctccgcgtctgtgttaacgagcagaagtttgttgccagaagcgcgcaagtggagacagatcgaagggaaccccctcgacttgttcaccacagatggcgtgtgcataattaggacttcttgcttccacgattaccatgagccccacgtcggcgtcttacaccccccccttttaaaagcctctcttctctcctccctccttgtggaaatagaaatgaacagacacatcacatcatctcagagcagtttcttacgctcgacatctgctcttgtgtcagtgaggcctgaaactccaccaccccctatgtatgagaaataaaagatttatcttctatcttctcaattgtccccctttttcttttggggtccacagaaagaaaaaaagggaaccaacccacatagacaa

SEQ ID NO: 689329 - DNA, 289 bp, Homo sapiens
ccagaggcaccaaggaggccagaggcaccaaggaggatccaggattattttattttatgtttacgatggggttttactcttgttgcgtaggctggagtgcaatggcaccatctcggctcaccgcaacctctgcctccagggttcaagcaattgtcctgcctcagcctcccaagttgctgagattacaagcgcctgccatcacactcggccaatttcgtatttttagtagagacgggtttcttccatgttgatcagactggtcttgaactccctccttggtgcgtctggg

SEQ ID NO: 689330 - DNA, 481 bp, Homo sapiens
  misc_feature (6)..(6): n is a, c, g, or t
  misc_feature (121)..(121): n is a, c, g, or t
  misc_feature (125)..(125): n is a, c, g, or t
  misc_feature (186)..(186): n is a, c, g, or t
  misc_feature (200)..(200): n is a, c, g, or t
  misc_feature (207)..(207): n is a, c, g, or t
  misc_feature (321)..(321): n is a, c, g, or t
  misc_feature (328)..(328): n is a, c, g, or t
  misc_feature (339)..(339): n is a, c, g, or t
  misc_feature (344)..(344): n is a, c, g, or t
  misc_feature (376)..(376): n is a, c, g, or t
  misc_feature (387)..(387): n is a, c, g, or t
  misc_feature (400)..(400): n is a, c, g, or t
  misc_feature (409)..(409): n is a, c, g, or t
  misc_feature (455)..(455): n is a, c, g, or t
tggcgntacctattcttagaagcctgttgaatatcagtcttgttaacaagtgacactgttgtacattctcctgctggttctcactggcacaagacagcttcatagacacatacatattgcncaanattctatgacaggtttccactggaaaaggtttccacctggtctctgctgtttctctacagntaggggcttaagtncctctgngtcactgttcattgttacccagtgtgcttcctcttgtgaagggccactgtatgcctatgccctttacttcattggcatagagctcgcgcctggcatcataatggcgcttggtcntagcgcnaagagctcatnttaantatggtcaggcaatatgcgtgcaggctactgngccccctctcncattttgggcaanccaaaactntggagaccgttttacaaaaaaattcattcaaaggaacatcaaaaantggagtatgttcgtttctttttttgt

SEQ ID NO: 689331 - DNA, 362 bp, Homo sapiens
  misc_feature (11)..(11): n is a, c, g, or t
  misc_feature (331)..(331): n is a, c, g, or t
gtacaggaganaatggcataggaagccgagaattagttccacagacccagttctgatgaattccagcccaaaagaaccaccctgacaatttttaggttctaaaagtctcaattattagacagtattgcacagctattgaaggaaaacaattcactcattctatagggcggcttagttgtcttgggcaaaagctgtataatggtaccacaaaaacagttacatggtggagttccaattacacagaaagaaatccattcagtaaatttccaaagttgcagactgtttaggcccacccaggattccaccagggctgggacagcccccaccaggnttattactgggatatgtgggacacagggctt

SEQ ID NO: 689332 - DNA, 1663 bp, Homo sapiens
  misc_feature (2)..(2): n is a, c, g, or t
  misc_feature (1181)..(1181): n is a, c, g, or t
  misc_feature (1326)..(1326): n is a, c, g, or t
  misc_feature (1401)..(1401): n is a, c, g, or t
tncggcggctgtccacggcgagtgtctgttgtgctgtcctatgtgcggtgtcttctgttggtcttcatgctgggtcttgttgtctcctgtctctatgtagtcgttctcttgttccggttctctgtgattgtcgtgtctgatgcaatgcacttgtgtcgtgcgttgttagcagatagctatgaccgtgttgtgtgtgaggtcaatccaccacccccacgtttgtttgttttttgtgggcccacgagagggtgcctctttttgatggttttgtactattccccgtgtgggcggcaatttgcctcccctttatcgtggcccgcttggcgaaagagggggggatccctccccattggtgtgttggtgctttttcttcctccttgaggagactcccttgttgccgcgtttacgtgtttattccctctgtgtgataatcccatccctctttggtgatttctcggagagaatatacaggggtgtttgtgagatgtaagtggagaaaccacccccacagagaggggggacacccgagattgttgtggttgtataacgccaccaatggtggggaaatttatagtaaaaattggagagagtgattacttcccccgccagcggttgatgttccacattgtgttggggaagtagtgtttttgaaggacctttatttgtgaaaagaaccctcccttttgttcccttttggtgatttcaccgcctttctttaaaaatttaggggttaaatctatataatgttccccccccccctctcttggcgttgcctttttcgtgttgtcccccctggcccccctccccccacgtggagttataaacggaaaatatttggattaaaaatgttgttttctcgctttgtggcccacatgtgccaatttccgtctaaatgtctttagaaaactataggatcctatatagttaattataggcccacttgtggtgtaaccctcgaaacactctggctaaaacgcgtttttgtctacacccacgctgggttttccacagattttataaaaggtcgggctatagttggtgtttataagaagacacacctcgtttcacaaggggagtataaggcccctccttctgggtgacactctgtgggctctatattttgacaggagaatccacgcttggtatgggagagccacagtgagaaagtaggatttcctatngggagagtaccacttgttctgcaagatgatcccacccactctgtgtctcgagagaattcactataaataaagttgtttatatatccacgcgttttctaaacccgctctgtgggctggtaacacacacaggcacgacccacgaganaatgccacatctggttacacacatataaatgaggagaaaaagccttatttatatggctgagatggaggcacatgnctttttataaatcccttttataaaaccaccgtcacccactatttaaacttgcacatttgaggcttgtgtgttttctttgttaaatgtgtagagttttacctctttctcgagaattgccacgctgtgtaacttgggcttaaactccagagaccacgcttttctttctggagttcctctaatttgaatttaatttaaccctaagttatattttaatattgccaatattaccataagtgggtaaaaagtcaaattcctcttttga

SEQ ID NO: 689333 - DNA, 861 bp, Homo sapiens
tgggggtgtggctaatgacatgtgtgagctctagatggtgtgagaccaccccaaagccaagaaatggctacagccgtgtgaaccagaggaccagtgatctttggtgaagaagagggaattctgatggtgaaactggaagatgatttcacctgtcggccagagtctgtcttacagagggatgaccctggtgcttggaaacctcccacgcagaacttcctgacgcttcctgctaccaggaggcagcaatgccctagatgaaggctctcatcagactccgagaactttgtcaaccatgtggcttgagaccatgagaggcggacaaatggagcatgatcctagagctgcttgtgctggaacaatttcttacctgtcactacctggagaactacatgagcttgtggttgcgtggtgccaaacgagccagaacatgtgggtgaggaggcagtgaccgctggtggatgggtatgccgaaatcaagccagtgatgaccaacttgcgtgtggggttgacttgtcccaatgttcacggccagtgaaggtcctgtccagagtgatgactgtgtgcaattttaagagaagttggaaagaccttgaagattcaaccgttaactgaaggcttgtcaggtgattactttgttggcaaaggtttcgaaacccccactgaaggccaagactttccttgatgtgacacaccaacgactacgaagccacaagacatctttggggggtgcagcctggtcaagtatgcatatagattcccacacccatggacaagcatcgagcttaccatgaatccttggagctgaagagccgatgtcccagttgctcggaggaagccagagcttacctgcagatgatgatg

SEQ ID NO: 689334 - DNA, 416 bp, Homo sapiens
cgtcgacaatgtgaatttggaaaaacatctttgaattatttgggtcatatagtagggggtggtgaattgaagatagatccctctaaggtggaaatcattgtgaactggcctaaacccaaatctgctacagaagtgagaagcttctttggagcagcgcaatattggaggaagttcatttctagctttttcttaattgcagctcccttacatgctttaacaggattgaacaaggtgtttcagtggggaggcaaacagaaaaaaaccttcgacaccttgaaagaaaatattagtacaacacctgtactagcactatctgatcttcaaagaccattcaagatccaaacggatgccaatgactatgccatgggagcagtgttgacacagcatgataaacccatatgttataatgtcgacgc

SEQ ID NO: 689335 - DNA, 348 bp, Homo sapiens
cgtgccattgtgcaaattcatcacatgctcagggggaggtcataaacaggcactcttgtacatagacaaacatctgctaacactgagttttcaaaagcagcacgtttttaaagataccgaacagctcggacatcttatcttgacaaactctattttatttctattattttttgagatggagtcctgctccattgaccaggctggagtgcagtggcacgatcttggcccaccacaaaccccggctcctgggctcaagaaattatcttggctcaggctccagagtagttgggattacaggcgtgtcccaccatggcacgtggatccacaatggcacgtggctgggtaccg

SEQ ID NO: 689336 - DNA, 883 bp, Homo sapiens
accctttcctgccccacttagcgtggccgcgagcctcggtgagccggccgtattcccgtctctcgcttatgtggggcacatggcgcaggtatcggcccggcgactccaagccttctggtgcgcgggcgcgtctgggatacgggcccgggaggcgccgcctcgtcgtgtccgcgccggtgcctctcagtgaacagcgaaccggagaagcaggcgccggagagttgggctcagtgcagagctcgggccggggcccatgcccgtgcgcccctgcaggccggcgccatggcctccgggagtgtggccgagtgcctgcagcaggaggaccacctggcccggtgtgcctgcagtacttcgcagagcccatgatgctcgactgccggccataacatctgtgtgcgcgtgcctcgcccgtgctgggggcaccggtagagactaacgtgtcgtgcccgcagatgccgggaagaaccttcccgcagaaggcaacatgcggcccaaccgggtacctggccgaacgtgacccaactggtaaaagcaagttgcggcaaccgagcaggcctgtcggggcccgggcggcgaaatggggctgtttggaaagaaagaaaccggtgagcccctgaaagctgtaacggccgagggaggaccaggatgccccatttggcgtgtgtgtgcgaaccggtcccggggagcaccgggccaccgttgtgttggccgtacgaagaaggccggtggacgggcttcaacgggcatttcagagcagctcgggccatttaccaagagtggcggtttcaaagaaacttcggccccgtgggacactgcgaggggactttgagcctacccatggaagggacaatgtgtggctccaccagttttcctaaagccattc

SEQ ID NO: 689337 - DNA, 289 bp, Homo sapiens
  misc_feature (9)..(9): n is a, c, g, or t
caggtctgncacatgctaaacaggaagatggaacatcgagataaaacttccccacagaatgtggcatgtgacacttccctgagcagtgaatggacaggtgagcagttccacaccagcgcagaggcagagagcccgatgtcccattctgctccgtgccttgctagaagattggaaaaaggtcaaaccacatgcctgtgatgaaagtgcgaactgtttagaaatactggtagtagaaccaggagtaagaaaagctttaccagcttttactacaaatggatgaaagacatca

SEQ ID NO: 689338 - DNA, 313 bp, Homo sapiens
cacagatgtatggtaagttctcacttaatgttcaaaatagggtgttgaaaactgcatctttaaccgaaacaatgctgatatatgccatttaaacaacagacctagcagcacccttgtgacacaatggccaggctaggctggaactcctggccttaagtgatctaccaccttggcataccaatgtgctgacattacaggtgtgagccaccatgcctatcctggctaatgtgtgttttttaaaatttgtttttacagatggggacttgccatgttgcctgtgctgggcttgaacacttgggctcaagtgatctac

SEQ ID NO: 689339 - DNA, 282 bp, Homo sapiens
ggccgccctatttttattatttatttaagtaaagatggggtttaaacatatgggtcacgtcacgtggggtcttgaactccgtggaccttggtgatccaccccgcctgggcctcccaaaggtgctgggattacaggtgtgagccaccggtgcccggccaagtaaaagtgtttttaaaaagggtaatggtggattatctcataaaaaataagggggtcacagtctatattaaaactgtttaaagcacacatcttatggaataaagagatgagaagcttaagttg

SEQ ID NO: 689340 - DNA, 231 bp, Homo sapiens
  misc_feature (6)..(6): n is a, c, g, or t
  misc_feature (18)..(18): n is a, c, g, or t
  misc_feature (38)..(38): n is a, c, g, or t
  misc_feature (72)..(73): n is a, c, g, or t
  misc_feature (103)..(105): n is a, c, g, or t
  misc_feature (110)..(110): n is a, c, g, or t
  misc_feature (149)..(149): n is a, c, g, or t
  misc_feature (155)..(155): n is a, c, g, or t
  misc_feature (164)..(164): n is a, c, g, or t
  misc_feature (169)..(169): n is a, c, g, or t
  misc_feature (183)..(183): n is a, c, g, or t
  misc_feature (187)..(187): n is a, c, g, or t
  misc_feature (193)..(193): n is a, c, g, or t
  misc_feature (203)..(203): n is a, c, g, or t
ccctcnctgccccctcanagctgacattctggggtggncctttcattttgccacgtactaacgttctgcacnnaagacaggctagactcttgtctagattgtnnnaaagnaacttttcaaattggttacattaattttagtttattttnacaagnaaaaatggnttttnatttagattctttntgtnccaggntgttgatctnaaaatagttgcatttaaagagttttttt

SEQ ID NO: 689341 - DNA, 445 bp, Homo sapiens
ccccatctctaaaaataaattgtacaacatctaacttcaatgcccaatcttatagaacaaaagtaaaatgtctttatgtaagaccccattatatttacagttcccaacagacccaccaactcttatatacccttatataacttgtttagaatttagccatgtgcatttttaaactgtgtttgtcaacattaagcctcagtacagtctccaaattatatgccaccagaaatgaaattcagcaaaggacaggattgtttttaacatacgcaagccagcctggccagcatggtgaaaccttgtctctactaaaaatgcaaaaattagctgggcgtggtggtgggcacctgtaatcccagctacttgggtggctgaggcacaagaatcgcttcaacctggaagccgaaggttgcagtgggctgagattgtgccactgcactccagcctg

SEQ ID NO: 689342 - DNA, 516 bp, Homo sapiens
  misc_feature (44)..(44): n is a, c, g, or t
  misc_feature (57)..(57): n is a, c, g, or t
  misc_feature (77)..(77): n is a, c, g, or t
  misc_feature (89)..(89): n is a, c, g, or t
  misc_feature (141)..(141): n is a, c, g, or t
  misc_feature (183)..(183): n is a, c, g, or t
  misc_feature (191)..(191): n is a, c, g, or t
  misc_feature (322)..(322): n is a, c, g, or t
  misc_feature (345)..(345): n is a, c, g, or t
  misc_feature (369)..(369): n is a, c, g, or t
  misc_feature (379)..(379): n is a, c, g, or t
  misc_feature (408)..(408): n is a, c, g, or t
  misc_feature (433)..(433): n is a, c, g, or t
  misc_feature (497)..(497): n is a, c, g, or t
  misc_feature (509)..(509): n is a, c, g, or t
  misc_feature (512)..(512): n is a, c, g, or t
cccttgcgaagatctggggcctcccgggaggagagagggctttntccttgaaacccnggacgccaggggcgctctcncaagtgggggtnctctgggacttggaacgcctcggatgggtggtgtccgggcgtcctttctccncttcttcccacttcggctggtcccgtttcctcttgcgctcantgcggacntgtctcggcgcccgttgccctctcatcgccccacgcaggatctcggcctggtcaccgggcagtgtgattcttcccgactgccgttgggacagcgaggcacacacagggctttggtctcgttggaggtactntggtctgtttgagttgctcttgntctcccgcttctcccaggcgaccnggaggtagcntttcccaggaggcacggtctccccctagngggatgggcaaatttatgttagatntgatgagaatgaccaatgaaagcatgaggaaatggttctgagtttcacttgagcagtggcgggnggggatgaacangtngcaa

SEQ ID NO: 689343 - DNA, 683 bp, Homo sapiens
  misc_feature (39)..(39): n is a, c, g, or t
  misc_feature (72)..(74): n is a, c, g, or t
  misc_feature (76)..(76): n is a, c, g, or t
  misc_feature (118)..(118): n is a, c, g, or t
  misc_feature (150)..(150): n is a, c, g, or t
  misc_feature (165)..(169): n is a, c, g, or t
  misc_feature (177)..(177): n is a, c, g, or t
  misc_feature (191)..(191): n is a, c, g, or t
  misc_feature (193)..(193): n is a, c, g, or t
  misc_feature (286)..(286): n is a, c, g, or t
  misc_feature (314)..(317): n is a, c, g, or t
  misc_feature (322)..(322): n is a, c, g, or t
  misc_feature (327)..(327): n is a, c, g, or t
  misc_feature (353)..(353): n is a, c, g, or t
  misc_feature (358)..(358): n is a, c, g, or t
  misc_feature (362)..(362): n is a, c, g, or t
  misc_feature (365)..(365): n is a, c, g, or t
  misc_feature (378)..(378): n is a, c, g, or t
  misc_feature (381)..(381): n is a, c, g, or t
  misc_feature (388)..(388): n is a, c, g, or t
  misc_feature (390)..(390): n is a, c, g, or t
  misc_feature (406)..(408): n is a, c, g, or t
  misc_feature (413)..(413): n is a, c, g, or t
  misc_feature (423)..(423): n is a, c, g, or t
  misc_feature (432)..(432): n is a, c, g, or t
  misc_feature (438)..(438): n is a, c, g, or t
  misc_feature (498)..(498): n is a, c, g, or t
  misc_feature (514)..(514): n is a, c, g, or t
  misc_feature (544)..(544): n is a, c, g, or t
  misc_feature (582)..(582): n is a, c, g, or t
  misc_feature (598)..(598): n is a, c, g, or t
  misc_feature (623)..(623): n is a, c, g, or t
  misc_feature (625)..(625): n is a, c, g, or t
  misc_feature (627)..(627): n is a, c, g, or t
tttaattaactcatcaacctctcatggcaagaatttganaaagtaaatttatactcaggttctaattttaannngnaaggaagaagttacagctcagtgcaccatgaagttgagaaanaaatggagaaacctcagccccacctctctggnacaggaaagatgatnnnnnagggagcncaggtcagcgtggnangagggtcatggtggacatgggggtggggtggtctccccacctcctcacattatgcctacacgaacacagacacatgcaggtgcctttgcaganacaaagtcagggttcttcaagtcacagnnnncaggncaggnacaactcttgcctctcagtgccacanaaggnagcngtntcacactttacangcngtgagananacatcagagccctggnnnctgtnactgcttgcngcctgagtnttactncctccttttctatctgagctcttcctcctccacatcacggcagcgaccacagctccagtnatcacagctccaaggngaactaggtcagctatgatgcccacgatgnggatggtgggctgggaagatagctcccatcttatgttnttgtgcttgggcagancctcatgctgcacatggcaggggtntntnttctcctctccagaaggcaccaccacagccgcccacttctggtaggttccatcccc

SEQ ID NO: 689344 - DNA, 355 bp, Homo sapiens
ccaatctactttttatctctatgtgtttgtctcctctgtacacttcatataaatgaaatcatacgatatgtgctcctttgttgctggcttctttaacttatgttttcaaggctcatctatgttgtcacatgtttctagtactttctttttttgctgttgctgaataatattccatagaaaggaatggataaccacattttatttatccattcatcacttgatagacattggatatctctactatttggctgctatgagcatttgcgcacatgattttgtgtagacatatataagtatatggtgtataaaatgtgtgtacatcgagtgtatattttatacatatgtatatatggga

SEQ ID NO: 689345 - DNA, 1194 bp, Homo sapiens
tccctgtggaccaaatattttttttggaaaccccacttggtggcaaccacggggctaggtgcgggaaactcagcgagtggggctccagcccaagctcacgccctcgaggggatctacttctctaaaagccggttacctaagaccaaacttttgccaacaaaatttctctctcccgtgctcgggggcggggatcggaccaggggatgggaggcaggtatgtgtggctggggacaaggtgaggcacgctatggactagagtagggcctatctaccctgcagactttgtgcccctcacaggcacctgggggagagtggcaggcagggtccgctcagggtggttctacccacactgctgtttgttggtgtcacccggggccccgagaaccacgcccttccagtaggacgggatgtccttgccccccggtgctcaaatgcggagacagaagctgaaaccgcccggggccctgtagtcgtgaagaaggtgtggaaagatctccaatccagcccccgcgcgtgacaactggtcttgggggcaactggcccacctggcccgtctggttggaaacttcagccgagcgaggttctccgtggcttcgggacgattaactctaacaggggtggagcttcgtagaaagggccaacccgagggtactgtctaggggcccgtagtaacccaagtctcttccacccaatgataatgggcccgggatgaaattctgtgtgctccaaggagagtctcccctccccacaagaatgaagccctctacaagactcggcagggtacaatggacccttggttggccttggccggaccacccatcttccaaaaggggaaggaaggccgaaagaacatttccttaaggaacggctccaccactccggggggtagaaacttcccacccccaagtggttcctcccacagaggacggtttcctacacagccgcttacagagggtgtgtcaccccacgaagtggtgcccaggtgtaaaccagcaggctttccaagggtccttcttcctccccacgggtgttttaccgccagaaggggtttgtcggcgcccgaggtgttcctcaggagaggttatacactggtcggtccagggatggttggggtccacacctccagggcggcgcccctgtgggacaccagcccctctgttgtgcactgtggcgcccaggggtgggccgtccaca

SEQ ID NO: 689346 - DNA, 129 bp, Homo sapiens
ccgttgtcatgcccactttagatgtatctaagttctcctgactgtctacccaggagagtgtggaggtcttggccctgtgccctgtcctaccaattaacgtagaataaaaacataccccactgacaacgg

SEQ ID NO: 689347 - DNA, 125 bp, Homo sapiens
gggatccagcttatcctgttgggcaaggtgctgggagtgaaggcaggtaagccatgtcaagggcctgggatccagttttccccttgcttcccaggcccttgacatggcttacctggggtaccgag

SEQ ID NO: 689348 - DNA, 98 bp, Homo sapiens
tgaaggagcggggactgttccgtggcattgaggacaaccccatggtggtgccactttgcaaccggtcgaaggacgtggtagagcctctgctgcggccg

SEQ ID NO: 689349 - DNA, 115 bp, Homo sapiens
ggccacaccaccctttgttataagagggcttctgcctaggctttggccgggccatccctcatgcctgtgtggggcccctgcagcagaggggccggggcaggtggtcttccaggcc

SEQ ID NO: 689350 - DNA, 843 bp, Homo sapiens
  misc_feature (220)..(220): n is a, c, g, or t
  misc_feature (237)..(237): n is a, c, g, or t
  misc_feature (242)..(244): n is a, c, g, or t
  misc_feature (251)..(251): n is a, c, g, or t
  misc_feature (258)..(260): n is a, c, g, or t
  misc_feature (280)..(280): n is a, c, g, or t
  misc_feature (282)..(282): n is a, c, g, or t
  misc_feature (311)..(311): n is a, c, g, or t
  misc_feature (316)..(316): n is a, c, g, or t
  misc_feature (330)..(330): n is a, c, g, or t
  misc_feature (340)..(340): n is a, c, g, or t
  misc_feature (347)..(347): n is a, c, g, or t
  misc_feature (405)..(405): n is a, c, g, or t
  misc_feature (841)..(841): n is a, c, g, or t
ccctctctcttgctggccgcacgccccggccccgcgcacctccgcccggctccgcagccgctacccgcgcttcgttgccctgtgggactccgagcgagcccggaggaaccctcctcttcttctgggggcgacttttgtttgcttgcctgtttctttctggtgacttttgcagctttccaatatccgtcttcggagcgcacgggaatccgccgagctctgngtgcaggcccttttttnttttnnngttcacnttttttnnnattttacgccagggcttttntnatttcctcccccgcccgctgacggtcctngagtngctcggggctttangccggttatncaacgtntaccgctcggggctgccggctgcacctccgccgcgcctcgccgctcactgcgctaganccggcgccccgcgtctcgcttcgcgggcagtcagggggccggcgctctgtcgaggtctccagctagagcagggagcccgagcccgagggagtccccggagccgacgaagggcttattagaccctgactcttttctgaggcgcgcagattttgtctttgatcactccctctccgcgggtctacggccgcgcgctttcggcgccggcgatggggagaagacggaggctgtgtctccagctctacttcctgtggctgggctgtgtggtgctctgggcgcagggcacggccggccagcctcagcctcctccgcccaagccgccccggccccagccgccgccgcaacaggttcggtccgctacagcaggctctgaaggcgggtttctaaccgccgagtatcgcgaggagggtgccgcagtggcagccgcgtccgcggcganga

SEQ ID NO: 689351 - DNA, 305 bp, Homo sapiens
tgaggagtactgaacagagctcgccttctacttctggatgatggtgacgctcgactcctgctgagaacgacggagcgacgcctgctgatgtcatgcggaccttcagcgcgcgtccgatcatagacgagctcttccaggcaggtctcacccggagcccggatactacactactgccttgagctgcccaccggggcctcacttcttctttccaagtcccgcatccgtccgcagcttgatgccccttctctccgtacgaggcccataacttccacgccatgtgtcagcccttccttgagatgatacac

SEQ ID NO: 689352 - DNA, 103 bp, Homo sapiens
tgaagcatcactggtgagcctgccagaggtccaagggtgaaggggttggcactgaagaaatccctgacatcatattggcgctgctgacgggcgtactgccccc

SEQ ID NO: 689353 - DNA, 2136 bp, Homo sapiens
gagcgggggctggcagcgagcaggatggcggcggcggcggctgcaggcgaggcgcgccgggctgctggctgtacgcgccggcatgggcgcgcctcctggtgttctcgcactgcgcttgcaggtctttctcgcgtgccctgcaacctggctgggcttgtccagccgctctgactgctgcgctgcgacgacactgcacacgcacgcgcccatgcgccctcagacaactcactctgctctacacacacttgaccacggaacctccgctttccacctgaagggcaacgcggccttgtaacccaggcggctggaacattggccgtgaaagcggctctggcgacacacggccgttcccttctgcgcggcttgcaaacgccacgcacacgcgctgcggaacttgccccaacccttctccgttttcctgggcccagccttatggcccgttgcgcgcacgtcgcaacctggcgctggcacctgctgcgatgcggcccatccatcgctggccgccgacataccatgttcccccgggcaacgctctttcccttccgcttcccattctcttcaccacgtgaaacaaccctcgttgggacgttggcgaaagccggccgcgttggggcagcctttgcctgtgcctgcacaaccgggtctgcacctgcaaacgggacgccaagctttacaatttggccggaaagccgcaacagtttcctgctaatctgcgcctcatcgttacctgttatcctcctcaagggacgctctcccaatcatttcccactttggcgtcgccccttatatagtcccccgcgaacaagcggcgggccgaatgttccgctttcctgcaacaccggctggcccaccacactgtggtcacacagccggctccaccctatttccactacttgtgcgccaatacctccccgagtggttggacgggtagcctcattttggcgcgtctcctatagcccgaagcccactcaacggggggggccctccttttggatctcgtcctcccccgttgtgctggctcccaccatttggtgactcacggtacaaaccccccgttatccccccgcccttgtgccggacgactttacacgctttcggtcaaacactttcccaagcgagtgcccgcgcatttaaacgcagcggcgggtgacgatacaccacttgtgcgccctcacaccgaaacaactgcgtggccggtctacttttgggcgccaattcgggagctttactagcagaaatcccacgcccgcgacagagagcgtcgcgttttccccaagttttggtcactcacccgctaagcggccgaaaaccgtgcccccgccccctgttcgggtccgggcccccccattatggtcggcgccgcgcacaacgctacgggcggccaaacagaacgcccccgacacgagcgaccaccccgggtgctgcgcagctcggagacgacacttttttgagcagccgccacccctctgcgcacgccgtcccacctccaggggatcgcagtgacgtcgctccacccctaaacatgctgatggccgccactccctactgtggcgcatacctccgacaagtacagtctattcctcagcgggcacgcacccgttttatggcgcacgttgggcccgtgataatttccgacgccaacccatgtgagcacgtcagctcatcaatcatcaacgcgccgcgctctcgcagtgtttgtgggtgacgaaacatacttttaaacgcccacgcatgcggcacggatggcggacattccagtcttgggagaacgagcagagccgcagacaaagtgcgggttcggggtaaaccgacatcaacagtactttccccgaacacagactatatatggacccgcccccccctacttgtcgaacaacagtcatctgtgcgccccacccttttgtgatcactccccctactttcttctccgcgacagtcgctgccgacgcgattttcccccccgaccttttgcgtcgtatacacatctccatacaaagccagccgtccctcgcgattatagatatcacacgctgcgagctcaaaacaaacagcatatatcatgctagccgccacccatttatattaagtgacggcaatattactttgcagcagactaccacagtaagacccccgact

SEQ ID NO: 689354 - DNA, 146 bp, Homo sapiens
atgcaagaatggactgtctagcaaggagaaggaggggtctcgaggagaagaggatacaggccaagaggaaggtggctcccgccgggagcctcaagtcaaccagcaagaagtgcaacagctcatggacatgggcttcacaagggacc

SEQ ID NO: 689355 - DNA, 351 bp, Homo sapiens
ggtgagattcggagagcagactatgcaacgctttatcgttacattactgcagcacaatctactgattgtgactgtcaaagagagatgagtgaacacgtgtatgcaatacacagagttgtattctcttacactgatctttacgaaacagtgcaatatgtcactatacctcgaagtctcagttagaggcttattatgagagcaaactatctgttactgtgctctaaaggatctgttcacggctttgagaacttgccgtgacagcattatttgagttcactgtaatgacactcacttgatctacatggtcgctcaacctttgattcatcccacgtggttacacactgttttggc

SEQ ID NO: 689356 - DNA, 398 bp, Homo sapiens
aggttcaaaaaaacacctgtgtacacagtcccatgcgtttcttcgaagagaatcaagggtgcccagatggctagcacattgaacagtaaatgaggcaatgataggtgaattaaaggataaagcgatagcctgctcatttgcagcttgaacaatgactctggcgccaacgataggtcttcccttagggcaaaaataaaacttaacaggtaaatagcggttagaaataccacaaggcctgtggtcaacgcagctggtggatgaccaccgggaaaaacatacgacttccaattcatagcacgaccaaatagcacaacctaacaactagagtgaattgctgttctcagtgcttccaactaagcttttcccatccccctattcttcttgtatcgatgcaatta

SEQ ID NO: 689357 - DNA, 224 bp, Homo sapiens
ctttctacgtctcatcactggagcctcgggtatagccctaaaaagaccaaaaaaacacaaaaaacaaaaaccaaaaaaaagcaccccccaaaacccttccaatatacagaatgaggaagcggacccaagtcaaagagaagaaaaacaattagctaaagataaagaaaagcttaagaatgtgtgtggcctatctggatcctttggactcatagtcagtgatgaga

SEQ ID NO: 689358 - DNA, 277 bp, Homo sapiens
aataagcagtctgaaggctacatactatatgattccaaatatatgacattctagaaaagacaaaccatgcagactataaaatgatcagtgattgctagatgctgggggagggagggatgaataggtggagagcagggtaattactcttgtatgatactcaacagtcagtataagacattatgcatttgttgaaacacatagaatatacagcacaaggagtggaccctaacataaactgtggactttgggtgatttaaaacagggggtggcaggagcc

SEQ ID NO: 689359 - DNA, 411 bp, Homo sapiens
ttacctctatgggtgacgggcggatgatgtgcagtgcatatcatggccattattcaatcaagcactcatattcttgatttactgctaaatcctccattaggttattagttacataaaaacttacgtatggtgggtattcttatgtaggaaatgtagcccatttctttccaacccataagctacaccttgacctaacgtttttatgtgttatgatagtgcttactattgttcctttttagggtttgctgaagatggcggtatataggctgaattggcaagggttggtaaggtctatcggggtttatcgattatagaacaggctcctctaggtggatgagagagggtccaggcgcctggaccctctctgggtcgaatcggagctgtagctgctggcttatggcagagccacag

SEQ ID NO: 689360 - DNA, 544 bp, Homo sapiens
ccagcaaaatttcgatcaagaaaagggcaagacaccatgagatacgaatccaaaagacagccagctctagcaaagtcatgaaagatgctaataatcttgcaagtgaggttaaaatacagaggctgacctgaagaaacttcatgaaagcccgtgactgatcctgaaggagtctctgatcatgaactcatagtcgcgttgaatgactacaggcctaagccgttgccgagtgtgcttaccagttacgaaggaagaagtatgagaagagtaaaggccagtaccacactcataccctgatagatctggagctagtgttctcctataaagaggccacaggtttcacggagtatagtgaatatcacaagagtaccagtatgcacaagagtgacacggaggaatacacaccgcatgtctggacctttgagacaccaaatgtacatcagctgacagatagagtctgctagctaggatgcaggagtgggaccggatatatctggaacgagtaatggaagcagtccagttcctagggcagcaaaccggaactggc

SEQ ID NO: 689361 - DNA, 151 bp, Homo sapiens
cacgggtctttctccaacacactccccatccccaagaaaggcacgggtggagaccaaaatggtgacagcgagctcccagtcggggtcaggcacctacgatgcaaggatccgggatgccaaccttccctcccaggtgtggtcctccacccgg

SEQ ID NO: 689362 - DNA, 270 bp, Homo sapiens
  misc_feature (20)..(20): n is a, c, g, or t
  misc_feature (45)..(45): n is a, c, g, or t
  misc_feature (206)..(206): n is a, c, g, or t
agactgagaaaaatagaggncctaaataaataaaatcagagattnaaaggaggcccaggcatggtggctcacagtactttgggaggccaaagcaggcagatcatttgaggtcaggagctcaagaccagcctgaccaagagctaaaactctgtcaaatgtaatcccagctagccaggaggctgaggcaggagaatcacttgaacccnggaggtggaggttgtagtgagccaagataactccagcctaggtgacagagcaagactctgtctc

SEQ ID NO: 689363 - DNA, 741 bp, Homo sapiens
ggaggcgaggtcgctcgggcagctgttgcgggggccatggcggggaccgcgctcaagaggctgagtggccgagatacaaacaagttaacactgaatcctccggaaggaatgtagcaggccccatgaatgaagagaaccttatttggaatgggaggcattgatcatgggcccagaagacatctggttagagttgggttgttattcatacctgccatacctgagtttcccacttgtattacccgttaatggtcaccgccagaagtatgagatttacctgtgagatgtttcatcccaacatctaaccctgatgggagagtctgcatttccatcctcgtacgcgcaggcgatgaccccgatgggctagcgagagcagcgcggagcggtggagtcctgtgcagaagtgtggagaagatcctgctgtcagtggtgagcatgcgggcagagcccaattgacgacagtggagctaacgtgcgatgcgtccaaagatgtggcgcgatgaccggagagcagttctattaacattgcgaagagatcgtccagaaagtctctgggactggtcagacctggctcgtgacaggcgcgcaccatcacgactaagcacgatcagcattatcccggcacacttagtgacagtgatggtctgtgctggtacaaacaaggcagacttgcagaaccatggaactttttgattaacacttcttattaaaaggggcctccggaacgaagtcaaagtcatttgc

SEQ ID NO: 689364 - DNA, 735 bp, Homo sapiens
actacaggacccctggtggtctgtgctgggattacaggcgtgagccaccggcccggcctacaaagtcatttttaagggaagaagaaaaaaaccctctcctttcttgaaatctagattctatttaagtgatactatttgtctatgaaaaatacaatgagctatggtgaagtgatttgtgtaaatgatctcattcaggaggcactgaagggacagacacttgtcattgccaagtaagtcacatttaaattccctcaagccttgagaaataatgtgagggaaagtgcaaaaatagcacagtcattcctttggactaagtcaactcctaggcctcctgagagcactgtagctgtgtgttcatctatatgcaaagagaaataaaaagaatcaactatatttgtcacagggtactttcctatataccagcgtacacctctatcaatacattttatgctgagactttcggtaaggaaagactgaccatacacactgcctcatgcacagatatagacacatattgaagatactttctttcccctgcaatgcagaaaattgcatgagcacacacaaccacactaaaccaaccagaatgaaactagaggcagctgtatctgattgaaactggtgagaattgagattgacagagttacagggctaggaggttaatgagtccatactcctgcctccagtcagaactgtcctaagccattccaagtaaatgacagctcagcctctgga

SEQ ID NO: 689365 - DNA, 350 bp, Homo sapiens
gtgtggcagtgacactgagctctactcagtaggcttatgtcagtgtcctcaagctcactgcattggtgcagtcttctattgcatcatctagtttccataagcttggacactaaccgtaacccgattacagtagagtttagcatttgttttctattgttggggtctatccccaggacttctgtgtacggttcatctgctagtttgtactttccttccttaaatgctttattcccatcttctttctttgctttgagtgctttggcatttctgcaggcaatgcaggacttctcgtggtcaggagccatcctgagagcctgtacgaaaaactgacctgccttctcaatacaatc

SEQ ID NO: 689366 - DNA, 385 bp, Homo sapiens
  misc_feature (83)..(83): n is a, c, g, or t
  misc_feature (128)..(128): n is a, c, g, or t
  misc_feature (182)..(183): n is a, c, g, or t
  misc_feature (229)..(229): n is a, c, g, or t
  misc_feature (297)..(297): n is a, c, g, or t
aggagtacctggatgagtattaccggctggactacgaggacatcatcgacgacctgccctgtcgcttcaagtaccgcacagtnggtgccctgctgactttgcgcctcagccactgagcgagatcctcngctgctgacgcataaggagcctcaaccggctggctgctccctaaacgaacgacnnctgcatgtacagcgtcagcagcaggcaggaaagctgcgggacaagncggcgcgtacacgccacgaaggcccagaactcatggcaaaaagcggcaggctcttcaacgtcactctngccgagcaagaggcagagacacctgcggaagccacagggaagccacagagagatgaagccggcccacagaggcagctgccagcccttg

SEQ ID NO: 689367 - DNA, 388 bp, Homo sapiens
  misc_feature (338)..(338): n is a, c, g, or t
  misc_feature (354)..(354): n is a, c, g, or t
  misc_feature (375)..(375): n is a, c, g, or t
caggctggagcgtagtcattagatcttggctcactgcaacctctgcttcctgggttcaagcgattctcctgcctcagcctcccaagtagctgggattataggtgtgagccaccacgcctggctaatttttgtattttcagtagagatggggcttcatcatgttggccaggtggtcctgaactcctgacctcaagtaatctgcctgccttggccttccaaaatgcttggggattacagggcgtgacaacttgcgcctggggtccctattttctttttacaacagaccttggggaaatatttttctttccccccaaggagggtttgagggcccatgggantgcattaggggggcangttgggggtgggtggtgctcngttaggcccttta

SEQ ID NO: 689368 - DNA, 655 bp, Homo sapiens
  misc_feature (13)..(13): n is a, c, g, or t
  misc_feature (64)..(64): n is a, c, g, or t
  misc_feature (91)..(91): n is a, c, g, or t
  misc_feature (163)..(164): n is a, c, g, or t
  misc_feature (185)..(185): n is a, c, g, or t
  misc_feature (197)..(198): n is a, c, g, or t
  misc_feature (228)..(228): n is a, c, g, or t
  misc_feature (234)..(235): n is a, c, g, or t
  misc_feature (237)..(237): n is a, c, g, or t
  misc_feature (244)..(244): n is a, c, g, or t
  misc_feature (247)..(249): n is a, c, g, or t
  misc_feature (257)..(257): n is a, c, g, or t
  misc_feature (266)..(267): n is a, c, g, or t
  misc_feature (306)..(306): n is a, c, g, or t
  misc_feature (310)..(310): n is a, c, g, or t
  misc_feature (339)..(339): n is a, c, g, or t
  misc_feature (364)..(364): n is a, c, g, or t
  misc_feature (366)..(366): n is a, c, g, or t
  misc_feature (383)..(383): n is a, c, g, or t
  misc_feature (389)..(390): n is a, c, g, or t
  misc_feature (414)..(414): n is a, c, g, or t
  misc_feature (439)..(439): n is a, c, g, or t
  misc_feature (442)..(443): n is a, c, g, or t
  misc_feature (458)..(458): n is a, c, g, or t
  misc_feature (468)..(468): n is a, c, g, or t
  misc_feature (475)..(475): n is a, c, g, or t
  misc_feature (505)..(505): n is a, c, g, or t
  misc_feature (507)..(507): n is a, c, g, or t
  misc_feature (509)..(509): n is a, c, g, or t
  misc_feature (520)..(520): n is a, c, g, or t
aggtggcacgggnggggggtttcagattcaaccatgcccatgtgcaagggcgctggtccctggngaggggacataatcagagaagtgacgnggccatgccgaggtatacgtgtgtgcagaaatggacacatagggttcaggagcatcagtaactgactattgnnatcatggtcttcttggaaggnataaatgtaaanntgttgctcagccccacagagttggggtgtntccacnngntgagggnttnnnggtgtggngtcttcagnngttctgccctgcagaggctgaaggtggcatcccataggntttntagagcaggtcgagaagctccctcttttnatcttttgggaggtaactagttttngncgctttgttgttcagcntttttnnctcctcttcagttaagcccatgtnccgtttggtcatctggtaatcagtnttnngggtggacttgttgntgagcgggtnatctgtnttgagcgagttgttagcctggtcatttttntncngattgtttgcntgctccgtgtccggcttccaggcaccagtgaggtagctggaccaggggcagatctcgaagtgcatgttttcctgccagaagcctgttataaagggcctggtcttccagggtgtggtagccgtgtcccagccgctc

SEQ ID NO: 689369 - DNA, 448 bp, Homo sapiens
  misc_feature (42)..(42): n is a, c, g, or t
  misc_feature (72)..(72): n is a, c, g, or t
  misc_feature (77)..(77): n is a, c, g, or t
  misc_feature (133)..(133): n is a, c, g, or t
ctcctcaaaattccatactcaggccaccctggacccctactnagccccttcctgtttggccccttccctacnccccngggggcttggttccccatgcctttccttcctctttcccttaagctttccttccctncctctccctttgtcaaccttgcagcctcatgatctggcttccctctgtcacagaatcaaagggagcattatggaggggggtttccccaaacacccacatgttctcacttataagtgggacctagatgataagaagacatggacacatagaggggaacaacacacactggggcctgttggaaggtggagagtaggaggagggagaggatcagaaaaaatgactaatgggtactgggcttcatacctgtggatgaaataatctgacagcaaacccccatgacacgagttcacctatacaacaaatctgcacatgtac

SEQ ID NO: 689370 - DNA, 88 bp, Homo sapiens
aacaaaggggcagctgcgccacctcctccaagacaccttcctgaggacgctggcccagtgcaggccaacatccacccctacctccata

SEQ ID NO: 689371 - DNA, 705 bp, Homo sapiens
  misc_feature (117)..(117): n is a, c, g, or t
atctctcagtagtagaaaggagcagaagatgggggagagaagaatcatatcgtaatgcttcatgctactgtgcgcttatatgtacgatcctgtttgttatatgttgctctctttcanttggttggctcactcctccgtaacgtgcttttcgcgtatgtttaggtttttttgatgtttccttactttcttttctgtttctcttgttttctctctttttctcctatctatcgacacttgctttggagtcctccgtgtcttttttctgctggcgtctgtgtgtctgagtctcttctgatttctctccatctgctcatatgtggttagcgttcctgctatttctccattatcttgtgcgttgttttgactctccttggtcctctttacctgttgtcttgctccagtatctatccgctttcttactcccgtatgtaatactttgagatcgtatttggtcacagttttctcgcggtgcttgagtatgttttcctcttgatactcttgaggcttgaggagaaagctccttgtatggccatcatctgattgcggtccatgaatgtccgagagcttgaagaaggagcaggaacacaagtgcacacctggaacggatgaagcagacgctggatcagtacggtgcgcgagctccaggcccgccatgaggaggcagtacaggccgccctccgtggcgggaagaagcaggtgcagaag

SEQ ID NO: 689372 - DNA, 153 bp, Homo sapiens
cggcacgaggctgtctgcatcatttcgttactcaggcatttatgatgtggaggtcattaattttcagcttcgaaggtggagggaacatttctgcttttcaggcaccagctgtaaggggaaccaccagtgaactaaaggcaagtctctaaaaaa

SEQ ID NO: 689373 - DNA, 131 bp, Homo sapiens
tatctaagggatacctaagataaacagtatatctatgagatacatacaaggctagatgaaatcaccccatgtgtctgccttacttccatggccttattcccaagagctcgtcatatgtcaaaatcctacct

SEQ ID NO: 689374 - DNA, 103 bp, Homo sapiens
tttttcgcattttatatgtgttcgatctttgcagccacgacccatgttactgtcgactgcgaactcatgagtcattttttcagagaacccgtcctgaagacat

SEQ ID NO: 689375 - DNA, 473 bp, Homo sapiens
agtcatcttagcatgatggggaaaggcaccccaaactctgttaagattcttataaaggaacggttgatttttttgccaaactatgctttggccaaggggaaataaccacctggccacccttttctgcccccctacaggacactaagggttgttacagataaaggcacgatgcgtttatgctgggagaactaacaacacctgatttctctggtataaaaaatattgccaaatttgattcactttatgaaaagaaaatgtttttttgctgtaaacccattgagaacatagctgccatccgtgcaagatgagggtaaggccacctctgatactaagaatggcgccccactattgcaaggatgtcacacctgctgcgcgtgggcacacgctgcgtgatacatctttgagaccacggatgggtaccggccattaaagtccagtcttttaatgaggatttgatctacctcggttggcta

SEQ ID NO: 689376 - DNA, 893 bp, Homo sapiens
gcgggaggcactggcctccagagccccgtggccaaggcgggcctcgcgggcgggactggagccgggatccgggtgcctcagctgttcgggctggatgacgaggccaggtctccagctgtgggtggtagcgtgtccgccaccagctgccgaaggccagacgccaggtccggtggattggtgacagcaggacatgacatggtccggtgtgacggcgaggacagaggaggcgcgtgcggtacttcctgaacaccttaggctgggtggttggctgcggcaagaagcgggtctgtttctttacttcctccacaggagtcggtacactatggctgaacctctgggctcccagaacccacaacatgaaagaaatggtgctacccagctcaaagaccttgggcctttgaatccggacataaaacctctagcttggaaatgaatatgctgcactttatcaaccgactgcaacgtacctgagtcagtgaatcggctctggaaggtgaggctagaggaacggcagacctcatccgaagcccagagatcgaaagacaccatcggaacagcagacgcccgtgagagccagccggcacggcgattccatcttgatggccaccccctgcggtggacggttgacactagcacgacatcaatccctggagcgtgagctcgctccagcgggatgacggcggtccccgagcaagctccgtcttctgcttttgcatccgttctgtcgtcttgtatctgagcttgctgtctgtccgtatctgagaggattcaaagccttcacgactctgttccccgtcgctctgcattaatttggccaagcctgggcggttgaggtgggggacggctgaagctcgccggtgggtggtttcccgttgttcgtgggggcggccttg

SEQ ID NO: 689377 - DNA, 103 bp, Homo sapiens
tcgaagaaattagcttttattggaaactactttaccccacgtgtttcttttaagaattctatgctatgggataacctgcttatccactggcccaataccaaaa

SEQ ID NO: 689378 - DNA, 763 bp, Homo sapiens
ggtaagaagtgcctttgcctcccaccgtgattctgaggcctccccagccatgtggaactgtaagtccaattaaacctctttttctttccagtctcgggtatgtctttatcagcagcgtgaaaacggactaatatactagatagggtagcagtagagtggagcactgctgaaagagacacccgaaggtgtggaagcagacgtttgtgaagtgggtaacagggagagggttggaacagttggagggctcagaagaagacaggaaaatgtgggaagagttcggaacttccgtagaaccttattgaatggcttgccgaaaatgctgatatacaatatgaagcagaaaggtccaggctgaggtggtctcagatggagatgaggaacttgctgggaactggagcaaaggtgactcttgttatgctttagcaaagagactggtgacattttggccccgccctagagattgtggaattttgaacttgacagtcatgatttagggtatctggtggaagaaatttctaagcagcaaagcacgcaagaggtgacttggatactataaaaaggcattcagttttcataagggaaaacaggcatacaagttcagaaaatctgcagccgatgatgcagtagaaagaaaaccattttttgagaaacattcaagccagctggcgaaaattcgcagaagtagcagaagctaatgttaattcccagacctagggaaattttgcgggcaggtcgagaacctccgacgagccctcccatccaa

SEQ ID NO: 689379 - DNA, 112 bp, Homo sapiens
aaggaactctagatgttacaaatggctctcacaaactatagggtgacacgtaatgagctggctgcccacagactcacaaccaagcaggcagaagaggcgacagactgactcg

SEQ ID NO: 689380 - DNA, 257 bp, Homo sapiens
gggtattcaattgctttatatttatttctgggaaaataaattttaaaccttgactgacttttcagggttaattagtcatgttgaggagaaacaaattctcaaattccttttttgcattacaataactttgaaactcacaagccgtgtgtcccaactcaaatagttaacttcattttcaacccataccaagggtttcagtaatttttttttaagcaaaagcaaaccattgccgatcacatgatttaagacttccgttt

SEQ ID NO: 689381 - DNA, 1010 bp, Homo sapiens
  misc_feature (14)..(14): n is a, c, g, or t
  misc_feature (20)..(20): n is a, c, g, or t
  misc_feature (22)..(25): n is a, c, g, or t
  misc_feature (27)..(27): n is a, c, g, or t
  misc_feature (30)..(31): n is a, c, g, or t
  misc_feature (33)..(35): n is a, c, g, or t
gcgagcgtacccgnaggcgngnnnngntgnnannngggccgagcggatcgcgggctcgggctgcggggctccggctgcgggcgctgggcctgcgaggcgcggagcttgggagcggagcccaggccgtgccgcgcggcgccatgaagggcaaggaggagaaggagggcggcgcacggctgggcgctggcggcggaagccccgagaagagccctgagctgcgcaggagctcaaggagcagggcaatcgtcttgttcgtgggcctgaaagtaccctggagtgctggctggcctgctacgtgccgcgcgatcaccctggaacccgctggtggccgtgtattacaccaacctgggccttgtgctacctgaagatgcagcagcacgagcaggccctggccgactgcctggctgcgccctggagctggacgggcagtctgtgaagggcgcacttcttcctggggcagtgccagctggagatggagagctatgatgaggccatcgccaatctgcagcgagcttacagcctggccaaggagcagcggctgaacttcggggacgacatccccagcgctcttcgaatcgcgaagaagaagcgctggaacagcattgaggagcggcgcatccaccaggagagcgagctgcactcctacctctccaggctcattgccgcggagcgtgataagggcagctggaagagttgccagcgaaaccacgagggttattaggtacgacaggcagggttcgtggccatgagtggccttgattgataggcaagcacaaactagtaatttgggagcatttgcagggagttttttctccaggtttgtttagagagaggtatagaagcggaatcccgattactatttttggaagattagttttagataatagagtagggagataagcacgggaataataagagagagagttagggccgtaacgtggtaattagcggaggggggcgctacagagagattcgaggagtaagggggaggacacagtgggtggtggctg

SEQ ID NO: 689382 - DNA, 1053 bp, Homo sapiens
aagaccttagggctagtgtatgaggcctggtgttttgcgcggtgctcgtgtgctgcgtgtgtgctccgtgtctgctgtggctgcatgtgtgcctgctgatggctgctgtgatgcttgtgtgatgctgtgatgcccatgtgcctgtgcctgctgctgtgctgccatgaatgtgtgcaatggatgtgatgaagtgatgtgtgctgtgtgcactggctttggtgctgcattggcggcggaagccccgagaagagccctgagctgcgcaggagctcaaggagcagggcaatcgtcttgttcgtgggcctgaaagtaccctggagtgctggctggcctgctacgtgccgcgcgatcaccctggaacccgctggtggccgtgtattacaccaacctgggccttgtgctacctgaagatgcagcagcacgagcaggccctggccgactgcctggctgcgccctggagctggacgggcagtctgtgaagggcgcacttcttcctggggcagtgccagctggagatggagagctatgatgaggccatcgccaatctgcagcgagcttacagcctggccaaggagcagcggctgaacttcggggacgacatccccagcgctcttcgaatcgcgaagaagaagcgctggaacagcattgaggagcggcgcatccaccaggagagcgagctgcactcctacctctccaggctcattgccgcggagcgtgataagggcagctggaagagttgccagcgaaaccacgagggttattaggtacgacaggcagggttcgtggccatgagtggccttgattgataggcaagcacaaactagtaatttgggagcatttgcagggagttttttctccaggtttgtttagagagaggtatagaagcggaatcccgattactatttttggaagattagttttagataatagagtagggagataagcacgggaataataagagagagagttagggccgtaacgtggtaattagcggaggggggcgctacagagagattcgaggagtaagggggaggacacagtgggtggtggctg

SEQ ID NO: 689383 - DNA, 838 bp, Homo sapiens
gagactctaaggaaaaatatcactgccccaatctttgttttctttctgtaactttcttttttaagttctataaccaatatttaattctttgttgtgttcctctaggaattccactctggctgagagaaagggtgccctaggtgagaggtatcctaaggcactttcatagaacctagagctctattaacccatttggaaaaccactattttaggaaaagccttgtatttatcaaatctaaaaagaaagaaaatatcttaaaagcacgtattgaaactaagttttctgagaagaaatacatatacaaggaacttccctatcagcattagaacaaaggccaacttaagtccctaaaacggtaacaaaataagcacgtgaattatgtatacgaatggacaagaagcacatgaaaagatccttaacatcatcagtcattagagaaatgcaaatcaaaaccacaatgagataccatttcacacccagtaggatggttatagtaaaaaagacaataataagtgatggcaaggatacggaaaagctggaactctcatacactgctgatgggaatgtaacagtggtacagtgcgcagctggaaacaggttgggcagtaccttcaaaaagctttacattgattttaccatattgaatccagcaatccatccctaggtattttttccaggaaaccggaacctgtggttcctaaaactgatcgagtggtcggggttttcgtattggcaacgggtgaacatcccgcaccatgtagtggtaaccctggtttcccttatttcgcgcagaaaagaaaccgtgaagtgccaacgatcgacaggctgaacaagaga

SEQ ID NO: 689384 - DNA, 167 bp, Homo sapiens
tcatcgaaaccctaccaagaacaaacctggtcatcaaacccttaggtgaacctgcggaaagcaatataagaaggccccccaaataaccgcgttaattggctgtagtggtctacttgtatagggtttcgatgaccagggtttgatgaagggtttgatgcggggatcct

SEQ ID NO: 689385 - DNA, 208 bp, Homo sapiens
taaaatatagagatggggtcttgctgctatattgcccaggctggtctcaaactcctcggctcaaggaatcctcccaccttgacctctcaaagtgctgcaattacaagcatgagccaccgtgccaggccttatgtgcattcctaagtaacataataataaaaataacttcagctagggtaccaagacgtcgacgcggccgcgaatttag

SEQ ID NO: 689386 - DNA, 482 bp, Homo sapiens
acccacagatcttccgagacagggacggatatccaggttgcctttatcccatgttgccatttgaaccaggaatcctttactttagaactgccaagggacgtcgcccccaggatcggctatcctaaaaccagcctggtgcactccaccttctttccagccctgcagggctgcccaagaccaaaaatgaagtgccagcgacccccactcctccatcttcctcaccgacacggccaagcagatcaaaaccaaggtcactaagcatgcgttttctggagggagagaaaccatcgaggagcacaggcagttaggggggcaactgtgatgtggacgtgtctttcatgtacctgaccttcttcctcgaggacgacgacaagctcgagcagatcaggaaggattacaccagcggagccatgctcaccggtgagctcaagaaggcactcatagaggttctgcagcccttgaatcgcagagcaccaggcccg

SEQ ID NO: 689387 - DNA, 159 bp, Homo sapiens
tcatcgaaaccctaccaagaacaaacctggtcatcaaacccttaggtgaacctgcggaaagcaatataagaaggccccccaaataaccgcgttaattggctgtagtgtctacttggggtttaggtttcgatgacaggtttacgatgggtccgagctcga

SEQ ID NO: 689388 - DNA, 167 bp, Homo sapiens
  misc_feature (167)..(167): n is a, c, g, or t
tcatcgaaaccctaccaagaacaaacctggtcatcaaacccttaggtgaacctgcggaaagcaatataagaaggccccccaaataaccgcgttaattggcagggtttgatgacagggtggatgtagggagtccgtctagagtcgaccgcagcagcaggtgcacgccn

SEQ ID NO: 689389 - DNA, 347 bp, Homo sapiens
cgtcgacgtacactagagggtagcttttaaaagttgtcagcaaacactttgatatacttcccttcaaaaatgaaatacaatgtccccattttcttgagtgagggctgggttggttggttggttggttggttggttggttggttggttggttggttggtttgagaccaggtctcactgtatgtctctacctggccttaaattcacagtaatctgcctgcctctgcctccaagttctgagtggcggctcactgtttaagaacagaatgtggaaaggttggtaatatagcttagtagtagagtgcttgtccagcatgtgtgagaccctgggtttgatcactgacaccaca

SEQ ID NO: 689390 - DNA, 321 bp, Homo sapiens
atctatatactcccgaacacttatataccatggtctcagatttacatttccgtcaaaaggcagtacagagtgagaaaacaacaacaacaacaacaacaacaacaacaaaaccacccctaaacaagcaagcctagtaagtagcctagtctcatgattaatgaattccctaatgctggcatatagcccacatactgagaggccggaactgtaacaaggtgctctttactagtgtagtaaggggaaaatgtataaggaaaattaatttttcataatcaggtaaatataatttgttaatagcaaaccaagaaattccggagagaa

SEQ ID NO: 689391 - DNA, 381 bp, Homo sapiens
acggcacctgtctacggcagatggagacaggactacatgcagctcccacttggatgaacagaacagcatgtggagactcacactgtgaatttttgctccaagaaccaccacaggaacataccgggaaaaccaaaagaattcaagaccctttgaaacaagtggtttgccactgcaaattctgtgaaacagccaaaaactgtgagttcccaaagtgtgagagggaaaaatgtctgcctccaaacacacatcccctctgggaacctgaaaattcagatcacgggagaaggatttcaccttacctagagctgaaatggatttcaggagccaagcaaaatataatagtaccgagaaaagaagcaccgggccgttaggccgatctga

SEQ ID NO: 689392 - DNA, 393 bp, Homo sapiens
aactcaaaccaggaaggcactacaagtcgcatcataatcctctctgaaggacttcaaggtctacggccactaagagcaaggttgatgacagctagcaagcctcgctaaccaggcctgaccccccactattaaccagcggggagaactcggtgtggtagtaaccaggttctcctgatcaaatagcactgtagagtaacagggctcaacatactagtgacaggcctatactccctaaacaaattaaccagaacacaatggggctcaggcacccaccacagttaacaacataaaaccctcattcacacgagaaaacaccctcatgttcatacacctatcccccattctcctcctatccctcaaccccgacatcattaccgggttttcctcttaaaa

SEQ ID NO: 689393 - DNA, 449 bp, Homo sapiens
aatcgggaaaccatttcggcccggggttcacttgtttccgcccctgttggaggagttggccctgaacgagttggtgacgctaacgtgcctggcacggggttttagccccaaggacgtgttggttcgttggttgcaggggtcacaggagttgccccgcgaaaagttccttatttgggcatcccggcaggagcccagccagggcccccccccctttgttgtgaccagcatattgggggtggcaaccaaggattggaaaaagggggaccccttttcctgcatggtgggccacggggccctgccgttggcttttacacaaaagaccattgaccggttggggggtaaacccccccatgtcaatgtttttgtttttatgggggaggtggggggcccctgtttttgagccgcccgcctgtccccccccctgaataaattccatgttcccccaagca

SEQ ID NO: 689394 - DNA, 458 bp, Homo sapiens
gcagatttgaccgagctctgtggagcgcgaacaatgtccgcagggctccaggttcagagagggactcgcttctccgccttcgcccgcgtccaggcaccagcgagctgcactctgcactcgctctccctggtccacccctacactgcccggacccgaggggactggccctgcgggcgccgccaaggcgactgagagcgcggcgcgcgtcccgagcgcctggactccgcgcagccgggcgccgcgcacccgggtgccggggtgggagccgggccgcagacccaagtgcgcccgaagccgccgtccgccgcctggcacgccgtctgccgcctgctgggcgatgtgtgcgcgagcccgtggggcttgcgcgcgccctgcggcgtgtgtactcacaaaggtgtgtctgctaaccccacagcccgggctgcgttccaccccgagctggagaaaccccggcctgg

SEQ ID NO: 689395 - DNA, 709 bp, Homo sapiens
ctccaacatctatatatcttctctttaataattttgtacatctatttattaatcagtagagcaagtgagtgctatggcacatgaatggaggttggagaccagcttttgagagttggtgatcttcttccatcacatggaagccaagggtcaaactcaagtcattgggcttagggacaagtgtccttacccactgagccatctcattggcctgtgtatactggattttgaaggatgaatcagaataataaggggaacatatgaggaaagggagcagaagacggtgttttagatgaaggaaactgtatgtgcaaagatgggttaggcatacagtaactcaataaatgcaaaaaacataaggatttctgtgtctatagaatctgacactacaaataacaagttggcttgcaccagtagatgcaaagaagacagcgtaaagtttcagacaaaataataacaaagcaatatttataatttgggaaaatgacagtgaggtggtgtggagaataatttgaagaggagagggagacaaatgccaatggtcctggtgagatataatgattatacatgtcaataaaaattaagagattaaaacaaatatctaggggatggcatcaaagaaatcgctaatgaaaagaatgtgaagggtaggatgaagccccagtcagcagaatggttactcaagcagcataaacaggagcctggacagatg

SEQ ID NO: 689396 - DNA, 84 bp, Homo sapiens
gcccaaaagaacccgacagctttctatctctgtgccagtgagaaccaagccgggacagaagctaactatggctacaccttcggt

SEQ ID NO: 689397 - DNA, 224 bp, Homo sapiens
  misc_feature (3)..(3): n is a, c, g, or t
tantccgtacacacacacacacacaccacagagagagagagagagagagagagagaaataaagagatgagagagagaaaaatagagagagagagagatagagagtcctttctcatgagggatgcccagtatgctcctatcccagtctgtgtgatctcttcccagatactgcgtgttagcgcgtgtgtgacagagggtttcaagtatgatgtcacccccagccca

SEQ ID NO: 689398 - DNA, 140 bp, Homo sapiens
tcatcttattgcgttttgctttattgcactttgcaaataatgcattttttacaaatggaaggtttatagcaactctgcgttgagccagtctattgtaccaggtccaaaaacttctctcgtgccgcttcgggcgcgttggg

SEQ ID NO: 689399 - DNA, 414 bp, Homo sapiens
  misc_feature (78)..(78): n is a, c, g, or t
  misc_feature (134)..(134): n is a, c, g, or t
  misc_feature (335)..(335): n is a, c, g, or t
agcattgcttgaaccccaggaaacaaaggttgcagtaagctgaaattgggccactgcattccaacctgggtaatgaantcggagtgaaactctgtttcaaaaaaaaaaaaggccagttgggcttggtggctcanacctgtaaaatcccagcactttgggaggccgaggcaggtggatctcttgagcccaggagttcgagaccagcctgggcaaagtgcaaagccctgtctctaaaaaaataaaaataaaaataaaaatacaaaaattagctgggcgtggtggcatgtgcctatagtcccagctacttggggggctgcggcaggaggatcattgancctgggaggttgaggctatgatgagccaagatcacaccagtgcactccagcctgggtgacagagtaagaccctgcctca

SEQ ID NO: 689400 - DNA, 114 bp, Homo sapiens
  misc_feature (14)..(14): n is a, c, g, or t
ttaccagccttgtntcggccacctcaaggataatcactaaattctgccgaaaggactgaggaacggtgcctggaaaagggcaagaatatcacggcatgggcatgagtagcttga

SEQ ID NO: 689401 - DNA, 373 bp, Homo sapiens
  misc_feature (219)..(219): n is a, c, g, or t
gcggccgcctactactactaaattcgcggccgcgtcgaccttgtgagtacacttgaaactatacttcaaggctacactaacaaaaacagcatggcgctggtgacatggcacattgacaaaaacagacacacagaccaatggaacagaagagagagcccagaaataaagccacacatttacagccatctgatctttgacaaagtggacaaaaacaagcantggagaaaggactccctattcaataaatggtgctggaataactggttagccatacacagaagattgaaactagacccctttgttgtaccaaaatcaactcatgatagattaaagacttacatgtgaaacctaaaactgtgtcgacgcggccgcg

SEQ ID NO: 689402 - DNA, 165 bp, Homo sapiens
  misc_feature (45)..(45): n is a, c, g, or t
tgcgtgctgctgcggtcgctctcgacggctcccggcggggtctcnttcctgaccacttccgacgggtggtccctggggctccaccctcgacgggtgactggtcttacccacgtccgggttcttcccgacacgactcggcactcccaccctctgacgacgggacgc

SEQ ID NO: 689403 - DNA, 1117 bp, Homo sapiens
catatacgatggtgtatggaaagccacctctggtgatcctgacaattattcgcgcaattacttgtgttacttggtcccccctaaagaatcccataatgctgtggcgaagtggagcacgaatcatttctgttagttacttagcgtctgtaacaatgatctggctgtggtgagccaaagtgacattagtaaatgacctgcattcttctccacatgattcctccggtcttgagatctggacggtcccatgcaacgtggatctgccttggcccgctggattcatcgtgtgctctccgattgctggaaggtgtctcccctgccttacccttaaaatgaagctgcattgacatcatgccacgtccacgtcatcgtcccttggtgcgccggctcgcatgcctcgttattaggccggcgtgactgtcgcgaggtttgggtgtgcgagcgaggctctggctgtgcctgtttgtccacggaggctacgtctctctcttgtcgcaggtcgcgtgcacgccgcactgtgacctcggtgctctacgtcccatctgacacgctaaccgatggttgttgcttcgcttgtaatgctctcgagggcacgttttgctggtctcgactctgttaagtacagtagttcctgccgctgcctatagtgtgtctttcagtctgcccacgtacatcacggttgattggctgcctggagtcatgactaggttgctccatttgtctctattttcttacgattgactcgcgtgtgtcttgtaccttatgtctactaagttgagatgattcctaaacagagccttccttcgcaaccctgtctgagccatgggaaacgctttcgctaataatgggaccacgtagaactgcactaatttggggaccccccacaacgggtctttgggacgtccgtaccggattgcggttacatcagcctctatggtatatgggtagccgcaaatgtgccccatttgtcccatgggcgtccggggccagaacaaatggggtccaagccccagtttccccagggctccaatgtaaatgagacccccaccaacaaggggcctatccgcaaatataccccacacaaaaaaacacgggtgaaaataagtgagaggaatttaac

SEQ ID NO: 689404 - DNA, 585 bp, Homo sapiens
  misc_feature (499)..(499): n is a, c, g, or t
cgactctgtggatcccctgcctgctgtcgctaggacagctctcctggcttgctagattaatggccagcgtgtctcaagactcgaatcacggggctgtgaccgagaactctttggcggagggcatttcatagaccttaaggactctcagtgaaatgagacactatcaaaggctgcctgattatgtggagccgatttgcgcattgaatatcagaggaaaagaattatgtgcggcagtgttaggacagcaccagtaccgagctctgtcagagagcatgctcaccacaagagagtttttgaaggaaattagttatgagcttatcacaggaaaggtcagtttcctggcatcacatttcaaaaccacatcattaggcgatgacctagacaagctgctggaaaaaatgcaacaaagaagaggagacagtgtggttacccctttcgatggagaccttaatgaatgtgtgtcaccccaggaggctgctgctatgattcccacacaaanacctggattagataatgaaaccttccacatttatcaaccgcagctaacagttgccagaaaactcttatcccaggtgtgtgctatag

SEQ ID NO: 689405 - DNA, 477 bp, Homo sapiens
  misc_feature (269)..(269): n is a, c, g, or t
  misc_feature (327)..(327): n is a, c, g, or t
  misc_feature (450)..(450): n is a, c, g, or t
taaatggagtctcactctgtcgcccaggctggagtgcagtggcgcgatctcggctcactgcaacctccgcctctcgggttcaagtgattttcctgcctcagcctcccgagtagctgggattacaggcacccatcaccatgcctggctcatttttgtatttttagtagagacaaggtttcaccatgttggccaggctggtcttgaactcctgagctcaggtgatccactcgcctcgtcctcccaaagtgctgggattataggcgtgacanccgcacccggcccttaattattatcttaagttttaaagattattatttttaacctctngaaattctccctctggggccaacacacaaatacttttgaggaagttatctggaattcttacctgttaaacttgaggaggcattactgatttcagggaatgctttttcccattaaaaaaagganaacaaaacaaaaaaccgggggcagatt

SEQ ID NO: 689406 - DNA, 784 bp, Homo sapiens
gctctccccctcaagtaccgtgtcagccagcctgcaagcggctcaccctagccacggtgcccacccgcgcctccgaggggcaccaacaacagcaggggcgtgcgagtgtgagtcagtcagcgacaattgtccacagcctgacaaacactaccaggacacacctccatccatcaccattgcccatgcaccaagcatccacactaacaatgacatcatccactagatacaacaaaataaccacatccagaaacatcataaacatcacactcacaccaccaaattactacagctatacgacaaaccactatctgagcgaacaacctatcacaattgaacaaactgacaagtctaagagaattacgatactgcacactaccaccacaacatacgacaattcgcattctacaacacacacacaccaatatgcaacgcatgtactgagacgctgactccacaaccgagccacacacactgcacaacgtctgtccttcacccacaccctatcagcaatcattgcggaatcagtaccccttcacatgcataccacaacacattgcatacaacacaattatacactaatcctcacacacaacccccaatgatcaacctacccataccacaaactctcaagcagtattggccccaaacaatcaacataatcaatagcagtatacataactattcgtaccatgaccccatacgactttcctttatccgtcatcacactatagataccaccaaacaatacatattcacacaccaataaccttactaactcacacat

SEQ ID NO: 689407 - DNA, 800 bp, Homo sapiens
ataaagcataaacaaaggaaacgcaacaaaagacttcatctcgcagaaatgcacaggcaacacgataaagtaagagggggcacatttcactcccaagtttaaacggtcaaggccaaaggtaaagccataatggcccgctctgaaagatcctttccaaaaaacaatcgaaggactggttggatggcggaggtgggggaaacggatactaaagccctatactacaagttcacaatctaacaggcatgtcatatacagaaaaccaaagccagggaccatatgtcactacattcttcttagatcacatctagcacctagtaaatagcttgcctgtaccctggcttagctccatagacagcccacacggcacttggggctaggggtcagggacttgctgtcacaggttctctggttccctaaatgccccctacctctcagttctcctccctgtatgttggtcggttggtggatctctcatagacgtcgagcctggaagtgcatgcctagctttggagcttgggccggtcgttcttaccatacatgcgttgacgtgggaaaatcgtatgggcggaaaaacaaaaaaaaaaaacaaaaaaaaaaaaaaaaaaaaaaaacaaaaaaaaaaaaaaaaaaaaaaaaaaaaaacaagatcgcccaccggctcacaagcgaaaaagagagaaaggaaaacgagacgacaaaaaaaagaaggagggaagtacgaataaaagaagagttaacgaaaagcaagggacataaaaagaaacacttagaataacactataacgagaagaaacgagtgg

SEQ ID NO: 689408 - DNA, 109 bp, Homo sapiens
tggacagcacagaggaggtggacagcacagagggggacagcacagaggaggtggacagcacagaggaggcacagaggaggtatgaggaggcatcacacccctcctctgt

SEQ ID NO: 689409 - DNA, 154 bp, Homo sapiens
cacgagggcggggcgcggggtgggcgcggccgaactggtccctgagccggccggcgacaccggacctcccgcgcgccccgcacccgaccggatcagccggccggtaacgtaacacgccctatgctcgcttgctcgccggcctcagggcaggcat

SEQ ID NO: 689410 - DNA, 776 bp, Homo sapiens
  misc_feature (12)..(12): n is a, c, g, or t
  misc_feature (17)..(17): n is a, c, g, or t
  misc_feature (44)..(44): n is a, c, g, or t
  misc_feature (49)..(49): n is a, c, g, or t
  misc_feature (52)..(52): n is a, c, g, or t
  misc_feature (60)..(60): n is a, c, g, or t
  misc_feature (99)..(99): n is a, c, g, or t
  misc_feature (105)..(105): n is a, c, g, or t
  misc_feature (109)..(109): n is a, c, g, or t
  misc_feature (116)..(116): n is a, c, g, or t
  misc_feature (120)..(120): n is a, c, g, or t
  misc_feature (132)..(132): n is a, c, g, or t
  misc_feature (134)..(134): n is a, c, g, or t
  misc_feature (140)..(140): n is a, c, g, or t
  misc_feature (158)..(158): n is a, c, g, or t
  misc_feature (163)..(163): n is a, c, g, or t
  misc_feature (186)..(186): n is a, c, g, or t
  misc_feature (201)..(201): n is a, c, g, or t
  misc_feature (227)..(227): n is a, c, g, or t
  misc_feature (236)..(236): n is a, c, g, or t
  misc_feature (240)..(240): n is a, c, g, or t
  misc_feature (249)..(249): n is a, c, g, or t
  misc_feature (251)..(251): n is a, c, g, or t
  misc_feature (254)..(254): n is a, c, g, or t
  misc_feature (262)..(262): n is a, c, g, or t
  misc_feature (264)..(264): n is a, c, g, or t
  misc_feature (282)..(282): n is a, c, g, or t
  misc_feature (302)..(302): n is a, c, g, or t
  misc_feature (313)..(313): n is a, c, g, or t
  misc_feature (321)..(321): n is a, c, g, or t
  misc_feature (340)..(340): n is a, c, g, or t
  misc_feature (356)..(356): n is a, c, g, or t
  misc_feature (369)..(369): n is a, c, g, or t
  misc_feature (380)..(380): n is a, c, g, or t
  misc_feature (382)..(382): n is a, c, g, or t
  misc_feature (392)..(392): n is a, c, g, or t
  misc_feature (410)..(410): n is a, c, g, or t
  misc_feature (412)..(412): n is a, c, g, or t
  misc_feature (414)..(414): n is a, c, g, or t
  misc_feature (422)..(422): n is a, c, g, or t
  misc_feature (469)..(469): n is a, c, g, or t
  misc_feature (513)..(513): n is a, c, g, or t
  misc_feature (520)..(520): n is a, c, g, or t
  misc_feature (523)..(523): n is a, c, g, or t
  misc_feature (525)..(525): n is a, c, g, or t
  misc_feature (535)..(535): n is a, c, g, or t
  misc_feature (564)..(564): n is a, c, g, or t
  misc_feature (608)..(608): n is a, c, g, or t
  misc_feature (630)..(630): n is a, c, g, or t
  misc_feature (651)..(651): n is a, c, g, or t
  misc_feature (659)..(659): n is a, c, g, or t
  misc_feature (661)..(661): n is a, c, g, or t
  misc_feature (670)..(670): n is a, c, g, or t
  misc_feature (705)..(705): n is a, c, g, or t
  misc_feature (707)..(707): n is a, c, g, or t
  misc_feature (769)..(769): n is a, c, g, or t
tacattgtaaanaccanaattatttgtctgaggcttgcaaaccnctggnaanaagcacanaacgcagggctctccttcatgctgccctgggccccaacncgccangcangcagganaaanctggcaaaagantnaaaaanctttgggagcagcgccanggaancagcaggccctgctccttcccangcccaaacccgccancacgggcctggactgcagccaagaangtgggccanccangatccccangnaanttcgccananggacctcttcttggagcngccttcccttccctccccanccctctccaanccccgcanaacttaaaacctgggccanaagcttggtccctcanaaaaagaccaaancaacagctgtnangctgtttctntgggtcctgtctctccantnangaagccancagggcagggcaggcctggctctcctcctggaatcacaccgtgcacncagctcagcgctgggcactcagctggggaccgggatggacaaanccttttncananaaccactgtnggggagacgtgcatggcagccggactcancctcctgcagcctccattcatgggctcttggctgggcctgaaanttgttagggcctcaactctctntggtgcagaagaacacctccncctccaanangcccctcangcttggtgccaggcttgggactgggctctggaaantnagccaaggctgctacttcaaggccctgaggacagcctccagcttcatgggccatagccaggncgccctt

SEQ ID NO: 689411 - DNA, 102 bp, Homo sapiens
atcctaacagcagacaagttctctatatcacttgttttgttgttgtagttgttgtcgtcgttgtttgagacggggtcttgctcaggtgccccggagtgcagt

SEQ ID NO: 689412 - DNA, 871 bp, Homo sapiens
  misc_feature (857)..(857): n is a, c, g, or t
agacaaggcgggggaagggggagtagcggtggcttaagccgcgcggagcagcgcaacctgggtcgctccctgttcgccgcgcctcggaccgagcccagcggagtcagtgtcctagagaccctgtaacaccacaaagcggacgaaggagtccatgtgtggggaactgtggcagcggagtgactgggacctgggaacctactgtggggccgcggcggacgagcgctcgacctcggttctgaggaaacccttttccaaagagaaatgaagaagaaaatgtatgtaccctaaatatgggagataagaagtatgaagactttggaagggtgaaagaaaagggaggataatactatttccatgttctgtgtgtacaggtgaggtgacagatgccaatatgtcttaatggtctattagaaaaggaagtgtggttttccagaaagctgtaatcatgtcttctgtatgactgtgtattcttaaaattgggcaggagggacttttcaacataggttatggattttttcttaatatcagctttgtggaataaccagagcaggtacgattagttgtcttccattttacagatgaggaacctgggatttatgttctatgacttgggtccagatctcatagtttaagaggcgaagtgatttagaactgatgtctaatctggttggagttgggtggacaattcagagttgaatagagaaatacggcagaagcgatacaaaagaatcgggtttatggtttgtgggtcacttggccaaattgaggatttttaataccgcggtgggggggaaaagtctttgtgtttaaaatgcgtggaggaaggataaaaaaggcgcggaagaaggtagagggangaggggacgtacat

SEQ ID NO: 689413 - DNA, 287 bp, Homo sapiens
tagggtacctttccgtgttttggcctcgcaagtggaactgtgacaattattccttgaggatgtgccaatgtgttgagcttcagttttcccaagtgtgttttctctcccacattcccttaggtgttcctctgatattgtttgccaaggttattctccttaaagcgcctctcggaccttgagccctcattctgtgatcggccgtgtattgtgttctcgtgcgcatatctcccgcgctccgctctcacccccaggtttcgccacatctcgcgtgaaattctcgcacaacg

SEQ ID NO: 689414 - DNA, 124 bp, Homo sapiens
cggcccgcgttcgcttagcggataggatgaaagattaagtggtatgcctcttccaaggcaacaagtaatagaaattatatttgttttaaaagcagtcagtactcttattgattcacttaagcgg

SEQ ID NO: 689415 - DNA, 222 bp, Homo sapiens
ggaggagagactcacgagctcaatagagagaaagtccatgatacaccgccattactgataccaagagaggtaggatctcacacagaaagaaaattctgatagtgacgaaagagaatgtctcttaataagtcgtgatcatgatatactcaatatgacagcagggaaaaaaaggctgatagagatcaaagtcccttctcaaaaataaaacaaagcagtcagttc

SEQ ID NO: 689416 - DNA, 134 bp, Homo sapiens
  misc_feature (57)..(57): n is a, c, g, or t
gacaaccttgagccaaaccatttcaccccaaataaacgtataggcgatagacattcnaaacctcggcgcagatagatgatagtacccgcaaggagaagatcgaaaaaattataaccacgcataatatagcacgg

SEQ ID NO: 689417 - DNA, 609 bp, Homo sapiens
gtatccatgtcacacatttacttctgcgttcgtatctcctcaggcaaaagtggagggtgccttatgggccctcctcatagggttgtctctgcatacacgaacctaacccatagttggtttggtgccagaaaaactgagctatgtctgaacaaagatgtcgtgcctgggtgtacagtgaacaacagttggtttaaaatatgaggggcaaggaggaggatgcatttcaaaagcttgattgatgtgttcagagctaaattaagaggagttttcagatcacaaactggttaccattttttgtcagagtgtctgatgcggccactcattcggctccccagaattcctagactgggttaatagggtcatattgtgaatgtctcactacaaaatgacttgagtccagtgaaatctcattagggtttaagaatatttcagggatccttaatgtatagatttaggtattctgaaactggattttattttattttattttctgatgctattattatatttctaacaattatactttaagttctagggtacatgtgcgcaacgtgtaggtatgttacatatgtatacatgtgccaggtaggtgtgctgccccattaactc

SEQ ID NO: 689418 - DNA, 99 bp, Homo sapiens
ggatttgctggtgcagtacaactaggcttaatagggacatgaatgtatgttatggtaaatgggaccaaataaagtcacagaagagttttcaaaaaaaaa

SEQ ID NO: 689419 - DNA, 317 bp, Homo sapiens
tcatctgacatttcttcgtgacagacgtctgatcgacccgtgtgatccctaagcctagctgcacatctccatccctggactatgacgtaatgtgacaccggccttattgtgaatgaccggcgggagccacagggacacgttgctctccagctccagcgggggcaccagcactgattggtgtcccgagtagacactgcacagacaccacagggcaaaaccaaggccacagtaggggtcgaggcagatggcgatctgccgcgaggggtacagctcacactgcagctttatggagcggcataaggcgcttgtggccgcgt

SEQ ID NO: 689420 - DNA, 931 bp, Homo sapiens
agggtagaaaagaggttcaagatacagccggaggaagtggtaaggactgaggtaaagggtcccatgcagccctcgggatgagaccctagccaccatccaactcccaagttaaagaccaagagttataggagggagtccatcctcagctccagcccaaatgcaggcctccaaagcggaccctctcgtatgctgcttggtaagtgccagagagccagggcattgtttccatgcagagagtgtgaaaagggtgtttgacaaggatcaagagtcgaaatgcccgatatgaacgcggcaccgccttcaggaccacgtggagcccatcatcagggctgaagtggccagtgaagcccttccagctaaaggaagaggagctgggagctcgacagtcggcctccctgcagtggtgactcccgtggcagcaagtccgaatggggcctccagtgtctgcccctcctcccattcggcctctgccagggcgtttggggcacccctctgcctccccgccaccctccctgtcccctgttggccaacctgcctgcaaacatggagggcatttggccacagataggcaggaggagctcagttgtcggacagctatgcagtccctgtccggtggtgctggaggtctcgcactctccttaggtgtcataagtctctcaccgcttctttacccttaccacttactagagccagggaggctctggaggaggggcaaaatattagcttctgggtagcatcttaaatcattagcctgcagttgtggcggtcttggtttacatgtgttagatgaaggccaagagcttagagaatcagtgcgaaaaaaccttgagatcgtccaacacggctgggcccctcctgggggcggggactctaccttccagattcagtccctagtcttgcgatatactccgcagtgttcggtagtatttgc

SEQ ID NO: 689421 - DNA, 355 bp, Homo sapiens
agatcattgtgtgtgtataccacattttctttattcatttgtccactgatgggcagttacattgatcccatgttttggctattgtgaatagcacttgcaaataaacatggcaatgcagatgtctgtttgatatcttgatttcttttcttttggctatatacccagtagtagaattcctgggtcatatggtaggtctatttttaatttttaaaggaacctccgtggtttccatagaggctgtactaatttacatttctacccagtatacattccctttcttcacattcttcccagcatgttattccctgtctttttgatttctctgatgattagtgatattgagcatattttcatt

SEQ ID NO: 689422 - DNA, 290 bp, Homo sapiens
ctgcgcccccgctggtgacagactgagactctgtctcacaaaaatagaactaataaaaagtattgtgtagcgggaagctctcaaaccacgttcttcctctactctcacaccaccacaacaatcatcaacacataacacatctgtgaccaaaagtgtgggggtttttcacctcagcaccaagcagtggacaccagctcggtgttctccaattcaggttgggggctcagtcttcaagactgcctgcacacccctggacaccagttgcatgtctggggccctggatcttatga

SEQ ID NO: 689423 - DNA, 109 bp, Homo sapiens
cctcaaggattttgcgaaactcatccggtcgagctgctgaagatgccgcgatcaccaccgtgcgccgttcgtcgacagtacctaggtcttcacgtgcttagtgttgatc

SEQ ID NO: 689424 - DNA, 126 bp, Homo sapiens
atctcaaagcccagaaagctgaaggttcggagcaaggacagctttgcacgttctcctggagttcgctgaggagcagctgcgatgccgaccaatgtcttcatttgcgttccaccatgaaccgctgag

SEQ ID NO: 689425 - DNA, 583 bp, Homo sapiens
  misc_feature (16)..(16): n is a, c, g, or t
  misc_feature (18)..(18): n is a, c, g, or t
agcgggcgggagctgngnctctccagctctcaacgtctcaactgctgttcatcgccaggctctaagacagcgagccatgttccttcttctggtgcttctcactggacttggtgggatgcatgcagacctcaatcctcataaaatcttcctgcagaccacaattccagagaagatttcatcatcggatgcaaaaacagatccagaacataatgttatttacatgattaccatagggaaagccatattttgtccatctcaaaaagcaatcaattttatcttcagcttctgttattaattcttatgacgaaaatgacatccgtcattccaaacctctgctagttcagatggattgcaattataatggatatgttgcgggtattccaaattctcttgtgactctcagcgtatgttcaggactcaggttgtagactacttaaagatactcaatttgccagtattatatcctgctagcctatgaattaattctccatgtatctgttctaattctataatcacctttgttatatttcagttccttaaggactgaaccaaaattactaataaaatagtattgatattcaaa

SEQ ID NO: 689426 - DNA, 214 bp, Homo sapiens
ctaaaacaccgattatgaaaagagaaaaggaggagagggcttaaccagtaacctacaaccttgaatgctactgcttggagagaggagagtaacaaatacattatcagaaactggcccaaaccaaggaggaacaagacacaatttctctctcattgctcttgtcactgctgagggttttaaactatgaaataaatcatctggcctgaatctcatg

SEQ ID NO: 689427 - DNA, 1953 bp, Homo sapiens
  misc_feature (16)..(16): n is a, c, g, or t
  misc_feature (18)..(18): n is a, c, g, or t
agcgggcgggagctgngnctctccagctctcaacgtctcaactgctgttcatcgccaggctctaagacagcgagccatgttccttcttctggtgcttctcactggacttggtgggatgcatgcagacctcaatcctcataaaatcttcctgcagaccacaattccagagaagatttcatcatcggatgcaaaaacagatccagaacataatgttatttacatgattaccatagggaaagccatattttgtccatctcaaaaagcaatcaattttatcttcagcttctgttattaattcttatgacgaaaatgacatccgtcattccaaacctctgctagttcagatggattgcaattataatggatatgttgcgggtattccaaattctcttgtgactctcagcgtatgttcaggactcaggggaacaatgcagctgaaaaacatctcatatggaattgaaccgatggaggctgtatcaggatttatacacaagatttatgaagaaaaatatgctgacactaatattctcttagaagaaaatgacacttatacttggtttaattcagagtatcaagtcagaaaaagttcagaaaaaactgactttattaagttattccctcgatatattgaaatgcatattgttgtggacaaaaatttggtactctggtggtgtaaaggattttaacatctgtagcttggatgactttaaatatatttcttctcataatggccttacatgtcttcagacaaaccctcttgaaatgccaacctacacacacaggagaatatgtggcaatgggttgttggaaggaagtgaagaatgtgactgtggcactaaagacttcaaaccggctaatatgatttgtaggaaatcagttggtaaagaatgcgatttcactgaatattgcaatggggaccttccatactgtttgcctgacacttatgtacgtgatggagaatattgtgattcaggtggagccttctgttttcaaggaaagtgtcggacttttgacaaacaatgtgatgatttaattggaagaggttcaagaggtgctccggttttctgttatgatgaaattaataccagaggagacaattttggaaactgtggcactgcacactgtctttttcaacatattctatgtggaaaattagtctgtacatgggaacacagagacttaatatcacgtccaaatttatctgtgatttatgcacatgtacgagaccaaacatgtgtgtctacatacctacccaggaggacgccacctccagtaaattcacctatttcaatcacatcatattattcagctgaagacagagatgaaacatttgtacaagatggttccatgtgtggtcctgatatgtattgtttcgaaatgcattgtaaacatgttagattcctgatgaatttaaaattgtgtgatgcttctaatcattgtgatcgtcatggagtttgcaacaattttaaccattgccattgtgaaaagggatataatcctccttactgccaaccaaagcaaggagcatttggaagtattgatgatggacgcttagtaccaccaactgagagaagttacatggaggagggaagataggccacttttcaaaaacaacggtttcaactcattttctacatttctctacctgtgcttcttattactactgccattttaataaaacagaaaaaattgagagagctatgctatagaggggaaaatgaaagtgagagctctgtgtcagaagaaagcagcagtaacagcaagtcatccctcagtgaaagcaccagtctctaacaaccttgaatgctactgcttggagagaggagagtaacaaatacattatcagaaactggcccaaaccaaggaggaacaagacacaatttctctctcattgctcttgtcactgctgagggttttaaactatgaaataaatcatctggcctgaatctcatg

SEQ ID NO: 689428 - DNA, 201 bp, Homo sapiens
ggtaccgcttctgtgtctgttcgcgcggcaattcgcgacgaaactcgtcaccagattcgacagcaagcggcggctgctgacctgctgtaaacgatagagcatcggctgatgcatactgctggcccagaacgccagccaggctttcatcgccgcactgctcacctgcgtttcatcgaagtttccgccaacaatcgcctgtaa

SEQ ID NO: 689429 - DNA, 137 bp, Homo sapiens
atatttaactggatacattcgttccgcagcatgacctctgagtgctctccaaatgggatgtcataaggcaaagctcataacctgacacgttcacatgcacacataaaaggtttctcatcatttcggtacttggaaaa

SEQ ID NO: 689430 - DNA, 853 bp, Homo sapiens
ggagctgccgccgaagcacagccgagggcactatggcttctgagttacagtgaatgatgaagtcatccaaagtttttaatgctctgacccgtccaggaaatcttctacacaagaggagatcaaaacagagaaagaaagcagttctcttctgtttaagcgatgacaaaagacaaataatgtgtagaggaagcaaagcagatctgtggtgggtgacatgtggtgatactgtagaggacccctaacatctttggtgaagtgtgtacctctgaaatgatgtgcgcgatatgcttgtgtacgatgccaaattagaaacaaaagagtctaagaaagaagacctagtatttatattctgggctctgaaaagtgcacctttaaaaagcaagatgatttatgctagctctaaagatgccattaaaaacgaaatttacaggtattaaacatgagtggaagtaaatggtgtggatgatattacggaccgttcgacactggggagagaaatcgggaggcactgtagtagtttcacttgaaggaaacaccattataaaaatgacagtcaagtgccatctggatccttaaggagctttcaactttcttccagcttcagtccatttgtcaaaagaatcacgcgtgggtaatagttgaatttccccctttcccagtgaggccttcccaacaccatgactgcggaactatcattatttaaggaggcctatcaggatgcattcaactggtgcaactggtactttatatagaagcaaagaatggctctggcatatttcaggcaaacatggttattggccctgagaagccaaagtgtggtcgcatgaagtagcaaggacagaaaatgatcgga

SEQ ID NO: 689431 - DNA, 1886 bp, Homo sapiens
  misc_feature (16)..(16): n is a, c, g, or t
  misc_feature (18)..(18): n is a, c, g, or t
agcgggcgggagctgngnctctccagctctcaacgtctcaactgctgttcatcgccaggctctaagacagcgagccatgttccttcttctggtgcttctcactggacttggtgggatgcatgcagacctcaatcctcataaaatcttcctgcagaccacaattccagagaagatttcatcatcggatgcaaaaacagatccagaacataatgttatttacatgattaccatagggaaagccatattttgtccatctcaaaaagcaatcaattttatcttcagcttctgttattaattcttatgacgaaaatgacatccgtcattccaaacctctgctagttcagatggattgcaattataatggatatgttgcgggtattccaaattctcttgtgactctcagcgtatgttcaggactcaggggaacaatgcagctgaaaaacatctcatatggaattgaaccgatggaggctgtatcaggatttatacacaagatttatgaagaaaaatatgctgacactaatattctcttagaagaaaatgacacttatacttggtttaattcagagtatcaagtcagaaaaagttcagaatactctggtggtgtaaaggattttaacatctgtagcttggatgactttaaatatatttcttctcataatggccttacatgtcttcagacaaaccctcttgaaatgccaacctacacacacaggagaatatgtggcaatgggttgttggaaggaagtgaagaatgtgactgtggcactaaagacttcaaaccggctaatatgatttgtaggaaatcagttggtaaagaatgcgatttcactgaatattgcaatggggaccttccatactgtttgcctgacacttatgtacgtgatggagaatattgtgattcaggtggagccttctgttttcaaggaaagtgtcggacttttgacaaacaatgtgatgatttaattggaagaggttcaagaggtgctccggttttctgttatgatgaaattaataccagaggagacaattttggaaactgtggcactgcacactgtctttttcaacatattctatgtggaaaattagtctgtacatgggaacacagagacttaatatcacgtccaaatttatctgtgatttatgcacatgtacgagaccaaacatgtgtgtctacatacctacccaggaggacgccacctccagtaaattcacctatttcaatcacatcatattattcagctgaagacagagatgaaacatttgtacaagatggttccatgtgtggtcctgatatgtattgtttcgaaatgcattgtaaacatgttagattcctgatgaatttaaaattgtgtgatgcttctaatcattgtgatcgtcatggagtttgcaacaattttaaccattgccattgtgaaaagggatataatcctccttactgccaaccaaagcaaggagcatttggaagtattgatgatggacgcttagtaccaccaactgagagaagttacatggaggagggaagataggccacttttcaaaaacaacggtttcaactcattttctacatttctctacctgtgcttcttattactactgccattttaataaaacagaaaaaattgagagagctatgctatagaggggaaaatgaaagtgagagctctgtgtcagaagaaagcagcagtaacagcaagtcatccctcagtgaaagcaccagtctctaacaaccttgaatgctactgcttggagagaggagagtaacaaatacattatcagaaactggcccaaaccaaggaggaacaagacacaatttctctctcattgctcttgtcactgctgagggttttaaactatgaaataaatcatctggcctgaatctcatg

SEQ ID NO: 689432 - DNA, 1770 bp, Homo sapiens
  misc_feature (16)..(16): n is a, c, g, or t
  misc_feature (18)..(18): n is a, c, g, or t
agcgggcgggagctgngnctctccagctctcaacgtctcaactgctgttcatcgccaggctctaagacagcgagccatgttccttcttctggtgcttctcactggacttggtgggatgcatgcagacctcaatcctcataaaatcttcctgcagaccacaattccagagaagatttcatcatcggatgcaaaaacagatccagaacataatgttatttacatgattaccatagggaaagccatattttgtccatctcaaaaagcaatcaattttatcttcagcttctgttattaattcttatgacgaaaatgacatccgtcattccaaacctctgctagttcagatggattgcaattataatggatatgttgcgggtattccaaattctcttgtgactctcagcgtatgttcaggactcaggggaacaatgcagctgaaaaacatctcatatggaattgaaccgatggaggctgtatcaggatttatacacaagatttatgaagaaaaatatgctgacactaatattctcttagaagaaaatgacacttatacttggtttaattcagagtatcaagtcagaaaaagttcagaaaaaactgactttattaagttattccctcgatatattgaaatgcatattgttgtggacaaaaatttggttcaaaccggctaatatgatttgtaggaaatcagttggtaaagaatgcgatttcactgaatattgcaatggggaccttccatactgtttgcctgacacttatgtacgtgatggagaatattgtgattcaggtggagccttctgttttcaaggaaagtgtcggacttttgacaaacaatgtgatgatttaattggaagaggttcaagaggtgctccggttttctgttatgatgaaattaataccagaggagacaattttggaaactgtggcactgcacactgtctttttcaacatattctatgtggaaaattagtctgtacatgggaacacagagacttaatatcacgtccaaatttatctgtgatttatgcacatgtacgagaccaaacatgtgtgtctacatacctacccaggaggacgccacctccagtaaattcacctatttcaatcacatcatattattcagctgaagacagagatgaaacatttgtacaagatggttccatgtgtggtcctgatatgtattgtttcgaaatgcattgtaaacatgttagattcctgatgaatttaaaattgtgtgatgcttctaatcattgtgatcgtcatggagtttgcaacaattttaaccattgccattgtgaaaagggatataatcctccttactgccaaccaaagcaaggagcatttggaagtattgatgatggacgcttagtaccaccaactgagagaagttacatggaggagggaagataggccacttttcaaaaacaacggtttcaactcattttctacatttctctacctgtgcttcttattactactgccattttaataaaacagaaaaaattgagagagctatgctatagaggggaaaatgaaagtgagagctctgtgtcagaagaaagcagcagtaacagcaagtcatccctcagtgaaagcaccagtctctaacaaccttgaatgctactgcttggagagaggagagtaacaaatacattatcagaaactggcccaaaccaaggaggaacaagacacaatttctctctcattgctcttgtcactgctgagggttttaaactatgaaataaatcatctggcctgaatctcatg

SEQ ID NO: 689433 - DNA, 257 bp, Homo sapiens
  misc_feature (3)..(3): n is a, c, g, or t
agnagatcccgctgcgctcttatgagtatacacactttaatttatcttttggggaggataggtgagtcagcaatacactggtttggtggtgtggtgctcacactgtatccagcactttggaggctgaggtgggaggatcacttagctcagaattcaagacagctgggcacaaagtgagaccgccatctctacaaaaaaaatacaaaaattagccaggcatggtgtcccgtgcctgtgtcctcaactactcaggaggc

SEQ ID NO: 689434 - DNA, 1703 bp, Homo sapiens
  misc_feature (16)..(16): n is a, c, g, or t
  misc_feature (18)..(18): n is a, c, g, or t
agcgggcgggagctgngnctctccagctctcaacgtctcaactgctgttcatcgccaggctctaagacagcgagccatgttccttcttctggtgcttctcactggacttggtgggatgcatgcagacctcaatcctcataaaatcttcctgcagaccacaattccagagaagatttcatcatcggatgcaaaaacagatccagaacataatgttatttacatgattaccatagggaaagccatattttgtccatctcaaaaagcaatcaattttatcttcagcttctgttattaattcttatgacgaaaatgacatccgtcattccaaacctctgctagttcagatggattgcaattataatggatatgttgcgggtattccaaattctcttgtgactctcagcgtatgttcaggactcaggggaacaatgcagctgaaaaacatctcatatggaattgaaccgatggaggctgtatcaggatttatacacaagatttatgaagaaaaatatgctgacactaatattctcttagaagaaaatgacacttatacttggtttaattcagagtatcaagtcagaaaaagttcagaattcaaaccggctaatatgatttgtaggaaatcagttggtaaagaatgcgatttcactgaatattgcaatggggaccttccatactgtttgcctgacacttatgtacgtgatggagaatattgtgattcaggtggagccttctgttttcaaggaaagtgtcggacttttgacaaacaatgtgatgatttaattggaagaggttcaagaggtgctccggttttctgttatgatgaaattaataccagaggagacaattttggaaactgtggcactgcacactgtctttttcaacatattctatgtggaaaattagtctgtacatgggaacacagagacttaatatcacgtccaaatttatctgtgatttatgcacatgtacgagaccaaacatgtgtgtctacatacctacccaggaggacgccacctccagtaaattcacctatttcaatcacatcatattattcagctgaagacagagatgaaacatttgtacaagatggttccatgtgtggtcctgatatgtattgtttcgaaatgcattgtaaacatgttagattcctgatgaatttaaaattgtgtgatgcttctaatcattgtgatcgtcatggagtttgcaacaattttaaccattgccattgtgaaaagggatataatcctccttactgccaaccaaagcaaggagcatttggaagtattgatgatggacgcttagtaccaccaactgagagaagttacatggaggagggaagataggccacttttcaaaaacaacggtttcaactcattttctacatttctctacctgtgcttcttattactactgccattttaataaaacagaaaaaattgagagagctatgctatagaggggaaaatgaaagtgagagctctgtgtcagaagaaagcagcagtaacagcaagtcatccctcagtgaaagcaccagtctctaacaaccttgaatgctactgcttggagagaggagagtaacaaatacattatcagaaactggcccaaaccaaggaggaacaagacacaatttctctctcattgctcttgtcactgctgagggttttaaactatgaaataaatcatctggcctgaatctcatg

SEQ ID NO: 689435 - DNA, 1942 bp, Homo sapiens
  misc_feature (16)..(16): n is a, c, g, or t
  misc_feature (18)..(18): n is a, c, g, or t
agcgggcgggagctgngnctctccagctctcaacgtctcaactgctgttcatcgccaggctctaagacagcgagccatgttccttcttctggtgcttctcactggacttggtgggatgcatgcagacctcaatcctcataaaatcttcctgcagaccacaattccagagaagatttcatcatcggatgcaaaaacagatccagaacataatatcaattttatcttcagcttctgttattaattcttatgacgaaaatgacatccgtcattccaaacctctgctagttcagatggattgcaattataatggatatgttgcgggtattccaaattctcttgtgactctcagcgtatgttcaggactcaggggaacaatgcagctgaaaaacatctcatatggaattgaaccgatggaggctgtatcaggatttatacacaagatttatgaagaaaaatatgctgacactaatattctcttagaagaaaatgacacttatacttggtttaattcagagtatcaagtcagaaaaagttcagaaaaaactgactttattaagttattccctcgatatattgaaatgcatattgttgtggacaaaaatttggcggaggtctcgaatctgttgccccagactggagtgccagtggcatgatcttgggttcaccaaaacctctgcctttctgggttcaagcgattcatctgccttcagcctcccaagtagctgggactgcaaggtactctggtggtgtaaaggattttaacatctgtagcttggatgactttaaatatatttcttctcataatggccttacatgtcttcagacaaaccctcttgaaatgccaacctacacacacaggagaatatgtggcaatgggttgttggaaggaagtgaagaatgtgactgtggcactaaagacttcaaaccggctaatatgatttgtaggaaatcagttggtaaagaatgcgatttcactgaatattgcaatggggaccttccatactgtttgcctgacacttatgtacgtgatggagaatattgtgattcaggtggagccttctgttttcaaggaaagtgtcggacttttgacaaacaatgtgatgatttaattggaagaggttcaagaggtgctccggttttctgttatgatgaaattaataccagaggagacaattttggaaactgtggcactgcacactgtctttttcaacatattctatgtggaaaattagtctgtacatgggaacacagagacttaatatcacgtccaaatttatctgtgatttatgcacatgtacgagaccaaacatgtgtgtctacatacctacccaggaggacgccacctccagtaaattcacctatttcaatcacatcatattattcagctgaagacagagatgaaacatttgtacaagatggttccatgtgtggtcctgatatggtttgcaacaattttaaccattgccattgtgaaaagggatataatcctccttactgccaaccaaagcaaggagcatttggaagtattgatgatggacgcttagtaccaccaactgagagaagttacatggaggagggaagataggccacttttcaaaaacaacggtttcaactcattttctacatttctctacctgtgcttcttattactactgccattttaataaaacagaaaaaattgagagagctatgctatagaggggaaaatgaaagtgagagctctgtgtcagaagaaagcagcagtaacagcaagtcatccctcagtgaaagcaccagtctctaacaaccttgaatgctactgcttggagagaggagagtaacaaatacattatcagaaactggcccaaaccaaggaggaacaagacacaatttctctctcattgctcttgtcactgctgagggttttaaactatgaaataaatcatctggcctgaatctcatg

SEQ ID NO: 689436 - DNA, 171 bp, Homo sapiens
actagataacttctctttttttccactttcaccagtataagaggagagttcttattgcaataccataatgcagctgtacagccattagtactgacgtgctggctaatggcaggccagtgctagccttcctagaatggtacgtcatgctaggggtcaagacggccagggctc

SEQ ID NO: 689437 - DNA, 303 bp, Homo sapiens
  misc_feature (35)..(35): n is a, c, g, or t
  misc_feature (108)..(108): n is a, c, g, or t
  misc_feature (198)..(198): n is a, c, g, or t
  misc_feature (224)..(224): n is a, c, g, or t
  misc_feature (228)..(228): n is a, c, g, or t
gcggtacgaggcgcgcgctcggggtcccggtcgcnaggaggaggaggatgtggcgcgcggaggggaaatggctgccgaaaacaagccggaagagcgtttcccaaagtntattctgcggaactagcacctactgttttctcaacaccgtgccacctatagaagatgatcatgggaacagcaatagtagtcatgtaaaantctttttaccgaaaaagctgcttgantgtntgccgaaatgttcaagtttaccaaaagagaggcaccgcttggaacactaaatgagagatcatgatgcagccgtcc

SEQ ID NO: 689438 - DNA, 1629 bp, Homo sapiens
  misc_feature (16)..(16): n is a, c, g, or t
  misc_feature (18)..(18): n is a, c, g, or t
agcgggcgggagctgngnctctccagctctcaacgtctcaactgctgttcatcgccaggctctaagacagcgagccatgttccttcttctggtgcttctcactggacttggtgggatgcatgcagacctcaatcctcataaaatcttcctgcagaccacaattccagagaagatttcatcatcggatgcaaaaacagatccagaacataatatcaattttatcttcagcttctgttattaattcttatgacgaaaatgacatccgtcattccaaacctctgctagttcagatggattgcaattataatggatatgttgcgggtattccaaattctcttgtgactctcagcgtatgttcaggactcaggggaacaatgcagctgaaaaacatctcatatggaattgaaccgatggaggctgtatcaggatttatacacaagatttatgaagaaaaatatgctgacactaatattctcttagaagaaaatgacacttatacttggtttaattcagagtatcaagtcagaaaaagttcagaaaaaactgactttattaagttattccctcgatatattgaaatgcatattgttgtggacaaaaatttggttcaaaccggctaatatgatttgtaggaaatcagttggtaaagaatgcgatttcactgaatattgcaatggggaccttccatactgtttgcctgacacttatgtacgtgatggagaatattgtgattcaggtggagccttctgttttcaaggaaagtgtcggacttttgacaaacaatgtgatgatttaattggaagaggttcaagaggtgctccggttttctgttatgatgaaattaataccagaggagacaattttggaaactgtggcactgcacactgtctttttcaacatattctatgtggaaaattagtctgtacatgggaacacagagacttaatatcacgtccaaatttatctgtgatttatgcacatgtacgagaccaaacatgtgtgtctacatacctacccaggaggacgccacctccagtaaattcacctatttcaatcacatcatattattcagctgaagacagagatgaaacatttgtacaagatggttccatgtgtggtcctgatatggtttgcaacaattttaaccattgccattgtgaaaagggatataatcctccttactgccaaccaaagcaaggagcatttggaagtattgatgatggacgcttagtaccaccaactgagagaagttacatggaggagggaagataggccacttttcaaaaacaacggtttcaactcattttctacatttctctacctgtgcttcttattactactgccattttaataaaacagaaaaaattgagagagctatgctatagaggggaaaatgaaagtgagagctctgtgtcagaagaaagcagcagtaacagcaagtcatccctcagtgaaagcaccagtctctaacaaccttgaatgctactgcttggagagaggagagtaacaaatacattatcagaaactggcccaaaccaaggaggaacaagacacaatttctctctcattgctcttgtcactgctgagggttttaaactatgaaataaatcatctggcctgaatctcatg

SEQ ID NO: 689439 - DNA, 1745 bp, Homo sapiens
  misc_feature (16)..(16): n is a, c, g, or t
  misc_feature (18)..(18): n is a, c, g, or t
agcgggcgggagctgngnctctccagctctcaacgtctcaactgctgttcatcgccaggctctaagacagcgagccatgttccttcttctggtgcttctcactggacttggtgggatgcatgcagacctcaatcctcataaaatcttcctgcagaccacaattccagagaagatttcatcatcggatgcaaaaacagatccagaacataatatcaattttatcttcagcttctgttattaattcttatgacgaaaatgacatccgtcattccaaacctctgctagttcagatggattgcaattataatggatatgttgcgggtattccaaattctcttgtgactctcagcgtatgttcaggactcaggggaacaatgcagctgaaaaacatctcatatggaattgaaccgatggaggctgtatcaggatttatacacaagatttatgaagaaaaatatgctgacactaatattctcttagaagaaaatgacacttatacttggtttaattcagagtatcaagtcagaaaaagttcagaatactctggtggtgtaaaggattttaacatctgtagcttggatgactttaaatatatttcttctcataatggccttacatgtcttcagacaaaccctcttgaaatgccaacctacacacacaggagaatatgtggcaatgggttgttggaaggaagtgaagaatgtgactgtggcactaaagacttcaaaccggctaatatgatttgtaggaaatcagttggtaaagaatgcgatttcactgaatattgcaatggggaccttccatactgtttgcctgacacttatgtacgtgatggagaatattgtgattcaggtggagccttctgttttcaaggaaagtgtcggacttttgacaaacaatgtgatgatttaattggaagaggttcaagaggtgctccggttttctgttatgatgaaattaataccagaggagacaattttggaaactgtggcactgcacactgtctttttcaacatattctatgtggaaaattagtctgtacatgggaacacagagacttaatatcacgtccaaatttatctgtgatttatgcacatgtacgagaccaaacatgtgtgtctacatacctacccaggaggacgccacctccagtaaattcacctatttcaatcacatcatattattcagctgaagacagagatgaaacatttgtacaagatggttccatgtgtggtcctgatatggtttgcaacaattttaaccattgccattgtgaaaagggatataatcctccttactgccaaccaaagcaaggagcatttggaagtattgatgatggacgcttagtaccaccaactgagagaagttacatggaggagggaagataggccacttttcaaaaacaacggtttcaactcattttctacatttctctacctgtgcttcttattactactgccattttaataaaacagaaaaaattgagagagctatgctatagaggggaaaatgaaagtgagagctctgtgtcagaagaaagcagcagtaacagcaagtcatccctcagtgaaagcaccagtctctaacaaccttgaatgctactgcttggagagaggagagtaacaaatacattatcagaaactggcccaaaccaaggaggaacaagacacaatttctctctcattgctcttgtcactgctgagggttttaaactatgaaataaatcatctggcctgaatctcatg

SEQ ID NO: 689440 - DNA, 153 bp, Homo sapiens
gtagtttcacatttcatcttttttcttctaaacagtatgtattcatcttctaatttccctatcttctctattcatgtacaccttgcaaggtgcaggttaattcaagtcctgttgtggcagtttgcagggcccagcttctcacatttttggcag

SEQ ID NO: 689441 - DNA, 1732 bp, Homo sapiens
  misc_feature (16)..(16): n is a, c, g, or t
  misc_feature (18)..(18): n is a, c, g, or t
agcgggcgggagctgngnctctccagctctcaacgtctcaactgctgttcatcgccaggctctaagacagcgagccatgttccttcttctggtgcttctcactggacttggtgggatgcatgcagacctcaatcaattttatcttcagcttctgttattaattcttatgacgaaaatgacatccgtcattccaaacctctgctagttcagatggattgcaattataatggatatgttgcgggtattccaaattctcttgtgactctcagcgtatgttcaggactcaggggaacaatgcagctgaaaaacatctcatatggaattgaaccgatggaggctgtatcaggatttatacacaagatttatgaagaaaaatatgctgacactaatattctcttagaagaaaatgacacttatacttggtttaattcagagtatcaagtcagaaaaagttcagaaaaaactgactttattaagttattccctcgatatattgaaatgcatattgttgtggacaaaaatttggtactctggtggtgtaaaggattttaacatctgtagcttggatgactttaaatatatttcttctcataatggccttacatgtcttcagacaaaccctcttgaaatgccaacctacacacacaggagaatatgtggcaatgggttgttggaaggaagtgaagaatgtgactgtggcactaaagacttcaaaccggctaatatgatttgtaggaaatcagttggtaaagaatgcgatttcactgaatattgcaatggggaccttccatactgtttgcctgacacttatgtacgtgatggagaatattgtgattcaggtggagccttctgttttcaaggaaagtgtcggacttttgacaaacaatgtgatgatttaattggaagaggttcaagaggtgctccggttttctgttatgatgaaattaataccagaggagacaattttggaaactgtggcactgcacactgtctttttcaacatattctatgtggaaaattagtctgtacatgggaacacagagacttaatatcacgtccaaatttatctgtgatttatgcacatgtacgagaccaaacatgtgtgtctacatacctacccaggaggacgccacctccagtaaattcacctatttcaatcacatcatattattcagctgaagacagagatgaaacatttgtacaagatggttccatgtgtggtcctgatatggtttgcaacaattttaaccattgccattgtgaaaagggatataatcctccttactgccaaccaaagcaaggagcatttggaagtattgatgatggacgcttagtaccaccaactgagagaagttacatggaggagggaagataggccacttttcaaaaacaacggtttcaactcattttctacatttctctacctgtgcttcttattactactgccattttaataaaacagaaaaaattgagagagctatgctatagaggggaaaatgaaagtgagagctctgtgtcagaagaaagcagcagtaacagcaagtcatccctcagtgaaagcaccagtctctaacaaccttgaatgctactgcttggagagaggagagtaacaaatacattatcagaaactggcccaaaccaaggaggaacaagacacaatttctctctcattgctcttgtcactgctgagggttttaaactatgaaataaatcatctggcctgaatctcatg

SEQ ID NO: 689442 - DNA, 1727 bp, Homo sapiens
tcaaaaattggtggggtttggttaaatttgggctggtgtccctttactttggttacaaaaagttcctttggggtcttaaatctggccctttcccccccttctttttgtgggagttttcccagtgaattaacatgtgtgccccaaataaacacactataaccaactcctatttgcaagagctattatcgtgccaccaaccttcccaggtgggtctccgtggcgccgcaaaacgagaaaaaattaacacggtgtgattctacaaaaaagagtcgccaagagtgtgaagaggttctctcttttctttctatactccacaaccatatagtgtggggggttagtgtcccccttataaggttcaccattcagtgtgcatatctagagtgtgcgggattctccactgtgccaaactctctttcagagtctcccccacaatatactctctctctattttcgcgtggagatcatagaaagagtgtatatctctccaagagagggagagagccccaccacaagaggagagccagcagccttggtggcgggccaatatcgctgtggacaaagaaccacttctcacgtggggttatagagaaaggagacgaacactaaatttgtctttaagagagtctccaaaatttaaaaatagtgtggagggacggtgggacaaaatgagggcaggtgtatcccgagaatgtttaaacatatcaccgggggttttttacaaaatgagggctatcacgcgagaatatacaagcgaggaaaaagagaggggtgggggtttaaaatataaaaaaacacgtgggaaaatgtgtggcttctcacagaagagggtacaccacagatgggaaggggtttgtgatgttcaaacaacaggtgtctatatattttcacccgtttcacaagccaaattttttcccccaggataaaaacgtctccgggagacaaaagcgggggatccccgtggtgggaaaggcaccacccaaaaaaatactggtgggaagggcgggagacaccaccactagatggtgtccttatttgcgccgcaaattataaacccaggaggggggaggcggagaattgttctgcttataaaggagaaaccccccaccagtgtattgatcggtcttcttacgaaacaaggcgggtggtagtacttgacacagacgacagcagagcagcttattaaccccacttatagttgtccaccacaacagcgtggtgaggggatgaacaatcttgaccgaagcccatccttgtttctcaaaccacagttggtgtgcaaacacgaaggacgattatacacagtgttgggggcaatatctaaccactcgtagtgggaagaaaggcacggttctttcatggaacaaacacaaccgtggcgtgcggcctccaacggtgtccacagagaagaaccccccggggtagaacgcattaaacaaacactttgcgccacgaagtaaggcacctccccagagaagaaaggggtgatgcgagcacacacggcgagggcggagcgagagcagcgtgaccacagtgcaccaacaaaggcggctactacacctgtctctaaggagaagaagaccccagctgcagggagcaacacaagtggggggtggcgcagcagacatagcaccccgcaggagataaaaggaaacacccccctcctcaaagagaagaaccgctactcatcctcggagtggagagagcagcacaaatgcaagtactccact

SEQ ID NO: 689443 - DNA, 849 bp, Homo sapiens
  misc_feature (56)..(56): n is a, c, g, or t
  misc_feature (71)..(71): n is a, c, g, or t
  misc_feature (80)..(80): n is a, c, g, or t
  misc_feature (91)..(91): n is a, c, g, or t
gctttccgctcggctgttttcctgcgcaggagccgcagggccgtaggcagcatggngcccagcggaatggntggtcttgnagccccacttncacaaggactgtcagcggcgcgtggccaggtggttcaaccagccggcccgtaagatccgcaggtgaggcccgtgcgtctcggggctggcccgtggggctcgtgcccgcggctgcggcctgtggttgcgggtggccgatgccaaggtcgggggtcgctgtctgcgacctgtggcgtggccggtgtcctggcggccttaggtcgagggtgatcgccggtgcgcttgttctccaccatgattaaggcccggactgcgaaggtggcgccgctagcggcccctgcggcgcggcgttgggatcccagtggggggccaatctgtgggggtggcccctagggtctaccggaaccaacaatggtaaggtgcccgccgggtgggtggctgcaaactagtggagagaaagctcaggggtggccctggtgttgtccacaagatggggagcggcaccatccgaaaattcttggcagctccgagggagggggaacaactccgacgggagtgcctggccagtgcaaatcgtcgcaagagcgtgaatggattaccggcaccaaaattcatccttcttccccaggaagcctcgggccccaagaggggagaagtctgctgaaagactggaggggccaccaaggtgacggacggtcaggccgcaggacgtataagagggagggcccagtcatccgtggggagacacaattaaagcgtcgagcccgatgccgccacacggggtctggatggaaaaaccggacgcgaaggtggaaaaaa

SEQ ID NO: 689444 - DNA, 604 bp, Homo sapiens
  misc_feature (56)..(56): n is a, c, g, or t
  misc_feature (71)..(71): n is a, c, g, or t
  misc_feature (80)..(80): n is a, c, g, or t
  misc_feature (91)..(91): n is a, c, g, or t
gctttccgctcggctgttttcctgcgcaggagccgcagggccgtaggcagcatggngcccagcggaatggntggtcttgnagccccacttncacaaaggagtcgtgccaggggcgttggtgcgacgatggtgtgttcacagcacggcgggcttcgtatccatcacgacagtacagtgcacggcggccaggccaagcgaagggcgcagctggatcggacgcgcagccgctcggggtcgggtcccgatccggcccattggtgcgctagcccaacggtatcggtaccaaaagcgaacggtgcagcgcacggccgctggccttcagacctggacggagcctcagcggtggccggaattcagcaagcaaggtggccccggaccatcgagatttcatgtggatccgaggagtgcggaacaagtcacacggaagtctctgcaggccaaacgtgcagcggctgaaggagtaccgctccaaaacatcatcctcttccccaggaagccctcaggccccaagaagggagacagttactgctgaacgaactgaaactggacacccagcttgacgggacccggatcatgccccgtccggaacgtctataaagacgga

SEQ ID NO: 689445 - DNA, 421 bp, Homo sapiens
  misc_feature (12)..(12): n is a, c, g, or t
  misc_feature (50)..(50): n is a, c, g, or t
  misc_feature (69)..(69): n is a, c, g, or t
  misc_feature (142)..(142): n is a, c, g, or t
  misc_feature (187)..(187): n is a, c, g, or t
  misc_feature (201)..(201): n is a, c, g, or t
  misc_feature (233)..(233): n is a, c, g, or t
  misc_feature (236)..(236): n is a, c, g, or t
  misc_feature (251)..(251): n is a, c, g, or t
  misc_feature (332)..(332): n is a, c, g, or t
  misc_feature (341)..(341): n is a, c, g, or t
  misc_feature (376)..(376): n is a, c, g, or t
caaggcccacancccccaaattgggtttccatcaaaattttgtccctgancccccaatgttttgaaaanaattgacccaaactccttccccccatggtttgaggaagatccatgctgccagcccactttgggaatccccaanatcgcctacgaggaagctgaaacggatagatgacgcccatgaaanagttacagaagaanactgacagcttgacgttctggggcccaccganaantcccagagagagaancagagatgtgaaaaacagtgaaggagactgtgcctgaggaaaacggggggcgtggctgcagttctggacgggctggccgantgcgcgggntccttgtgcagggaagagctccctgggcacctggnaccacaagaccatgttttctaagaaccattttgttcactgataca

SEQ ID NO: 689446 - DNA, 734 bp, Homo sapiens
tcggcgttcgacgacgatgggccggggaccaggatgcgttagagcattccggtcactggcgcactaggtgtcgtgccgcccgggctagacgaagaactgtgacgcaaacatagtataggagaggcctaacgcgctgtgctcttctgcgtcattgaatcacgctcgtaatactctcatcgctggtagagccaagatctgatacccccaaaatccatgccgagctgccgtacgaacaggtggcacgagtgcacgccggctatggagcatgacaggagtgtgagccatgtagggatcgaggcaacagactctactcttgcctggcgatatggtggcctcaccaagtaggagatgcaagttcatcatttaaagccaggccacagatcgcctctagatgctgcatgatgatgtgcactgtgagaaccacagagccagcacgttttctggacactaccgtcgcacttcagccattgatcaaagccgtatatgctgcactaggcctacctctgatagatactgcttaacagctccaaactcttggcgtgcgtcttgaccgagaaaggtataaactcgtgcaagatgatgcacactgccgcggttcagggttgcttgagctactagccctatagggagtcccatactagggccatcgaccgcacataccatgtgtgtgtcaagtaaagccgtgactgccaccgacttaatagtctaggggtaactgcactttgcctagctgg

SEQ ID NO: 689447 - DNA, 101 bp, Homo sapiens
gatggatgggtgagtgggtagatggatgataaatgtataggaaggtggatggatgagtgaatgggtggatggtcaaacgtgcacaaggctactgaatgctg

SEQ ID NO: 689448 - DNA, 250 bp, Homo sapiens
ctgcaggttataatggcacttgctgtggcatgagattcaacatctgatgtgtgactcagctttgtgactgtcctcactcaccggtgtgcagagtctttgtccatgaagagtggttatctactctctgctacccagtggtgagtggctgggtgtaagctgtgtgtggtgatgactaccctcacatctcagtattggccctatatcgaggtggtgatcctactagatgtctgacctgcagtgcattgcaatg

SEQ ID NO: 689449 - DNA, 491 bp, Homo sapiens
aggagggtcctcagcttatgaagatacggattgggagattaaagtaaagagaggcataagaaatggtagaagtattatttggggaacggataaaggtccatgaaattttcacaactcaggttcctcggccggggctccagctggtccttcggctcagggtcccggcttcccagaacattcggtatctacccaaagtaaacgaagtcattatacaaaaacaatactggcacgtgcatgtttatagcagcacaattcacaatggcaaaagggtggaactaactcaaatgcccaccaaacaatgaagggataaacaaacaataggatactactcagccattaaaaggaaagaattaacggcattggcagtgacctggatgagatgggaggctattattctaagtgaagtaactcaagaagggaaaaccaaacacggtatgttctcacggatatgtgggagccaagctatagctgaggaccatcgttggggtacc

SEQ ID NO: 689450 - DNA, 503 bp, Homo sapiens
tctcgtcacggggccctcttatcattgatgataaggggttcttcggcagatccctgaaatgacctccctgttggccgctctgtggatgagactttgagactagttcaggccttccagttccctgacaaacatggggaagtgggcccagctggctggaaacctggcagtgatcccctcaagcctgatgtcccaaagagcaaagaatatttttcccagcaaaagtgagcgctgggctgttttagggccaggctgcggggggcacccatgagaacaaacccttttttggattttttttttcccttagtaaaacccaagacttcagattcagccgaattgtggtgtttcacaaggccggcctttcccacaggggggggagagaccacccttttttcctttggtaggaatggcctgagttggggttgggggccggcccctggtttgtatgatgtattagtagggcccccccttaatcttttgtggtttgtattaaacttgacctggga

SEQ ID NO: 689451 - DNA, 161 bp, Homo sapiens
  misc_feature (64)..(64): n is a, c, g, or t
  misc_feature (92)..(92): n is a, c, g, or t
gcgctccggccaaccggaggtgtccagaagccccatcggggtcggcctggtacagtggctctcngcgagattcgccgctaccagaagtccancgagctgctgatcagaaagctgcctttacagcgtctggtgcgtgagatcgcgcaggacttacaaagacc

SEQ ID NO: 689452 - DNA, 369 bp, Homo sapiens
gtcacgagtgatttttatcatggacttgattgtccatgatatcttttatctactggacatcctggtactgcctctctacttagattttgtgtaggctgaaatttaaaatttttcttttaacattccttcaatgaatccagcaggtgtagaaatcgggaaccagcagtattacatggggacttattttgtttatctagcctttgggtcaagcaccctaagttgctttgctctcacttgttggatggagagggtgtggccaaagtacctgcaatataaaacttgagttttctgtactgtgaaaaataaatagactttacgtggaagaggttttttactaataatatgaaactaataatctatttcttgtga

SEQ ID NO: 689453 - DNA, 918 bp, Homo sapiens
  misc_feature (12)..(12): n is a, c, g, or t
  misc_feature (293)..(293): n is a, c, g, or t
  misc_feature (313)..(313): n is a, c, g, or t
  misc_feature (318)..(318): n is a, c, g, or t
  misc_feature (352)..(352): n is a, c, g, or t
  misc_feature (357)..(357): n is a, c, g, or t
  misc_feature (362)..(363): n is a, c, g, or t
  misc_feature (372)..(372): n is a, c, g, or t
  misc_feature (422)..(422): n is a, c, g, or t
  misc_feature (429)..(429): n is a, c, g, or t
  misc_feature (433)..(434): n is a, c, g, or t
  misc_feature (443)..(443): n is a, c, g, or t
  misc_feature (447)..(448): n is a, c, g, or t
  misc_feature (452)..(452): n is a, c, g, or t
  misc_feature (462)..(463): n is a, c, g, or t
  misc_feature (468)..(468): n is a, c, g, or t
  misc_feature (484)..(484): n is a, c, g, or t
  misc_feature (496)..(496): n is a, c, g, or t
  misc_feature (502)..(502): n is a, c, g, or t
  misc_feature (625)..(625): n is a, c, g, or t
  misc_feature (761)..(761): n is a, c, g, or t
  misc_feature (803)..(803): n is a, c, g, or t
  misc_feature (832)..(832): n is a, c, g, or t
  misc_feature (885)..(885): n is a, c, g, or t
ggctagccatgnatttcaacctgtctagccccaagtgtatgcttttaacaccacttgttactgctattataaacccctcacattccctctttctgtgcttttaagaacatttattttgaaaatttttctttgaaaacttttgatgatagctttttaattttagtgaattaatttagtaaattaattttagggttaatttacttatgaaaacttaaaaattggtaagaattttgttaaaatgttacactataagttcaaacatatatttcaagatatgtcttaaattggaagtngagatgataaaatataacgnagganatcttcatgaccttgggggaggaaaaaaatgggnagacnggacnncattaaaanaagacttcagttcatcaaagattatatgaacagacttgaaaaggcaagcnaaagggnagannaacagattnccgnncggncgcgcggcgnngcggncggcgcgccgagcggnaaaagaaggggngcgagnagagagaaagcaacgggaaaaagacagtgcagtaaaaaaactgggcaagacttgcataggcatttcacaaaagaagatatccaagtggccaataaacatgaaattgtgctcaaaatcactggntatcagaaatgtaaattaaaacccaaacaagataccaatatatacccatcagaatggcaaaaattgaaacagacgttaccaaatgctggtgaggatgtggaacaactggagattttatacaccagttgtggcagtntaaattggctaccactttggaaaattaattcctagtggaatnagtacatgtttctttgtgtcacagatggncaccaaaaatatataatgttcttgtcagcattattacatatatccctcaaacnagaatcatctaaaaatccctcaacagtaagaat

SEQ ID NO: 689454 - DNA, 356 bp, Homo sapiens
tgagacagactcttgctcttttgcctaggctggagtgcagtggcgtaatctcagctcactgcaaactccacctcccaggttcaaataattcttgtgcctcagcctctggatagctgggattacaggcactcaccaccacgcccgggtaatttttgcacttttagtagagacagggtttcaccatattggccaggctggtctcgaactcctgacctcaagcgatccgcccgcctcagcctcccaaagtgctgggattacaggcgtgacactcgcgcccggccattagtaagcattttgtttagcaggtactggatggaagcattttacatccaaaatcccatttcatcctcataaga

SEQ ID NO: 689455 - DNA, 190 bp, Homo sapiens
tcccgaattgcgttgttataccacccctcccttgccatctgctccagcatactccctagagtagtacaggcagggatagatctaactattggaaggcatccctcacacttttccaggtagaattctaggctagtccaaaaagggtccttcttttaagggttaagagaaactagacactgcaacttattag

SEQ ID NO: 689456 - DNA, 174 bp, Homo sapiens
accttaaacagcattataatatattgcttcacctattaaacaaaatatagacaacttaccagaaaaggaaatgtacttatcactttctctgtatcttttttttcttcctgatgctctaatatctatttatcttctgtatggagcaacttcctttcaacccattctactagaata

SEQ ID NO: 689457 - DNA, 968 bp, Homo sapiens
cttccccgtttttccaatgggtttcctgtttgccctcgcttttggccctccttttgtactctataagatgtctgcgcgcccacttttcgcgtgttttccttctccggggctattctttatttctatgccgctaatcccttttcggtccaagtgtccgcctgtgtgcctccctcctttcgcccaggagtggccttcggtcctcccaccaaattgcccgttccatttttgtcccactacgcgagttctcaaagtgtgttctccgaccgccgcccttacagcgtcgcggctgccctcgtgatcatctcgccgcgcagggtacaccctatcttgtccgcaccgggggccccccaataaatacgtgcgcatgggcgcatttctttcaaggggcactcccccgtgccccttacggtccgaaagcccggcaggtggtgccagcagggcggatccctccctcaaggccaccccggcctcgtggaacctctagaagctaaaacaaatacggggggacaccccaacagtgcgggcggtctctaacaccaggtgagagccacctccgggtgatgccctcctaggaagaaatgcatgcatggtagacaaacgccacgcagaaataaaataggttcatcaccacactcggtgatgtagaatagaccttttcactttatcggcgggacatttaataaatacaaatccttgtaccatccatttagccggtgttttggtgaagaatccataacatcgccccttctccctctatcataacccacgctttgacaaccctgtcatacaggagaaatatacgcacatcgctcatagtgccgctccctctctcctctattgctctccacacgtccacagaactcccaatccctgaggtttgcttttttctacttggagtgactcgaaaagaaaacgaccttagctttgtcccccgccaaaacaagacccttttaaacgaccacaaaaca

SEQ ID NO: 689458 - DNA, 154 bp, Homo sapiens
  misc_feature (49)..(49): n is a, c, g, or t
ggcgggtctcttcctggacctcgttcacccacctcggcctcccaaagtnctggggattacaggcatgagccaccgtgcccaaccctaactaattttttaagtttttgggatttaggaggtctcactatgtggcccaggccggtttcaaactccg

SEQ ID NO: 689459 - DNA, 1022 bp, Homo sapiens
gtaacactgttagccgccaccggcgatggggtgggcgctggggagcaggacgatgcatcccctttctgctgcaggaacctctcatcagaccgtcggacgggaagcggcgcccaggagaccgctgccccgggaccggtccagattcgtccccagcgaagccgtgagtcatatggggcggggacccataaggggcagcctggagccgaagccacggaagccatgcccgcagaaccctctgaaaccgtccaggccacggggcagccctctgggatgcaggccaggcctcgtggagcgaagcacgcaccgcacacgcacgaagcaggccagtgaagcagaagacaggatcgatcgtggttcacagacccgggtcacacgtggtgcactgcattctatgcactgaatggacaaacaaacgcgcatggactacccatgcatgggcaacgggatcccacaggaccatatcagaccgccgctccagcatctcaccacgaaccgccaacgcgcccaactatccctcttcgacgctcgatggagcacgcgaagactgcacgacccgacccagccagcgatggctcatccaaccatgatgcccagtcgataccagagagagatgctcaaagatagtaacccgagggccaacacacaccaagcttaccagtcaggctgggcagacgacgcatcacgccaagggtcatgggagccatccaaactacacaggacaaaggccaaagcgacgagaatgacaggcgccccaagcgatggacagcacgggcaaatggagccacaggttgaccccttaagcaagggcagacggagaacacgaagggatggagaacaccacatacacagcacaccaacaaggagacacataccacaacgcctgggcaaccaggctccacgcaaagagagccccacatccccccgggaagcagacgacgagacagcaaagacaaaagaacaacagagacaccaagcacccgcgccacaaggacggaaagaccgacacagaaaacggaccgagg

SEQ ID NO: 689460 - DNA, 603 bp, Homo sapiens
ggctccggctcctcagagagcctcggtaggtgtggaaacaggaagagaactagaactggaagtaaagcattgaagatgtgactgaattgctgcaatctcatgatcaaatttgaatggatgaggagttgctttttagggatgagcaaagcaaagtggtttctcgagatggaatctactggtgaagttgctgtgaacattgttaaaatgccaataaaggatttaggaattacagaaacctggttgataaagcagtgccaggtgtgagagagttgacttcaattttgaaatcaagttccactggctgggtgtggtggctcacacctgcaatcccagtactttaggaggccgagactggtagatcatttgaggtcaggagttcaagaccagccttgccaacatggtgaaacccacctctaccaaattagccaggtgtggtgcacacctgtagtccccagctacttgggaagctgaggcaggagaatctcttgaaccaggcaggaggaggttgcagtaagccgaagatggcgccctgatccagcctgtgtgacagagtgagaacttgcgttgtacaaacaaagtaccaatcaacaacaacaaagacca

SEQ ID NO: 689461 - DNA, 100 bp, Homo sapiens
  misc_feature (83)..(83): n is a, c, g, or t
ggaggtgctgcgaagttggggctgcctggggatacatcattcactctttggggacgtgaagaagctcatcactgatgagtttnttaagcagaagtacctc

SEQ ID NO: 689462 - DNA, 341 bp, Homo sapiens
agaggcggcactgcaggacccatcctctcgttgcccaggacgcttcctccatctccacctcctccctgcgtttgtaatgatctcttcctctcttcagtgcgttacttaggatttcatttatcctgcccatgttcatcccagatccaaatcgacccatgtatgccataccgacatcaaaggggccctccattcctcccattgtatttattcgcgaactcctatgccttccattcccattcccgcgggatctatgtttcccattccgatgccttgatacaggtgattggcatcaatgggttgccctcctgggcctaacgccatgccaatatcaccatggtgca

SEQ ID NO: 689463 - DNA, 463 bp, Homo sapiens
tacacgtcgtaaacgctgcaagctcaatcaaccgatagttgatatactctcaacagggagtacaggcttgatctcaatggtctagaacatgtactgtaatttactagaagagatggtcgtcttactattcaatgatccacacgaacttcccagctccatgcgacgagtacagtccaagaataaactcacactttctgaacgcatctatgctacctatttgtatactttgcgatcctcaggtgtccgtgccacatattctctctcaataagtccttcaatacgtttcttaataacaactggacttggtaagaatcgcgccttcaactgctgagttacctccgctactagaacatagtgctgcatcttctttctagatttcattatccgcactatagcagcttctatctcatgtttactgtcgtcgtctactttctgccttgtttctttcctccccgggatacag

SEQ ID NO: 689464 - DNA, 664 bp, Homo sapiens
tggggtggggtaagtgcgggggcggtgaacatctgttcaaagtgggttgctccggaattgcctgtcgttccacaattcaggactggctgcgggtgaaaaggcgtgggaagcttgttctcctgacgggagaacgatgcaggattcaggaatatacaggagaaggctgacgtggatcgaagggaatgcccgacatcaccggattttgatgccctggcttggatatcggcgaaacagcgcggcgagtttttgctggaagggactgtcgggcgaatccccgttcacatccggttcatcgaagcgggcgaaacatcctgacgtcgtaaaactgcggtaggcgacataaagaaaaagcgattgggcagcaagtgttgcccaggtctgctgtacttcctcatgcagtgacgtaatccatattcttccttccaaacaatggataaagggttcaataaggatatcattttatatcattcggtccggtaaacctaaaagcaaagggcgcactagtgtcaaatcttgaggtaaacgcaatctgaagtcggggttgcatctgggtcgtggattacaatgacaaatgagaagcactattgatggatcagcataagcgcagtgtgatgtcctgcgcagatctgggcccctctccccttccaggtgagggctgggtgag

SEQ ID NO: 689465 - DNA, 653 bp, Homo sapiens
ctcaatacagattctgtaataaatactaattgtcttttcccgaggaataacatattctacttggatattattccagactgcatcagctctttgccagtcaccgtttattttattacagttttagcagattgtagtacatctggactctatcacattcaaatagcttctatgtcaactccactaatttttccagagtttcaacctgattattttgccacacatctgtcaacaaaaccactgaagcccagcagatcgagctctaatccctggagtactcaatgaacttcttgggctcttagtaatttcctgtttgtaggaaggcaaagaagagatcatagagcaacaaccaattaccaccttgtacctggctcacaaagtccatatgctttctgaattagatcagtctacgcctttctctaccagtatacacaagacatcatgaatccttggtaatactttatacttatcataacagtcaatagcgacctccagaaccgtacataagtagcccttatcccagtgtacagtgacccaatggaaacatatttaggtaggtagttctgctaaccctagaatcacgatggcttcatgcaactgttttactggttcaatttccctcttaaagtgcgccattatcatgtggaaaaagccag

SEQ ID NO: 689466 - DNA, 157 bp, Homo sapiens
tgtaggaagagcctcggcttgcctgatcgccgcccgtcatacccgccgccaggtcaccatggatgatgattcgccgcgctcgtcgtcgaccacggctccggatgtgcaaggccggcttcgcgggcgacgatgccccccgggccattcaacgcctccg

SEQ ID NO: 689467 - DNA, 132 bp, Homo sapiens
cccgttggagcgactttccccatgatgctcgcggctttcattgaacggatcacgcaccagcctgatgccgaggctcgcgagctccggcccgcggtcctgaagaccgtcgcgtgtattctgcatgtttcgatc

SEQ ID NO: 689468 - DNA, 102 bp, Homo sapiens
gatgcgaggctggatgagatcacaggaccacaggtactgggcttgaaacttaatattgctaatgaagtttcaacccagctccttgtggctccgacgcggggc

SEQ ID NO: 689469 - DNA, 965 bp, Homo sapiens
acacaggctggatgtaggagggcaggtaccggcttgttaatttcagtgcgcgggcctgggcgtccggattaagaagaatggtgcgtgaggtctcagacaagatgcccaacagcagaggtgactccatcagagagcagatgagagcatctccactcggtgacacgagatctgcaatcccggtcactgcacctgaggcacgagtgctacccaaggacctgtcccaagaagcatgctagaggcatccttgagaggaacagggacctggcatgtggatgtgggtgagactggacccatcaccacccatattcactccaagccccgtaacgcctgcgtggcacaacggggggcccaaaaagccagaggctcacacacacgagatatacgagactcatgcagagggaggaggcgcaccagacgtaagtgtggtgttggagacgagacatgtacacgtctagaattgtagatgggcatagtcctacatacacacatacaaggcaagtgagaaaggaaaggcatcaaggacagcggacaatcagatgaggacgtgggagaaaagacttatgaggttggacagtgacatgaagaggaggtgcagatgggacttaccaaaggtggactgcctccggggacgactgggcataatgtagcacgtgggaggactgggagctgacgggcagccagaggggagcacgactcccccacacccatggggaatctcgtcggacgtccctccggtacgataatcaaggagccaggccctgggagaactgaggaaagttccacacagagtctcctactgacgaaaccagaaggctcttgagggacagaatactgacaggactacccgactggaccccctcgggccgcagctcacaccatgagacgagggcgcccaacatccggcacagaaaacatgatagagcaaaacagaggaccagacaagaaacaaagcaccacaaaaagag

SEQ ID NO: 689470 - DNA, 879 bp, Homo sapiens
  misc_feature (325)..(325): n is a, c, g, or t
  misc_feature (327)..(327): n is a, c, g, or t
agtgcacccagggtactctaccacatgtacatgaatggtttacttaatacgcgttcatgctatctgtgagctagagtccctggggtgtcactgtgcccggacacctgtagctcccagcgccacgtacgatagtaccgacattcgactgacctcttaggcgaccgttcgagcttacccttatactggaccgatataatactgttatctgggacacgtctcgcttatcaacaatagtctggctattgcgggattcaatcacctgtctagctagtccctgacggacgttcgaattcacggttggctttgatcgctttagaacttaatngntatgtggaggtacttgggagtggggcgctacccaaagctactctccgcacaagctaagttccccctcttggcatgccagcttcaccaacgttgtgaatgtccaatttcttggtactagttcctcaccctagttggtcactctgattggcagcgactccattgacatggtggtgccatccccgccattattaagtggagccacagcaggcactttctagtgactatggtggcctttcacctagagctcattctgtcgtttctagtctaagaactcggatggggacctgcgtacctggaaggaaggtctgattttcgctaacccatacggtcacaaccgtctcaccaactggtctgggtttcacccgtaagtcaaccccgcccacagagacccaccacaaacgaccacgttgtgttgctcgcattccgtaactcccattgacataccgccatcacacgcaataacaacctacccccttttatctactcccacaatgtctactccctttttgcacactacccaataccattcacaaactatgcacaattctctca

SEQ ID NO: 689471 - DNA, 314 bp, Homo sapiens
ccccttttttttttccggggggaaaaaaggttttgcccctttttttgggggggggtttccccctccccccttttgggaggggggggggctttttggggggtccctttcccctttgggggggggcccccggggggggggcccccccccggggtttttttttttttggccccccccccttgggtttaccccccaaaaagttggggggggggccggcggggattggggtttggtttttttttttttttcccccaagggccccccctttgcccgtttttttttttcccccgggggataggggggttttttttttttta

SEQ ID NO: 689472 - DNA, 368 bp, Homo sapiens
gcgtcgacgccagtgccacgcaccacgaatgtcacgataaacagcaggaagcccaggggatcacgccgaacgatgcaggtcggtgtaggcctcgctgaactcgttggcgatgaccgatgcaatggaactgctgggcatcagcaacgaggcggagaactgttgcgcgttacccagcacgaaggtgacggccatggtttccccagggcgcgaccgaggccaagaaagatcccgccgaccacggccgagcgggtgtagggcaacacgatgtcccacaccacttcccaggtagtactaccgagtgcgtaggccgactccttcaattgagtcggaacactgcggaaaacctcatgcatcaccgacgtgatgaa

SEQ ID NO: 689473 - DNA, 225 bp, Homo sapiens
tgtctcccacccagtatttgtgcataccactgtaccccatccagatacggaatcatggaatctaattaagttcactccacttgaatttcgagctggcctaggcgattcgcatcagctactaaaatgtggcagcagcaatgtagtgccatctccaggcttagccacttaaagccctgacagcttcggctgtgtctcaccttggaaccctgagtccattactcggat

SEQ ID NO: 689474 - DNA, 228 bp, Homo sapiens
ccccccccccccctttggaaagcccttttttaaacctatttttggggggaggccccgcttaaaggtggggaaaactaaaatccccgggaccccttaacccccccccaaaattttttggggggggccctttttttacttttaaaatgtttgggggaactttcccctgaaaaatttttggccaattttttcctggggttatttggtaaaaaaaaaagaaattcccaaaga

SEQ ID NO: 689475 - DNA, 949 bp, Homo sapiens
gggccatattagcagcggttattcggtgagcggtggtggttgtattctgccgcggagtgaagggctccgtggacatctcaggtcttcagggtcttccatctggaacgtatataaagttcaggaaaacatgtttcgagagatatgactctgaggatcgaggtatatttactccagaaggtcggcgttatagccaaaggttgtatagtatagccatggaaatgcatatttggagaatgcaggcacctgtttttgggaactttgatgcaagagtgagttggtgttattgctttggatgaagagaggtacgctagacattccatcaatgacttctttggatgaacgtctgggtgtttctgaaaagaattgataaactcaagggaggacatggcttgacggtgtgggcaggcagtaacttgtgatgctaatgttctggagtaatgaactaagggctcattgtcacaggtattgattacagtatcaggagccaataccttgtgagcaagttggttacagcgctgtgtggtattaaaccaaggttatacacgaaattgtgggaggagaaacgttcccttgggtggttcaatttgcggcacattggggtgggaataaggccatattgggttttcaggatcgtatacagaagatgatccgttgggggtgcagtaccggggggatggcagggcgccagtggttgtggaaataataaggggggggcggggggggtcaagtgttgtaccccgaacgttatgtggggggggaagtgtctgtttgtgatggaacattgtttgtgtggacgaagggataaataaaccacagggggggtttgaaacctctgtggtgtgaagggagggttgggaaacaaaaagggatgagggcactttttaacaaagagggtggcgaactagagagaagagtggtggttgtagaaaaaagaaaaagtgtatgttgc

SEQ ID NO: 689476 - DNA, 842 bp, Homo sapiens
  misc_feature (459)..(459): n is a, c, g, or t
accatgctccgactgctgagttccctcctgcttgtggcccttgcctcaggctgtggacagccttcccacaacccctccagccgagttgtcaatggcgaggaagctgttccccacagctggcccatgcaggtctcccttcagtatgagaaggatgggagcttccaccatacctgtggtggctccctcattacccctgactgggttctgactgcgggccactgcatctcgacttctcgcacctaccaggttgtacttggggagcatgaacgtggtgtggaggaaggccaagaacaggtgatccccatcaacgctggagacctctttgtgcaccccaagtggaactctatgtgtgtgagctgtggcaatgacatcgccctggtcaagctctcaagaagtgcccagctgggagatgcagtccagcttgcctgcctccctcctgctggtgaaatcctacccaanggagcaccctgttacatcagcggctggggccggctctccaccaatggacctctgccagacaagctgcagcaggccttgctgcctgtggtggactatgaacactgctccaggtggaactggtggggcttgtctgtgaagacgaccatggtgtgcgccggcggcgatatccagtctggctgcaacggtgactctggaggacccctcaactgtcccgctgacaatggcacctggcaggtccacggtgtgaccagctttgtgtcctccttgggctgcaacaccctgaggaagcccacagtgttcacccgtgtctcagccttcattgactggattgaggagaccattgccaacaactagatccaaggttcggctggcagagaggaccc

SEQ ID NO: 689477 - DNA, 305 bp, Homo sapiens
ccctcgatatgtagaattaacgtgaaagttgtgggggcacagtatgctacaccttgaattctattttaggaacattctttcactggcatatattcacttgtatcacaaaaggtggttctcattcaggcagattaacaataagcactaaaaagataattagatgactgccaatgtacatcagacataaattactgtgggggtagaattactgtaagaagagatcacacattgtgtagtttaatctttaattcttcttgtatcctgagataccagttaatattctttccttttaggattgaacttat

SEQ ID NO: 689478 - DNA, 1632 bp, Homo sapiens
agtgctgaagacattctgttgaagacaaatgctaccaaagaaaaaatggaccaagcagccaatgcaggcagctgcagcacaatctcacatcgaagccacacatccagcaaacgtttttggacccgaggcatcagtgctgcatttggcacagccattgacagccagttgctcaatgcaagtcattgaacaatggcagatgcctagcgacccccacagccagttcacagcacacttgccaccagcacagcatcatacgtgcacacgcagttgcaacagcctttctcgaaggtagcaggttattcttcagcatcagtgctgctgcacattgccagagctgcagcatgttgttcagacagcaagctcacacaagcagcaagccaacaagtgccacaccagatgttcaaagtccactggccagcatcatggtcacacaggcacagctctggcacagcacagccgcacaacaggcccccagggtcggccagccaagcagcacacggccaacttcaaacacagccagcatcgcacaagcaccattccaagggcaacccacaagacaacattgcttcaacctatcagcataagcaagtctgcacacacaagcgagctttcctagcagggcaacaccctctgtttcaaacagctgatcccccaagcagccactccagccggcagtctcaagcaagcaaggcacaatggtcgggcaaagcacaccttccaagccgggcaccaagctgcacccacacaaactcacgggcggcccaggcccaggcacatccacattcggcacacccacacggccagctccactcactcccccgcccgcacacgcccaacacagtcggcccaagcacaagacatgtcaccaacggacaaggcaacctatcgaacgcaactcgggggtggacacacgacacggactcgacagacaacaggctcactccaccagcaacacggtcagacaaaacaccctacacaccctcgggccccaacacagaaccacaaccctagccacagaacgacccaacgcccatggaaagtggccaagcacaacgggacaaacgccccgacaatggcccgcccagacaaccggacagccacaaccacacgcccacctaccaacccacaccaacagacaacacacaaccacagagcctggcacaccgagccccccaacgcagatttacggacacaggacaacaacacgaacggaccacccccacaacaaactcacacaacgcacacggggccaacagagcagctcgacccgaaccgggaacaagaggacacaagcacggcaacacgccaccaccaggaatcattcaagaacaagaccaatcgcaccgacctagcaacaacaagcgtgcaaccaacagcacaacaaacacgggacgcagcggaacacgggaccacccaccaacacacgagagcgcatcaagcaccaccacagaactacacgcacacgcgcaccacactcgagagaccaaaccacggacggaacacccaagcacgccgatacacaactaaagcagcatccgaagaccgcacgcaagacaaacaaaatgtcagcacgagcgcacgacacccacccacaacttaacacagcacacacagaaccacgaaaccccgacc

SEQ ID NO: 689479 - DNA, 718 bp, Homo sapiens
ggtcgtttatggcatttgtctggactcattacttgtggtagaaatgccccggagcgctgggtcatgcatcatccgtgactgactgagaaggcgcgagaggagtcttccccgctgcacagagtgcgtggtgatgctgctcgtgagtggcccagtggtacccagtgccgggccggaataaggacatcctctactgtgccccgatcctggctcacagagtcagatggctggctgggacgacatgacaaggcccgagaccagggcattgtgactttgagagacagtggctgtatacttctcctggaaggaatggggtcttcttgattgagtgctcagaaatgccttgtaccacgaatgtgattgctggatgaacttggacacttacaaacctcccatggggttggttctcggcatgcaagtgcgatgcgggagagacactatactcagcagacgcaccttacatcccccaacgcgcggttgtcaacacggtccaaggcatacctaatggcaccttaccttctcccctcagaagaccacaccctgagagactattgtggcccagtctatgacgacaccgattttgcacctacggttgaccaccacggaacaacaccatggtcaagaaatggaatacagaacggggacttgtaggaacaacatacaaacataatagaataacttatacaggaccatgaagcagcatgtatgtccaagaacacaa

SEQ ID NO: 689480 - DNA, 180 bp, Homo sapiens
  misc_feature (62)..(62): n is a, c, g, or t
taggtgagtaaaagagaccaaaggagtactgtgagtgtcaaaaaaaaagcacaaatatccanagcagtatttagagaaccaagggagggccgggtgtggtggctcatgcctgtaattccagcactttgggaggccaaggcaggaggatcacctgaggtcaggagtttgagaccagtctgg

SEQ ID NO: 689481 - DNA, 291 bp, Homo sapiens
  misc_feature (60)..(60): n is a, c, g, or t
  misc_feature (162)..(162): n is a, c, g, or t
  misc_feature (167)..(167): n is a, c, g, or t
gggcacgaggggggtcctgctcctctcaactttgaagtccccacgtatgagttcaccagntgacgatatggtgattgttggttaagagactgggacccaagtcagaggcttcttttagtttaaacgcccacctttagaaaaaaaagagaacagaaccccttntgtanttgaagtagattaaaaatatgtaagaattgatgatgtatttgcaaacattaatgtgaaataaattgaatttaatgttgaatactttcaggcattcacttaataaagacactgttaagcactgtt

SEQ ID NO: 689482 - DNA, 92 bp, Homo sapiens
aaggaaacgccaagacatagaaaaccacgcttttcccgtagaaggaaccgatgatgagccctgatgaaagaaggaagaagacccgctgtctg

SEQ ID NO: 689483 - DNA, 122 bp, Homo sapiens
taagatagactcgagctcggtaccgtcacatgaccatcgccctccccttttcgggactcgtattccctcttgggctgacacagcttctccctttcccaaccaataaagtaaccactttcagc

SEQ ID NO: 689484 - DNA, 132 bp, Homo sapiens
gaaccgcgccgtggtgtgccctcaggtgatcgcgaggacggacggtcacgcagttacttggcgtgcacgccatgatggcctggaattccggcttcacgtcttccttgtccaggtcgaagtagacaacgcgct

SEQ ID NO: 689485 - DNA, 282 bp, Homo sapiens
ttccccaaattggttgggcccttggggttttttttgggaatgggggggacccccttgttgttggggggcccccccccctttttttttttgggggtttttttcccgttccgggcaaatttttttgggggcagggcgcctttccccggggggggaaggcattttttgttggccttccggtttttgcgggtccctttttgaccgggggtttccctttggtttttgggtttgggggggggggtttttggtttccttaaaggtggaattaaagggtttttcccttta

SEQ ID NO: 689486 - DNA, 935 bp, Homo sapiens
  misc_feature (9)..(9): n is a, c, g, or t
  misc_feature (12)..(12): n is a, c, g, or t
  misc_feature (14)..(14): n is a, c, g, or t
  misc_feature (18)..(19): n is a, c, g, or t
  misc_feature (23)..(23): n is a, c, g, or t
  misc_feature (25)..(26): n is a, c, g, or t
  misc_feature (28)..(28): n is a, c, g, or t
  misc_feature (40)..(40): n is a, c, g, or t
  misc_feature (44)..(44): n is a, c, g, or t
  misc_feature (46)..(46): n is a, c, g, or t
  misc_feature (110)..(110): n is a, c, g, or t
gtgattganatngntttnnatcnannangagagatgcatntgtntntgccataaaaaatcattactggtaccagatgtacatagatgatttaccaatatggggtattgtnggtgaggctgatgaaaatggcgaagattactatctttggacctataaaaaacttgaaataggttttaatggaaatcgaatgttgtatttaatctaactccgtgcacaggaaaggtgacccctggttccaaatactcaaaatccagatgtcatattccagtcaaacatggcaacagtccgcatgtgcacttctgacgcatcgcattcgacaaatatcttgcatccgtccttttttcaaccatcggccttcattggttttcaattttcaactccttcatgcatggtgcatcttcttggtgggctccagtttccatgcattccccctgcagaaccccattacgccacaagcatcctgctcggtcaccagtcaagaggccgccactggctgctatggctagcagacctcaagagatgactcatggctggccaccggtgcatggcacatgtcatttcagaccatcaagtcacacccctgcatactttttccatctctgatggctctcggcctgtcccctctttcgcccgtgtccctccatccgttcattactggtcgcacaccgactagacacaatttaatctacctgagcggcgattcacatggctcccagccccagcccctcacccgccactatgctcgcccacctcctcccgtgcacctgctcatcccgcgacgcaactctgactcccagaaccaccgcagccggccacgctccacccacacgtcactggggcatccccatcccactcaggcggcgctcgcctgcctcccccccatccacccttcttccccgcccacaaccccccccgccaccccccccccccccgc

SEQ ID NO: 689487 - DNA, 201 bp, Homo sapiens
caagacatcatgttgtactttataagtgtatacaatcatgatggcaggcggattatgaggtcaagagtttgagaccgtcctggccaacatggcgaaaccctgtctctactaagaatacaaaaattagctgggcgtggtggtgtgcacctgtagtcccagctactggagaggctgaggcaggagaatcgcttgaatccggga

SEQ ID NO: 689488 - DNA, 102 bp, Homo sapiens
tcgacgtgtatacaacactgcggtgacatgcctccctgtacaagtaccgtcgtacacgtgagcaaccgtgctgacctccaaatatcgtaaaagctggagcct

SEQ ID NO: 689489 - DNA, 155 bp, Homo sapiens
  misc_feature (83)..(83): n is a, c, g, or t
gctggtggttgagatgccccaatctaccctccttgttatttagaacacgctctcccactgcacaaggctcacttattcaatgngtacaatatgtacattcaagtataatcacatctattattatttaattcaatagtactccagcacactcctcc

SEQ ID NO: 689490 - DNA, 908 bp, Homo sapiens
ccgccggggtcgagcggatccgcgcgatcctgctgccaccgcggtgtgccatatgcgggagcaggagcggtggtccggagtcaggcgccgtgccggctgggatgtggtgcgttccggtgtgcggcgggtgcggggcgctgagcggcgtgccccggcacaccctgcttgcgatgctgccgctccagcactggacgagtccgacgtaccgtgcgcagcccctctcctggagtggcaaggagccgtgacttctgcgctgcggcggccccttccggcgctacatgcagctctatacgtgtgcgctgctgggcagctggggactgccggtgggcgccttcttcggcctgcactgcgataccccgtgccccaatggctgtgcccagtgcgcgctacacgttctgcccaatgggcaacaagttacgtggttttctaccctggacctcttccttcactcttcctcctagaacttgaagcgctgcggcatggcgcgcgccttgcctccaggccgtcaagtacctcattgttcgcccttcaacctgctctttctggctgggcaggcctgtggccgtgctgggtgtcaggcaattctggctggcctacaacacagggggacgcttcgccacgctgtcctctttcctttcccagtccctgtcggatgccaacctgtctcatcatcaaccgggcgccttatgtcactggccatcggcttcgtgggctgccttgggttgccatccacggcagaacaacgttgcctcctggtcacttacattcctgcttgcatgcatagctggtgttcctgcatgggatggcacagcattcggccatccctccttcttcgacctacacgggacaagacttgaccacgtaatgccccagcaaacgacctgaagaaaaggcttgaaccatggtac

SEQ ID NO: 689491 - DNA, 298 bp, Homo sapiens
gtccagaatgtcacaggtcagggcagaggaccaacatggagcatatgttatgagcaacgtgggtctcagaggtgatcggcgatcagagggcgatgaagttctagatccatagagacgagctctagacagtagcatgcagttccacgacttgtaccagcattcccagcgtccggcattccatgtttctgctcctgtggcctccacggtgcaacaagctagcggtttacttggacctctgcctcatctttcttcttttgcgcttcagcctgcgcattcgcttcttcctccactttgctct

SEQ ID NO: 689492 - DNA, 408 bp, Homo sapiens
gcggtatgaagcccagaagctggagcgcatggagaccaatgtggaggaacggggacatcgtccagcacagtcctcaagccagagccgaacactgtcagctacaggccagtccagcttgataccacctggtggggccttcagactgcaccctgcacaggcttggtgcacggaggtgtgacccatgaagctcatggcatgagggtcgccgggatcgtggcttgacgccgatgcaagaacaacgatcgtcacagattccgggtgacgccattaattttcatgaccagatcagagaagggtgggttatcaccaatctcgggaatccattgacttaacgaagaataagtccctggagacgaggagtaggcgacagcgaccctgtaggttgacggttacaagagacacgggcgc

SEQ ID NO: 689493 - DNA, 266 bp, Homo sapiens
catattctctacagaaggaaaatccagcagacaccgagctgacatgatgtgtgctgaggccacatgacctgaatggacgggtcatgtgggagagggccctggtgggagctgtgggccacacggctgagtacttccaatacggaagccccgagctggtaggctcacacgctgtgggtgcagcccagagttgctggacagctttcacagagggtgcgtaagctaatggagtcagtatcgcacggccgctgtgaaggggtacccccgct

SEQ ID NO: 689494 - DNA, 1550 bp, Homo sapiens
ggtgtctcgctgggccctggtactgaagacgcggatccgggatcgcccctagactgattatactactcacccaaagccccgcaacccgccttttctctctctcctctggcaggatgaggcgtgcaggcctgggtgaaggagtacctcctggcaactcatgggcacactcatggctcatgctacatcagtggggtcatcaggtgccctgctgcaagcacagcacacaatgcagcaggcctccactgcaacagtctgcagcaagcaaaagtcaactgctcatcacacaatcctcttttcccagtggcacacatcaaggcaccataggcaaggcttacagagacctcaagcaaatcaccacatctcatttagacctgtcacacatggggatttcaactacactcttggaattccctacgaaacatgggcattgtctaaggggtcagacacacctcattggggccaacacgttgtcacaggaatctgacgcaattcaccacagcagggggcaagcgcgcaacctgaaaagcctggctggttggcactcatcatggcatcgtcctgtctttcactttctccatcctggctccttctcactgctcatcccattttcatgtgggcaattcacttcaacacctggagggtggcatggccatggcttcacactttcggttgcacctttgcgggggacacatttatggatgccacaaacatttgtacacttggggttttggccagctttaatcacccttttttgggattacacacacccaattcatggcaatccaaacagaacgcattattccttacgactcggttcccaccacattaactctggtggtgccatatttgtcccaagtgtggacgaccaactttgggtctggaacatcgtcggccctctacgttcgcgtaacataccagagtccaaccaatatacgctgacactatacgcaagggcggagccataagcgggaaaatcacactggtagcagtgaaagatgagcagcaccacatgcaccaaggccaccgctaaatcaaagtcacagggggacgtacaagctgcaacaacaggggcacggacaagcacacacaccagcagccgtacaccacgacgtagggcacagcacaactgggacgcgggccaccaagccacacaatatacaccagcacgattacatacgaaactctatgtgcggcgcattacacatcacaggcgacggggttaatgagcccaccggtgtcgacgcaatcttgatgagagcacagcacttcaccccacagtgccggcagcacacattgactactgcgccaccatggaaggcactctgtcccacatgcgtgcaacagcggaagttgacattcacatagcgcaccactaatgaagcgtatcactgactacgtctgaagctaacacgaacacgacgcaaccaccgaccagcccacacaagtatatagagcacacgtacatatcaacagactctacaacagcgtaacactcagcggcagccaacaaaaacattacagagcatagatacacaaaagtacaaaagtaa

SEQ ID NO: 689495 - DNA, 792 bp, Homo sapiens
agcggggcgggtcgtgcggccagccggcgggaacggggctgaggcggcgcagcggagtctgggcggctggcgcgtcccgcccgagggcggctctggcctgagggcggaggggccggggaagatgcccggggcgatgcggctgacggcggtgacgcgccggctgtgggagccgcttgccccctagaagaacccagccgagatgctggcggaacaacctggtagacggagtttgagatgacaggacggacgagcccgtggtacgaccaccaggacctccagcaagatcttcaaccttgctgcctgacccttggcggacggaccagttacctgggatcgggaacacagagtcaggaggactctggttcagcagactgtagtacaagccaactcaggagcaggttacaagggaaattgagtagttctggacgaaagcaagatggagactgtctacgggcaagatgaaacgagacaaacatgccaacagggtttatggaacgaattgcagacgttcaacaagcaatagtgcgcaccctgggctcaagcacacacacacgctcacacaccaggcgtacgcttggcctggaccaggccaacggcccagccaaccaggacacccagacgaatttccttggacgcccttggatccttggacacacccggcactctgcacagttgcccttggccaaacccctcaggccacattctggacttcacccctgtccctagaatgccccactcgtcggagatgcggagcgcatcggaaccgtcccactccttgggccccacaagcgg

SEQ ID NO: 689496 - DNA, 148 bp, Homo sapiens
  misc_feature (81)..(81): n is a, c, g, or t
  misc_feature (148)..(148): n is a, c, g, or t
ctcggtccattaataagaaggccaaggccctgggacaacttcgcctggcaaaccccaagagtctgggcagcctccagcccnactcctgcagccagccagcaatgccagaggagaaacccaggagtcagcccatgaagggccaggggcn

SEQ ID NO: 689497 - DNA, 347 bp, Homo sapiens
ccctctaaccattcacagtcagtagggccaccacatgcatatactgcacagtttgtgcacggcacaactcgagtgggtaccagtcacttggtctggggtccagtacacaatctgtgtacagtacagaaagccttcatcacctgtggccagagacctgtattctacacagtctgtcagctcaagctaatcaagttaggaaacctgatatttggttgaagaatttccaagaaacagcgtgtacctgtaagagccaggtattacttaaggggtgcacaaggtacagacataaaacaggaagggttctaaatatattcgctggtcactgcacgagtttccctagaattgcg

SEQ ID NO: 689498 - DNA, 996 bp, Homo sapiens
ggtgaaagaggtgcctgcttctccttctgccatgattatagtctgctgaggcttgcccagtgcatgcgtaactctccttcccattgatgagagagccacatgacatcagcccatagactgtggagagtattccagatctatcacattctgcgattctgcgattcccagaaggctggtcatgaaaaaatgccctcttcagtttgcatatatggctagggctcctagtgctcgggtgaacagtttttgaatcttcgtggttgccatcgtgctatagatttcgagtctctaattgaagaaaatcatctgttgtatctcgaggagccccttgattcaagtttacacaaagatgtgccttgtggagactatcctgttaattaagaacatgttcagatcccacttgtatgtgagacgagatgcttctctgtgccatcagtcaggtaccacttaaaggatgtacaggcgacttctagatatctgttgagagcctggtaaggggtgaaacacaattcagggaagggagttgaagataaaggggtttaccgtgggaagagaagatccggggtgccttcttggaagatgcttgtggttgaaagagagatgaagatgaaggtccctgtgaagaagttggcgctgccagagaggatcgatgggcaggactggcatcagcaagtagtcgcaggtaggtagtcttggttcggagagtctaggcgaatttcgctactggtgcccgttcgattgcatggtgcaactgggttccgaaacactggtccgggaagagaatctggctcaaccctgattcacgggttaggacccccgaaattctggcatcaggtctccccatgcagggtgcggtcacagacggtcgcgagcacggagcccacacagtcatcgcccccgctcacgactcactggagacgccgagcatcccacaaacgtctttcccacgagacgacgaaccaccccaacagcgcgcgcccagcaacaaccgcctcataa

SEQ ID NO: 689499 - DNA, 102 bp, Homo sapiens
atcagttcctcctgacaggtgagcagtggtgggaaaaaaaaaaatggagctgggattatgggtctgatgaagaaactaggatttgctcattgaaaactcagg

SEQ ID NO: 689500 - DNA, 483 bp, Homo sapiens
  misc_feature (483)..(483): n is a, c, g, or t
ggccgggcgcggtggctcacgcctgtaatcccagctctcagggaggctaagaggcgggaggatagcttgagcccaggagttcgagacctgcctgggcaatatagcgagaccccgttctccagaaaaagaaaaaaaaaaaaaaaaaaaaaaaaaaaaaatttggggggcgcggcttgggcccctggagaaaagttttttaagaacaatcgcggggggggcgcgcggggcgcccaagggggaaggggacaatggggccaaaaagcgcgggttcccaagagagagaactccggggcgcagagagaaaagcgggcggggagttccctccccatatataaaaaacgcgccggggggaaaaacgcggaggggtcgcggagaacaattctccaagaaggggggttccgaggagggccataggggggactcatacaaaggggggagtccaaggggagagccggaattcaattaagccccgacggggggaan

SEQ ID NO: 689501 - DNA, 768 bp, Homo sapiens
gagcgggtcggcggcctgcgagagcagcgcagtgagccaccggctgggactgccggcgggtgtgaagaaaaaaatgacactccaatgggctgcatgtggcaaccgtcttctttatgccgaaataggactcattttaagtctatctgcctacctaatagattacctccatcggagagatggcataagataagatcattgtaatgactggggtaaaattgcaacttgtaggaacaaggcatatccttgaccagttatcatcctatggatagttactatgacatagatgctgtgagagaagtaatggaaactactattcctcaaggttcataccattggagaaaggagcttccaaagcagacaaagctgagtgccctattgaaacgctacaacagattgaaagcttgtgttaagagctctcagcacagacaattcttttagcacttgtctcgcgaattacaccgcgtaatattatattcgtgcgtaggttttatggaggaccgtcttggattaacgaccattatttgactctatatctgggtataaggaacacgtaggtcaaaaagcaataatgggtcgttatcttataaaataagtacaaaagtattgaagagatagtaatcttaaagcgagcagggctggtccaaaacaaaagttatttaattgggaaggacaaataggacgaaacgttagaaaaagaggatgtttggaataagggccagtggttaagagaatggaatgaactggtgtaggaggcgacggaaagaataa

SEQ ID NO: 689502 - DNA, 176 bp, Homo sapiens
ggtgttagaggatcgggatctcctcctcctgcactgggcttatgttcactgaggttggtgggacacacatcaaatgtatcagttcttgtcactctttgctgtgggtatgggtcctttctggctaaagagcaaggacccccagaagcagccctgccctctgtttaaaatttctaacg

SEQ ID NO: 689503 - DNA, 385 bp, Homo sapiens
  misc_feature (223)..(223): n is a, c, g, or t
  misc_feature (225)..(225): n is a, c, g, or t
ctccctctatcgagcctttgactcctccgcccctgtacgatgaggtccaggcaaaggcgcccgatgcccggccacccgactgaaggactctctgactacactccctcctgtctcaccctccacaccaacagacttcgccaaagccacttcagccccagtcgaggggtcaaggcacacttagccactgtgatggggattgtgggtagagggagagaacgggttnanagagccccgcagagtaggggaatcagaaggatgctgggagtttatgatgctctgaaccatagcaaggggtgtggccttggaatccccggcatctttctctcccacttgggatcattgcccacacacccctctcctaagctgggacacgattccctagtgg

SEQ ID NO: 689504 - DNA, 1111 bp, Homo sapiens
gggctgctgatgcagagtcggtgtgcagcagaggacattttactgactccctggcccctgacacggctgcactttccatccacgtcgcggaggccggccgctactccggaccccaggatgcagaatgtgattaatactgtgacggggaacggcactggaacgtggctgagtacctgaccccggtcctcaaggcatcacagtttaaggaacacaggtgtaattaccccagaagagttagtggcagctggagatcacctagtccaccactgtccaacatggccacatgggcatacagagggaagaattgacacgtgcaggccataccataccaacaaggcaaacacataattcggataaccacaaacatgtgccgtgcatataacgcgggtgccaaacagcatggacatcatccgagcattgcactcggaagctcatccatcgacgcacgcatgcatggtgatggcggctgggtcagatacatatcacaacacagcgtattacacggacataaccggcaacagcccggtcacaacgcagatcacacactggaaaacactcacgggccacatcatcaggcttcacaagacataggctcaagcaccataatgtgaacgacgcgacacgcacgactgcaggctgaccggcagaacgactgcacacccatcggaccgaccatacagaacgcagcgtggacatgacagggcaacaccgcatgcaagcatacccctaagacatccaagggcacaacgcagatagacaccatgatcacagcccccacaatggcaacactgagcgactccaagacacgacatctcgaccaagccacacacctctagtgccctctaccattaaataggcaaacactcataacccaacgtcccgcacaaacgagatggaggggctactagtaacgaacagacgcagcttttcccagtagtacacacgtctattacgacatctggacaggacatatattagaaaaacatggagagcactgatgaactacccacttttacgacagacaaagtaataaaaccaatagtacaataagtcaatctaacaattcacgttcacaaacacgacacacacatcatcctatacacaaacacag

SEQ ID NO: 689505 - DNA, 238 bp, Homo sapiens
agaggcgtgctgttaggttactcatatctctagttcacgtgtggatatactctgctccaatttataaagtacctcagaactttcctgtatcctacgaaacaactttttaagaagagaacagatctttgccgcactcctaggagactggctgttacagattgtatgtaatagagaactgaatccactgcattgcttccatggaagcgatttctgtgcccgttgcaaaggttaccgagct

SEQ ID NO: 689506 - DNA, 552 bp, Homo sapiens
cacgagctggtgtaataaaccctctttggagcagagtattacgtagtagcaataagtacaatatctatagcattctatctgtcctttctttcctacctttactgacgtcgcacaccgtgaaacgacagccctttcagtatgaacaagttaaggaagtaatgtcagccgcacacagtttcaccctatgatttgcttgctttggttggctgggaaagcaatgtctgcaaagtgtacagcatagtatttactattctggttgaagcagaaaggaatgaaaaagcgcatatgcatcacccttctgggttgcagtatagcagtatgggaatgtatttttcttccagaaatgcgactttctggtttagctcaaatatatgtcctagcgactcattaacaaacattaactagtccactgactgaaggatgctatagctaggcactagaaataccaccaagatgaatacattgtggtcctgaaggaatctagaaagggatcagatgccccgtgtactctaatggcagtcacagtgtggtaagtgagcccgcagagagtta

SEQ ID NO: 689507 - DNA, 910 bp, Homo sapiens
ggctgtgtacttgtcctggaggacccgcatgcaggtactgactgatggatttgatataatccatcagtcagtatctgagtgcgggtccggctgtgtactagtcctggaggaaggggacgatacctcttccaaggggcataaattgggtgcggtgcttgggctgaagatgatccctgggtgcagcgagatatttaacgctagtgcagatggacaactatacccgaataggcttcgaccccatcgtccgtggatcgacgattattatcagacatgggtgaagccacagatcgtcttgctgatcgagtggacaatatcactgaacagttctgcaatgcttcagtggttgaccctgctgcgttcgctgcaggcctctgactccggaaggaaacagaggcctcaggggggagacgttcattgagattcctgtgcccagtgtagcacttatcggataaacctaacccgagtgtggcaaagggggacgatgctgcctatagttcatgcggattaacatagcgttcgttggacatggcacccagggtcgggaggccaggtactttaatgagcatatgagacgtacatgagagctctgatgactttattgacgtctgaagaaagcacggcacttaataaggcaggtaagtgttaccggaaaagccaaggggccataaaccgggaaggtgacataccgaagtaattccttacacgaagggattagatgccaactaagcagaaggacctgccccataatcgtcgacactactgtctaacgtccgtgtgcactgagacaagaaaattcttggtaccacgttctcgagcattcagcatggccggcgccccaaatagtgccactacaagcgttgagccacgtcgagtaactatagccggtcgaaaaactccaggtactagcaac

SEQ ID NO: 689508 - DNA, 298 bp, Homo sapiens
  misc_feature (85)..(85): n is a, c, g, or t
tatgaggccccaccgtcttatgagcagagctgcggcggcgtggaacccagcctgacccctgagagctgaccaccgtgctgccttncgtcaggcaggcctgcactcagtcctgggactggggccccagggcctcgtgccttctctccttgcctagcctggcccactcaggacctgcccagcctctcgcagctcctgccgatccgccctcttctccctggggctggggtgggggtggcagggagctgggacctggagagacaactcctgtaaataaaacactttatttgtaaaaaaaaaa

SEQ ID NO: 689509 - DNA, 167 bp, Homo sapiens
tccccacctgtgttctctgagagactgaagcattcgatggctccctggccaggatcagcccttcaggagctccttagtaaaggacttatcaaactggtttcaacagcacagtagcacacagtgagcacacaggtcagggatggagcacactggtctgaggattgggg

SEQ ID NO: 689510 - DNA, 319 bp, Homo sapiens
ggtgggcgagcgccagagtactgagtgggtgaagcacctgagcgtgccgagaggtcggatgtgactccgcatatacgagtctgttctgccggtccgctgtggggaggacacggaggctgcgatctgggctccccccagcttgtgtccttcggtccccagccccacctaggtctggccaatacctgcagcgtcttggagaatcctggccttggtggcctcgtttacctgtgtctgccgcacacgcccactgcccgacctgcccaggtggcccaggctgaatcccaggtcctcctggtaggcgtcctcctcgaatctaggg

SEQ ID NO: 689511 - DNA, 916 bp, Homo sapiens
tatctctaaagggtgcagggcctgatctcagagtttcttagagaaaggagagagaaagacagacagagagagagagagagagagagagagagagagagagagagagagagagagagagagagagatagtatttgtgtatatatagtagactctcaggggcgtagacatagacgagtagaggctcctgcggggagtgctccagagagggacacacgtgtctcatctgcccttacgtaggcgtgttgctatctctctcatagtgccccgaaagtgatgatgagaagcatggcagagacggggcgacagcgagatgctgctcgtcgtcgtagagcatggtgcagcaggcaggcagatgcagcggcggacgagcgcggcgaacaacaacatcaacaacaccaacaacaacatacggcggtcaaggatgatccgagcgcaggggagggaccacgtcggcggcaggcggggtcgtcgctggtggatagatacaaaggcatcagtcactccgcagaggaggcagtaggcagtcggcagtgcagcagcaagaaagagcgacatgcccggaagagagcgagtagagagaaagacagggggcagggcgaagtcagtcgacacgggacgagagagagaggagacaggcgagcaacaacgatgaaacggtgggggagaaccacaccccgcagtcgagacgaaaggagagacagacagggagacggtcaaccaggcacgtcgaacgaaggataggagagagtagtatggtagagaatggcagggctagactgcatagcgggggcacgcacacaaaacaccggacgacacgctacgcgtgtacggcggagccggacggccacataaatagggggcagagcgccgatagacagtagagaatggcatagttcgtagggggaggaggcgatag

SEQ ID NO: 689512 - DNA, 325 bp, Homo sapiens
gatctggtgatgctgaccttgttagatattattcctgtccaccccatgttgtgttgagagcttctcagactatccaccttcggctcgcttagctggttcgtgatgggaaaacaccttgtggcggtgggtgtcatcaaagcagtggacaagaaggctgctggagctggcaaggtcaccaagtctgcccagaaagctcagaaggctaaatgaatattatccctaatacctgccaccccactcttaatcagtggtggaagaacggtctcagaactgttagtttcaattggccatttaagtttagtagtaaaagactggtaaatgataa

SEQ ID NO: 689513 - DNA, 163 bp, Homo sapiens
tagaacagacaggaaggttgagtatcaactaacttacatcctcgtcagactgatgagaaaactaacagcccaatggggaatactggcctgagtacctatctcatctggttctgtcattaaccagctctgtgataccccattggatgttaggtttactcaacac

SEQ ID NO: 689514 - DNA, 338 bp, Homo sapiens
  misc_feature (77)..(77): n is a, c, g, or t
cttggccggggcgcaacgctctccggttgccagatttcaacaggccgctcggtgatccaggcggcctttttgctgtntgcgatccgcgcgccctacccggctcgctcgctgcggagcggccccttcgggccgcccttgacacgcctcggccgcgaagcgccagagcgggcatcgagcccgccctggcgctgctgacgcacccataaagccattctccagcacgcgcgtcgaaacgctgcccgcgcccagcaccaaggggccgggatcatcgccggagaggagagagaaagggtgacgcggtttcaacgaaggaggtcgagatgaccatcacgttccgc

SEQ ID NO: 689515 - DNA, 467 bp, Homo sapiens
atcgtgactccggtatcccagacaacgacgtggtcaaccggacccggttcacaagcggttcacgcgggtcccgggatcaatcctgtgaacacagcatctctttcatggcgtcaaacagatcagaaccacaaaactatgccaaatgtacatcttgaatatttgctaagtttagttacaaaaatcatctctcaagcttcaaaaaactaaacccaagtatcgtgattcagtgatttttttctgaaggtgggaatggacaatttactgaaaccctttcatagccttcaaaactgtataatctataaggatatcccttgtcaatcattacctttcaagactgaacctgaacaatactgggctatattatccacctctatgcagaaaccctggtatttccctgttaatattccaagttctctggcacattctgagaacataaagacatggcaggaaaagtgtcaaaactccac

SEQ ID NO: 689516 - DNA, 868 bp, Homo sapiens
ctgaattaggcagtcttaaaaaaaaaaaaaaaacgaaaaagaaaaaaaagaacgttgaaattggttaaaatgccaaaaaggacagtttaatttggtacagattatgttacctcaggtttctttagtggtgcttgaatgcccttctttccatataacacttatcttcttcttaattcggcaagggaatatctttaagttttaaaaaaccgggaataattatatctatctttttggcgtaatatcaaggggtcggtcgataaaatcaagtctgggtggtgggtggctgaattacatatttatgagtggtgcatcttaagtatagtggaacaagacaccatattaagtaccagcggataaagcattctatattcctgtaaaaaaaaaaaaattcttggctatgcttggtttttcaacaggaaacaaaaatgggctggtattcgggcctgtttgggaatggaatggggctaagggctctggcatttctgggcaggtctgtaatccggaggacttaatatcctccaaaagggtttagcctttggaattctgtctccaaaaaaaagtgtctggaaaaattctagagggggagaagtttccttaaacgtttcaacatcagcgtcggccatgcccctgtgcgatagtgcgctggtttgcaaccttcgtgaatataccaaggtcggcgtgcctgtcaacttcaaagggtggcctgtatgtccaaccgtagctattggtcgtgttctgcggggccaaattgtcctcacctttcctggtatcgagggcaccggctctgcaaacacaacctctttttatgtggggcgataaccaaagcgtgtgtgtcgctggcaagcggcaaaattttcttcgtgcaaac

SEQ ID NO: 689517 - DNA, 214 bp, Homo sapiens
tgcacatccattcagtatatttccatcctttatttagttttgtttgccgaaagtgaactccatgactttaaaatgatagcaatttatcaaccaaagtaatccgtacttcatcaccgctttcaataacatgcagtctactttccttagaactgttctgtattaatttctgaatactgtggaattcgtcattttcaaacgcactctggtctttagc

SEQ ID NO: 689518 - DNA, 296 bp, Homo sapiens
gatcatcacaagaagtctgagaattgtccggataaaggggcttggagacatacatctaaatgtaatgtagtatcctggatggactcctgcaacagaaaaagactttaagtaaaaattaagggatattaataaagtatgcattttggttaataatgtatcaatattgggttattagttgtgccaatgtaccagaggatgtaaatgtcaccaataaaggaattggtgtgggtacatgagatgctgtactatttttgcacttttcttaatctaaactcttataaatttaaaataaaagg

SEQ ID NO: 689519 - DNA, 252 bp, Homo sapiens
ctgtatttgggccagaaattcccagtatatttcccccacacaggcacagcctccctcatcatcagcatccccaccagagtggtatgtttgttacagttgatgagccgacattgacacattcagtcacctaaagtccatagtttacactagggttctctcttggtgttgtacatgctgtgggtttggacaaatgtataatgacgtgtattcactattatggtgtcatacagaataatttctgtgccatttcaa

SEQ ID NO: 689520 - DNA, 327 bp, Homo sapiens
gataccggcgtctgattctagcgtacggggggtagtatgtgggacttgatgattagagctgccgtagtctggtatactcgtcgggggggtaccattggcgggctatttgattggatggtaagggagggatcgtggagctcgtcagttatgtagaggatgcgttgggatgggagggcgatgaggactaggatgatggcgggcatgatagttcaaacggtttctatttcctgagggtctgagatgttcgtattagttagttttgttagtgagtgtaaggaaaagggcatacagagactagtgaagcaggataggaaaattgattattag

SEQ ID NO: 689521 - DNA, 523 bp, Homo sapiens
ctgtatttaatgttttctcttcggacagaaaagtggacacacacacacacacacacatgttgtgttcagtgttctgttttatattacttcccattgaggttggaatagaacaggttcttttcatgcaaactgtatgaaatgaaaaacttttaagactcttctttaattggagtttctgggcaacatcgtatgtgtgtgtgtgtgtgtttgtgtgtgtgtatacacagactttttttattaaatttatgatgcagatgtcctggtccttgaatcgtcatggtttacttattttgagaattgattgttaaaaatttcaaggaattaaaataaatccctttttttttttagagggtaagagattggtagaagagtatacctgtgaaaattttattagtttattcttgtggagaataccaagaaaatgtgtatttgcccattgctaaatatgatatataccatctttgtatttatttgtcccaagtgtctttttttaagaggagaataaacaataaggaattactga

SEQ ID NO: 689522 - DNA, 620 bp, Homo sapiens
agcggaaaattggaaggtcacatgcagaagagtaggactagaccctgtctccaccatatacacagatcaactcaaaatggattaaagactgtcttctatagctgctgtactaatttgtaattccaccaaaaatgtgcaagtgttgtcttttctccacatccttgccaacagttgttttttttgttttgttttgttttttaagacagagacagagtctcactgtgtcactcaggctggagtgcagtggtgcaatctcggctcattgcaacctctacttcggtggctgaggaaggagaatcgcttgagcccaggaggtagaggttgcagtgagccaagatcgtgacactactccagcctggacgacagagcgaaactctgtctgaaaacagttcaggtgggaggatcccttgaggacaggagtttaagaccagcctgggcaatgtagcaagaccttgtctcttaaacaaaacaaacaaacaacagaattgcaaaagccattagaaacctttctcctaggagaaaatgctacggaggcaaggagggaaccaggtatattctaagcggtaacactaagaagggcctaattgccccggtggtcagcatctcctatctacattatg

SEQ ID NO: 689523 - DNA, 283 bp, Homo sapiens
tgttcagacggatcccggctgaggcgggcggatcacttgacggtcaggagtttgagaccaacctggcaacatagtaaaatcccatctctattaaaagtacaacaaaaacaaaattagcggggtgtggtggcgcacgctagtattcccagctactcaggcggctgaggcaggaaattcgcttgacccggggagccagatgttgcagtgagttgcgatcatgccaccggcactccagccgggtgcacagagtgagcatcggtcccacacaacaacaataacacag

SEQ ID NO: 689524 - DNA, 257 bp, Homo sapiens
ggtgtgatgtggtgtgttatacatttcatgttaagaatatattacccacaactttcagagaagagctaatatctactgtgaagaaaacgtaacagactgtgtttagaacgttaatgtagttagtaccagtgcctgcgatggccctctctatttcatagagatatgtatccagtgtctcctgatacacttctcagttgcttgatccaggtgagaagaaagaagggcctagataaagtaaatcaacaactctgcttcat

SEQ ID NO: 689525 - DNA, 390 bp, Homo sapiens
ggtcgaccggggcctgctttttaagctgtacgaactctgggtgagcatcgctgccattgacgtcgatcttcttgaacagcgggaaactgacaccgaagttcagttcgcaaaattccgaaatggcgccctcgttgccgggctcctgcttgccgaactggttgcagggaaagcccagcaccaccagcccctggtccttgtaatgctgccagagttcctcaagccctttgtattgcggggtgaagccgcacttgctggcagtgttgaccacaagaatcgccttgccggcgaaatcggccaaggtcatttgctcacccttgatggtggtgcatgggatgctcagcaggttgtcgctcatggcagtgctcggaagagatgagaagaactgaacga

SEQ ID NO: 689526 - DNA, 265 bp, Homo sapiens
tcaaaataatgaacaatgtacattaaaatcacaaacaacaactataaagccaaatatctatagtaaaccaaggaaaatactgatctggactggttggactaaaagcacagaataaaggcaccatgctaatgaaaatttagcacaaacatcaaaacagacatagttacccacagacacatgtaacaacaaagggaaacaagatacagagacagattaaatgggatgaaaaaaggcacagtaaccattacagatacaaaaaacatgc

SEQ ID NO: 689527 - DNA, 143 bp, Homo sapiens
tcgataggcaaatttcaaactgactatcgcatccctatacattgggacagacctagttcaatgaatctgaagaggctaatcagtagacagtcccacgcctcacacgattctttagctttcacttcatctgggcccttatcgag

SEQ ID NO: 689528 - DNA, 529 bp, Homo sapiens
cctgctgaaataactccgatgggaagaaaaaagaaggcgttaagagaccctcccggcccaaccctagacactctaagatcctttttcaaacctgctcccatttcgagtcaagagatagataaatagacacatcccattgcactgatcggggggcgctcgtagtgactgagggggtcgaagaccaagaagtgagttatttataccaagcattcttcttatggctagatccaatctcctggtccctgcggaaaggaaaaagaatctcacgttcttcctttcgggaagggaggatcagggaaatcctattgatagctgatttctccagacctccgggaaaagcatgaaaaaaaggctcgaatggtacgatccctccgtcaccccagaatgaaaggggcgatctcgtagttcttggtctgtgaagatgcgtcgtaaggtgctccattttcccgtagtaaggtgctccattttcccattgaggccgaacctaaactgtgctcgagagatagctgtccataacaccacacattcc

SEQ ID NO: 689529 - DNA, 241 bp, Homo sapiens
caggccactgagacagcaatggttgtatcaactattaacgcgttatgtgaggcactatcctgtcggttttgacgggcccctggggcggagctcgtccgcgatgtgctcaagtggctgacggaccttccccgtctccccagcagtccgtgcctttcccatgctctgacttttgtatcttgcctacagtttccctaggctttcttgtctcagcaactttcccatctcgtctcttctcttgtac

SEQ ID NO: 689530 - DNA, 300 bp, Homo sapiens
ctacatggaaggtgttatgggtcatgagggcagatacctcatgattggctaggtgccattctcatggtagtgcgtgagttctccctctttcaaaactggattcatacccttaggactgaattagtaaccaccagagtaggatataatacaagccaggatgcccctcaggttaagcctcttcacatgtgtacacttaccctttgaacttctctgccatgttatgatgtgtcaagaaagctctcggtcaggcacagtggctcatgcctgtaatcccagtactttgggaggccaggcaggcgg

SEQ ID NO: 689531 - DNA, 316 bp, Homo sapiens
gctcgaccctcttcgctggcaagcaggctcctacaggtctgtggtgtccgcaaaacctgtgtccgacgccgggtgctgaatcagatcgggcaggtcacgccgtgccgcgaatcccgcaatagccttcggggttcttcggcaggtactgctggtgatagggctcggcatagaagaaggtcggcgcttcgtcgatttccgtggtgatagtgccatggccggccttgctcagttcggcctggtacagctgcttgctcttcagtgccgcttccaactgattcgggctggtggcgtagatcaccgagcggtactggctgcc

SEQ ID NO: 689532 - DNA, 279 bp, Homo sapiens
cagcgtataggagatataatagactttagaacttccaacatttttttctttttttggagacagagtcttgctctgtcgcccaggccggagtgcaatggctcgatctcagctcaccgcaacctccgcctccctggttcaagcgactcttctgcctcagcctcctgagtagctgggactacaggcacacgaccaccacgcccggctaaattttgtcctttttagtagagcaaggtttcaccagtgtcatggcttggtcttgaacctcctgggaaccttccc

SEQ ID NO: 689533 - DNA, 1239 bp, Homo sapiens; identical to SEQ ID NO: 687359

SEQ ID NO: 689534 - DNA, 1854 bp, Homo sapiens
  misc_feature (1462)..(1462): n is a, c, g, or t
agcggataatttggaatgtgggtggagggggatcatagttctccctgagtgagacttgcctgctcctctggcccctggtcctgtcctgttctccagcatggtgtgtctgaagctccctggaggctcctgcatggcagcgctgacagtgacactgatggtgctgagctccccactggctttggctggggacacccgaccacgtttcttgtggcaggataagtatgagtgtcatttcttcaacgggacggagcgggtgcggttcctggacagatacttctataaccaagaggagtacgtgcgcttcgacagcgacgtgggggagtaccgggcggtgacggagctggggcggcctgacgctgagtactggaacagccagaaggacatcctggaagacaggcgcgggccgcggtggacacctactgcagacacaactacggggttggtgagagcttcacagtgcagcggcgagttgagcctaaggtgactgtgtatccttcaaagacccagcccctgcagcaccacaacctcctggtctgctctgtgagtggtttctatccaggcagcattgaagtcaggtggttccggaacggccaggaagagaaggctggggtggtgtccacaggcctgatccagaatggagactggaccttccagaccctggtgatgctggaaacagttcctcgaagtggagaggtttacacctgccaagtggagcacccaagcgtgacgagccctctcacagtggaatggagagcacggtctgaatctgcacagagcaagatgctgagtggagtcgggggctttgtgctgggcctgctcttccttggggccgggctgttcatctacttcaggaatcagaaaggacactctggacttcagccaacaggattcctgagctgaagtgcagatgaccacattcaagggggaaccttctgccccagctttgcatgatgaaaagctttcctgcttggctcttattcttccacaagagaggactttctcaggccctggttgctaccggttcagcaactctgcagaaaatgtccatccttgtggcttcctcagctcctgcccttggcctgaagtcccagcattgatggcagtgcctcatcttcaactttagtgctcccctttacctaaccctacggcctcccatgcatctgtactccccctgtgtgccacaaatgcactacgttattaaatttttctgaagcccagagttaaaaatcatctgtccacctggctccaaagacaaaaaataaaaagaaaagaaaaagggaagattatttcctaatagcaaaaaaaaaaaaaaaaaaaaaaaaaaaaaaaaaaaaaacaaaaagaaaagaggggggcggcgccgccaccagagaatatacccccccgggggggggccccacagtttacagccgcgtaccccgcagttcttctctgggaccacaagggggcccccctataggangagagggcgctattatatataacaacaggagcggccggggcgccggttgttaaacaaccggtcccggagacggggcaaacacggctgccaacggggggaccacttcgggggggagggagaacccctaaaaccgccgggggggtgcggaccaccaatagggggggcacaacactacttccctaacaggagagatttttagaaggccctccaggagggggcaaacataataaacaccaatctgaaaagcggggttctcagcgggggtcgaaaaacacaagagggggaaatatctgctgaggcgtgttaaaaaaaaattgtgggcaccaacgcgggagaatgtatatgtgcagaacaaattttttccccgggagtggtagtattataataatcag

SEQ ID NO: 689535 - DNA, 1842 bp, Homo sapiens
agcggataatttggaatgtgggtggagggggatcatagttctccctgagtgagacttgcctgctcctctggcccctggtcctgtcctgttctccagcatggtgtgtctgaagctccctggaggctcctgcatggcagcgctgacagtgacactgatggtgctgagctccccactggctttggctggggacacccgaccacgtttcttgtggcagcttaagtttgaatgtcatttcttcaatgggacggagcgggtgcggttgctggaaagatgcatctataaccaagaggagtacgtgcgcttcgacagcgacgtgggggagtaccgggcggtgacggagctggggcggcctgacgctgagtactggaacagccagaaggacatcctggaagacaggcgcgggccgcggtggacacctactgcagacacaactacggggttggtgagagcttcacagtgcagcggcgagttgagcctaaggtgactgtgtatccttcaaagacccagcccctgcagcaccacaacctcctggtctgctctgtgagtggtttctatccaggcagcattgaagtcaggtggttccggaacggccaggaagagaaggctggggtggtgtccacaggcctgatccagaatggagactggaccttccagaccctggtgatgctggaaacagttcctcgaagtggagaggtttacacctgccaagtggagcacccaagcgtgacgagccctctcacagtggaatggagagcacggtctgaatctgcacagagcaagatgctgagtggagtcgggggctttgtgctgggcctgctcttccttggggccgggctgttcatctacttcaggaatcagaaaggacactctggacttcagccaacaggattcctgagctgaaatgcagatgaccacattcaaggaagaaccttctgtcccagctttgcagaatgaaaagctttcctgcttggcagttattcttccacaagagagggctttctcaggacctggttgctactggttcggcaactgcagaaaatgtcctcccttgtggcttcctcagctcctgcccttggcctgaagtcccagcattgatgacagcgcctcatcttcaacttttgtgctcccctttgcctaaaccgtatggcctcccgtgcatctgtactcaccctgtacgacaaacacattacattattaaatgtttctcaaagatggagttaaaaaaaaaaaaaaaaaaaaaaaaaaaaaaaaaaaaaaaaaaaaaaaaaaaaaaaaaaaaaaaaaaaaaaaaaaaaaaaaaaaaaaaaaaaaaaaaaaaaaaaaaaaaaaaaaaaaaaaaaaaaaaaatttgggcccccttggcccaagccattttaaacctgaaaaattttattcatggcccccaaatttgggccaaattggccaaatccccctaaaggggggcgattaaaaattaaagggcccggtttttaaaaacgtggaactggaaaaaccctggggttacccaaataaaacccctttgaaaaaaacccctttttcccaagtgggataaaaacaaaaaagcccccaccaaacgcctttccaaaaaatttcccaacctaaatggcaaaggaaaattgaccgttaaaattttggaaaaaatcccggaaaaatttttgaaaacaacctaatttttaaacacaaaggccaaaattggaaaaacccctttaatattaaaaaaaattccccgaaaaaggttaaagggtttccacagttggaacacaagagccctcttttaaaaaccgggccttcaccctaaaaagcgaacccttataaagggcaaggcccattcgggcctcccct

SEQ ID NO: 689536 - DNA, 500 bp, Homo sapiens
tgaaggtggggaatcctccgggggctcagagttgtggtactcgtaaaacagggatcatcgatgtggtctacaattgcttctattaacgagcgggttcgtaccaagacccgggtgaaaattggcttcgtgctcatcgacagcacacggtaccgacaggggtacgagtcccactatgcgctgccccggggccgcaaaaggggagccaagctgatcccttgaggaagaagagatttaaccaaaaacggatctacaaaattcagaggaattatgatgaagggaaaaggattgccaaaatcagcagtctccgggaggagcagtcccagcggggcaagcttctggcgtgcttcgtttcagggccgggacagtggggccgagcagatggctatgtgctagagggcaaagagtgggagtcctatctaaggaaattcagggcgcggaaggtaagggcgcggtaggtaagggcgcggaaggtaagggcgcggaaggtaagggcgcggtag

SEQ ID NO: 689537 - DNA, 823 bp, Homo sapiens
  misc_feature (544)..(544): n is a, c, g, or t
  misc_feature (568)..(569): n is a, c, g, or t
  misc_feature (628)..(628): n is a, c, g, or t
  misc_feature (639)..(639): n is a, c, g, or t
  misc_feature (658)..(660): n is a, c, g, or t
  misc_feature (673)..(674): n is a, c, g, or t
  misc_feature (791)..(791): n is a, c, g, or t
agcggataatttggaatgtgggtggagggggatcatagttctccctgagtgagacttgcctgctcctctggcccctggtcctgtcctgttctccagcatggtgtgtctgaagctccctggaggctcctgcatggcagcgctgacagtgacactgatggtgctgagctccccactggctttggctggggacacccgaccacgtttcttgtggcaggataagtatgagtgtcatttcttcaacgggacggagcgggtgcggttcctggacagatactttctattcacccaagagggaggttactgtgccgcctttcggacaagccgaaccgtgggggaagttcccggggccgtgtgaccgtgaagcttgtgggcggtgcctagctgccgaagtaccttgtgaacagccccagaagggacactctctgtgatgcatgagtgccgtgtgcctgcgggttgtgaccaacctatcttgcatgaacacgaaaactacagggtcgttgctgcgaccgagctttcaacatgttgcatgcgtgcgaagttctanattcctgagtgttgaccttgtgcnntatcccgtggcaaagaaccccatgccgcccgtgcatgcgacccacataccttccctgtngtcttggctcnttgtgagatgggctttctnnnatccagtgcatgnncattgaacgtccagcgtcggttcccgggacacgtgcagcgacagagacagacctgggcgtgcgtgtccgacatggcctggatccagcaagtggacgacttggacccttccgagacgncctggcttgatgctggagaacaggttccctct

SEQ ID NO: 689538 - DNA, 587 bp, Homo sapiens
  misc_feature (231)..(231): n is a, c, g, or t
cgacatgttaccaaggatgataaataggtgccaagtggagcaccagctgtgatgagtgccctcacagtggactggagtgagaagctttcgtgacctcataaagtgaaggcttatcttcagtcattgtgttatatattttacgtgcattagtcctcatataaacccaagaggtaaattagtataattatcgttcattgtaggtgacaaagttgagacacagaagaatcaaanaactcttccaggatcaaccagtaaaaggcagaccttggattcgaaccaggcaacctggctcaaatatcagttttaattactacactctgtactttccaagatttgtaaacagtttgacaatgcatgccgatttaaaactatgaagaaacaaacacaatttttcacaacacctctcaaatctaatgggtcctcactgtcaagattaaattccaggctgatgacactgtaaggtcacatggccagctgtgctataggcctgccagagtcctagaccctcgagcgacgcagagaagcacacacccatcccaatcaggcaacctagctaggtcatcttagacaattccctgaacaggtta

SEQ ID NO: 689539 - DNA, 612 bp, Homo sapiens
  misc_feature (223)..(223): n is a, c, g, or t
  misc_feature (272)..(272): n is a, c, g, or t
  misc_feature (275)..(275): n is a, c, g, or t
  misc_feature (277)..(277): n is a, c, g, or t
  misc_feature (280)..(280): n is a, c, g, or t
  misc_feature (308)..(308): n is a, c, g, or t
  misc_feature (315)..(315): n is a, c, g, or t
  misc_feature (340)..(340): n is a, c, g, or t
  misc_feature (375)..(375): n is a, c, g, or t
  misc_feature (405)..(405): n is a, c, g, or t
  misc_feature (428)..(428): n is a, c, g, or t
  misc_feature (436)..(436): n is a, c, g, or t
  misc_feature (438)..(439): n is a, c, g, or t
  misc_feature (450)..(450): n is a, c, g, or t
  misc_feature (456)..(456): n is a, c, g, or t
  misc_feature (462)..(462): n is a, c, g, or t
  misc_feature (466)..(467): n is a, c, g, or t
  misc_feature (470)..(470): n is a, c, g, or t
  misc_feature (474)..(474): n is a, c, g, or t
  misc_feature (477)..(477): n is a, c, g, or t
  misc_feature (485)..(485): n is a, c, g, or t
  misc_feature (487)..(487): n is a, c, g, or t
  misc_feature (495)..(496): n is a, c, g, or t
  misc_feature (506)..(506): n is a, c, g, or t
  misc_feature (511)..(511): n is a, c, g, or t
  misc_feature (513)..(513): n is a, c, g, or t
  misc_feature (516)..(516): n is a, c, g, or t
  misc_feature (530)..(530): n is a, c, g, or t
  misc_feature (538)..(538): n is a, c, g, or t
atgcagcaggattgcaacacataagtgctgctggcttggcctcttctgtgccattaaggccttggagcctgactgccaactgggctgccagccaccctcctgcacaccctacaagctgcgacctgctttgccagctgttccaggtgaggccctgcctgcagcgggcacaggtaggaccgagaaggctgggtgacaagaggacccactcctgccaacagccccngagagcgggcagtgccggacaggatgtgcagacacaactacgagctggncgngnccntgaccctgcagcgccgagtccagcctanggtgaangtttccccctccaagaaggggcccntgcagcaccacaacctgcttgtctgccacgtgacngatttctacccaggcagcattcaatccganggttcctgatggacaggaggaancagtgggntnngtccaccaacntgatcngtatgnagannggncttncanatctggtnangcggaaannaccccccagnagganangtntaccctgccaatgnagcacacnagcctgaatagtccggtccccgtgaattgaaaggcccattttgattttgccaaaaaagccgggggtatcttata

SEQ ID NO: 689540 - DNA, 401 bp, Homo sapiens
tttatttccaccttagcagaggccaaccgacccctcttggcccttgccgagggggagtccgaacttgtctcaggtttcaacttcgaatacgcggcgggccccttcgccctttttttcatagcggaatacccaacctttattataataaacacctccccccctccatttttcttgggagcaacatatgaggccctttcccttgaactttacccaacattttttgtccccaagaccctacttttaccctcccggtttttatgaattggaacggcatacccccgattccgttagggccaattcatacccctcttatgaaaaaacttcctccccctccccctagcattacttatatgataggtttccatacccattacattttccggctttccccctcaacccta

SEQ ID NO: 689541 - DNA, 1236 bp, Homo sapiens
acaacagtgttacaggcggaccgtgttattcatcaggggtgccttcagtgttcatcacttgcctctgcgcactggtcctgtcctgttctccagcatggtgtgtctgaagctccctggaggctcctgcatggcagcgctgacagtgacactgatggtgctgagctccccactggctttggctggggacacccgaccacgtttcttgtggcaggataagtatgagtgtcatttcttcaacgggacggagcgggtgcggttcctggacagatacttctataaccaagaggagtacgtgcgcttcgacagcgacgtgggggagtaccgggcggtgacggagctggggcggcctgacgctgagtactggaacagccagaaggacatcctggaagacaggcgcgggccgcggtggacacctactgcagacacaactacggggttggtgagagcttcacagtgcagcggcgagttgagcctaaggtgactgtgtatccttcaaagacccagcccctgcagcaccacaacctcctggtctgctctgtgagtggtttctatccaggcagcattgaagtcaggtggttccggaacggccaggaagagaaggctggggtggtgtccacaggcctgatccagaatggagactggaccttccagaccctggtgatgctggaaacagttcctcgaagtggagaggtttacacctgccaagtggagcacccaagcgtgacgagccctctcacagtggaatggagagcacggtctgaatctgcacagagcaagatgctgagtggagtcgggggctttgtgctgggcctgctcttccttggggccgggctgttcatctacttcaggaatcagaaaggacactctggacttcagccaacaggattcctgagctgaagtgcagatgaccacattcaagggggaaccttctgccccagctttgcatgatgaaaagctttcctgcttggctcttattcttccacaagagaggactttctcaggccctggttgctaccggttcagcaactctgcagaaaatgtccatccttgtggcttcctcagctcctgcccttggcctgaagtcccagcattgatggcagtgcctcatcttcaactttagtgctcccctttacctaaccctacggcctcccatgcatctgtactccccctgtgtgccacaaatgcactacgttattaaatttttctgaagcccagagttaaaaatcatctgtccac

SEQ ID NO: 689542 - DNA, 1844 bp, Homo sapiens
agcggataatttggaatgtgggtggagggggatcatagttctccctgagtgagacttgcctgctcctctggcccctggtcctgtcctgttctccagcatggtgtgtctgaagctccctggaggctcctgcatggcagcgctgacagtgacactgatggtgctgagctccccactggctttggctggggacacccgaccacgtttcttgtggcaggataagtatgagtgtcatttcttcaacgggacggagcgggtgcggttcctggacagatacttctataaccaagaggagtacgtgcgcttcgacagcgacgtgggggagtaccgggcggtgacggagctggggcggcctgacgctgagtactggaacagccagaaggacatcctggaagacaggcgcgggccgcggtggacacctactgcagacacaactacggggttggtgagagcttcacagtgcagcggcgagttgagcctaaggtgactgtgtatccttcaaagacccagcccctgcagcaccacaacctcctggtctgctctgtgagtggtttctatccaggcagcattgaagtcaggtggttccggaacggccaggaagagaaggctggggtggtgtccacaggcctgatccagaatggagactggaccttccagaccctggtgatgctggaaacagttcctcgaagtggagaggtttacacctgccaagtggagcacccaagcgtgacgagccctctcacagtggaatggagagcacggtctgaatctgcacagagcaagatgctgagtggagtcgggggctttgtgctgggcctgctcttccttggggccgggctgttcatctacttcaggaatcagaaaggacactctggacttcagccaacaggattcctgagctgaagtgcagatgaccacattcaagggggaaccttctgccccagctttgcatgatgaaaagctttcctgcttggctcttattcttccacaagagaggactttctcaggccctggttgctaccggttcagcaactctgcagaaaatgtccatccttgtggcttcctcagctcctgcccttggcctgaagtcccagcattgatgacagcgcctcatcttcaacttttgtgctcccctttgcctaaaccgtatggcctcccgtgcatctgtactcaccctgtacgacaaacacattacattattaaatgtttctcaaagatggagttaaaaaaaaaaaaaaaaaaaaaaaaaaaaaaaaaaaaaaaaaaaaaaaaaaaaaaaaaaaaaaaaaaaaaaaaaaaaaaaaaaaaaaaaaaaaaaaaaaaaaaaaaaaaaaaaaaaaaaaaaaaaaaaatttgggcccccttggcccaagccattttaaacctgaaaaattttattcatggcccccaaatttgggccaaattggccaaatccccctaaaggggggcgattaaaaattaaagggcccggtttttaaaaacgtggaactggaaaaaccctggggttacccaaataaaacccctttgaaaaaaacccctttttcccaagtgggataaaaacaaaaaagcccccaccaaacgcctttccaaaaaatttcccaacctaaatggcaaaggaaaattgaccgttaaaattttggaaaaaatcccggaaaaatttttgaaaacaacctaatttttaaacacaaaggccaaaattggaaaaacccctttaatattaaaaaaaattccccgaaaaaggttaaagggtttccacagttggaacacaagagccctcttttaaaaaccgggccttcaccctaaaaagcgaacccttataaagggcaaggcccattcgggcctcccct

SEQ ID NO: 689543 - DNA, 171 bp, Homo sapiens
  misc_feature (29)..(29): n is a, c, g, or t
acgagattatctagccaatggtacctccnagcctgatacgagttgccaggacgcaggtcagggggacttggctgtcccccgtctttcaaataaagctgtttgtctaaaataaataaataaataaataaataaataaataaataaatttattttttaacttcctggtgaatt

SEQ ID NO: 689544 - DNA, 1842 bp, Homo sapiens
agcggataatttggaatgtgggtggagggggatcatagttctccctgagtgagacttgcctgctcctctggcccctggtcctgtcctgttctccagcatggtgtgtctgaagctccctggaggctcctgcatggcagcgctgacagtgacactgatggtgctgagctccccactggctttggctggggacacccgaccacgtttcttgtggcaggataagtatgagtgtcatttcttcaacgggacggagcgggtgcggttcctggacagatacttctataaccaagaggagtacgtgcgcttcgacagcgacgtgggggagtaccgggcggtgacggagctggggcggcctgacgctgagtactggaacagccagaaggacatcctggaagacaggcgcgggccgcggtggacacctactgcagacacaactacggggttggtgagagcttcacagtgcagcggcgagttgagcctaaggtgactgtgtatccttcaaagacccagcccctgcagcaccacaacctcctggtctgctctgtgagtggtttctatccaggcagcattgaagtcaggtggttccggaacggccaggaagagaaggctggggtggtgtccacaggcctgatccagaatggagactggaccttccagaccctggtgatgctggaaacagttcctcgaagtggagaggtttacacctgccaagtggagcacccaagcgtgacgagccctctcacagtggaatggagagcacggtctgaatctgcacagagcaagatgctgagtggagtcgggggctttgtgctgggcctgctcttccttggggccgggctgttcatctacttcaggaatcagaaaggacactctggacttcagccaacaggattcctgagctgaaatgcagatgaccacattcaaggaagaaccttctgtcccagctttgcagaatgaaaagctttcctgcttggcagttattcttccacaagagagggctttctcaggacctggttgctactggttcggcaactgcagaaaatgtcctcccttgtggcttcctcagctcctgcccttggcctgaagtcccagcattgatgacagcgcctcatcttcaacttttgtgctcccctttgcctaaaccgtatggcctcccgtgcatctgtactcaccctgtacgacaaacacattacattattaaatgtttctcaaagatggagttaaaaaaaaaaaaaaaaaaaaaaaaaaaaaaaaaaaaaaaaaaaaaaaaaaaaaaaaaaaaaaaaaaaaaaaaaaaaaaaaaaaaaaaaaaaaaaaaaaaaaaaaaaaaaaaaaaaaaaaaaaaaaaaatttgggcccccttggcccaagccattttaaacctgaaaaattttattcatggcccccaaatttgggccaaattggccaaatccccctaaaggggggcgattaaaaattaaagggcccggtttttaaaaacgtggaactggaaaaaccctggggttacccaaataaaacccctttgaaaaaaacccctttttcccaagtgggataaaaacaaaaaagcccccaccaaacgcctttccaaaaaatttcccaacctaaatggcaaaggaaaattgaccgttaaaattttggaaaaaatcccggaaaaatttttgaaaacaacctaatttttaaacacaaaggccaaaattggaaaaacccctttaatattaaaaaaaattccccgaaaaaggttaaagggtttccacagttggaacacaagagccctcttttaaaaaccgggccttcaccctaaaaagcgaacccttataaagggcaaggcccattcgggcctcccct

SEQ ID NO: 689545 - DNA, 1239 bp, Homo sapiens
agcggataatttggaatgtgggtggagggggatcatagttctccctgagtgagacttgcctgctcctctggcccctggtcctgtcctgttctccagcatggtgtgtctgaagctccctggaggctcctgcatggcagcgctgacagtgacactgatggtgctgagctccccactggctttggctggggacacccgaccacgtttcttgtggcaggataagtatgagtgtcatttcttcaacgggacggagcgggtgcggttcctggacagatacttctataaccaagaggagtacgtgcgcttcgacagcgacgtgggggagtaccgggcggtgacggagctggggcggcctgacgctgagtactggaacagccagaaggacatcctggaagacaggcgcgggccgcggtggacacctactgcagacacaactacggggttggtgagagcttcacagtgcagcggcgagtccatcctaaggtgactgtgtatccttcaaagacccagcccctgcagcaccacaacctcctggtctgctctgtgagtggtttctatccaggcagcattgaagtcaggtggttccggaacggccaggaagagaaggctggggtggtgtccacaggcctgatccagaatggagactggaccttccagaccctggtgatgctggaaacagttcctcgaagtggagaggtttacacctgccaagtggagcacccaagcgtgacgagccctctcacagtggaatggagagcacggtctgaatctgcacagagcaagatgctgagtggagtcgggggctttgtgctgggcctgctcttccttggggccgggctgttcatctacttcaggaatcagaaaggacactctggacttcagccaacaggattcctgagctgaagtgcagatgaccacattcaagggggaaccttctgccccagctttgcatgatgaaaagctttcctgcttggctcttattcttccacaagagaggactttctcaggccctggttgctaccggttcagcaactctgcagaaaatgtccatccttgtggcttcctcagctcctgcccttggcctgaagtcccagcattgatggcagtgcctcatcttcaactttagtgctcccctttacctaaccctacggcctcccatgcatctgtactccccctgtgtgccacaaatgcactacgttattaaatttttctgaagcccagagttaaaaatcatctgtccac

SEQ ID NO: 689546 - DNA, 819 bp, Homo sapiens
ggcggagagttgtaagaggcgtagagccaggcgtgttaagagccggctcggaactgctccggagggcacgggctccgtagggcaccaatcggtgtggatcccctccccgcgtgcgtggggctcccatggcagcaggttcgcgttcgagagtgacctgcactcgctgcttcagttggatgcgcccatccccaatgcgaccctcctgcgtcgctgggcagcggcaagagccagaggtagagcctggaggcctcggaccccgtcaactccgatgacgggctcggcgaaccggatctccacgagcgccggtcgaggacatccggtgccgaagtccgtggtgaaatccagcttccaaggggttcaggagcatctccttagcaatacgctggtcgggtgagcggctatatcgctcgccattcggcagatgctgtcccatactggatggtggccagcattcgctccgtgagcaatggagaagcaagcctgagaaacagccagaggcccaccagagaaggaagcatcagaaagccgtgggctttggaacgctgaacgggctttcgatagtacgaggaagcccaggatccttcggctcaggtggaaaagaccactaaaatggcgccagaggggttatcagaagcagacttgaccagtacgtcttataggccaaaaagggcactcctggcatccagcgggaagagctggcgttacatttcctttccgctggccagaaccgtatcctgggattgcgccgtgagaatccgaaaatgacctattagcctgaagccttgtgggaattggaagttccatggggaattgtactgg

SEQ ID NO: 689547 - DNA, 960 bp, Homo sapiens
  misc_feature (44)..(44): n is a, c, g, or t
  misc_feature (86)..(86): n is a, c, g, or t
  misc_feature (152)..(152): n is a, c, g, or t
  misc_feature (160)..(161): n is a, c, g, or t
  misc_feature (163)..(163): n is a, c, g, or t
  misc_feature (197)..(197): n is a, c, g, or t
  misc_feature (210)..(210): n is a, c, g, or t
  misc_feature (229)..(230): n is a, c, g, or t
  misc_feature (232)..(232): n is a, c, g, or t
  misc_feature (237)..(237): n is a, c, g, or t
  misc_feature (248)..(249): n is a, c, g, or t
  misc_feature (253)..(255): n is a, c, g, or t
  misc_feature (278)..(278): n is a, c, g, or t
  misc_feature (298)..(298): n is a, c, g, or t
  misc_feature (311)..(311): n is a, c, g, or t
  misc_feature (323)..(323): n is a, c, g, or t
  misc_feature (327)..(327): n is a, c, g, or t
  misc_feature (342)..(342): n is a, c, g, or t
  misc_feature (345)..(345): n is a, c, g, or t
  misc_feature (353)..(353): n is a, c, g, or t
  misc_feature (361)..(361): n is a, c, g, or t
  misc_feature (370)..(370): n is a, c, g, or t
  misc_feature (398)..(398): n is a, c, g, or t
  misc_feature (400)..(400): n is a, c, g, or t
  misc_feature (402)..(402): n is a, c, g, or t
  misc_feature (408)..(408): n is a, c, g, or t
  misc_feature (417)..(417): n is a, c, g, or t
  misc_feature (424)..(424): n is a, c, g, or t
  misc_feature (431)..(431): n is a, c, g, or t
  misc_feature (437)..(437): n is a, c, g, or t
  misc_feature (444)..(444): n is a, c, g, or t
  misc_feature (447)..(447): n is a, c, g, or t
  misc_feature (463)..(463): n is a, c, g, or t
  misc_feature (858)..(858): n is a, c, g, or t
  misc_feature (883)..(883): n is a, c, g, or t
  misc_feature (903)..(903): n is a, c, g, or t
gaaaaacataataaattcattgtatagataaaaatgacatgtanactattccaatatctgtttcctgttgaagaaaccatcaaganaaaatcttttcttggttcttcatcattaacacaacccccaaaataaaatacgattttaaaaaaatnaataaaanngnatatatatatacatacacatacacacataattanaaaatttcctganttaacaaagacatgctctnngnaagcngtagacctttnncccnnntctggtagcctttccttcttttnttttctgcagttcttaaacngcctgtttgtttnttttggtatggntganttgttttgtttcttntcntggatgtnttcttgtntacacaacngggggggggggggcggggagggggtgcncngnggggcnaagggcagngcgttgnacataancggggngcattantcnttgggtgggatgtgcntttgggggggggagcctggtaagatacactcaaaacctttattcattgatttacaaactgtacaatatttacaaagtttaggcattaatcccatattgacatgaatgctgtggagagtctaaaaataaatatgtggcacatagcttaatatacacatcatggctctttacacttaagccattaccaatagtgagatgtaatggagaatttaatgtggtagaaaagtcagagtggctgaccagtcccggaccttccatgtgaatgactcttccttggctccttgaggctggggatagtgagcaaataactttctttcaagagaattaaacactgccattctgacaggcacatgggacgcatgcagcaacatctatgcagagtctgcaagcactctntgggtggtggttgaatctgcaccanctgtggacctgatccctgtncaccagccagggaggctttggtgtgggcacttttcttgtttcttattcaatcacatg

SEQ ID NO: 689548 - DNA, 677 bp, Homo sapiens
gatggacacaaaggcaagtgtaaatgaaccgtatatatcagcacagcttccgcatggtccagcgtccttgatgacaatgcccgaaaatacggcacgggctaaaaagtgtggaaatgaattccacactacgagctttgtttatccttagggggtacatgcaggtgctcgaagaaaaacttaatgtcgtgctcttaatgcttccatttaagagaatgttcggagatattcaaggcttcttctggttctgggaccaaactcagtgacagtgtaatcgacaacatcatcaagcagaagaatctgaattagtgtcgctgggtctactgatccgcaggattacaattatcacagatgagcaccgattggccctccaccacgaagctacggggaggccaggcttaaccaaagggtatgctgatttctttctggtcaggggtcgtaaaggtagagacactgaggggatccgaagtaagttagtgaagaaattggaagcgaaaatcgctaatgtgcttacgcttaaggatagcgtagtagggtgacataatcacttggctgtaggataatcgccatgtagaagtcacgacgaggaaacaagatacagttcctaccttttgactgagaaaggccttggtggaaagccttagaaagggagaaggtttgagggagaagtaagaccaatt

SEQ ID NO: 689549 - DNA, 844 bp, Homo sapiens
tggaaacaggggtctggctggttgttcgcccaggttgggatgtgcagtgggcctgggtcattgggcttcaagggctcactggaagcttgggacctctgggttcaaggtgatcctctggtgtcagtcccctgagaaatcccccaggcccagtacatattttgggtgggataccaggggtctcatttggttggcctagcgttgtctggagaactccggggctcaagggagatctggtaagcctaagcctcctaaaggggcggggagataatagggcatggatgtcatgtggtacccgggcctgggtcaaccgggttataaagggaccgcttatggatcactttgggcgcctacccagatgaacccagggtgcgtacttaccaatttcacagggtcacgctggatttagccaccttaagtccacattctgcgcaatcttaatgtcacacatggggctggttgtacaccctaatcgatatgtcaccagggctctggggagacttggtaaacgtgtgggacaatcttggagaaaggcccggaatttctggcgcaacaggaacccactccggggtacattcccctgtggtacccttggtccgtggggcgcaaccatttgagggttgtataagccccgcggaagaaaaatacgtcgtttgacgatctgcgtatataccagtgggtaccggggacattggttgtggtctccccccgccaataaaaggggggtactgtggagtacaatcacctgtgatgagcccgtggaaaacgttagtccattttacttagacgccttggatgagaggtggggcgacccacttctgcggcaacaccaggggcattgtagata

SEQ ID NO: 689550 - DNA, 509 bp, Homo sapiens
agttcgacggagactctctcttcttgattagtatcgcaagaggtttccacattttattagtcttctttaagaacttttattttgttgatccttccgagtatttctttgcttggcacttcccatcctctgctaactctacaggcttactctatgttctacttctaacctcttgtggatctgtttagttattaattttaacatcttgtgttgcattgtgatttcttctaaacctattaattaatttgaagttgctttttgggtgttttgttgattttagtttcccagctaaactagaaggggtgataaatatctttctgttgttttgtagttttattgcatttttattagaaaacagagtattcaaggtcaggagatcgagaccaccctggctaacagggtgaaaccccatctctgctaaaaatacaaaagattagccaggcgtggtggcacgcacctgtagtcccagctactcgggaggctgaggcaggagaatggtgggaacctgggag

SEQ ID NO: 689551 - DNA, 869 bp, Homo sapiens
agacagatgaggcgacgggatgccggaggggggatgagaatgttctgggcgtcctctgcaaatctacgaatgcaaatataaatagatttgtagaagtgataagagttcactatatacatcatatttaagaactcgaaagaagtctcagtggcagtctatttgtcaaaatcaatatccatattcttgttaatatacggtgagatattgcgcaatatagatctggattttgacaccatttattgaagcggcatcaccaggctgtgcggaggtgttggcattcttcgctgatttggctgtgcccaactgttaacattatttaatcatgcaatcacatggttctgtgcatcttggatgtgaaatgctgtccagttttaatccacacatgtgtgatccttgggtgtatgaccacgatgcagaacgtgatctctggagatatctgctaattttggtcatctatgcagagtgactccggaaatgtgttctaaaacaagaagagaacttactaaggaagtgatacatagaccagcgtttatcgcaacatgagttgtaaagctggtgtactttgttgctgtggctatctgcctggttaatgcaaatgtaccactttttagtgtcagcccgtatacataaacatctagagacaaaaggatggaatgaccgagcaaagggggaacacgtggtgcgtgtcttacatccccttgaagaggtgtgtgacgccttaatttttaaactgggcggagccttagggcgcaaaggtcgccaagggaaattgtgagcaaggtaaattccgggcggggccacagagggggggcggaataggacagacagggtgggtgaacggaaaccgggagggagcccccaatttgacg

SEQ ID NO: 689552 - DNA, 116 bp, Homo sapiens
gtactcgggacagtgaagatgacgagtatcagaggctgtgaggcaggaagaaactgtgctggaagggacaatggatcaagatgaggagtcccacccagtataggaggctgagtgag

SEQ ID NO: 689553 - DNA, 222 bp, Homo sapiens
  misc_feature (41)..(41): n is a, c, g, or t
  misc_feature (47)..(47): n is a, c, g, or t
  misc_feature (122)..(122): n is a, c, g, or t
  misc_feature (141)..(141): n is a, c, g, or t
  misc_feature (164)..(164): n is a, c, g, or t
  misc_feature (192)..(192): n is a, c, g, or t
  misc_feature (214)..(214): n is a, c, g, or t
ctgtgcctcctgccccacgcagctgtgagggagcccagggnaatggngccttagacccgggcagctgtgttggaatgaggtaattctgttccgaaggaaaaaaggcaaatgaagtcatgggnacacacagagttagcaagngtccattgaacccggcaggcaantgtgtctgtggtgacccatctctcctanatggtgccacaaacatctctcnggacgact

SEQ ID NO: 689554 - DNA, 187 bp, Homo sapiens
caatcctatgagccattacaaaatggaagtgcaattaaacatcgctttcgtttcttagggacaaaacctgactaagcaaaaatgttatttgacttatcactctggactcctccatcctgcatgtagactgcctagatttacaaaaccaaattatgagaaatcagcaatgctgcccatccttttaact

SEQ ID NO: 689555 - DNA, 1111 bp, Homo sapiens
tgctggagatggagtgagggaggccgggacaaggctgcctggtgcagccccagcagtctccagctggctgtgcccccggctggcactggactgagaagcctgagcggcaacggagctgtgctggtgatgcctggggacaaggacaaagaacaggagctgtctgaagagtgataaacatgcttcaagatgaacttggacgatgctcgatggaacgactaggggacgaagtgatacatccctgtatcagaccagcagcatggagcgacatttgcgaatggcagattcgtatcttctacaacttccatgacttcagtgcccaagcctctcaaatttctcgcgtccacactatggcaaaactgaaggaaatctatgagaacatggcccctggggagaataagcgttttgctgctgacatcatctccgattaatggacatgaccatgagtggggagcgtgagtgcctcaaagtatcggctacgtgggctcccaggaggaatcggcatcatggggtcatgagctatgtcaggcactctggcaggagaagtggctaaggagtggaggacaggatgaacagagacaggtccaacagtagagccatcgtgaacagacatgatgaaatgaaaagagaaacatatcagatagagccaaaagaagaagaatgaccgattgagacatagaatatcggaaaatgacaaagagaacatgacatgagaaagcacattgctaaaaaataatatacacaaaatcataactaaaatcacaaaaaaaaataaatacaacacactaaacaagaaaacactcctataacaacaaaaataaacgataaaaaaatcataaccataacgatcacaacgaccgcaatagcatacgaacctccagccaacagaggaacaagacaaagggaggacggagacaggagagatgcggcaaagagagaagagagaccacaggagagcagaaaggaaggacacgagatagggcagaaaagcgcgcacaagcagaaacgaacagagtgccacgcagcgaaggaaagaaaagaacgtagctggacagctagaggaagcagagcgcaggagcgacaccacgaaagaaagccgtagagcagcacgaag

SEQ ID NO: 689556 - DNA, 96 bp, Homo sapiens
caaattttgttaagatcccatttaatatttgaaaaaaatcagtagcccaaatatattttgattgtcccttccaaaataaaatacatttccagtcta

SEQ ID NO: 689557 - DNA, 239 bp, Homo sapiens
  misc_feature (13)..(13): n is a, c, g, or t
  misc_feature (19)..(19): n is a, c, g, or t
aaagaaaaaaaanaaaaanaaaaaaaaaagaataaaaaatgaaaaaggttgatgtctgatgccctgtttctttgcaacatgacctgaagacgactgaaacaacgtgttctttgcctgaaatatccaccttgacttacagttttattaatgctggtgtgatcagactggacaaaaattagcatatgttattaactgatctaatttaagtgccaattcttaatagaaacactaaacaataa

SEQ ID NO: 689558 - DNA, 120 bp, Homo sapiens
atcccgtctgatacgggaagcaggatacttgggtgaggggtgggcacaaagaatggccacggagtgatgaaaggtcatttggatctgatgctatcttctttccccttcccccgtagtcat

SEQ ID NO: 689559 - DNA, 122 bp, Homo sapiens
  misc_feature (6)..(6): n is a, c, g, or t
  misc_feature (13)..(13): n is a, c, g, or t
  misc_feature (19)..(19): n is a, c, g, or t
tccacncccaaantttttnccgctccaacacttcactattttgttttgcttttcttattaatatagagacaggaatgtcaggtcctgagcccaagctaagccatcatatcccttgtgcctgc

SEQ ID NO: 689560 - DNA, 424 bp, Homo sapiens
  misc_feature (9)..(9): n is a, c, g, or t
  misc_feature (354)..(354): n is a, c, g, or t
tgtaccccnggcccatggttgcctaaaaactagctgtacccaggtcgcctcaccctttcaggtcctgccctgcccttggcccctgagtccatggacaggagtgttatgttgtcttttctccttataaaatgtaaataatggctgggcaacggttgtcacgccctataatcccagcactttgggaggcccaaggtgggtggatcacaaggtcaggagatcaagaccatccctggctaacacggcgaaaccccatctctactaaaaatacaaaaaattagccaggcgtggttgcatgcgcctatattcccagctacttgggaggctgaggcagaagaattgcttgaacctgggagncggaagttgcagtgagccgagattgcgccactgcactccagcctaggcgacagagcgagactctgtctca

SEQ ID NO: 689561 - DNA, 689 bp, Homo sapiens
atttttttttcaaaccaaaagaaacaactttgttcttccgccaagttcccatttaatgggacccattttacacacccccaggtaaaggttctctttccttttaaaacccgtttctcttaaaaaaattcgccaacatcgttttaacctccaatttttctcaaccatccccttgaaaatttcctaaggtttttctcataattagggcaccaccttccctgttcatctttgaagaatccattccgcacaagaatttaaaagaagtgattttaagatttggttggggacctatagtaacgcttatgcagcaaaccaaaacccaattgtcttgaaaattatatgcccacatgtttagtagcaaagtctcccaaacactcttgctttcacttaagtgtctggcccgcaacactgtagcatcaagcatgatcttgttgccgcaatatttaaaatatccacagtactcgctttttccgtatgatcatagtaattgcctagaaatatctttctcctacctgttattcatcaatttttcccagtctttttatacggaaaaaattgcattaaaaacacttagtagccaggttataagaggaatctgggacaactatggtgggcgattatttttcacactgtacgtgccaaacctttatgactgtggaaagactgctgttttaagaaagatttaccttcca

SEQ ID NO: 689562 - DNA, 367 bp, Homo sapiens
  misc_feature (321)..(321): n is a, c, g, or t
  misc_feature (332)..(332): n is a, c, g, or t
aattcggaacgaggatatcaggccaggagtttgagaccatcctggacaacataatgagaaaagaaaatacaaaaattaaggggtgtggtgacacatgcctgtagtctcggctgtttgggaggctgaggcgggaggattgcttgagcctgagaggttgaggctacagtgagccatgtttacgccattgcagtccagcctgggcgacagagccagactgtctgaggaagaaattgtatatcaggctgggcacagtggctcatacccgtagtcccagcactttgggaggcccaggctgggtattcacttgagcccagggagttngagaccagccnggcaacaaagtgagaccctctctctacaaaaaata

SEQ ID NO: 689563 - DNA, 330 bp, Homo sapiens
cgagaaaaactgctaccgccagtctcgatacctggaaaccatttccatagagcatacagttattgccagcaaaaacgggtgaaactgtatgatgtcttccgttctccatgaattcaggcgtctcagttcgatgctcctgccacgttctagggtcacgcctatatacggaaggtacatcggaaagcccaggctatatcatccttgggcatgacttgcttcttcccacgggtccacatcatgcatgcgctcacaggtacaatagcagtctcgcggaacacaggttactcattgagatatagctgtacaacactatgacagagtgggcttccg

SEQ ID NO: 689564 - DNA, 824 bp, Homo sapiens
  misc_feature (38)..(38): n is a, c, g, or t
  misc_feature (49)..(49): n is a, c, g, or t
  misc_feature (221)..(221): n is a, c, g, or t
  misc_feature (374)..(374): n is a, c, g, or t
  misc_feature (421)..(421): n is a, c, g, or t
  misc_feature (479)..(479): n is a, c, g, or t
  misc_feature (488)..(488): n is a, c, g, or t
  misc_feature (502)..(502): n is a, c, g, or t
  misc_feature (506)..(506): n is a, c, g, or t
  misc_feature (510)..(510): n is a, c, g, or t
  misc_feature (512)..(512): n is a, c, g, or t
  misc_feature (514)..(514): n is a, c, g, or t
  misc_feature (517)..(517): n is a, c, g, or t
  misc_feature (588)..(588): n is a, c, g, or t
  misc_feature (605)..(605): n is a, c, g, or t
  misc_feature (632)..(632): n is a, c, g, or t
  misc_feature (637)..(637): n is a, c, g, or t
  misc_feature (752)..(752): n is a, c, g, or t
  misc_feature (768)..(768): n is a, c, g, or t
ggaagtgacgcgaggcgtagcggaagttactgcagcgnggtgtgtgctntggggaagggagaaggattgtaaaccccggagcgaggttctgcttacccgaggccgctgctgtgcggagacccccgggtgaagccaccgtcatcatgtctgaccaggaggcaaaaccttcaacctgaggactttgggggataagaaggaaggtgaatatattaaaactcaanagtcattggacaggataggcagtgagattcacttcaaagtgaaaatgacaacacatctcaagaaactcaaagaatcatactgtcaaagacagggtgttccaatgaattcacctcagggttttctctttgaggggtcagagaattgctgataantcatactccaaaagaactgggaatggaggaagaacgatgtgattgancgtttatcaggaacgaaacggggggtcattcaacagtttagatattgctttggatgtnttttctgtntccctcaagtcctnttgnttantntntgnagaaaatagttcttttgtgaatgtggtgttcaaaacggaattgaaaactgggaccccatctcgtttgaaanaatctggtaatttgaanttctagtgctcattattcattatggtnggtgntcattgtgctgatttgtggtgatcaagcctcagtccccttcatattaccctctcctttttaaaaattacgtgtgcacagagaggtcagctttttcacggacattgcatttcaggnttgtggtgatacatangatcgaccaatgaagtgctcataatgacttccactgcgccctgatgtctagcatgt

SEQ ID NO: 689565 - DNA, 170 bp, Homo sapiens
  misc_feature (153)..(153): n is a, c, g, or t
aatgtatttcattctggagctccatttgtttttgtcatagtgtcactcttgggtgctgatctcgagtgttattttctgattgtggtgttgagagttgcactcccagaaaccttttaagagatacatttatagcccttaggtgttggtatgacnccaaagcttcctctgtg

SEQ ID NO: 689566 - DNA, 447 bp, Homo sapiens
cgtttccctgttggtctgatcaaaggaagaatgaatcgtgttgtgctgtattggggaggaaataggagggaagtcaccaaaacccacccgattatcatgtatgttaaggaactttaagaaaggttattcggggactatggaattaagttgacccccagaggctgagaactctctgtgaaatacaatggccctcttttgatgttagatggccagctgaaggaaatgtagataaggaaacaattggctatgtatttaaggtggtaactggggtcagaggacagtcaggtcacctagaccagttcccttgtattgactcatggttaaatatagtacagactccacctgcatggttgcagacttgcctggcagctttttgctcaagctgagcctaagccaccaaaagaaaaaaatcagctttgctggaagctacagagaccaagggaaaca

SEQ ID NO: 689567 - DNA, 259 bp, Homo sapiens
  misc_feature (245)..(245): n is a, c, g, or t
ctcactggcaacatctgcctcccgggttcaaatgattctcctgcctcagtctcctgagtagctgggattacaggtgcccgccaccacgctcagctaatttttgtatttttagtagagatggggttttaccatgttggccaggctggtcttagactcctgacctcagttgatccacctgcctcagcctctgcattcagtttattcacatatttttggtaactcccatgggcagctcctaggatttnagcggtctttgggg

SEQ ID NO: 689568 - DNA, 1200 bp, Homo sapiens
accttagccaataccatatacgccaaataaagtataggcgatagaccttgaaccctggcgcaatagatctagtaccgcaaggtgacagatgagaaacattcagtaagccaagcagtaatatagcaaggactaacccctataccttctgcctaagtgaacttcactagaaataactcggcaaggagagccaaagctaagacccccgaaaccagacgagctacctaagaacagctaaacagagcacacccgtctatgtagcaaacatagcgggcagacccatcaggtcagaggcgcacaacacctaccgagcctggtgcataactcggctagctccaagcatagaatcttagtacaacataccaacatatgcccacagaacccatccaaatccccttgacaacatacacacctgtcagatccaagagaggcaacagactcatcaggacccctacggcaaaccacaccctcgctacgaccagcgtaccgacactcagacacacccaatagtaggcacatagaacgcacggcacaccactcacacgaaaacgcgtacaaacgcacacaacgagcccaccaaccgcgtacaacagaacagagccagagacatactaccactgaacacaccatcaaaaccccaacagggacacaaagcctactcaaccctaccagacacgaacagtacgaaggtcagcacaccacgctaacgcaggacaacccgacgccccgcccccgccacccacaccacgtgacgcccaaaagaaacaacaacaaggggacgcaggacaaaccgaacgacgccccaaactaccacactcacacactaacacagagcaacacacagtacatacgccaccccagccgtgcccaaaacaaccgaacacacaaagcacatcgtgctccaaaacagacccaacggggcaacagacaacaccacaaccacaccgacaacgagaacacaacgaacatcgcgacgacacacaagcaggcagcacaagacgacccaacacacgaagcgcacgagcaccaaggagagagcacatcaaaaacacaatacagaagagacgacaaaccaacacagcgcaaaacaaccagaacgaccccaatagacaacgcaagcgagacaaccgaacacaacaaggcagaaaacacacagacaccggacagcatgagcgacagcagagagacgacaacaagtccgaa

SEQ ID NO: 689569 - DNA, 566 bp, Homo sapiens
  misc_feature (2)..(2): n is a, c, g, or t
  misc_feature (6)..(6): n is a, c, g, or t
gnaagnagggatgcttactgaagttttcaggtgacttggatgaccagacctgtagagaagatttacacttccttttctcaaatcatggtgaaataaaatgggtcgactttgccagaggagcacattagggaataattctcttcaaagaaaaggctaaggaagcacttgagaaagccagaaatgcaaataatggtaacctactgttaaggaacaaaaaggtgacttggaaagtactagaaggacatgcggaaaaagaagcattgaaaaaaatcacagatgatcagcaagaatccctaaacaaatggaagtcaaaaggagggcatgcaggtggaagatttaaaggaagccatgtttttacagcagcccgcagatttaaaggaaaagggaagggtaataggcctggttatgctggggcacccaaaggaagaggacagtttcatggaaggaggacaagatttgatgatgatgatcgtcgtcgtggaccaatgaaaagaggaagagatggaagagacagagaagaacccgcatcaaagcatatgaaaagagaaaatggtgcttgagacaag

SEQ ID NO: 689570 - DNA, 903 bp, Homo sapiens
gggactgagctgaaggactgggatctcaagcctcacgtccctgcagccatcccgccgtctctgtgtcctcccctggggcccaaaacactccatcctaccattctaggctcgctgagcgtcaaggccaatggagcatcagcgcgctcgcgcatccgaccggaacgcaaacgagctgattcccaggagacgtctcctgctctcaacttatgccaatctactccgaacgcactttgacgcagcggagcaaacggtgacctgttgggtcgcggcctcctctggcggagattacacaaaaaaagaggtgaaactgcgcggaccgtgcgctgacgagatcgctaggcttcgcctccaaaccttttgctgttagacaggcggaccccgggcccccgagaccacatcgcatcataccgcatacgaaaggcaccaactgcggcatcgcgatgagggcctaaggtaccccataggcacagaggaagacgatagtggagaccgcgacgcaaagcaggacagagcagagaagggccgtgaagtgaccagaccagggcaaggccaacgcgcaacgagctaaccaaagatcaacgcccggcccacgaacagcggccacgggacagcgaagccacgcgcaccgcccaggagctacggccagggcacgacacacggccagcgcccaagacacgcggccacccactagttgccatgggacccacagagggcagcaacaaggacaaaacgccctatcgcaaaggcgaagacaacgagaaaaacccaacattaacacaggcaacacaagacagtggggaaccctccacacagtatgggcacaccacaaggacaagttacataccacaccgggaagaccccacgagggcaacaacgagctgcacacacaacacccactaacac

SEQ ID NO: 689571 - DNA, 392 bp, Homo sapiens
caggcgacccgcatgccaccgggtccactttccccgtttaattagtacagttcacccatgataatcatataaaactaaacattgtgccaaagtcttagtgatgtgtcttggggttgtgcacagtacccggtgactctatggggatattgtatttatattccctgagcctatatcgttcatctgtgaaatggggataaaaagtaacttgcttgcgtgtcacaaattagttaccatcttctccagctagcaaaattactaccagagccgttactacacacaaaggctattgaccgagcacataccatgtgtcacacaccttgacaaaatcttttaatacagtttattatgtactattcaatctttacacaatgtcacgggcgcagtctgtgagg

SEQ ID NO: 689572 - DNA, 157 bp, Homo sapiens
tggagtaatgtaggaaaatgtaattaagataatgatgaacaggacatgtatagcctagtgtctcatgaggctcataggaagggagaaattgacactcgtgaaggaaggtgtgtatgagaattcaaaagacttttctgtattgtgcccctgagtttta

SEQ ID NO: 689573 - DNA, 197 bp, Homo sapiens
  misc_feature (98)..(98): n is a, c, g, or t
  misc_feature (114)..(114): n is a, c, g, or t
  misc_feature (148)..(148): n is a, c, g, or t
  misc_feature (183)..(184): n is a, c, g, or t
gagacttaagtaaaacggctgcaggccagattcgcccaccagctcagagaccacctttatccatgctttgaagtaggactccttccgtcttcaaaatnttgaagaccctaacangcttttatgatgggggtcatatctatggtcacgnatatagtagaaaccaaaagaatgtaagtatttgtnnatgatttaaaaat

SEQ ID NO: 689574 - DNA, 493 bp, Homo sapiens
  misc_feature (492)..(492): n is a, c, g, or t
agattaatacacactctacaagtacacaccactctcaatgtacacaccactctacaatgaacacaccactctacacacaatgtacacaccactctcaatgtacataccacttacaatgcaacacaccacactacacacaatgtacacaccactctgcaaacaatgtacacaccactctacaatgaacacaccactctacacgcagggtacacaccactctacaatgaacacaccactctacacaccatgtacatgccactctacaatttacccaccactctacacacaatgtatacaccactctacaatgaacaccccactctacacaccactctacaatgtacacaccatgctgcaatgaacacaccactctacactgaacacaccactctacacacaatgtacacaccactctacaatgtacacaccactctctacacaatgtacacaccactctacaatgtacacaccactctacgctggaatggaatng

SEQ ID NO: 689575 - DNA, 424 bp, Homo sapiens
tctagaggatcccgtgatgttatcgcccaacactacatgaaaacttttacatttcatatggccaaatttgttaatattttcttcttactttttggtttcctgtatagtgtagaaggtctctcccacccccaacttttagtctgctagagttttctttaggattaatattattaccttttatagagtatggaattcatagttagaactggagctgaacctttgaaggagggaaaggaaacaaacactgacaaagcaaggtggtagatcttgacaactgatttgatgtggagtgggcacgtcaaaaggtgtcagtatgaggtaaaaaatatattactgagcttgtcaggagtatgtgtagaattttaggggaagtctaagttgtaaaaaaagggcttattaaagtatctgtgttggggataacata

SEQ ID NO: 689576 - DNA, 150 bp, Homo sapiens
tattcactctcattaatgactcccctcatgattgtgcttgtgctctctgtcacatatatcggttatctgtctctctctctgtggtatcgtgtgtatatatagggcactgatatgatcgtctacgtgtccttggtattcgcgcctctcatg

SEQ ID NO: 689577 - DNA, 1039 bp, Homo sapiens
  misc_feature (384)..(384): n is a, c, g, or t
ggaagcctccaaggtaacccggctatgggactgcagtgcccaaggaatttctgctctggttagaaaaaggactctgcttcagtccacttctgctctggttagaaaaaggactctgcttcagtccacagtacataaaatgtactcagctatcagctctataagagctggatgcacatcaggagtgtgcccctctgtaacaactctagtcagcacaggccatggtgcacaaaagggacttggaaaatgatggaatgaccagcctgtccaacagaggggcagccaggacatctctgccctcttctcatcccccagccacagtggccaaagaggcccccactaggcactgtggctctgcatgacaaacacacatccagcccaggactntaagcctctcacctggactccagtaaaaaccttgctgagcctccttgtctatccttcctcccccacccaccattgtaaagtttatgtcaccagaatatttctttcatgtctaattgcttaagaacttggttgttcatcaattaaatctagatgttcaaaatggaaaaaaaaaaaaaaaaaaaaaaaagaaagaagaacaaccaagaaaacacaacaaaaaacaaaaaacacaaagagggggggggcgcgataagaaagtacaccgggggagaccaataatgcgtaccaccggttttgtgtgcaaaaaggggaccccaaaaggatggagcactgtataaaacagagagacagaggacacaggaaaaaaaaacaagagagagagagaggaaccacacaccacacaagacaacaatacagggaagagggagccaccaacagcgcggggggggaagaacaaacatgcggaggccacaaccccgagacaagaagaatataaaagccgccgcaggaggaaaactaacaaaaagcaagagcaacgggtacaaatagaggggtgtacgaaccacaaacagcgcgacatactaggagcgacaggagaaaaaatctagctgctactacgagagacaatgatcaagcaagaagacaattataaccg

SEQ ID NO: 689578 - DNA, 226 bp, Homo sapiens
acccactccaccttactaccagacaaccttaggcaaaccattttacccaaaataaagtatagggcgatagaaattgagacctgggcgcaatagatatagtaccgcaagggaaagatgaaaattataaccaagcataatatagcaggactaacccctataccttctgcataatgagttaactagaataactttgcaggagagcaagtaagaccccgaacagagagca

SEQ ID NO: 689579 - DNA, 341 bp, Homo sapiens
gcatataccaaaaaaggacaaacagatagaagagtcatctcagtgtgtaacgaggaaaagatttatctcccatcctctgatcctccatatgatatctgatagcgaagatgacaataaccccttgactcttcacgaaaactcgatgagagagaaacttgaaaagtcagaaaataagttcataccgcaattaaccttttggtcaagtaatggaaacttttgactactagtgtaagtcaaaagacaaaggactccagcaagatgagagatttctctattttgtaacgagtagtccaccgatcgtcatcaaagagagagaatgaacaactacgaaagtttaaggg

SEQ ID NO: 689580 - DNA, 131 bp, Homo sapiens
  misc_feature (69)..(69): n is a, c, g, or t
cgacgaaggtggaactgcgtatcctatggcagcggcagacaagagcccgacgtgaggaggagcccgcgnaggactgtctcacccccaccgggacatcacgctctgttctggcacccaggcaccccatgtcg

SEQ ID NO: 689581 - DNA, 115 bp, Homo sapiens
cgtacagatgatgcgagaaccattcaaatatagtcaagaatcttaatatcaaccaatatatcaagcaagctggaaggcagaaataactaaccaataatttagtataagtacccaa

SEQ ID NO: 689582 - DNA, 106 bp, Homo sapiens
tcacctccctgcccagctctcccttccaccagcagacagagaacacttagtcttgcctgtcaaaaagtccaacatttcataggtagtatgggccacatattacatt

SEQ ID NO: 689583 - DNA, 164 bp, Homo sapiens
ccccccccccccttttttgggggggggggttttttttttaaaaattttttttttgggggggggggaaatgggggggacccccttttttggcccccccgggccaaaagggccccctttttttttttttttttggttttgggcctttttcccttttttttttttta

SEQ ID NO: 689584 - DNA, 209 bp, Homo sapiens
ccaagatagcgccactgcagtcgggcctgggcgaaagagcgacactcagcctccaagcagctgagacacagattgcacaccacgccctgataatttttgtggagggtttgttttttgtttttttgtagagacagggtcttcccatgttgcccaggctggtctcgaactcctgagctcaaatgatccacttcagcctcctgagtagctgg

SEQ ID NO: 689585 - DNA, 385 bp, Homo sapiens
tagaattgctcagttgagtgaaatcattctttggaaatccatgcgcagacccttctgtgccactgcatttgctactgaaatcaacccgtgataaagctcaggattgagagttaacctgggtccaagacatggtaccacttccttaatagctgtgtgaccttggcccagttatataatctctctgagccttaattatcttacctgtaacagggggatgataatgacttgacagtgttgctgaaagtgttaagaggacaaatgtggggtatagggtatttgtttggtgtttggtacacggttaagcacaattctaagaccaatttcttattaaactctaaagtattaggaaacgttgtactagcaaaattagggtaggtcgagaaag

SEQ ID NO: 689586 - DNA, 156 bp, Homo sapiens
tgcagtatcaggcgaagtgctatataatgtgtgctggatatgttacaggatattagaacagcttattagcgaacaaaggcagagaaaggctcgagggtcatgctctcccatctatagtgtgaagactctctgccttacctaatttcacgagccagg

SEQ ID NO: 689587 - DNA, 927 bp, Homo sapiens
  misc_feature (194)..(194): n is a, c, g, or t
gcgaaaacacacaaaaaagaagcgcaacgagcagaacacacagttattatatatcgtgacgtagtgtctatcctcctgatttcgcccccctgtgattctgcgcaaagttgttgacgacggacatttgtttatccccggcgtcgctcactgttccttggcttttcttagagcgcctttgcaatttggccgcaccnacatcttgtgcaatggcccaccttctcctccggccctttggggccagttcccttctgtgtcggcaatatttccccctttctgcagcctcccaagggtgttcaaccgcccccctccccgaaattttttcccgccaactgttaaaaaataattcttcaaccttcgcgcccaaagttatattctccttcaaacacttgggccacaaaagtaactcgcccccttctcccttcctttcaactgcccacccgacctctacatgggattggtaacaaccccacaccccactcccaccacctgggtacctccatttccacgacccctgtttccgaaaatagttctcattctcgtcaggacagagtcttctccactatattaacaatcgcactgcaaaagtttttgccctccaaacacgattaaccacaaaatttaaataagtagccttaataacagtcccatttttagggtggaaatacccccacattctcaaccacacgcaaaacccaatggtcctccttccaagatggcaaatcccaccgttttccaaacacgcctgccgcgtccgacttcacgagttcatccgaattcacgcacttatttctcgctcggtcaaaacctctcctttctaaattttcccctgtaatataggagcttcttgataatttctactcctcgatgcaaaccttttgccctggccaaaaccccgcagaaaacccattaaactgttccaaaatgaca

SEQ ID NO: 689588 - DNA, 114 bp, Homo sapiens
ggcttacttgaggagcatgtgggcttgcatggtgacttcctgaaacctgtggccacgggaatgcctggtctccttcctcagccctaggaatgttctaagatcctcagcctcttt

SEQ ID NO: 689589 - DNA, 424 bp, Homo sapiens
gcgctcggcttgatggagtttcgccatgttggccaggttggactcgaactcgaactcagtggttccgaacaacttggcctcccaaagcgctgggattacaggcatgaaccaccgcaccccagcccagcatttgtcccttggtggactgctttatttcacttagcataacgtcctcaaggttcatctatgttgcagcaggtgtcagaattcccttccttttaaaggctgaataacattgtggtatacaccccattttgtttatccgttcatctgttggtgtgtattcaggctgtttctgccttcgggctgttgtgaagaatgccgctatcaacatgggtgtgagaatatctgttcaagtccctggctatatttttcttttggatatttagccagaagtggaattactggatcatctggtttcttt

SEQ ID NO: 689590 - DNA, 370 bp, Homo sapiens
gatgactccgtacatcgaaggcggagacgttgtagagccgctgggtgagcgtgtactgggtcgtgtaatcgcccgtgacgtattcaagccaggtaccgaagatgtcatcgttccagccggtacgctggtcgacgagcagtgggtcgaattcatcgagctgaacagcatcgacgaagttatcgtacgctcgccgatcaactgcgaaacccgctacggcatctgcgccaagtgctatggtcgtgacctggcgcgtggtcaccatgtgaacatcggagagctgtccgccgtatcgctgcgcagcgatcggtgagccggtacccagctgccatgctacgttccaataggtgggttgcagcggacttggagggga

SEQ ID NO: 689591 - DNA, 288 bp, Homo sapiens
  misc_feature (39)..(40): n is a, c, g, or t
  misc_feature (58)..(58): n is a, c, g, or t
  misc_feature (69)..(69): n is a, c, g, or t
  misc_feature (154)..(154): n is a, c, g, or t
  misc_feature (191)..(191): n is a, c, g, or t
  misc_feature (242)..(242): n is a, c, g, or t
agacgatccttactcccaagtagctgagatacaggtgcnnccagcacgccggcctttngtattttgggnagagacggggtttcaccatgtaagccaggatggtctcgatctcctgacctcatgatccacccgcctcggcctcccaaagtgcagngattacaggcatgagccaccgtgcccagccaagtgcntaattttaaaagaaaaataatttatgtggctcacagttggacagactatangaagtgtgtgctagcatctgcttctggtgagggcctcaggaaactt

SEQ ID NO: 689592 - DNA, 482 bp, Homo sapiens
  misc_feature (1)..(1): n is a, c, g, or t
  misc_feature (95)..(95): n is a, c, g, or t
  misc_feature (388)..(388): n is a, c, g, or t
  misc_feature (409)..(409): n is a, c, g, or t
  misc_feature (447)..(447): n is a, c, g, or t
  misc_feature (462)..(462): n is a, c, g, or t
ngaagttagccttttaactagaaagcctaagagttctggcacatttatttcttcttttgttgaaatttattcacctagataaaggcagcagtttnggactcagatctttattttatcccaccttcttgtcttctgtattccactcttcttatgttctttcccttcatctgtttccttggcctggccagagcagcagtgctgatcttcatttgggaaaggatgttcctgggtattaccaattagtatacagataagtaaagactagttttccagatctaatacttttttttgaagtggttttgctctgtcatttaggctagagtgtagtgaagtgatcgtagctcactgcagccttgaacttccggggctgaactgatccttccacctnagcctcctgagtagctgggantacaggtgtgtgccaccatgcccagctaattttttaanttgttttgtaggaancaaagtccgggttggttctt

SEQ ID NO: 689593 - DNA, 452 bp, Homo sapiens
tattcattcaattaaaatagtttttttaaatctatatatccatgtctttttgtcttaagggaaaggggtggctcatgataaatttcctgctaatgtgtaggaaaattagtttggttaccatgttaatgtaaatgtagctaatatttaaattgcacaataagttattagaatgtaacttttgggccaggcacagtggctcatgcctgtaatctcagcactttgggatcccttgagcccaggagtttgagactagtctgggtaatatagtaagacctcgtctctactgaaaatacaaaaattagccaggcatggtggtgcttgtgtgtaatcccagctacttgggaggctgaggtgggaagactccttgagccacagaggctgcagtgagctgtaattgcgccactgtactccagccctgggcaacagagtaaaaccctgtctccaaaaaaaaa

SEQ ID NO: 689594 - DNA, 181 bp, Homo sapiens
ttattcataagggattcaggtgattctcagctactccggaggctgaggcaggagaatggcgtgaacccgggaggcagagcttgaagtgagcggagatcgcaccactgcactccagcctgggcaacaaagcaagactctgtctcaaaaaaaaaaaagtcacacctaatgtaaaaacagggac

SEQ ID NO: 689595 - DNA, 1440 bp, Homo sapiens
cttacttttttcttttcttcttctttacctttgttgtttatcctgtgtttctgttcttgttccttctctgtggtctctatgtgctcttctgactccgttttattggtgtccttttctgtctttcatttggcactctgtgcatctcgtatcctttaggtactttattttttcctttggtttctctttgttgtttttctctctgttctctgttcccttcctttttttcgctgtcttttcgtttctgttctttgtttgttcctgctttgtttctctctgagtgggctccactgacttgtggtttcgctccgtctctcgtgtgtgctttcccgtgtgatgtcccctgttctctctttcctttctctttctatgtgctcgcctctgtatctctttaatcgcccctcttcttgccgttctccccgttcaatcctccttcttgaccatctttctttgtttttgatctctaaatctcttgtctcttgttatagttctttctttcctctcgtccgttcatctggtcctactgtgttccttccacccgtgggttctctcctcttggtcattttctgatgccacttctttgtcctctcacaatctgtctggttccttccatgtccatgctcttttcgtgattctttttgtcctcctaccctttttttcttttcttcttgttgtgtttcctctttctcatgtgatatggccttcctttgtcatcttctgtcttttgctccttttgctttctttctctctccgtgccatctgtcccgtcattgcgtgtgtcttgtcgtcttctgtgtcgtgttcctatgtcgtcttcactgtgtttgtgggtcgccccctggtggtttttcctcttggtctttcctctgtgtggtccggtgcttggttgtcgctctcgtcggtctgcctctgtctggttatctgccgttcgtgtgatgtccggtgcgtttcctcggtgatgtgggtctctggtactcggcgcctgccatcccttgtgttgctccttttcctccgtctgggtcctatgtctcggtgtgtctgtgttcccccgtaagtcttggtacccttctggttcggctgtcctagtgtccgtctgtggcctctggggtctgttcttcgtgtggtcgattaggggtcgtcctgtgggtccgtcgtgtggtagctgcctcacctccctatgcgccccgtccgggccctcggcacttcggggtaggtttcatgcctttgtattctgtctcaatgggcgctctgcttccatgctctcacctgctgccgcagctcgccttatcaggtgacagctgccctccgcgatgtcagagggaacacggagcagaaattcccgccgcacaccccgcccgccccagaattataggcgcagcgctccagctctggtctcggttgctaggtgggtgtgttccctagtaacgccgggtccgcaaggag

SEQ ID NO: 689596 - DNA, 683 bp, Homo sapiens
tagtttcgtacagcacggtggtaatcggcacgcggagagagacatggcagacctctccagaggcccgccaggtgggcatggtcccccattttctttaaggcagcacctggagtggagagaggccactccctctccagcccccgatgtggacccggggaggggaggctgaggcgtttggccccgtgcctggccaggagaggcccatccccagggcatgtttcatgtgtgcctggctgggccctgaatgtcgaggatagtatatagcccgctcctgggttcttgggagcttggtgggcccttttggtaactcgtgttggtggtccattggtgtgtgtgcgtggggacagaggcctggaaatgcggaggactatacatgagaagtgcaggttttgtgtgaaggccaggcagggtttggatggccggggtgtgtgatgatggagagtgcccatagggctgatgttggggtcgggtgacggcaagaggtcagaaacagaagagctgcagttgcttggagctgggctgagaactgggcttgctcctggcaatcccacccgttatactcaccctatctccaccttggtgccccacctcttaatcagaatctgaagtagttccctactcacaattcatctcttgaacactgactcacacctttagggcactaatgtgtgtatagaattcca

SEQ ID NO: 689597 - DNA, 990 bp, Homo sapiens
attcattttgggggaatgaaaagttttaattaaagagctttgttgataagaaagggtagaggggaaagatcagggtgaatcttgattcaaagccactgatagcacctgaaagactggtttgagagagcaactggagagcatgggcaagtggtttatttggtgagaagatgatctgtatttggtatggagcaggtgggtggcattgagggagtatacctcaagagtataccttgagaagaatgatgtatccatcactgtgattatcgatggaagctgataatactgatgttaatatatatgacagtgcaaataaaggaaattaggaagaacttgctgaagtatgatactaagatttgctcagaacagaaatattatgttagaactggctgtaagagcaactattaagatatgtataaaaaagagtgagtaggctgggcacagttgctcatgcctgtaatcccaacactctgggaggccaaggggggcagatcacctgaggtcaggagttcgagaccagcctggccaacatggagaaaccccgtctctactaaaaatacaaaaaaattagctgggagtggtggcacatgcctgtaagcccagctactcgggaagctgaggcaggaaaactgcttgaaccccggaggtggaggctgcagtgagccgagatggcaccactgcactccagcctgggcaacagagtgagactctgtctcaaaaaaaaccacacacaaagagctacagcaaggcacaacgcttgcaccaaaaatttgacgctccaattaaggaacggaccaaaccttgttacattaaggtgggggtgctgagcctgccaacgccctttttgccaaactgttaaccaggcgaacgggtcttacggacgggccgggactcgcgggccctgcaaacttccaatttcccaggtttcgcggactggactgtcaactaattaccacctgggacaaaaaggggggaggaaccttgcacatagaa

SEQ ID NO: 689598 - DNA, 500 bp, Homo sapiens
agctgactcctagaggatccctctctgcccagattccaggtagtctctggctccagaccgagttccaccatgtggtcagtcatgtcatgtccaagccacaggtcatatcatggcgcttccagtcattgagtgctccttaaagaggctggaggagaggccaatgacatttgtacttgagactccagagtctagatttataaccactatgttacggctgcccttgtggctgcaaggacacttctttcattcattcatttacaatagatgtagcatctgctgtgtgccagatgccattctaggttctagggaaacaaggcagagcccctgttttccaaggcatccacattctaggaaagactgctaccagcctggcgtggtggctcatgcctgtaatcccagtactttgggaggccgaggtgggcggatcacttgatgtcaggagttcaagaccagccaacatagtgaaaccccgtttctactaaaagtacaaaaatcagctg

SEQ ID NO: 689599 - DNA, 441 bp, Homo sapiens
  misc_feature (11)..(11): n is a, c, g, or t
  misc_feature (311)..(311): n is a, c, g, or t
  misc_feature (356)..(356): n is a, c, g, or t
  misc_feature (398)..(398): n is a, c, g, or t
ccattgctggnctttctgttgtctgcgtgtctcggttttatagaaaagggctctcaccatgggcagctttccctcgcgtccttaagccgagatccccattttcgttgcctgaagtgcccattgtgtgaatgtgtctgtttacccttcacctatcagtggacattaggttgtttctgatttttggtggttactaagagagatgctgtgaatactcatgccttcatttttcttgattaaacccctgggagtagaatggttagaacatatgacaggtgtctaggcttaacattttcagagactgccagtagccnggcatggtgacacacacctgtggtcccaggtactcgggaggctanggtgggaagatcgcttgagcccaggaggtcaaggctgcagtnagctgagatcgcaccactgcaccccagcctgtctcaaaaatta

SEQ ID NO: 689600 - DNA, 213 bp, Homo sapiens
ctgcttgtcctgctctgactagttgtgagaacttgggaagtggcttaacttttcagtactcactttcttcagtctgtaaaacgaggaggattgcttgagcccagaagtttgagagcagcctgggcaacctaacgagactgtttctacaaaaaatactacaattagctgagtgttgtggtgctggcctgtattctgagctactctaaggctgag

SEQ ID NO: 689601 - DNA, 855 bp, Homo sapiens
ggagtcagagggggcgccagcgctgctaggagctgacagtggtacctcaaatcctcgggccgacctggagcgccagcagtctcctgccttcgggtagcggctataaattcttcgaggacattttacagccagagacagagtttgtctttcctctgtcccatctgcatctcgagtcgcagagaccccccataggtagtatctcatccatggcaaggtgaatgtgtgagcacactggatgcaatgtagaacttattgaccttggtggacccggatgcaggcagactgtgttcttgccttgcgaagatcctccaacaatcccccagtcgatctggggtggacaaccatttggacggagctgagcctgccggttgcctacttcagacagtgaccacatctaggacctcctcctcctcctcctccgagttcctccagcaagctggcatagcccaaatccaagtgatgatggagcagatactgcccttggcacagtcggactgaacaggaggacagcgggtgactggacggggccagagcctggaggcctgcaagtctagcactgggcccttgcctacagaatggaccacgctggctattcgtccacatgagagcacaggcccaggtcagagccttgtcggggagaaggaccaaaatcttataagttgccagataaagcacccagaaggttgcggacagcgcatgcttggggacattgctgtagccttttctaaggaaattaacccgtttacctgctttaacttggcaaactttttttcctggcaggcaatccttcccaacagatatgggcgttgagtcccctgaagatttgaattcgccaatcgacggagcacgcagaag

SEQ ID NO: 689602 - DNA, 247 bp, Homo sapiens
ctcgtttacacaagatccgccacaccacggaaattcggtggatactccccagaggttcccatccggccacgctcctccccccattcaccgatccgcgaaccgaacccacgttaccactccctcatgctccaaccctcttgaggacgatacaccctcagtctatactcgcacgcgactccacctcgtgaaaatcccccgccccgaaagcaccctgccccgccctactccatccatgctcggcagtgta

SEQ ID NO: 689603 - DNA, 712 bp, Homo sapiens
ggatgagggtcggctccaagctaagagtgggccattagctgttcctacttagtatcatccaggtaccagaaaaaggtctccctagtgtttgacacgcctcctgaacagctcttggtgaggtctcttgaggcttggggatccagtctaggaatcccctctgtcacatggttggttacagtggctgggcgtaggtcacactggtcctggtgatggaacagcacctcctctatccagctataccccacagaattcacatgggataatgatgctctcctccagaggatatgaattgctcaggcccatcaaagagtctaactagattgcttgcaacctgttgcaaaaagttcaggaagaatacatcaggtacctccacccctctggggaaagagctgccagtattgagtgaaggtaaggcactttaaggattacaacttatctgatggtcaatcagcagttcctctaagaagagcttcaaaaaaaattaacaaggcagcatgatctcgacaattgcaccctttatgtcactaagagacctgggaccggcatgagactggtcggctcaataaggcctcaaaaatctgctctgccaactgaagttgccttatttgcaattagggcacaataatagacaggatcttaaaacactgagaacaagtgaatgccgtttaaacttaaaaccctagaaaaaaaaccaacaaaacaacaaaaaaaa

SEQ ID NO: 689604 - DNA, 127 bp, Homo sapiens
ttgggcaaaaaagttgaaaaggtggttgtgtcgaccgatggacatgtcctggacagcaaacatgagagaatcatgaacacaggttacatggcagcaaagaaacacctggagataaaccctgaccatt

SEQ ID NO: 689605 - DNA, 648 bp, Homo sapiens
taacatgcttttgattatacaagcccatattggatatatcctaagggcaaaatctttcgtaaaaagcatatatgttgtatgataccattctgtaaaattttgaaagagaattgggacatccatagtaaaagatagacttgaaaaccgtccacccacggaaccagtatacctttaaggtatggggacaattttatgttctttcgccatctctggagggtctaaatttgcaataatacccatccatgatgttgattgaaaacataattgataacacgcgtgtccgatatgcctacagtctcgtagtgccttgagaggttgcattttggcgtacttttctcatatttagacatgtgagtagttcctagtatatgagcgtcgttagtacaacatatgcacgtactgcctggtcacctccttgactaggtaaaatgctttctaaattttttatactcttttattcaatatagatgggatgtctatatgcagcatgatatagtatatggcataatgtcaaaaactttaggcctgacggtgttcagttacgtcgcaatatcctttttaggatatagcatatcctcgattggttgtgtctaaatgtgcaatccacaactccagatgctcagggtattattcatatcataaatgtag

SEQ ID NO: 689606 - DNA, 575 bp, Homo sapiens
actgagggtgtcacccggaccgtgctcaggaaccccagagcacgggcttgtgctgtcgctgccgtgtcaccccttctacaaggattgacatgttggcagctcaagcaatgtggattcatgatgatacccaagacctcgggtgcacgcaccgaaaggacgcccttcggatcatgcctgctattagtacacgtcatcacagttattgtgtccacgaaaatctaggtatctgtgcacgaagaagtggacaacataacgaagagaatctgcagaccccatgttgtatgtggtgtctattacattaggcagacatgcattccaggcagaccccagagtttttggcaccagtgccacacagtttcgtgtaaagacaaactgtgtgaggccatggtaccaggatgaaacctgttctgctcagactcatcaggcatacgtcagcttctcatacaggagcttgacagcgtaatcctcgcatgtgcaggttcacagtagtggtccgcgctcctgtcagaattctgctgcagcactgatctgacaggaggcggaagacatggccgcatattgtctgccggtggtac

SEQ ID NO: 689607 - DNA, 138 bp, Homo sapiens
gatgagcttgctaccaccaagagccactggcataattgccagcagccctgctccagagctcacctcagctggcacccctctcacctggcacaatggggccagtgataactccagcccttccaataaaactgatttccc

SEQ ID NO: 689608 - DNA, 306 bp, Homo sapiens
tgcaagacattaatggtatgggaaagtgtgtacattgaggggaaactcgctgtactctgctcagtttttctgtgaacctaaaatcgctctaaaaaagaaagtctattcatttaaaaaagtcttcgttcatgggctgtacagaggcagagggcagcctcaatttggccctcgggccatggtttgtggatcccccggtttaggctaacagtgcccaatagaaatgtaacgtgagccacctctgtgatttaaaattttccattagccacgtttaaaagtttttatttcgaagtaaatacaggaagttgc

SEQ ID NO: 689609 - DNA, 569 bp, Homo sapiens
gtgatgggcgtggcgagtaggcgacagcgccaggtctccagcatcgcccgggagtagcgcgggggcgttcttcccacaaacgcccgacccacggtgaaaacttctcacggatctgcaggcggtaacccgacgccacttcacgcagttcaaaggcacggccctcgcaagatttgcgcaggatctccaaggccttcttgaagaccggcggctccgggcgttcggcctcttcaaagagttcgaacaggcgctccagagatcgcggtttacccgaggccaggagaaaggcctccagcaaaggggccagttcgcggggttcagtcagattcatcgattcagctcgttattcggctcgcgcccgcacgtggatagccgcaaaaggctcattctgcaccagctcgaccaaggactccttcaccagctcaaggttcgccataaaggtcaccaccacgcccagtcggccctcttcggcagtaaacaactcgacaaagggcacaaacccacctcccttgagacgttccagcacatcgctcatgcgctcgcgggtggacagcgcttcacggctgacctgg

SEQ ID NO: 689610 - DNA, 1645 bp, Homo sapiens
taaaggttaaaaatttttttgttttttcccaaaaaaacccccaaaaagtgggaaaaaaaagggaggtccgaaaaaactcccctccaaaatcgcggggcgcgagagggggggaacaacagcgagcgcgcgccaaaaaaaagcgggcgcgcgcggggcccaacgcgggaagaaaatcaaagaagagccctctgatcccagggaacaccgacgacgccccgagggtccaccgcctatattgcgagagagagcaccaccgcgccgaggagcgcggcggcgtgggaggagagacacaatagtttggtggggccccacaatatatattctctctctctctattatgagagaggagacgagagagagaagaggagaaagagtcgccctctctcttgtgtaaaccagtgtgtttcgcgagagaggagctctgttgtggtgcgctctctcttgtaggagggggctgctctctctctcccaacacagcgcgcgcgcgcccctataggagaatatcgtctctctctacgagaggagcaccccatctctctcgcgcgcgcacgacggggcgtctctctctctctctcgcgagcgcgcgagagggggggcgccaccaaactgcctcaaaaacctcgcgcgcgaggaggatgggaatccgcgagcggaacgtatattatacaaagacgcactgcgagagagcagcgccccacaaactctctctctctatagcagagagagagtggatgattgccagagcggccatggcggagaccaacatatgtgcgacacagcgccgtgtaaaacagcccgcgcggaaagtgtgtcctctcccgaagcacccctcccccttaatagaagagagagatctatgagaaaagcggcgcaacaacaccacgcggggtgcaacacaaaccagagagaagaggggggtgtccaaacaacacgcggagcgcggaactccctcttgcgcgaacaacaaaaggcgggcgccaaagagggcgcagaccaccagaccaaattatttctgctggcacacaatctcggctgcggcgatgagaagagcgccccacaacatgatttttacaaccaaacagacgaaacagtgtgtcgcctcccccacagaggggtgggcggcaaccccccttctcggttgctgttgtgccgttactacccgaacgcagggcccccccgggggagctatctaacaccgagagcggggctgtctcctaacccaccagacgacctagctcggcgggtgagagcaccccccccccgcagagaaccgtaagagcgcttacgtagacgccgcgaactcgatgtacagaaaacaagagctctccccccaaaaaagacgcccccccctagagtttgtatctccgccccagacgtgctactacgttgttggcgcccgccagagaacacacttacgagagctactcagagaacgcaacactcggacgacggagaagaagaacggagcgtgcggagcacgaacagccacctcaccaacatacaggagaggggagaggacccccacggagggccccaccatcatgagcgcgcggagaaagaacacacgcacgcaccacgaggagcatccacacaggggaggacataccacccggcgtactaactccacagggaaaaacaccgcact

SEQ ID NO: 689611 - DNA, 813 bp, Homo sapiens
gggaacgtggtatcaccattgatatctccttggggatcattggaggagccagcaagttactatgtgactatcattgtgtgccccagtgacagcagagcactttatcagaaacatgattacagggatcgtctcagggctgactgtgcgtgtcctgagttgttgctcgtctggtgttggtgaaagtgttggaagctggtatctccaaggaatgggtcagacccgtaggagcatgcccttctaggctgtacacactgggtgtgaccacaggctagatggtcggtgttaacgaagagtggtattccactgagggcaccctacgaggcccagacagagatgatgaggaaatagttgaaggaagtcggcactgacattaggaaaaatcggatagaaccccgacacagatacgcatatgtgtgccaacttttcgtgggttggaatgcgtgacaagcatgctggagccaaggtgcgtaacactgcctggggtccaatggcgatggaaagtcacgcctgttaaggatggccagtgccgaggtggaaccacgctggttgaggctctggacgtgcagtcctagcatgcaattcgtccaactagatcaggccctttgtggcatgcctctgccaggagtgtctaccagaattggtggtataggtactgttcctggttgggcgagctggagactggtgtgctcaaagccggtatggtggtcagcttgtgtccagtcaaggttacaaggaagttacatctgtcgtaaatgcccatgaagtttgcagtgaagctcttctggggaccatgggggtccatgtgcaggaagg

SEQ ID NO: 689612 - DNA, 107 bp, Homo sapiens
cgcgcacacatcctgcacacatccatcgcgcacacatcctcgcgcacacatcctgcacacatccctcgcgcacacatcctcgcgcacacatccttagcggattccga

SEQ ID NO: 689613 - DNA, 246 bp, Homo sapiens
  misc_feature (176)..(176): n is a, c, g, or t
ttctgcccaacacccatgagacacattactgaatgagcaggtgaaagccatcaaagaatgggtgacacgtgacaacttgcgcaagatgggagcgcccgaatctggctggcggaatatctctttgacaagcacacccgtgggagcacagtgataatgaacagctaagcctcgggctnaatttccccactagccggtggggtgacttcccgtggtcaccaacggcagtgcatgcgtgttggggataca

SEQ ID NO: 689614 - DNA, 293 bp, Homo sapiens
  misc_feature (87)..(87): n is a, c, g, or t
tatttttgtgccaggtgtctcaactcttggcttagtgatcagtagcttgactcccaaatgttggatgagcacttgcctggctgatantattattagcagtttgtgttagatatcttcaactaatacaacatcagctccttaacagtttctcatttgatatttaactaactttattagtacatgagtaattaggaatattgacctaccttttaacaacaataaaatggtgttttttaaactcaaaaaatgtctagaaaaagggaattgatatatgaaacagtgtaaccttaagc

SEQ ID NO: 689615 - DNA, 212 bp, Homo sapiens
gcaatttaattttttataacaacttgagataaaatctacataccacacagttcaaacattcaaagtatacaattcagtggtttttagtatattcagagttgtgccaccattaccacaatcaactttacaacgtttacatcaccccaaaaaagaaaccccatactaattagcagtcacccctttgtcctccccaacccttctgtcgtcttctc

SEQ ID NO: 689616 - DNA, 420 bp, Homo sapiens
  misc_feature (97)..(97): n is a, c, g, or t
ctcgagtttcaatgtctgtctcatactttctctctggattgactgtcacaaacacttcgaattcctcctttttatacggttccttgagctttagtgncagcagaactgtcactgacccgcttcctggtcaggatcttctggctgcacttgcttgaacttgaaagctccctgtttcggacatgcctctttacgaggctatatattgacttctgtgcctacaccataccgtggaaatacttactgtgactgcgcaacggctaggctctgcggaaagatttgaaacagtccgcaacttagcatttaaacttatggtatacgctgacagatgatgcatctgatgacccctactgatctgcggaattagaagcatactgtgctttcacaagcttctctagttattccacaagggggggcggttct

SEQ ID NO: 689617 - DNA, 227 bp, Homo sapiens
tcactgcaatcacggtagcttcgcccattgcctcttcaaccaggcacatacatcgagaagttgaacctgcactttatttcacactgaacagacttaccccgacaacaacacctccccagtgggacaaacctaccccacctccccacactctactcccagctaacgttccctataatcatcatgacccattaaacatttgcaaaaccacacttcaacccacaggaaga

SEQ ID NO: 689618 - DNA, 127 bp, Homo sapiens
gaaatgtattgaatacatctatgtagcaggtactgtggtaggcgtggaagatagttgagacagggaacaaggccaacattacggagcttagtatcaccacctagaagagtttttaaaaaacatagat

SEQ ID NO: 689619 - DNA, 289 bp, Homo sapiens
cagttggatttcgctacagacacagcccacactgaagacacacgactccactatagacacagcacacacacacaatgtaggcaaacagggacaggcgtggtggctcacaccggtaatcctaacactttgggaggccgaggcaggagaatcgcttgaacccgggaggcagaggttgcagtgagcagagatcacgccactacactccagcctgggcgacacagtgagtttcggtctcaaaaaaaaaaaacttgcaacagaaccttgaggcttacacggctctgtaaatgtg

SEQ ID NO: 689620 - DNA, 106 bp, Homo sapiens
tactgctaaaggagctcagaggtaaggagcaggctctttcttgaggagtcatggcagtgcagctgcgcttacagctgcatccactcagttactttcctgacttaga

SEQ ID NO: 689621 - DNA, 139 bp, Homo sapiens
ctctaaactcagcacaactggatcaaatgggaatgacttatagacttttctccaagaggccaatgaccacagacacataaaatgatgctcacatcacattactaggggacatgcaatcaaaccatagtgagatactact

SEQ ID NO: 689622 - DNA, 976 bp, Homo sapiens
gccattaaagctgaattttctaagcaaaaaaaaaaaaaaaaaaaaaaaaaaaaaaaaaaaaaaaaaagggggggcgcccaaaaaattttccctaggagacgccaaaaataaagcgcgcatacccacagatttatttgagagaaaaggggtcgccccatataggggagtggtattataaagctataggctcgggggccgtcatgtataacaaagcgacaagagatgggggacaaactgggcgacagtggagaatctttggggtgaagaggagacccctttatatttcgggggggggggaagaacattattgggtggagtaaattatactccactacagaggagatatatataagaagttctatatagggtgagatatatattataaaatattaatataagagagtgttataagtgtgtggttgtacacaatataaaagcgcgagcgctatatatgaggcgtgagcgcgtgtgattaagagagatattatgtgggagatgatatatgtgagaaggttattatgtgagatgtatttgtgtgagagatatatatatatatatatacacacgagagagagaggactcaataagtaaaataatatcaaacaaagacaaataaaagtaaaacataagcaaagagatatgaagaaagccagaggaaagatcagagctagtagtaatagaaagtcagacgataacaagagcaacacagagagaaaaagtcgacgaaagcgaaaacagtatatagagagagaatagagaaagtatcaagaagaagataatatatgaacagtcaaactacagagatacgaagatttggcgaagcatctcctacgaataactaagagcgaagacgatcacagtaaaccgaatacagaatcgagagcacagtcatgcactatacactcacatgcctacagtaaacgacactcgacaacagagcacacacacgacaacaatataatgctatacaaagcac

SEQ ID NO: 689623 - DNA, 196 bp, Homo sapiens
attgcacgagccccgacgaccgcccgacgtgcattcccgattcctcttggttcaagtccactatggcactctaaaggatcagctgatttataatctctaaaggaggacagacccccagaataagataacagttgttggggttggtctgtggcatggctgtgcatcagtatctaatgaaggactggcagatgaactg

SEQ ID NO: 689624 - DNA, 2026 bp, Homo sapiens
acaaaagataggaagaaccttaaaaatatagatgccttttatgcagtgataaaatgtctagatatttatactgtggtgattattaggaatatgtgcaaagattggctattaggatgttcattacagtgttgtttaataattataaaaggacagaaagcaatgtggactcaaaaataggaaaagaatttaaataaatcctagtgtacccgttatacatgaaattatggaaatatgaccctgagcatggaaatatgtacatgagaatgtctaaaagctagttcattttgaaaaacaaaataatgtcacctcatattatttatagtatataaagatgattttaagagtggcagtgtctgggattataggtgattgtatttcttcccttttgcacatctatgttctctcatttgtattgtgtggggagaagtgactttttttataaaaagaaaaaggtatatgcatcccagcagagaagcactggctccacccagtacctgcctcctcatgccaccctctcaagccaaaagccgggggaagcccaggcaccttgaccatgaccgcccgagactcacacttcttctttctcatcagggaaggaaagcccccctgtaagcgatactccagatgagggcgatgagcccatgccgatccccgaggacctctccaccacctcgggaggacagcaaagctccaagagtgacagagtcgtgggtaagtgggtcaccagcggcctctgtgcctgtgaaacctttatctctttgtatttttccaagacagtgatgaagggatgcaagtcattttatccattgtgttccctcaactggcatattaaagaaatatggcacaaagatcagcaggatgggggtcctctggtgtgtgggaggatggacactcacaggccagcatggccgtgagagccacacaccccgcaaaatgtccaagttgaggagcaatcctgcccagggacgcgtctctgtcactgtcctctgtcctcactgcacttgcaggaatatcaaatgttatggattgtagatcgtgaaaattacacacttacgtgttttggcaacagtgcttttcagtgtttggggttagaacaagccacatctggccattttatgttatccctctaatctctagttcttaaatttcagatttaactgaaaatagaaagtttcataaatggtaatttttaaatgttagaaaaaaatcaaagcacacatttacataccttttccataaaaaagtgtgtgtgaaaccatctgcaactccactggttaacttacacatgcgacagtttgtgtttggaaaacttcacccaccctctttatttcaagaaaccaaagacggagagaagttcagtgaattaaccaaggtgaaatgacagagtcagaattgaactgaatttctgactgaaaaactagttctcgctccattataccatgttctaatgagctaatgagtcaacagttccctggaatacctgttttcttctttaaaaagagaaagagctgtgatactgagagctacctattggcataaaagaatatgaaggacatacaggtaaaatgaggtagactggatcaatgtgggtcagctacataagcccccatagccaaggagggaacatgtatgtaaaattctcaggcttatgagaatcacaactgtatgtctataggacatcctaatgcaataatgggaaaatgtgataactgaattttatctacatgtatagaaaacatattttgggccgggcatggtggctcaagcttgtaatcccagcactttgggaggccgaggctggcggatcacaaggtcaggaaatcgagaccatcctggctaacacggtgaaaccctgtctctactaaaaatacaaaaaattagccgggcgtagtggtgggcgcctgtagtcccagctactcgggaggctgaggcaggagaatggcgtgaacccggcaggcggagcttgcagtgagccgagattgcgccactgcactccagcctggatgacagagccagactccatctc

SEQ ID NO: 689625 - DNA, 220 bp, Homo sapiens
aaacaaaaatccgagggggggggggggggggcttttaatttttcctttaaagaccccccaactgggaatttttttaaagccctttaaaaggggggacaaattggccccttttaaaaaaaagggcccaaattaaaaaaaaatgaattatggacccccctccaggttttgggggttgtccttttcccaccctgatggggaatttatggatgggtttccttta

SEQ ID NO: 689626 - DNA, 1484 bp, Homo sapiens
  misc_feature (1)..(2): n is a, c, g, or t
  misc_feature (4)..(4): n is a, c, g, or t
nncnccttgttgttcttgccccgcccgggctggtagttgtgttcgtctgcttcttttatggtttctctcgtggcgacatcttgtttgttcgcgcgtggccagttcatattggtcgctggcggggtggttctgccgccctgtgtctgtctcttgtgtttgtgttgttttggtcgctccggcggggggcgcggtaatcttccgttgtcggtgggggtgtggtgcggccccgttgtgtgtgtctcccgccccggcgtctgtggttgtggggtgctttccctctggagtaggctcccgccggctgctgctgttgttttctcccctccccctgtgtgtgttttatgcggccgccaccgtctcgtgtgtttttattaagttgcccctctcgtttttgggggctccccttttttacaaactgcgggggggcgtcttgtgggcccccccgcgggtttttttttcgccccccccccttttttttttttttttttttttttgtttttttgtttttttttttttttttttttttttttttttttttttttttttttttttttttttttttttgggggtgattgttcaggtcgaatctgttgtatccagtacagctttaggtcttcagctgcccttctggcgagtacatgcacaggattgtaaatgagaaatgcagtcatatttccagtctgcctctatgatgatgttaaattattgctgtttagctgtgaacaagggatgtaccactggaggaatagagtatccttttgtacacattttgaaatgcttcttctgtagtgatagaacaaataaatgcaacgaatactctgtctgccctatcccgtgaagtccacactggcgtaagagaaggcccagcagagcaggaatctgcctagactttctcccaatgagatcccaatatgagagggagaagagatgggcctcaggacagctgcaataccacttgggaacacatgtggtgtcttgatgtggccagcgcagcagttcagcacaacgtacctcccatctacaacagtgctggacgtgggaattctaagtcccagtcttgagggtgggtggagatggagggcaacaagagatacatttccagttctccactgcagcatgcttcagtcattctgtgagtggccgggcccagggccctcacaatttcactaccttgtcttttacatagtcataagaattatcctcaacatagccttttgacgctgtaaatcttgagtattcatttacccttttctgatctcctggaaacagctgcctgcctgcattgcacttctcttcccgaggagtggggtaaatttaaaagtcaagttatagtttggatgttagtatagaattttgaaattgggaattaaaaatcaggactggggactgggagaccaaaaatttctgatcccatttctgatggatgtgtcacaccttttctgtcaaaataaaatgtcttggaggttatgactccttggtgaaaaaaa

SEQ ID NO: 689627 - DNA, 985 bp, Homo sapiens
  misc_feature (983)..(983): n is a, c, g, or t
gcagcagaggaaccttttggaggaggaagaggacacagaggccctgtagccaggcaccaagatccctcccaggtggctgggtctgaggggaactccgagcagccctaggtcctcaaagtctggatttgtgtggaaaaggcagctctcacttggccttggcgaggcctcggttggttgataacctgaggaccatggatgctgatgagggtcaagacatgtcccaagtttcagggaaggaaagcccccctgtaagcgatactccagatgagggcgatgagcccatgccgatccccgaggacctctccaccacctcgggaggacagcaaagctccaagagtgacagagtcgtggccagtaatgttaaagtagagactcagagtgatgaagagaatgggcgtgcctgtgaaatgaatggggaagaatgtgcggaggatttacgaatgcttgatgcctcgggagagaaaatgaatggctcccacagggaccaaggcagctcggctttgtcgggagttggaggcattcgacttcctaacggaaaactaaagtgtgatatctgtgggatcatttgcatcgggcccaatgtgctcatggttcacaaaagaagccacactggtaaggcctggctcagtttttcctttagtggcctggagaaggtgcatggggtttgaaggaggaaagcatcctgtcttccttgtgttctgagcatgtttctaattgactggtagctcagttgttgcaagcgattggttccaagtggtaccgagtcatagagtccttgttctggtacagccttgtaaaggacttctcaacacgtaccaattccaccctataaataaaacaagggaaaagtgaacagcatcacatgagaggcttggcgagggctgctattatagtaacacatactaagtagtctcagctgagccctcagggtacgtgtgctgagtggtcacctccacaaaacaaaaaatcctgatacaccaaantt

SEQ ID NO: 689628 - DNA, 111 bp, Homo sapiens
atcctcaaagatcacccagcactcagaaagggatagacgccttctgccggcaccgaggctgcctctccacagcgctgtgccattggactgcgcccttccttggtgcctctg

SEQ ID NO: 689629 - DNA, 6208 bp, Homo sapiens
  misc_feature (4932)..(4932): n is a, c, g, or t
gaattccggcgtcgcggacgcatcccagtctgggcgggacgctcggccgcggcgaggcgggcaagcctggcagggcagagggagccccggctccgaggttgctcttcgcccccgaggatcagtcttggccccaaagcgcgacgcacaaatccacataacctgaggaccatggatgctgatgagggtcaagacatgtcccaagtttcagggaaggaaagcccccctgtaagcgatactccagatgagggcgatgagcccatgccgatccccgaggacctctccaccacctcgggaggacagcaaagctccaagagtgacagagtcgtggccagtaatgttaaagtagagactcagagtgatgaagagaatgggcgtgcctgtgaaatgaatggggaagaatgtgcggaggatttacgaatgcttgatgcctcgggagagaaaatgaatggctcccacagggaccaaggcagctcggctttgtcgggagttggaggcattcgacttcctaacggaaaactaaagtgtgatatctgtgggatcatttgcatcgggcccaatgtgctcatggttcacaaaagaagccacactggagaacggcccttccagtgcaatcagtgcggggcctcattcacccagaagggcaacctgctccggcacatcaagctgcattccggggagaagcccttcaaatgccacctctgcaactacgcctgccgccggagggacgccctcactggccacctgaggacgcactccgttggtaaacctcacaaatgtggatattgtggccgaagctataaacagcgaagctctttagaggaacataaagagcgctgccacaactacttggaaagcatgggccttccgggcacactgtacccagtcattaaagaagaaactaatcacagtgaaatggcagaagacctgtgcaagataggatcagagagatctctcgtgctggacagactagcaagtaacgtcgccaaacgtaagagctctatgcctcagaaatttcttggggacaagggcctgtccgacacgccctacgacagcagcgccagctacgagaaggagaacgaaatgatgaagtcccacgtgatggaccaagccatcaacaacgccatcaactacctgggggccgagtccctgcgcccgctggtgcagacgcccccgggcggttccgaggtggtcccggtcatcagcccgatgtaccagctgcacaagccgctcgcggagggcaccccgcgctccaaccactcggcccaggacagcgccgtggagaacctgctgctgctctccaaggccaagttggtgccctcggagcgcgaggcgtccccgagcaacagctgtcaagactccacggacaccgagagcaacaacgaggagcagcgcagcggtctcatctacctgaccaaccacatcgccccgcacgcgcgcaacggcttgtcgctcaaggaggagcaccgcgcctacgacctgctgcgcgccgcctccgagaactcgcaggacgcgctccgcgtggtcagcaccagcggggagcagatgaaggtgtacaagtgcgaacactgccgggtgctcttcctggatcacgtcatgtacaccatccacatgggctgccacggcttccgtgatccttttgagtgcaacatgtgcggctaccacagccaggaccggtacgagttctcgtcgcacataacgcgaggggagcaccgcttccacatgagctaaagccctcccgcgcccccaccccagaccccgagccaccccaggaaaagcacaaggactgccgccttctcgctcccgccagcagcatagactggactggaccagacaatgttgtgtttggatttgtaactgttttttgttttttgtttgagttggttgattggggtttgatttgcttttgaaaagatttttatttttagaggcagggctgcattgggagcatccagaactgctaccttcctagatgtttccccagaccgctggctgagattccctcacctgtcgcttcctagaatccccttctccaaacgattagtctaaattttcagagagaaatagataaaacacgccacagcctgggaaggagcgtgctctaccctgtgctaagcacggggttcgcgcaccaggtgtctttttccagtccccagaagcagagagcacagcccctgctgtgtgggtctgcaggtgagcagacaggacaggtgtgccgccacccaagtgccaagacacagcagggccaacaacctgtgcccaggccagcttcgagctacatgcatctagggcggagaggctgcacttgtgagagaaaatactatttcaagtcatattctgcgtaggaaaatgaattgggttggggaaagtcggtgtctgtcagactgccctgggtggagggagacgccgggctagagcctttgggatcgtcctggattcactggctttgcggaggctgctcagatggcctgagcctcccgaggcttgctgccccgtaggaggagactgtcttcccgtgggcatatctggggagccctgttccccgctttttcactcccatacctttaatggcccccaaaatctgtcactacaatttaaacaccagtcccgaaatttggatcttctttctttttgaatctctcaaacggcaacattcctcagaaaccaaagctttatttcaaatctcttccttccctggctggttccatctagtaccagaggcctcttttcctgaagaaatccaatcctagccctcattttaattatgtacatctgtttgtagccacaagcctgaatttctcagtgttggtaagtttctttacctaccctcactatatattattctcgttttaaaacccataaaggagtgatttagaacagtcattaattttcaactcaatgaaatatgtgaagcccagcatctctgttgctaacacacagagctcacctgtttgaaaccaagctttcaaacatgttgaagctctttactgtaaaggcaagccagcatgtgtgtccacacatacataggatggctggctctgcacctgtaggatattggaatgcacagggcaattgagggactgagccagaccttcggagagtaatgccaccagatcccctaggaaagaggaggcaaatggcactgcaggtgagaaccccgcccatccgtgctatgacatggaggcactgaagcccgaggaaggtgtgtggagattctaatcccaacaagcaagggtctccttcaagattaatgctatcaatcattaaggtcattactctcaaccacctaggcaatgaagaatataccatttcaaatatttacagtacttgtcttcaccaacactgtcccaaggtgaaatgaagcaacagagaggaaattgtacataagtacctcagcatttaatccaaacaggggttcttagtctcagcactatgacattttgggctgactacttatttgttaggcgggagctctcctgtgcattgtaggataattagcagtatccctggtggctacccaatagacgccagtagcaccccgaattgacaacccaaactctccagacatcaccaactgtcccctgcgaggagaaatcactcctgggggagaaccactgacccaaatgaattctaaaccaatcaaatgtctgggaagccctccaagaaaaaaaatagaaaagcacttgaagaatattcccaatattcccggtcagcagtatcaaggctgacttgtgttcatgtggagtcattataaattctataaatcaattattccccttcggtcttaaaaatatatttcctcataaacatttgagttttgttgaaaagatggagtttacaaagataccattcttgagtcatggatttctctgctcacagaagggtgtggcatttggaaacgggaataaacaaaattgctgcaccaatgcactgagtgaaggaagagagacagaggatcaagggctttagacagcactccttcaatatgcaatcacagagaaagatgcgccttatccaagttaatatctctaaggtgagagccttcttagagtcagtttgttgcaaatttcacctactctgttcttttccatccatccccctgagtcagttggttgaagggagttattttttcaagtggaattcaaacaaagctcaaaccagaactgtaaatagtgattgcaggaattcttttctaaactgctttgccctttcctctcactgccttttatagccaatataaatgtctctttgcacaccttttgttgtggttttatattgtaacaccatttttctttgaaactattgtatttaaagtaaggtttcatattatgtcagcaagtaattaacttatgtttaaaaggtggccatatcatgtaccaaaagttgctgaagtttctcttctagctggtaaagtaggagtttgcatgacttcacactttttttgcgtagtttcttctgttgtatgatggcgtgagtgtgtgtcttgggtaccgctgtgtactactgtgtgcctagattccatgcactctcgttgtgtttgaagtaaatattggagaccggagggtaacaggttggcctgttgattacagctagtaatcgctgtgtcttgttccgccccctccctgacaccccagcttcccaggatgtggaaagcctggatctcagctccttgccccatatcccttctgtaatttgtacctaaagagtgtgattatcctaattcaagagtcactaaaactcatcacattatcattgcatatcagcaaagggtaaagtcctagcaccaattgcttcacataccagcatgttccatttccaatttagaattagccacataataaaatcttagaatcttccttgagaaagagctgcctgagatgtagttttgttatatggttccccaccgaccatttttgtgcttttttcttgttttgntttgttttgactgcactgtgagttttgtagtgtcctcttcttgccaaaacaaacgcgagatgaactggacttatgtagacaaatcgtgatgccagtgtatccttcctttcttcagttccagcaataatgaatggtcaacttttttaaaatctagatctctctcattcatttcaatgtatttttactttaagatgaaccaaaattattagacttatttaagatgtacaggcatcagaaaaaagaagcacataatgcttttggtgcgatggcactcactgtgaacatgtgtaaccacatattaatatgcaatattgtttccaatactttctaatacagttttttataatgttgtgtgtggtgattgttcaggtcgaatctgttgtatccagtacagctttaggtcttcagctgcccttctggcgagtacatgcacaggattgtaaatgagaaatgcagtcatatttccagtctgcctctatgatgatgttaaattattgctgtttagctgtgaacaagggatgtaccactggaggaatagagtatccttttgtacacattttgaaatgcttcttctgtagtgatagaacaaataaatgcaacgaatactctgtctgccctatcccgtgaagtccacactggcgtaagagaaggcccagcagagcaggaatctgcctagactttctcccaatgagatcccaatatgagagggagaagagatgggcctcaggacagctgcaataccacttgggaacacatgtggtgtcttgatgtggccagcgcagcagttcagcacaacgtacctcccatctacaacagtgctggacgtgggaattctaagtcccagtcttgagggtgggtggagatggagggcaacaagagatacatttccagttctccactgcagcatgcttcagtcattctgtgagtggccgggcccagggccctcacaatttcactaccttgtcttttacatagtcataagaattatcctcaacatagccttttgacgctgtaaatcttgagtattcatttacccttttctgatctcctggaaacagctgcctgcctgcattgcacttctcttcccgaggagtggggtaaatttaaaagtcaagttatagtttggatgttagtatagaattttgaaattgggaattaaaaatcaggactggggactgggagaccaaaaatttctgatcccatttctgatggatgtgtcacaccttttctgtcaaaataaaatgtcttggaggttatgactccttggtgaaaaaaa

SEQ ID NO: 689630 - DNA, 6627 bp, Homo sapiens
  misc_feature (5351)..(5351): n is a, c, g, or t
acaaaagataggaagaaccttaaaaatatagatgccttttatgcagtgataaaatgtctagatatttatactgtggtgattattaggaatatgtgcaaagattggctattaggatgttcattacagtgttgtttaataattataaaaggacagaaagcaatgtggactcaaaaataggaaaagaatttaaataaatcctagtgtacccgttatacatgaaattatggaaatatgaccctgagcatggaaatatgtacatgagaatgtctaaaagctagttcattttgaaaaacaaaataatgtcacctcatattatttatagtatataaagatgattttaagagtggcagtgtctgggattataggtgattgtatttcttcccttttgcacatctatgttctctcatttgtattgtgtggggagaagtgactttttttataaaaagaaaaaggtatatgcatcccagcagagaagcactggctccacccagtacctgcctcctcatgccaccctctcaagccaaaagccgggggaagcccaggcaccttgaccatgaccgcccgagactcacacttcttctttctcaatggatgctgatgagggtcaagacatgtcccaagtttcagggaaggaaagcccccctgtaagcgatactccagatgagggcgatgagcccatgccgatccccgaggacctctccaccacctcgggaggacagcaaagctccaagagtgacagagtcgtggccagtaatgttaaagtagagactcagagtgatgaagagaatgggcgtgcctgtgaaatgaatggggaagaatgtgcggaggatttacgaatgcttgatgcctcgggagagaaaatgaatggctcccacagggaccaaggcagctcggctttgtcgggagttggaggcattcgacttcctaacggaaaactaaagtgtgatatctgtgggatcatttgcatcgggcccaatgtgctcatggttcacaaaagaagccacactggagaacggcccttccagtgcaatcagtgcggggcctcattcacccagaagggcaacctgctccggcacatcaagctgcattccggggagaagcccttcaaatgccacctctgcaactacgcctgccgccggagggacgccctcactggccacctgaggacgcactccgttggtaaacctcacaaatgtggatattgtggccgaagctataaacagcgaagctctttagaggaacataaagagcgctgccacaactacttggaaagcatgggccttccgggcacactgtacccagtcattaaagaagaaactaatcacagtgaaatggcagaagacctgtgcaagataggatcagagagatctctcgtgctggacagactagcaagtaacgtcgccaaacgtaagagctctatgcctcagaaatttcttggggacaagggcctgtccgacacgccctacgacagcagcgccagctacgagaaggagaacgaaatgatgaagtcccacgtgatggaccaagccatcaacaacgccatcaactacctgggggccgagtccctgcgcccgctggtgcagacgcccccgggcggttccgaggtggtcccggtcatcagcccgatgtaccagctgcacaagccgctcgcggagggcaccccgcgctccaaccactcggcccaggacagcgccgtggagaacctgctgctgctctccaaggccaagttggtgccctcggagcgcgaggcgtccccgagcaacagctgtcaagactccacggacaccgagagcaacaacgaggagcagcgcagcggtctcatctacctgaccaaccacatcgccccgcacgcgcgcaacggcttgtcgctcaaggaggagcaccgcgcctacgacctgctgcgcgccgcctccgagaactcgcaggacgcgctccgcgtggtcagcaccagcggggagcagatgaaggtgtacaagtgcgaacactgccgggtgctcttcctggatcacgtcatgtacaccatccacatgggctgccacggcttccgtgatccttttgagtgcaacatgtgcggctaccacagccaggaccggtacgagttctcgtcgcacataacgcgaggggagcaccgcttccacatgagctaaagccctcccgcgcccccaccccagaccccgagccaccccaggaaaagcacaaggactgccgccttctcgctcccgccagcagcatagactggactggaccagacaatgttgtgtttggatttgtaactgttttttgttttttgtttgagttggttgattggggtttgatttgcttttgaaaagatttttatttttagaggcagggctgcattgggagcatccagaactgctaccttcctagatgtttccccagaccgctggctgagattccctcacctgtcgcttcctagaatccccttctccaaacgattagtctaaattttcagagagaaatagataaaacacgccacagcctgggaaggagcgtgctctaccctgtgctaagcacggggttcgcgcaccaggtgtctttttccagtccccagaagcagagagcacagcccctgctgtgtgggtctgcaggtgagcagacaggacaggtgtgccgccacccaagtgccaagacacagcagggccaacaacctgtgcccaggccagcttcgagctacatgcatctagggcggagaggctgcacttgtgagagaaaatactatttcaagtcatattctgcgtaggaaaatgaattgggttggggaaagtcggtgtctgtcagactgccctgggtggagggagacgccgggctagagcctttgggatcgtcctggattcactggctttgcggaggctgctcagatggcctgagcctcccgaggcttgctgccccgtaggaggagactgtcttcccgtgggcatatctggggagccctgttccccgctttttcactcccatacctttaatggcccccaaaatctgtcactacaatttaaacaccagtcccgaaatttggatcttctttctttttgaatctctcaaacggcaacattcctcagaaaccaaagctttatttcaaatctcttccttccctggctggttccatctagtaccagaggcctcttttcctgaagaaatccaatcctagccctcattttaattatgtacatctgtttgtagccacaagcctgaatttctcagtgttggtaagtttctttacctaccctcactatatattattctcgttttaaaacccataaaggagtgatttagaacagtcattaattttcaactcaatgaaatatgtgaagcccagcatctctgttgctaacacacagagctcacctgtttgaaaccaagctttcaaacatgttgaagctctttactgtaaaggcaagccagcatgtgtgtccacacatacataggatggctggctctgcacctgtaggatattggaatgcacagggcaattgagggactgagccagaccttcggagagtaatgccaccagatcccctaggaaagaggaggcaaatggcactgcaggtgagaaccccgcccatccgtgctatgacatggaggcactgaagcccgaggaaggtgtgtggagattctaatcccaacaagcaagggtctccttcaagattaatgctatcaatcattaaggtcattactctcaaccacctaggcaatgaagaatataccatttcaaatatttacagtacttgtcttcaccaacactgtcccaaggtgaaatgaagcaacagagaggaaattgtacataagtacctcagcatttaatccaaacaggggttcttagtctcagcactatgacattttgggctgactacttatttgttaggcgggagctctcctgtgcattgtaggataattagcagtatccctggtggctacccaatagacgccagtagcaccccgaattgacaacccaaactctccagacatcaccaactgtcccctgcgaggagaaatcactcctgggggagaaccactgacccaaatgaattctaaaccaatcaaatgtctgggaagccctccaagaaaaaaaatagaaaagcacttgaagaatattcccaatattcccggtcagcagtatcaaggctgacttgtgttcatgtggagtcattataaattctataaatcaattattccccttcggtcttaaaaatatatttcctcataaacatttgagttttgttgaaaagatggagtttacaaagataccattcttgagtcatggatttctctgctcacagaagggtgtggcatttggaaacgggaataaacaaaattgctgcaccaatgcactgagtgaaggaagagagacagaggatcaagggctttagacagcactccttcaatatgcaatcacagagaaagatgcgccttatccaagttaatatctctaaggtgagagccttcttagagtcagtttgttgcaaatttcacctactctgttcttttccatccatccccctgagtcagttggttgaagggagttattttttcaagtggaattcaaacaaagctcaaaccagaactgtaaatagtgattgcaggaattcttttctaaactgctttgccctttcctctcactgccttttatagccaatataaatgtctctttgcacaccttttgttgtggttttatattgtaacaccatttttctttgaaactattgtatttaaagtaaggtttcatattatgtcagcaagtaattaacttatgtttaaaaggtggccatatcatgtaccaaaagttgctgaagtttctcttctagctggtaaagtaggagtttgcatgacttcacactttttttgcgtagtttcttctgttgtatgatggcgtgagtgtgtgtcttgggtaccgctgtgtactactgtgtgcctagattccatgcactctcgttgtgtttgaagtaaatattggagaccggagggtaacaggttggcctgttgattacagctagtaatcgctgtgtcttgttccgccccctccctgacaccccagcttcccaggatgtggaaagcctggatctcagctccttgccccatatcccttctgtaatttgtacctaaagagtgtgattatcctaattcaagagtcactaaaactcatcacattatcattgcatatcagcaaagggtaaagtcctagcaccaattgcttcacataccagcatgttccatttccaatttagaattagccacataataaaatcttagaatcttccttgagaaagagctgcctgagatgtagttttgttatatggttccccaccgaccatttttgtgcttttttcttgttttgntttgttttgactgcactgtgagttttgtagtgtcctcttcttgccaaaacaaacgcgagatgaactggacttatgtagacaaatcgtgatgccagtgtatccttcctttcttcagttccagcaataatgaatggtcaacttttttaaaatctagatctctctcattcatttcaatgtatttttactttaagatgaaccaaaattattagacttatttaagatgtacaggcatcagaaaaaagaagcacataatgcttttggtgcgatggcactcactgtgaacatgtgtaaccacatattaatatgcaatattgtttccaatactttctaatacagttttttataatgttgtgtgtggtgattgttcaggtcgaatctgttgtatccagtacagctttaggtcttcagctgcccttctggcgagtacatgcacaggattgtaaatgagaaatgcagtcatatttccagtctgcctctatgatgatgttaaattattgctgtttagctgtgaacaagggatgtaccactggaggaatagagtatccttttgtacacattttgaaatgcttcttctgtagtgatagaacaaataaatgcaacgaatactctgtctgccctatcccgtgaagtccacactggcgtaagagaaggcccagcagagcaggaatctgcctagactttctcccaatgagatcccaatatgagagggagaagagatgggcctcaggacagctgcaataccacttgggaacacatgtggtgtcttgatgtggccagcgcagcagttcagcacaacgtacctcccatctacaacagtgctggacgtgggaattctaagtcccagtcttgagggtgggtggagatggagggcaacaagagatacatttccagttctccactgcagcatgcttcagtcattctgtgagtggccgggcccagggccctcacaatttcactaccttgtcttttacatagtcataagaattatcctcaacatagccttttgacgctgtaaatcttgagtattcatttacccttttctgatctcctggaaacagctgcctgcctgcattgcacttctcttcccgaggagtggggtaaatttaaaagtcaagttatagtttggatgttagtatagaattttgaaattgggaattaaaaatcaggactggggactgggagaccaaaaatttctgatcccatttctgatggatgtgtcacaccttttctgtcaaaataaaatgtcttggaggttatgactccttggtgaaaaaaa

SEQ ID NO: 689631 - DNA, 6231 bp, Homo sapiens
  misc_feature (4955)..(4955): n is a, c, g, or t
gcagcagaggaaccttttggaggaggaagaggacacagaggccctgtagccaggcaccaagatccctcccaggtggctgggtctgaggggaactccgagcagccctaggtcctcaaagtctggatttgtgtggaaaaggcagctctcacttggccttggcgaggcctcggttggttgataacctgaggaccatggatgctgatgagggtcaagacatgtcccaagtttcagggaaggaaagcccccctgtaagcgatactccagatgagggcgatgagcccatgccgatccccgaggacctctccaccacctcgggaggacagcaaagctccaagagtgacagagtcgtggccagtaatgttaaagtagagactcagagtgatgaagagaatgggcgtgcctgtgaaatgaatggggaagaatgtgcggaggatttacgaatgcttgatgcctcgggagagaaaatgaatggctcccacagggaccaaggcagctcggctttgtcgggagttggaggcattcgacttcctaacggaaaactaaagtgtgatatctgtgggatcatttgcatcgggcccaatgtgctcatggttcacaaaagaagccacactggagaacggcccttccagtgcaatcagtgcggggcctcattcacccagaagggcaacctgctccggcacatcaagctgcattccggggagaagcccttcaaatgccacctctgcaactacgcctgccgccggagggacgccctcactggccacctgaggacgcactccgttggtaaacctcacaaatgtggatattgtggccgaagctataaacagcgaagctctttagaggaacataaagagcgctgccacaactacttggaaagcatgggccttccgggcacactgtacccagtcattaaagaagaaactaatcacagtgaaatggcagaagacctgtgcaagataggatcagagagatctctcgtgctggacagactagcaagtaacgtcgccaaacgtaagagctctatgcctcagaaatttcttggggacaagggcctgtccgacacgccctacgacagcagcgccagctacgagaaggagaacgaaatgatgaagtcccacgtgatggaccaagccatcaacaacgccatcaactacctgggggccgagtccctgcgcccgctggtgcagacgcccccgggcggttccgaggtggtcccggtcatcagcccgatgtaccagctgcacaagccgctcgcggagggcaccccgcgctccaaccactcggcccaggacagcgccgtggagaacctgctgctgctctccaaggccaagttggtgccctcggagcgcgaggcgtccccgagcaacagctgtcaagactccacggacaccgagagcaacaacgaggagcagcgcagcggtctcatctacctgaccaaccacatcgccccgcacgcgcgcaacggcttgtcgctcaaggaggagcaccgcgcctacgacctgctgcgcgccgcctccgagaactcgcaggacgcgctccgcgtggtcagcaccagcggggagcagatgaaggtgtacaagtgcgaacactgccgggtgctcttcctggatcacgtcatgtacaccatccacatgggctgccacggcttccgtgatccttttgagtgcaacatgtgcggctaccacagccaggaccggtacgagttctcgtcgcacataacgcgaggggagcaccgcttccacatgagctaaagccctcccgcgcccccaccccagaccccgagccaccccaggaaaagcacaaggactgccgccttctcgctcccgccagcagcatagactggactggaccagacaatgttgtgtttggatttgtaactgttttttgttttttgtttgagttggttgattggggtttgatttgcttttgaaaagatttttatttttagaggcagggctgcattgggagcatccagaactgctaccttcctagatgtttccccagaccgctggctgagattccctcacctgtcgcttcctagaatccccttctccaaacgattagtctaaattttcagagagaaatagataaaacacgccacagcctgggaaggagcgtgctctaccctgtgctaagcacggggttcgcgcaccaggtgtctttttccagtccccagaagcagagagcacagcccctgctgtgtgggtctgcaggtgagcagacaggacaggtgtgccgccacccaagtgccaagacacagcagggccaacaacctgtgcccaggccagcttcgagctacatgcatctagggcggagaggctgcacttgtgagagaaaatactatttcaagtcatattctgcgtaggaaaatgaattgggttggggaaagtcggtgtctgtcagactgccctgggtggagggagacgccgggctagagcctttgggatcgtcctggattcactggctttgcggaggctgctcagatggcctgagcctcccgaggcttgctgccccgtaggaggagactgtcttcccgtgggcatatctggggagccctgttccccgctttttcactcccatacctttaatggcccccaaaatctgtcactacaatttaaacaccagtcccgaaatttggatcttctttctttttgaatctctcaaacggcaacattcctcagaaaccaaagctttatttcaaatctcttccttccctggctggttccatctagtaccagaggcctcttttcctgaagaaatccaatcctagccctcattttaattatgtacatctgtttgtagccacaagcctgaatttctcagtgttggtaagtttctttacctaccctcactatatattattctcgttttaaaacccataaaggagtgatttagaacagtcattaattttcaactcaatgaaatatgtgaagcccagcatctctgttgctaacacacagagctcacctgtttgaaaccaagctttcaaacatgttgaagctctttactgtaaaggcaagccagcatgtgtgtccacacatacataggatggctggctctgcacctgtaggatattggaatgcacagggcaattgagggactgagccagaccttcggagagtaatgccaccagatcccctaggaaagaggaggcaaatggcactgcaggtgagaaccccgcccatccgtgctatgacatggaggcactgaagcccgaggaaggtgtgtggagattctaatcccaacaagcaagggtctccttcaagattaatgctatcaatcattaaggtcattactctcaaccacctaggcaatgaagaatataccatttcaaatatttacagtacttgtcttcaccaacactgtcccaaggtgaaatgaagcaacagagaggaaattgtacataagtacctcagcatttaatccaaacaggggttcttagtctcagcactatgacattttgggctgactacttatttgttaggcgggagctctcctgtgcattgtaggataattagcagtatccctggtggctacccaatagacgccagtagcaccccgaattgacaacccaaactctccagacatcaccaactgtcccctgcgaggagaaatcactcctgggggagaaccactgacccaaatgaattctaaaccaatcaaatgtctgggaagccctccaagaaaaaaaatagaaaagcacttgaagaatattcccaatattcccggtcagcagtatcaaggctgacttgtgttcatgtggagtcattataaattctataaatcaattattccccttcggtcttaaaaatatatttcctcataaacatttgagttttgttgaaaagatggagtttacaaagataccattcttgagtcatggatttctctgctcacagaagggtgtggcatttggaaacgggaataaacaaaattgctgcaccaatgcactgagtgaaggaagagagacagaggatcaagggctttagacagcactccttcaatatgcaatcacagagaaagatgcgccttatccaagttaatatctctaaggtgagagccttcttagagtcagtttgttgcaaatttcacctactctgttcttttccatccatccccctgagtcagttggttgaagggagttattttttcaagtggaattcaaacaaagctcaaaccagaactgtaaatagtgattgcaggaattcttttctaaactgctttgccctttcctctcactgccttttatagccaatataaatgtctctttgcacaccttttgttgtggttttatattgtaacaccatttttctttgaaactattgtatttaaagtaaggtttcatattatgtcagcaagtaattaacttatgtttaaaaggtggccatatcatgtaccaaaagttgctgaagtttctcttctagctggtaaagtaggagtttgcatgacttcacactttttttgcgtagtttcttctgttgtatgatggcgtgagtgtgtgtcttgggtaccgctgtgtactactgtgtgcctagattccatgcactctcgttgtgtttgaagtaaatattggagaccggagggtaacaggttggcctgttgattacagctagtaatcgctgtgtcttgttccgccccctccctgacaccccagcttcccaggatgtggaaagcctggatctcagctccttgccccatatcccttctgtaatttgtacctaaagagtgtgattatcctaattcaagagtcactaaaactcatcacattatcattgcatatcagcaaagggtaaagtcctagcaccaattgcttcacataccagcatgttccatttccaatttagaattagccacataataaaatcttagaatcttccttgagaaagagctgcctgagatgtagttttgttatatggttccccaccgaccatttttgtgcttttttcttgttttgntttgttttgactgcactgtgagttttgtagtgtcctcttcttgccaaaacaaacgcgagatgaactggacttatgtagacaaatcgtgatgccagtgtatccttcctttcttcagttccagcaataatgaatggtcaacttttttaaaatctagatctctctcattcatttcaatgtatttttactttaagatgaaccaaaattattagacttatttaagatgtacaggcatcagaaaaaagaagcacataatgcttttggtgcgatggcactcactgtgaacatgtgtaaccacatattaatatgcaatattgtttccaatactttctaatacagttttttataatgttgtgtgtggtgattgttcaggtcgaatctgttgtatccagtacagctttaggtcttcagctgcccttctggcgagtacatgcacaggattgtaaatgagaaatgcagtcatatttccagtctgcctctatgatgatgttaaattattgctgtttagctgtgaacaagggatgtaccactggaggaatagagtatccttttgtacacattttgaaatgcttcttctgtagtgatagaacaaataaatgcaacgaatactctgtctgccctatcccgtgaagtccacactggcgtaagagaaggcccagcagagcaggaatctgcctagactttctcccaatgagatcccaatatgagagggagaagagatgggcctcaggacagctgcaataccacttgggaacacatgtggtgtcttgatgtggccagcgcagcagttcagcacaacgtacctcccatctacaacagtgctggacgtgggaattctaagtcccagtcttgagggtgggtggagatggagggcaacaagagatacatttccagttctccactgcagcatgcttcagtcattctgtgagtggccgggcccagggccctcacaatttcactaccttgtcttttacatagtcataagaattatcctcaacatagccttttgacgctgtaaatcttgagtattcatttacccttttctgatctcctggaaacagctgcctgcctgcattgcacttctcttcccgaggagtggggtaaatttaaaagtcaagttatagtttggatgttagtatagaattttgaaattgggaattaaaaatcaggactggggactgggagaccaaaaatttctgatcccatttctgatggatgtgtcacaccttttctgtcaaaataaaatgtcttggaggttatgactccttggtgaaaaaaa

SEQ ID NO: 689632 - DNA, 1193 bp, Homo sapiens
  misc_feature (256)..(256): n is a, c, g, or t
tctgctgacccccggcccttttttaggggggaaactccccttggtctggcaagagacgggggatcaacagggaccagcacccatctcgagggtgggtattttctggtaaagatcagggtgttcctccctcgtagtgtttagaggagaaacaccctcatagatagaaaacccccccgagacagcagcactgcaactgccaagcagccggggtagagagggggccgccctaggcacatgtgggcgcccttgaagacangcaggggtcttcagattgtcaggcgctcagattgtcaatggtgtctggagaacgcggcggggttggtcacctggctgtaggggcgccacaccggtcgggggccccaccagggaatcttctcaaatgtcccaaggcgaactatctgttcgcagacaacaccgggaaacccatggtgcgataagacgctcgggggtcgggccattaaagcgcgcgggggctagtccgcccgtctggagacgcttgggcagggggcctcccacggcaagagaaggcgccacacaacaccaggtgtgtgctgccccccggaaccgggttcaccttcgggcacttttcttcgggaaagacgcctttgaagtgttgtggtgtctcaagaaccccaccactcaaggggcccggggacgaggtacttctagagggggaacatccagaggaatcctcttgcggatcccatagggggggttcctccttggaatcgcccccaaaaccctggtctttgcccacgtgaagaaagcccagagaccacaccacaccagggcccccggggggtcccccagaagcgacgccccacgttagaaggacctacggtcacacactctcgtggggttgtaagcccgcccgggacccgcttggggtggccctcaagaagggagacgcccaaaattttcctcgaatataggtaggataccctttggccccccgtatgaggggagaaccccccaggcgtctccacacagggtctccccccagcccggaccaaggagtgtgcgccgcccagaaaaaaggggtgatatacaccccggaatgtgggcgtccgcgccggcccgcccggatatagcccagagagacagcgccaccaccatgtttgcgggcccacattttgttcccaaagaaaaccacccggggagaagcggcccccgaaaaaaaggcccttttcagg

SEQ ID NO: 689633 - DNA, 5969 bp, Homo sapiens
  misc_feature (4693)..(4693): n is a, c, g, or t
gcagcagaggaaccttttggaggaggaagaggacacagaggccctgtagccaggcaccaagatccctcccaggtggctgggtctgaggggaactccgagcagccctaggtcctcaaagtctggatttgtgtggaaaaggcagctctcacttggccttggcgaggcctcggttggttgataacctgaggaccatggatgctgatgagggtcaagacatgtcccaagtttcagggaaggaaagcccccctgtaagcgatactccagatgagggcgatgagcccatgccgatccccgaggacctctccaccacctcgggaggacagcaaagctccaagagtgacagagtcgtggagaacggcccttccagtgcaatcagtgcggggcctcattcacccagaagggcaacctgctccggcacatcaagctgcattccggggagaagcccttcaaatgccacctctgcaactacgcctgccgccggagggacgccctcactggccacctgaggacgcactccgttggtaaacctcacaaatgtggatattgtggccgaagctataaacagcgaagctctttagaggaacataaagagcgctgccacaactacttggaaagcatgggccttccgggcacactgtacccagtcattaaagaagaaactaatcacagtgaaatggcagaagacctgtgcaagataggatcagagagatctctcgtgctggacagactagcaagtaacgtcgccaaacgtaagagctctatgcctcagaaatttcttggggacaagggcctgtccgacacgccctacgacagcagcgccagctacgagaaggagaacgaaatgatgaagtcccacgtgatggaccaagccatcaacaacgccatcaactacctgggggccgagtccctgcgcccgctggtgcagacgcccccgggcggttccgaggtggtcccggtcatcagcccgatgtaccagctgcacaagccgctcgcggagggcaccccgcgctccaaccactcggcccaggacagcgccgtggagaacctgctgctgctctccaaggccaagttggtgccctcggagcgcgaggcgtccccgagcaacagctgtcaagactccacggacaccgagagcaacaacgaggagcagcgcagcggtctcatctacctgaccaaccacatcgccccgcacgcgcgcaacggcttgtcgctcaaggaggagcaccgcgcctacgacctgctgcgcgccgcctccgagaactcgcaggacgcgctccgcgtggtcagcaccagcggggagcagatgaaggtgtacaagtgcgaacactgccgggtgctcttcctggatcacgtcatgtacaccatccacatgggctgccacggcttccgtgatccttttgagtgcaacatgtgcggctaccacagccaggaccggtacgagttctcgtcgcacataacgcgaggggagcaccgcttccacatgagctaaagccctcccgcgcccccaccccagaccccgagccaccccaggaaaagcacaaggactgccgccttctcgctcccgccagcagcatagactggactggaccagacaatgttgtgtttggatttgtaactgttttttgttttttgtttgagttggttgattggggtttgatttgcttttgaaaagatttttatttttagaggcagggctgcattgggagcatccagaactgctaccttcctagatgtttccccagaccgctggctgagattccctcacctgtcgcttcctagaatccccttctccaaacgattagtctaaattttcagagagaaatagataaaacacgccacagcctgggaaggagcgtgctctaccctgtgctaagcacggggttcgcgcaccaggtgtctttttccagtccccagaagcagagagcacagcccctgctgtgtgggtctgcaggtgagcagacaggacaggtgtgccgccacccaagtgccaagacacagcagggccaacaacctgtgcccaggccagcttcgagctacatgcatctagggcggagaggctgcacttgtgagagaaaatactatttcaagtcatattctgcgtaggaaaatgaattgggttggggaaagtcggtgtctgtcagactgccctgggtggagggagacgccgggctagagcctttgggatcgtcctggattcactggctttgcggaggctgctcagatggcctgagcctcccgaggcttgctgccccgtaggaggagactgtcttcccgtgggcatatctggggagccctgttccccgctttttcactcccatacctttaatggcccccaaaatctgtcactacaatttaaacaccagtcccgaaatttggatcttctttctttttgaatctctcaaacggcaacattcctcagaaaccaaagctttatttcaaatctcttccttccctggctggttccatctagtaccagaggcctcttttcctgaagaaatccaatcctagccctcattttaattatgtacatctgtttgtagccacaagcctgaatttctcagtgttggtaagtttctttacctaccctcactatatattattctcgttttaaaacccataaaggagtgatttagaacagtcattaattttcaactcaatgaaatatgtgaagcccagcatctctgttgctaacacacagagctcacctgtttgaaaccaagctttcaaacatgttgaagctctttactgtaaaggcaagccagcatgtgtgtccacacatacataggatggctggctctgcacctgtaggatattggaatgcacagggcaattgagggactgagccagaccttcggagagtaatgccaccagatcccctaggaaagaggaggcaaatggcactgcaggtgagaaccccgcccatccgtgctatgacatggaggcactgaagcccgaggaaggtgtgtggagattctaatcccaacaagcaagggtctccttcaagattaatgctatcaatcattaaggtcattactctcaaccacctaggcaatgaagaatataccatttcaaatatttacagtacttgtcttcaccaacactgtcccaaggtgaaatgaagcaacagagaggaaattgtacataagtacctcagcatttaatccaaacaggggttcttagtctcagcactatgacattttgggctgactacttatttgttaggcgggagctctcctgtgcattgtaggataattagcagtatccctggtggctacccaatagacgccagtagcaccccgaattgacaacccaaactctccagacatcaccaactgtcccctgcgaggagaaatcactcctgggggagaaccactgacccaaatgaattctaaaccaatcaaatgtctgggaagccctccaagaaaaaaaatagaaaagcacttgaagaatattcccaatattcccggtcagcagtatcaaggctgacttgtgttcatgtggagtcattataaattctataaatcaattattccccttcggtcttaaaaatatatttcctcataaacatttgagttttgttgaaaagatggagtttacaaagataccattcttgagtcatggatttctctgctcacagaagggtgtggcatttggaaacgggaataaacaaaattgctgcaccaatgcactgagtgaaggaagagagacagaggatcaagggctttagacagcactccttcaatatgcaatcacagagaaagatgcgccttatccaagttaatatctctaaggtgagagccttcttagagtcagtttgttgcaaatttcacctactctgttcttttccatccatccccctgagtcagttggttgaagggagttattttttcaagtggaattcaaacaaagctcaaaccagaactgtaaatagtgattgcaggaattcttttctaaactgctttgccctttcctctcactgccttttatagccaatataaatgtctctttgcacaccttttgttgtggttttatattgtaacaccatttttctttgaaactattgtatttaaagtaaggtttcatattatgtcagcaagtaattaacttatgtttaaaaggtggccatatcatgtaccaaaagttgctgaagtttctcttctagctggtaaagtaggagtttgcatgacttcacactttttttgcgtagtttcttctgttgtatgatggcgtgagtgtgtgtcttgggtaccgctgtgtactactgtgtgcctagattccatgcactctcgttgtgtttgaagtaaatattggagaccggagggtaacaggttggcctgttgattacagctagtaatcgctgtgtcttgttccgccccctccctgacaccccagcttcccaggatgtggaaagcctggatctcagctccttgccccatatcccttctgtaatttgtacctaaagagtgtgattatcctaattcaagagtcactaaaactcatcacattatcattgcatatcagcaaagggtaaagtcctagcaccaattgcttcacataccagcatgttccatttccaatttagaattagccacataataaaatcttagaatcttccttgagaaagagctgcctgagatgtagttttgttatatggttccccaccgaccatttttgtgcttttttcttgttttgntttgttttgactgcactgtgagttttgtagtgtcctcttcttgccaaaacaaacgcgagatgaactggacttatgtagacaaatcgtgatgccagtgtatccttcctttcttcagttccagcaataatgaatggtcaacttttttaaaatctagatctctctcattcatttcaatgtatttttactttaagatgaaccaaaattattagacttatttaagatgtacaggcatcagaaaaaagaagcacataatgcttttggtgcgatggcactcactgtgaacatgtgtaaccacatattaatatgcaatattgtttccaatactttctaatacagttttttataatgttgtgtgtggtgattgttcaggtcgaatctgttgtatccagtacagctttaggtcttcagctgcccttctggcgagtacatgcacaggattgtaaatgagaaatgcagtcatatttccagtctgcctctatgatgatgttaaattattgctgtttagctgtgaacaagggatgtaccactggaggaatagagtatccttttgtacacattttgaaatgcttcttctgtagtgatagaacaaataaatgcaacgaatactctgtctgccctatcccgtgaagtccacactggcgtaagagaaggcccagcagagcaggaatctgcctagactttctcccaatgagatcccaatatgagagggagaagagatgggcctcaggacagctgcaataccacttgggaacacatgtggtgtcttgatgtggccagcgcagcagttcagcacaacgtacctcccatctacaacagtgctggacgtgggaattctaagtcccagtcttgagggtgggtggagatggagggcaacaagagatacatttccagttctccactgcagcatgcttcagtcattctgtgagtggccgggcccagggccctcacaatttcactaccttgtcttttacatagtcataagaattatcctcaacatagccttttgacgctgtaaatcttgagtattcatttacccttttctgatctcctggaaacagctgcctgcctgcattgcacttctcttcccgaggagtggggtaaatttaaaagtcaagttatagtttggatgttagtatagaattttgaaattgggaattaaaaatcaggactggggactgggagaccaaaaatttctgatcccatttctgatggatgtgtcacaccttttctgtcaaaataaaatgtcttggaggttatgactccttggtgaaaaaaa

SEQ ID NO: 689634 - DNA, 268 bp, Homo sapiens
cgggcattcgacgcagcggacggtgcaccgcagcccctctgagtgatgcctacctcagtggtatgcctgccaagagacgcaagctccggtctgatatacaacacgactgcaggaagaccccatatacagtccccagcgcttacccaatgcccagcggggctattgctgatgatccttagctctttgctctatgggcctatctcatcaggggaacgtttcccccctcttccttcacaggatataagaaataaaagtcggatttatctgg

SEQ ID NO: 689635 - DNA, 6268 bp, Homo sapiens
  misc_feature (4992)..(4992): n is a, c, g, or t
gaattccggcgtcgcggacgcatcccagtctgggcgggacgctcggccgcggcgaggcgggcaagcctggcagggcagagggagccccggctccgaggttgctcttcgcccccgaggatcagtcttggccccaaagcgcgacgcacaaatccacataacctgaggaccatggatgctgatgagggtcaagacatgtcccaagtttcagggaaggaaagcccccctgtaagcgatactccagatgagggcgatgagcccatgccgatccccgaggacctctccaccacctcgggaggacagcaaagctccaagagtgacagagtcgtggttacatatggggctgatgactttagggatttccatgcaataattcccaaatctttctctcccagtaatgttaaagtagagactcagagtgatgaagagaatgggcgtgcctgtgaaatgaatggggaagaatgtgcggaggatttacgaatgcttgatgcctcgggagagaaaatgaatggctcccacagggaccaaggcagctcggctttgtcgggagttggaggcattcgacttcctaacggaaaactaaagtgtgatatctgtgggatcatttgcatcgggcccaatgtgctcatggttcacaaaagaagccacactggagaacggcccttccagtgcaatcagtgcggggcctcattcacccagaagggcaacctgctccggcacatcaagctgcattccggggagaagcccttcaaatgccacctctgcaactacgcctgccgccggagggacgccctcactggccacctgaggacgcactccgttggtaaacctcacaaatgtggatattgtggccgaagctataaacagcgaagctctttagaggaacataaagagcgctgccacaactacttggaaagcatgggccttccgggcacactgtacccagtcattaaagaagaaactaatcacagtgaaatggcagaagacctgtgcaagataggatcagagagatctctcgtgctggacagactagcaagtaacgtcgccaaacgtaagagctctatgcctcagaaatttcttggggacaagggcctgtccgacacgccctacgacagcagcgccagctacgagaaggagaacgaaatgatgaagtcccacgtgatggaccaagccatcaacaacgccatcaactacctgggggccgagtccctgcgcccgctggtgcagacgcccccgggcggttccgaggtggtcccggtcatcagcccgatgtaccagctgcacaagccgctcgcggagggcaccccgcgctccaaccactcggcccaggacagcgccgtggagaacctgctgctgctctccaaggccaagttggtgccctcggagcgcgaggcgtccccgagcaacagctgtcaagactccacggacaccgagagcaacaacgaggagcagcgcagcggtctcatctacctgaccaaccacatcgccccgcacgcgcgcaacggcttgtcgctcaaggaggagcaccgcgcctacgacctgctgcgcgccgcctccgagaactcgcaggacgcgctccgcgtggtcagcaccagcggggagcagatgaaggtgtacaagtgcgaacactgccgggtgctcttcctggatcacgtcatgtacaccatccacatgggctgccacggcttccgtgatccttttgagtgcaacatgtgcggctaccacagccaggaccggtacgagttctcgtcgcacataacgcgaggggagcaccgcttccacatgagctaaagccctcccgcgcccccaccccagaccccgagccaccccaggaaaagcacaaggactgccgccttctcgctcccgccagcagcatagactggactggaccagacaatgttgtgtttggatttgtaactgttttttgttttttgtttgagttggttgattggggtttgatttgcttttgaaaagatttttatttttagaggcagggctgcattgggagcatccagaactgctaccttcctagatgtttccccagaccgctggctgagattccctcacctgtcgcttcctagaatccccttctccaaacgattagtctaaattttcagagagaaatagataaaacacgccacagcctgggaaggagcgtgctctaccctgtgctaagcacggggttcgcgcaccaggtgtctttttccagtccccagaagcagagagcacagcccctgctgtgtgggtctgcaggtgagcagacaggacaggtgtgccgccacccaagtgccaagacacagcagggccaacaacctgtgcccaggccagcttcgagctacatgcatctagggcggagaggctgcacttgtgagagaaaatactatttcaagtcatattctgcgtaggaaaatgaattgggttggggaaagtcggtgtctgtcagactgccctgggtggagggagacgccgggctagagcctttgggatcgtcctggattcactggctttgcggaggctgctcagatggcctgagcctcccgaggcttgctgccccgtaggaggagactgtcttcccgtgggcatatctggggagccctgttccccgctttttcactcccatacctttaatggcccccaaaatctgtcactacaatttaaacaccagtcccgaaatttggatcttctttctttttgaatctctcaaacggcaacattcctcagaaaccaaagctttatttcaaatctcttccttccctggctggttccatctagtaccagaggcctcttttcctgaagaaatccaatcctagccctcattttaattatgtacatctgtttgtagccacaagcctgaatttctcagtgttggtaagtttctttacctaccctcactatatattattctcgttttaaaacccataaaggagtgatttagaacagtcattaattttcaactcaatgaaatatgtgaagcccagcatctctgttgctaacacacagagctcacctgtttgaaaccaagctttcaaacatgttgaagctctttactgtaaaggcaagccagcatgtgtgtccacacatacataggatggctggctctgcacctgtaggatattggaatgcacagggcaattgagggactgagccagaccttcggagagtaatgccaccagatcccctaggaaagaggaggcaaatggcactgcaggtgagaaccccgcccatccgtgctatgacatggaggcactgaagcccgaggaaggtgtgtggagattctaatcccaacaagcaagggtctccttcaagattaatgctatcaatcattaaggtcattactctcaaccacctaggcaatgaagaatataccatttcaaatatttacagtacttgtcttcaccaacactgtcccaaggtgaaatgaagcaacagagaggaaattgtacataagtacctcagcatttaatccaaacaggggttcttagtctcagcactatgacattttgggctgactacttatttgttaggcgggagctctcctgtgcattgtaggataattagcagtatccctggtggctacccaatagacgccagtagcaccccgaattgacaacccaaactctccagacatcaccaactgtcccctgcgaggagaaatcactcctgggggagaaccactgacccaaatgaattctaaaccaatcaaatgtctgggaagccctccaagaaaaaaaatagaaaagcacttgaagaatattcccaatattcccggtcagcagtatcaaggctgacttgtgttcatgtggagtcattataaattctataaatcaattattccccttcggtcttaaaaatatatttcctcataaacatttgagttttgttgaaaagatggagtttacaaagataccattcttgagtcatggatttctctgctcacagaagggtgtggcatttggaaacgggaataaacaaaattgctgcaccaatgcactgagtgaaggaagagagacagaggatcaagggctttagacagcactccttcaatatgcaatcacagagaaagatgcgccttatccaagttaatatctctaaggtgagagccttcttagagtcagtttgttgcaaatttcacctactctgttcttttccatccatccccctgagtcagttggttgaagggagttattttttcaagtggaattcaaacaaagctcaaaccagaactgtaaatagtgattgcaggaattcttttctaaactgctttgccctttcctctcactgccttttatagccaatataaatgtctctttgcacaccttttgttgtggttttatattgtaacaccatttttctttgaaactattgtatttaaagtaaggtttcatattatgtcagcaagtaattaacttatgtttaaaaggtggccatatcatgtaccaaaagttgctgaagtttctcttctagctggtaaagtaggagtttgcatgacttcacactttttttgcgtagtttcttctgttgtatgatggcgtgagtgtgtgtcttgggtaccgctgtgtactactgtgtgcctagattccatgcactctcgttgtgtttgaagtaaatattggagaccggagggtaacaggttggcctgttgattacagctagtaatcgctgtgtcttgttccgccccctccctgacaccccagcttcccaggatgtggaaagcctggatctcagctccttgccccatatcccttctgtaatttgtacctaaagagtgtgattatcctaattcaagagtcactaaaactcatcacattatcattgcatatcagcaaagggtaaagtcctagcaccaattgcttcacataccagcatgttccatttccaatttagaattagccacataataaaatcttagaatcttccttgagaaagagctgcctgagatgtagttttgttatatggttccccaccgaccatttttgtgcttttttcttgttttgntttgttttgactgcactgtgagttttgtagtgtcctcttcttgccaaaacaaacgcgagatgaactggacttatgtagacaaatcgtgatgccagtgtatccttcctttcttcagttccagcaataatgaatggtcaacttttttaaaatctagatctctctcattcatttcaatgtatttttactttaagatgaaccaaaattattagacttatttaagatgtacaggcatcagaaaaaagaagcacataatgcttttggtgcgatggcactcactgtgaacatgtgtaaccacatattaatatgcaatattgtttccaatactttctaatacagttttttataatgttgtgtgtggtgattgttcaggtcgaatctgttgtatccagtacagctttaggtcttcagctgcccttctggcgagtacatgcacaggattgtaaatgagaaatgcagtcatatttccagtctgcctctatgatgatgttaaattattgctgtttagctgtgaacaagggatgtaccactggaggaatagagtatccttttgtacacattttgaaatgcttcttctgtagtgatagaacaaataaatgcaacgaatactctgtctgccctatcccgtgaagtccacactggcgtaagagaaggcccagcagagcaggaatctgcctagactttctcccaatgagatcccaatatgagagggagaagagatgggcctcaggacagctgcaataccacttgggaacacatgtggtgtcttgatgtggccagcgcagcagttcagcacaacgtacctcccatctacaacagtgctggacgtgggaattctaagtcccagtcttgagggtgggtggagatggagggcaacaagagatacatttccagttctccactgcagcatgcttcagtcattctgtgagtggccgggcccagggccctcacaatttcactaccttgtcttttacatagtcataagaattatcctcaacatagccttttgacgctgtaaatcttgagtattcatttacccttttctgatctcctggaaacagctgcctgcctgcattgcacttctcttcccgaggagtggggtaaatttaaaagtcaagttatagtttggatgttagtatagaattttgaaattgggaattaaaaatcaggactggggactgggagaccaaaaatttctgatcccatttctgatggatgtgtcacaccttttctgtcaaaataaaatgtcttggaggttatgactccttggtgaaaaaaa

SEQ ID NO: 689636 - DNA, 207 bp, Homo sapiens
gaccggcatctggacttctggcatctggacttctggcatacctggaccttctggcatacctggaccttctggcatacctggaccttctggcatacctggaccttctggcatacctggaccttctggcatacctggaccttctaatagtggatacaggttgccgtggcttctcagcagaaacattacaggccagaaggtccaggtatg

SEQ ID NO: 689637 - DNA, 6653 bp, Homo sapiens
  misc_feature (3830)..(3830): n is a, c, g, or t
  misc_feature (5377)..(5377): n is a, c, g, or t
acaaaagataggaagaaccttaaaaatatagatgccttttatgcagtgataaaatgtctagatatttatactgtggtgattattaggaatatgtgcaaagattggctattaggatgttcattacagtgttgtttaataattataaaaggacagaaagcaatgtggactcaaaaataggaaaagaatttaaataaatcctagtgtacccgttatacatgaaattatggaaatatgaccctgagcatggaaatatgtacatgagaatgtctaaaagctagttcattttgaaaaacaaaataatgtcacctcatattatttatagtatataaagatgattttaagagtggcagtgtctgggattataggtgattgtatttcttcccttttgcacatctatgttctctcatttgtattgtgtggggagaagtgactttttttataaaaagaaaaaggtatatgcatcccagcagagaagcactggctccacccagtacctgcctcctcatgccaccctctcaagccaaaagccgggggaagcccaggcaccttgaccatgaccgcccgagactcacacttcttctttctcaatggatgctgatgagggtcaagacatgtcccaagtttcagggaaggaaagcccccctgtaagcgatactccagatgagggcgatgagcccatgccgatccccgaggacctctccaccacctcgggaggacagcaaagctccaagagtgacagagtcgtggccagtaatgttaaagtagagactcagagtgatgaagagaatgggcgtgcctgtgaaatgaatggggaagaatgtgcggaggatttacgaatgcttgatgcctcgggagagaaaatgaatggctcccacagggaccaaggcagctcggctttgtcgggagttggaggcattcgacttcctaacggaaaactaaagtgtgatatctgtgggatcatttgcatcgggcccaatgtgctcatggttcacaaaagaagccacactggagaacggcccttccagtgcaatcagtgcggggcctcattcacccagaagggcaacctgctccggcacatcaagctgcattccggggagaagcccttcaaatgccacctctgcaactacgcctgccgccggagggacgccctcactggccacctgaggacgcactccgttggtaaacctcacaaatgtggatattgtggccgaagctataaacagcgaagctctttagaggaacataaagagcgctgccacaactacttggaaagcatgggccttccgggcacactgtacccagtcattaaagaagaaactaatcacagtgaaatggcagaagacctgtgcaagataggatcagagagatctctcgtgctggacagactagcaagtaacgtcgccaaacgtaagagctctatgcctcagaaatttcttggggacaagggcctgtccgacacgccctacgacagcagcgccagctacgagaaggagaacgaaatgatgaagtcccacgtgatggaccaagccatcaacaacgccatcaactacctgggggccgagtccctgcgcccgctggtgcagacgcccccgggcggttccgaggtggtcccggtcatcagcccgatgtaccagctgcacaagccgctcgcggagggcaccccgcgctccaaccactcggcccaggacagcgccgtggagaacctgctgctgctctccaaggccaagttggtgccctcggagcgcgaggcgtccccgagcaacagctgtcaagactccacggacaccgagagcaacaacgaggagcagcgcagcggtctcatctacctgaccaaccacatcgccccgcacgcgcgcaacggcttgtcgctcaaggaggagcaccgcgcctacgacctgctgcgcgccgcctccgagaactcgcaggacgcgctccgcgtggtcagcaccagcggggagcagatgaaggtgtacaagtgcgaacactgccgggtgctcttcctggatcacgtcatgtacaccatccacatgggctgccacggcttccgtgatccttttgagtgcaacatgtgcggctaccacagccaggaccggtacgagttctcgtcgcacataacgcgaggggagcaccgcttccacatgagctaaagccctcccgcgcccccaccccagaccccgagccaccccaggaaaagcacaaggactgccgccttctcgctcccgccagcagcatagactggactggaccagacaatgttgtgtttggatttgtaactgttttttgttttttgtttgagttggttgattggggtttgatttgcttttgaaaagatttttatttttagaggcagggctgcattgggagcatccagaactgctaccttcctagatgtttccccagaccgctggctgagattccctcacctgtcgcttcctagaatccccttctccaaacgattagtctaaattttcagagagaaatagataaaacacgccacagcctgggaaggagcgtgctctaccctgtgctaagcacggggttcgcgcaccaggtgtctttttccagtccccagaagcagagagcacagcccctgctgtgtgggtctgcaggtgagcagacaggacaggtgtgccgccacccaagtgccaagacacagcagggccaacaacctgtgcccaggccagcttcgagctacatgcatctagggcggagaggctgcacttgtgagagaaaatactatttcaagtcatattctgcgtaggaaaatgaattgggttggggaaagtcggtgtctgtcagactgccctgggtggagggagacgccgggctagagcctttgggatcgtcctggattcactggctttgcggaggctgctcagatggcctgagcctcccgaggcttgctgccccgtaggaggagactgtcttcccgtgggcatatctggggagccctgttccccgctttttcactcccatacctttaatggcccccaaaatctgtcactacaatttaaacaccagtcccgaaatttggatcttctttctttttgaatctctcaaacggcaacattcctcagaaaccaaagctttatttcaaatctcttccttccctggctggttccatctagtaccagaggcctcttttcctgaagaaatccaatcctagccctcattttaattatgtacatctgtttgtagccacaagcctgaatttctcagtgttggtaagtttctttacctaccctcactatatattattctcgttttaaaacccataaaggagtgatttagaacagtcattaattttcaactcaatgaaatatgtgaagcccagcatctctgttgctaacacacagagctcacctgtttgaaaccaagctttcaaacatgttgaagctctttactgtaaaggcaagccagcatgtgtgtccacacatacataggatggctggctctgcacctgtaggatattggaatgcacagggcaattgagggactgagccagaccttcggagagtaatgccaccagatcccctaggaaagaggaggcaaatggcactgcaggtgagaaccccgcccatccgtgctatgacatggaggcactgaagcccgaggaaggtgtgtggagattctaatcccaacaagcaagggtctccttcaagattaatgctatcaatcattaaggtcattactctcaaccacctaggcaatgaagaatataccatttcaaatatttacagtacttgtcttcaccaacactgtcccaaggtgaaatgaagcaacagagaggaaattgtacataagtaccccaaaattttaaaaaaagggtnaccctcagcatttaatccaaacaggggttcttagtctcagcactatgacattttgggctgactacttatttgttaggcgggagctctcctgtgcattgtaggataattagcagtatccctggtggctacccaatagacgccagtagcaccccgaattgacaacccaaactctccagacatcaccaactgtcccctgcgaggagaaatcactcctgggggagaaccactgacccaaatgaattctaaaccaatcaaatgtctgggaagccctccaagaaaaaaaatagaaaagcacttgaagaatattcccaatattcccggtcagcagtatcaaggctgacttgtgttcatgtggagtcattataaattctataaatcaattattccccttcggtcttaaaaatatatttcctcataaacatttgagttttgttgaaaagatggagtttacaaagataccattcttgagtcatggatttctctgctcacagaagggtgtggcatttggaaacgggaataaacaaaattgctgcaccaatgcactgagtgaaggaagagagacagaggatcaagggctttagacagcactccttcaatatgcaatcacagagaaagatgcgccttatccaagttaatatctctaaggtgagagccttcttagagtcagtttgttgcaaatttcacctactctgttcttttccatccatccccctgagtcagttggttgaagggagttattttttcaagtggaattcaaacaaagctcaaaccagaactgtaaatagtgattgcaggaattcttttctaaactgctttgccctttcctctcactgccttttatagccaatataaatgtctctttgcacaccttttgttgtggttttatattgtaacaccatttttctttgaaactattgtatttaaagtaaggtttcatattatgtcagcaagtaattaacttatgtttaaaaggtggccatatcatgtaccaaaagttgctgaagtttctcttctagctggtaaagtaggagtttgcatgacttcacactttttttgcgtagtttcttctgttgtatgatggcgtgagtgtgtgtcttgggtaccgctgtgtactactgtgtgcctagattccatgcactctcgttgtgtttgaagtaaatattggagaccggagggtaacaggttggcctgttgattacagctagtaatcgctgtgtcttgttccgccccctccctgacaccccagcttcccaggatgtggaaagcctggatctcagctccttgccccatatcccttctgtaatttgtacctaaagagtgtgattatcctaattcaagagtcactaaaactcatcacattatcattgcatatcagcaaagggtaaagtcctagcaccaattgcttcacataccagcatgttccatttccaatttagaattagccacataataaaatcttagaatcttccttgagaaagagctgcctgagatgtagttttgttatatggttccccaccgaccatttttgtgcttttttcttgttttgntttgttttgactgcactgtgagttttgtagtgtcctcttcttgccaaaacaaacgcgagatgaactggacttatgtagacaaatcgtgatgccagtgtatccttcctttcttcagttccagcaataatgaatggtcaacttttttaaaatctagatctctctcattcatttcaatgtatttttactttaagatgaaccaaaattattagacttatttaagatgtacaggcatcagaaaaaagaagcacataatgcttttggtgcgatggcactcactgtgaacatgtgtaaccacatattaatatgcaatattgtttccaatactttctaatacagttttttataatgttgtgtgtggtgattgttcaggtcgaatctgttgtatccagtacagctttaggtcttcagctgcccttctggcgagtacatgcacaggattgtaaatgagaaatgcagtcatatttccagtctgcctctatgatgatgttaaattattgctgtttagctgtgaacaagggatgtaccactggaggaatagagtatccttttgtacacattttgaaatgcttcttctgtagtgatagaacaaataaatgcaacgaatactctgtctgccctatcccgtgaagtccacactggcgtaagagaaggcccagcagagcaggaatctgcctagactttctcccaatgagatcccaatatgagagggagaagagatgggcctcaggacagctgcaataccacttgggaacacatgtggtgtcttgatgtggccagcgcagcagttcagcacaacgtacctcccatctacaacagtgctggacgtgggaattctaagtcccagtcttgagggtgggtggagatggagggcaacaagagatacatttccagttctccactgcagcatgcttcagtcattctgtgagtggccgggcccagggccctcacaatttcactaccttgtcttttacatagtcataagaattatcctcaacatagccttttgacgctgtaaatcttgagtattcatttacccttttctgatctcctggaaacagctgcctgcctgcattgcacttctcttcccgaggagtggggtaaatttaaaagtcaagttatagtttggatgttagtatagaattttgaaattgggaattaaaaatcaggactggggactgggagaccaaaaatttctgatcccatttctgatggatgtgtcacaccttttctgtcaaaataaaatgtcttggaggttatgactccttggtgaaaaaaa

SEQ ID NO: 689638 - DNA, 2885 bp, Homo sapiens
  misc_feature (1609)..(1609): n is a, c, g, or t
gttcttagtctcagcactatgaacccctgtttggattaaatgctgaggtacttatgtacaatttcctcagcatttaatccaaacaggggttcttagtctcagcactatgacattttgggctgactacttatttgttaggcgggagctctcctgtgcattgtaggataattagcagtatccctggtggctacccaatagacgccagtagcaccccgaattgacaacccaaactctccagacatcaccaactgtcccctgcgaggagaaatcactcctgggggagaaccactgacccaaatgaattctaaaccaatcaaatgtctgggaagccctccaagaaaaaaaatagaaaagcacttgaagaatattcccaatattcccggtcagcagtatcaaggctgacttgtgttcatgtggagtcattataaattctataaatcaattattccccttcggtcttaaaaatatatttcctcataaacatttgagttttgttgaaaagatggagtttacaaagataccattcttgagtcatggatttctctgctcacagaagggtgtggcatttggaaacgggaataaacaaaattgctgcaccaatgcactgagtgaaggaagagagacagaggatcaagggctttagacagcactccttcaatatgcaatcacagagaaagatgcgccttatccaagttaatatctctaaggtgagagccttcttagagtcagtttgttgcaaatttcacctactctgttcttttccatccatccccctgagtcagttggttgaagggagttattttttcaagtggaattcaaacaaagctcaaaccagaactgtaaatagtgattgcaggaattcttttctaaactgctttgccctttcctctcactgccttttatagccaatataaatgtctctttgcacaccttttgttgtggttttatattgtaacaccatttttctttgaaactattgtatttaaagtaaggtttcatattatgtcagcaagtaattaacttatgtttaaaaggtggccatatcatgtaccaaaagttgctgaagtttctcttctagctggtaaagtaggagtttgcatgacttcacactttttttgcgtagtttcttctgttgtatgatggcgtgagtgtgtgtcttgggtaccgctgtgtactactgtgtgcctagattccatgcactctcgttgtgtttgaagtaaatattggagaccggagggtaacaggttggcctgttgattacagctagtaatcgctgtgtcttgttccgccccctccctgacaccccagcttcccaggatgtggaaagcctggatctcagctccttgccccatatcccttctgtaatttgtacctaaagagtgtgattatcctaattcaagagtcactaaaactcatcacattatcattgcatatcagcaaagggtaaagtcctagcaccaattgcttcacataccagcatgttccatttccaatttagaattagccacataataaaatcttagaatcttccttgagaaagagctgcctgagatgtagttttgttatatggttccccaccgaccatttttgtgcttttttcttgttttgntttgttttgactgcactgtgagttttgtagtgtcctcttcttgccaaaacaaacgcgagatgaactggacttatgtagacaaatcgtgatgccagtgtatccttcctttcttcagttccagcaataatgaatggtcaacttttttaaaatctagatctctctcattcatttcaatgtatttttactttaagatgaaccaaaattattagacttatttaagatgtacaggcatcagaaaaaagaagcacataatgcttttggtgcgatggcactcactgtgaacatgtgtaaccacatattaatatgcaatattgtttccaatactttctaatacagttttttataatgttgtgtgtggtgattgttcaggtcgaatctgttgtatccagtacagctttaggtcttcagctgcccttctggcgagtacatgcacaggattgtaaatgagaaatgcagtcatatttccagtctgcctctatgatgatgttaaattattgctgtttagctgtgaacaagggatgtaccactggaggaatagagtatccttttgtacacattttgaaatgcttcttctgtagtgatagaacaaataaatgcaacgaatactctgtctgccctatcccgtgaagtccacactggcgtaagagaaggcccagcagagcaggaatctgcctagactttctcccaatgagatcccaatatgagagggagaagagatgggcctcaggacagctgcaataccacttgggaacacatgtggtgtcttgatgtggccagcgcagcagttcagcacaacgtacctcccatctacaacagtgctggacgtgggaattctaagtcccagtcttgagggtgggtggagatggagggcaacaagagatacatttccagttctccactgcagcatgcttcagtcattctgtgagtggccgggcccagggccctcacaatttcactaccttgtcttttacatagtcataagaattatcctcaacatagccttttgacgctgtaaatcttgagtattcatttacccttttctgatctcctggaaacagctgcctgcctgcattgcacttctcttcccgaggagtggggtaaatttaaaagtcaagttatagtttggatgttagtatagaattttgaaattgggaattaaaaatcaggactggggactgggagaccaaaaatttctgatcccatttctgatggatgtgtcacaccttttctgtcaaaataaaatgtcttggaggttatgactccttggtgaaaaaaa

SEQ ID NO: 689639 - DNA, 129 bp, Homo sapiens
tccactgtcccagtgaagatgggctggcccaagaggagttgccagtacacagccagctgaccaaacatcgatggatgaggtgtaatcagtggctccaaagattagctctggggcccggtacatgcaatg

SEQ ID NO: 689640 - DNA, 1114 bp, Homo sapiens
ggatcccctggaagccaagagttcaagaccagccaggctaacatggtgaaactccatctctactaaaaatacaaaaaattagccgggtgtggtggcacatgcctgtaatcccagctgctcgggaggcagagagaggagaattgcctgagcccagaaggtggaggttgcagtgagccgagatcatgccactgcactccagcctgggtaacagagtgagactccgtctcaaaacagaaaaaacaaaaacacgagaaaacaaaaaaaaaacccttgaagctttaccagaagattccagaatgtcctccagggcgtaatccacttggtccagagcaattttaacggggggccaggccattcctaatgacattgtcgcaggatatccacgcactacacatacggccaacccaaaaattcttctgaccctaaggggtacgagcatctgtgcgacactcactccagactttgagttgagacggctctcgaggcgggcacaatttccaccgtgcacacacaacaacagcgacagagggttccttgacaccagtagttgtccccatgtgttccccacgacataacgtggatgacggtgtcatcttcagcccgccgtgtgacgcttatattccccacacgttgtcgcactgttacacgattgatgtaacaccattaagaacgcctgttacgaaacctttaggaggtatgcgaaggacgcatcgttggtcacccccctatacgcctaacatcattagcacgagtcgacgaaacggatctttgagcgaacgcccagacgctgtcgccgtagaagaaatacccccccaatggggtcaccaactttacaagacggcggctacatttagaaaagcgacgattttatgtgtggtcatataacgtaagaatctttatatggtggaagaaaagaaaaggacggcatgttttacgaacaccacctgtgagatgtgcggacaaagcgggcgcgttgtgaaaaaacctacataagtgagaggcgcagcatcaatacctggcgcattcgacatcacgagggaggacaccgacgccgacgcctctactgggagatgcctccagagggccacaagacatcctccgcggtgaacgcatg

SEQ ID NO: 689641 - DNA, 495 bp, Homo sapiens
aacagaccagaagtagaaggaaagaagaagataaatataccatgaaaacactaatgaaaagaaagcttagaggctgggtgcaatggctcacacctgtaatcctagcactttgggagacagaggcgggtggatcacctgaggtcaggagttcaagacagcctagccaacatggtgaaaccccgtctctactaaaaatgcagaaattagctgggcatggcggtgcgtgcctgtggtcccagctgcttgggaggctgaggcaggagaattgcttgggcccggggagttgaaggttgcagtgagcctagatcgcaacatttcactccagcctggtgacagagcaagactccgtctaaaaaacaaaaacaaaacaaaaaaacccaaaaggactgagttcagagaacttcctgatagttgaacacctggaggatcttagagggtggcataaacagagagggcatagaagtaccatgccatacccccataactccccatatg

SEQ ID NO: 689642 - DNA, 909 bp, Homo sapiens
gcctgcaggctcttctcccgccgcggcccggcgctctccgagtcgccctgcggactggtctcgcacagtgctgggcaccgggcgccagaagacactggccatgagagcgggcaaccaggtaccggctgagctgctcgctccggggcacgagctggacgtacggggcctggtgtgctgcgcctatccgcgggagcctttgtgtccgtgtcccgagaccgcaccaccgcctctgggcccagacagtccaaacaggagcttcacagaaatgcactgtatgagtggccattccaattttgtctcttgtgtatgcatcatcaccctcaagtgacatctaccctcatggcctaattgccaccggcggaaatgaccacacatatatgcattttctcactggacagtccactgccatttataattctaaaaggcacaaaaatacttgtctgtagtctatcatctggaaaatcttgggacattacttagtggttcatgggacaccacttgtaaagtctggctgaatgaccaatgtgcatgatgacttgcaggtcatacaagttgcagttgtgggcggaaagatcttacctgacaggcttaatgttgactgcatcagcaagacacccacctgttacaacccgtcgcgaacggctcgcacccactgtggagacggatcctctctccagggcctgacccacccgtctacagcgggtcgccccactcctgagtgcccccgcaatctcctctcctgttgcgagtgatggtagcatccagaacgggtgcaacaccccggccagcgctcgcagcctctctgtccctcccaccccttctcacctatcccatcccatgccacatctccgccacccgcccctcccactcgccatgggcgtccacctccgccccatatcgccccccacg

SEQ ID NO: 689643 - DNA, 861 bp, Homo sapiens
gaatcagttttttccccccaaagtggaataaatagtggtacgcattattttcgtaaatactgagcagtagaacccttatggtagtatagcagtataaaatgggtgcttggaaataaagaatttttctgaaatggtatataatgtggtaacggtatatatacaaaatatatcttcacatctagtatatctggttggaagaatgattatgtaaatgggcagaatgggtatgaaaagactttctcattaccattgtgatggtgaatgctcgagtttataacctgaaaatatttactctatataaagaagtttggtccttggcaattggtaatacgttcatttaatatactctggctccaggattccagtatttgtcttgaagaactaataaaatctcacctgtcaatttctatatggtagcttttggtgacagtatagaaggctaaaagcaaatggtctaaatacgcacttgcacacacgtatatgattattatctccaaaatattgagacttacacataacagcttggcgcggctagattagaacaatcactaccataaaccattagatgtcctaattatagtttccagaactgcctatgtagaaacaaatacctcaagttggtgtctatgttacctgtcgctttggccacacatgatgtctggtgactcagttcgggaaaatcacggctctgattcgcaacacctgttgcctgtgtttccccattccaccttattacgcggggggctaaaaatactatgcccgggggggttccataacacagcgttaccacaaccagcgctaaatgggccacactaatggccaagttgtagaaatcgacacatgaggggggacaagaaaacc

SEQ ID NO: 689644 - DNA, 480 bp, Homo sapiens
  misc_feature (38)..(38): n is a, c, g, or t
gctcgacgggagagagaaaaaggaaaacggggcatggncattcgacgccttctccaaggggtctgatttctgagacaccagcttcaccttcttaacaaggcacctaattacaacaagcattcacattttggtgcattccagaatggaaaattcagatagcagcattgattcttccggtgcagctcagttggagatgttgacacccgaagacctgagctcagggtaaagggcctgtctggagaacccttccatttagttattaagataagggaagctggattcctgaaaatgtccgtgggtactccaaatgattattggtaccatttgaattgaacctggacttttagccggtcatggtttccaaatggccttacgggggaacctgattaaaattggcccctaattaccaaaaaacaaaacgagtcgaagctgagaaaaatctccccggccggatttttgtagtattgctcccccgggatt

SEQ ID NO: 689645 - DNA, 237 bp, Homo sapiens
tctggtccccatactacagcagcatctgccccactgttagtatttgttgagtgaataatgagttagtccaggaatgggagcaaccaagccgttccgaccttcagctgtacccttccctttcgagtgggaattcacacgccgagcgtctcttcttaagaagcttaaagcactttcacattgctggggacttctttggagtgagaatctctaagcaaaatgtgttggccaggtgggaac

SEQ ID NO: 689646 - DNA, 689 bp, Homo sapiens
  misc_feature (58)..(58): n is a, c, g, or t
cttcgtggaggtggcgggtggcctatgtctcctttggactcatgccggaaaattggtngcgatgtagatgttattgatcagaacagggctttggtcgatggaccttgcactcaagtgaggagacaggccatgcctttcaagtgcatgcagctcactgatttcatcctcaagtttccgcacagtgcccaccagaagtatgtccgacaagcctggcagaaggcagacatcaatacaaaatgggcagccacacgatgggccaagaagattgaagccagagaaaggaaagccaagatgacagattttgatcgttttaaagttatgaaggcaaagaaaatgaggaacagaataatcaagaatgaagttaagaagcttcaaaaggcagctctcctgaaagcttctcccaaaaaagcacctggtactaagggtactgctgctgctgctgctgctgctgctgctgctgctgctgctgctgctaaagttccagcaaaaaagatcaccgccgcgagtaaaaaggctccagcccagaaggttcctgcccagaaagccacaggccagaaagcagcgcctgctccaaaagctcagaagggtcaaaaagctccagcccagaaagcacctgctccaaaggcatctggcaagaaagcataagtggcaatcataaaaagtaataaaggttctttttgacctgttga

SEQ ID NO: 689647 - DNA, 310 bp, Homo sapiens
  misc_feature (19)..(19): n is a, c, g, or t
tcaagtttaagacacaacnatagaagacagacatagctgggtgcaagttgtacgcctgtaatcacagcactttgggaggccgaggatggtggatcaagtgaggccaggagttcgagaccagcctggccaacatggtaaaaccccatctctattaaaaatacaaaaattagctggatgtgatggtgcatgtctgtaatccccgctactcaggaggctggagaatcccagctactcaggaggcaaggagaatcgcttgaacctgggaggcagagattgcaatgagccgggattacgtcactgcactgtagcc

SEQ ID NO: 689648 - DNA, 222 bp, Homo sapiens
tgctctgagatcccctggtgtacatagtattgatcagaacagggctttggtcgatggaccttgcactcaagtgaggagacaggccatgcctttcaagtgcatgcagctcactgatttcatcctcaagtttccgcacagtgcccaccagaagtatgtccgacaagcctggcagaaggcagacatcaatactcatgtacagccaggggataatctaggtcactc

SEQ ID NO: 689649 - DNA, 195 bp, Homo sapiens
aatgaattactgaaaccaactttccccatattgtcctaaatgatcccagatgacccttgaaggacaaggaggtgaaacagaaaacagcttcagaaaggagtgcttagaaagctatttaggtgggctcctcttccttgactatctacgcaggagggaaggcagaagttgagacgcagccagtagaggaaactccgg

SEQ ID NO: 689650 - DNA, 645 bp, Homo sapiens
tgctctgagatcccctggtgtacatagtattgatcagaacagggctttggtcgatggaccttgcactcaagtgaggagacaggccatgcctttcaagtgcatgcagctcactgatttcatcctcaagtttccgcacagtgcccaccagaagtatgtccgacaagcctggcagaaggcagacatcaatacaaaatgggcagccacacgatgggccaagaagattgaagccagagaaaggaaagccaagatgacagattttgatcgttttaaagttatgaaggcaaagaaaatgaggaacagaataatcaagaatgaagttaagaagcttcaaaaggcagctctcctgaaagcttctcccaaaaaagcacctggtactaagggtactgctgctgctgctgctgctgctgctgctgctgctgctgctgctgctaaagttccagcaaaaaagatcaccgccgcgagtaaaaaggctccagcccagaaggttcctgcccagaaagccacaggccagaaagcagcgcctgctccaaaagctcagaagggtcaaaaagctccagcccagaaagcacctgctccaaaggcatctggcaagaaagcataagtggcaatcataaaaagtaataaaggttctttttgacctgttga

SEQ ID NO: 689651 - DNA, 354 bp, Homo sapiens
ccccctttccttaaatggtaataactgggaggtttagctggaaaaacttaaaatcaaaaatctggttttgaatctgttcttttttaaaagcatattcaacttccatatggaggtgtcaaagaggatttaaatttaaaattttggagcccaaaggaaaaggtttaactgtaaacataaattttaaaaatgccggaaaataaattgtgatccttttttatcaacacaaaaaaaactttactttgtccaaaataaacaatcaaactgtacatgttaacaacccctttttcagggccaatttggccttttgcaaagttttgtggtttttaaaataaataaacatattatatgttttta

SEQ ID NO: 689652 - DNA, 618 bp, Homo sapiens
  misc_feature (23)..(23): n is a, c, g, or t
  misc_feature (32)..(32): n is a, c, g, or t
gtgtactatatactcagaagtanttggtcatngacttgcctcagtgaggagacaggccatgcctttcaagtgcatgcagctcactgatttcatcctcaagtttccgcacagtgcccaccagaagtatgtccgacaagcctggcagaaggcagacatcaatacaaaatgggcagccacacgatgggccaagaagattgaagccagagaaaggaaagccaagatgacagattttgatcgttttaaagttatgaaggcaaagaaaatgaggaacagaataatcaagaatgaagttaagaagcttcaaaaggcagctctcctgaaagcttctcccaaaaaagcacctggtactaagggtactgctgctgctgctgctgctgctgctgctgctgctgctgctgctgctaaagttccagcaaaaaagatcaccgccgcgagtaaaaaggctccagcccagaaggttcctgcccagaaagccacaggccagaaagcagcgcctgctccaaaagctcagaagggtcaaaaagctccagcccagaaagcacctgctccaaaggcatctggcaagaaagcataagtggcaatcataaaaagtaataaaggttctttttgacctgttga

SEQ ID NO: 689653 - DNA, 1138 bp, Homo sapiens
  misc_feature (58)..(58): n is a, c, g, or t
cttcgtggaggtggcgggtggcctatgtctcctttggactcatgccggaaaattggtngcgatgtagatgttattgatcagaacagggctttggtcgatggaccttgcactcaagtgaggagacaggccatgcctttcaagtgcatgcagctcactgatttcatcctcaagtttccgcacagtgcccaccagaagtatgtccgacaagcctggcagaaggcagacatcaatacaaaatgggcagccacacgatgggccaagaagattgaagccagagaaaggaaagccaagatgacagattttgatcgttttaaagttatgaaggcaaagaaaatgaggaacagaataatcaagaatgaagttaagaagcttcaaaaggcagctctcctgaaagcttctcccaaaaaagcacctggtactaagggtactgctgctgctgctgctgctgctgctgctgctgctgctgctgctgctaaagttccagcaaaaaagatcaccgccgcgagtaaaaaggctccagcccagaaggttcctgcccagaaagccacaggccagaaagcagcgcctgctccaaaagctcagaagggtcaaaaagctccagcccagaaagcacctgctccaaaggcatctggcaagaaagcataagtggcaatcataaaaagtaataaaggttctttttgacctgttgaaaaaaaaaaaaaacaacacacaaaaaacacaaacaacacacacaaaaaaaataaaaaaacaacacacaaaagcggcgggggcccccaactaaaaaatcacccaagaggggcccacaaataaggcataccccatattagtaaaaaggggggccccaaatatagaggagcgaagctaatataaaaagaacgacacagcacgaggccaacagcttaaaaaacagcggtcaacgagcgaaaacacgcgctccataggagccacccgggaacagagaaccacaacatcacggcgggggggggaaacaattagggggacaacaaacacccccaagaaaaaaaaacacccaggaagaaaacaacaaacaaaaaagcggaaaaagaggtgcaaaacaaccgaaaattacgggcgcagaaaaaaattggcaaaggggaaataatggtcaaaaatttcc

SEQ ID NO: 689654 - DNA, 524 bp, Homo sapiens
  misc_feature (113)..(113): n is a, c, g, or t
  misc_feature (117)..(117): n is a, c, g, or t
  misc_feature (267)..(267): n is a, c, g, or t
  misc_feature (486)..(486): n is a, c, g, or t
accccaccacgaccctaccaaaaaaaaaaaaaagaggagaagtcggccgcaccttgctttattgtgtttcatttaacgctgaaatcacacaatgattagaacatgaaactttntttnaaaaagatatggggataaatattaaatttaaaacacaactcttgacctataaagtataaaaagtacttacaatgaaatattcttcactaaatctgacactttgggattccaggcaaaaggatcgcttgggtgccaaaagttcaagaccancctggtcaaggggggagattctatctcctactccaatgtaaataacaaaatgaaaaatatcacgatgattccagaccaggaatactacagatgtccaacacttccaccctgaatccccaaagaggcccgcttttagcctccacactggttaggtgacctgcctctgcatttcactcttctgcttcagataaaaattttcaggtctgtctcccactctantgaaccactcctttggctactgtctggagagaatttaa

SEQ ID NO: 689655 - DNA, 224 bp, Homo sapiens
  misc_feature (4)..(4): n is a, c, g, or t
aagnctcgaaaaggggcatagctggtgaggagagtctgggcacctcctccatggctctcatgtgcctattcatttctgtggcgaggggcatagaggtatgtggcactgaagatgggtctttatgctctgtaaatcttgatggcactggcttcctcctaagtccccatactcaagcctcgctcacttcccctcattctgtccccccttttccagaggcttgagga

SEQ ID NO: 689656 - DNA, 206 bp, Homo sapiens
  misc_feature (3)..(4): n is a, c, g, or t
  misc_feature (51)..(51): n is a, c, g, or t
  misc_feature (171)..(172): n is a, c, g, or t
cgnngaagccctacgagttggagcctcgagaaatagcccggggtccacccntgcacatgttccccccagcctgtgcagggccccagccccctccacataccaccggcagccaccggcagcggcagcgaggaaaggtgcagcagtggcccacagccggcagctgcacgggannccgagagagtcccgcgctgcaggaaagtgccccc

SEQ ID NO: 689657 - DNA, 783 bp, Homo sapiens
  misc_feature (58)..(58): n is a, c, g, or t
cttcgtggaggtggcgggtggcctatgtctcctttggactcatgccggaaaattggtngcgatgtagatgttattgatcagaacagggctttggtcgatggaccttgcactcaagtgaggagacaggccatgcctttcaagtgcatgcagctcactgatttcatcctcaagtttccgcacagtgcccaccagaagtatgtccgacaagcctggcagaaggcagacatcaatacaaaatgggcagccacacgatgggccaagaagattgaagccagagaaaggaaagccaagatgacagattttgatcgttttaaagttatgaaggcaaagaaaatgaggaacagaataatcaagaatgaagttaagaagcttcaaaaggcagctctcctgaaagcttctcccaaaaaagcacctggtactaagggtactgctgctgctgctgctgctgctgctgctgctgctgctgctgctgctaaagttccagcaaaaaagatcaccgccgcgagtaaaaaggctccagcccagaaggttcctgcccagaaagccacaggccagaaagcagcgcctgctccaaaagctcagaagggtcaaaaagctccagcccagaaagcacctgctccaaaggcatctggcaagaaagcataagtggcaatcataaaaagtaataaaggttctttttgacctgttgacaaatgtatttaagcctttggatttaaagcctgttgaggctagagttaggaggcagattgatagtaggattataataaacattaaataatcaaa

SEQ ID NO: 689658 - DNA, 549 bp, Homo sapiens
tgtaatttcttgttaatcaccctcctcccagctcccaaccttctgagtctccagtgtcgttattccacactgtggcccacatgtacacattatttgggcttcaacttataagtgagaacatggcctccaggtccttccatccttccacgttgctacaaaagacatgatttcattcttcctttatggctgaatagtattcgtgtgtgtgtgtgtgtgtgtgtgtgtgtgtgtgtgtgtgtgtgtgtgtgtgtgcgtgtatgtgtcgagggacagtatcactaggagatggagggctcctccctccactagagagagagggagagatacatagagacaaagaataagtggacgagacactgagaaacaggtcggggagaggtcatggagagccagctccccgcacacataggagacggcacagggaagacacagcgagagctcacgaaccccaacccaagctgtgccgcaggaggtcgtcaaccccaaacgctatctggggagccacaaggatccggaagatagagacgcacacattaattctccactctc

SEQ ID NO: 689659 - DNA, 162 bp, Homo sapiens
aaactagttacctgaataataaacctctccctgttgccagagcaggcaccacacacggggatccctaagggggctccaggtgggtgctacaaacacgatgctgagagttcctttagtcttctcaagatggcagccaagtttttggtgtcccaaataactagg

SEQ ID NO: 689660 - DNA, 786 bp, Homo sapiens
  misc_feature (96)..(96): n is a, c, g, or t
  misc_feature (126)..(126): n is a, c, g, or t
  misc_feature (187)..(187): n is a, c, g, or t
  misc_feature (193)..(193): n is a, c, g, or t
  misc_feature (205)..(205): n is a, c, g, or t
  misc_feature (270)..(270): n is a, c, g, or t
  misc_feature (304)..(304): n is a, c, g, or t
  misc_feature (336)..(336): n is a, c, g, or t
  misc_feature (340)..(340): n is a, c, g, or t
  misc_feature (352)..(352): n is a, c, g, or t
  misc_feature (405)..(405): n is a, c, g, or t
  misc_feature (415)..(415): n is a, c, g, or t
  misc_feature (444)..(444): n is a, c, g, or t
  misc_feature (461)..(461): n is a, c, g, or t
  misc_feature (542)..(542): n is a, c, g, or t
  misc_feature (565)..(565): n is a, c, g, or t
  misc_feature (577)..(577): n is a, c, g, or t
  misc_feature (580)..(580): n is a, c, g, or t
  misc_feature (591)..(591): n is a, c, g, or t
  misc_feature (649)..(649): n is a, c, g, or t
  misc_feature (667)..(667): n is a, c, g, or t
  misc_feature (672)..(672): n is a, c, g, or t
  misc_feature (680)..(680): n is a, c, g, or t
  misc_feature (682)..(682): n is a, c, g, or t
  misc_feature (687)..(687): n is a, c, g, or t
  misc_feature (760)..(760): n is a, c, g, or t
cggaccccgcgctggcgctgaagcgcaggctgcggggcgcggcgtcgggagtgccggcctgcgtgttccttcccgcctgtcggagggggagtcccngacagtccttagcagtggctccgccccccnggtcgaatcctcctcttccgctcctggcctgccctccgtgtcccctcctgtgccctccccnacctcngctgcttccccngaggaagaagaagaaagtgaagatgagtctgagattttggcagagtcgccctgtgggcgctggcngaagaggcgagaagaggtgaatcaacggaatgtnccaggtattgacagtgcatacctggccatggntacngaggaaggtgtngaggttgtgtggcatgaggtacagttctctgaacgccagaactacaagctgcnggaggaaaangttcgtgctgtgtttgataatctgattcnattggagcatcttaacnttgttaagtttcaccaatattgggctgacattaaagaaaacaaggccagggtcatttttctcacagcatacatgtcatctnggagtctgaagcaatttctgaanaagaccaaaaanaancacaagacgangaatgaaaaggcatggaagcgttggtgcacacaaatcctctctgccctaagctacctncactcctgtgaccccccnatcanccatgggnanctganctgtgacaccatcttcatccagcacaacggactcatcaagattggctctgtggctcctgacactataaacaanaatgtgaagacttgtcgcgaagagca

SEQ ID NO: 689661 - DNA, 410 bp, Homo sapiens
ggctgatcagagtgctataacacatcacacattttgtgatgaggcctgagataaacactatccacctcgacaagcaacagggtcaacttctggcagagatgtgtatccttattggtgaaaatgacacatttggagctgagaccaagaagaattgtgacctggacgagaacattgagaaaggattattggatcgagcttttaatgtgcttcttattcaacaccggtgtttacaaatacctgtgtggaggcatccattaagcaatccacccgagcttgaggaaagtgacacccttggagtgaggcgagcagcacagagaccgctgaaagctgagctatgaatatccttggaagaaggtcctccacaagaaattaattatttaacacgaattcactacgctcaatctgggttt

SEQ ID NO: 689662 - DNA, 119 bp, Homo sapiens
agatcgtcaccttcacagccgggatcatgctgtatggaatatcaaaacaatctccaccatgaaagtcatgcagtttcaggctatgaaacgcaaagccagttctcccgtccacccatctt

SEQ ID NO: 689663 - DNA, 175 bp, Homo sapiens
cactcttctggccaaagaatactcattttaattgataattggcagaggaaagaagaaatatttagagtagacatgtagttgccctttagagtcatttcttaaggccagcaaattgcaaagccaggccaggcacggtggctgacacctgttatccccgcacgttgagaagctgggt

SEQ ID NO: 689664 - DNA, 429 bp, Homo sapiens
gtacctagcaacatgtgacagctacagcagcaaatactgaacgctcatgaaactcagcagccactcgtgacccctgacctttgtttctggcaattaatatgagcttattcggtatggaatcatcgggagtctcgaaggaccaaaaggtgcctcgtcctctcaccctgctaatgacctgggggtaccgggcttgaaggtccaccagtcctgtgagcagggccttcgcggcatgggctgcatatatttagcagtgtcctcccgcttgatgatgttaatcacctcagccagcaacaggttcttgcacgggtcccccagccagtgtgttgaagatccgatagagagctttaggcgtgaactcctccttgtggaaagagcccacagtcatcatcctcgtgctgaaggtcatcacgtctgctgggtcatacaggc

SEQ ID NO: 689665 - DNA, 202 bp, Homo sapiens
actcgcaaggccttccgtagcgctttcgcgctgcgccccgtcgccagtattcggcagtacctactatgtcactcctcagtcccgccatcgagccgttgcgctttcgtgaagcgctcgggcactacgcgtccggcatcacggtggtcaccacgcacatcaatggcgagccgatcggcttcacctgccagtcgttccacagcgt

SEQ ID NO: 689666 - DNA, 167 bp, Homo sapiens
aaatttcccagctctgcaaagcgtaactttttaagtaccaaaacatcattgcttaccttcttttttttttgtctttttaagaaaatgattacaaaaatggtgcatgttcattagtgaaacttgaaagatatagaaaactttgcgaaataaagtaaaaattccttgta

SEQ ID NO: 689667 - DNA, 319 bp, Homo sapiens
ccccccccctttttttttttaagggttttgggggtggtttggttggaccggggggcccgggccctccctggaaaatcccctgggaaaattggccgggggtggggccggttccctttccccccctggggggggtttggtgggtttttgggggtttggggggggccccccaggccggggggggggggcccccccgcctaggcccgggggctggggtggggggggccggcccggtttttggttttggttttttggggcccctggtaaccgggggtttcccaaatcccctcccccttaattaaaaaaaaccccgggtttggga

SEQ ID NO: 689668 - DNA, 360 bp, Homo sapiens
ggcacgagctggtctcagtgactaaggagggcctggagctaccagaggacgaggaagagaagaagaaaatggaggagagcaaggcaaagtttgagaatctctgcaagctcatgaaggagatcttggacaagaaggttgaaaaggtgacaatctccaataggcttgtgtcttcaccctgctgcattgtgacaagcacctattgcttggacagcacacattggacgggtcattagggcccaggcacttcgagacaactttacaattgggctacattattgccaaaaaacaccttgagatcaacccttaccaccccattgtgggacccttcggcagaaggcttaggcagacaaaacgacaaag

SEQ ID NO: 689669 - DNA, 861 bp, Homo sapiens
  misc_feature (861)..(861): n is a, c, g, or t
gggtgcggtggctcatgcctgtaatcccaacgcttggggacgccgaggtcggttggatcatgaggtcaaaagattgagaccatcgctgggcaactatggtgaaaccccgtctctactagaaatacaaaaaattagctgggtgtgggggcgtgcgcctgtagtcccagctactggggaggctgaggccaggagatttgcttgaacccaggaggcatgaggttgctagtaagccgaagatcgtgccactgcattccagccttggtgacagatgcaagagtccgtctccaagaaaaaggaacaaagaagtttcttgaggtggaatgatgttcacacaaagacccattttatagataattacggcattggtgaatacaattagtaaatagtcttctgaaaagaggcagcgtgataccttaagtgtttactagaattgggtctggatatgtatgtaagaatttattggcgagggaaatacggggtttcatgtgtttcaaatttcgagagtgtatgttactgttgacagtgcttatttaatatccaatggtctccaatctccatttaccttagggactgtacaggagctgtgcaagatgtatgaatggtattctttataatccacaataacatttctggtcaggatggaatcactacatgtggtcacattttcaggtaaggatgaggaagcttaggttaagtgggggtaagaacgggttggttcaggttcattgggcgaagggctttgcgtgtttaagaaggggtcacaatcgtgattgcacgtttgggaataaaattttttgagggggggggcccacatgttaaggctcggggatataggggcggaaggccaagggggccaaaggn

SEQ ID NO: 689670 - DNA, 809 bp, Homo sapiens
agcgggcggggcggacgcgcgaggagcgtggagccgcggtcctgtcgtggctccgcgtgcctgcgtccgcccggccagcccggctctgcgctgcgagaggccgtacgtgcagctcgcggctgcgctcggtggagagaagcgctgggggacatggggcgcgtgcgtgcccgcctgggcctcgcaggctccggaagccccgagtgagcgagagctgtccccagcctgtcttacctggtccatggccaaactggagtgatcccgtctgccgttggtgcgccttccctctcctagccccaggttccgggtgcccttggaggagccccctctaagtccagacgtggaggaggagtgacgatgacttgggcaatgacccttggcctgctgagcatggcttctggggacctcgatcagcaagcctcccggcctgggtacacccgagacaagcccatgcccgcgaagcatacagtcggaagcggggaagctttgaggttttcaaccggacaactacaattcgctattgagaacccgactcaaattctgcaattcgtcagggagcggccctgcactacccaaaccgcaactgatgcctacagtacagcggaatgccagcaccgcgatatcttgaacccatgacataaatctgaaggggtaacaaggagccaagagagaagggacaagaagcgctattggccctcattatcatcacggatataggagtacccgttgccagaatgacaagaagtaagtggttgatacgatacaggtatatatgagcgaacaatggcggaatgaagaatgaagtatagtta

SEQ ID NO: 689671 - DNA, 852 bp, Homo sapiens
tagctggtcagcgggctgcgtaagggctcccggcggtgcccaaataggtgtggggtgctgggttgtgctcagccgagaaataaaatgttggggcggccgccccttggggcagtagtggggtcgtgttttgcccacctggggaggtggtccgtgccctttacacgcagacgtggccccgtccgtcttagtatggtgttgcagaacaacgtcgtgggttcaagtggtatgacgtagcgatcaatctggatagacggtcgtgaatatacctggggaaggccctttcgttatgcgccgcagaaatgccatggtagtaggtcttggcgcccaagtgctcgggcgttgcctacctggcataagcagggcttttgccacggtctcccccctattgttgcgacagcgcacctcgggtaattcttgttaaggtttcccccaggtggtctctatttatacgtaggatctgagggagctctttcttgagcagaagcactgttggaacatgggggaggcgaagcaaagtagtcgcacacaaactacgcccgtgtgcacaccaatgatgaacgccactcgttctgttcggtcactccagcgtttacttcaggagaggcgaagcttagttctcccacacagaggatagaacctgggagcagccaccatatgatcccacccctcccgactgtatgtccacggtggactcgtaactgcacccggcgagttgccctacagaacatctttagtcaggcacggggatcttttcccgcttttatctttatgagccaagctttctgtccaccccggatgagcggcgtagctcccggttttccccactctggggaggaaaccgcccacatgaca

SEQ ID NO: 689672 - DNA, 384 bp, Homo sapiens
ggggtcttggggtccctggctgggtggccagaggcccgaagccagcgctgggaagggctgcggatgcccgggtcatgatggaaggtggcaggtccaatgacacgcgggtctggtcctgggctaagataccggcccctcgtccgggcccttgcattctagtcttccgttctgcagaacaacggggccgaggccccttcccatctgctcgcccgtggtgcttgaagtcatagcacccatcgccgtggtccaagtgcgctcttgggtagcctccgtttcccagcggcaccgcgcggccgccagtgccggccttaactgccaccgtgcgacctgtgccgagcatgtggaccaccgcaaggcactccctcgccaggtctcctcgagaag

SEQ ID NO: 689673 - DNA, 196 bp, Homo sapiens
tgtctgatatttgagtgaaaaaaggtactgtcaggcagctctggacacacaagaaggaggaattattttaaaagctgtactctttaattggtagtatctttaaaatcagttggtaacaatgaaggatttgaaaggagcattgactttggcactttaaaagtatttctaaaaatattttggtgcttcgggtcgaaca

SEQ ID NO: 689674 - DNA, 211 bp, Homo sapiens
tcgtctattcatcggcacctggcttactggctcgctctggtggcttccacaggttgtcctgagaacacgaggctgccaggtatcctggtacaagaaggcggtccgcttggactgagagggtaggcttactccccttccaatccagccaggggaatggggtgccgatgaatagcgaggtgccgatcaatagcgaggtgccgatcaatagcga

SEQ ID NO: 689675 - DNA, 181 bp, Homo sapiens
tgattagaggatccgatcagtgcatgtgaagtaggcagagagtgatgatactagaacaggagggatgtcagggaggggatccggaactagatcttggagagaaaggaggagttgagaagataggcaagttagagagaaagttctcctgtgagagcaaacagtacccacaatggcagtggat

SEQ ID NO: 689676 - DNA, 375 bp, Homo sapiens
tgggacgcgaaggtagcggcagcattcctgttcttcaggttggtctcgtggatctggcaaagctccggtgatgattggccggtccggagggtggcgaggctccagagctgcatgctcgccggatcgagccctcgccgtagttctcgtctccgatcaacacccacctgatgccatgtttcttgtagtagcgggcagtgtcagggacggggccaaactcctgagtgacggcattgcgcacggagttggccttgtcgccatcaatgttgatggcaccaatgagcaggttgtcggagatgttatccaagtgcccatggaacttgagccaggggccagcagctgacatgtggtcagtggtacacttccctttgaccttga

SEQ ID NO: 689677 - DNA, 302 bp, Homo sapiens
gaggatcccccctagaagacgaagtagctctatggagtccttaaccactgatagtcttacaaatactggcagatgccaagtctggcaactactgagacttcactgattttttgcacatttcaagtcagcttctccatgtacttgcagcttagtatgagccaacacattattgaacagtatttgaaaagatcttcactgagaatcgggttagggagttacagctggagaacaagaacattagcacaagtacctgatctgcttttgagcaattgctatttataaccggtcgcaatcactacata

SEQ ID NO: 689678 - DNA, 347 bp, Homo sapiens
  misc_feature (49)..(49): n is a, c, g, or t
ggatcttaaagtgcactcttctatatctccgcagcagtatgtattgcanaagagcaaaagaacaaagcttccacagtatggaaggggacctgagtgggttgctgctgctggctccagcagcctgcttttattcccttatctgaccccacccacgtcctcctgattggtccatttatagagagctgattgttccatttacagagcgccaactgatccattttacagcagagctgattggtctgttttgacagggtgctgattgggtatttacaaacattgagctagacacagagtgctgattggtgcatttacgatcctttaggtagatatagaagagtgcacttttg

SEQ ID NO: 689679 - DNA, 632 bp, Homo sapiens
cccaccgcgtcccaataagaagaaaaagtgtgaaattcacaggtggaaaagtaaggccccgggcccccatgagggcacacccagtggagaagcccagcgtcccagtgtcacgaacacggtgcccctctaagaagaaggaaaccacatgagcagggcacaaaggcactttttcctcctcggaggttttgaggagacccctgacacaacccaccacaggttggcaatactgtgtgtgctcgtttcttgagtttttctctttaggagttaagttgaggttcccagctgggttttgggaagaaaaggaagattgctacccacagtcttggaatagttaagggcgaagaaccccgcacaagttgaggtaattatagaggaggcttgtctttcacaaggcacggttcctggggcttcaagggctaaggaagggaaggaggcctgcccctttaacagaaccccacgtcaacacatgcggctcaaagtcaactcacagaaggctgttgcactttcacagggctaatgttggtcctttgtttatcctcctataaccccacgctgtttgtgtttcacacaatgttgtgaattttccttggttctttttaaaggaatgataataaacttacttgctttaggga

SEQ ID NO: 689680 - DNA, 128 bp, Homo sapiens
tgcttggaagaaacagattaagtaagacaaaaatatatgtcttcaagaacacttacgtttctgagaaagaattcttgaatgcagattctaatgtctggtaaaatgctttacagtgtaaaaaaaaaaaa

SEQ ID NO: 689681 - DNA, 336 bp, Homo sapiens
cgagaagaccctatggagctttaattgattaatgcagactgtacctaacaaacccacaggtcctaaactaccaagtcctgtgtttaaaatttagtgtggaaagactcggagcagaacccaacctccgagcagtacatgctaagacttcaccagtcaaagcgaactactatactcaattgatccaataacttgaccaacggaacaagttaccctagggataacagcgcaatcctattctagagtccatatcaacaatagggtttacgacctcgatgttggatcaggacatcccgatggtgcagccgctattaaaggttcgtttgttcaacgattaaa

SEQ ID NO: 689682 - DNA, 889 bp, Homo sapiens
gacactcgcttgtggaacgtctgaggttatcaataagctcctagtgtccacacgccatgggtcatgattacagggaggtacggacaaggttagtatcacaagcctgtggtgcaaggtgaaatgtggaagatgctgaaggagagacccgtgggaaggttcttgtgattgtgtaaacctatggaaccagagagtgctttgacagttttggaaatacctgttctctgcctcatgccatcatgggcattaatccaaagtcatgggacatgggatgatggtgttgatttccttggggagattgcataaagcaacgtggatgattctctaaaaggggagcttttggccaagtctgagtagtaactggcactgttgacaaagggtgcattggtgcgatccttgaggaacctggcaaagacatactttggcgataaacttgtagctaggtcgaccagttgtttggaaaatccaattatctgtgtaacatgcatatttcacactccaatgaatgggtggcatgtgcttttcacttgtggcagaaagacttggttcgaacatgggaaggtgcgtcaggtgggctcgctttttacactcctaggattagcagttgaagacgtacggtggggccaatgaattggagagaagctataccggagggcataggtgctttcaagtaaactgggaaaggacaacttcaataatttatttaaatctaatttactggtggatggaggacgcaaagacttggacactaaacgaattccttgctttaaaaagaagtgataatttgttgcggggaaattctaacgggcatctggcaagaaccgtttcttgcaggaaactagtttggacttttggggggtccaagtgacgtctgtgaaaaactcgtgggcag

SEQ ID NO: 689683 - DNA, 1014 bp, Homo sapiens
agagcagcaggaggagggacgagcatgatgatcgtcgtgtaccagattcgttcttgaggcgacgttggcaagatcttgctcagctcgaaatgccggagcatggaaatctcactagcatgagcaatgctagctgtaaattagcgtattcggcctgcctacgtctatcgacctgtgcgctataccaagttaaccaggctgattctggaagttctgaggaagaagctgctgtataaataaaagtactcgagaatgtcttgtgtcctcgacatggggtattagacctgagctccattctcaggaagccagaaattctcgctagtgctccagttagatatgctggtgttcctcttgacagaataaccacgtgaacttttgaatgagagaccctctccgcaagtgaggttcactctcagtaaagcccttgagggacatggggtgatgcctggatgactgactcgcttgctgcggacccatgttggtactatgaacgcgagtacctccactatgtagctcgaaacgaccgtcttgactgtatggtatgactgaactgtggactgattcgtacagcccacgatactagagtagacgtactccaacacaatgtcttgactgaacttcacggctgaaccgcgggcacatgtgaattattcccccagagaacataggccagagaaccggaagttatccactctacggggtccacccagagttggaaagcaatatgatgagccgagaatgaacgacgtgggctacacggacagaggcacaatctacgaagttaggcagaactggacatccagtaccggatgctacgaggacgagctccactcacaaatgaaagggcgcgctgacggcgcgcatcaggcaaccccgtgcccgaccgcccgcacccgctgcaacccgcgaaagaccggtacaacggacggacaccagacgcgatacaaccaagaccgaacatacgggagagacaaaaacaccgatatcagtaaaacacaaccgcgcagagcacgaaag

SEQ ID NO: 689684 - DNA, 1095 bp, Homo sapiens
cgtgacgcgtgggggaagaagggagctggggtcggagccgtcggggccaaatggatgacggggccatggaacaggcagtctcggcccaacatgctggacgctccctccaccccctgctgcaaaaatgacccaaccggagttgaggcgctgcccctgaatggccccaccttacacttggcagggggcctggatgccaggctcccaggactgctccagaaccgagggaagctcgggtccctccaagctagccatggtgaggcgccggaggccccggggccccaaccccaccggcctgaccacactgccctgggtgccctcctccagaagcccgagatgcggggggccgggagacaacactcctggctccccagagaggcgtgggtctcggggctgagggccagggcccggatgcccaggttccgggactagggccttggcagccagcgggggtggggaccacgggaacccaagagaaggtcctccacaaatcccagagccggctcccggccatggagcccttgaagagcctctatcctcaagagccctctagggtcatggaattggcagtggcaagcagaagacagtagactgaggacgacggaggaggcaggcctggcctgaggggagtcatccaaaggcagcagggataatgccaaaccggtgtggacagcctgtccgactaacaagccagtggaggcacaggaattgacagctggcccccttgacgtgaacggggttgacccgcgttgaactgagtgttgccccggagacgaagccagttcaacgaagacgaatagactgtaggacacgaccaggtaagatggcaagcggcaacattacggccaaatatgagaccagagatagtaggaccgcccatgtaaaggtggccagaccaagggaatagggagatagaaacaaggacaagactagagacgacgagaaggcgaacagagagggctgacgatcacagtaaagaaacaaagcagacagcacacagagagacagaaaacagagggcaaaagcaacggaaaaaagagcccagaagcgcacaagatagaaggcagcaaagagaaacgaagccggaaacagagacag

SEQ ID NO: 689685 - DNA, 194 bp, Homo sapiens
actgcgcagtacggatggctgagaccaagaggtgaactcgccaggacgggggtggcagatgggcacttacatttcgacgatgccctctggcaagttggcaggaatctctgtcaagcccttccctcgacagtccacgatgttgttgctgcaagtgcaggctgaagggcaggagatggagtcgcgtttgcgcactg

SEQ ID NO: 689686 - DNA, 178 bp, Homo sapiens
atcgtatatcggtgcctcagagttcgggctggagacgaggccaggtctccagctagggagtaggacgtagcccagccagctagccgaaggccaagacgccaggtaccggtaggacgtgacaagcaggacatgacatggtccggtagtgacgagcgaggactagaggtaggcgctgtcc

SEQ ID NO: 689687 - DNA, 321 bp, Homo sapiens
cgggggggggggggggggggggcggcccggggttgttaaaccctcccccccccctttggggttttccaaggggtttttccccgccaaatttggggggccgggggggggtgggggtatatccccccccagggggggggttttgttttcccccccggggggggggggaaaaacccgggcccgggggtttttttttttttttaaaaaaaaaaaaaaaaggggcccgggggggcccccccccccccccccttttttacccgggggtcctggggccggggaatttttcggggtttgggtttttttacccttttaatttttttggga

SEQ ID NO: 689688 - DNA, 523 bp, Homo sapiens
cccccggaaggcagacggcaacaggagtcaggagtcaacaggatcgcgggttgagcatcgtgcaagtatgtctggatctaagcaaaacaagcactatgaatgaatacctaaatactttagagttaaacaaataaagtaacaaaggaaaatgagagaggggtcaaataatcagaaaataatgatactctgaataaagaacagaaacacatgaaaaagaatcagatagaatgtctcgacatggaaaatatattcattaaaattaaaacctcaaagggtagcttaataacaaggtaggcagagatgacggaagaattaatatagtataggctagagctaagcagttaacatggaagaacacaaagagatacagaatggaaaatatgaaagagaggtaaaaagagatagaatagataacgagaagattcaaaatacactcaaaaggaaaaccaggaggagtaaagaataggcatgggggataagcaaaagtggaagacacatatatggctgggaattttccagagtt

SEQ ID NO: 689689 - DNA, 347 bp, Homo sapiens
catcactccccgtggaaggtaagaactccttcgcaaattattgttttcaagagttttgcgagatcatgaaaaatgcctactgtagtggggaaacatttcaatcctgcatctacatctctgaattgggcatctctgaagcctttcttaggccacaggataaagaggccacgcagatggggaatgaaggcctgccctcctttacatgtgtagttgatctcgtgttcacatcatttgccttgggaccgcctcttactgctggaaccctgccaacaacagtgctcgctgctgcagcatatcctgcaccaacatgcgtaatcaatgcaacctatctgtactgagcatctgac

SEQ ID NO: 689690 - DNA, 392 bp, Homo sapiens
ttgcataaatccacccctgtttgaaatctatcaagccttgttaagcccaacacaacatcatgtagcacttataggaataaaaggacttatgggctcagaattacctaaaagatgggggaagaattctgaatctgaaggtgggaaatcaacagcgaattgtagtaccactccagaagcggagagattttttaccaactccacctctctgactttaaagcaagctgcgatggttccaagcgaaatcctggttccccacgtagcgctgttaacatcaaacaacgtaatcagaattaactgactacgtgagccgcagaccccccctaacggaataatacttgcaaaagccaaaaaagaaaagtttagccctcaataaaagaaaggcgtattccccc

SEQ ID NO: 689691 - DNA, 112 bp, Homo sapiens
tgagagtaggataactagataatcttaatccccctactattattcctatagtccagcaatacatctctaacgttttcattaatgacgtgtatagtaattattagctctgtaa

SEQ ID NO: 689692 - DNA, 422 bp, Homo sapiens
  misc_feature (422)..(422): n is a, c, g, or t
agcacaagaaagtgatgttacaaacactaagagaattcagagaaacagcaggatttaaagtagcacacagagatctttgtgcatactttcagttcaaagacagagtggaagagatgacccatttttaacagcaacaaaaagataaaaatccccatgcgtaaaagaaatgtgaaaccctaaatgggaaaaactttaaatagaccataaagacaccaaagtccgattttaacaccaccatggtttgaatgaattccccaaaagttcatgtgttggaaacctggactccaatgcagcagtgctgggatgggattctggggaggtgttggctcatgaggactaatccattcatggactaatgggttctcagggagtggagcagttatcaccagggggctggttataaaagcccagctttgccgtcn

SEQ ID NO: 689693 - DNA, 187 bp, Homo sapiens
ggtgcccgaggaggcagccaagctcgtggcctgcctcttgcgtgctgctgctcaacggccgtgaaactgctacagcgtgaaggccgccacccgggtcccaggattgccttttgccgccagccaagctccttggcccttggcccttgattcattcttgcttgtggcttttgtccagtatccgggaagg

SEQ ID NO: 689694 - DNA, 314 bp, Homo sapiens
aggaactggcagctttgcaaatgcttttttcaaactttcctgatcctgcaggcaaggtaaaccagttttggaagaacctgcgggagttgcagcagctccgatgggatgagagctgggggcagactgtgctccctttggttatggacatacaactcctgggccaaagggtaaaaccccggggcccctgctgtcctttccccaggtttttttcggagtttcagggcaaacccttttgagcagggcctcccagtggccaaaagctgaaatgacggcaggggggccgcctggtgaatgaattggttttgtggcccgga

SEQ ID NO: 689695 - DNA, 93 bp, Homo sapiens
  misc_feature (11)..(11): n is a, c, g, or t
  misc_feature (31)..(31): n is a, c, g, or t
gatctaaaatnagagaagcatttaaaaaatnatttctgtcttggttcatcttattgttagtggtttatgctaataaaaattgatttaacaatc

SEQ ID NO: 689696 - DNA, 2328 bp, Homo sapiens
  misc_feature (1757)..(1757): n is a, c, g, or t
gctccggccgcagtgttgggactgtctgggtatcggaaagcaagcctactgttgctcacgtattacgtatagatccattgttctctttcaagcatgccgtgagagaagtgcacgcatggcagcaggagcgcaggtggacgacttcttgccgtgttcagtcgcatgaagacttgacccaagcctcagtagttcccctcactcagtcgaaatcaccgtctcgtacttgccaatcacacggcaagacttgcttcccgtctccgcggcaagcattgagctcgtcgctaacctggctgttcctcgacgtgcgcgctatgccgcaccacacgcactctcccgcgtacctgcaccaatgcacatagcaccgcagcacactcggtcatcagcacagatctcgcgcacccaagctcgcgtcacacacgcacgccctccacaccacattcgtcgcaccacttccaatccccccccacaccgcacccttccaggcgtgacactacgaatcaccacaacactgccaccgctaccccggccgaatacggcaaccgaccccacacgcgccccaacttcatgcggaccaccttgcaccctccacaacaagccacccctgcaacttcccttaacaagcttacaaacaaactcacaacctactgcccagcgccggacaaacaccccaaacaatctaggagcacccaaccacgtgcatcctcttggcgctcatccacctctttacaaacaacgctcccaacgttcttaccacaattcgacggccaacggcgcacccccaattccccgtgtacatacccaaaggcctgggcaaccacactctgccggtacctctggtcaccaccacatcggcaaacagaccgcaagcatatccgcaagctttgacaaccccacaacgatatggcccaacacaccttccatgatgtgagggccacgcataacccaaacaagcggactctcaggctcaaccaaggccagccccatcaggcacctattcctcccgcaacgacgacctctcatttgaccaatccgtgcatcgctctcaaccagcattctattagccccgctcttcggagtcatcgctacacggtttaccactccccgcctttccttagcgcaacacgatcagtcagggtcaggcgctcccacaacagcgagacagagcgacaaggaccaaccacagcagggtcgcactccgcgtcagccccgcctacctacagcgcccactcggcacacacaccaccgacagccgccgcaccacgacacggcaccagcccgccgccgcagcccccccacctgactgcaacacctggacaacacacgctcgtccgcccacaccacgtcggcggagctcatcaacacgacctgcaagacgcgacccgagcgccacaacctattgcggacgcaccacacactacagcagaggccgcaacagcaacgcacaacacagcctaaatccaccctcaagaactcgccaccatgagcggcacaaccaacactaagtagcgacgaacacccacggtaccggcccccgactacatacacacactcaccataatgacacgacgcacaaaccccgcacacatacggagacacacaagataccacccacggcgacacgctatcgccacaccaccacactcgcggcacgcaccaactccgcaccgccaacagactacgtggatcaaagatgacacgagaatagcaaacagccacgcaccaccagaccgcgacccacactcgattccagcgcagcnatgcacagtacccaactcaaagcgccccagcccagcgaccaggcagccgactaccccgcccgcgcccaacacaacacataaactcacgtgacccgcagtgcaccagacaaacgatatgactcacacagtcacctctgcccacacgtacggagttcgcactcactcccacgctctcgactacaagacagcgccactgcgcgatccaataacccctcacgcggcacacaccccctactcctaatatatagcatccacaatccactaacaacctcaagcaacaactgcgctaactctaccaacacgacacacacacccactacacacacgcacacacactaaaatacaatactcaactagtacaaacacaaattgatctaaccaccccacaacaacttctccatcattgacagcacacaccaatcaacattccgctccacacagcacacccgcctcctttctagctataacgcccccaagcacgaacatactacactccctacctatctcacctcacacatcaacgaacccacactatccttaccccacactattcaccaccacgcccccatcc

SEQ ID NO: 689697 - DNA, 110 bp, Homo sapiens
ccgtgcactgagcaggcttctctgtagaaccccagggtcttcggcccagaccacagcgtcttgccctgaggctagagcagggagtcccgaacttctgcattcacagattt

SEQ ID NO: 689698 - DNA, 125 bp, Homo sapiens
cccaaacccactcacctacttccagacaaccttagccaaaccatttacccaaattaggattggcgattgaaatttaaccctgcgcaattgattttgctccgcaggggaaagtttaaattttttcc

SEQ ID NO: 689699 - DNA, 864 bp, Homo sapiens
tgacagacacattctggacatgatgttcgtcgtggcaacgtgctggtgacagcaaaaatgacccaccaatggaagcagtggtcatgtcaggatatcagtgagagtgaagcgcgtatgggggagatctatccgtgaaccactccaggccaaataagcgccgcccatatgccccgctatggatcgccacaaggctcacatagacatgcaaattagctgagctgaaggaaaagcatgatcagacagacctggtacaaaagcctggcaaggatggccctacaatcctagaagaacatggagatgctgccataagctagatatggaaatcatggcaacggcccatgattgcagtctgagcgagctaactcacacacatatccaacctaacgagaacgcatcagcgtgaccgtgatatgagaccagaacagacagcggcagcagttgttcagtaaacagccagctggacccaagaaccggacactggatcgacatggaaaaggctcaccacacagcatgcaccaagaacagcgtcacgaaggacaaacagcacactactagtccagaaagtacgcatggccacccccaccacactacaaaccaagatggcaggaacacgaaaccgaggcatccagcaaccagcgctaggtaccacagtggagcccatctaagagttcacgacagaaaccaggaaatggcacaccggaataacaacgccactcgtccacaccacagcgcaaggaccgcgcacaagaacgacggaccaccaacaggcacaccaacagcaggcccaagcaccaagcaaatcaccacgaacaaccgccccaatcgtagggccaccacctgcaaccaaaggtaccggccctgaca

SEQ ID NO: 689700 - DNA, 345 bp, Homo sapiens
ggagttggcaaggtccccaagtttgcccagaaaggtcagagggctaaatgaatattatccctaatacccgccccccccctcttaatcagtggtggaagaacggtttcaaacccgtttgtttcaattggccacttaagtttagtagtaaaagccgggttaatgaaaccaaggcgtgggaaacccttcagaaggaaagaagaatgttttggcgccccctttggttttttttttgggggggggcgggtttaaggtattagtttttaaaaacagcactttttaaggggaacaacttgcccaaaaatttgtcccagaattttgggcccccttcaaaaagttaaatgggga

SEQ ID NO: 689701 - DNA, 430 bp, Homo sapiens
  misc_feature (2)..(2): n is a, c, g, or t
  misc_feature (18)..(18): n is a, c, g, or t
  misc_feature (23)..(23): n is a, c, g, or t
  misc_feature (52)..(52): n is a, c, g, or t
anccccggtcactctagnccagngaaaacctgggctctgtggacatcaaaangagcaaagaaacaataaaaagttgtagtagactcactcactctatctacacaaaaagacgtctttggggcccgcatgctttccctggacagaaaccggacctcctcatcttgcaagcctgttgccctctcagaagccgtggatcgtctttcctaagtacagagttgaccttgaagttgtgaaagtggaagctcaagtggagcttacttcaaagctttggagattatctcactaaccagcattactttgcagaagtgggactaaggctcggaggctgggttgcttggaggccaagccagttccagaacccaggattttgactctgccccatttagctcaatgcagtgccgccttccttctttgactgtggactagagtg

SEQ ID NO: 689702 - DNA, 150 bp, Homo sapiens
aaggctcttgtatcttcctttactactgtaattgggtgtctcttcctgaatcttaggctgcagataaaattaatgtcccttattttcctgccatgttggttcgaaattgtcctgctttaggttatgtcctcagtctggccatctttccaa

SEQ ID NO: 689703 - DNA, 396 bp, Homo sapiens
tattcgtgttcggggttggaattcacgctggacttgcggttggatggctctgatctcccagggaggccgccggccccgtcgctcgtccgatgtgcgctgtccggccgctgatccgcgtggagatcttgcctgtgccctatgtcactgaggcctcacgtctcactgtgctgctgcctctagctgcggctgagcgtgacctggcccctggcttcttggaggcctttgccactgcagcactggagcctggtgatgctgcggcagccctgaccctgctgctactgtatgagccgcgccaggcccagcgcgtggcccatgcagatgtcttcgcacctgtcaaggcccatgtggcagagctggagcggcgtttccccggtgcccgggtgccatggctcagtg

SEQ ID NO: 689704 - DNA, 628 bp, Homo sapiens
gccgccgacaagaggaggctgacctaggcagatgtttggacagctggcacgttccagtaacatcatgtccaatgaaacaatcggtacccttgcctttctcacatcagagatcaagtcactctttgtgcatcccattcctggctgagcgcatcatctccatgttgaacctacttcctgcaaccaacctggttggcccccagagatgggctgccttaaaagtcagagggacttcagcgacattgacttcaaacccccagcagcgtatgtatcagatatctgcaactatcttacgttaaatcttggggatgaggagaatttctgtgccaactgttgcccaaggatggacgtcctattcccgcaactctcttgggcacagacagttcgaggtctatgaaggaaaaaataaatatcgcctgggacattatggttcatgggcgtcttcagcaactttggaccgaagagaaatcctagttctcttggcagaacctgcagacaatcaggaagcagggagaaaccctattggcgggatgcctggtggattgaggtttccttggaatccgccaattcatggagcaccacctggagtgtggtggaccctggtggttggcttgcctagtctttcccaaaa

SEQ ID NO: 689705 - DNA, 1370 bp, Homo sapiens
  misc_feature (120)..(120): n is a, c, g, or t
  misc_feature (1370)..(1370): n is a, c, g, or t
gctcacacacacacacacacacacacacacacacacactagtttcgtgccttgcgatgaggcggggcagtgtgtataatggaccccgtggatcttgctacctatcagcggttcctatacntctgtcctctccctctcctggctctgcgtgtcgtggatgtcgtggcaacgcggtgggctgtgctacacgaagcggtccctaggccgctgtgtcgctatgctccaggccacgtgcgcctgacccatgcggctcctctgcgcaccaatgtcccagggcaggacgcacgcgtgctttctccactcctcttcccagaccaacgtctctactttactatcacatagtgacccctcttagcagacgcgtctcaccacggccacgtctcagcggctgctcccatctactcccctctggagcgcacagcacgcgccaggcaacaattcctccccgggctccctgctccatgcctactttcctccatcccagatatcagagctgtccagagaccatcttactcctgccacccatacaagagacacttatacggccagagatttcacacttaagcgccagagcacgtttgcgcgcctacagcgtcatctgtacccttcctgcgcccacttcactgcgcagcgctcacctgggcgactcaccacgctgaacctgcgcgagagcaccgcaacgagcactagcacgagcctaccccgctgctgacctaccacccagcaccgcccctcacgccccgcgcgccgccctcggcgcacacagcagcaccacacacgagccaccggcacccgccacctcctcaccccgcgctgcggccaccgaactccactcagcgacgcaagaactcccaaagcacgcggagcaaaagcacactgcgccaacgacatcaccccccgaagggacaccaaccacgcacccgcaaacggccccaccagcaacaaccaagaaaccacaccgccacaccacgcccgcctacgcgagacaaacccggcgacacagaacaccacgaccaccaccccgctgccccacaccacgcgcgcccaccacgacagcaccgaccctcgcccccggccacgaccccccaccccacgcacacacccaccagacgccaccacaacgccgcaaaacaaacacaccacccgcgaacacccctacaccgccaccgacccaccccagcacgccaccaccccacacgcacagacgcccccaccgaaaaacccccagcgacaccctctgacacaacgactacggacgcacccaaccgcccaccccacaccacacccacgacaacgacaacaaccacccatcacccacataacacgacacggcgcgctgcgacgacccaccaacccccaacccccccgccn

SEQ ID NO: 689706 - DNA, 101 bp, Homo sapiens
gccccgggggtttttccaaccccaaattttaacgggttttttttcaaaaaaaaaaaaaaaaaaaaaatttaattttttaaatttaatttttttaaccccca

SEQ ID NO: 689707 - DNA, 438 bp, Homo sapiens
taacctactaatgcctaatccaaggttcccaaatcgcccgcacatccacaagcacataaagttttttgttacctagtggccgatttcggatagtaggggtaggggcggatactagggatagggtaaggaggaggccattttggtctgaaggttttattttatcgcgcctaacggggatgctttacggagtgtattctgggttaggggcggtttttttgtaggtcgcgtaattcgctgccgggtagccctcgggtggaccgagtaggggtttaggggggggaatcgcccgattctctaagggggggggggggggggggggggggggggggggggaaagtttgtgtataaatgatttttttttaaatgcggcgcggtcgttctattgggacccgcggggttaatggccttgggttatatatttaaatggatggtggctgg

SEQ ID NO: 689708 - DNA, 126 bp, Homo sapiens
ctgtgaacgcaacatcatagacacgaaagggtcattcctgggtgtcctcacccaagaaaaagatggaggcatgttacacacaagatttctctttttttaaacgatacactaaaattgaaaactctc

SEQ ID NO: 689709 - DNA, 154 bp, Homo sapiens
tagggcagtgtcataggagcccaagccccaaatacagaagccaacccctgggatagtagaggagccaggcctagccggggccacccccaccattaggctaccagccctaactgagaaactagcacccactagcgggtactctacctagtaccag

SEQ ID NO: 689710 - DNA, 355 bp, Homo sapiens
  misc_feature (58)..(58): n is a, c, g, or t
  misc_feature (171)..(171): n is a, c, g, or t
  misc_feature (336)..(336): n is a, c, g, or t
ttgaaagggcaagattttacctttcaccccaggttattggggtctcctagtttggtgntcccatagtcccatagttcctcatggttttgtttgtttgtttttttgtctgtcgccccaggctggaagtgcagtggcacgatctcggctcactgcaacgtccacctcccgggntcaagggattctcctgcctcagcctccctggtagctgggactacaggcgcgtgccatcacgcccggctaattttttgtatttttagtagagacggggtttcaccgtgttagccaggatggcctcgatctcctgacctcgtgatccgcccgtgtcgacctcccagntctcatgttttatctatgg

SEQ ID NO: 689711 - DNA, 302 bp, Homo sapiens
  misc_feature (48)..(48): n is a, c, g, or t
tataaagaaacacggtatggtccaaggatctacatgaaggctggaacntccttaactatgttacattatggtcaggcacacacagttcagccattggactttagtggcttaaaagaggttagaacaagatcagtccttgatactatgaagaatattcatccaatttataacattaaaagcttaatgattaagagagagttggcaaaagcattcgtgaacgttacgactcacaaagattgggagagactttatgccacagattcaaacacaaagaatgtgaataaaacgcgggtgaaacttcg

SEQ ID NO: 689712 - DNA, 179 bp, Homo sapiens
tcccatcatcgctcctcgccacccattcgcatgtctctttcccgtggatccatgtagcccattcggctgtaactttcctctcttgggcgcctcattggttcttccatctcacgttgacgaatcatcatctcttcctctcttctacgtcgttcctccccttgcctcaatggcatttcttt

SEQ ID NO: 689713 - DNA, 594 bp, Homo sapiens
tgaacatttctcaaggcagcttgagtgctctctgaggaaacactggtgtcgagcatggtgatgaggagacttcgagtgcagcagctgatacacctgggattggatggggcttatctgtgcaagcttgaaagtcgttctcatctgttaaagtgacactttcactagtttctttgcagatgggtttctggtagcaattaatgtattgtgttttcttttgcagaatacagattctgttcatcttgctctgaaattaaataattctgaactcatggggagaaaactcagagtcatgcgttctgttaataaagaaaaatttaaacaacaaaattcaaatccacgattgaagaatgtcagtaaacctaagcagggacttaattttacttccaaaactgcagaaggacatcctaaaagcttatttattggagaaaaagctgttctccttaaaacgaagaagaaaggacagaagaaaagtggacgccctaagaaacagagaaaacagaaataacaaccaggaactgctttttcttttcctgctgagtactgctaataaaagtgctattatctgctgatagcatcgtctgctaaaaaaaaaaa

SEQ ID NO: 689714 - DNA, 1092 bp, Homo sapiens
  misc_feature (1)..(1): n is a, c, g, or t
  misc_feature (321)..(322): n is a, c, g, or t
  misc_feature (324)..(324): n is a, c, g, or t
ntagaaaaaaaacaagggagcatcaaggaagaaaacaaaggcgcctcttccacacgtcccccaaacaacgcgggggaaccccggccctgcacacctcagggcgagaacccccaaatgcaacgggaagcttggtcctataagaaatcccaaacggccaaaagaaactctcacctggtctaagcagcgaagcaatactgaggacacggagacaccagtcgtcactcaagaagaaattcaaatcaccagagaagagagataaagaaggagagactgtgttgttggaattgcctgtaacatgaataagaagaagctgaagtcgtnntntaaagagtatgcacaaatagaatctgtacgatttcgttctctgattccagcagagggaacgctatccaaaaagttggcagcaataaaacgtaaaattcatcctgatcagaaaaatattaatgcctatgttgtgtttaaggaggagagtgctgccacgcaagcattgaaaagaaatggggcccagattgcagatggatttcgtattagagttgatctcgcatctgagacctcatctagagacaagagatcggtttttgtggggaatctcccttataaagttgaagaatctgccattgagaagcactttctggactgtggaagtatcatggccgtgaggattgtgagagacaaaatgacaggcatcggcaaagggtttggctatgtgctctttgagaatacagattctgttcatcttgctctgaaattaaataattctgaactcatggggagaaaactcagagtcatgcgttctgttaataaagaaaaatttaaacaacaaaattcaaatccacgattgaagaatgtcagtaaacctaagcagggacttaattttacttccaaaactgcagaaggacatcctaaaagcttatttattggagaaaaagctgttctccttaaaacgaagaagaaaggacagaagaaaagtggacgccctaagaaacagagaaaacagaaataacaaccaggaactgctttttcttttcctgctgagtactgctaataaaagtgctattatctgctgatagcatcgtctgctaaaaaaaaaaa

SEQ ID NO: 689715 - DNA, 995 bp, Homo sapiens
  misc_feature (23)..(23): n is a, c, g, or t
  misc_feature (62)..(62): n is a, c, g, or t
  misc_feature (92)..(92): n is a, c, g, or t
  misc_feature (112)..(112): n is a, c, g, or t
  misc_feature (164)..(164): n is a, c, g, or t
  misc_feature (166)..(166): n is a, c, g, or t
  misc_feature (224)..(225): n is a, c, g, or t
  misc_feature (227)..(227): n is a, c, g, or t
aggcttattaggaggagaaatcnccagaaacaagggcagaaaggaaaaattctcaccctgtnttaaagtaggagatagaaaaatacttgttnaaacaggaaaaacagttttnagtcaaagaaagaaaattcaattcaaccaagaagaagagagattaaagaatnanagaactgtgtttgttgggaatttgcctgtaacatgaataagaagaagctgaagtcgtnntntaaagagtatgcacaaatagaatctgtacgatttcgttctctgattccagcagagggaacgctatccaaaaagttggcagcaataaaacgtaaaattcatcctgatcagaaaaatattaatgcctatgttgtgtttaaggaggagagtgctgccacgcaagcattgaaaagaaatggggcccagattgcagatggatttcgtattagagttgatctcgcatctgagacctcatctagagacaagagatcggtttttgtggggaatctcccttataaagttgaagaatctgccattgagaagcactttctggactgtggaagtatcatggccgtgaggattgtgagagacaaaatgacaggcatcggcaaagggtttggctatgtgctctttgagaatacagattctgttcatcttgctctgaaattaaataattctgaactcatggggagaaaactcagagtcatgcgttctgttaataaagaaaaatttaaacaacaaaattcaaatccacgattgaagaatgtcagtaaacctaagcagggacttaattttacttccaaaactgcagaaggacatcctaaaagcttatttattggagaaaaagctgttctccttaaaacgaagaagaaaggacagaagaaaagtggacgccctaagaaacagagaaaacagaaataacaaccaggaactgctttttcttttcctgctgagtactgctaataaaagtgctattatctgctgatagcatcgtctgctaaaaaaaaaaa

SEQ ID NO: 689716 - DNA, 163 bp, Homo sapiens
  misc_feature (2)..(2): n is a, c, g, or t
gntgattatgcatcgaagaagtgcccatgcctcaagctgcttgaccacaggcctgtggcaagccgccatgtttcacctccatctcaatctctccgtccaagtcatggaagaatattcttcagcgtctcttgactgcacacacgtgtccacaacaggatacggg

SEQ ID NO: 689717 - DNA, 134 bp, Homo sapiens
tggagaaatcggaagaaatccatgtgtgtattgccagcctccacatcgggcgggggcaggtccgggcgggggcttagcgctggccgtcctctcacggggccaccggggagtctgtgcccatgcaagaagggacg

SEQ ID NO: 689718 - DNA, 449 bp, Homo sapiens
  misc_feature (174)..(174): n is a, c, g, or t
  misc_feature (185)..(186): n is a, c, g, or t
  misc_feature (257)..(257): n is a, c, g, or t
  misc_feature (339)..(339): n is a, c, g, or t
aagctaggtggagcctggtttgaatcggagaggtcttctgggcattgccatctgctgctgctgctgctgcaggaggaagaggagccggaagccggacaggagtgaggagaaggccatgcgtgagcgggaggagaggcggatacggaggaggaacggagagcagagatgaagacnagaatgatganntcagaaaaaaatatggcctgtttaaagaagaaaacccgtatgctagatttgaaaacaactaaagcgctccngcacatcagtcccgacgcttcctgtgaggtgcacgctccgcagcccatgccccagcctgggatgaaccaacgttgtgccaantttgcgtgtctccctgaactccttggcccaagtgaaacgctgccagccttccatggacaggcgtgcggagaagctgcccctgaaggacagtcctctcgtcttgcagactg

SEQ ID NO: 689719 - DNA, 941 bp, Homo sapiens
  misc_feature (23)..(23): n is a, c, g, or t
  misc_feature (62)..(62): n is a, c, g, or t
  misc_feature (92)..(92): n is a, c, g, or t
  misc_feature (112)..(112): n is a, c, g, or t
  misc_feature (164)..(164): n is a, c, g, or t
  misc_feature (166)..(166): n is a, c, g, or t
  misc_feature (224)..(225): n is a, c, g, or t
  misc_feature (227)..(227): n is a, c, g, or t
aggcttattaggaggagaaatcnccagaaacaagggcagaaaggaaaaattctcaccctgtnttaaagtaggagatagaaaaatacttgttnaaacaggaaaaacagttttnagtcaaagaaagaaaattcaattcaaccaagaagaagagagattaaagaatnanagaactgtgtttgttgggaatttgcctgtaacatgaataagaagaagctgaagtcgtnntntaaagagtatgcacaaatagaatctgtacgatttcgttctctgattccagcagagggaacgctatccaaaaagttggcagcaataaaacgtaaaattcatcctgatcagaaaaatattaatgcctatgttgtgtttaaggaggagagtgctgccacgcaagcattgaaaagaaatggggcccagattgcagatggatttcgtgtggggaatctcccttataaagttgaagaatctgccattgagaagcactttctggactgtggaagtatcatggccgtgaggattgtgagagacaaaatgacaggcatcggcaaagggtttggctatgtgctctttgagaatacagattctgttcatcttgctctgaaattaaataattctgaactcatggggagaaaactcagagtcatgcgttctgttaataaagaaaaatttaaacaacaaaattcaaatccacgattgaagaatgtcagtaaacctaagcagggacttaattttacttccaaaactgcagaaggacatcctaaaagcttatttattggagaaaaagctgttctccttaaaacgaagaagaaaggacagaagaaaagtggacgccctaagaaacagagaaaacagaaataacaaccaggaactgctttttcttttcctgctgagtactgctaataaaagtgctattatctgctgatagcatcgtctgctaaaaaaaaaaa

SEQ ID NO: 689720 - DNA, 257 bp, Homo sapiens
  misc_feature (37)..(37): n is a, c, g, or t
  misc_feature (58)..(58): n is a, c, g, or t
cgtcgacgtccagtctttgtctctctgtgtctctgtntctgtctctctctccaatcanttctccagcaccacacctgcctactattatgctccctgccactatggaaatggactaaagcccttttctgaactccttgggcattgcacacatgtgtgtgcacacacatacactgagacaaagacacacacagagagagggggaagggaggtggaggagggagagggggaagacggaaaggggaagagggggtcgacgc

SEQ ID NO: 689721 - DNA, 432 bp, Homo sapiens
  misc_feature (309)..(309): n is a, c, g, or t
  misc_feature (357)..(357): n is a, c, g, or t
  misc_feature (417)..(417): n is a, c, g, or t
aaggctggagaggcctcagaatcatggtggaaggcaaagaaggagcaaaaaggtatgtcttccatggcagcaggcaagagagcacgtgcagggaaactgccctttataaaaccatcagatttagtgagatgtattcactatcacgagaacagtatgggaaaaacctgcccccatgattcgattacctcctaccgggtccctcccacgacacatggggattatgggaactacaattcaagatgaaatttgggtggggacgcagccaaaccatatcgggtagcaacaacctagggtcagtttttgcaggtngtaaagccatttaccaagattagttgttagggtaaagaaggggccagntttttttaggaggaatttgttgaaaatatgtttgcagttgggcagcttccagccaggagnagggggcttacctaa

SEQ ID NO: 689722 - DNA, 1071 bp, Homo sapiens
  misc_feature (1)..(1): n is a, c, g, or t
  misc_feature (321)..(322): n is a, c, g, or t
  misc_feature (324)..(324): n is a, c, g, or t
ntagaaaaaaaacaagggagcatcaaggaagaaaacaaaggcgcctcttccacacgtcccccaaacaacgcgggggaaccccggccctgcacacctcagggcgagaacccccaaatgcaacgggaagcttggtcctataagaaatcccaaacggccaaaagaaactctcacctggtctaagcagcgaagcaatactgaggacacggagacaccagtcgtcactcaagaagaaattcaaatcaccagagaagagagataaagaaggagagactgtgttgttggaattgcctgtaacatgaataagaagaagctgaagtcgtnntntaaagagtatgcacaaatagaatctgtacgatttcgttctctgattccagcagagggaacgctatccaaaaagttggcagcaataaaacgtaaaattcatcctgatcagaaaaatattaatgcctatgttgtgtttaaggaggagagtgctgccacgcaagcattgaaaagaaatggggcccagattgcagatggatttcgtattagagttgatctcgcatctgagacctcatctagagacaagagatcggtttttgtggggaatctcccttataaagttgaagaatctgccattgagaagcactttctggactgtggaagtatcatggccgtgaggattgtgagagacaaaatgacaggcatcggcaaagggtttggctatgtgctctttgagaatacagattctgttcatcttgctctgaaattaaataattctgaactcatggggagaaaactcagagtcatgcgttctgttaataaagaaaaatttaaacaacaaaattcaaatccacgattgaagaatgtcagtaaacctaagcagggacttaattttacttccaaaactgcagaaggacatcctaaaagcttatttattggagaaaaagctgttctccttaaaacgaagaagaaaggacagaagaaaagtggacgccctaagaaacagagaaaacagaaataacaaccaggaactgctttttcttttcctgctgagtactgctaataaaaaagtggcctcgttggcctcat

SEQ ID NO: 689723 - DNA, 84 bp, Homo sapiens
gcacgagacaaaactcaatttgacacaccctctgtaaaggcaatgatgtgcaccttgcagatgctcaataaagtaattactgac

SEQ ID NO: 689724 - DNA, 423 bp, Homo sapiens
  misc_feature (71)..(71): n is a, c, g, or t
  misc_feature (235)..(235): n is a, c, g, or t
  misc_feature (241)..(241): n is a, c, g, or t
  misc_feature (299)..(299): n is a, c, g, or t
  misc_feature (382)..(382): n is a, c, g, or t
  misc_feature (388)..(388): n is a, c, g, or t
  misc_feature (407)..(407): n is a, c, g, or t
gaggggcatgctttctttcctgataggtctttactgtccctagtgggtcattcacagttgcacgtgaacgngcatggaacaaaggtaaaagggggtacacacacaggcctgtgcatgcatgtggttaatacttttacggagttaaccgaaaatatgtaaaacagataatctgcttaaagaaaagttttctatacagtagacgagacactgtggatacatagaacaatgcttgtgnaaatcnaaaagaaagaaaaccagaacaattcaatattcttaacaaataaataagaccaattggnatagtaagtattttaaaaagatgataggttactactggaaacccccttcttaaacatggccaagggactggatttaatatttnattttnccagaccagtacctacatnttggaagatttataat

SEQ ID NO: 689725 - DNA, 838 bp, Homo sapiens
  misc_feature (23)..(23): n is a, c, g, or t
  misc_feature (62)..(62): n is a, c, g, or t
  misc_feature (92)..(92): n is a, c, g, or t
  misc_feature (112)..(112): n is a, c, g, or t
  misc_feature (164)..(164): n is a, c, g, or t
  misc_feature (166)..(166): n is a, c, g, or t
  misc_feature (224)..(225): n is a, c, g, or t
  misc_feature (227)..(227): n is a, c, g, or t
aggcttattaggaggagaaatcnccagaaacaagggcagaaaggaaaaattctcaccctgtnttaaagtaggagatagaaaaatacttgttnaaacaggaaaaacagttttnagtcaaagaaagaaaattcaattcaaccaagaagaagagagattaaagaatnanagaactgtgtttgttgggaatttgcctgtaacatgaataagaagaagctgaagtcgtnntntaaagagtatgcacaaatagaatctgtacgatttcgttctctgattccagcagagggaacgctatccaaaaagttggcagcaataaaacgtaaaattcatcctgatcagaaaaatattaatgcctatgttgtgtttaaggaggagagtgctgccacgcaagcattgaaaagaaatggggcccagattgcagatggatttcgtattagagttgatctcgcatctgagacctcatctagaatacagattctgttcatcttgctctgaaattaaataattctgaactcatggggagaaaactcagagtcatgcgttctgttaataaagaaaaatttaaacaacaaaattcaaatccacgattgaagaatgtcagtaaacctaagcagggacttaattttacttccaaaactgcagaaggacatcctaaaagcttatttattggagaaaaagctgttctccttaaaacgaagaagaaaggacagaagaaaagtggacgccctaagaaacagagaaaacagaaataacaaccaggaactgctttttcttttcctgctgagtactgctaataaaagtgctattatctgctgatagcatcgtctgctaaaaaaaaaaa

SEQ ID NO: 689726 - DNA, 639 bp, Homo sapiens
gtcacttcgtggctagggtacgaacgtgcttgtgggagacaagtctggggcttggtgagtctgtgtgtggccagcatgcctctgatactgtgcagggtattaagcgtgtcagggcctgagtgttctgggatttctctagaggctggcaagaaccagttcgtctagtcattgcgggatctgctcgagggcttggtaacacgatccacacgcctccgttaaggtacaccaggtttccatttctatagtctgatgtcttttgtgctcagtaacactcgtgggctgttacttgcttctgagcttggaagcggtttgcatttacgcctgtaaatgtattcattcttacatcttatgtaaggtttttacttggtacgcaattctcgattctttgaacgagatgacaacaaattttggttttctactgttatgtgagaacattaggccccagcaacacggtcattggtgttaacggtacacaactaacaagctgcctgggcgaaaaaataacacatataaagacagacaccataccacacacaaacacaccagagcgtggcgcgcgcgcgccgcgcttcacctgaggcgagggtcaatccacagctccagacagaggggtgcccccacaaaggggcactttaacgc

SEQ ID NO: 689727 - DNA, 114 bp, Homo sapiens
agattttgaggctgcagtaagccataattgtaccactgcactccggcctgagcgacagagaacaagaccctgtctcaaaaataaagtgggggaaggggtgcaaaattacactgt

SEQ ID NO: 689728 - DNA, 268 bp, Homo sapiens
tatccacatcatgcccaggacccatattacgctgaggcactttaagtacctgatctgctaccctgactatacctggactacagctacatctcattgccgcccttcttcccaatcacaaagcctcctttgcgtcctcctcttgatatccccccaccttaacccacaagtataagacacctctactccctcctatggcgactgatcatgcaccccttaccatctcattgaaacctaatcatccttaccccacttaacgaccgtatccgca

SEQ ID NO: 689729 - DNA, 255 bp, Homo sapiens
taagtacgatattagtataatcatttcagccctcataataaggtattatacatgtcaagatagctaaaagaatacgttttcaaatgtcttcattataaaaaataagtatgtgaggtgatggacatattaatcagcttaatataatcatttaatagtatatgtagctatatcaaaacatcacattataacccataactacatgcaattattatttgtcaattaaaaatacaaatctaggccaagatttactcatcg

SEQ ID NO: 689730 - DNA, 1233 bp, Homo sapiens
  misc_feature (3)..(3): n is a, c, g, or t
  misc_feature (12)..(12): n is a, c, g, or t
  misc_feature (15)..(15): n is a, c, g, or t
  misc_feature (691)..(691): n is a, c, g, or t
  misc_feature (699)..(699): n is a, c, g, or t
  misc_feature (732)..(732): n is a, c, g, or t
  misc_feature (789)..(789): n is a, c, g, or t
  misc_feature (851)..(851): n is a, c, g, or t
atntcggcacgnggnggagggagaagaaatagaagaaagttctgcaacaaccatgtctgagaacttccagtattaatgtcagacaccaaaccaaagatccaggaagctccgagaacaccaggcagaataaatgccaacaacctacacttggacatataattttcaaactatatgaaataaaagataaaggaaaactctgaaagaaaccagaggtggggcagaaaacaccttacctacagagacacaaagataagaactgcattcaacattgcagaaactgtgaaagcaagaagacagtgaaatgaaaaattcaaaatgttgacagaaaaaaacccaccaacctaagtttctgtacccactgaaaacacccttcaaaagtgaaggagaattaaggccttcctcagaaaaataaaaattcaagaaacttgttgccaggagacctgtcttgcaagaaattttaaatgaaattctttagggaaacaaaagatatgtaactgaaacctggatcaacatttttttaaaaagagcattaaagaaagaattgtggtacaataaaaacctatgtatttattcttaattgatctgaccaagaagttcatagacaataacaaatacacacagatagattatgtatgcttatacacaagttaaatgagtaacactaatacaaggaatggaatggaaggatggnagggaggnattgtggtacaataaaaacatgtatttattcanaattgatctgaccaataagtttgtagataataataaatacacacagatagattatgnatgcttatacacaagtgaaataaggaacaataatacaaggaatggaatggaaggatgggagngaggaatcaggtgttttctttgttaagcaggtagtcacccgtgaagtgggatagtgttatctgaaagtggacttgaattggttgtaaactgtatattgaaggaacttaggtgtgttctttgttaagcaggtagtcttatttgggggaatagtgggataagtgttatgtgaacagtggactttgaactgggtcgtaaactggttcctgagcgaattagggtgtattgatggtaacgcagggtagtctaataagggggaataagttggaaaagggtgatctgaaaagtgtgcctgaaattgcgttggtaaaggttattggcaattccgggtaacaccaggttaacaacacaggtcttaacagagaacatacgtgtctacaaaag

SEQ ID NO: 689731 - DNA, 134 bp, Homo sapiens
tatttctgcaccagatttaaataactaggaggaatatataatccaataaatgattaccttctctggcaggtatccccagcagtcaattaacaataagccagtataaaccacctaaataaccaatctgtcaatca

SEQ ID NO: 689732 - DNA, 444 bp, Homo sapiens
  misc_feature (167)..(167): n is a, c, g, or t
  misc_feature (222)..(222): n is a, c, g, or t
agatgttatgtaagtagttgggttgagatgacatatctgacactctatgttaccctcagaagctactacatgtgaaattctaatgactgcattatcctgccaaggtgaaagaggcaggcatgagcaaggacagttaagaggggtgagagcctcatcatgatggggangtctgttctgacatcttgggaaaaactgtccacagtgtgaagtcatccacttgtngtcctggtttacagtttgagcatctgtggttatggtgtcgaacattttagtgagttctgagtggctcacccttcaggtacaagggttttcccatgaaatttacattgagttgtccacctccagcttatagggcttctggaacagagtgggtctttttcttagcgattccatggaagaaaatggaattggaggaactagtagaattcagggtaatgtccagtc

SEQ ID NO: 689733 - DNA, 195 bp, Homo sapiens
gtctctgctccagagatgtatgctgaaacctagccatggtgatggtagtaagaagatggggctattggaagatgattaggtcaggtggggctttgtgagatgtggatgatgtgaagcatccaagagctccctcgccccatccatgctaggggaaggacatgtgggatgaagacatcctccgatgcaaccatggac

SEQ ID NO: 689734 - DNA, 206 bp, Homo sapiens
  misc_feature (115)..(115): n is a, c, g, or t
  misc_feature (120)..(120): n is a, c, g, or t
tcaactgggtcgagtctaacttctatatatcattacccatcatccagcttcaaaatataggcgtttgtacttcccttttccctttacttatctacatattcctttccattccagnctaancatataccagtcacaaaagtttctaggcatagtcccgtaataaatgtcggtgtcccctgtattcttcaagatacggtcccctggta

SEQ ID NO: 689735 - DNA, 204 bp, Homo sapiens
atcttgaatgaaaaaccagctatggcacatacatgcaattaaactactagttagccatagaatgcgatgaactgtctgatacgggaccacccctctggataagtctcgaatatcatgagagacacatttttgagggtgatgtagctgttctatatcctcattgtcctaatgacatgcctctatacatgtcctgaaattcacaga

SEQ ID NO: 689736 - DNA, 651 bp, Homo sapiens
gagacgccctatttctatgtcattgttaactgtatctattgtgtacaagtctctcaaagtgtcttattgtagtgatgacatatagaagtatcagctattctagacatgtaagagaatgttacggcatcacacttatattggatgaacactgtactgtggctttaatatgagcttcagatataggaagcaagtcgttgaaatagaaaaaagattttgttggtaattctgggttggattcttaacattgaagacaaacgttgaagtattctaatgagtcgcatgtaatattgcgtaattatagagttgtgatcttgttaataaccctatttatgatctgttgtgtgtctgtctgctgtgcttctattgtgttatttaaaatcaaatactgttgttacaaagtgtcttggttcaggacaagcattctgtaacatcatgtaacagcctttcctgtacattcttggtgttagcctcctggcttctcttcacacacatcttgctaaaaaagaaggatgtgaaagaactaggtcagtctatgactttgcaatatgtggttatatagtatgcatttatcttgtatatcagtaattcgatggttatgagagatgaatccatgagggaatggagctatcagaactctaatgttccaggtat

SEQ ID NO: 689737 - DNA, 754 bp, Homo sapiens
tggtaccggcccggaagttagggatggaaccgggcgtgtacatcatccaatcctagcatgccctccgtgctgctggtcgccatgtggtgggtctccttctggatcagccaggcggcggtgcccgccaggatgtctctaggcatcacgacggtgctgacgatgacgcacgctcatggtctagtgacccgctcgtccctggcgcagggtcatcagacatcaaggcactggacgtctacttctggatctgctatgtactgtcggtgtttgccgccgctggtggagtacgccttgctcatttcaagcgccgatctacaggaagaagctagaaggccaaggtcaaggtctccaggccgagggcagagatggacgtgaggaacgccatttgtcctcttgctccctctctgcgtgccggcgtgcacgcaggagcgtggccatctcccgtcggcagcgccgtgatcccggggaacctgatgggctcctacaggtcggtgggggtggagacaggggagacgaagaaggagggggcaagcccgctcaggaggccagggggcatccgatgcccggctcaggcccagtcgacgcagacaccattgacatttacgcccgtgctgtgtgccctgcaggcgtttggggccgcccaagtgtcagtctactgtggctggcatacgccgatgtgagcacaggacgtcaggccgaccatcgcttgtccttggtcgcccggcggatgcatggccaggaaacttcctgggaggaa

SEQ ID NO: 689738 - DNA, 704 bp, Homo sapiens
  misc_feature (2)..(2): n is a, c, g, or t
  misc_feature (33)..(33): n is a, c, g, or t
  misc_feature (552)..(552): n is a, c, g, or t
  misc_feature (657)..(657): n is a, c, g, or t
gnggatcccccgggctgcaggcttgcccttttntctcaagtgtattgaattccatgttcagcaaatgggaccgttcccgtcttcaccctccctttcaacatggcgttgccaatgtacctttcagccacaggacattacaatccattctttccagccaaactggtcatacctataactacagttccaaaaatctccgggcctgacctaagggccctgaagtggtggaaaccattcccaagggaagtgggccaaacctatggctgagaaatccatgcacagggccatttcctgggagccacctactctcctcaactcatgtcctgcatgctgccaaggacattgctggcatagcagcgggctcagtctttagccccatttgggacatctactgggactctggggttaaacagctctgtgcctgcattgcaatgggaggaatgttcatggcgctcacctggcaaacccacctcctggctcttggctgcgccctgttcacggcctatcttggagttcgcatggcaaactttatggctgaggttggattgccagctngcacctggcccttttgtttgccacgctattgttctcatcatgaccacaattccaacatctacaagatgccctcagtaaagtacttatcctgaagataccgcattntctacctgcagccaagaaagaatggttggccctttgtgagcgcccct

SEQ ID NO: 689739 - DNA, 177 bp, Homo sapiens
ccctcagcaccttggccagctccttcccctccttcaagtctttactcaattttcacttaggaggccacccctgaccattctatttaacattgccatctgtccccatgcccaccatgctcatttcttctttctttactttcttctttcttttcttcaagatctcactgtcacgaaggc

SEQ ID NO: 689740 - DNA, 336 bp, Homo sapiens
  misc_feature (44)..(44): n is a, c, g, or t
atttagaaattcatcccctagaccttatacttgtttgtggtgtncctttcaagaccttattttttaaattaaaaacattgtttttaagaagatggggtcttccctctgtcatcctagccttgaagtacagtggtgtgatcatagctcactgcagtctcccaactccctgggctcaagtgatccgcctgcctcagcctcccaagtagcttggactacaggcacatgccaccatgcctggctaatttttaaaacattttttgtagagacaaggtctcgctatgttgcctaagttggtcttgaaatcctgacctcaacagtcctcccaccccaccctct

SEQ ID NO: 689741 - DNA, 347 bp, Homo sapiens
caggaagcgagcactcagcaggctaaagctgaggctcaacagagatatagtgatctctgtgcgcatttataatctggtccagaaggctctcatgcctgctgcaataaagctctatcgggaaacaaatgaaccagtgccaatacccggacctttaatacatgtacaggcggcttgcttctgcctagcgataccaagaggtctcagatctatgggagtcgccagattatactggagaaagaggacaacagaagagctgctgaagcaccattacctgaggccctccatgttcgcgtacccagaggaagcgctggcgattgggagcttaaccctgttcagtgctctgcttt

SEQ ID NO: 689742 - DNA, 149 bp, Homo sapiens
tactgatttttggatggaaaaaaaaaaaaatgtcttgtttttcccactagattgtgagctccttaagggcaaagccatgaattatacctctttgtatccccagggccttgcaaacagtaagccctccataaatattttatggtgatgga

SEQ ID NO: 689743 - DNA, 143 bp, Homo sapiens
ggtgatactgtggggggtgttggaggtcactgtaactctgctgtggttaaggtggggtttcttgtttcttccttctttagctgaccgtgctgttgcctgtctgccatgttgctgcctggtggtggccgtccaagacggggccg

SEQ ID NO: 689744 - DNA, 472 bp, Homo sapiens
gtcaggaagtgactcacaatgactcaagctaccacatactgttcattgtgaaatgccagttgaagcatatgtcctgtgagcttaggggtgctacaagttgaccactgcagcagtaaagatgattctgaagaatggcatgggatggatcctttcgaatgcacttgagcagcggtctccaaccacagggccacagagctggaggtgagcagcagctggatctaccatgaaagacttctgaatccaggaagagagactgactgggcaacatgttattcaggagatggggtctcaccctgtcgcccaggcttgagtacagtagtgctatcacagctcactgcagccttgaactcctgggctaaggatcctcctacctgagcctcctgagtagctgggactgtagggtctccctctgttgtccaaggctggagtgtagtagtgctatcacagctgactgcagcctcaaccttccagg

SEQ ID NO: 689745 - DNA, 394 bp, Homo sapiens
ctcatatgctatcctgggattgccttgtctgaagctatgggtctctttgtttgatggttgctttcttgattttgtttgccatggttaacaaattacgtgcgttgacatgtggcattcatattaattacggatgtaattctgtgtatcttactgtgagtccgaaaagctgtagatatgggtgtcgatgggaatgtacgttatttgccaaagtcgatttcagttaaaagatgaaaacgtttaatgttcaaagagaagacaaaagagaaagagagacatagaacggagaggtacgagcaaaacaagaacacaagaattagagagcgaaacagaactaacaaccgaactagagataactaacagacaggattagaagacaatgagaagagcgcgcaac

SEQ ID NO: 689746 - DNA, 443 bp, Homo sapiens
gcagcaggctgtttgctctttgatcaaaatgacaaggtcatgcggcagaacctggtgtattaccagtaccccagggacacgtggggcctttcagatgagcacttccagcccagacctgaagcagttcagttctttaatgtggccacactccagaaggagctgtatgacttcaaatgatccatctgccttggcctcccccagtgctgggattacaggggtgagcccccatgcccggcctctttttcacctttacacctgtctttttatcctcacatctgttttcaccccttcatccctgttttcctcatgttcacccttgttttccccatgttcatagctgccttttttaccattttggtttgaagggcagttttttctggcgtgtttttttgtttttcccaaaaaatcagtattattttttaaataaaaaaaacattcctaga

SEQ ID NO: 689747 - DNA, 312 bp, Homo sapiens
caaccaaaaccaaaaccaaaaaaaaatggctggcaccgttgcttcacacttgtatcccagccactttgggagcccgaggcaggtagatcgcctgccaggagttcaatgccagactggccaacatggtgaaacctcatctctattaaaaatacaaaaatgagtcaggcatggtggcagagacctgtaatctcagctactcgggaggctgagggaggagaatggcttgagcccaggagctggaggtttcagtgagccgagattgcaccactgcactccagcctgggcgactgagtggagcggaactctgtctcc

SEQ ID NO: 689748 - DNA, 133 bp, Homo sapiens
agccgcgcgtccagaatcatagacgagctcttccaggacaggttcttcacccgggagacccaggatacctaccactaactgcccttcagcctgccccaacggaggcctcacttcttctttcccaagtcccggt

SEQ ID NO: 689749 - DNA, 113 bp, Homo sapiens
atccggaggcagtcacggaatggagaaggctccctgagtagaggtcaagaaaccctgaaggttggtgttgtggctcatgcctgcaatcccaacactttgggaggccgaggtgg

SEQ ID NO: 689750 - DNA, 423 bp, Homo sapiens
  misc_feature (1)..(1): n is a, c, g, or t
  misc_feature (69)..(69): n is a, c, g, or t
  misc_feature (75)..(75): n is a, c, g, or t
  misc_feature (96)..(96): n is a, c, g, or t
  misc_feature (101)..(101): n is a, c, g, or t
  misc_feature (103)..(103): n is a, c, g, or t
  misc_feature (133)..(133): n is a, c, g, or t
  misc_feature (203)..(203): n is a, c, g, or t
  misc_feature (236)..(236): n is a, c, g, or t
  misc_feature (256)..(256): n is a, c, g, or t
  misc_feature (274)..(274): n is a, c, g, or t
  misc_feature (315)..(315): n is a, c, g, or t
  misc_feature (385)..(385): n is a, c, g, or t
naaggggcaagaagcatggccaccgaggctccagcttaacggtatttggaggtcagcacggtggctcanagaagngagggagctgtgtgccagggnggggngnaccgcagggggtgaactcggcgtgggaggngggcggccagggtcaccagcaggcagtggcttaggagcttgaagttgaccgggtccacccgaagcttgtncgcgttcaggtcgctcagggcggacagcgcgtngggcatgtcgtccacgtgcnccacggcgttggtcagcncgtcggccaccttcttgccgtggcccttaacctgggcaaanccgtggctcaggtcgaagtgcgggaagtaggtcttggtggccgggaaggacaggaacatcctctccaggncctccgcaccacactccgccatcctgcgcacccgacct

SEQ ID NO: 689751 - DNA, 284 bp, Homo sapiens
  misc_feature (5)..(5): n is a, c, g, or t
accangaaaatgaaaggaattgaaattaagagaagggagagattgaagtgtggcgctaagattgtgcaaaaaaagcagcatctggatattagaactgaatcaggtcatgcagtagcgctctgaggacaatgcccggcacaagcagcccctggaggtagtgctgcctgaaccattcaggacaaaaataaggagtatcgagagactcaatcgcctgagttccaggcggaggccaagcgccgttggcattattaaaatcagctgagtaaggtaagaaacaattatga

SEQ ID NO: 689752 - DNA, 459 bp, Homo sapiens
  misc_feature (121)..(121): n is a, c, g, or t
ggccgccatcgtgccagcccctcgggtgagtgtcggggccagcacggccggggcggtgggctggggccgcaggaagccgctctctggggctggccgggagggctccgctgaagagtccccnggggcggcccccctcgcacgtcacgcaccccacagcaggcaccaagggggaggagagaggacccccgggaaaaaaacacccggagcgccgggggggcccccgggggccacaatgggtgggtacacacaagcgcgcgagggacatccccagggactttcacgccgggcacgaggggcaccccgtggattagaacaggcgccgcgtggcaggagacacaccaggggcggggcgtcatacaacgaggagaacaacacgaacggagacagagaaaagggccccccaagaacacaccacggggggaggccccgacccaatactccttggggcgcccgggaacc

SEQ ID NO: 689753 - DNA, 839 bp, Homo sapiens
  misc_feature (1)..(1): n is a, c, g, or t
  misc_feature (179)..(179): n is a, c, g, or t
  misc_feature (234)..(234): n is a, c, g, or t
  misc_feature (268)..(268): n is a, c, g, or t
  misc_feature (298)..(298): n is a, c, g, or t
  misc_feature (301)..(301): n is a, c, g, or t
  misc_feature (305)..(305): n is a, c, g, or t
  misc_feature (345)..(345): n is a, c, g, or t
  misc_feature (353)..(353): n is a, c, g, or t
  misc_feature (463)..(463): n is a, c, g, or t
  misc_feature (465)..(465): n is a, c, g, or t
  misc_feature (476)..(476): n is a, c, g, or t
  misc_feature (501)..(501): n is a, c, g, or t
  misc_feature (516)..(516): n is a, c, g, or t
  misc_feature (536)..(536): n is a, c, g, or t
  misc_feature (539)..(539): n is a, c, g, or t
  misc_feature (811)..(811): n is a, c, g, or t
  misc_feature (828)..(828): n is a, c, g, or t
ntatcatccctggccttcgccaccgcatacccagactcaatatgcaagacaggcaaactggagatgagctattccaagttcaagaccaagagcctctctttcttgggcacctttattttaaaggtggcagagagcctccagctggtgacagtacaccagagtgagactgaagatggtgnattcactgaatgtaacaacatgaccctcatcaactagctacttaaagtccttgancccatacatgagagaaacctcaaattgctcctgntgctgctgcagatccatgagcagtgccgtnacnttcnccattcgatatcagctcgttcgactcttctatgatgtctnagtccctngatcattgtcctttacctaacagtctctaggattcctagactacaggctgacctctactctctggtcccagtactgcctccttgcccaggcctctctcactcttcatacncntccagattttnttctcagcattttcctttctctttnttattggcatcctgngcgtttcttgccctctactnacnactgattagattttacctatggctttctgcaacttgctactctctccctctccatcccatctttgcagcctcatagggtgggatacagcagctttttttgcagttatccacactcacatttcagagtcctgactctcaaggaaccactggtttttgggatagaacttgggccagggctaggaacacaggctccacggtgacatgtcatttgattgtaaattaagtgctctgattagtaagaactaagcagggggccacatgctctcaatggngacaataaagtgttgtntttttcttatt

SEQ ID NO: 689754 - DNA, 215 bp, Homo sapiens
  misc_feature (18)..(18): n is a, c, g, or t
  misc_feature (20)..(20): n is a, c, g, or t
  misc_feature (23)..(23): n is a, c, g, or t
  misc_feature (27)..(28): n is a, c, g, or t
  misc_feature (33)..(33): n is a, c, g, or t
  misc_feature (35)..(36): n is a, c, g, or t
  misc_feature (130)..(130): n is a, c, g, or t
  misc_feature (132)..(132): n is a, c, g, or t
  misc_feature (134)..(134): n is a, c, g, or t
  misc_feature (137)..(137): n is a, c, g, or t
  misc_feature (141)..(144): n is a, c, g, or t
  misc_feature (147)..(148): n is a, c, g, or t
  misc_feature (151)..(151): n is a, c, g, or t
tagaggatcccgaacggntnagnggtnnagagncnnaagaggagctggctactgaagaagaacacgaggaggagatgaatgccctgagaggccaggtgggtggagatgtcaatgtggagatggacgctgnancnggngtcnnnnggnnttnatctcctcctcgtggttcttcttcaaggtaaggccagctcctcccttgtgcctctaagcgatcc

SEQ ID NO: 689755 - DNA, 195 bp, Homo sapiens
ccactggccagagaggaatccatcccaatcatcaatgtatgtaagtcacccatggagttactaaatggtagattcccaggatcctaatcccactgtgtagggacaggaagcactcctgtgtccctgcctccagagacacccatgatcccactgcgccagagcaggaactccatcccaatcatcattttatgtcag

SEQ ID NO: 689756 - DNA, 248 bp, Homo sapiens
aaaatctacgtgaggcgcttagactcctctttgaatagatgatgagatataccagcagagccatatcatgtctatttccacccgagggaactacatcaatctacaaaccaagtcctccagctggtcctgctgctagtagtgtatggcttattttccatcccagatctgagaggtcttgcaagtctcttccctttggttgcccaccttaccatttggttaagtatatttgaaccggcgatccggcgtga

SEQ ID NO: 689757 - DNA, 598 bp, Homo sapiens
  misc_feature (469)..(469): n is a, c, g, or t
gggtagccagggagtggtctcgatctccggacctcgtgatccaccggcctcggcctcccaaggggctggggataacgagcgtaagccacggcgcccagcccccttcaccacttttaaccttcggataaaatggttttcatcatcaccggactcccagatgtagatgtgggtgtgtcacccgagaaagttccggaagccggggccagagtctcaacatttcactctcggagccggtagccggccacccatttcagagccggccatcattacccttacccagggcctaggagttttaagctcattgggctcgggaatcttccgttccggggtggcagatccgggctctaccactcataagctcggtagtctggggcaagtaattaaaccttgcttggccgcagtttccggaaaacaatcagaaggcaccggacacacagaagccctcaatatgtgagtaaccagggatggngtataaaggccagaatctgctccaggggaactgggagagttattggggtacccccaagaaatgcacttttccccttcccaaagagctaagaagcttccaagaacgagcccagaatgaactggtgtccag

SEQ ID NO: 689758 - DNA, 123 bp, Homo sapiens
attgggcgtaagtgataagttacaagaacaggcttttattcattggctatcgggtttttatggttctggtagacttcgttggattggtttctcaaaactcactcagtgggattaccggtctgg

SEQ ID NO: 689759 - DNA, 279 bp, Homo sapiens
  misc_feature (47)..(47): n is a, c, g, or t
  misc_feature (57)..(57): n is a, c, g, or t
atttcgaccaagacgaacgtagtgtagaaaggagaagaagaacttcntcggataaangggtattggatttcattggctttatttatgtttgagacagggccttgctctgttgcatggtctgtagtacagtggtgcaatcatagctcactgcagcctccaactcctgggctcaagtgatcctcccaactcagcctccctcccaagtagtgaggactacaatcacacgccaccatgcctggctgtataatttgcacttctaaggtgttcccaggagatgct

SEQ ID NO: 689760 - DNA, 113 bp, Homo sapiens
agatggtggtgaggggatgggatgtggtgagaatgacagtgcatgagtgaatggaatgagagatgtgcatgcattcatgcctccccacactgctgccatgccatggagacaaa

SEQ ID NO: 689761 - DNA, 618 bp, Homo sapiens
  misc_feature (159)..(159): n is a, c, g, or t
  misc_feature (163)..(163): n is a, c, g, or t
agcttcttaaggcttaggacctgaactggcacaaccttactttcactgcattctacccgttagatccagccgcagacccagcccaggttccacgtgggaaggggccctcgtgggacaggcgtggcaggagggatgggggccatctttggagactggccncganccagcttccttccccgctgacactgtgttcttggtctctgtgccctcggcatctagcagggtgcctgtccgagtcagtgctcagcaacacctgataatcaagggactggagggaaggacggtgggtccgacagatggacagaagggctccacactggctcccctgcccccaggctcctaccaccctgtttagttcacataaacacgactctctgctgcctaacactcctctatttttaaacctctcaagcagtgagtggtgcttaacattttttgaatcagggaccccttaaggaatctcatgaaagctgtaggagaccctctccctagagaagcgagcctacacataatcactcacacttctgcagtatattaatgacggctgcccttgactaagatcttaccacgtgccagtgactgtgaaggcacattgtgtacattacccgaactcttacc

SEQ ID NO: 689762 - DNA, 132 bp, Homo sapiens
aattaaaatcatttgaacaaaaaaaaaaggggcactctgattaaacggcattacagccggcaggacacctggggccagtgtggtttcactctagatttcacggtcgtcccaccccatttcttccaccccatt

SEQ ID NO: 689763 - DNA, 179 bp, Homo sapiens
tttaaagaacacgggtggtctcacgtgttgaccaagctggtcttgaactcctggcctcaagcaatcctcctgccttggccttccaaagtgctggaattacaggtgtgagcccctgtgcctggccatcaatgatacttttaaatacattttttactaaaagagacgaagaccaaggacag

SEQ ID NO: 689764 - DNA, 1137 bp, Homo sapiens
gctgaggcctactcacctaaggtaccaccccgtgagcttcccgcaacatcactactatgagatgtgtggacttgaagggctctctttgaccagaccatgaagctctggcgtgaaccatccgtgcagtacgcgactcgtccgggtgcacacgctcgactcaaggtctcactgtcccctggttgtccgtggtcgtctcgccaggttgcttctagggtcggctcgctgctgggccaggtcctcgagtgtgcctgtgcgaggtcactcataccgaaaggcagcttgagggtggggaccggggctgatctgtcccatctgtctgctgtcaccggacactgaggtaggtgacctgatcgtgcagcgtgctccttcttaccaatgatgcctctgatggctgctccccacgccgtcttttgcagcctgtccggacggcagtatgtccttgggacgcacaccacgggaccggctacaccatttcccctgacgtaccctgttttgcgccgtagcgtcgtgcacgcgaggaccgtgccgcgtgtaacaggcccgcggacgggatgacacgtgcccgctgcgttcaaccctgtcagaggatgccttgatgctcatcaatcactgattgccctgttgcccagctgtcttgaccacaagtatacagaaacctgctacaagtgggctcgaaaagccaattggagcggagagtcgccacggggggtcgcagggccccggtaggcaaccatagcagtgggaagaaaggcaggcgggggcagccacacaggagctcttctgcgtcaggcctgttgaccagcttctaatctcgtccaccccacacagactacaggcagcacctgcgggaggtcaaccggggagggcgtcttataagtgcccccctgtgcaagtcgtgtaatatccgctaggcccttaccagtcataggaccagcacctttgggacgaccactagcagacggaggtcacaacttccctggtgtggtagacctgtggcgctgtccctttcgggaacagagggccttccttcatggcccaccggggagcccaacacccccgaattcctctgcattcatggtcatttgggaagacacttggaaaccttaccaagatcttaaatcaccgggggtatcatac

SEQ ID NO: 689765 - DNA, 713 bp, Homo sapiens
atgatgaattagttttaatatgctcttgtgcttgcttgctaatttgggggtttttgttttagttgtgtaatcaatattcatagtgaaactgatgtgtattatgggatgtgaagtattatactcggaaattagaaaatatatatttctaatataacaaggcaaataagttttccttagttttctgtgcactgggatattttaagtagcattggatctggtctttaaaaattgatagaaaattggtagaaattcccaagggagtctattcttctattttttttaaattattaatgtgttaattctaattatgtatacttgtgctttctacctttttcatttattgttttaattagtattttttctctgttttctttcaaagcacttctgatttactaattaactctactgttttccaactcattaattttggttttaacactatcaacttttttcattccactttttcgtgtattagcttgtggaaattggatattagtaggtatattatccatgtcatgttatggtactgtttagctgtatcctaaaatttctgactatgatttccaagagaaagtaccatttccttttgatgctttaaataatgtctgatttaaatctgtggcgagcatgcgtgaatatacatctggatcatgaggctctgggctaaatgtcttttggaattcagtgcactgaagaggtttcctaaagtttaa

SEQ ID NO: 689766 - DNA, 286 bp, Homo sapiens
atgtggaactataagggatggctatatacagatcaccatgtctagctaaatgttccagtaatataacacatgcatttattagcctgtgatcagcagcggacagccttcaaattctcaggagtatacgggtctagctggcggaagatgccagagctgggctgacctaaaaggtctggtagttaatggcatccttctaccgcactaccataggcacgggatacttggaaaaagtctacccgagtgcccaagtcgtctactaaactaagttactaagggctatctcttt

SEQ ID NO: 689767 - DNA, 445 bp, Homo sapiens
tggggagttaagagacggagaatagtaacatgaatatgattgtgatagggtacgatgcagattcagacgagagggatcctggccaggaacatggctcaggcctgtaatcccagcgggagggtcacttaagctaaggagttcaagaccagcctggcaagggcaacatggcaaaaccccatctccgccaaaaacaaaaaaattagccgggcatagtggcaagcacccgcagtcccagctaccggggaggctgaggggggaggattgcttgagcccggcatgccaaggttgcagtgagctgagatcgtgccaccgcactccagcctgggtgacagtgtgagatcgcgtctcaaaagaaaaaaaataaaaagaaataggggaggggggagatactaacctaaatcagtacttaatcgttctttaggcataaagggaaaccaacatgaaa

SEQ ID NO: 689768 - DNA, 156 bp, Homo sapiens
cctaactattaaagtacagtccagtcagatgaaatacactcataatgtgcaaccattaccaccatccacctccacagtctttttcatctgtaaaactgaaagtctataccctttaaacaataacttcccatttccctatccccttaacccgagcgc

SEQ ID NO: 689769 - DNA, 243 bp, Homo sapiens
  misc_feature (234)..(234): n is a, c, g, or t
ggagttcagtactagccctggcaccatagcaagaccttatctctagaagaaataaaaaaattggccgcatgtggtggagcgtgtctgtagtcctagcaaggcggaaggttgcggtaggaggatcacgtgagagcccgggagttcgaggctaaagtgaactgtgatagcaccactgcactctggcttgggtgagagagtgagaccctgactcaaaatatatatatatatgtgtgngtgcgcgtg

SEQ ID NO: 689770 - DNA, 359 bp, Homo sapiens
tttttttttagacagtgtcggcgtgttgcccaggctggagtgcagtggcacaatctcggctcactgcaacgtctgcctcctgggctccagcgattgtcgtgccccagccccccaagtagctgggatcacaggtgcacaccatcatgcctggctaactgtatttttagtagagatggggtttcaccatgttggccagcctgctcccaaactcctggcctcaagcaatccacctgcctcagcctcccacagtgctgggattacaggcctgagccactgcaccaagccccagctccagattgtgagtttcagagacaggctagataggattcagactcagaactgtgagatttctgctgctc

SEQ ID NO: 689771 - DNA, 706 bp, Homo sapiens
gaggctcagtgatgtgcagagtgaggggctccttctcttgtgctgaggccctggctcttccgtcaggacctggatgtggtcagctccaccgttcgctgccgtcatcgccaccctgaggtctgcgggagcatgtgcagcggtggagcccggacctgatcatgcataatgctcctcgcaggggtcgtagagtcgaggtgagtgtcccacccaactggaaggatctgacgtggactgcatatcttactcgttgcgcactggctgactgcttgcctccccggtttccaggccttgtaagacgccgttggtggtggtgatgctccctgctggctgtgggaggaggagccccgtgtgctgcgtggaagccgggtgcggacggtggcatcctggatggccgtgcggactggtggccctcgtccaggccttcctagtgggacttggctggaaaatgctggaccccgaggtggtcagcagctgtcccgagctgacgctcaggctgctccttctcccgtgaggaagggcgaagaaggtcaggcccaggtgcccgtcgtatcctgtcccctaactccttgacgcgctcgtttcacgcgagtcaggtccaagacgtggtctcacacttggcatccgagtgcattccggaagttccgttgacttgggggccaaacggaagcgctgtcgcggaacagcgagggttccgaagcccttcatg

SEQ ID NO: 689772 - DNA, 193 bp, Homo sapiens
acctggatccacgtgtaaagtagtaagcatcgcaggttgcttgacacatttttccaaaattaccgggtacgccgagacatgatcccagtctcggttgactcaagagtgtggatgaagatctcagtaaacgggaggtggataaagtactaagaggtacatccagttttgttgcataagcaaacaatatcaagag

SEQ ID NO: 689773 - DNA, 978 bp, Homo sapiens
atttgggaacatttgacttccttgggcactcttaagtgcatactagatggcatagaagtaaaaggggcctccatgatgataggaaaatcagttactttataaaatattctatcaagaaaatccaggctatcacatagtctattctgtgtagacttattaggagataggaagcagccattggagaaacttgcacagctagctaatgcatctacattttggttctggggttagttatgaaatagttcttactatgacgtgttcaataacttcacataaacttcctagtactccaaaacctacaaagagatagagttaatgcagtatagtatgtatttatatatataaatagggaggtaagtatttctaatactgttcataggagctactagacaatctactaccagactaacccaatgtactgacatcaacacaaagctgaagtttcctactaactagaaggcagaaggcctggaagacacggctctctatgacaggtactacatcctactacccaatcccaagtccagatatatcacatcaaactcctaatctcgggagacagatctaggctacgcaatagtatactacgacacgtcaaacagccaggaacacaacttgtaagcaacacatagaacacgcacaacacacgtaacagacacaaacagacaatagaatgacatcacgacagactgacatatccaaccatgatataaagcccaaaagacaacatgagcaccacagaacaaacataacaacaacacagagaaactacaaggacacgaacaacacaccaaaaagcaccacgaagctacgaacagcaacaagaggcacattaaggacgtccacacaccgaggcaatgagcaaacaaaaaagcgaagaaacaagaaccaacagagagagagaggatcccgaaggaaccccacaacgccagacgtcagtaacgagcaaggcaagggggagcagagaaaaacgcaggg

SEQ ID NO: 689774 - DNA, 402 bp, Homo sapiens
  misc_feature (11)..(11): n is a, c, g, or t
  misc_feature (60)..(60): n is a, c, g, or t
  misc_feature (392)..(392): n is a, c, g, or t
tggcccatatngcgccacatataccgcagattaacaagggatgccaagctggtaagtcgngtacacggcatatgtggtgtacgttgacgcagacgcaggcgtggtggcggttgacgagtaaatgtagcttagggtgccgaacggcgtttatgccagtgctttggtaatctacgccgacctttagtcgcagccgcaaataataacggtgctaagggcgctaaggtggccaacatccacggggtaacggcggcaggggcagccacagcgccacaaccacacacacgggtgcgtagtaaaacatgggtaggcgcgtgcatgggggcggcgcgtacctgtggggtggtgcgcatttggctatcacggggttaccacaaaacaaaggtcaaaccggngcggttttgg

SEQ ID NO: 689775 - DNA, 269 bp, Homo sapiens
gacaacttgaagaagctcccacctagacctctttgcatggtcggggccagagctcactactgctgacgcagcactgctctctgcagctgagttgcctctaccaagtgtctttagagggttatgacctagagtagctggcctggagagaggtagcctccctgggctggatcattagggtctgactgtctgcagagaagatgctttacagatgtgtcaaagctgaggtaacgtggttgggggaggaaatccagacccaaagtgttagcagc

SEQ ID NO: 689776 - DNA, 329 bp, Homo sapiens
gacgaaaggcacgtgccaccacatgcggctaatttgtatttttagtagagacagggtttcgccatgttggccaggctggtcttgaactcctgacctcaggtgatccacccacctcggcctcccaaagtgctgggattacaggcattagccactgctcccggcccggaattttctttatttctatacattttacttccgttgtttttttcttttttgagacagggtctagctcttttgcctaggctgaagtgcagtggtgtgatcacagctcactgtagctttgacctcctgggctcaagcaatcctcccacctcagcctcctaagtagc

SEQ ID NO: 689777 - DNA, 420 bp, Homo sapiens
gtgattagcaggatctatactgggtcgagtctaatggatatagatatgaaatactcaaaagtaatagtcagctgtggaatcaacaaggagagaaagaaaaggactagtgctataaagaaatctttataacattcagaacattaaatatgttgcattgatttcttattaacaggtttaatacctccatctttctctaatagttttcagtttattagaaacagtatgtgaactttttagattaaaaatttccagcataggtttatcacttattatatccttttattccttgaaatggatgattgtcaggcagaaatttaggacaaaggagctggaaaatattcatgagactcaggcccccccgctattactcccactgtaaggtttcattataagcacgttaatctagttcaaagtttccac

SEQ ID NO: 689778 - DNA, 543 bp, Homo sapiens
aatgccatggctgtgtggagtgttcgatgccacaaagcgtaagagggcgtcatgtctcgcattccgtagatgatcctgggatatctgttcagcacgggaatagctgtctggaactttctcgagtatgttacaatgcgtgcattagaatatcattacacatgctctcaacctggatgcgattgaattgtactggaacagcgacaagaaccgccgagacctgaattttgatcgtggaggttgatatcaccgcgtctaggtgtcctgtgatgctggtggtatgtgaccaagcatccttcatgaggatgctcgtggtgtgaatgtaactctaaaactggatcccagaccatagcttctcttccgtcaagatggttgactccgagaggtcagccccagctgagctcagtcaggcaagcattgacacgatgcctttaagtacttactgataggtatgggctatatggcctcatcctgctttaatcgtctgtcccggtctcgtacaggctctctgaacagtgcagcatcagtagatgcaagctggagtat

SEQ ID NO: 689779 - DNA, 156 bp, Homo sapiens
agcagcgtcgggtgggtatggaggcatggtatgtaaaagcagccaagatattgacacaggaggaggttcattttagaagaggaaaaactgaggtgcagaggctcaaaaatttgcttaaggtcacataactaagaaatgccgcagccgcggcgctga

SEQ ID NO: 689780 - DNA, 1093 bp, Homo sapiens
gtcgttagccacgtttttgatgctttcttggtgtcactatcacgtataccgggtacgactctgttaaggggtagtcggacaggtgtaacgcggcagagtgaaaggtcgcccacttggtatggtcaatctctttagtgaacagagggggaacaccgtggctgcgtttctacctcttgtaaaatggccctttgttactgtcaaatgcttacgtgaagcgtttggcgcggggacgcgcgttggggtgggttttcccccttcgaattgcgtcagtcgtcaccacgccatggtccctataggctttccctttcgtagcgtggggtttcgaatggcaaagtataaggaagactaacggtcgggtgtgaatgcgcggattttatgagcgttcgcctgcgcttatggaagcagttgtcccgtggtgattcgagcaggtgcacgcatgaagatcgggtagtgcatatgcgacgggacaagttgtgctcgcctgggacctcttactcctggggccagtatggtagaggactggagagtgaaggggtaggaaagatggtcagaacgttaccagcactgaggacggggagctagtcaaaggagtatcgttgcttttgggattaagtgtttgtccttagtagtcaaggatggcaaaatgggtgcaccagcaataggaaagagtcaaacgtgtgaacccttggggtttggacagcccatgaggcccagctccccagtataagccatacaggtccaagggatcctcacagtgagagtggacttagagcacgaagtcgtggcgctgcgatctgagtgcgaccaagagtctgatagggcctagatgcagggtagacaatctcagcgccacagggcagtcctgaccactcttggcccctcaggcattatcccatttggaatgtgaatgtggtggcaatagatgggcagaggaccccaacctgggaacctttgttccctctagttagtggggagatctagcagcctaggtagcccacatgggtatttatatctgaaccagagcagacgcttgaatcaggcactaaactccagaaatatattagttgtaataattcgggggggatggcgaggg

SEQ ID NO: 689781 - DNA, 462 bp, Homo sapiens
cagttatacatggatgttccttctgcctcccagagatggctgcctgatactcagatccttaatacttctgggatctgattggctcagatttaagttaggtgtctaggtgtctacccaaattttccaggagtcttgcaacagcaattggcttctaaagcccactttgttggtggagcttggattatcagagcaattatgttggaaagcaatcccagtagatgtcatctaattggtaccatttggactagaggcaattagacggtttgcatatattttaaattattattgtagacatgaatctattactgtattttccacattttgagttactaaaaggattatattccacaggctttaataaataggtggatggatgatgatgataactttagtgataattgataattgctttaggttccagatgatattagagtaaatatagtatgctgtcatcagacatag

SEQ ID NO: 689782 - DNA, 1300 bp, Homo sapiens
  misc_feature (1300)..(1300): n is a, c, g, or t
agcggaggggagggacgcaggaaagagtcgcacggacgcactcgcgctgcgagcagcgcccgggcctgcgtggcccgggcggactgctgtgtgtgcggcagtcttcatggagtacccgcacagatggaggtactactgtggctgcagagtgtgacggctgctaactgcagccacctgctgcatgccttgtccccgccgctctgaagcggccgcgatcataagccgaaatgccgccaacccggatcggccgaggccttctctggctgggtctggctacttgagctccgctactagcggtcgcaccgtcgcgatccgaaagcgcagtgccaacatcgcacgcaccagatgctcgtgacacgtatcttgctcaatcatacgcgcggatgaccgtgcggccctcgtacccataggagattcgttgatcggcgggataagcgctgcgctcgacggtctcgcctaggactaattttgaacgcaaacattcgagccataccgccactagggccctccgcctcatctcgcaatgcataatcgccatctccggcaaccacgccaacaggctaggaccgctcgctcgccctcgccggaatgaccccagactgacttagcgaccatcatgtcgcttcagccacttgcgcactaggtggatagaactcggatgtaaccacccacaaacgcgctggccacactgcgcctacccggcaactggtttcaagacgccatctagcgtgtatgctgtggggaaccgcgtcggctaggcaagccgggccctgtgcgcaacaccccttctcgatcgtgcaggcacagttacactccacgaatgggtgaccttttccagcacccgcgccaccgcaaagctggggccttcatttgtctcggaaacatccaagaggtttcaagcaggatggcgtctcatccacaacaaggacgtcatcataccaccaccccgcccttggcgggaggtaaattaatttctctctgcgcattacacgaccgaaaatttaggcaccaagcaactagcgagtttgctattcgccaaacttagactatcaaggccacttcggaggacccagtatcatattacagcctacgcccgttctgaatgctaccacagttccaccattttgtcctccagtcagttgggaaaggaaaaacgcttacctacgaacagcacaacgccatcatgtataatgtggagcgaaattagactccatgaagtggcgaggcctacagggcacatctggccagagcaaaacagcatgacgctatatgggcctcaagaacccagctgccatctatn

SEQ ID NO: 689783 - DNA, 142 bp, Homo sapiens
tgttggagtgaggaatatcgaatcggaggagtgaagatagcgtccaacagcgccacagcgttccgcgtgggcacgtccaggagctgtccgaactgagcgagcaagtttggaaactttgcatgatgccatgcgtggattgcca

SEQ ID NO: 689784 - DNA, 166 bp, Homo sapiens
  misc_feature (96)..(96): n is a, c, g, or t
  misc_feature (149)..(149): n is a, c, g, or t
  misc_feature (158)..(158): n is a, c, g, or t
ccgcggccgggtgccctcctgccctcctggccatccagggattggttgtaagtggcctgttgcacattgtaacttctacaagtaactaacaccgtnagataatctaaaactacgaatactacctgattccacaagggtacggtgtattntccagtttnagcatctg

SEQ ID NO: 689785 - DNA, 425 bp, Homo sapiens
ccgctgacactctctatgcactggtaacgttgtggttgtcattggtttttcttgaattaagacagatttttaggtgtcttgggctgtgtgcatgcccatgcgtgctgtagagctaagatcctgcactattaagaagatattctcttttctatggtattggcttgttttacagtgaaagaatggatttctcagaactttatgctaaaaacatataggctggtgagccgtaatttaaaaaaacacggaagagaagttctgaaatcataataaatactcagcattataaactgatgtagtgcttttaagttagggtcattgtctttttgttgagaagacatgagctgttaacatcacttttgaaatgaaagacgtcttgtggcatttgccacttgagtgagacttttgtctctgaagtcactgaatca

SEQ ID NO: 689786 - DNA, 228 bp, Homo sapiens
tgctggctacatttaattgtttatttgatgtaaacgttatatggtcaacattaaacttgttttaaaaatatatactcaaatctggatctcatctctctatacctattcatagctactcctataggtaaccttttcaataggttctggattttttttccctgtgtttctttctaaaatgtgtaacatttatgtgtactctattatcctctgctgatggagtctttatat

SEQ ID NO: 689787 - DNA, 361 bp, Homo sapiens
ccaccatcaaggctttgaggaatgtagacacggctgacaccagggaatatacagctggcacagaggctgatgacatatagaactggctgcagaagcgcacggtcccggcgtgccacacaccctggctgacggcgcagatgcagagtccttgctggagttcaacgcggtgagatgtgcattggcttattaactgacgtggaggcggactctggcaagcagtttgtgcaggcagcataggacattgatgacgtaccatttgggatcactttcaacagtgacgcgatctccgaataccagatcatcgaagatggggctgtactatgtaagaagttgatgaatgccgcagcaactgtccgctggg

SEQ ID NO: 689788 - DNA, 342 bp, Homo sapiens
ccatgatcagtcctcattgttctcggcaattttcttttcagagtagtggcgcttttcgagccgcttccagaatcagctcgtgattgcaccgaacaagcagcacgagatcaacccacctctccggccacgcatcacaagtgtgccagtctagcactagtccgccccgggtgtcactgtccagaggcatgtcacgggcctgcgcacagccctctgggtcctcttcgattggatccggtgctacgccacccgacatggactcaaggtagtctaataatgcgtcttcgtctacttcgaccgagtcccactccgcatcgcgcgatgcaacaaagtgggtaccgagct

SEQ ID NO: 689789 - DNA, 112 bp, Homo sapiens
atatggccaggattcattccttagcacatatcaccactaacattttcttatacagtagatcccaagcatgctgcatgggcagcaagcatggggggtaccgcagctcgcacat

SEQ ID NO: 689790 - DNA, 424 bp, Homo sapiens
agatgcattcataataataataataaaacactgaatcaagagaagaccacttaaaatggagaaaaaattgtgacattttgatttacccttttgctacctctattctccacatggtactattgaaaacagcagcccacatacccagtacaggatccttcgttccagaggaaacagagcagttctctgccttttcttaccagtctagatgctccctgaaggactgatgcaaagtgcttttctatattttgcctgactcggaagtcagtcagaacagaaaagtgttgggcatttctcaaaaacagtgtaaggcaaacaaacaggctgagccacttggggcacaagtttacaatggaagcaaaccatagtgtacaaaaacctgggaagatcttgtgagagtggttctttgggaaattagggcattcaa

SEQ ID NO: 689791 - DNA, 208 bp, Homo sapiens
gaaagaacaagcagaagacctccggaaacggagatgggggcagaaccagcgacacctcagccccctctgaagaaaagggcccgtgcagaccccatccgcgacagtgatgaggcgttaaagaaaagaagggaggttaaagtaagagacctgaggaattaaaaccacggccgttttaggtctgtacccagttaccaggcagatgcatccg

SEQ ID NO: 689792 - DNA, 312 bp, Homo sapiens
ggtcgacatacatactattggtactttgatatttcttgtacagtatataatatatagtttgaggactttgatattttatctccagtataagatatatagatttcgtactttgatattttatgtacagaatatagtttgagtactttgatattttatgtacactttattataaaagtttgggtactttcatattttacgtacagtatataatacatactttgggcactttgatgttttatgtacagtatataatacatactttgggttctttgatattttatgtacagaatataatacataatttggggactt

SEQ ID NO: 689793 - DNA, 968 bp, Homo sapiens
gctcagctcttaccagtgggggcccaagcctctctgccatggggaatggccgctccagctcgcccaccagcagcctcactcagcccattgagatgccaactctactcctctagaccccacagaggagaggccaactagtggggcctggcgcagcaggacaatcccctcctcaacaacctttagctaacgctctctggcaggcactcaggcggcctttctgtcctccccggcagcactttttcacaggcagaacaaccgctcctattctgacgctgtgacccggttctcactgcatgaacgaacgcttggcttgcacgacaagactcggactccagcaccaaccatgtgacctgtcagactttgagctgactctgaggagcagctgcaggctaagcacaggcctgcacgggaactccagagcacctgactggggaacgctgggccccaatgcgcgcagcgcacctgctgacgctgcccactgggcaaccagcacacacggaagcaggcccccaaggcgccggccttcggactgcccccctgcacaagttgcgccactcacgcgctgaacagatgtcacgccacgtgaacgaagccctgcaacgcccccctgccagcagcccttcctgcaggatgggctcatgccctcacccgtggcaccacatcttgcacccagtcgctccgcctgccgcctgcagccgcgcacgggacagctcagcgacccacgcagccacatcatcccaactgatacgcctgccgacccacacccccccaacggtcgaacccgcccccgcacccgcgccacacccgctgcaccgcgctttgccacccccccaagcaacactgccccgccttgccatgccgctcatcaacacccctttccacccacccacacgggcccacttcatgacgcacagcacccatgtacaatgtgcgcccacttatacacccctcctctccccccccccgtc

SEQ ID NO: 689794 - DNA, 1145 bp, Homo sapiens
  misc_feature (354)..(354): n is a, c, g, or t
  misc_feature (356)..(356): n is a, c, g, or t
gcgctgttcgcctctcctcccgggagtcttcagacctactcccagaagaggagggaagcacagtatgaagactgtggagactcaagcgttagctccgggacgtgctgtaccgttcaggagccatggacccaagctgccgagaccctatcgcttactccccagcggcttccgccgatgaagtaaaaatgcggactctgaactgatgccagcgcctcccgaaaggggggatccgacccggtttgtccccagtagtcctgatggcatggctgtcaagccatgctgatcctcagggagtcatagcagggagcgagtggaacccgagtatattcatcgtcgtgccagcatctccacgtngntaagtacagcagtattaggcttccgcgctagtcgaagtgttgacgtcgcttcgcacatctgatggcagcaaagcaacttgtctggatagaatagcagaggctctatcctgtcaagtaagaagctacaacgggagcctttctgaagaagaagcgaacgggccagagttggggtctggaaaagccatggaagatacctctggggaacccgctgcagaggacgagggagacaccggtaggaactacagcttctcccagctgcctcgatttctcagtggttcctggtcagagttcagcacccaagctgagaacttcttgaaaggctgtaagtgggctcctgacggttcctgcatcttgaccaatagtgctgataacatcttgcgaatttataacctggcccagagctgtaccatgagggggagcaggtggaatatgccgaaatggtcctgtccttgcgatggtggcaggtgatcccatctatgattactggctgggaaactccgatgttcctcacgccagccgagagcctctaaggtggccagcaggagccgggaaacccgatacaatctgggacgcgctcacggggagagacccgggggacgccgtaaggcgccaaaagaaccggggaagcacgaagtgagcacatgcgcgatgtaccacagaggggcccaaccactgtggagaaaccgcaggaaggggtaacacacagacggggggacaaaacagacagcgcccgcattgcaaacgcgccacgcgaatagacgtaacgaagaacgcagaaccatatcaagc

SEQ ID NO: 689795 - DNA, 109 bp, Homo sapiens
ggttcccatgctaagggttgagtcggagctgcagccaccggcctactccacagccaccgcaacgcgggatccgatcctcgtctgcaacctacaccacagctcacggcaa

SEQ ID NO: 689796 - DNA, 139 bp, Homo sapiens
ttggggcccccccttcccctttttttgtcccccaacttaaaaagaaagaaggcttttggtctccctgggaggggggggagccaaccagggttttcctgtaccctgttttgagaccagttgaataaaagggcccccctta

SEQ ID NO: 689797 - DNA, 301 bp, Homo sapiens
gatcatgacaatgtcaagtatttgaagaaaattcttgatgagttggagaaagtcttggatcaggttgtaacctttattttccaaaaaaaaaataaaggaaccccagcttttcatatgcagcatactggtggaagaacagctcacctggtgccaaagacaacagtggacttggcagagcttgctgccttgacagtgtatcaatagcagagctgatctggcacctgccagttgggtttatttcagcaaacccactttaaaaattttattagcaaataatgaataaataggtttggagcctttc

SEQ ID NO: 689798 - DNA, 1070 bp, Homo sapiens
  misc_feature (10)..(10): n is a, c, g, or t
  misc_feature (108)..(108): n is a, c, g, or t
  misc_feature (175)..(175): n is a, c, g, or t
  misc_feature (595)..(595): n is a, c, g, or t
tcgttgctgnggatagtgttatataacgtctagcgaagctcgaagccgagaaagagacgacaaactaaagtacagataacgtctgtaccaccattggtcgcttgatgnggtgctttccctaccagatgtaccgcggatttcgtcgcctcaccccgtgttatatgcgaaactactntattattggtaaccgttcacctttggagtgtaggtgacccagcatctacccagcacaagcggatcaccgagagctactcaccgatgtcaccacacataaattcgcgcgaatggtgcctttcacaatgtgccccatagactggatctaattggtgcacggcaagattcccacttgccctttctaacggcaaaccaggcgcttcccacatgggccatattaacccactgactcggtcagctggcaactccctgtttccgtcgtccacaacaaattggaatataccgctggcccccctggaccattatttgttcaacccggcgcagcacacaggaaaatgttaatcctgtccccacaacagtaggccaccactactatgtccgctgtgcggagcaccaccaagtcttcatattggcttgcttnccgccactgcactcgcccgcaaccaggataataattgtggcacgccgcgccagaaaaaatatatccaaccctgtgtcgcacacgtgtccaccaacattcacagagtccctcttcttgaagaacttccacacgcgtacatataactctctcttcgaacacagttaattaagtatccacttttgaaaccagcagtgatagccctcaccccttattcaatgcagagcccttgtatatttcaccaattgtgttgaaaacagaagactctttcggccaacaggtaatacttctatatgcgaacacttcaacctttttctaaggagtacccgtattaccaccaacgggctgtaaaaacacatcacctgtgcagaccacataccatgatgaataagagaaacctctctttcttgatgtttcaggcttctacacccgggaatccagggcccccagggttaaacactaatccccccacataaca

SEQ ID NO: 689799 - DNA, 409 bp, Homo sapiens
gaggacgggaggctcaggtggcctcatctgcaacccagaggaccggggaagagcagtggcggagacaatgggggggtgtctgtaggagagtaaatgtgtacactgccgagggggaggtggcagtcctgcagcttgtgccggagcatatgtgagggcaggagccggcccaggctgtggggaaagaaaacaaagggcctgctgagatttccgccagtaggagctacggaggaccgagcgagggagggaggcacggcgggagggagcaccggaggcaggcgtctcagaggtactatccctgccaggccctcgatcccctcgtcccagcaaacagccaggcagtggccgactcggccttcctctgcgctctgggggcatgacctccgaagagtcggggctccttcaccctgct

SEQ ID NO: 689800 - DNA, 663 bp, Homo sapiens
catttgtttacttgaaaaatccccctcgagggtgagagaacctctgagggggctgtattttctcctaagcttgagatagggggctgtggtccttcctttctcctgaggagaaagtccttgctctggtgacctgtaagttgcagaggagggtggagtgagagtgtcatgtattgggatagtcagggatccctgcctttggcctttcttcttcttcttcttcctcttccataggtggatcatgtatattttacttctaaaggagagaatgtcaaaaaggtctgcatttttttatattctatatattaaggaggccaatcctaaatggtctcaagaggaaagactgtctgtcattttcggaagtaggatactgtgaggaagacccaaaagagatatggatgcttcctcgctcaagaggcctgagcttggaccttttcctctctgcttggaatctggaccaccacctgggaccaaccttcagctgtggaacccttataaaagagggcaccgtggccctgattgttccacgaacctgaagggagcacagatgggcctaagggcctcggggaagcctggtactcttggccttactagtggaaaaccctggcttgtatcaagaaaacccagaagcaaggttggccttgagaatccccgggccctggtccc

SEQ ID NO: 689801 - DNA, 150 bp, Homo sapiens
gctatgtgtaggtcaagtattggcacagcctatttttgcagatagagattatccaccatttaatcgtgtagcgatggatggaatagcgatacgcatcgatgactggaatcgcggaacacgggaattccatattcgggacaccatttttgc

SEQ ID NO: 689802 - DNA, 927 bp, Homo sapiens
agcggagtgctccgcggcgtgtggagcgaggccttgttcccggcgttgagccgccgtcgcctgcgcctggcctcctcagcttcagacctccgtgcaaggccgcggccactcgggcgttaggaccttgtcctatggagtggagcagaacgggtgatactaaagatggtatcatttggtagaatgtttgtacaaccatggcgaggaagttagcagaagagctattgtttagagaaatgaaataggggtgaatattagaatagatatttggaaaagggttaagcaaactgtaatgagttagtaagattgactgaagcagaacatatggacagaacattcttagacatggagagagagtagtgccttgagaactgggccgcaggggggcaccattagagagtgctgcgtggcagatggacgacagcaggaatccaagtcatatagtcttcggtgcaccatggacaacgtgttaaaaagtgtgttaagagactagttggacggtgcttgtgacggtgtcccaaattggacacgtttaatgagggtattggaatggctatgtggaggagatttaaggttagcatggagtgtataaacgggtgacaggaagatggaattgattggttgtatggcctaattgcccaaccagatcaagtgaaagcaagggtggttccaggtggtggagaggacaggggtagaattcgcaaagtgtttcacataaggcgttaaagattgttagggcaatagtgataagaaaggacatgaacaagtgatgcagccacggaaaaattggttggttagggttggtaatcaccaatttcaaagccttgggaattttgggatttggtagagcttttcttgggttttggattgtcaacaatttgagaggagaagctttgggaaaagccttgtcgagaggagtagcttttggga

SEQ ID NO: 689803 - DNA, 450 bp, Homo sapiens
ggtagagcatgaatgacagcatattataccatcaagatgttcttagagcagtgtatggatggatcgattgtactgccatcagttgtgactgacgttgtattcaaggagaaagagaaacttgtttagaaagcactttgaaagttttttgagtacgggggtgccctgtatcaccccgttatggctggactttctccttcagaattaccaaagttggcatcagtggcaaattattgggttcagagcctttatcagacatattctgggttcgaggctcctcatataatacatggtgcgaacattatatttccactcattcagatggatgcatcgcgccaggcatccagtgcgtgtggggatagggacccttgaccattaacagtcctgaagaatgttgggatgacagagttacgacgtcccacatgaatgcaggtctcctccaatatgtgtaca

SEQ ID NO: 689804 - DNA, 554 bp, Homo sapiens
cccccggccgtaccctcaccccccggagtggggaacacttgaataggaggtccagaaagtacttccagcctttggattcctcattttccccttatttaaggaacctgagcgcccagaaggtagagactaagaaagggaagagagaaaacatcaaaccttcagtgtgcagatttcaggtgtagccttatttagtgagttcaggacagtgaaaaataatgagtggaattacagtttataagtagttccagctgcatgatagcttgtttccttgtatgatgccattcttggatattaagaatatagtagtttaaaacaacaaaagaagtgaagattttatttggccaccatttgttacttcaggcaataccatttcttagattttttttttcccaggttaatgatttcctggtaacagggttgcttactttaattaatttttttggctgtttctatcataactttatgcatatgtgtttgccatcaattctaggctttcccatttcacaactatttcatgttaaattctaatctagtacccaaggctgaaacattta

SEQ ID NO: 689805 - DNA, 110 bp, Homo sapiens
tggaccagtatgacagcacagaggaggtggtcagcacagaggagggtgacgttagcattacccccaacctcattttagtcgcctaaacattgcctggcctcctctgtgct

SEQ ID NO: 689806 - DNA, 814 bp, Homo sapiens
agcgggactcggggtccagagctatcagggcgtctgcggcgctccagagagcctgcgggtgagtgagcgctccgccggacttcccggggtcagctcgtcgagggtctaagggccagtggtgggggccgcctacccgcggagcgacgatgcggacatggaaccccagtttcggcaactggcagtgcttgtggcctgacccgtacgagaccatgatagtgatccaccctctcccttcgacccatccactaaggctgtccgtggtatagatcagggaagggactgggttggtcacgtaggtcatctagggtaggcgtatactggcgcgtagcgcatggatccgatggcgtcaattgtaacgcccagactgttgggtcacagaccttggaggaggagggggtagaatgcttctagagatctgggaactctagtgtggtccgatctagagacctggtctgctgcacgggccaccctgcgggcatcgaatgccaaggccactgaccggggttgaacgctctaagaggctgaaggctgcttcttgggatggcccaagctggggccctaacaaggcctctgtccacagccccgagcctgaagatgagggggagccggggcggtcgggactggagcttgaaccagaagagcctcccggctggcgggaactcgtccccccagacaccctgcacagctgcccaagagccaggtgaagcggcaggaggtcatcagcgagctgctggtgacagaggcggccacgtgcgcatgctgcgggtgctgcacgaactcttcttccagccatggcagaatgcctgttcttccc

SEQ ID NO: 689807 - DNA, 521 bp, Homo sapiens
ctgcagccagctcagccccagctggttcagcagaggcaggatgcagcacgctcatcttcagatctccagcggaggttgaggggatcgtcagtagagatgctgcaggatgtgattgacgtcataaaaaggagtgaaagctgggccttgaagaagcccaaatctgtttcccagaaactaaagagtgtattccgagtgcccgatctgagtgggatgctgccagttcttaaaaagctgacagatgtccagtactactgggtggacgtgatgctgaatccaggcagtgccccttcgaatgttgctatttttgtggatcagagacaagtgaaaactgtacgcccctgcccctttaagaattcaaatccatgtgatttttctgcttttggggtcttcggctgcccatatttctcttcggggaaatattactgggaagtaaatgtgtttggaaaaattgcctggatcctggggggacccagtaaaataagtagtctgaataaaaggaaaagctctgggtttgcttttta

SEQ ID NO: 689808 - DNA, 236 bp, Homo sapiens
tccagtacccgagcatgattgaatgccttgcagggtcgacgtgtattcactactgcgctgcatgcctccctggactaagtatccgtcgacacgtgagcaaccgtgctgacctccaaatatcgttaagctggagcctggtcgacgtgtattcaccactgcggtgcatgcctccctgtacaagttccgtcgacacgtgagcaccgtgctgacctccaaatatcgttaagctggagcct

SEQ ID NO: 689809 - DNA, 1888 bp, Homo sapiens
  misc_feature (73)..(73): n is a, c, g, or t
ggctaccggtgacggtggaagggcgtgcgtcaggtttcagttcagcatgggatctgtgaaagtacctcgagtnacacctctccaagcaaatgcgcgcagctggaggcgactgtgggtgctcgaggtgttggataggcgcgacgggctggagagtggcagcatctctgaacagtgtgagtcatgccgggggcgcagagttggcgcaaagcggttgatgcgtatggccctcaggatgcaagccttagagaagcctactgtctccagggtcagtgtcacgcatcgcctgttggtgacaggtgtctcggaactcgcagtgatagcaatctatgcgcctgtcgagggaccgatgcacagtgcaaggaaatcatggtcacatgtcgcagcataggaaaccatcgtaagccagactgcagggaaggcttgactggtgagagaagccataggcatcgctccaaggtctcatagtcaccgagtgccccgaaaacttgggtctcgccccagaattggagacacggcaattggggcgtggcacggcgccgtagccagttccgccatgctacataagaagtcaagtccccatgggatttgtgtgcgcatgggatactcgcggagaccttgtgccacaagagaataagcgtcagatcgtgggactctcctggaggacacctcgataggtgaatacccgagggcggggtgggggaatccataaagcccactcaagagggaaacagggcgtaaagaccattgaggtacgcagcaaggacatgtctgaaggttccggtgcgttacaacacaggcacattgggggaaacaccagaaggaggttccaaacgaggcattgcttcgtgtggtcctcgcaccacaaggggaagaggcaccgcccaaccatacatgtggacgtcgagccgggggaacatgtgatcaccaaggggaagggggaacgagccttatggttaacggcaaaggaatacacggttgaacggaattgcacctcgcctttgctggaagccaaagggcaacttgccggtctgggaacagcaaaaggtttaacccattgtcccaaagcgagtcgccttgcggcattcggcccggggctgtggggcatggggacgcgaacaaggggacatggagcgggaagcagcaggttgcacaggaaggagccctgtggcgaagagagagactaccgaactgtgtgtcgcctcggtagacaaccgggagggcacttcgcacaaaggacgcggagactagcgtaggaaggtataggaggtgcggagatagagacacggagcatccgcgtgggaacccatagtggggccccgaagcggattgctctgggcgtgggtgagattgccacgtgtgaaattgacagcatgggaagcgaacgcacccgcacagacagcctccgcagggaacaatcgacacgctgtgggacccctgcggagacttgagaacaactccaacggactacaaacggagaaacggacccagggagacgcagactcgaaaagacgaagtcaatacgcgtaaacgccaagggacaccacccatggtgccatacaacgtgtaaaaataaacacaggagagctaacatatgcaatatgactaaatacaaggaaaccaaggaggcagaaaaggaaaaacaccaacagccaaaccagggaagccaagacacaagccacacagtgtaacacgtgaacagcaacaacgaagaagtcgaaagaacaaagcaacaaaaaaaaaactaagatagccaaccacacagcacaacgacacacaaacatagacaaaacatagacctacgacgaacgcaacaaagagagagcagatcagaaacacaaaacaagaagcatacgcctcaatcgactgtattcgaccacatccaatcaac

SEQ ID NO: 689810 - DNA, 143 bp, Homo sapiens
cctggtttagtcgtggctgccaaagtgctgggattacacggcgtgagcatgatacccagcctaatttttatatttatgtagtaggcagagtctccctgtgttacccaggcgggtctcaaactcctgagctaagccacggtcaa

SEQ ID NO: 689811 - DNA, 234 bp, Homo sapiens
  misc_feature (185)..(185): n is a, c, g, or t
gactgtctgaccagtgttgaatgcaattctcctgtctcagccttcctgagcagctgggaccacaatgccctgtgctaattttatgtatttttatgttggagacgtgggctcaccgatatatggtcatggctgtgtctctgaactacctgacctcagtgtgatctagcctgcctcaagattcccanaaatgatgggattacatggtgtgcagccacctgaccccatgcatttttt

SEQ ID NO: 689812 - DNA, 413 bp, Homo sapiens
gctcggtccactcttgtcctgggcaattagagctggtgctgtccgcccttcagtccccacaggaggccctccatacccccgatgtccccggtatggtgctggtcgatggtgaactatgatgccttccgatggccaggaggttatccgtgggaaagctcgtcaatagtgatggttcgtgtgagacccaatggtcattgtggaatatcgggacctggatgccccagacgatgttgatttcttttgagccgtcccccgttcctcagtcctggagcatccatacttgtactaccttgtcctatgaagctcttattgcccaggctggagtagctcttattgcccaggctggagtagctcttattgcccaggctggagtagctcttattgcccaggctggagtagctcttattgcccag

SEQ ID NO: 689813 - DNA, 1215 bp, Homo sapiens
gcatctttgcgacgttgccctacgtcgcgtgcaaccgccgtcagagacctctcaccgaccagtgtctaacgcccccactaggtgaacgtccgcgagactgactcttacatatctaacacgcaagccaagcgtagttggctacacgaccaatggcctggtaccacctagtattcccttgggagccgacagtgattgacgcagtgcctgcggacctattatgcaattgcagccctagggctcgagtacgagcaaggcccgcagttaggacatattggggcactcgaatacgtgttgagcgcagtgtgtccacccaaaggcattgcaccccgaagtactatataggaacgcaccgtatcgcagcaatcgagacatcgcattcagtcgtctggtgcacagtgcggaacctagtagagattccgttacatatggacacggtatctcccctgcgcgtcggggaaacttactcacttgcaagtgacacggttagcacggcaagaaccgcatcttcccgtatatgattgccagcaggcaatgccgactgtgtagagccatgtagcctatcgtgagcctcaatttcgcatgcttactaggacacgcggatatgccttgggtgagtcctcctaagagcgactccagaaagtgactcttagtagaatgcctgattaccattgcgaaactcctagtcgaaaggggacattcgaggaccttggcaaagaaggggatgcgtccgcatgaaaggcacaggtggcaggcccattctccattctagacacacttccagtcggatcgcgtggacacttatactttgccttcacctattcggggcacccaaaaggttgtttgtaagcggcacgtagagatcgacctccgcatggtgtggggcgttgggtaaccattaaccccattacgaaataaccttacttcccctcgacttataagtgggtttgggcgcgtatgccggaacaccgtttcgcggttgtgcaaaggctacagaggggacatattggttatggaggactaggaggaagctaggcaccttggacgccgaccatagacaaatattcccctttaaattagcaaaggcgcgtcgcaaattggggcaaacagagaaaccccgcggttgggcgcgggatacacattatgccacgtgttggtttcgaacctacgcaagcagttcgatagccaaaaacgttaagccattgacacatacaggaa

SEQ ID NO: 689814 - DNA, 887 bp, Homo sapiens
gaaggatctggtgcccgcgctgattgctagtggagtggaacacagacgtgctcatggagggcgtgaagactgaggtggaggacacactgaccccacccccactcggatgctggctcacctttccagagacagcccctatgtcccttgcgcagccagggtgcatgttggccagctgtgtgtgcagtgtgcatgtgactctggagcctgactatgcccagtctttcgaggacagcaaggcaaagcccagagccagcggcctgtctctgcacagcctgggtgcattgctggaacctagctcccaggtccaatggcacctttgtgacacaggctcatggtcgtatacctcttgcacttgtatccttggcaaaacacacgcatattgggcgcatccacttgccttggtgaggcacctgggtggggcatttcacccaagagccaccctccaggataccacaacgcagactgttcataacccaattaagcacccgttgtgaggcgtgcaaaaccagcttgccttcgggtggcaccccggaagaaaaggcgacgaccgacttggcccacttgcggccttgggagccctcgaaggatggtctttgactttgccgcccccccaaggttggttccttgggcattggcttccaaaatgcggggcttgtacttgtggttggctacagggtcgttccactttggtggtaggactatcataccgtattaggtactaacgtgttgaaggcccaaggtacgacgacgcgtggacgcccaacatgtcaagggccccacagtccctgagtggtaacgctaatcttgggaatgtggcccattcggccaaatggtcagagaggatttgaaccttggggaaacatttgggataccacgggaggaagaac

SEQ ID NO: 689815 - DNA, 109 bp, Homo sapiens
cgccgcgtgggggcggcggcggggtggagaagggtcggggcggcagggccggcggtggcggcgattctggacgcgagccgggcccttcccgtgatcgccccagctgcgg

SEQ ID NO: 689816 - DNA, 388 bp, Homo sapiens
atccgattaaagctcagtacaacaccatcacttaatcagtgcacacatgtcgaacagggttccctattttacgggtataatttatatcatattttgaaacaatctccacaatttatagaccaattccaagtatttccagaaatctatctatcttgaaccatttgacagtacactgcatgatctagatataccaacaaccccaaatacttaggtgaacattctctataaacacggacactcacaaatatgaccgtgatacgatcatcacaaaatggtacacttcagcactgatcaattattacctttctaatcctcaaacaacattccacatttgccaactcctttaataattatcctttaacaggctgggcgtgtgatagcttggagg

SEQ ID NO: 689817 - DNA, 450 bp, Homo sapiens
  misc_feature (80)..(81): n is a, c, g, or t
  misc_feature (98)..(98): n is a, c, g, or t
  misc_feature (164)..(164): n is a, c, g, or t
  misc_feature (252)..(252): n is a, c, g, or t
  misc_feature (265)..(266): n is a, c, g, or t
  misc_feature (279)..(279): n is a, c, g, or t
  misc_feature (287)..(287): n is a, c, g, or t
  misc_feature (289)..(289): n is a, c, g, or t
  misc_feature (330)..(331): n is a, c, g, or t
  misc_feature (360)..(360): n is a, c, g, or t
  misc_feature (375)..(375): n is a, c, g, or t
  misc_feature (403)..(403): n is a, c, g, or t
  misc_feature (422)..(422): n is a, c, g, or t
  misc_feature (424)..(424): n is a, c, g, or t
  misc_feature (437)..(437): n is a, c, g, or t
  misc_feature (443)..(444): n is a, c, g, or t
tccccatcagcggtgcctttattatcataaacattgggagcaaataaatggtacagaaagggcaaacaggcccagttccnncttcaggagaacttcantgaataaagcaagaaatcagggtgaggaagaaaaaggggagccatggcctgagcctggctggctgngccccataagtcaaccacacagcccagctgcagctgccttatcctccaaggcaccactggtccagctctcctaaccaggacacagatngcatcttggtatnntttcttgcctctntatgcttncncacgcctagtacagtgccttgcatgtagtaggtgctcaatnnatgaagaaccacgaggatacaagtgggcnctccaagaaaccatnaacagatgttactttacaaggaagaaanctcttgttttaaggagggnanttgctcaaggtcnacatanntagcaa

SEQ ID NO: 689818 - DNA, 514 bp, Homo sapiens
tccataatgtgtgccagatcccaccactgcactcaacctgggcacagagtgagactccatctaaaaaaaaaaaaaaaaatacaaaaaaattagccgggctggggggcatgaggctgaggcaggggaatggcccgaactaaggaggtggaggttgcagtgagccaagatggcaccacggcactccagccggggcgacagggcaagacgggtctcaaaaacaaaaaacctgggtagctcaaggtgtctcttaagtaatttaccgattaagttaaaaggctattatatcaagaattccggcataagtgaaatacaatttaactccaggtagagtcactgggggagtggtccaggacagagactccacaatgactaaaaatgatacccttcgtggctgggcacaggggctcaggcctgtaatcccagcacttgggaaggctgaggcgggcggatcacaaggtcaggagttcgagttccagccgggccaactgggtgaaacacggtctctaccaaaaat

SEQ ID NO: 689819 - DNA, 626 bp, Homo sapiens
  misc_feature (168)..(168): n is a, c, g, or t
ctagaccagttcttgcctctcccagaaccccaaagcatcatcccagcccttccatggctgtactgacacctatccctgggacaggctttacctttcttctctgagatgtcagatctttcccctacagacagggtggaaaagagagccggcgcagcgacacttcttctncaagcacgacacccgtacttcctttgacaaagagggtccctattgcctgctgcagggaatcggaaggcggaaggacctggagcgcctgtggcagcggcacaccttcctgcgctgggcaccctgtgagatagagttgcgccagcaggggcccctggaatcttcttaccaggctgatttcaggccaggcccaggactcagtggcctcccccagcacctcatccactttgtgcaggtccagccttcccataccaggaccacctaccagcagaacttctgctgcccatcccagggtggccactatggcagctacaaggtagggccccaggcgccggtcactgacgtactgcctgacctcccagggatcccaagacccaagctgctgcagcactaccttcatgctggggtctctgagtgtctaaactggtccagagcattaaacaaggacagctgaaaaaaaa

SEQ ID NO: 689820 - DNA, 444 bp, Homo sapiens
ttatcaaagttaatttaaaggggttggggcccttttattttggttttaaaggcttggatatttcaaggtaacccccaatttttgacccccataggtagaaggtaaagcttgtttgttcgttcaaagcatgaaagggaaacttatagggaaattcggcccagatagaatgccggcccgtcaaaccaaattgtttgcaaagggggggcaccagggcccttggcgggctgatttttaggtaggaaatgggggacccccccttttaatgaccaaagggccttttttaaaaactgggggcctctaaaaagcgggccagtttttttccccggggggcatttgtttttcctttaaaaagactgtttttgggccagtttttttgttgagggggggcccaaaagttacaggttggcccctttttagttgaaaaaaaaggggatttttttttta

SEQ ID NO: 689821 - DNA, 1544 bp, Homo sapiens
  misc_feature (486)..(486): n is a, c, g, or t
  misc_feature (1057)..(1057): n is a, c, g, or t
ggagagcgaagaaggaacgctcgtgactctctctgtgaagacggctgtaggccaaagtgaaggctttaacaggtcacatgaaggcgagctgtagagtaggtgttccataggcagtagaaaggaataagatctctgcatcggtcaacccactcattcgcagggaccgaggagtgtaaagactaatcgtcggacttcccgcgtacgagcaagaccaggataatccatcgagaacgcattgctgcacaggacgaaacaatgctcgaggcacctacagctagtcattctaacgtggtcgcggctcgagcagcatgatgatcgtgtgcactgaacgaaaaactcagaacgaccagaccaagggccagcttcgttggtatccagttccgttcgagagtggttgtaataggaccgaagacaatacgccaacccaggacttaaacagcaacggcgtaagtagaaaggcagaggactggggtagtggtatcactntggatttggtcgtgccaagggggttccaaggacgctcccttgaaagtttccgtaacacatgaacatgggactgtatcgacacgtaaatggcgtggcaggtagtggttctcccgaagcgttggaccgtacgcgtgtatgtgtactcgacatgggcgtattcgcagaagtgcattgtgggcacacaacgcaacacaccctcgggggacgtccacgtactagaagaggcatgaacggatgcaaaaaagaggctggacactgtaaaactctacgtttgaaacgtgagtacatgaatcagtaaattactttaagtgattcagtgtgtaatgcgacctcaaagttgaggaaaaaacaaagaggccgaggaaaaggaaaaaagaaacacgtgcttgggggaagggcaaaattgctaaaaaatagttcgggaggaggataagttgaagaaacaagagaaaggggtggcgcttctaggaggaaaaatcgctgcgaccggaggaaaagttggtgccccatgaagatattccatcgtaatgctcctcccccacagttgttaaaccacggcaacgcctgggtnttttcaagttgtttgttcgtccctttcccaaacagtgagctggtggggtattacacagaaacttctgtgctgcacagcgggaggaaatcttcttccaccagcataggtgaaataagttgtagtgaaagtaatccgcggcagcagatgttgagctgtggtctaccaaaacatgaaaaggggccccaggggtggataaaaaagcggccgttgcccatgttgtaacttgataatacggatgcgtgcgggaaaacaacacttagtgtgacacaccaccacgaagtctttttcgttttgtaggcacgtacccaacaaaaggtgtggtgggtaataacatcctcctgcaccgccagaggttcctacccccctctataattgagagggagtcacgcttcgagcacaaagttataaacgttcatcatcaagcgagatttacaaaagcccccaccagcggtgtgttattacaacgcccgttctgggacaatgtata

SEQ ID NO: 689822 - DNA, 461 bp, Homo sapiens
  misc_feature (10)..(10): n is a, c, g, or t
  misc_feature (213)..(213): n is a, c, g, or t
  misc_feature (229)..(229): n is a, c, g, or t
  misc_feature (394)..(394): n is a, c, g, or t
cccaccacantgcacagacccctccacattatgccacacacggcctagacgttgtgtttcctcagccattttccctctgctgccccagtttactctgtccaaaaccctaaggttcttctctcacttgaacacagacgaccttgcttgggtgatgagacatcccctttatttcttcctctaccgccggccaccccctgtcactctacaagcagntcagccgcagcactgntggagagctctctctttatgcacaaatctcatttcaccacgcgcttccagcagtttcacctgcggctaacattcaccagcatttctgttaggatatttagatggaggttttattttcacacttggattcttgctctgtaccaatatttgcctccttttttgtgantgaactgggtttttctgacatgcccaccctcccactcaccgtatttcttccttggtcccttctctcc

SEQ ID NO: 689823 - DNA, 212 bp, Homo sapiens
cgactggtacgagtagatatgatatgacgcggtctcattttgttgggtttcggaactgagtgcctgatttagagggacgggcggggcattcgtatatggcccctagaagtgacattcttgtgaccgggccagacggaccagaacgaaagcatttgcccagaatgttttccttaattccagaacgaaagtcggaagttcgaagacgatccgat

SEQ ID NO: 689824 - DNA, 1542 bp, Homo sapiens
gactggcaagaaaatgatcgagagtctcctctggtatcatgcctagctaacagtgtgggatgagatagagagggtagatcaagcgtcatgatctcccgttgtgggaccgggttccgaacggagtaagtcaagcaagccgttcagcaccttcagcaaccacgcatgagcatgagtaggtaactaacctgtgtagctttgtttcaaccctccaattcctcttggaaaattcatattcgattcttagttcaactaattatgtagtttataccactgggagtggaaggtaacaaaaggtagttcaagtgcaccatgacctctctcgtggcagggtgccgtggtaacgttaacttagacgtgagctgatggatgaccgcagtcgaaaaagcttgggcacattccagactatgatgtgacagagattccatcaacttggaatcatgacacataggcacatgaaagacagagagacagctgccagtcggacgacactgtgctgtacttggcggcgcggcgaagacaatcaacagtggagctgtgggcacctggggcgcattttgaggtgcaatagcgttgttggaccgatagaagcggcccccctatgttttcgtggcgcaaccccgggggcagacagaggccctgggcattgtgcccctccttcaatgattccgggaaggggcaagaaggaaaggagttgcaaggacagaaaggcctcggcgagcgctacgcacggggtgataagagcccgtacaccgtgtggaaatagaaaacggaatggaacctatccgaagaaaagcagtccaaggcagagcctgggccaggcaaagaggaaagcccctttacaaacacaaaggcccaggactggaatggaggagccggggccttcacaaaggagaaaggacacgcaaacaggaaaatggccttagaagtggaccctgggcattacgggcagacgagccaccaacggaaacaggcgccccttggagaggcccaaagagcacaagcacttggacaaaccggcaagggctacgcaaaacggccatggcacaacaaggaaaaaggcgcccaaaccgaatagcgccacgctggtttgccacacaagcaaggagaagacacggcctggggcgtaataccttccaccagaacgacacaggccaaacacaaggcaacaagggcagaggaacgccgatgccaccttccaagagccccaagaacaacaggcttcagagcgaaaacgttaggccaacgcaacaaacaataaggaaacaaaagtggccaacgccacaggagatggtactagctaaaggaacccaagaaggaagaaaaggtctgacgaaaagcgccccaggaaagggagacatcctacaaccaggcggccaacggcccccacataccataggacacaaaccatgggcaggcaagggagatcaaggaagagacaggtgcgcgatgagagctacagagggaaagaaacgcgcgatcggacttccccccggaagcagagtcatggcgagtgagcgggccgcaaagcaacaaacaaccagg

SEQ ID NO: 689825 - DNA, 190 bp, Homo sapiens
ccaagtagattaagacacacacacacacacacacacattataaaaaaagataggtaataatatactgctgaggcttttatatttaacaaggtcagcccatttttaaggccttcaagataccgcgctgtatctaactgtttacagagaaataccacatggttttttgataatgagaaatttaaagttgaaa

SEQ ID NO: 689826 - DNA, 147 bp, Homo sapiens
atgtcggcaggctggtctcgaactctgacctcaggtgatctgtctgcctcagcctctcaagtgctgggattacaggtttgagtcaccgtgcccagtctatacttcatatttcgtgataagcaatcaactagtacaacctgccggtgg

SEQ ID NO: 689827 - DNA, 111 bp, Homo sapiens
ccttatatacacctcactaacactctcccctgtttgcattttacatgtataagaaaagcaccacctccatgagaattcacgtgtggtatagagtggtatcaggggtggtat

SEQ ID NO: 689828 - DNA, 391 bp, Homo sapiens
ctattccagggcccagttgcagacattacgcaaaggacataccaccctggggttagttgagtggcctgaggccgggacagcagtgaccgctgctcactgtcatcgagatccacagctggctggagctgggcctgaagactccccacctgttctacacccctaggtaacaggtggataagtcacaactgtaactgtgacagtataccagaagggctaacaggtcttcaaaaaccctgactagaacaactttagcccaacccctgtgccagcctgccaggtggtgcaccctgtggacatccctgttggtccctgaaccaatcctgccacctgaggtgtatactacttggggatccgtgcacgttaacgattactaggactatgcagaaaccag

SEQ ID NO: 689829 - DNA, 409 bp, Homo sapiens
  misc_feature (1)..(1): n is a, c, g, or t
ngggctgtaggaattcggcacgagtttttgggatttgctcctagagcccggttcatagagggtgcttctgagttatttgtcgttcgtctccctcgttgttctgaatgttcagtttgtgtatgctggggaaatgagcacagtatgtaggtgatgtgtctggtgaatatttgtggtaatagaacatatggtaaacgtagtgtgacccgacaatctctgagcccctgtgagaaggctttataaaattgtgggagtattaaataggggggtttatagtttcataaagaaagctcatcgagagtaaggaccattgtgaatctgagtggttgtattacgtgtagagaactgtgaaatgtgtgtataaaatatttggaagagtggaaaagaggtggaaagtgggggggggtgaggc

SEQ ID NO: 689830 - DNA, 213 bp, Homo sapiens
ttaaataacctgattggggagggcggtaagggacggtaaggtgagagcctgtttcaccaggaaccttcgcctggatctaaacaggatttgctttcagattgccggaaatcctgcggtgaattagaggcctgccccgctagtcatgaggtgacccagtgactgctacaaacgctcctcctgtgcatcctggacttggtacacccgccttcccca

SEQ ID NO: 689831 - DNA, 901 bp, Homo sapiens
atttttttttgtttgtttgtttgtttgtaaacacacacactaatttgagaggacccgttagggttgtctgagcccagccaccttgagttttttagtactgtgtttgtcaggctcttcccaggcctcaggtttttgtcttttgtgctgtgtggggatgcattgctgcctgttattttattgattcttttgtgccggtggtttctgagcatttcaccttcaccatgtgttttacaaagaaactggtttggtattattagacatttttcaggcacgttgcttgtgcaccaacccttgcgttggcttctgtgttctggtgtttagcttgttcccggtgtgttgcacacttaattctcgtgtttacaagtttgttctattggcttgtttcttactttgttaagattagtttttcttattttcctttcagttaattgttgttccacagttacccgtgttatttctcgagtttccatttattacttgaagttacttcattgttttataattagttgccttcttccaaaggccttcacctttggacagaggttcaatcctttgatgctccagcacaggttgacgttcacttaatttgtcacttttccagttggtttttctctattaaggaagacatttttctaattggcttttccatgggctgtgagactgtgtgaagccgtttgtgtggtctccatgtaggtgctgtgttcccggcaccgccttgctctgaacatggtaattccaggtgctgcgcttggcaaaggggtctcgccaaaaggctgtgtgtgtgctgttgtgaacgtgtgtgtcctttgcatggttgagcttgagtgcttgtaaggcttagcggacttgggtgtttgttccatggtccaactggacctaattgggctcttaagcccataca

SEQ ID NO: 689832 - DNA, 738 bp, Homo sapiens
gtatctttcgctgtgacgagctacggcaagaatctgtatatcgcagactgtacacgatagaattccgtggttgctctcgatcttgcagtttccaacggagaccggatgcttcccaaccccacgatagcagatccggctgtatggcgatcaccatcggccctgtctcagatgtccgcaaggccataactactgctcagtgaacaagtggcggcgctgcacccacctatgcttggccaccccatgggagcaggacctgccgttgccctgacaacaccttgggagttagactgtagtcgatacggaaatgaagacaagagtgccttatttcctttccgaagtatttcactagcatagactctacttgaagtcaacttggtccagattgaaaagtgtcctctggcctgaggtggccactaggcccagacccagtccagcctgagcccctaacaactttgccctcactgttccccagaactatgcaccctggacttctctaatagaaaagtctccacccctacacaaggacagaaccctccaccctacccccaacctcagacagacttatacacccctgagtgaggattacatgcccatcccaggtgtcctaggaccttttgccaattactagccccccagtggtgaacagaactcccaaattttgagttgcacccttacacctgtggctttatgagctcagcctcgctttgaggtacccaccgtctgtcagtcacttgacta

SEQ ID NO: 689833 - DNA, 141 bp, Homo sapiens
ggacagtggatttcgtacttctgttgcactacagaattctaaagttttgaaaatgtgggaagatgtgacatagaccgtggtaggatcatggctttggcaaagaacttctctggccacaggactgcagaagcggacagagca

SEQ ID NO: 689834 - DNA, 308 bp, Homo sapiens
catagctagctactgtgtgataggcaaggtaaagttattatggaaactcaaatactataagatgtgtcaaggtatttctccagaattaattgcaacgcacgtgctgaaggattttaatcagcttctaaaattttcttctcaataaggcatatgttttgattacttagggaagattcctcatttttatttgccctttatgcatttaatccacatgataggacattaaaaattaatataaagaaaaatcgtgctcatactgtacatctgtttctgtgcttggaactacttgttaatagcttttatcgaag

SEQ ID NO: 689835 - DNA, 232 bp, Homo sapiens
  misc_feature (62)..(62): n is a, c, g, or t
  misc_feature (66)..(66): n is a, c, g, or t
  misc_feature (68)..(68): n is a, c, g, or t
  misc_feature (83)..(83): n is a, c, g, or t
  misc_feature (202)..(202): n is a, c, g, or t
agagaaagccaaaacacattatgatgccaagaagcagcagaaccaagagctgcaggagctgncggnanctgggagcagctcangaaggaaaacaaagagctgcgagctgaagctgaacggctgggcatgagctacagcaggctgggctgaagaccaaggaggctgaacagacctgccgccaccttactgcccaggtgcgcanctgggaggcacaggtaagaatttggctggc

SEQ ID NO: 689836 - DNA, 410 bp, Homo sapiens
  misc_feature (209)..(209): n is a, c, g, or t
cacgaggcgtcaactgcggcttgtgcctcggcgatggcgacgcgattggcatcgctaggatcgtcttggtaagcctgttcagccttcttcagggcgagctgcgcatccttttgcttgctgttcgcgatgtcacccacggtgcgcgctaccgcttcaccagccgcctgcgcggcggccatcatatcggcctgctcgctcaatacattagncaaatccgggttcttgcccactgtggagttcgtggaagcggtatcccggttcagcgtcgtcaaatcctgtttttgatttgccgtatcggtaattgtgatggtgccggccgaaaccccggcttgcgcgagaccttcctggctaccgctgtcactctgcgggatcatggggctgatgccaccagtgtttttccccgaagtcgg

SEQ ID NO: 689837 - DNA, 907 bp, Homo sapiens
cgcgggctaccaagtgtatacaaccgagtccgctgtgtgcgcaacgccgtggtaatgccgctggcggcgccattccactaggcgtcgtgaacagcaacccccttaaggtaaaggtgggcggtgaaacactggccggcaacccaacgggggggctcttaaccacagccagcccccacctggggcaacccccgccccccctggaacaaagcggggccctgtcagaaagaaagaccggggcccctgcacttccaccacaatctcgagagacccacagccccttggagctcgcacactcccgcgatcggcaacacaccttcaaaagggctaacaccccccaagcggtgttgggcacactccccccagatcgctgggccagggaagcccaccgtttttctgggcggatcacctcccgagacaggtgtgctcacagcacaaatatgcagcacactggttgtgcaccgcccccgattcaacaccctggctgcaacaaccctgcgcggggaaacatgcgaggaaaaacacaaacactgggccccccttcctggacccatggaaccacgacattcttgagggagaggaaccctctttatatgggcgaagtagacacaaaatttcacggagaatgtttaagaacaagccgatgtctcgagaccgcagtgcagtaaccccgcgcgcagctctctctggagtgcagacccccagtgggtgagaaggcaacaccacccggcgaacacagtaacaccctgtgggaacggcgctgcacctgttgcacatgattctatggcgccacacagtacgtagttgttctcctgtctccccccaaagcccaagtaatgtatgcgctcattatcaaacccatacaaacttgcttaaatttcctgggtaaatggggagggcgaacaaaaaa

SEQ ID NO: 689838 - DNA, 549 bp, Homo sapiens
gagcagatcagtcagtccgacggggataagaagcccatggtggacgccagtcacttcctgccggccggagacagtgtcgcgagaaaatgattttccttctgaagctcccatctccttgaatctctctcataacatctgcaatcccatgaccgtgaatagtctcccacaatacgcagagccttcctgtcccagccttcctgccgggcccacaggtgttgaagaagataaaggtctttactcacctggagacctgtggcccactccgccagtgtgtgtgacaagcagcttaaactgcaccctggagaacggcgtgccttgtgtgattcaggagtcggccccggttcataatagtttcattgatgggagtgcaacatgcgaaggccagttttccagcgcatactgtccattggaattgaacgattacaatgcctttccagaagaaaacatgaactatgccaatggcttcccctgtcctgcagatgttcagacagactttattgatcacaactctcagtctagctggaacaccccacccaaaatgactgctgc

SEQ ID NO: 689839 - DNA, 933 bp, Homo sapiens
  misc_feature (849)..(849): n is a, c, g, or t
tttctttctgagacagggtcttgtactgtttcccaggctagagtgcagtggcctgatcttggctcctggctgggcccaagtgatccaccgccctcagccttccaacgtattgggattacgggaatgagccactgcatttggctaagtttttgtttatttttcttctctattcttccaaacttatttgattagtaagataaagacattaactgctgttgacagtttccatttttaattagtaatcaggagcatttgttgtatttttcgtcttgataatcagaataagtgttaagtttcgtgcaataggatcaatagcgtttctgtattccaacatgttaatgctggctgtaagtttcacttacatatgttgctttttcgcacggttcgtccttctgttcatagactagaaatgtttaatgttattcttccatggttttacaagcgggacgcccagttgaaaggacgatccacgtcatttgaaaatcttacgtgggtatggactacactaatcatacttgaatcagtctactatgctcgacatcctaactctgtagaataattcatcaactatgtacgccttcttataagcaattcctatgaaccatttctatgatatctatacgaataagctaattatcctgtgccgcgagcgctggtggttcgcatctcgtcggtcccagctactcttgcgagatgtgtctagagggcgtgtaggtattatttctgcaggctacaggtagtgtacatggaaccagccatgcccggccgtagcgtgagacccctctctctatctgaaaaatgcaataaaagaaaattgccctggctgtgtgtggcacgtccctgtgtgtncccggtctgctacgggagctctagatgacgggaggtactcgcttgaccccgggagtacgacgtttggcatgctggcgcttgaga

SEQ ID NO: 689840 - DNA, 514 bp, Homo sapiens
attttccatttaaaagcttgttattgtggaaaagcttctctttttttttatttaaagcctggatacaacaaataaacggcggaaattcggaaaaaggtatgaatggcgcacttcgaatgttgcaccaggagcttgttcttagccttcataataatttggaaaacagggtgaccatacaacgcggcctttaattgattactataggcacgatgatacgatagagcaaatattcaagccttcaactaaaagactcatgtcgtaactttacccgttgacttagggggctcaaggcctggattatgcctttgaaaaccgaacggcgtttatacaaaacacgtggacgcattagcaactggtgagataactgacaaggtaacgatttccgctggctctttggggcaccaggccactaacaacctatgtatgagtcagagcagccatatgctgttcttcttttttcgcatgaaccaacgagagaacgctcataaaagcacccagagtgaagcgacaaccg

SEQ ID NO: 689841 - DNA, 117 bp, Homo sapiens
gggggggggatttttttcccggggggccctttttcccccccaaggggccttaagtccccccccccaggggaaatttttttggggtttgtggtttaaaaaaggagaaagcccggtcca

SEQ ID NO: 689842 - DNA, 1034 bp, Homo sapiens
gagccgtggcctgtgtcttcccgagtcctgctcgttggtcgcggcgtctttaagtggccgtcacgaacaccagtggtggaataattcgctaccattgtgagattgatactcgcttcgccgccgttgaagttgtcagtgaggtgcgacgcgcgatgattctacgggcgcccggatgagacgtggcctgtcggtggttgtgtccctctcgtctacctcctctatgggagactcttgcggtcccttggagagggcctcattggcaacgtccatgacacctccgctggggtgggcctgctagggccccgagccgtcccaagcgtggcgctttggtgggccctattgttggagcctccggtgtcggtcggggaatatgcctagtttcgtggatatttggaggacacccaggagtcggcgtacgggggcgcgcaccaggagatcggtgcaggctggtgcacaaactcccaaaaggctagggggggcccgggttttagacacgccgggcggcgcagacgaacgacggctcggccccggacaagcctggcggccgacgggccccctgttgtgaccaaagagcacgggtaatctacggagttggccgccaaatgagaggaggggcccccacaagccaaacgagaggcagggcagcaccatgggaggctgcacgccggatgactgacgattagacccgtggtagagtaaggttcaccaaccgccggggtcgggcaacagggcagcgtcggcaaaagaatgcgccatcacgtaggtgaccggcccccaagcgaagaaggaagggtcacgatggctcccgtgttggactaggtcctggcaactggtggaatccacgcctcgggtcgtcgtcggcacatggcaaggtgccgctgtgggctcacagcaccgacagacggctggagcgcgggcacccgctcgggccgggggggagcccagaaccacaatcaccgggcggcggggaccctcagggacgattcctggagagagatcccttgacagccggaggctactccaacaaacagggc

SEQ ID NO: 689843 - DNA, 374 bp, Homo sapiens
acactgcctcagaccagcccgtatggcttcctgtgacgcagagatcaggatgaacgcacctgcagaggatgtggacacagagaggtgacaccttcccccagggactcaggaagccatacgggctggtctgaggcagaacagcgtatagacagaggggtcagtagtgccgaccatggcatctccagacgtgacccatccccatggtttatgggccggacacgcaccccgctcagctgaggccccatcatttgtctctcttagtgtgtgtgcctatgctttgggggtagtgggtggaggagggagggtctgtgctaggcagttgacaggaaggggaatgggaccggaaggggcctaagagggggaagggttaggat

SEQ ID NO: 689844 - DNA, 123 bp, Homo sapiens
gtggctgtctagaggatcccatcaaatactaaaaaaaaatcccagtaatcacctatagtatgatcattgcttttggtttcttcatttgtttttgagacacagtctcactctgtcacccaggct

SEQ ID NO: 689845 - DNA, 184 bp, Homo sapiens
gcggccgcctactactactactactgctctaattcaagcttataacgatgtacggcgacatggacaaagagagaaactgtaaggaaagacaatcacaaacttcaacccaaatcaatctgactggtccagaaatgggggactgtgatagagaatctttaataaagtggcttttcccaccaaaaaa

SEQ ID NO: 689846 - DNA, 91 bp, Homo sapiens
acggccgtgtattactgtgcaaaaagcccatattactatgatagtagtggttattgggagaactggggccagggaaccctggtcaccgtct

SEQ ID NO: 689847 - DNA, 221 bp, Homo sapiens
ttcccctgacgcgacgacgtctgacgtgtacgacgtgccgtgactccacgacgcgggacgacggctggggccgttgggggcctggatggctggggcctggttaccttggtgccgtgccgacgctctctctggggggctgccgatcactcttgggggacgctggactcagactgcccccgtacggtgcctgacccaccccacgggggtacccggacgctcga

SEQ ID NO: 689848 - DNA, 184 bp, Homo sapiens
  misc_feature (125)..(125): n is a, c, g, or t
aggatccttaaggagagagaactgaggagcacgatgtaacagacagaagcgggggtgcggggacagggaccgtgacccagagcacctgggttcgcggggcgcagcaggccttggcctgcccactngatcgggcctcagagcaggcggcaggcgttgcccacgcctgtcagccatgaggtgtcaa

SEQ ID NO: 689849 - DNA, 838 bp, Homo sapiens
  misc_feature (698)..(698): n is a, c, g, or t
  misc_feature (809)..(809): n is a, c, g, or t
tgtgtaaaattggcaattaggaaattatgagacgagtgttttggataatagatggaatattaaaaatatgagaagataagttagtaagattatgaggtaagtagaaagagaatatatatgccccaaattgagaaattagatatatataaaaaatataaagaattagtatgaagtaatggtgggagtattaaaagataagttaattgtaaagattagagagtagaatggagtgaaaatagggagaatagaatatagtgagaagatgatggtatattagaggaaacaatggtagatagaagaagatagtaaggaagataaaataaaaatggaataaaaaaatagttgataataaataaaaaatatatgaagaataagattgaataaatttatgttagaaggtatatattataaataaatatagggaagttattataaattaagtgagattaagtttaagggtataagtaagatatatttatataattttatagaaaaattaggtaaatgataaaaatatgtggatttaaaagagaaagttaaagagagtatatgagtggaaaatattatataaaatgaatagaggcaaaaagagttaatatttaaaattatgataaatagaatatgagtaattaataatataatattgatatcagaataaatgaaataataatgagtaaaatgatataaatgagtaatantgtatgtagttatatagaatatatatatataggatttatataataggacgataataaggatttaatgacagcagaactatactctaatatggaagattaatagagtcaggntataatatagtatagacgattatgtgtct

SEQ ID NO: 689850 - DNA, 407 bp, Homo sapiens
cgactctacaggatcctctgctgtcttggaatctgacattagagggtagcgaaactttacaatgtgtggggcagcctggtgtggtggctcaggtctgtaatccagcactctgggaggccaagcgatggcggatcactcgagccctggagttcgagaccagcctgggcagcacgatgagaccccatctctacaaaaattagctggacacggtggtgcacacctgtggtcccaccactcaggaggctgaggtgggaggatcacccgagcctaggaggtcgagactgcagtgagccatgaccatgccactgagctccagcctgggagacagagtgagaccccgtctcaaaacagaaaaaaagtcaccaggcatggtggcacatgcctgtaattgcatcactttgggaagc

SEQ ID NO: 689851 - DNA, 539 bp, Homo sapiens
  misc_feature (44)..(44): n is a, c, g, or t
  misc_feature (500)..(500): n is a, c, g, or t
caggataagaccagtgttggcagcacagtagggtgactgtagtnaacaataatttatggtatatttcaaaataactaaaagagtggaattggaatgttctaacggaaagaactgattgatgtttgaggtgatggataccccagttaccctgatttgattgttacacattgtgtgcttttatcaaaatatcacatgtacttcataaaaatgtacaactattatgtattcataataattaaaaatgtaagaaattaaaaattcaacagcaggccagatgtagtggctcactcctgctgggaggccaaggtgggtggatccgttgaagccaggagtttgagatcagcctggccaacacagtgaaaccccatctctactaaaaatacaaaaattatccaggcacggtggcatgtatctgtaatcccagctactgggaaggctgaggcacgaaaaccactcaaacctgggaggtgcaagttgcagtggagctgcagtggcaccantgcattccagcctgggcaacagagcaagacactgtctca

SEQ ID NO: 689852 - DNA, 225 bp, Homo sapiens
cagtcgtcttggaacctgcgtgtttgcctcacggttcatcggacaatatctatcttgtgttgcgtaacagtggagctcacttcattctctagcctcgtcttatgttattctggacttagaccggaattactatgccctttcatgaccttcttcacttatatcgtgcgtcttacatagctcttctcctgggttgtcacaacagatcttgacttgttgtctcgtgat

SEQ ID NO: 689853 - DNA, 332 bp, Homo sapiens
tgagtaagtcaatcttcgtgtcagtgctttcattgatgcttattcattctttgaattctcgcctctccccttatacaatctagagccctaatattctctatgtcctggagctcgtcgcaccttacccaaaacacagctgaatattcaatgacttcttctggagtcatgccttctacttctctagctatatttacaatatcatcacgagcccacttctcattagcttcgataaactggttaaaatctctcttattccaattggtacatccctatgttagaagcttctctttatcctctaactcttcatcattaagggattcagcttcatcaat

SEQ ID NO: 689854 - DNA, 183 bp, Homo sapiens
cctccagcaacatctggcccagctgatcatgttctccgaacgctttactctgctcccaggatgctgtgtggtgtggtgttgatcatgttctccgaacgctttactctgctcccaggatgctgtgtgatcgcggtgctgatcatgttctctgagcactttattctgctcccaggatgctgtgcg

SEQ ID NO: 689855 - DNA, 110 bp, Homo sapiens
  misc_feature (58)..(58): n is a, c, g, or t
gcagttcagggtagacttcttggcaatactgcaggatggcttccttggtatcaatgcnggtttgggtccctgatggatctgaatcccacttcccattctgggaagtataa

SEQ ID NO: 689856 - DNA, 240 bp, Homo sapiens
aggagaactgtagaaagaaatgagaaaatcagttcgtggattgcattgtggatcaaatctgagcgttctcaacttggttattgtacacaaaaggagagaaggatattccatggactgactgatactacagtgactcgcagactgggccccaaaagagctagcagaatcacgcacacttttcaatctctctaaagacgattgatgtccggcagtatgttagtaagaaagcccttaaataaa

SEQ ID NO: 689857 - DNA, 114 bp, Homo sapiens
cgaggacagctgaactttgaacctctaacattggttccaattcagaccaaaatgatcgatgtggattctcttacagacaaagagtgcgactggctcaacaattaccaccacggg

SEQ ID NO: 689858 - DNA, 828 bp, Homo sapiens
gagatcttgtccagcagctgctggctgccagagaggcgccttcaggagacccagcgcttacagccaatagcccaccatgtcccaggctggtgctcgaggaagcccctatcatgaaggaagcgcccccctgtgatggaggaggacctgaagggggtcctaggaaacctgaccaagaaccaggaaatcagagtcataaggacctaccaggtcatgcgagacgtgtgagcaagctggctcggcgccccgtcggttgttcagttccgcatccgcgctgaggtaccgagactgtctttgatgaagtccgaagccggacctcaccaggagtgtcttcggctagacgaaaaggtgttgccgccactcccctttgctgccagaatggtcggtaatcatggagccttacccaggaactctgttttgatgcgcagaagcttgcatctcccctgctgtctctggggctgcacaaccttgccccgcacaagtccaggcggcttcagccaaggtctcctgcacccagtacctttggaagcacctgtgaaagatgggtgccctgtggggacccaaggttgagtccactgggtattactatgaagaccaacttgacaaagggtagctgactggatcagtgctccggaaaagcaattcctgacaattacgcgtgggggggcgcccaatacagaggagtatcttcggcatggaggggtcacactaaagaaaccgggtccgaattgggtgcgcgtgacacaaaaaaagaacccgcggggtacgggctcgtggaagaaacgagaggggctcggggcagaggggcccaaccgacaagggacatgtaac

SEQ ID NO: 689859 - DNA, 838 bp, Homo sapiens
agccgaaattccctacggagtgcttctttctcaccctgcatgctcaccacctctctattctgcctagttgccgtcgctatatccgcagactccgggctatccgggagctcaatagaactgtagaagatttgaaaaataatgaaagccaatggaaagattccccactggcaactagacaccgcgaaatgctgaagcgctgtaaaactcagcttaagaaactggtacggtgcaaggcctgtgctgatgctggcctacttgacgagagcttcctgagaagatgtctgaatttttatggccttctcattcagctgctgctccgcatcctggaccccgcatatcccgatataacactgcctttaaattcagatgtccccaaggtatttgcagcgttgcctgagttttatgtagaagatgttgcatatcccgatataacactgcctttaaattcagatgtccccaaggtatttgcagcgttgcctgagttttatgtagaagatgttgcagaatttttattttttattgtacaatactctccccaggcgctttatgagccctgtactcaggatatgtgatgttccttgtgtgatgttgtgcaacagaactacatccgaaacccatatttggtgggcaaactggtagaagtcatgtttatgaccaacctgctgttcagccacgaacccagaagtttctgaaatgattgaagaaccatcctctctccacaagttgtggtacttcctgatgaagtttatacgatgtggagcatacggaccacaggagtttatgacaagtcccaatccgtcattaaattgccatttaaaagcttggcaaactttccccg

SEQ ID NO: 689860 - DNA, 399 bp, Homo sapiens
tgcggattcctgtggggaaattcggtcagaagaccagcggaggatccctgtggggaaattcacaacgatgcggcatctgacttcctgactctgaaggccaaatgagatgcacctggccctcctctccccactccccagcatcaaagacagcatttccagcccaaacaccttcagagcagccctggcgagaagagaggagcaaggaactgactccaggtgccgcacttgagtctgtctaacccaacattcagaatcagacatccccgttgccttggggtcagtccccaccccaacctcaaaggggggcggtcaggatgtctgcaagtggtgctttgtgctccagcaggtgcacccggactccacgatgtctgcctaacttccaagcccagttttgcagcc

SEQ ID NO: 689861 - DNA, 600 bp, Homo sapiens
tcagaaaagaaaataactttccagttatcagaatataggtaccattgtcctctaatatttaagaacatgaaaaatgggactaaagatcagaaggttattttagtgagccaccacacctggccactttttcattttattaatggcatctttttaagagcaaaagatcttatcctgatgatgtctaatttattgaaaaaaaatttatggggctaatgctttatgtgtctaagaaatatttacctaccccaaagttgtgaagactttctttgatgttttgtcctaaaggactgacagttttagcttttacatttaagtctatgacccatttcaagtagacttttctgtgcagtgtgaggtcaagattgaggttcatttttctccatgtgattatttagttgttcaacaatattaaaagagtattctgttcccattgacttacctggcatctttgaccacatacatgtgggtctatttctggactctattctgttctgttgatctattttctaccctgacagcataccatactgcactgattattgtagctttataagtcaagaaattatgtagtcctcaactttgctctccttaaaaaaaaaa

SEQ ID NO: 689862 - DNA, 861 bp, Homo sapiens
gggcaggagaggttgtggtgctagttgctctaagccatccagtgccagtcctcgtctgctgcatgcagacacactgctctcgccagcgccatgactgagcagatgacccttcgtggcagccctcaatgggccacaacaggcatgggtaacgccagatcggctacttaccccagcaggttccctggacatgatcctctccgcctctcgagataagatcatcatcatgtggaaactgaccagggatgagatcaacgtatggaattgccatagcgtgctctgcagagggtcactgcccaacttgttacgtgatgtggtatatctcgctcagatggccagtttgcacctgctacaggctaccttgggcatggaactcctgacgacctactggcgatctcgacaacgaggcatccaccactgaggccgagttgatgggcccataccaaggcatgttgctgagctgtgggccttctcgctctgagcaaccaggcacgatggtactctggactctgcgagcattgaatgaccgatcatagctactggaatacccgtgggctgtgctgcgaaactacaactagtccaagcgcatgatgcagccactacagcagctggcgatgtctcagatgtcccgctgtctcgccgcatacacgcacggcaaccctagtcatacgtacttccttgtgcgctgggacaatgctaggtcacaggtcactggaaccctggcgtaaacctggcaacgcgtcgaagaaggcaaatcgacaatttgggtccaccacaggcgtaatcgttgacaccgagcgcgtgaactgggacttctaccaagaattgggacttccattctgctgccttaattggcagggcaag

SEQ ID NO: 689863 - DNA, 199 bp, Homo sapiens
tgcagccctctgatgttacagaatgagtcaattacatggaattctttcgaggattaaatatcagtgcagtgcgtttaccacgtgaacccatgtaatccatgagaggctgacaaggttttggttactgctgaactctgtagtgacctgcgtttccctgactcagatgcccttgtagttctcacattgtacagagtctcta

SEQ ID NO: 689864 - DNA, 622 bp, Homo sapiens
gccattgaagtacatagaggcccagattgtcagcaccggggcaggtgaaagccgaacgggcactgggcgactctgggccttgctgcggaaaaataactacaacgtgggcaaaggagatcctaagagagcgactaggcgcaatgtcatcatatgcattctttgagcaaactatgggggcaggagctttatgacgaagctcccacttgctgaagcaaattctaaaaagcatctaagaagcggtcctagaggcggaagaccacggctgctaacataaaaggaaaatttgaagatatggaataagcgagcaggggccgctatgaaagagacatgaaggcctatatccctgccataggggcgacaaaaaagagagtcagggagcccaatgcaaccatgaggcccggcttcggactttgtgctgttttgatacgagcaccgcccaaaaaataaaggaaaacattctggcctggccatggctgatgcccgcaacaaactggaagacacgtggaataacactgatggagatgaaaagcaggcttatttaaacaaggtttgtaactctggaagaaaaaaaacgaaagggatatttgggcgcaatcttgcgtaacgaaagcctggatctagg

SEQ ID NO: 689865 - DNA, 223 bp, Homo sapiens
  misc_feature (81)..(81): n is a, c, g, or t
  misc_feature (123)..(123): n is a, c, g, or t
cgtgaccacctgtgttccagtccagttggcatcattttcagcacagcatgcaactcacttcccagcatcagccatttcaanaccagccattcagccattttcgcaggggccgcaaatcacatncatcacgtccatgtcagggcatcccacgcgtgcaggacacaacagcttccaagccaggcacctctcaccaccatcaaagccattcccatcaggccacatt

SEQ ID NO: 689866 - DNA, 333 bp, Homo sapiens
atcctccccccttgtagctggggctacagctcccagcccccctggctaaaattttttttttgtttagacggattttttatgttgccccggctggtttcaggctcctgggctcaaatggtcctcctgcctcagcttccaaaggccccggcccagttgtagctttgtcccctgccctcatgccccaccaaaggttttataccttttaatgaattgactttcataaattggttatgttggtgggccagtttttttagctggaaattgtaaattccccctgaaatgttttttcatgccgtttcccttaacttatactcccataaaggatggttttgg

SEQ ID NO: 689867 - DNA, 117 bp, Homo sapiens
atccaccattaaccttccctctacactatatcatactatcacaatactaataactactagactatcctagaaatcgctgtcgcctatataacaccaagccccagatcgaggcgggga

SEQ ID NO: 689868 - DNA, 329 bp, Homo sapiens
  misc_feature (164)..(164): n is a, c, g, or t
  misc_feature (192)..(192): n is a, c, g, or t
  misc_feature (322)..(322): n is a, c, g, or t
  misc_feature (326)..(326): n is a, c, g, or t
atggtcgttggggtggttgtcatgtgatgggtcccctccaggttactaaagggtgcatgtcccctgcttgaacactgaagggcaggtggtgggccatggccatggtccccagttgaggagcaggtgtccctgagaacccaaacttcccagagagtatgtgaganccaaccaatgaaaacagtcccatcgctnttacccggtaagtaaacagtcagaaaattagcatgaaaccagtttagcattgggaggaagctcagatctctaaagctgtcttgtccccgcccaggattgacctgtgtgtaagtcccaataaactcccctnctcntca

SEQ ID NO: 689869 - DNA, 848 bp, Homo sapiens
ggaatcactcagagggttcctgctgttggcggtgccttggtagcctactcgcgctcgcttcgtcgtttctagctgcgcgccagtgagcccgtgtcggagtcggcggtggactcgccgtgctgtgtcggtgcgggcgccgcgcatgtggttgtggtaggaccagggtcggcctcctggtgccctttctccttcctgttgactagtgctgctggctgggtgatcgcgtgagtcgccgggttgtctgtccatgtcttgcctcatacgtgccattgcccatcgtctcgtctcataccttgccgcgttcgttcagtcatttgacgtccgggttgctcctcttgtgcgaggtggcgccttgctacggatgcgtcacacgtcgctccgcgggaccctgccgacttgttcttgcacagtcgaccgcatcctggtgtgggggcgaggacctaccgtaccgacgacactctgaacggatagcgaccgccgttgagcctgggacgctaacttacgagacgacgagcaagacgttacatgaagttgtggaagtcacaacacgtggcgatgggatgtatggtagccactctcgtaggctattcacgtctcgtcgcacgtgggacttaccttgatcgtataaagtagacaacgcatatacatcagatagaactagtggacggagtgccatggggagctggtgccgactgtggtggtggcatcttgtaacaattgtgaatcagaactattgctaaaaccctcgcagagtccagggggaactatccccctggacgccttgtctagggggggttgcttcttctccgtgactgcatggagatcctcataggcccttaggggaaagg

SEQ ID NO: 689870 - DNA, 384 bp, Homo sapiens
gatcaggccaatgacactgtcccactactattcatgcgcaatgtctgtgacagccacgatgaagtggtctgcaccgaaaacctcacccccatggcagaagcacttgccctgtaattccaaggcaggcctctctgtaactgatgaaggacagatcgattgattccacaccagctaccactccacaggcagatgacatatccgccctgatttgcaaaaaatgcacgctgttctagcatctcctgggagctgaggcagaccctgtctgttgtctttgctgccttcatcacggtgcagggaacgccagagtggtccctcttccggatgttctcccgaaccctcacggcgccctgccccctggcttcagcgagccgagtctctgtggac

SEQ ID NO: 689871 - DNA, 331 bp, Homo sapiens
  misc_feature (72)..(72): n is a, c, g, or t
gcttagtactctttccctggctcttttatatcatgtttaatcactgctctgttttctcatctatgcggtaanttagcgggataaatggatttctaaaattttttgatttcgtgttctctccatcccaaacctcattgtggctgtattttagtctcctccattaaacttttcctagagctgccaacagctcagtaatgaatttcgagggctacttactgccaacccccattgcacctacatttgttctacaaaaccccctagatggccctccctctggtagctctgtgtgtctacaggtattgactggtgctgttcactctcatcttgggat

SEQ ID NO: 689872 - DNA, 199 bp, Homo sapiens
tgccagatcgcgccactgcattccagcctgggcaagcgagattccatctcaaaaaaaaaaaaaaaaaatagtgtgaaatgtgcgatgagggaaaagtgtttcagcacttgaaataccttgtaactatttcatttatataatattatgatgcacctgagatcatcaccatgcctgaaaattggggcacacattatggagg

SEQ ID NO: 689873 - DNA, 796 bp, Homo sapiens
gaatttgagagcacaattggttttaagctcccaaaccaccggatcacgccacaagagactgtgcgaagggtctgctaatcgagcatcatacattctgtccgagctggtgtcccctgaagcccccatccaagggcattcttctggtgatgggctccaagttccggtacagtgggaggaccctggcacagactcgccaggcacagcgccctgcattgatcgggctgcacccttctttgagcgttcttccagcaaacgttgtacagcatgtcccgcagccttgatggagccagcagttctgccgcccaaggctctgcgtcagccgagagaccacggaatgcgagggcctgacggtggatcaagcgggatgagtgatggctgatgtctggtggcggcaacggtccagagggctgagtgagggagaggtctaggattccaaccccgaatttgggatcttacagttcttagacaagccataagatgtcgttgcgtgatagcactcaggtcgcagcatcaatagagcgtccacaatgggaccctgagaggaggtcgcttggcaagtcagcatcttcatgccaccgggcatcgaagactggagaatctgagtaggcgcggggtctggccctacctctcgggggtcctaagcatttcctcgcaacggtgaaccctgtagagaggggaaagatcggcgtcaaatcttttgggccgtgacctgggaaagggattttgagcccacactaggaaaggagttgaagctggaggctcgaatgcagatctgatgtgctggggaggctggtac

SEQ ID NO: 689874 - DNA, 970 bp, Homo sapiens
ctggtcacaacctggccagacaggtccacaaaggatcgatgttcagggtggacctgtctggtcacaacctggccaatcctcacccgtttgcagttgtccccagcacggcgacagtggtgattgtggtgtgtgtcagcttcctggttttcatgatcatcctgggggtgtttcggatccgggctgcacatcagcgaacgatgcgggaccaggacacggggaaggagaatgagatggactgggatgactctgccttgaccatcaccgtcaaccccatggagacatatgaggaccagcacagcagtgaggaggaggaagaggaggaggaggaggaggagagcgaagatggggaggaagaggaagacatcaccagtgccgagtctgagagcagtgaggaggaggaaggaggccccggagacggccagaatgccacccgacagctggaatgggatgactccacactcagctactaaacccgcactcagcgcctgctctccagactctctcccagccccacgggtccacgatgtacaaaatcattttgaccagcaggtctgcagacccttcccccactgctcaaagtcctcccgtgcttggtgtgtgggaccaccggctccaccctccccgccatcacattggcagttttgctagaagctggcgctttctccccagggcaggggccccacagcaacctcagaaccccaagtgtgtcctggagttcctgtcggcaggagaggacaccaggcacctgggaactcagagaagcggacttgagcgactgtcaccgaggtgaaaaatactccacgcgcagtacccatttccttatttaaagtttaatttttccccccatcgcatgttaagggacacaggggttatgttataggccctttatatgacgaacaggtaggtctcggcacacccaaagacaaggcgaggagcacccccaaaggtggatggcacgatgccacaggta

SEQ ID NO: 689875 - DNA, 101 bp, Homo sapiens
ggaataatccttgaaattttgatttttggaaaaaaaagttttttttcttttgttgaaatcccctgttacccttgtttgtaacctgataccgggtgttttca

SEQ ID NO: 689876 - DNA, 1207 bp, Homo sapiens
agcggctctcttccgtcgccattgtaagatccagctccatacaacgctccgactggcgcgtgctgacgcgacccggactgcgcgccagtgaccccctgccgacagttccgctccacttacggaggatagtgaacgagtacagcataatatagaggaagttcgcaatgagggatcccacagactcaaacgtcgagtcacagaactcagacatgcgatgacggtaaaaactgtgagtaggaaggcgtatgacgctggtgagtacaacgctggaaaaaggaatctagaacaggaaggtacctttgatcgtccgacgtttgagcgagcgaaccggttggtcaagagcgtgcagcgaattctagagatcacaggagtccgacgtcagcttggtgaacgcatcagaggagcgagtttggggagtcccgtggctgtgttcaacacgactgcctgcctaggtccggtgttgaacttacaggtggtcttacggtgcaaaccttgagagataggcaatcagcgatagaacttgggaattgcgccaggaatttcgaatgaggcaattcccccacacaaaggggtcccaagaagtcctttcacctacacgggtgagccacgaaaccgtcccgaaacaaggattcctgtaggcgtggaactgtgagtcccgcgcatgtacgtgtcttgtacaccgaacaaagatgcacaagagcaaactaatgatgcgggagcctatcggcggagccaggcaattcgggagacagacttactttggacagccgtttcgcaccaatgggcattagccagaggagaaagccgaatatgcatacagcacaaggcaagggacctctggtgcgccttgatttagcttccagcacttaaatacctttggagtttggaacaaggaaggccacaagcgtttagagcaaacaccacccgtgcggtgtacaaggaaatgaggggccgacattaccccaatttcacaacggtttagggggttcctagggggcgaaacagcctggtttgaccagaacatttccaacaaagtgtgtttgggccgaacaaaacgtccccagcaagaaagataggggctcatttaataaacggggccaggcgcgacagcctatggcgaaaacccgaaatcctcagaagacgtacgcgctttgcggaacgcagcctgtggttgtcccaggcgaccggccgttgtgcgttgcgacag

SEQ ID NO: 689877 - DNA, 717 bp, Homo sapiens
agacaacaaaaagaagagaaaaaaaaaagaacctccttggaaaaattaataggcttctgcgtaagtggattctctatgctaaatgctctctcgtgctgtctgtctgtctgcccatgtcccccagcccacgcacggtgcgtactctgatgtcccaaattgtctccaactccctcagcgaggtagaggctcaggctggagagaggaggcgataaagtatcccctttgctccagtagaggtccctagagctctttcgtcgtcgaggcacctttgtagaactatgaatgggaggcatgctaaacccagaccctcatccagtggcaaccccggataaagaaaagcttgaagcccgcaacccgccagggaaggctcactgaatacccaccgtggacaagaagcatatgagacgaggtcgcgccatgtaaccccaaagacgcgtacgacacatcttgctcagaccccatggagagaacgaccacactggtagacaagcacggatggcatgccatgaccagagtatggacaacacacaaaatggacaattgacccacgggacatatccaacatagggcaagtagggacaccgaccaatgagggaacaaaacacagcagcaggaagtggactacgtcagaccatagcaggtatgacaaaaacccgagaacgggagaaacacaaaagagaagcaatcgagtaggacacaaagaaatacgagaaacaa

SEQ ID NO: 689878 - DNA, 348 bp, Homo sapiens
  misc_feature (9)..(9): n is a, c, g, or t
  misc_feature (81)..(81): n is a, c, g, or t
  misc_feature (95)..(95): n is a, c, g, or t
  misc_feature (109)..(109): n is a, c, g, or t
  misc_feature (135)..(135): n is a, c, g, or t
  misc_feature (212)..(213): n is a, c, g, or t
caggaggcnaacggatgctgcctgactgcaagttgccggcgacgatgcccttggtgtgggtccatgttcccatgccactgncattgcctctcaantggctgcacgcacngcaggtgcagcagcatgccccatgtnccgccaggaatggaagttcaaggagtgaggcccgacctggctctcgctggaggggcatcctgagactccttcctcannctggcccgatggctgctggggacagcgcccctgagctgcaacaaggtggaaacaagggctggagctgcgtttggccatcactatgttgacacttttatccaataagtgaaaactcattaaactactcaaatccca

SEQ ID NO: 689879 - DNA, 808 bp, Homo sapiens
agtggtggctcacgtctgtaatcctagcatttgggaggccaaggctggtagaccgcgagtcaggagttcgagaccagcctgaccaacatgtgtgaaaccccatctctactaaaaatacaaaaattagccaggcatggtggcgcatgcttgtaatcccagctacatgggaggctacggcaggagaatcgcttgaacccgggagatggaggttgcagtgagccgagatggcgtcactggcttccagcctggtgacagagcaagacccggtcccccaaaaaataaattaaattacattaaatatacacctacactaaggaaaaataccaccgttgagaaggggagggcactaggtgttgtgagcaagtatttggcaggaagaaggaagtaggagttcagtggtagacatagtgaattgtgcagtattgtgtatgacagcaaaaacacaagatttttagttttaaagacaaaaacagaagcgaagaagtaaacatggaaatcacataatgtacttatgggtagatcctaaaaattactacttataaaggccaggtggttgattgcctgtaaatccccagcaccttgtgggaggccaaggcacgggcggatcacttggagggccaggagttccagggccagcctgggttaatattagcaggaccccatttcttaaaaaatcttcagttcacacaaacacaattttgttaacctcttggtgaaacgttgcgcaaaaacaaggcggggaaaccttttggcgcaaaagatcagggacggaagctcctaaagaaggggggggcaaaagggtaaccag

SEQ ID NO: 689880 - DNA, 494 bp, Homo sapiens
atatatcggctaaatccctgaaacagtggtgagcaagtagtggcctgaaaaaatgaagtatgagagccaattccggctaacaagattagtagtctcaggccattctagaggtcaatagagtaattatatggtactgaatctcgagtcatcccattaaacctaatggaattaggtagattgcagtcaacagactggaacatatttggatctgtgtcatcacccaaatttcatgtcacatagtactccccagagttggaggtggggcctgatgggaggtgatgggatcatggaggtgaatcatcccctttggtgctgttcgtcatgatagtgagttatcatgtgatggggtagatgacagagtgtgtagcgcctcccctttacctctcttcctcctggtccagccatgcatgtaagacatggcctactgctgctgcactttctgacgtgattgaaagttgcctgaggccatacgcagaagcagaagcgacttgatg

SEQ ID NO: 689881 - DNA, 222 bp, Homo sapiens
tggcggtattaataaaaaccaatttattctctaccctttcaaagattaagctcaaaggggggactcatctgtggaagacagaaagagagccccttatagaggctttaaatagctttggattatttttccgaggtcacctttactttctggaactcatggcttcacaaaaaagctgattttaaaatatttctaatgaactgattaaggggggaaaaaaaaaag

SEQ ID NO: 689882 - DNA, 334 bp, Homo sapiens
  misc_feature (3)..(4): n is a, c, g, or t
  misc_feature (8)..(8): n is a, c, g, or t
  misc_feature (22)..(22): n is a, c, g, or t
  misc_feature (31)..(31): n is a, c, g, or t
  misc_feature (44)..(44): n is a, c, g, or t
  misc_feature (49)..(49): n is a, c, g, or t
  misc_feature (68)..(68): n is a, c, g, or t
  misc_feature (84)..(84): n is a, c, g, or t
  misc_feature (105)..(106): n is a, c, g, or t
  misc_feature (110)..(110): n is a, c, g, or t
  misc_feature (112)..(112): n is a, c, g, or t
  misc_feature (120)..(120): n is a, c, g, or t
  misc_feature (124)..(124): n is a, c, g, or t
  misc_feature (131)..(131): n is a, c, g, or t
  misc_feature (134)..(135): n is a, c, g, or t
  misc_feature (139)..(139): n is a, c, g, or t
  misc_feature (142)..(142): n is a, c, g, or t
  misc_feature (145)..(145): n is a, c, g, or t
  misc_feature (148)..(148): n is a, c, g, or t
  misc_feature (152)..(152): n is a, c, g, or t
  misc_feature (158)..(158): n is a, c, g, or t
  misc_feature (168)..(168): n is a, c, g, or t
  misc_feature (175)..(175): n is a, c, g, or t
  misc_feature (186)..(186): n is a, c, g, or t
  misc_feature (210)..(210): n is a, c, g, or t
  misc_feature (217)..(217): n is a, c, g, or t
  misc_feature (244)..(244): n is a, c, g, or t
  misc_feature (258)..(258): n is a, c, g, or t
  misc_feature (263)..(263): n is a, c, g, or t
  misc_feature (273)..(273): n is a, c, g, or t
  misc_feature (325)..(325): n is a, c, g, or t
tgnngttntaaatttgcatttnatatttcanaattcctgtaagnggggntaggcaggggggaaacccncaagtttaaatccccncacttacttacttactgcccnnccgncnctttcgcnaagngggattnatnnttcngtngcnggnccanaacgcncagcttgggnacgcagnggcccaggccncatgtaatttcccccccccggaantgaacgngctgacccatgttgatgtctgccttcntccaggggggaaancaganatgctacgcngcccccttcaaacgggttccccgggttggggggaaagggccccgccaaactntgccactga

SEQ ID NO: 689883 - DNA, 523 bp, Homo sapiens
ggtaaaatggtataaattatctgagatggagtctggcccatcacccaggtcggagatgcagtggagccattctcagctcatggcaacctccgcctcccaggtccaagcgatgctcctgtctcagctgcgcgaagagatgggaccacaggcacataccaccacgcccagctaatggtggtatttttagtggagatgaggtttcgccacatgggccagtctggtctcgaactcccgacctcaggtgatctacccgcctcggtctcccagagtactgggattacggccgtgtgagccattacgcacctggcctggtcccacttcttagtcgcccctgcatagggatgccagatgacatacagatcaccacttacacttgatttccagataaacaataaataatgttttagcataagcctttccctaataccacatgggctttccggctactaaaacatgatttgtggtctgaaattcaaatgtaactgggcatctcatatttcatgggctaaatctcgtaactcca

SEQ ID NO: 689884 - DNA, 192 bp, Homo sapiens
cgcattctcaacgggtgcacgatatcgacggtttctacgacagatgtcatagatggcctcattcgtctaccatgaacagcacaatcagagtgctccagggctggtgtggagttggtgacggatgagaattgtcggagctcaacttacacgctgtggaaagctgagcgcgccgcggctaaatggaaaactcct

SEQ ID NO: 689885 - DNA, 1656 bp, Homo sapiens
ggctctgaaccctgaaaggctcgcgcatgcctactacacaagtataccctgtgtggctctggaagcggctgcagctgcgggagtggcatctgtatccctgcctgcccgcgcactacctgcgctccctggatcggactgatgctggctgcccactcccgctgcctcatagtgcctccactggcgcgccaccttcaccgactccccccccccgcaccgcggcgctgcgcagctgtgtgcgcccgccgtgccccttccccctcctccttcccccccgcactccccagcggcccctctgccgccgccgccgcacccccgcactccttgccccccccctactctcgccccccaccccaccactcctctcccccccaccgcctgcccacccgccgctgcgccgcccccgcctgtctcgccccgcccacctcacccccgccgcccccccctgcccccccccccctcccctgccgcctgtcccctgccggcccccttgccaccctccctcccgtctcacgtgctctcccggccttcgccacctcccccctccctcaccacccccgcccgcgcgccccttcctcccccccccgcgccctggccctgcacccccccgcctcccgcccccgcgctctcccggcccggccccccaccttgccccgctcggccctccactctcatccccaaccccccccccccccccccaccccctcccccccccccccaccgcatgcacaaccgtcctgaccccacccctgccggaccccttccatactccccctcggagcctctcccctctcccccccaacccatagtctgcagtagcaacaaacgcaccaaccaacaccggtcccccacgacctccagccaagcccgtccaccaccccccccctcccacccctccccccccccccccccccccccccccccccccttctccctaatatcctcccccccccccccccaccccccccccctctccccccctacccactcccaccccacaccccccccccccctcccccccccccccccccccccccaacccccaccttactctcccccacctcccaccccatccaccccctcacctaccactcacatcctccccacctaatcccctccatctcctccgacccccaccccaccccctcaaccactccctctcaccccccacaacaccccaatcacacctctctgccacaaccaagaaccaccaccgacccccgctcccctcaccatccccgaccaccccgcactctccccgtccttacctcccacatatcatacaaacaatatataccaactcctcctagtaccacccccttcacctcaccccgcaaccctctcgtaccctagcccagcccgccaacaccaccccccctttcccaccatccctcctcacactacacacaacaccgcatcacgacgacccccccacaccaccctcctccccccccctcccccttcccctacctccctcgtccgccctacccaacaccacccatacccgcccgtgtacaaccccctccacccaccaaaccactccatccatccccccacttccatcttctccctccccacacaaccacacacacccacatgatcccatcacctccgcacctaccccccccgctcgctcacccatccacacccatccctctc

SEQ ID NO: 689886 - DNA, 397 bp, Homo sapiens
gagaacacctcgtgctccctaccagctccagtacttggtcctgccagagactcccccagaacttgtcagcccccgggtcctagaggtggacacgcagggtgaccgtggtcgtgtcccgggacgggctgttcccagtctcggaggcccaggtgcagctggcagtgggtgaccagaggttgaaccgcatagtcatctatggcaacgactccttcgtcggccaaggcccgtcagtcagggtgaccgcagaggacagaggtgccccagcggctgatgtgtgcacgatagtactggggaaccagagccaggagactctgcggagagtgaccatctacagcttgccggtgcccatcgtgattctgacgaagccagaggtctcgaagggaccgagggacagtga

SEQ ID NO: 689887 - DNA, 603 bp, Homo sapiens
  misc_feature (492)..(492): n is a, c, g, or t
taacaacacagtattaatgtaataggggcatgcaagaacaacaaagtccttgacaataaccgtggaacacagacatagagtgctggatccacatgggggggagtgtggaccaagtactgggcctgaaggctggcacttgcttactttaacacatggagaagtgcctctgggtggctgttgattaatagaaaaggagctggtctggtatgacccaaaaaaagcaatctccacattcacatgtgaatcctccaagcgctagaacatgcaatagctgctcacgacatccacctcgaggtctctaagtttcagagtgatcactggaagcttgacagggacgcgtaacgtgatgggaacaacagcttagagatcaacgactttctaaaagacatcggaacgcacgctggcgctacaagtgtgggttgccacccatttgaccgaagaactatgcgaggccttgaaatgctggcatttagaaaacaagacaatcgtttnatcatgggggccagacttctgcagcaggtgaaggcactgtgcgctctacccaatggacggaaattaagcaggcgcctgtaagtccagctaagcgtttgaggatctaggaga

SEQ ID NO: 689888 - DNA, 306 bp, Homo sapiens
  misc_feature (12)..(12): n is a, c, g, or t
  misc_feature (138)..(138): n is a, c, g, or t
  misc_feature (141)..(141): n is a, c, g, or t
  misc_feature (279)..(279): n is a, c, g, or t
actctactaaanttgggagaagcaatgaaataacaaagaaacacacagagccaacataggcagagtgattttaaggagacacactgatctgtaagcctttaagacttgcctaaagctgcataaacatatagaaaaatncanaggaaacattgtttagaaggtgaaattcagctgaccatgaaagccacagaataaaaaaagcttcactttcttcctcttttacatattgggcttttatataagatcttggttttaaaaagaggcttgttgctttttaantaaattttcaaagatgtttccaatctg

SEQ ID NO: 689889 - DNA, 400 bp, Homo sapiens
  misc_feature (362)..(362): n is a, c, g, or t
aggagtctattactggcatttatttcagagcttgtgtatgagtgcaggaagacaatggaagcagaagtgaagggatcctccagctgacttgtggaagagccagtggggaattttttttttttggtgaaacagagtgttgctctgtcgccaggttggagtgcagagcaagactctgtgtctaaaaaaaagaaaaagaaaaagaaaaaaaaattagagagagaaagagaaagagaaaagcgtgtgctcacattacattgggtgtcacagaccaataggcgtgttgggctcccctttgtaatgaaactttaacagggactccaacgcagatttctccccagacaagggcattttatttccaagangcttgggtgcttagaggctgcagggggaaaaacaatgt

SEQ ID NO: 689890 - DNA, 327 bp, Homo sapiens
aggatcgctctttcgaaaggcacatatttgggcagaggaggtgagacgattctttagtaggcttgatgcctcctggcaataaagggcatccaggcatagagatcgcttagcaaaaggcaggcccaccctagctgattagggcagagggtgaggcagtctggcccgttggacccttcggcctactctgccctttcagtgcgctgggaaaggggtcagctgtgttcattcagaccactccccgcttttagaaccagcaaggtggcaggcattcgacagtggcctgaggggcacaggcttctcccaacggctgctagtcgaactatggcc

SEQ ID NO: 689891 - DNA, 96 bp, Homo sapiens
tatttctgtgccagcagccaagaggcagtttctatgaactatggctacaccttcggttcggggaccaggttaaccgtcgtagaggacctgaacaag

SEQ ID NO: 689892 - DNA, 768 bp, Homo sapiens
aaaattaacaattttaaaatgtatcattcactagcacctagtacattcacaatgttgtgcaaccagcacgtctgtccagttgcaaaacatttttatcaccccaaaagaaaactccgtacacgttaagaagtcactttccattcccttctcccttcatcccctggcaaccaccaatctgcattctgtctctatggatttacctattctggatatttttttgtatttatttattttttgagacgaagtctctgtcacccaggctggagtgcagtggcgcgatcttggctcactgcaatctctacctcctgggttcaagcggttctcttgcctcagtcttccaagtagctgggattacaggcgcatgccaccgtgcccggctaattgttgtatttttagtagagatggggtttcgccatgttggccagactggtctcgaactcctgacctcaggtgatttgtccacctcagcctcccaaggtgctgggattacagacgtaagccaccatgcccagcctggatattttatttagttggaattatacaatactgtatgtgaccttttgagtctggcttgtttcaattaacgtaatgtttcaaggttcattcatgtagtagcatgtataaatactatgtaccatttttatgactggctgaatgatacagcattgtatggatatactagctatatccattcatccattggtggacttaggtaataatggataggtgaatatgacatttgtgaacaagtatgtattgagtgctatt

SEQ ID NO: 689893 - DNA, 715 bp, Homo sapiens
tcacatgatgagatttccaaccttttagctcaccaaccttgcttctgcctcagggccttgccctttctgtgcatctgcctgaagctctccccagttctgcagacagctaccatttccatattcaggtcttcagtcaaatgtccctggtgctaatgagttcttattgatgaccatatttaaaatgcaggtatacacatgcacatgtatgtacacacacacacacacacacacacacacacacacacacaatctcccttctgtgctatatttttcacagtgagtgttctccatcttacatactaaatatttcccatatttgcgtgtgtctccgtgcatacatagtgtgtgagtccatgaattcggggaatccctcgtgcgtcgtgtattctcgtgaatacatgtcgtgtgctcccagtctccagaacgagtgtcggggcacttagggatatccataatctatctaggtgaatcgagtgaagtgaggtggtggccagtcgtgccacaagagtgtctaggagtatcacacaaaattcattttccatcataggcactataccgtgcagtctaagagttatcgtgttataaagtgtgtccccttaattatcacgtgtgtctccttcccgtgaagtgaagggacagctcagatgtgaggacaggtcgtggtttatcttgcttaagtgatatcccagcatctactagaggctgtgagagatag

SEQ ID NO: 689894 - DNA, 237 bp, Homo sapiens
  misc_feature (201)..(201): n is a, c, g, or t
cgactctaagatccatgatagcgatagggttgctgtcagctgctcaatctccactagctccaagcatggatacgtgtgagcacagctgtctgtgtacttcaggtactcatttaattcaactcaaaagtgaaaatagaacagattccgtcacttcaccagatcccaaggctcacatctgcataatgcttatatcccttatgnaggcaatgatacacacaggcctcatcgcttatcaat

SEQ ID NO: 689895 - DNA, 297 bp, Homo sapiens
  misc_feature (14)..(14): n is a, c, g, or t
atgtatgtgtacangatacccttttctgttccttgtgttcactgttgcttttacaataggtttgttttccttttagatctgtttactggcttaagtcattactttccaattgtgatttcctccatcctatttcttcttactcctttttttatttaaaggagccctttcactatttcttttagaatgggtgtagtattgctgtacccttcgagtttttgtttgttgaagttattcctcctactattttgaatgatattcttgctgggtagagtattcaaagctgcacattgttccctt

SEQ ID NO: 689896 - DNA, 298 bp, Homo sapiens
aaacctgcgtgtactgcacatgtgtcccagtgcttaaagtataattaaaaaaaaaaaaggttctgtgctttatatgtaattcttatcccaggtaaaacaagacaccagtaggatgtgagaaaaataattgtttctacggaaatatggatgggtgaagtaataggatgtcggggataggttttaaatactccagaacaaaattcagttaaaagaagatgggcataatatggataactgtggaagcgggatgataaaatcattaggtttatactatcctctctaggttacatattacggg

SEQ ID NO: 689897 - DNA, 153 bp, Homo sapiens
taaaagcccccccccttttttttaaggagaatgggccagtcctttcccaagtccccccaggggaggggaaagcattgcttttgggtaaattatgtaatgcaaaatttttttaattttcgccctaaaacttttttattttgtttttttttgaaa

SEQ ID NO: 689898 - DNA, 140 bp, Homo sapiens
gacgtagcccaactgaagtgcatacaaattcatattagagcttgttcatcgagttaaaagaagagctgacccagatcccatgaagaacactgtgtaaattatttggtggtagcagatcatcgcttctacagatacatggg

SEQ ID NO: 689899 - DNA, 829 bp, Homo sapiens
ctgcttgtgtgctcgttgcgtgctggacctggtacctcttttgtgaagcggtgagcttgacgagactcctgggcgcatcgccaattgggggggactgaaaagcccaatggaaggattctaagactgagaatcgacggattcatataatatttgacaggtggcgtgggcgaggcaatggtgttcgttgtagtctgctatgttgcaaggaatccagaggcaaatacaaccgatctttagatacacttgattgaaaggccctattgttgaacagtagcatgggtagtttgtcaaattgagggtcaccactcaagattttcctgatctatgtagcggtggcaaccaaaaattcatagtgaagacagacacacgcttgcagcaaggattgggtaaaactgcagaggcatgccgaagttcatcttgtgcttggtgttccacacatggcgcgtacggtgaggttgtctactgaacataagggaagcttgtttatctattacctcgaagaaacgtctgtttcctttgaatggaccccaggtatgtacgattctcatattaggaaagactgctaatttgagggttccatcccatcatccttgactacttacccgatattagttcactctattctttcatttctccccttctccgcattccgtttgtgtgtaacattcacgtaaacctggtattattgtgctcaagctatatttgcattttgtaactttatctaaaaaaaaagtgccaccgtgttttgttttcggactacgacattcatgtttcggaactgcgatgcgtcaaacacctctgtttttgttaccattcccctttttcattg

SEQ ID NO: 689900 - DNA, 1004 bp, Homo sapiens
  misc_feature (506)..(506): n is a, c, g, or t
  misc_feature (520)..(520): n is a, c, g, or t
  misc_feature (534)..(534): n is a, c, g, or t
  misc_feature (546)..(546): n is a, c, g, or t
  misc_feature (594)..(595): n is a, c, g, or t
  misc_feature (625)..(625): n is a, c, g, or t
  misc_feature (631)..(631): n is a, c, g, or t
  misc_feature (651)..(652): n is a, c, g, or t
  misc_feature (674)..(674): n is a, c, g, or t
  misc_feature (697)..(697): n is a, c, g, or t
  misc_feature (699)..(699): n is a, c, g, or t
  misc_feature (756)..(756): n is a, c, g, or t
  misc_feature (807)..(807): n is a, c, g, or t
  misc_feature (919)..(919): n is a, c, g, or t
  misc_feature (973)..(973): n is a, c, g, or t
cggcggccatcgccgccattttgggctgggaggaggcagcggagggactcgctgcgcagtgagagcaccccgtggggggtggtccgggcgcggggagaggccgggccgagtgggctacctgaagtggcggcgcgggagacggcgggaagtgggaccgggggccagggagggtgaaggttggagtctcctcggccgagcccggtcctcaaaccgtcccggcagccccgcagcctcgcctctcacagagtgcggggttcttcggtaattaccgcgtgtttcccgagaccccagaaggggagaggctggtgaaacggcttccctctgcggtctttccacaggggcgcggatcctgaggccgagctctgccagcttccctccccacccccattcggcctgggtatggcggcgaggcccgcacagagggactccacttcgactggagacgtgggggcgacgcagacttcagacgctggcgcgcgggggagggcggaggtcgcaggtctggncacaagtcggcgtngcagtcagctggangctcgagagcgnagatcacagtgcaccacttactcgctacacaagcgcatctcgcgccgnntgcaaaacacacctctaactactgtagcancactantctctggagcagctagaganngcacttgaaacttcacagctcngtgctgaagtctctgaggtctgncntcaaatctctacattcagccgattctcggacaactgactagcatgtcgcagcatctngtgaacgctaaatatgctgccatttctgagtaacgagatagttgcttaagntgagaaatcgatgtcgtcgatagacgatacatctatctataatctcattatctattattatattaaatctctctaagaacatatatcattattattgtagtatatttcagtnagttttttcacatatataatattttctatgtctttatatatatttgatcatatnagtatttattatcacaaaacattatatcatt

SEQ ID NO: 689901 - DNA, 714 bp, Homo sapiens
  misc_feature (689)..(689): n is a, c, g, or t
tcctagcaacccggggaattctgatcttgtctagagccagatccaccctgtgagaaatgcagaccaaccgatttgggctttacctgcagatctgtccttcataggacaggctgagcccagctaaaggtggacatctaatggcctcaccaaataagccatgggctgtgaaagggttaaccggggtcccctgttactgcagtcgtgagtcccctaacataacgattctgaacaccatagatacacatggaaaacgtgtcttggggtcgatcctagccactatttctccattctgcaaggtggaacaggaaaataaacatgctcgtaatccaaaaatattcactgatgaactcaccacttataaaattagtcctcccactaaaaaattccctccctgcctaagagcccaacagaagtcctaacccgctgctccctgtcagtctgggtgattgtgaacatttgtttgtattttcatcttattgtggaatttgtggaaatgtcaagttataagtcttgagaaagatacaagaagctccaggacatgatgcagaagaaaggctgttccctggccgagcccaagaacacgaaggacccagctagggagtaaagatgaaagcatggctgttttgcaaattttaaattttgactaaccatctaactgattccagcaaggatgaaggataaagataaancaaaatctccctctacaaaacacct

SEQ ID NO: 689902 - DNA, 185 bp, Homo sapiens
  misc_feature (124)..(124): n is a, c, g, or t
ttttttttaaaattactagtctacataagttcactccaaccttctttggccctcataatttttttcccagccttcattctcaaatttaacacctgtcagacattttagcgctctcatccttcantccctagtttcggccgcctccttgctcgacctgacaaaggacttagtatgcagccttggcg

SEQ ID NO: 689903 - DNA, 186 bp, Homo sapiens
  misc_feature (39)..(40): n is a, c, g, or t
  misc_feature (138)..(139): n is a, c, g, or t
ggagcaggagaagagtttaagttttattaaaatactatnntggcacaaatctttaaaatatataaacattatgatataaacagtgtttcatggatcaaaatataactccagaccaagaccagtgaccagcagggaggnnagtgaccgtagagcctgagggcctggctgtggcaggggtggggacag

SEQ ID NO: 689904 - DNA, 166 bp, Homo sapiens
cgcatgtggtcgaaggtgactcgttccggcgcaactatgccgcgcgcgcgcggcctcgatgctcatgttgcacagggtcatgcgttgttccatgtccatcgcgcggatcgtgctgccgcggtactcgtatgacgatggccggtgccaccgttgacgccgatcacgc

SEQ ID NO: 689905 - DNA, 306 bp, Homo sapiens
tggaggcccagttcccccttatttaggaaaaaccaggaattttccaggacccttaaggggccatgatggcaacagatttggaacctcagcctggccagacacaggccctccctgtttcccaaaaaaaagggagccccctgttctgggcctgcaaaatttgggttttgcctgccaactgcactgatgctgccccttatttttttggccaacccttccctccccttggccccagacacccagggctttttttaactttgttgcaagtgcaataaatttgacccagtgccccccctggccagaacttga

SEQ ID NO: 689906 - DNA, 197 bp, Homo sapiens
tcttgtacacaatgctttcagcaataccgacactcttacctgatccacggctacccttgctcaactcgataccgttccttcctagtaaataatctttataagcgctactaactagcgtatttgcgaagctttcaatctacataccgttattataggcacacaaaagcgcctttatcatcagtcgccttctcgtccct

SEQ ID NO: 689907 - DNA, 173 bp, Homo sapiens
caacctcaacctaggcctcctatttattctagccacctctagcctagccgtttactcaatcctctgatcaggggtgagcattcaaacttaaacttcggcctgattcgcggcacttggagcagtaggcccaacaattctattttgaggctcaccttagcattatttctatatct

SEQ ID NO: 689908 - DNA, 623 bp, Homo sapiens
  misc_feature (9)..(9): n is a, c, g, or t
tgtgagtcncgatgaaatccctctttagtagtgctcctgtgccggaaggtgaggagcgagggtccgctctggctctgtcagcaacggggacccggtcggttctcgcatcgttcgcagtcagtgtttcaagtgtgcctgataactcctctccttctgttccatcagctggtcatgctgtctttggattgcctgcaacatttgtgctgaaggctgtgcagactcagctttcacacgttccactgaggaggaaaaggaagaagaaaaatttgtgtggggttatctggttgcctcattcttccttatacacttacctgtcatggttgtggactgcatatgccttactcagagatgacctcggcaagtaagacacacctttgtggatcttgctctagttaaagggtcccatgttcatccagtcaagttatttcaatttttggagcttttgaggccatctaatctcttaactcactcctcaccttcaatctccttttctttttctgtgagagtctggtctgtctggggaattgcatcagtcatagactccttggatttcaagtatgtctgcagaatctcttcagcctgtatccccttcctcggttcctcatagtactttttcttcaggt

SEQ ID NO: 689909 - DNA, 497 bp, Homo sapiens
actcgcggaaaacacctttcccttctagtaatgagagacttcctcttggtaatagaagaaattccctgactttatttacttattaatatagagacagagtttttgctatgtgttgcccagtgctggagtgcagtggcgctttcccggctcaccgcaagctctgcctcccgggttcacgccattctcctgcctcagcctcccaagtagctgggactacaggcgcccgccaccacggccggctaattttgtttactatttaaagtagagatgggatttcaccatgttgcccaggctggtctcgaactcctgagctccagaaatctgcttgcctcagcctcccagggtgctgggattacatgtgtagcccacctatctttcggtctctcttttttttaattacaaagggagacaggggtcccactctgtcactcaggcatacgggacagggttgccatcagggctcacggaagccacgccatcccagggttaaggtgatc

SEQ ID NO: 689910 - DNA, 866 bp, Homo sapiens
atgacgccctctcggcagctcttcccactctgccacgcgtccttttcctgcaccttcgccccgcgtacctactcctgccccgccctgccattcctctcccctcccttctctctgcgatccctccctgtgtaggccccagacgctcattctcccactcacatggtcttcatcttgtccatggcactcaccagtcttatccctattcctcatcccttgcccatgtgtcattgtcatcaagagccccctcggaggatgagggagtagcgtagtggacgcagcaacaactgggctcaccccacaagcagaacttcgtcaatccatgaggacaactggggacggccttcgagcgccagcccacatgtgacaactggcagggactgcggcttcctagacggaggagcaccacgctgagctcactgcaccatggacctccagcggaactcagacgtactggcacgacggagcgctgacccatgcatccatctgctaccaatgaactactggcaccctctgaacgccggtccatgactccctgtccacactgcacgcctggacccgagaagaccatcgggcaccccccgtctggccacacgcgccagtaagagccaaacctagatgcactacatgcccaatatctcctggcatgaccgagcgaccatatgccacgcactccacagtccagggacagcgatacataccgcgtccgtaacatggaggagcacaaacctaccgcagacatgacccaagtggattgatacactaacaagataaaacgataccgcaagagcaaggcacacagcaccccacctacccccctgacacgaagcccagggaaacaaccaccaaccacatcactcacgacaaca

SEQ ID NO: 689911 - DNA, 456 bp, Homo sapiens
cactttttttccttgtgaaatatatcctttgtaaattcctagtagaaagcaaattgctttttatttatccttcttggcatttataagaatttctgaatctgtgaattactgtctttcatcagttatgaaaaattctcagcaactattactttagtattgcctctccctcattttgttaccttctccgagaacttgtaggacatgtatgtcaacttctcactttgcaggcacgtatctttttttttttttttttttttgagttggagtttcgctctgtcgcccaggctagagttcagcggcgcaatctcagctcactgcaaactccacctcccaggttcaagtgattctcctgcctcagcttcccaagcagctgcaattacaggtgaccgacagcacacctggctaatttttgtatttttagtagagacggagtttcaccatgttgtctagactggt

SEQ ID NO: 689912 - DNA, 93 bp, Homo sapiens
gacaccaaaaaacaagcgggagaggcaacattgattggggccgacggacgagagcgcaccaggaaacacacaagggaagagaaaaggcacgaa

SEQ ID NO: 689913 - DNA, 428 bp, Homo sapiens
aacataacgtacagtattcgttatggcccttaatgtgttagacccgtatggtgcgcagccctaagtatatggtttgtcagataaaattcaaaagattcccttcatcctcagtaaaaggaaaagactagtccttgtcacagtttagtattatcacgtggcccagtaaccataaccagtctctcgtatcacgatggtttctcttagcctcttatacagtgttgatgtaagctttcatgccgtcatcccgaaatgtcccttccatctcgttccaggcatatcacttgaccttgctcgtgaagtccaactatccgggtccgacttgtacctacgtcgccagcagttgcttgattgtagtggtcatgctttaacaacatcatgtcattccatgtcccggtcaaagtgtgactaactcactcacaagctttctc

SEQ ID NO: 689914 - DNA, 398 bp, Homo sapiens
cgaagaggaggagcaagaacgatagttcagaaaacagttccccctgcatgaaaaggactctgcagatagggtggcgcagccaacgttggaggagaacaaaggaacttcagatgggcaagaagaggaagcaggcacaaacccagctctcctctcccagaattcaatgcaggcagtaatgctgatacaccagcaattgtgtctcaactttgctcgatccctctggtatcaacagactctgccgccacatgaagcaaagcattacctcagcctgtttctgtcttgctatcagactggggcatcgcttgtgacacacttctaccccctgatgggagttgaactgaatgaccgactcttggcagccaacttttgcctgtccctctcccaaacactctttttgg

SEQ ID NO: 689915 - DNA, 186 bp, Homo sapiens
gagactgttacccctagctgtggtcccgtgcccttactattaatgactctcaacgtcagggtacccacagatgctggaactatatagctgggctcaaagtactttgaattatttatgagcccactgctgctgctatagcgtacgggttagacaaaaaggtttgagcagaaagaaacgtgctctcta

SEQ ID NO: 689916 - DNA, 243 bp, Homo sapiens
gcttatttcgtctagcataatgacctccagttccatccatgacatccagtcaccctacagtgagcactagaactcattcctcctatctagctgtaattttgtatttgtcaaccatcctctccctatcctcccttcctcctcccctgcccaggctctggttaccactattcaactttctatctctatgatatcaatttatttagcttccacatatgagtgagaacacacattactactatttgt

SEQ ID NO: 689917 - DNA, 240 bp, Homo sapiens
  misc_feature (21)..(21): n is a, c, g, or t
  misc_feature (205)..(205): n is a, c, g, or t
  misc_feature (207)..(207): n is a, c, g, or t
ctttcccttgcttcataaggntcgttactctggtatcagttgctggactgggattttgggcatttataaatgtttttattttggatatcactgaatcacagacaatttcatcttagttaaaaattcatctgacgtgacacttgtctaaatcttaaaatattaaattttaatgtataaggatgttaataatctttatattttaagngnctatggaagtccaagtctgggctaacttaggtc

SEQ ID NO: 689918 - DNA, 472 bp, Homo sapiens
cagctggcaccatccccaggaggctttctgcttctgcaggaggcccaggaatttagcacatacagtcttagccatatgcttagaaaagaggcaggaccacaattaggattgactattgtggacgaggtgatgaaacgcagccccaaaggtgagatttgtttaccactctgtagccacggggggacacacatctgccggttcagaccataaattcattatttccaaagagtgctagctgttggttggaggggccagctgggtccacagtttttctgggggcagacatgactgtcccctttgggggtttttttggttttttgaggggaggttttacaattctttaattttggttggcccttttcggggttgaagggttcttttgttggtgaaaactggggtttgctttccaggaatttggttttgggccccatggtccttttccatttccaggggctctattaacgtgggggcg

SEQ ID NO: 689919 - DNA, 309 bp, Homo sapiens
gtggttttccgctattccagcaccagtcatctttatgcccttgagctgcagggcagtcactatgcgtgtcttggtctctaagagagtgggctctgtggctgtctccttgaaggttctccctgtaggttctgattagaattggtgctcttggaatattgctgttaccatcattttagggttgtgtagcatcttattgattattggaactcatgtacaagttcccatgggaaactaatacaggaaatgtcgtgaccagaactgtctaccagtagctaataatcgatcatcattgtgaagtatcggaagctt

SEQ ID NO: 689920 - DNA, 183 bp, Homo sapiens
caagatggtcctagcagtttccatcgaagaaacatcggatatcaccccaggcccgcgtcaagagctgtaagcctcttgattctccgcggtgtcgttggggcttcttggctttgtaaagtagtcagtgcgtatctcatttttttctctctgacacctattttagacacatctagggaaaagctt

SEQ ID NO: 689921 - DNA, 103 bp, Homo sapiens
ccccaaaacggggtaaaaactgtttgtgaactgaagttcctcaaagggtcatttgtatgagaggggttcatggccaatgaataaatgcccccttttgcctata

SEQ ID NO: 689922 - DNA, 157 bp, Homo sapiens
tactgaactcactcacactgcaatttggaccagtctatcatctttatataataactagtgtttagtattagtaacatgaaaacattcttcctccgcataagcctgcgtcagattaaaacgctgaattgacaattaacagcccaatatctacgatcaa

SEQ ID NO: 689923 - DNA, 711 bp, Homo sapiens
ggagcggtgggcgaaccagcgtcgcttaattgtaaaaaataagactatgcagattcatatattactgaatcataaacaccttgtcttcacagtatgagtgagaaatatatgaaatctgcatagtcttaattgtaaaacaataaagaacattccttaagctttaaaaaaaaaaaaaaaaggggggtttttaaaagtatccccaaggggccaaaggtgacgcttacccagtttttttgaaagggggtccctaagggggggataaaaagataggcactgggccgtgtataaaaacgtggtgaatggggaaaactgcttagttcggaaatcttggggacaggaccctaacttcgggggtgtgacattacgtgggaccaaattacttacggagattataacagctcttaaggtaattatcaagttttcaagggtatatgtggtcacactaggcgggcatatgatggggggctggaaaaagtagggtaacgggagtatgcattctatgaaacttttatccacgggagctaggttaaaaaaaaggcacaagcataaaagacgacgaaaagcaaagaagaaacaaagagcagagagaaaagaaaacgagaacaaagagagatgaaataaaacagaaagaaagacaacagaaaggaagggagaaagaaagacagaaggagataaaaaacaacaaaagatataaaagaaacgaaaaacaag

SEQ ID NO: 689924 - DNA, 1578 bp, Homo sapiens
  misc_feature (350)..(350): n is a, c, g, or t
  misc_feature (410)..(410): n is a, c, g, or t
  misc_feature (513)..(513): n is a, c, g, or t
  misc_feature (549)..(549): n is a, c, g, or t
  misc_feature (623)..(624): n is a, c, g, or t
  misc_feature (644)..(644): n is a, c, g, or t
gaagaagtagagaacaccattcggggaagaatgtgatggtggatgcgtgatcgctgatgatgggtgatctgcagtttggtctgaccgaaaggagatattgcgacatgggtgcaactcacaggagagccctgggtcctcgtgggcgcagatcgagctgtgtagtgcggaggagcacagaggagctcgtcgagtcttcgggagagggagaatggaccaaagagtatgtacggtaccgtgagccgtggcagatccaccctatacgcgtcgtgcgccacaggccttagggcacgacaaggcaaaattcgcataggaagttgaagatggttgcgcatgcgaaaggagtacgcaantccattactacatacctctgcgtgcgcgcctttacacgcgatttcatacgtgaaacactntcgggagggacttgatcctgcgtgtgcatctcaactggggtcgtcccctactgtctcctcatgaactagtgcggttggtgtcacggaattgagtgtcctagcntgctagtgacagagctcgaagccctgtctgttcccngaccgagctgcttgggcccaggtgtaaccatgcgaatataaacgtttggcccaatgcgaagaggagagtacacnnaattgatccatatgccttgngtggtcatcgggagggtatgacagtctggcatcaccacagacaagagaagagtaccaggcgatgccatcccagtcggcgagatgcgatgcgaatatgtgggatcatttgtgggcttgtcactgatgggccccccaggctgaaggaccagagaaggccgagtagttgtgggacaccatagatatggcgccaaagaccttacacattgggtgtcaattggcagggagtagtatagggggagtttccgatttaacaggcccataggttgccatctcgtacttttccactagccaactccaaggacgggacgagccagggtgatttttggggcttcccggaaaagtggaatgaacatgaatgcaaagcctgggacgaaagcaattgagagtgcggaaatgggaaggcgaaggtggggatacccatttgaatgcgccacttagtggagacagtggagaagtcggattggcccggtgggtccgaatgggaagggctggtaaacgggcggcaccactctctgggacaaagcgggggtggaaaacgataacgtaggaactgatttcaagttagccctggtaacgcggaacatgtggcgcatgcagggagaaggggggggacggaggtaacttgggcgggacacggtttgtctgctttaattcacagaggtgatgatacagaagggtcacatctccggtgggtacaaaggaatacaacacaacagaggagggtggtgtcgcgggtgagaaaagagataccacaggagagagagacccaagagggagatcaagcgcagacacacgagaggtggttttttagtacgacaaaaaggggggcacgtaataaaagagggggcggaataaaaataacaagaagcacagtggcggccgagtatcacacgggcgcggcgctggaaaaaccacatccagttgcgagcaaata

SEQ ID NO: 689925 - DNA, 131 bp, Homo sapiens
ttggtaccatattcatcatttagtggaataactgcatatgttcgaatttaagttctcttctacgagtactctgttgctacctggggtatccgtctagtagtcttacctagcagtgcatgcaagcgttgtgc

SEQ ID NO: 689926 - DNA, 742 bp, Homo sapiens
ggcctgcctactctcctatgccagctctggctccacggacccacggatatggtgcaacgggtggctggcgttggggcggctggtgacagttgtcgggagtgtgcgccctccagtgcccaagcctgccttctccgtgcccccgccatgtgcccaggtggcggcgagtcatgagctggatgctccgtgggaatcagacgtggcgagccaacaggagcagacgcccgagaagcccagtttaaactcatatcccaggcatatgaacgtgctttcagatccaatagaaaagggatgtttatgaccaaggcggagagcaggcaattaaagaaggaggctcaggcagacccagcttctcttcacccatggacatctttgaccatgtactattggtgcgtggtggaccggcctggctagagagagaagaggcacgaatgtagtacaccagttcatctgtaactctatgaagatctactatacatggagtcacgaagaaatcggccctccagaacaaatgtaatatgtagagaaatgtgaaggtgtaggatgggcaagaagggaatcggtggagacagtgcccgcatgtgcaaggggaaggaggatgcaagatccacaatccaggcagatcgagcacgggccatggcaacaggacagagtccagaaccggtgggacatttcgaagtgcacaagggaccaaggatgacagcggcaattcagacaccacaagggaacccggatgcagaaggag

SEQ ID NO: 689927 - DNA, 845 bp, Homo sapiens
agtcaaccatcatttccccggaaatggcatcgatctctggactgttgttactccttcttcctatctcctccttctcctcctcctcctcctcctccaccatgcccggactgatttatgtatttttagtagagacagggctttcactcatatgggccaggcagatctcgaactccaaaccgtcgtgatccacctaccttggcctctgaaagtgctgggataccgtggcctctgaaagtgctgggattacaaggcatgagccaccgcgcccggccccgttgtttccctatactaagaaacgcagtggtctctgaagcctgcaggggcaggccagccctgcactgaacgcctgttacttgccaggtggacagaaggttgctgctcatttgagcagtacctgtcacccctcctcccactgctgcggctgttaactcatcttcaggtctcaccaccttctgcaacataacactaagcatatttataaaagttactatcacacacactctttcatttactcttggagagggtaccaaacggatagctgttactgtctcacgtagggagctctcatggcctacaggctttgaccattctgagacatcaaactggagcaacattccgaacgccgttccttataacgtgtctccatcatctaacctgggcgactgacagatgggaacgtgctggcaacaaatgttagcaccaagcctggatccctggcgagcagatcggccaagacggacttggaaggacctggaaagccacaagagctggcacatcacccctccggcacacctaaacgagccagacagacaagaaactaaaacacaacacaagaccatatcacc

SEQ ID NO: 689928 - DNA, 179 bp, Homo sapiens
tgctcatgtgccacagcatttatttatattgaaaattgtgggggagcctgtgtggctctgtcggttaatgggcccgattcttgattcttgatattcttgatttcagctcaggtcatgatctgagtcgtaagatcaacgccagaactgggcttcaagctcagtgcagtctgcttgagagt

SEQ ID NO: 689929 - DNA, 574 bp, Homo sapiens
agcggggggcaaagatggcgggggtccaggtgtcggaggcctttgctacgcggtccgaggctttcattgcacaccgcggctaatgccgccgccacggctacagaaacgacctggcagagacgtcgcggcgacccccgtcgcgcgggtacccgccgagtgtgggctccatgagcagccgacagcaaagctgcacggctgcggcggatcgagcgctgggaggcgactggtgcactgcttgcggagtcggtagacgagaagctgcgaatcctcactcaagatgcagtgtatgaagtacagtggtttacccgcagaccttcgcgcatgtaatgccggacgcgcgtggtaccagtatcttcgaccaaggaccgttgttcctggtcgaggtcatggcgcgcacgtccgctcagcggagcccgagcccgagcccgaacccgaacctgaacctgcgctggacctcgcggcgctgcgtgcggtcgcctgcgactgcctgctgcaggagcacttctacctgcggcgcaggcggcgcgtgcaccgttacgaggagagcgaggtcatatctttgcccttcctggaa

SEQ ID NO: 689930 - DNA, 133 bp, Homo sapiens
tggaaagcacgcataacagctgtaatctcatcggataccctggagccaatgccttgggatcgcctgaagtgaagtgtagagcatccaccaaatagttgagtatctaagatgggccatgcgtggattgccagga

SEQ ID NO: 689931 - DNA, 113 bp, Homo sapiens
ctgtgagctcattgaggacaactttaagtgattctgaaacagacataaatagatggtgtctcaatgtgttacccaggcaggtctcaaactcctggtctcaagcaatcctccca

SEQ ID NO: 689932 - DNA, 122 bp, Homo sapiens
aggggggaaggggtgggcgggggggggtttttgggtttgggccccccttcccccccccccccctcccctggtcccccgtccctggggcttttttttttaaaaaggtttttaaaggtttttta

SEQ ID NO: 689933 - DNA, 170 bp, Homo sapiens
actgactggcactctgctcgcggtcgacgtgccccttcaagtttggtgatgtggctgccactgcttggttttgtgtaagagaggctgctgccaccattacctgcagtaaaccttctcataggggctacgatcggtactgctaggggagcacatagcgcccatgggctgtg

SEQ ID NO: 689934 - DNA, 827 bp, Homo sapiens
  misc_feature (43)..(43): n is a, c, g, or t
  misc_feature (50)..(50): n is a, c, g, or t
  misc_feature (108)..(108): n is a, c, g, or t
  misc_feature (120)..(120): n is a, c, g, or t
  misc_feature (130)..(130): n is a, c, g, or t
  misc_feature (156)..(156): n is a, c, g, or t
  misc_feature (452)..(452): n is a, c, g, or t
  misc_feature (481)..(481): n is a, c, g, or t
  misc_feature (747)..(747): n is a, c, g, or t
  misc_feature (749)..(749): n is a, c, g, or t
cccttttccattaatttttccttcaagttttcctccacatggngaatccnatttcctaaaaaccatttctttattttgcaagtttttgggacttcatataaaatgtanccatattggaanaatattcttncttcagcttctaagtttttcactaancaatatgttttgctgatacttacattcatatgacagtaatagttgatttattttaatggctatatattattccattgttagaatacaccaggatttatttttacttatttttttgctggaaaattgggtgtcttttttattttttgatataacaaacaatgttgtaatcattttgtatttacttcctagtccactcctgtaagtttctcttgagtacatactagcaatgaatatgctgagtcactgcatatacatactcacaactttattctataatgtaatattctataaagtanctgtatcagtttatactttaaccagtaanggacaagattttctgttacttcccatctttgttaattattacttttagactctaacttttatcaggctcatggatgtaaaaagcatctcagggtggttttaatttgcatttatctgctcatctatgaagatgagcttcttttcatataattatgagtcattatttttgttttgccttcttttgtttatgcattttgcttgttctatgtcttatttttcctgttgatttttgggagttcatatatattctaaatgtatatttattcncntatatatatgttgtaaatattacagtttatgatttgtcaccttatgatatcttccaaatagagaagctttatattttg

SEQ ID NO: 689935 - DNA, 893 bp, Homo sapiens
  misc_feature (4)..(4): n is a, c, g, or t
gatnaaaggcgcggcgagaagcatacggcgggaagcagatatggcattcccttttgaccttgtatttgccatagtcgccctcgtggacacgcgctcggttttacacaaatacgcgtggggactttcgtcttaaggggctttttgtaaccccggggttttgctttacgcccatgtccgtcttggggcccgtggggtatatccccccattttccgggctcccccaagttctggccaaacttccgtaccaaattatctctggcttgcaaatcctcggaggggccagcaatctgggtccccccctcagggggccccccccgggtcaccacacactgcatgaggttgggcatttctgagcccgtgcctcagaaagttgacgctcccctcccgcccttggaggatcgacccgtgcttccctctcagccatttggaggcccccctttggaaccccccttcgatggaggtctgatggccccccctaccgccccctctccaaatggtacgccagctctcacgggagtccctgctgcccccctgtaaatctagagcatgccaccacaccccggccacgagggacagcccccgcgcccggagtatgagggcctgctgtcaacaatcacaggtccagactgcgagggctgagattgccccaccacccccctccttgctggaaaaaaccatgcgagggaacactttctattcctggtgcaagaccctggcaccaaccagcaactccccaagccgcacaccatcctcaaagccccccccccgcccgataatcgatagccaaatggtgtgtgagacccaagacacacccactttgctaggcctaagcccccctgaaccggggaccccttggggggccggaggcccaaacaaaaattccaaactccaca

SEQ ID NO: 689936 - DNA, 588 bp, Homo sapiens
  misc_feature (4)..(4): n is a, c, g, or t
aagnaagcagctgtataagtagcttttgtcattattggtattggttggttggtttggttttggttttgtggtaaagagcaagaggaaggaataggaaatgaagctgactcattaaagaaactacaggtcacaaaaacacagacgagtgcttggggtgggagctttcacacatgtgttttgttctgcatcactgtttttcagcttctgctccaaaggagaatacaatgagttttctagaagtgagcttcacttctgaacccatagtgatttgtacgtatatacataggttcttggatccagtttcatattgcacatgcaggaacattatataaatgagtgccttttattctcacacaatgagtcatagcatggtcccattgtaggcctgttaacttcatgaagttgacggtagcctttaaaagatacacacacacacacacacacacataggagatttcctcaaagttttggggaaacttttacagtgtatcatgtgaattcagatttacctcaatactaagaattatgtttagatatgaaaaaaacttgttttgatctcaggtagaaaaatagattgctttgagtttt

SEQ ID NO: 689937 - DNA, 255 bp, Homo sapiens
acttatgcaccattctgagctgtagagtagatgtgggtttatgactgccaagtagcccagtacagatagattttttatcactgaagaggtggactcattgatggagtcctgtagtagtttcagtgtgagatacaggtttttccaccatacatctgtgcattttctctttaagtgactgttgaagaaatttgtgtgcatagttactcagttattatgaactgtcgtatcctgttaatgcatattgctcggtgactc

SEQ ID NO: 689938 - DNA, 1211 bp, Homo sapiens
gccatacacactgctgctatggatatgctgggaggacctggctatcgaaagccagtgctagtaaacagttgcatcatcattgcagatgcagcatattaccatgtatcccaaaccgccaaaaagtatttacctggttttttacgatcattagatgcaacaatatcttcaaaaggaagcaaggactagcaaaattctcgaccgtatactgcaacttacaacccaaggctcaatcactattgcaaaccacgcatatcttctatagcatgacatacccaagacagcagctcacgcacagaaagtaggaactcaacctggtggcatgaccagacattcaacacgacgagcaaactgacagactgcaacccaacataccaacagctatctggcagctgatggaagacaacactatacgaacttgttacggacctcttctcacgtgatcgactgtcgttaaacgccaaatcatagcaaatcctaatcttgtcatgaacctcctcccggttagaaagaataggtaggcaccgtgcattcactctgcatcctgacacacgcacaggactgggaccctgctcgcaatactgcacgaaccttactgtaaaccaacgccaagcactgcggcgactgaccatatgaccaacagcacagacaaaagaaaacacaacgccaaccaaaggacaacccaacaaaaacaacaaaagacccaaacactaaacagagcaccaaaaacaaaacacaataaacaaagaaccataactcacccacaccctcgcaaccacatcctaaatagaatcaaaacaataaatgacaaagaccagcataaccacacacctaatcaaaacaccacaacacacaacacattctcactcaccaaatacaaacaacaccccaaacccgctccacaacatgcaccttcacatcataccacctgccaatatctcacacctcatcacccacctatactcgaaccatcctcacattagcctcattaacacataacactactcaaaactccaccacatcaacaacacacaccacacccaacaaaacacaaaaacatcacacccgaactcaaatatcaaatctataaacacaccaaccatcattcccaccccaaaacaatacacctactataaaaaaaagacttatcaatcaaacacctaacacaacgcccactacctaccaacacaataccctctccacgaccgtctacc

SEQ ID NO: 689939 - DNA, 230 bp, Homo sapiens
atgccctttgaactttcccatttacgcaaatacttggaagcagaggtgccataaaactgactgggttgctccaaagggggtcattctctttgtctttcttcatttgtaaatgatttgtttatatatatatttttctttaagggaggaacctgaactgtagtctagatttcagtgtagtggaactgagaagctcagtctgtcacctgtttatgcaacggacagtccggttt

SEQ ID NO: 689940 - DNA, 84 bp, Homo sapiens
  misc_feature (62)..(62): n is a, c, g, or t
tgcatgttaaataggtcgcgtcaatcagtattcagttcacgatgttaaacaagtaaccaatngtctattaaatcatatttcact

SEQ ID NO: 689941 - DNA, 784 bp, Homo sapiens
  misc_feature (766)..(766): n is a, c, g, or t
tgaaaacacccgaacgatgcgtgctgtgccgtatgggagttaccggattgttatgaaaatattctgtgctctacactgaatgttgactgctaaccacacgacttatgtggaaatgctaacccgcatcgcagtgctattagtgggtcagcgcctttgcaaggcgattagtccttgacgatggaaacctgtccatggatcagtgcccttataaaaaaacccctgatagctccctccctcataccaccatgtgaaaacacagctggaaggtgacatctgctacccaaaacagggccttaatcagaacctgtccaacctcagccgcgatctaggactatcacacttcagaactgtagaaagtaagtgcttgtcgaacaagccaatgcaggatcctgttaaagcaggacatatctatcaagacgctctacctacatctatgattctggaggctgacagatgattatcactgactgacagattaatagtgcccacaggagtatatgaacgacgcactgtgttatgaaatgatgaagaatatcagcggcttaaagattgctacctgaccttgcctataatgtggtcacgcgtacccgaactcacttctagctaagccagcttacctactctgacactgtatcacgaaatggctactacaacacatggtgcagctgcccaatagagagattaagctccttcagacgattttatggatgtgctgtgctatacattgagggagcctgtcagatatgtgcgattatgtgatgctcgngctctatagtgcatattc

SEQ ID NO: 689942 - DNA, 1570 bp, Homo sapiens
  misc_feature (504)..(504): n is a, c, g, or t
  misc_feature (582)..(582): n is a, c, g, or t
  misc_feature (614)..(615): n is a, c, g, or t
  misc_feature (1219)..(1219): n is a, c, g, or t
  misc_feature (1262)..(1262): n is a, c, g, or t
  misc_feature (1264)..(1264): n is a, c, g, or t
  misc_feature (1358)..(1358): n is a, c, g, or t
  misc_feature (1367)..(1367): n is a, c, g, or t
  misc_feature (1379)..(1379): n is a, c, g, or t
  misc_feature (1386)..(1387): n is a, c, g, or t
  misc_feature (1399)..(1400): n is a, c, g, or t
  misc_feature (1402)..(1402): n is a, c, g, or t
  misc_feature (1404)..(1404): n is a, c, g, or t
  misc_feature (1409)..(1409): n is a, c, g, or t
  misc_feature (1415)..(1415): n is a, c, g, or t
  misc_feature (1569)..(1570): n is a, c, g, or t
gaaaaaagtaaactacttgaaaaatttagccttgttcaaaaagagtatgaaggctatgaagtagagtcatctttaaaggatgccagctttgagaaggaggcaacagaagcacaaagtttggaggcaacctgtgaaaagctgaacaggtccaattctgaacttgaggatgaaatactctgtctagaaaaagagttaaaagaagagaaatccaaacattctgaacaagatgaattgatggcggatatttcaaaaaggatacagtctctagaagatgagtcaaaatccctcaaatcacaagtagctgaagccaaaatgaccttcaagatatttcaaatgaatgaagaacgactgaagatagcaataaaagatgctttgaatgaaaattctcaacttcaggaaagccagaaacagcttttgcaagaagctgaagtatggaaagaacaagtgagtgaacttaataaacagaaagtaacatttgaagactccaaagtacatgcagaacangttctaaatgataaagaaagtcacatcaagactctgactgaacgcttgttaaagatgaaagaatgggctgctatgctnggagaagacataacggatgatgataacttggnnaatagaaatgaacagtgaatcggaaaatggtgcttacttagataatcctccaaaaggagctttgaagaaactgattcatgctgctaagttaaatgcttctttaaaaaccttagaaggagaaagaaaccaaatttatattcagttgtctgaagttgataaaacaaaggaagagcttacagagcatattaaaaatcttcagactcaacaagcatctttgcagtcagaaaacacacattttgaaaatgagaatcagaagcttcaacagaaacttaaagtaatgactgaattatatcaagaaaatgaaatgaaactccacaggaaattaacagtagaggaaaattatcggttagagaaagaagagaaactttctaaagtagatgaaaagatcagccatgccactgaagagctggagacctatagaaagcgagccaaagatcttgaagaagaattggagagaactattcattcttatcaagggcagattatttcccatgagaaaaaagcacatgataattggttggcagctcggaatgctgaaagaaacctcaatgatttaaggaaagaaaatgctcacaacagacaaaaattactgaaacagagcttnaatttgaacttttagaaaaagatccttatgcactcgatgttcnanatacagcatttggcagagagcattccccatatggtccctcaccattgggttggctcatctgaacagagctttctctctctcacttgtggggtcnctcgatctnacttgctcgggnggggganngtccaggccggnncncnggccngttccngaagggatccggtgaagtacgaccatggcccctgcgggtcttgccagacgacaaagtgtttgccggaatggttgcccccaagagaagtgtgtggtgggcatattttggggcaagaaaaatttgtccaggtgtattagttattcactttatgtgnn

SEQ ID NO: 689943 - DNA, 1048 bp, Homo sapiens
  misc_feature (232)..(232): n is a, c, g, or t
gcgtgagaatgccatgagcagcacagtctctcgccgacaccctgtacgaggcgagtgcgtggtaagtcctgcacgtggaaccagcgcatagcagtccgcaagttcctgagacgattggtggacggttggcatgatcaagtattgaagcgaacgagtgactccccaagaaaggacaatgcagcatttctcgcgagcaccggatcagggcttaagatctcacgtccccggcccntatagttctctgctcgtgtgtcctggagggaccagcagcactgtcgacgaagcgctaagagtcagtggataatcaccctcaacattggagcatacgatggacgactgaaaaaaatctcatacagatgaactaatacaatatgtgtgttcacacgaaggctggcacaaagatatgctattgactggcgtttgatggacctcaaggaccgtctctgagtcagaggctaggagtttcgcacgatgatccgtcggggcccacggttgaaggtaagggctaggaacagcttcctcattctccttgacgtacatcgagcgacagacgcaagaaacattcggtggcctaacaggtggtatgcaggtcgagaggtcgcagcaatccaaggttccatagatgagagaagggtgtctattgtcttggccttgtggacttgtatgggtcaacagttgcaaaggattgaccatgatccgaagtggaagctttgttgtcagttgaaccattcaaccctgtgcttgtcaagcattctttggggtgtccatttgctcaaagaaaaaactggtcagaaatgtcccttggccttatgagtatcgagtgaagcaccatgggggcaaggcccccaggcgcctaattgtttcaaagggccaccattgggcaattgacattgcttatttacgccagttagataggcaaatgccacggtgcgaacacaccggcttgcttcgaaggcttctgggctggcaattcctaacaacccaactcgacccactgacaatatgccctttgggcctgccgtatcccaggatggtgccgcaaatgagg

SEQ ID NO: 689944 - DNA, 236 bp, Homo sapiens
attcatggcggtgagccatcgcgcccggcagcattttaaagaaggattttgggtatagaattgacaggacttgatatattaaattgggttgatgaagaggaaggtggtgaggattactgtgaggatagtgatgagaggttgggagaaatggtgtagggaagtagagtaataattttcagtggaaaattatgctttgtaaagatagtgattggatgagatcatctggggagaagaaa

SEQ ID NO: 689945 - DNA, 951 bp, Homo sapiens
  misc_feature (951)..(951): n is a, c, g, or t
ggatgaggatacacacacacacacacacacacacacacacacacacacacacacagagtgtgtgtatcctctatatccaagaatattcagatagtgctccaagatgctccaaacattttttcgtgacccaccaactagtgacgtgtatgctcaagagaggattagtgcgacatgtggagaatactctatcaatattatctacaagatgtgagatagctgctcacacatgtaatgtatattctagtgcaataatatatccaaatatacaaaaaaaaaaaaaaaaaattttagaaaacttttttgcctccccacgtcttttaccacaaacgcgggtgttgctactaggtggcgtgctggtgcgtggtgtggtgtgtgctgcacgcccgcgggtgggtggtcgcagagaaaatcctactatcttttattactacaaagaacccctcttgtgtggtgcgtgctactattgttggctgctattattattagtgctaacacctggtggtcataccacagcagcactactgtttgagtcactcatctacgcggggaacaggcaccagacttatgtggcagaagagagagaaccgcgatgctagatggagggaaagcacttttatttcatattaaacccccgcgggagggtacaaatattctgttgtccccgggggagttcttatccacctgtggtgtcgttgtacaccacacaagacgaggcatcaggaggtggtttccatcaatattacaatcttacaactatcaacactttttaaattttcagcaattaatttttcgcccctttagtgaacttaactcccattttgggtatggtcggcacattcggcggcgttgtggcaagcggcctagccaataactcttttgaggctaaccccactttctttttccccttccacaggaaaccgtgttaggggggatacccccctggtgtacccn

SEQ ID NO: 689946 - DNA, 122 bp, Homo sapiens
gggcaaaggccaagaaaggagaggtagctttatttacaaccagagagtctgtggctgactactgcaacaggcttttatagaagcagttttttcaccgagccctaaaagtaatgaaaatgaaa

SEQ ID NO: 689947 - DNA, 408 bp, Homo sapiens
cgtaatttgagcgaggaggtgatccgaggctgggaagaagggcgttgccagatgagtgtgggtcagagagccaaactgactatatctccagattatgcctatggtgccactgggcacccaggcatcatcccaccacatgccactctcgctcttcgagtgtggagcttctaaaactggacatgacagcgaatggcttcctccacttagctccctgttcttgtgatctgccgtgcgcgggatcgtggtgcctcctagacatgtgcacatagagtccattatgagagcttttccgtgatgttccacatccactttgtatatgacatcgtgccctggactgaagtgtgttctggtcactccagctttgcttcgcgacacctcgtgtttcctcgttccccgtttctcctcgct

SEQ ID NO: 689948 - DNA, 230 bp, Homo sapiens
ggggggggttcccaaggtcaaaaaatcgagcccctcctggcccccatggtgaaaccccgtttttcctaaaaaaacaaaaattagctggggaggggggggggggtttgtagtcccccccccttgggggggtggggcaggaaaatccctttaaccccgggggggggggttgcagtgggccccgttcgcccccctgccctcccgccggggggcagagcaagaccccgttttta

SEQ ID NO: 689949 - DNA, 163 bp, Homo sapiens
accgaatgagggcgacacaggtactgtggatgtggatcgagatgaaagaaaccatcatagcctttgactgggcaaccaaatggacagtcagtttgctgtgctgcacggagaggctccgcaggatctctgtgtctttctaccacgtcaaaaacaacgggaagat

SEQ ID NO: 689950 - DNA, 704 bp, Homo sapiens
  misc_feature (221)..(221): n is a, c, g, or t
  misc_feature (464)..(464): n is a, c, g, or t
  misc_feature (466)..(466): n is a, c, g, or t
  misc_feature (481)..(482): n is a, c, g, or t
  misc_feature (484)..(484): n is a, c, g, or t
  misc_feature (489)..(489): n is a, c, g, or t
  misc_feature (492)..(492): n is a, c, g, or t
  misc_feature (498)..(499): n is a, c, g, or t
  misc_feature (505)..(505): n is a, c, g, or t
  misc_feature (512)..(512): n is a, c, g, or t
  misc_feature (517)..(518): n is a, c, g, or t
  misc_feature (578)..(578): n is a, c, g, or t
gtcagccgatgccctctccacaagctgcaccaggtcaacacaactgaatgtggccaccggtaaggccggccaagcctgtcagtacgtgaagagacccccaattgccgctgcagagtagccccccaacctgtccccccagaaagacccccagccccctctgtcctgactcaggccctgcagggttcccaccccagggaatgagggaggggactcttgtgcanaaaccccttcttcccagcgccttccgcactcggagtccgggtgaacggcttgtggttagctccaaggtaggcctccaagttgtgctgggaagcaatatcactgcctagccttctctgaccacagactttgtgaccgttgacctatgcgagtggtgggagaatcagttccaggcaataatccccacctgttcctagtgataactgggagggggcgtttctacacggccgacctgtcgccaggananaagcatggcccctgnncncccantgngcctgnntgggtnccggccncaccnnaagtgccagcatttggacttttgcccctttttttcccttgggccggctgtcccaaccaanctgccatggccaagggccgaacccgtttgacctcagccctgctccctgtgcccagggaccaacgaccagcccctggggctggcagggaggagctccaggctaataaagtggagaaactgtcaaaaa

SEQ ID NO: 689951 - DNA, 646 bp, Homo sapiens
  misc_feature (298)..(300): n is a, c, g, or t
  misc_feature (602)..(602): n is a, c, g, or t
  misc_feature (625)..(625): n is a, c, g, or t
  misc_feature (640)..(640): n is a, c, g, or t
  misc_feature (642)..(642): n is a, c, g, or t
  misc_feature (646)..(646): n is a, c, g, or t
atggtgggtcggaacagcgccatcgccgccggtgtatgcggggcccttttcattgggtactgcatctacttcgaccgcaaaagacgaagtgaccccaacttcaagaacaggcttcgagaacgaagaaagaaacagaagcttgccaaggagagagctgggctttccaagttacctgaccttaaagatgctgaagctgttcagaagttcttccttgaagaaatacagcttggttgaagagtttactagcctcaagcgtgaactatgtagaagcggcagtagacccatctgacaatatgcnnnaattgcgtggtggttgtgcgacaacgcccacacagcaccgtatacttcgcaggtgtctttacaagcaaactttctttcccacccaccaggtgtatcacaagatggctttcgtgacataacgctctccacacaatttaggtcaagacgaattgttgtagaggtcactccacgaggctcgtgtgctcgacaagattcgactgtcgcgaaatcgtagacacacacacatcgtccacaccattatattagatagatgcgtccaggtgtacgctcacactacatcacaaaacaacacaaatcaatcnaacattaacatattggccggganggagaagggggtggngngggn

SEQ ID NO: 689952 - DNA, 217 bp, Homo sapiens
tactctcgggcctgcaggtaggacgtggggaatattctggggctcagagtgttgtactcgtacaagaaggatcatagatgtagtctacaactgcatctaataacgagctggttcgtaccacagacctggtgaagacttgtatcgtgctcatcgacagcacaacgtaccgacagtggtacgagtcccactatgcgctgaccctgggccgcacgaaggg

SEQ ID NO: 689953 - DNA, 143 bp, Homo sapiens
gcggccgcctactactactactaaattcgcggccgcgtcgacgtgtgtttttctcatttataaaatcggtaaatttaacgccctgggccaacaacgcttgtataaattgctactttccttcacatttttttaaaaaaaaaaaa

SEQ ID NO: 689954 - DNA, 160 bp, Homo sapiens
tcctcagtgatctccagctgtcacattgtcaatcgccgtgaccttgccatatttgcagcgtcaggccggagaccccgtgaattgagccggtcatttcacgacattggaaagaaagtcaggccaggcggcatccggatcaagccgcagataggccatgccc

SEQ ID NO: 689955 - DNA, 1075 bp, Homo sapiens
  misc_feature (19)..(19): n is a, c, g, or t
attttgttggccataattnagactgttacattttatatagtgtggtataaaatggggcatggatttatactaagtccatggagttcagtggaaggggaatgatttaaaaaaagttgtggttttctaaataatgtggcttgaaaaataggtgtaacaggacttggtcagaaacgcagaggctgttcaagtttagctccccaccagatggaaaataggttaaattctgtaaagatttaactttaaccacaagagggcacaactggagagcacaatttttttggtactgcagtaaaattgattacctcttgagaagtgttctttttaaccagctataacaatagagttgagtattttcacccatggtttgaaaaagtgccagaaggccacactggcccacatctgtaatcccaacactttgggaccctaaggtgggcagagcacttgagccaatgagttcaagaccagcctggtcaacatgatgaaatctcgtctctactgaaaatataaaaaatagccagtcatggtgcatgcctgtaaccccagctacttggaggctgaggcaagagaatcacttgaacctgggaggtggaggttgcaatgagccaagattgtaccattgccctccagcctgggcgtcagagcaagactctctgaaaagtaccagaagcatttttcaggactgcctgtgtgtcttggtgattatgttaaccaactgtgttcaaaagaagtacccatgaaatgcctccagatataagggtgtttttttttacccataaagctaaactgcaaatattaccctagaattaactcttgtcctgtgtcaaaaagtctagtttggactctggactgtaaactgtcagcttctctctgacagtctcgaactggtaagaacagctcagttaacaggcaacggtgatctgctacaccttccaattttcagggccaatatctcaagttctcaagcacgtcggtaacataagcacgggttgattatcatgctctgattcccttatctgtgcacgcttccccttaacggtccctcggagtcctaccagtaggcatctaacaacggaac

SEQ ID NO: 689956 - DNA, 943 bp, Homo sapiens
  misc_feature (19)..(19): n is a, c, g, or t
attttgttggccataattnagactgttacattttatatagtgtggtataaaatggggcatggatttatactaagtccatggagttcagtggaaggggaatgatttaaaaaaagttgtggttttctaaataatgtggcttgaaaaataggtgtaacaggacttggtcagaaacgcagaggctgttcaagtttagctccccaccagatggaaaataggttaaattctgtaaagatttaactttaaccacaagagggcacaactggagagcacaatttttttggtactgcagtaaaattgattacctcttaaaaaaaaaaaaaaaaaaaaaaaaaaaaaaaaaaaaaaaacaaaaaaaaaaaaaaaaaaaaaaaaaaaaaaaaaaaaaaaaaaaaggggggggggccccccaaggatatatctccccgagggggaggcgacaaacatatctactacgcgctagcccgcccttattttcttagaaaaaaagggcgcgccaccacacaataaaagggggcgcgataataatataaacagcaggagcgagccgaggcggagactgtaataaaacaacaacgctagggggcaagaaaaactgagaaaaggcgaatcactattggtgaaagaaagaagaaggaccaccacaatgtgcgggggggagaggagcgagcacaaaaaggtaggaggagagcaaccacacccactccccagccagagattaataaagagagcccacggcggaggagagaaaaaaacggaccgcacagagaggagaaaaaacgaggggagggcacaaccccacaacacgacgagagctagtgggcggcggcggggggaagaaagaagaagcagggcagccacgacacaggaagagcatgaaaccagccaggccaaagggactttttcaccccagggggggagccaaataagaaaaaagagaggggta

SEQ ID NO: 689957 - DNA, 175 bp, Homo sapiens
cccgacgctgcccgaacctgaatcgtcgaactcgtaccacgcccacccttgtgcggtttccgtctcgatcgccgccccagatgcgcgccgctcgacggcgacgttgcgaaagtctacataccggcccggcagcgatccgtagtcaggcaggtgcagacgctcggcgacccatgcg

SEQ ID NO: 689958 - DNA, 234 bp, Homo sapiens
tgctttagcctatcaccccttattttattttgttgggttttaggcccccagggttttagggaactttttaagagatcctctgctcccaaacaataatggggatttttttgcccagaaaaatttaaggggggagggtaaaaaatgtcacaaaagactcctccccaaaactttatgttgaaatcccttaatattaaccagactttgttgtattgcaataaaacagagagctgttta

SEQ ID NO: 689959 - DNA, 100 bp, Homo sapiens
ctatctgttagaagctgagtataggccttaaacagaaatggtactgaggcttcctataccaaatcaaaaagagtactgacaccaattctcgaatcccacg

SEQ ID NO: 689960 - DNA, 162 bp, Homo sapiens
gccaggctggtctcgaactcgtgaccttacgatccgcccgcctcggcctcacgcctgtaatcccagctctcagggaggctaagaggcgggaggatagcttgagcccaggagttcgagacctgcctgggcaatatagcgagaccccgttctccagaaaaagga

SEQ ID NO: 689961 - DNA, 545 bp, Homo sapiens
ggtggtgctagtttctctaagccatccagagccatcctcgtcggtggagcgagagacgctctcgcgggcggcatgactgagcagatgacccttcgtggcaaccgtcaagggcgcagaacggctgggataaacccagagtcgcgtacgtaccccgcagtgttcccggacattgaatcctctccgacctgctcgagaataagtagccaatcgatcactggtggaaagctgaccagggatgagagccaaacgtatggaaagtatccactagcgtgtctctgcgagggtcacttcccaacttatgtataggtgactgtggtgtatctcctcagagtggaccacgtttgcacctcctcaggtcgtccctgggagtggaagccgctgctgccgtcgtgggagtctcacagacgtggcagccaccgagcgaggcggatttgtgggccataccaaggatgtgctgagtgtggccttctcctctgatgaaccggcgagattgtctctggatctcgagataaaacgatcaagctatggaataccctgggtgtgtg

SEQ ID NO: 689962 - DNA, 414 bp, Homo sapiens
gactattaactaaagtctcttgtatatgatgtgctcctaaaacctactaactctttctactggaatgagatcttctccggccttgggataatgggaacgtagccgactcctagacttagaatagagaccgccgtactcaatctgattattgaacgactgtgtctagaagatgagggagtcctcctcctactaaaacatgatctagatctagaatgcctacttaatacttcttacttatctggttctatagcagcagaaattagggactgtgcttctcgtactcttttcaaagctaacctctatatctttactagaggtaaccgatttcagaattgatgacacgagaccagcagctaactgattcaacttgcaatcaacagtactcataaagcttcaacaaatagtcaacaacac

SEQ ID NO: 689963 - DNA, 133 bp, Homo sapiens
tatgagagtggtggagcagagaattctacttatacaacatcaacatcttgtgtcaagatttgaactcttcaatctcttgcactccaagcttgtaaagatagttcagcgtgcattagttgcccgccaatcggaa

SEQ ID NO: 689964 - DNA, 407 bp, Homo sapiens
gcacaggtctacaaggattgtgatgaagatttaagatgtgcggtcaggagttcaatgaccagcctgggcagcatggtgaataccccatctctactaagaatacaaaaaatattatctgggcattgtggcaggcacctgtaatcccagctacttgtgaggccgaggcaggagaatcgctcgaacccgggaggcggagcctgcagcgagccgagacggcaccgctgcactccatcctgggcaacagagccagaccctgtctcaaacaaaacaatacagtctagggagtttcattctagcagctatgctcttaggtgctcaaaatttgttgaacattatcaagaacagaagttgagcagaaaactaatggatagtgaagaaatacttattgacattcttcacatagaatg

SEQ ID NO: 689965 - DNA, 116 bp, Homo sapiens
acacaacacaacacaaacaaacacaacaaaacgaaaaaaaggacgtgatagctatatatggcccatcgtgctcagccgaaggacgagcgccaggagcctatagagcgaggaagcgg

SEQ ID NO: 689966 - DNA, 358 bp, Homo sapiens
  misc_feature (234)..(234): n is a, c, g, or t
  misc_feature (259)..(259): n is a, c, g, or t
  misc_feature (277)..(277): n is a, c, g, or t
  misc_feature (314)..(314): n is a, c, g, or t
  misc_feature (346)..(346): n is a, c, g, or t
  misc_feature (350)..(350): n is a, c, g, or t
agggtctcgctctgtcaccaggctggagtacagtgatgactgctcactgcagcctccacctcctgggctcaaagtgatcctccaacgtcagcctctcgagtagctaggactacaggcacatgccaccaccaagcccagctatttttaaaatttttgtgtggagacaaggtctcactatgtggcccaggctggtctcgaactcctgggctcaagtgatcctcctgcctcggcctncaggagtgggagttggagttgatanctggatacagaagctctntgggtgggagttaggcaaaacaaagggtcctcaggtnttgggacaagcaatttcctctggtgaaaaaanactnggctttct

SEQ ID NO: 689967 - DNA, 246 bp, Homo sapiens
tgcgctgaattgtcataagaaacaccaacctgttgtcgatgttgaaaacaattgtgattgttgccctgtaacattgtgaagtgttccgttgaattattcacacacctgaaatatggcaggtgtcacccaccctcgctgtagaatatagaataccattatgggctttattaacaattattgttaacagtgtatgcagtggttttgcctagttgttccaagttgttggaaccgtcaccaatataacaa

SEQ ID NO: 689968 - DNA, 1469 bp, Homo sapiens
  misc_feature (569)..(569): n is a, c, g, or t
ctgttcgcccccggagttactgggatcgcgctggatgtctcgccccgtcgcgctgcgccggctcgcgctgcgctatttagctccgattcccacactcacctgctggggactttcagccgccgcctgcacatctgccgccacagcctccgccggctaccctgaacgttctcgtgggccagcgccgattggatcaccggggaccgcgaggcaccctgctgctgccgcatgacccctgcgcgggcttggattcaccctggctagagctgcgccatcatgcgccgtggcctcttgtcttgccctgggctgctgccagagcctgcttgacgggcgcgcaagagctgccttgggactccgggatgccctgatccctatgcgccgcgatgcgggaaggcaacctacttgcagagagatcgggggcctgggacgctgctggccgaaggtgtgatcggaaccccaggctagccacaaaaggtgcactttggccccagtggctaaggaagagccaaggggcacgagcaacagaccaacaccgacttctgatgtggcccgggaacttcgggatcagaacntcggcccggacgcaatttgctgcccccgaatggtaaccataccgtggggtagtaccaagtagtaccacgacgggttgcatattacaaaatttgggcagaagaccgcgaaaatttgtgtgggggttgccaccatgggaacgtaaagtgcacagagtttgaattcacgtgatgctgtgtcaacatacaccttggtacaaccagaggaatacagaccgacacgtataaacaccattatcacatatgtaacacccaggtaggttttagccaccaacaggaaattaggcattgcccccacgaaaggcccatttggtggtcccggcctgagtactgggagatacattaacgacagagcatagaaggcggcacaccagaaacacaattagtagcacccaactgaatatcccctaggaaaacccacgtagcacaccagtatacatggaggtaactacatgcgagtatacaccttcagagggcaagaattgggaacacataacgggaatggactagaaaaagaaaacgcaagaggatacaatccagattaacatacgcattttacacgatttagcagatatcgacacagaagagagatacaaataccaccagaagaatcacgagatagaaagtaatagataggagagaacagaaccatattacgcaatagcgaagaacatcatatagacaacaatagagaacaagagaaactagaaccaaaatagaagagaacaaccaacagataaaagccacagagaacagaaaataagacaacagagaagaaagagtaaatagaaagaaaagaagaaagaacaagtagagcgagaaaaaacacaaagacagacaaaaaaataaagaaaagagaaacaccaaaaaagaaaaggaagaagaataaagagagaaaaccag

SEQ ID NO: 689969 - DNA, 550 bp, Homo sapiens
  misc_feature (53)..(53): n is a, c, g, or t
  misc_feature (87)..(87): n is a, c, g, or t
  misc_feature (92)..(92): n is a, c, g, or t
  misc_feature (284)..(284): n is a, c, g, or t
  misc_feature (293)..(293): n is a, c, g, or t
  misc_feature (393)..(393): n is a, c, g, or t
  misc_feature (398)..(398): n is a, c, g, or t
  misc_feature (406)..(406): n is a, c, g, or t
  misc_feature (425)..(425): n is a, c, g, or t
  misc_feature (439)..(439): n is a, c, g, or t
  misc_feature (441)..(441): n is a, c, g, or t
  misc_feature (509)..(509): n is a, c, g, or t
  misc_feature (511)..(511): n is a, c, g, or t
ggtaatatattttcaaggggtgattttctttatttttgttaatattaaaaagnctgtatggcatgacaactactttaagggggaggnaaggnttctgtctactaagagatgctgtgataccttaggcactaaagcaggactagtaatgctttttgggattcatgatggtttattttcacaggttggggaaacgtgcactgtaaggcgaatgaaacatgatgataactttgtggtctaaagtgattagctgtcaagccggatgcctaagttaggacaaatcttgntattgaagngatctgagctgtatcttgatgattagaaaagtattcgttacatcttgttagggactactttttgaacttttcattccctgtagttgacaattctgcatgnactantcctctanaaaataagttaaactgaancaacttgatggaangnactctccacagggcttgtttttccaaagaaaattattgtttggaagaacaaagttaaaaacctacctnancatatccttaaagctgttcaaaaataactcaaaccatct

SEQ ID NO: 689970 - DNA, 159 bp, Homo sapiens
cactatcgtgaaaaaaactctacctctctatactaatcatccctacaaatctccttcattataacatatcacagccacatgacctactcatatatatatatcttcttcgacaaccacactatatcacccaccttgtgctatcatacaccctgatgcagt

SEQ ID NO: 689971 - DNA, 139 bp, Homo sapiens
ctctgagtatcccaattagaggcacggaccgaagcctgagagcctttcctctgtcaagtgggactgaaactcttgtacagatgctgctcaatctgactggtatagtcaggacagttaattccgtgggcctctatgaatt

SEQ ID NO: 689972 - DNA, 523 bp, Homo sapiens
caaacctaaaaaaaaaaaaaaaaaaaaaaaggaaaaaaaaaaaaaaaaaaaaaaaaaaaaaaaaaaaaaaaaggggaaaaaacccaaaaaaaaaaaaaaaaaaaaaaaaaaaaaccttgtgggccgcttggcccaatcgacttttaaactggaccaagtttttgctggcggccgaatttgggcctaattggcccaatgccccctatggggggtcgtttaaaaataaatgggccgcgttttaacaacgtgggaacgggaaaacccctggggtacccaaattaaatcgcttggaagaaaatccccttttcgccagtgggggaaaaagaaaaaaggccccaccggatccccttcccaaaaagttgcccaccctgaagggcaaaggaaaattgtaaccctaaatttttgggaaaaatccgggtaaaatttttgtaaaacaaactctatttttaaaccaataggccaaaatcggaaaaacccctttaaaataaaataccccctggggttgagggttttccctttgggc

SEQ ID NO: 689973 - DNA, 101 bp, Homo sapiens
aaggctattcttaggcctcaggcctcccaaatatgcccctccccagtagatacggttccctgcataggagctggggagggagagatctaatcccttcaagg

SEQ ID NO: 689974 - DNA, 125 bp, Homo sapiens
aatgaggaagaggacagatgcaagtcaggtggtgagagcacttggaggggctgaaaggacatgggctgggagtgaatgcatgtgcacatacacacacacacctctccaacatatgtacacatgca

SEQ ID NO: 689975 - DNA, 1021 bp, Homo sapiens
taggtgagcccggtgttaatcggccgagggtctatggtgtggcgctgcggaactgaggcatgaggggagctgcttatccgcttcttcaactccttcaatgaggccaccatggttctggtctcctggcctcatgtggtacgcccctggtgggcatcatgttcctggctggctggcaagatcgtggagatggaggatgtgggtttactctttgcccgccttggcaagtacattctgtgctgcctgctgggtcacgccgatccatggcgctcctggtactgcccctcatctacttcctcttgcacccgcaataggaacccctaccgcttcctgtggggcatcgtgacgccgctggccactgcctttgggacctcgttccacgtctccgctcacgctgccgctgactgatgatgtgcgtggaggagaatattggcgtgggcaagcggatcacgccgtttcatcctgcccatcggcgccaacgtcacatggacaggtagccagcgctcttccatttgctggtggtcagctgtgttcattgcgctagctcatgtccagcagatcctgtgtgacttcgttaaagatcatcaccatcctggtctacggacacgagcgtccgagcgtgaggggcgagccgcgtgcatccctgcttggacggtgtcctcactctggtccatcatcctcgaagcagtcgaacctcccggtcgaccatatctccttgatcctggctgtggactggctaatcgacggtcctgtgaccgtcctcaaatgtaggaaggtgaccctgtgcgggcagggtgtcctccaaaatcccgtggaccgacggatgtccagaagcccgatcctgattgatcccgtgaagagtgagctgccctggatccgtgccctcccctggggaaggaaccccttctgacccttagtggccggggatgccagtggcaccagaggaaaccctgtaccggggatccaccttggtgtctggcccgttaggaaccgagacactctcgttctccctggacgcccgaga

SEQ ID NO: 689976 - DNA, 133 bp, Homo sapiens
gtagacatccaccgcgccagccctgctgccaagagcccgtcggccccacttatggagcagtggctcagcttagtccctgagtgacaccgtcgagaagctcaaggatgaggtcctccacggagacagtatctca

SEQ ID NO: 689977 - DNA, 308 bp, Homo sapiens
agcatacaccgtcccagcgagtcaccctctaaatcaccacgatcaaaagggacaagcatcaagcacgcaagaaatgcagctcaaaacgctaagcatagccacacccccacgggacacagcagtgattaaccttatagcaataaccgacagtttaacttaagctatactaaccccagggttggtcaatttcgtgccagccaccgcggtcacacgattaacccaagtcaatagaagccggcgtaaagagtgtaatagatcaccccctccccaataaagctcaaactcacctgagttgtacaaaactccag

SEQ ID NO: 689978 - DNA, 174 bp, Homo sapiens
  misc_feature (40)..(40): n is a, c, g, or t
  misc_feature (48)..(48): n is a, c, g, or t
  misc_feature (75)..(75): n is a, c, g, or t
  misc_feature (110)..(110): n is a, c, g, or t
tgaatgatctgacctattttgtgctggcagctgaaacagntttttttntggatgaatggatccacaccctcaacngcattctgcaaatcagtcctgaggggcccctccangggaggaggagcacagagctcactgatctgggtctggattcgctggataattctgtaacttgtg

SEQ ID NO: 689979 - DNA, 914 bp, Homo sapiens
  misc_feature (424)..(424): n is a, c, g, or t
ttttcttataagtttttaatgatcaaaacaaagcatttaaaaccgcagttcttggaaaaccaatgtgtcctggctggacgactactccgggacgcaaagcggctaatcgctgaagaactttgatgatgcaccctcagatcgcccctagagccatgcatctggtggctggaatggaccgctacccccggaaagtgacagctgcccattggcccatgaagaagatcgcctagagatcaaagataaacatctttggtgaaagctgtataccttacaatcacctaattgcccacaaggtactcctgtggatatccccctgtggacaaaaattgtcgttcaataaggatgtctctcagaagatcctggctccttaaaccgtcaggaggccccgaacggggaagtgcccaaggtccaaggtctcggaagnagcagcatacaaagaccaggtcatagaaaccaagttggttccttccagaaacccgtggcggttcctcagcaatgccttgggtcccccgagtacattcaacaaactgtctccaccgcaaaagacaatactacaacatctcatggatgacatcccaccagtagccatatcacaaacgtgcgcaaagaccacctacgtcatatgacagcacgcgttaaatattacatacacccaacgacaaggaagagctagcccacgtaaacctatgaatataagatgccccacactgctagacaacggactatcgtactcccatgcttctagcgaagacaccaccgccgagcctcaacattgtagcaccaacacgggcgggctcgcctcccctatactaaaccgcgatcctcgtctattactgagcaacgacgcgacagcaccaccggaggccgtgcccatgctaataccccacaacagcggtactagctacgtagcgaaa

SEQ ID NO: 689980 - DNA, 197 bp, Homo sapiens
aaacctgtatcaatttgagtatactgagcaagtatactcgagacgatagaattgcataagattttgtccattgagtaatcacatccaaagatagaactcacgacgtgtgctgatactatgatgaatccctcattcctggccttatgttacagttcatagagggccagatgctgagggctgtataccattcataaaat

SEQ ID NO: 689981 - DNA, 1554 bp, Homo sapiens
ctcccccgtgcactgccctgcccagcctccgtgggctgctaccacgatggtggcctggctggtgtgtgtgctgtgctggcgtgcacccctgatgcagtgtggacactgtaccctgtactgggctgcccacaccgtcctgaagatgtctccccatggacgtgcttggatgcctgtgatgcatgaccattcttcatccatccctcctgccatgtgagtgatgcactggccaatcccctgcctgacatcctcccagccgtgcacagtggacagccctgtagctcagcctgtgatgttactgcccacaatgcgccatcataccacttgtatgcacacacacaccatgtgtgctcacacttgtgccccatatgtgaccaggttccacacctggactgtcttccacttgcattgtcgccactgttacctctctgtgagctggtcaccacgcagtacgtcccattggcgctacattagcgtacgcactcgtggcacagccctcactcagcaccagctacacaacatacgcaagcacatcctaatggccgcgacccttgtgtgcccaagagccttatatcacgcacatgcgacaatcccatcgcatgccaacccgttgtgcatatcaagagcgggcccacatagtgcactccaaaccttggaagccccatcgagttgagaaaccatcacattggacgtgtgaacgaagttggagagcttcagagcatactcttgataagattatccagaaccccagcgactgcctttcttggaacacctatcactccaccttgctgacgcaaccacccccagtggaagcagtactccatggcacccaacctactcgcgtggtgccccaacttgcgacgctcctttccaaccgtctggggagcaagcttggctttccccatggcggcttaccattccacatcgcagcggtggaattagaaagcgagcacaccaaactcacagtagttcgctttcccagcagagacgaaggggaagagacacgtgcgaagaggcccacttcagcagtgttcagttccacaggggagtccccatttggggcgtacttgggacgcttagcacgcgaagcgaggagtacccacaccgctgttgatcctacacaacatagagcgacacggtcgtatccccaacagcacttgggtgggacccacagtcaaccgacacacacttggcgaaacggaggcatagccacccaccggaagcctcagggggacccacgggagccagcatccgaccaggaccccagtacctgtcgcaggatacccacttgggaaggccccggatatggaagagttctggagaaaagacgaagacagcgccaagaagacacagaggcaacaacagaccccaaaaaggaactactaacgccgttccccgcagaccccagggcagcccaaacagaggcacacaacaggacacagcaggcgccataacagaggccacatcgggagacgacgccaccagaaatgaagccatactctgacagccaccaaacaaagcgataggaagacgaagccaagacacgtagtaaagccg

SEQ ID NO: 689982 - DNA, 141 bp, Homo sapiens
ataaaagggggggggggggtttttttggccccccccaaaggaaaaaaaaggattttttttccggggggggtttggggggccttttttcaaaaaaggggggggtttttgggggggggaaaaaaaccctttttttttttttta

SEQ ID NO: 689983 - DNA, 112 bp, Homo sapiens
gttgggtttataccgggtaggtaacggggacaagtgaggtaactgataccttgcttttgtagacagtgcaagacaattattttgtaggtgaagggactgtatgccaacaagc

SEQ ID NO: 689984 - DNA, 576 bp, Homo sapiens
  misc_feature (10)..(10): n is a, c, g, or t
agaggattcngccggatgataccttttaccagagcgggtcatgcaaagctgtcaaaagagcaacttcaggggttctagaaatcatgagataaacccacactgagacagccaatttgtgtcttcaattctcacagctttccatagcatttttttttaagagaaaggtactgcgtctttatcatacaggtacagcagttttaaagggacaaaattcaagtcaagacagttaccaactctcatcaatacgattaccaaagcacgacagaggattaacaagaagcacaatcgtcagagaaccacagcaggagtcgggcatgggtatgctatgtgcgtaccaccagtctagagccagccttcggtggagagcctggactggataggctgaagatgccgctgtccctgcaccaaagcgcttggacagcagaggagaagtcttagtcacttaccctcagaggctacccatgaggtctggaccaggtgttagttacgctcacactctaacacctgaaggtacataacgattatcttatgaggatgcttcacatggacgcagaaaaccaactctttgagaactcg

SEQ ID NO: 689985 - DNA, 425 bp, Homo sapiens
ggtgaccaggcgaggcgacacagccagacactgtgctttacacgggaatacagaaattacgccaggtgaggtggtgcacgcgtgtagttcctgctactcgggaggctgatggtaggaggatcagtttaggcccgggagcttgaggctgcagtgagctgtgatcgtgtcactgggtgacagggcgaaatcctgtctcaaaaaaaaaaaagcaaaatggtggtcctaggacagatttggatttacaaagttaaggcgggcaattggtaaaagtatagaatcaatggcaagacctctctccggtttatgtatccactgggaagttcccataggcttccggattcatcatttacaatggaattcctcttcccgggtatatcctaacctcctatatcctctatcacgggaaagggccccattttgtataa

SEQ ID NO: 689986 - DNA, 143 bp, Homo sapiens
agaccctgtggtgcttatggtcggctgctgcacacggactggggaccggacggcggacgacgctgacacggggctgggctgggcccgctgggacgggccgacggacgtctctgcacctggcacgttctgtacacccctgacgc

SEQ ID NO: 689987 - DNA, 108 bp, Homo sapiens
gtgcgaaactgtatcgtattatacgatggctgatatctgagtagtgtgattgaggtggagtagattaggcgtaggtagaagtagaggttaaggagggggtaccgagct

SEQ ID NO: 689988 - DNA, 537 bp, Homo sapiens
ttttgaatgcaccaaattttgtaatcttactgttacttctttgtattccattgcttcaaatggtatcacacctctgaatatgttccttaaaatttattagttacatataggcttatgtatatgtgtagtcattatatatgttcttatagggaagagattttatcattttgttcatcatgtaaacccacaagttcaagaaaaatactgatagagggtagatccacaaacattggtggaaagtgtgaaatcggtttgccagaaatatgaacaaaggaagcacaatggcatacaggacggtattccaaagtttttaagttgtgtcttggaaagttgtgtagtgagatttcagcagagggtaaacaccccgaaataacaattttgacttctatattatgacttgctttggcagtctacgtttgttccaaaagtgtacatcttcttttctaaacagagcttcctaatacccaattttgacaccaattccatttctaaaccacgattggcagttcagtatttctgatcatttgttatctaacc

SEQ ID NO: 689989 - DNA, 871 bp, Homo sapiens
ggcgtgtgaacctgacggaactgctcacgatgctgacactttgaatctctgtcactgctgctgggagccagagcgggcaaaacgaattgttgactagcggaaagacatcgggcggtatcagggatgactccccgcactggttcaggaattacggtaagaggaccccctccatatgtggcctggtctgcgagcaagatgtcgcagcaccggactttcatcctatagtacgtaatggagagccctgaaggaagtgttccagagaagaggtgcccggcaggaattgcatcgagaagacatcagcgtggctcccaaaatttctcagaatgaccaacgaagtaggcaaaagacatcttcgccctctgtagtttattgccatggggatttcctgtgagaagcaaacgggtcgcagacacggtaatatacttgggcctgggccgcagtggtggcgccatgcaaaagaagatccttggtacgcagaggcggccttgggaaaaaggtggtggaggaccggttcattgcgtgcttgttgcgcctcgtgggtcagacagcgttggctttcccccgaaaaccctggtggtttaccaatcgatccaaaagtcacctccgggagggagtccaatttcgctgggattcggtacgggtaacgcaagagaacgtgggcggttagtattgggggggagctctccttcgcagaccggggcggtccggattaacctcggccctttcccaactgttcgcatgtgttccatttgggggcctccaggcccttgtgttggccccacctgcctgtttgggggagtgctgtggacttgatgatccccattggcgcccacttgggcgcgcgttccccagggggttggcccccggccag

SEQ ID NO: 689990 - DNA, 832 bp, Homo sapiens
  misc_feature (25)..(25): n is a, c, g, or t
  misc_feature (90)..(90): n is a, c, g, or t
  misc_feature (104)..(104): n is a, c, g, or t
  misc_feature (112)..(112): n is a, c, g, or t
  misc_feature (119)..(119): n is a, c, g, or t
  misc_feature (123)..(123): n is a, c, g, or t
  misc_feature (133)..(133): n is a, c, g, or t
  misc_feature (142)..(142): n is a, c, g, or t
  misc_feature (144)..(144): n is a, c, g, or t
  misc_feature (146)..(146): n is a, c, g, or t
  misc_feature (154)..(154): n is a, c, g, or t
  misc_feature (158)..(158): n is a, c, g, or t
  misc_feature (160)..(160): n is a, c, g, or t
  misc_feature (172)..(172): n is a, c, g, or t
  misc_feature (177)..(178): n is a, c, g, or t
  misc_feature (190)..(190): n is a, c, g, or t
  misc_feature (192)..(192): n is a, c, g, or t
  misc_feature (207)..(207): n is a, c, g, or t
  misc_feature (210)..(211): n is a, c, g, or t
  misc_feature (214)..(214): n is a, c, g, or t
  misc_feature (216)..(216): n is a, c, g, or t
  misc_feature (222)..(222): n is a, c, g, or t
  misc_feature (229)..(231): n is a, c, g, or t
  misc_feature (238)..(238): n is a, c, g, or t
  misc_feature (245)..(245): n is a, c, g, or t
  misc_feature (249)..(249): n is a, c, g, or t
  misc_feature (260)..(260): n is a, c, g, or t
  misc_feature (272)..(273): n is a, c, g, or t
  misc_feature (300)..(300): n is a, c, g, or t
  misc_feature (305)..(305): n is a, c, g, or t
  misc_feature (308)..(308): n is a, c, g, or t
  misc_feature (314)..(314): n is a, c, g, or t
  misc_feature (316)..(316): n is a, c, g, or t
  misc_feature (318)..(318): n is a, c, g, or t
  misc_feature (320)..(320): n is a, c, g, or t
  misc_feature (328)..(328): n is a, c, g, or t
  misc_feature (350)..(350): n is a, c, g, or t
  misc_feature (363)..(363): n is a, c, g, or t
  misc_feature (367)..(367): n is a, c, g, or t
  misc_feature (392)..(392): n is a, c, g, or t
  misc_feature (396)..(396): n is a, c, g, or t
  misc_feature (400)..(401): n is a, c, g, or t
  misc_feature (409)..(409): n is a, c, g, or t
  misc_feature (414)..(414): n is a, c, g, or t
  misc_feature (424)..(424): n is a, c, g, or t
  misc_feature (448)..(448): n is a, c, g, or t
  misc_feature (462)..(462): n is a, c, g, or t
  misc_feature (469)..(469): n is a, c, g, or t
  misc_feature (477)..(477): n is a, c, g, or t
  misc_feature (487)..(487): n is a, c, g, or t
  misc_feature (497)..(497): n is a, c, g, or t
  misc_feature (499)..(499): n is a, c, g, or t
  misc_feature (502)..(502): n is a, c, g, or t
  misc_feature (510)..(510): n is a, c, g, or t
  misc_feature (534)..(534): n is a, c, g, or t
  misc_feature (545)..(545): n is a, c, g, or t
  misc_feature (582)..(582): n is a, c, g, or t
  misc_feature (593)..(593): n is a, c, g, or t
  misc_feature (604)..(604): n is a, c, g, or t
  misc_feature (606)..(606): n is a, c, g, or t
  misc_feature (612)..(612): n is a, c, g, or t
  misc_feature (728)..(728): n is a, c, g, or t
  misc_feature (819)..(819): n is a, c, g, or t
tcctgtcggaccaaagcattacacnagggggtattgccagggagctcttgcagagccttctccctctgtaccccccgacagtccccaganaccctgcctccgtngcctccanctctggntcanctccctggangaccccganananagggaagnaggnanaggagggctgtnggggnnaaacctccccanangcaaaaaaagaaatnaannaantngaaggntaagtannnaaaaggnggttgantganttgaatgaacnaacctgtgggtnnagtcaaacgaaaaaatgtaaataaatnaaggnctnaatttnanantnaaaaaaanaatcgggaaaaaaaaattcgcntataaatgaatanaatnaatggatggaaaaaaaaaaatggantggnaatnnaatggaanaaaanaaataaaatnaatcctttaatggaataaaatganatgaagaaaaaatnaaaaaanaaaaaatnaataggtganaattggattntngangaaaaatnttaagaagaaaaattgtatgtatnaagggactgtnttatgatgaaataaatgtaatttcctggagctaattnttgaatgaaantatgtaaaatntntaaatnaatttaattatgaattaacaattatacagccactcagaggtcctacattcgccagaattggcatccagttgatgggttcatttgaattaaatggtttggaggctaacgtgattttntaaattgaatttcatcactattctgtgtattctatttatcactattctaaataactcatggttggataattgattatcatgtaagcaagcnatttgaagaaatt

SEQ ID NO: 689991 - DNA, 757 bp, Homo sapiens
cgggactaccgggggtcattggccaggttcagatactgtggcacatggagccctgtcgtgtggatcttctttttattaccaggttgggccctgaccaatgcctggcgcccagaggtttgagctgtggtgagctggggtcaccaccccgtgcgttcccgccctgtgtgaccgggccaggcctcatgcgctctacaaatttagtagttacccgaggttataactggactctgagatatgacttaagttcttgtgtgatacagtgtgcccgtaattagcgtccagaccattccctggggcaaccctattggaactggcattgtaatccccggctatgtctcctttttagcgttctgtaatcctttggccagcgccccttggattctttccagcctggtacccattaggagactcgatccggtgattgcccttttccaactgtccagttctcttaatttcaggcgttggtagcttgtaggaactgtaaattgcccatttaacaccctttatgtaacctcccaacttatccatgtgattcaccacgaaaaagtccccttctttccccaaccttgatggtacccccacctaccagttttaaatatgaagtcgcacctgttttaagagattttgcatatattttatgtgccaccttccagaaccttttttttgggaaaaggaccccaccatttttataactgcaccatattaatttattgcccgaataaattgccttgccatcttaattaatccgataattcca

SEQ ID NO: 689992 - DNA, 435 bp, Homo sapiens
  misc_feature (25)..(25): n is a, c, g, or t
  misc_feature (90)..(90): n is a, c, g, or t
  misc_feature (104)..(104): n is a, c, g, or t
  misc_feature (112)..(112): n is a, c, g, or t
  misc_feature (119)..(119): n is a, c, g, or t
  misc_feature (123)..(123): n is a, c, g, or t
  misc_feature (133)..(133): n is a, c, g, or t
  misc_feature (142)..(142): n is a, c, g, or t
  misc_feature (144)..(144): n is a, c, g, or t
  misc_feature (146)..(146): n is a, c, g, or t
  misc_feature (154)..(154): n is a, c, g, or t
  misc_feature (158)..(158): n is a, c, g, or t
  misc_feature (160)..(160): n is a, c, g, or t
  misc_feature (172)..(172): n is a, c, g, or t
  misc_feature (177)..(178): n is a, c, g, or t
  misc_feature (214)..(214): n is a, c, g, or t
  misc_feature (216)..(217): n is a, c, g, or t
  misc_feature (220)..(221): n is a, c, g, or t
  misc_feature (227)..(227): n is a, c, g, or t
  misc_feature (237)..(237): n is a, c, g, or t
  misc_feature (246)..(246): n is a, c, g, or t
  misc_feature (262)..(263): n is a, c, g, or t
  misc_feature (287)..(287): n is a, c, g, or t
  misc_feature (299)..(299): n is a, c, g, or t
  misc_feature (305)..(305): n is a, c, g, or t
  misc_feature (309)..(309): n is a, c, g, or t
  misc_feature (313)..(313): n is a, c, g, or t
  misc_feature (321)..(321): n is a, c, g, or t
  misc_feature (332)..(332): n is a, c, g, or t
  misc_feature (380)..(380): n is a, c, g, or t
  misc_feature (396)..(396): n is a, c, g, or t
  misc_feature (399)..(399): n is a, c, g, or t
  misc_feature (416)..(416): n is a, c, g, or t
  misc_feature (426)..(426): n is a, c, g, or t
tcctgtcggaccaaagcattacacnagggggtattgccagggagctcttgcagagccttctccctctgtaccccccgacagtccccaganaccctgcctccgtngcctccanctctggntcanctccctggangaccccganananagggaagnaggnanaggagggctgtnggggnnaaacctccccagctagccacaaccgccatgaccccntnngcnngtcatncccacaaggnggttgcctncttttacataactccnnaaaaataaactaaaccgatcagantactcatgactnccaganttgntccnatttgatncggcgcctagngtttgctccgcacaagtggccaataaaatcaaaatcgaatccaattcnattggcaagatcagcnggnataggatttccattcgnttgctgtgcngcgacaccc

SEQ ID NO: 689993 - DNA, 136 bp, Homo sapiens
cgccacttcttcagataatattttctgaactaaagtcttttcctaaaattatttattctgttaaactttaatgtaacgtaatgttctagatccaagttatagtgtctattgtacttatgggacttacatatttaac

SEQ ID NO: 689994 - DNA, 654 bp, Homo sapiens
caaatgggaaaaagggtaagggaaaaggagatgcaaagatgcttaacaggaaaaaaagggccataaatgaggttaaaccaggattaggaattcattttaactcataactttggcaaaaggtaaaatttttttagacggagcctggctctgggtaagtttcgatctcaactaactgaaaccttaaccttccaggttcacgcaattcttctgcctgggcctcccgagtagctggaactacaggcgcctgccataacgccgggctaattttttttggaattttaagtaaagacggggtttaaccatgttaaccaggatggcctcttaatctctggacctcgggatctgccaacttaagcctcccaacgtgctgggattacaggtgtgagccaccatgcccggcccactttggtaaaatttaaggagtccaatgtaccgttgatgaggatgtggagaagcaggacctaacaccatgctagtggaaccatgattggctctatccctttggcaaagtaatctgccaatgtttattaaagggttgaactttgtggttcacgcctgtaaattcagcactttgggagacccagttgggaagatcccttgggcccagcagttgaagaccagccctgggcacatgattggacccttttttcattt

SEQ ID NO: 689995 - DNA, 132 bp, Homo sapiens
  misc_feature (78)..(78): n is a, c, g, or t
tctgtgcgacattttattacacagggaaatggggtccctagctgcacacccagcctgagctttttcaagcagataaantcacagcagaaatagaatcaccctaggacttctcgcgtgttccctggtgcttac

SEQ ID NO: 689996 - DNA, 256 bp, Homo sapiens
tcaggagaatcacttgaacccgtgaggcagaggtggcagtgagctgagatcacgccactgcactccagcctgggtgacagaatgagaccctgtctcaaaaaaaaaaaaaaaaaaaaaaaaaaattttttaaaaaatgaaaattcaacccttggttttaaaatggctctttgttgggccccacacctcactctctttacagagggcccctggcctctcctgtggccctcttccccaaccccaactctctcacaatcc

SEQ ID NO: 689997 - DNA, 416 bp, Homo sapiens
ttttattcaacctgtcagttcaacccatgacagggatgatttttgagattctgagctccccttgcttcaactgctaccctcttctaaagtgaccattgaggcacctcgaccgagccttaggactgcccatcctgaacactgaaaaccactgggccagtgccgtctccccatattgctggatcaggagaatcatctaaggtctttcttatacacagaatccctgagccccaccccaatctactgaatcagaatcttgcagtctgtgtttctatcaagtgctggagggcagtcatgatagactagtcaagttcataatgaacgctgtgctaggagcagagggccattttgggaaactgggacttgaaaagggcaggtttattaggggatgtttgattttcagggctgaggggttcatt

SEQ ID NO: 689998 - DNA, 174 bp, Homo sapiens
gaccatgtaaactcttgagaaagggtctatgactctttaaccaattattgttcaaaggagtccccaaagtgttaagcagtttcaaggacagacatccctcctaccaacgcagtggacttcactggaagatgctatttcaccaaaatctgcaaatgtaaactgaagtgtcaacgt

SEQ ID NO: 689999 - DNA, 1029 bp, Homo sapiens
gaaggacccagttccttaccagtgctccctttctctgtcagctggggacgtcatcagacgaagctggaagccagtaaagtgaactaattcgtttagaccacatatataccaagcccgctagtcttagagatacccgtctgtaggacagagaggccaagctgaattgtggtagtgaaaatctgaggaagcgatctctcagtccctcagagaatgatcaccctgaattcattgtctcagtgaaggatgaacgctgtacgaagatgacctcgttccaggagctgggtagtctcaaattctgctttcatcacagcacacatggcccgaaagcactatcttgcctgtcctacatggatggctgtgactagttgaactgtggatacggggggttgccctttcccgcgagttcgaggtgacgatgtacactgctctgctatggtgtaaatccattgctctgggaggacactctttgcccacttgaactgctttccccgagcgtagagttagatgtctaagggaagtgatccgagaatagctgttgacccttttccgttgaactattacatcttgcctggaggatagcaagagaaagcctgtctgtacttcattcgggaacagccaaagtagagagtatacaggcctagagaatacctctatattgttcagatctcataggatgacccccagtgtagttgtcttttgacatccaggcagtccaaggctattgagaccatagttcgtggaagtcagaaatgttactataatgtgagaagtacagctgtaagatgtacttttatcttacaaggggtggtagtataccctaaaaatactctattattgtacgggtcatttagaccacgatgtcttgacggtcgagcatggaacttactgaagtggtgcttcatcatttcatcttcgcgctttgggggcatcctgggcgtggcctccaggttgaggtccttagttggcttgctgtcagcagagggaaacactgtgaggggggatcttcctcatgtatactgacggtagacg

SEQ ID NO: 690000 - DNA, 503 bp, Homo sapiens
ccggaccggtctcatgcacagttggtggatacccacgtgatataaaaacaaatctacacaaaaactgtgcacagatgttcttgcagcattatttataatagcccaaaattgaaacagccctaatttctatcaactaacaagtgaataaacaaaacgtggcatatccatacaaggaatattattcagcaataaaaaaagagatgaagtactgatatgcaccacaacatggaaaaaccttgaaaacatatcaagtgaagaatgccagacatgaaaggccacatattatatgatttcatttatatgaaatgtccagaacaggcgaatatatatagagagaaggcagattagtggttgcttaggctgaagggttggggaggacaaaggggtgactgctaattagtatggggtttcttttttggggtgatgtaaacgttgtaaagttgattgtggtaatggtggcacaactctgaatatactaaaaaccactgaattgtatactttga

SEQ ID NO: 690001 - DNA, 164 bp, Homo sapiens
gactgttcttagaccacaaagtgtgtgtgtctgtagctcagttcccagacagcttctaggtagtgcaggaggttgcttcatgtggcacttgggcatttatattccacttggcagggtcaggctgtggcctatctggagccaggtagcttgttaatggaacgcta

SEQ ID NO: 690002 - DNA, 813 bp, Homo sapiens
ctgtgcccacggggatataggagatgcccccccttgtgcgaaattgtgcgcacaccccttgccaaggcggggaaaacattttttccaagggggggcaccccccagttttccaaactcttgggggattagaccctgtgcgatagctcttcttccgcggtttgcagcccccgggtgcgctcgccagtttttattgggtacctatgcggtcgcggcggaaaatccggtgctccgccataatctggcgcccgccgtgacgccctgcagggacgtcatgtgtaccagaacagggcgtttggtcttgttggttcccaaacaaaaacttttaagattatttctctcggcagaatcccactctgagagattttcccggcggaggcacctttaccataggaggaacacagcagatcgcccaccaccggcgtggcccctcaatataaaaggtgtgctgggcaccctctacatgctgcgcctgaaagccacgttctcccacaaagtgtgttttcaatacacgtgagcgtagttcacaatatctctacaaacattggtctccttctccgtcatccaggaccccaacaataggttttgcccccaatccccatctactaacaagatagatggtcccgaacgaggctgacccaccggcgcattagatgttttcaaaagaacaaaacattgcttcaccgaagggttccctcttattaggataactcactgggtgtctatctaatgtcctacaaacccttcccattaggataagactatgaagcaccaccaaagcttctgttccaaacccctgttcccacatcccacagc

SEQ ID NO: 690003 - DNA, 132 bp, Homo sapiens
ggaacccccagccaaaaaggcagctgttggctgttgtcccgcttgtctctgaggacaaatcagtcactgtagcctaaggcagaaatcctggagcagttttgtctgcttcaacccagtccttttcaggttcct

SEQ ID NO: 690004 - DNA, 154 bp, Homo sapiens
tagagataggggtccccctatgttgcccaggttggtcttgaactcctggcctcaagtgatcctcctgccttggcctcctaaagtgctgggattataggtgtgagccaccgcacccagctggatgtagttattgataaaatatcacaccatatat

SEQ ID NO: 690005 - DNA, 121 bp, Homo sapiens
acgcctctgtggggtggcaggtataacggatatattcatttagccttctgagctttctgggcagacttggtgatcttgccatctccagctaggcttacttgctcactgctttgatgacacc

SEQ ID NO: 690006 - DNA, 141 bp, Homo sapiens
  misc_feature (56)..(56): n is a, c, g, or t
cgggtcctgccggaaggcggcgtcgcgacgcagctgttcacgcttaggtgggcgangtgggcgcaggatggcaaaacagaagagaaaagttcctgaagtgacagagaaaaagaacaaaaagctgaagaaggcgtcagcaga

SEQ ID NO: 690007 - DNA, 377 bp, Homo sapiens
acagttcaacaagatgtttaaaatgcttttgtatttactggccatggtaattgaaaactatacttaaggcactattaacttgtaacctttcaacctgaacaatcaagcagtatgagagtttagttatttgtatgtgtcacctagctgtcttacatgaaggctttttaacaactctacacattttctttctcttaaacgaagtactttattacactgttgcaactgcgcaatattaaacaattcagctctaaattatcccccaagcttaattctgatagcttgctaagacacttgtattccaccaattttctgcaacatgggctgtagtttttacctcataaaattaaaaacgtgacacttcagaagtaaacaggtaa

SEQ ID NO: 690008 - DNA, 1742 bp, Homo sapiens
  misc_feature (1)..(1): n is a, c, g, or t
nttttctatataggctgtctggctcacagaagttgatctccagattgcttgatgtgattattgatttggtgccctggagatgctcttttgtggagattctacgaaaggacacatcttgtgtggtagaacactcccccacgtccatattgtttcttgggtgccacaaggccacacaaaacatgagattcctccgtttttttctctcgggcacagttgattgtctcacttgtggtgtgaaatgtccatcatcttacctccctcgggtgatataggactgtttgttgccacccatggagatctcttctcctcctgtttatagacgttgtgtggaaagaataggtccttggagttccccgcccgacgagtggttttatcggtcccccatagttggccccgccccgtgtgccccttctttggttcgactttggaattaaagtgtccgcggctgttggtcgtcatcatctcccccgtgcggcacaaatatattttgggggaaagtgaacatcacacatgatgaagtatgtccgttggggtggttaactttaatggtagaaatgagaccttctcggtgtttgttcccccatcatacatccttcgtggacataagtgtttcgtcaatatgagtatgtattatagggggagacaatcctctgtttaacattggggttgaaaaataggtgtgtgccccgcctgtgtttaatataatagagtacgaggatcatggtatgcccctccacagatgtcataattcgcgttttttcctgtaacagtggtatgatacccccgccttttaatccccctggagttgcctccacacacaccacatgtgttggaagcgccaccgtagatgttgtaagtcctcttatagagctttgtgtctttaatagggtcccacagagaatgttgttttcgatatggtgagagacacccacgggagttgggaaaaaatcccactgttgtgataatactctgggccacaacattgcagctcgcgctctgagttgtgtgttgtgtttgggtggtgccccacagtgtgccgccactacgccctcggagatttgtttttgctctgtctgatagcgcccctgattatgtgatatactctcttgtttcgccctctctcgccgtgaattcctctggggcgcctctgtgtgacaccttggccccagcccacacactgtgggggagacactctctgaaatatgcgctcacgactctgtgtcacaacacacagggggtgttgccacacacactctgtgtctctgtcccacactggtgaatgaagaatatacccacacctgtgagtaggcccaccttgtgatatgaagccacgctcttgtttcacagagacctcccacgtgatataagcctctgagagtgttgtgatgaatatataagctctgagaaataggagatatacgctacgagctctggcgagataatatatgggtgagctctgcctctgtgtgaggcgcactctcttgagaatataattgtaaggcccaagagtgaaggagactaattctgagagaaaattcacctacaccttcttagaggaaatccctctctgtgttctccacgcacaaaccttgggagtgtgaaagcctcccccgggattctgataaaaacctacttctgtcacaaccaccgaacccgaggggtaattttcttttccctcccgaggcaccccttggtaccttataaaaatctgtagctgattaaagattttccccaccaccctc

SEQ ID NO: 690009 - DNA, 393 bp, Homo sapiens
aaccggaccgcctttgcggcagatcctttcatgatccgggaaagaccacattatggggtgaacaaatttaattccaatgtcctctgaataaacatctggcagaaatgctagaggcctcagaagggcaagctccgggttggttcacagaggcttctgctaaggtagagaagaaccttggtctctgcaaagctggagtttatgggttgtgaggtgacagggactttctctgctcagtgtgtggctggctcttgtgttggtggctatatgtgttgttgctcaagaaggtgggtctgtggcatgaatccaactcaagtcagagtaggcaccaaaaaggcacccaggctcagcttccctggctcagcctggaccatcggcaggtcatttcagactaca

SEQ ID NO: 690010 - DNA, 592 bp, Homo sapiens
cactagtcctctctggctgcttatttcatgtgtaatatatttaacttcatctatagtgcattatgagacaaggcaactctgtcacctaggctaaagtgcagtggcgtgaatacagcgcactacagcctcaacatcccgggctcaagcaatcctctcacctccctcctgagtaactgggaccacaggtgcgtaccatcatacctggctaatttttgtatttttagtagagacggggtttctccatgttcatcaggctgctcttgaactcctgacctctggtgatccgcctgcctcggcctcccaaagtgctggaattacaggcacgagccacctcgcctggcctcacatttatttatttatatttatttatttttggagaggaagtgtagcttttgttgcccagactggagtgcagtggtgtcatctctgctcactgcatcgtctgcctcccgggttcaagcgattctcctgcctcagcctcctgagtagctgggattactggcatgagccaccacgtccggctaattttgtataaaaagtagataccaggtttcttcatgttggctaggctggtctcgaactcctggactca

SEQ ID NO: 690011 - DNA, 207 bp, Homo sapiens
gcacgagaaaagatgaacctaggcaacatagatctcatctctacaaaaaaaaaattaactaggcatgatggcttgtgactgtagtcccacctactcaggaggctgaagcagaaggatcccttgagagaccaggagttcaaggcggcagtgtgctgagatctcagtactgcaccccagcgtgggcaacagagtgaccctgtctcaatt

SEQ ID NO: 690012 - DNA, 506 bp, Homo sapiens
ctcttctgtcactcattgtagtccaggatcttctagtttggtgtcagatttatcctgcaaactctaaagaaaaacttttaagataaaagtaaattttaaaaatacatgtttgttgaaatccaagtataagacaggaacaaagataatgtcaattgaagcttgtaattcctagttaaacatagattgcatacgtcaagattctcaagaaattttagatatatttgtcttcattaatggtttcattagaatacaatatacaccctctttagaaatcatttaagtaatagtcatgttcctcaacatttccaagcttccaatagtatttacagtttcctgaatttggggaacacaaactgtgggaaaaaattaaaaggaaccaaatagagagtctatgtgtcattgtcctcttaattactatttcatatgcttaaaatctgtccaaggaggggaaaacagggaactgtgtgactcgtatccctcaaactttgctgtgtgctcacagttat

SEQ ID NO: 690013 - DNA, 627 bp, Homo sapiens
  misc_feature (277)..(277): n is a, c, g, or t
  misc_feature (472)..(472): n is a, c, g, or t
  misc_feature (483)..(483): n is a, c, g, or t
  misc_feature (552)..(552): n is a, c, g, or t
ggcagagaatcgcttgaacccgggaggcggagcttgcagtgagccgagatcgcgccactgcactccagcctgggcaacagagcgagactccatctcagaaaaaaaggaactggagggagggaccctcagacatcctgtccacaaggctgtcaagggggtttctggcctggcattcctccctagatctgacctacgctctccctgcagcattctctgccctctgacagggcctctgctggactgccaggttcccgtgtggtttggtggagaagatttnggggtgggtagagtaagtagttggctctcagggattttgtctaagagaaagtgagatgggagaaatcgggactgaccgggtcgtaactgaaggtaagctgtttgcagcatcccccttcctgggtgcaaattcaggtatcataagtctaacatggaatcggtctgctctcatatgtggcctggagataagggtatnggaggtctctnggcaggaaggcctcattcacatctgaggggtggagagcgcgcaggcagcaggcagttgttcccaggttngtcacaggccaaatggtagctttcatttggcccttgttgcccctgccccctcttcctccattgttagccatgtgc

SEQ ID NO: 690014 - DNA, 601 bp, Homo sapiens
ttctccgagcactaatcgccctacatgtaaaacccattactttgtgaataaatgcacactgcagccctcacgcctaaacaatgccgaagaacgaacaatacaaatttattgagttcctgcaccactcaagcaattttttacaggggggggccacaatcccttgcacctcctggcacccaacatacaccctatattaaggttacaccctacttcaatggatcagtcactgacctaagccttgttgactataacggcaaatatttggcacttatcttctatcctaaggaacgtaccttataataaacaacatgcaaagtacatcctcgcgacaaaactaaccaatttaacgacgctaactgataaacattgccaaacccaagctgtccccaccataggccacatacctctcccacccccccacctttaatgtcccttttgcccacactaacctttaactcaaatcaaccccccccaactcctacctccccctccttcctcgcactcctccaaacgacccataacttcccaaaacaccacactcccttattcacccttcatcaatatataatattatatcattaataaattaacaacacttcac

SEQ ID NO: 690015 - DNA, 932 bp, Homo sapiens
  misc_feature (48)..(48): n is a, c, g, or t
  misc_feature (90)..(90): n is a, c, g, or t
  misc_feature (109)..(109): n is a, c, g, or t
  misc_feature (258)..(258): n is a, c, g, or t
  misc_feature (582)..(582): n is a, c, g, or t
  misc_feature (777)..(777): n is a, c, g, or t
  misc_feature (788)..(788): n is a, c, g, or t
  misc_feature (857)..(857): n is a, c, g, or t
ttttttttaataggggaaaggcatacaagttaatttaataggtatccnccaggacccttcagaatgaagacccaaaggttccgggaaaanttgtcccatttttatgctnaggttcaacaaagtatggaccagctgtgtggaaaatatgattggaaagaaaaggcttatgaatcttaatgcttaaataggctgaagtgggggaaacccagcaagtctgtctgtctagattcttctcagcctctctgagcagcattcctncccttctgggtatgggcaggactctctctggaatgggggtcttacaacctatagtcagacaaggtaggtcaggtgatttcttttcttttttgagatggagtttcactcttgttgccctggctggagtgcaatggctccatctcagaaaaaaaggaactggagggagggaccctcagacatcctgtccacaaggctgtcaagggggtttctggcctggcattcctccctagatctgacctacgctctccctgcagcattctctgccctctgacagggcctctgctggactgccaggttcccgtgtggtttggtggagaagatttnggggtgggtagagtaagtagttggctctcagggattttgtctaagagaaagtgagatgggagaaatcgggactgaccgggtcgtaactgaaggtaagctgtttgcagcatcccccttcctgggtgcaaattcaggtatcataagtctaacatggaatcggtctgctctcatatgtggcctggagataagggtatnggaggtctctnggcaggaaggcctcattcacatctgaggggtggagagcgcgcaggcagcaggcagttgttcccaggttngtcacaggccaaatggtagctttcatttggcccttgttgcccctgccccctcttcctccattgttagccatgtgc

SEQ ID NO: 690016 - DNA, 395 bp, Homo sapiens
tatgttattgttatttttttaaacttaaaaaaagggagagcaagagacagggtcttgctatgctccccaggctggtcgtgcattcctggcctcaagcaatcctccccctcagccccccacaaggctggtattacaggcattagccactgcacccggccttttttaacttttattttagatttagagggtacatgtgcaggtttgtcacctgggtatattgcatgatgctgaggtttgaggtacaaatgatcccattactcaggtaataagcataataaccagtagttagttttctaatccttgctctcctcgttcactcccccaatagtccccagtttctattgttgccatctttatgtccataaattccaaatgtttagccaacctcaacttta

SEQ ID NO: 690017 - DNA, 827 bp, Homo sapiens
  misc_feature (48)..(48): n is a, c, g, or t
  misc_feature (90)..(90): n is a, c, g, or t
  misc_feature (109)..(109): n is a, c, g, or t
  misc_feature (258)..(258): n is a, c, g, or t
  misc_feature (582)..(582): n is a, c, g, or t
  misc_feature (672)..(672): n is a, c, g, or t
  misc_feature (683)..(683): n is a, c, g, or t
  misc_feature (752)..(752): n is a, c, g, or t
ttttttttaataggggaaaggcatacaagttaatttaataggtatccnccaggacccttcagaatgaagacccaaaggttccgggaaaanttgtcccatttttatgctnaggttcaacaaagtatggaccagctgtgtggaaaatatgattggaaagaaaaggcttatgaatcttaatgcttaaataggctgaagtgggggaaacccagcaagtctgtctgtctagattcttctcagcctctctgagcagcattcctncccttctgggtatgggcaggactctctctggaatgggggtcttacaacctatagtcagacaaggtaggtcaggtgatttcttttcttttttgagatggagtttcactcttgttgccctggctggagtgcaatggctccatctcagaaaaaaaggaactggagggagggaccctcagacatcctgtccacaaggctgtcaagggggtttctggcctggcattcctccctagatctgacctacgctctccctgcagcattctctgccctctgacagggcctctgctggactgccaggttcccgtgtggtttggtggagaagatttnggggtgggtagagtaagtagttggctctcagggattttgtctaagatggaatcggtctgctctcatatgtggcctggagataagggtatnggaggtctctnggcaggaaggcctcattcacatctgaggggtggagagcgcgcaggcagcaggcagttgttcccaggttngtcacaggccaaatggtagctttcatttggcccttgttgcccctgccccctcttcctccattgttagccatgtgc

SEQ ID NO: 690018 - DNA, 194 bp, Homo sapiens
agaggatccccgctcactcggcaatcaggtgaccctcctcatcatcctctacactcctggttctcttgccttcggtgactcttctggaaactgcaagtggcaatgtggcaagatcatcgagccaagtgaatatacctgtgtgaattcaggtcagaatacgaaattcattccgtgcggagatattcagtgcattc

SEQ ID NO: 690019 - DNA, 340 bp, Homo sapiens
ttcacacacaaattgttagtatttgaggtactgtatatgttaaccagcttgatttagttattccacattgtacttcataaagttgaaagatcagctttgtatcccataaagtttattataaattatcaatttacaatttcaaaacataagtaggaaggggatttattggctcatagagctaagtctgaggtcaatagtattaaggtgtagctcgatcagatgtcatcagtactctgcgttcctttctattccttcttattcttttttttaaatatttttttttttttaaaggggggacaaaaaaactgggggaccccaaaaaaaaacaacgaagaaaaaa

SEQ ID NO: 690020 - DNA, 125 bp, Homo sapiens
  misc_feature (3)..(3): n is a, c, g, or t
gtnccacatgtataggctggaaacatacttggttcagagtgcttaaggaggcaagcacggtggctcacgcctgttaatcccaacactttggaaggcaaggcaggtggatcacctgaagacagcct

SEQ ID NO: 690021 - DNA, 1022 bp, Homo sapiens
  misc_feature (5)..(5): n is a, c, g, or t
  misc_feature (160)..(160): n is a, c, g, or t
  misc_feature (180)..(180): n is a, c, g, or t
  misc_feature (297)..(297): n is a, c, g, or t
  misc_feature (332)..(332): n is a, c, g, or t
  misc_feature (357)..(357): n is a, c, g, or t
  misc_feature (681)..(681): n is a, c, g, or t
  misc_feature (689)..(689): n is a, c, g, or t
  misc_feature (719)..(719): n is a, c, g, or t
  misc_feature (794)..(794): n is a, c, g, or t
  misc_feature (849)..(849): n is a, c, g, or t
  misc_feature (878)..(878): n is a, c, g, or t
  misc_feature (937)..(937): n is a, c, g, or t
  misc_feature (958)..(958): n is a, c, g, or t
  misc_feature (972)..(972): n is a, c, g, or t
ctggntcgttagctcgatgaagttcgggcccagagcacccggcttgcccagggactgtggggcccacacacacggggagaggccagtaccacctcggggaaccctctggagccttcagccagcggcggcatccgggcagacccatggaatcctaattgtnctttttgcccccggtgaatnaaaaaaaaattttttcaattgcatgggaattttttttttttgtaaacagtctcacccaagccaagggcaagaaagcggaaacccggggtttctccccaagtgaaaaaccagcgaggngcaccgcagcgagccagcctgggacagcagaggcngggcccaccaccgagcggagcggcntccccgcaggcggcagccccatcttcaggcagaagccctggcccccgtggccgggccccccaggaggccactcctttgccccgagcctgtgaaagcctctgaggccgggggcggccgccctggctgccccccctccggccaaacttctgaggccgtggcaaagaaacaaaaaacgactaaaacgctactgagtctgcaacccagggcactgggcccgtgctgctcaaacccggggcccctgagcgaccgcggggcctctccccagccgggggtggatgctgcatgttggccaaggttggctcagatctctgactcccgtctgtngggccgcngctccaggaccccgccgccagcctggagtntgttaaagtcatgcctggcctgggggctgaggccgtcccggcttcggccgttctggtctccgtccgcctcatccncctcgtcacggctcaggaaggccagcgcgttctcgtagcagaaggagttggcgcngggcagcaggaacttgttctctaccaganccttcgcactgcagcggggcgtagagggcacccataggtcttgtggagttcgagttgtnatcttgttctggttctctccncgaagacacgggcncaagcggtgacccacaggatccattggcaggaggagcgcgggcctgggtg

SEQ ID NO: 690022 - DNA, 451 bp, Homo sapiens
cctgcagaaaggctaaataaatttggtgtagtcctataactatatgaaagagaatgaactaagagagagctcaggttaaaacatggataaatctccctaccataatgttgaggaaaaaaacccaaaaaggttataaacatataaaacatacataatttctataaaataatggatgcatatatacaaataatgaaagtataaagacatgcataggaataataaatatcaaattcaggctaatgtttacttttggagaaggaatgggagggaaggagcaagattgaggctgggcatggagagggcttgaattgtatttgtaattaatctggagcaaatatgagaaaatgtttctatcggggtggtagatacacaagtatttatattcatagatatgtagatagactacatatattctctatatatttttgcatgttgaaatatttaagacatt

SEQ ID NO: 690023 - DNA, 168 bp, Homo sapiens
tccttcgcacgctgcaaaaagcctcctgatcacaagtgtttcctacatgttctagtactcacacctcagcactgaactgcagaccacacccatattgagggacaatctagcaaaatatacttggccaaaatctgttaaagaactgtccccgttatgggtgacagccaa

SEQ ID NO: 690024 - DNA, 168 bp, Homo sapiens
agcaagaagagagtgacacaatatcatatgagacgaaaagaaccaccaacttagaatcctgatgcctggcataattatccgttcaaagaccaaagagaaataacaactttgctcagacaaacaaacaattagggctgggcaaggtggttcatgcctgtagtcctaatg

SEQ ID NO: 690025 - DNA, 340 bp, Homo sapiens
gccctggaggcagtggagtaatggatggagaacctgattacgtggcttcttccagaggctggaggatgagctcttctgctacttactatgctgtagcgacaagtacccaggctgctggcttcttgccagtcagcttgggtttgcttgaatgaggcagtcattgtcatgagcgtaagtttagcgagtgcagaaagtccctggacttgagggtggcaggaatatcccccagatatgactcctcaatcctcagctccttacagctaacctacttctgtagaacttctgtttcaggctctcacacactgcaaaagaggcatcggcatcggccagttcctatatg

SEQ ID NO: 690026 - DNA, 102 bp, Homo sapiens
  misc_feature (60)..(60): n is a, c, g, or t
aattatttaccagataaaaaagaaaaaaatagtgattgtttctcttcacccccatcatcntcgtttaccatggtcgagttggagagaaattcattgaacaac

SEQ ID NO: 690027 - DNA, 892 bp, Homo sapiens
  misc_feature (26)..(26): n is a, c, g, or t
  misc_feature (83)..(83): n is a, c, g, or t
  misc_feature (154)..(154): n is a, c, g, or t
  misc_feature (168)..(168): n is a, c, g, or t
  misc_feature (183)..(183): n is a, c, g, or t
  misc_feature (187)..(188): n is a, c, g, or t
  misc_feature (422)..(422): n is a, c, g, or t
  misc_feature (428)..(428): n is a, c, g, or t
  misc_feature (450)..(450): n is a, c, g, or t
  misc_feature (466)..(466): n is a, c, g, or t
  misc_feature (468)..(470): n is a, c, g, or t
  misc_feature (493)..(493): n is a, c, g, or t
  misc_feature (506)..(507): n is a, c, g, or t
  misc_feature (526)..(526): n is a, c, g, or t
  misc_feature (539)..(539): n is a, c, g, or t
  misc_feature (546)..(546): n is a, c, g, or t
  misc_feature (558)..(558): n is a, c, g, or t
  misc_feature (639)..(639): n is a, c, g, or t
  misc_feature (742)..(742): n is a, c, g, or t
  misc_feature (744)..(744): n is a, c, g, or t
  misc_feature (763)..(763): n is a, c, g, or t
  misc_feature (788)..(788): n is a, c, g, or t
  misc_feature (812)..(812): n is a, c, g, or t
  misc_feature (877)..(877): n is a, c, g, or t
tgggcgctgccgagtcttggggcgcncgcagttggcgtctgccagtgctaagactgtgccgcccccacagccgaggcgcgaangggggacgcccggcctctgggtcgctgccttcgctttctctttgttgttgcgatcgccgtccgttcaggangcgccccgcgaccngcgcgatgagtgccntcgnngacctggatgttggaactagaagcattacgctctatttatgaaggagatgtaagtttccgggaattatgtccagtttcttttcaatataggtttaaatatggtgattccaaagctcttcttaatagatatttcctggacagaaacatattcccaaactctctccatttctatttatgaacgctttttttaacatcaccttatcatcagctgtattgctgagtatattagccatnctacangaagcagttgaagctttttttntaaccgctatgtcctntnnnttgtttgaatttgccaaagacanttaagtgcagttnntggagtatcacaatccctntcaattccgcaanatcgctnagcaatatcatntcaattgaaactcctaatacagccccatcaagtaagaaaaaagacaaaaaagaacaactttcaaaagcccagaagcgtaantggacagacaaaacagatcacaaaggagaacttcctcgaggctggaactgggttgatgttgtgaagcatttaagcaaaactggctctaaggatgatgagtagnanttggaatttgagacaaggnaagagcattctttaaagagtaaaantgggttcaaaatctttcattactnttttctggtattgaggcgactttttataaaacacaattttttgtatgtttcttacattaaaaagntgtaagttgaagtca

SEQ ID NO: 690028 - DNA, 570 bp, Homo sapiens
ttgtacagggagggagagaaaaaaagggtcgaggtctaacatatagtagagggttgtaagttacaaacagaggtgaaatccttacggatcaagtggccatgaaaaaccagggacctcatcttgggaaagtcttaatatatgattccaaatatgtgcagggattatacaaaaatttgggaaatatacacaagagtgtcactcagcatcaggccgggtatataaaaggcactaactaaagtgtccagggaataacgtgattatgtgattatcatcccttcactcagccaagcaaggtgggtggtcaccaaaatactcccacccatttatgagagtagtatttttccggagtctagcaggggtgcacttcataccacaggctggggccggtaaatggtcccatcaggagtccaggagtggtgtatggaagggggatccagtcacctgggaccatagatcttagaacggggactacacgggcttaatgcatacggttactgggaagcgctgaaagtatcccgcctcttctggcagtaaccctgtgtaagggtctaatcaatagtagcttctctc

SEQ ID NO: 690029 - DNA, 997 bp, Homo sapiens
  misc_feature (1)..(1): n is a, c, g, or t
  misc_feature (78)..(79): n is a, c, g, or t
  misc_feature (87)..(87): n is a, c, g, or t
  misc_feature (99)..(99): n is a, c, g, or t
  misc_feature (119)..(119): n is a, c, g, or t
  misc_feature (159)..(159): n is a, c, g, or t
  misc_feature (162)..(162): n is a, c, g, or t
  misc_feature (196)..(196): n is a, c, g, or t
  misc_feature (239)..(239): n is a, c, g, or t
  misc_feature (326)..(326): n is a, c, g, or t
  misc_feature (343)..(343): n is a, c, g, or t
  misc_feature (356)..(357): n is a, c, g, or t
  misc_feature (368)..(369): n is a, c, g, or t
  misc_feature (455)..(455): n is a, c, g, or t
  misc_feature (552)..(553): n is a, c, g, or t
  misc_feature (582)..(582): n is a, c, g, or t
  misc_feature (849)..(849): n is a, c, g, or t
  misc_feature (914)..(914): n is a, c, g, or t
  misc_feature (987)..(987): n is a, c, g, or t
ngtgtgtgttaacaaaataaagataaattaggattgttgatggaaatgctttactacagaatagaatacatggcggcnncgtcctanctgactgccgcngtgtcttgtatgtgcaaganctgggtccagcccagatggtagctctttacaaaaacacgnganaaagtgttgcagtttgcacaacagggctgcaccnctggacttcagggtctggtttcaacaatgatgttaaaacagtnagctagattcccagctcggtctgtatacagttcagagctcttttatttattagctagctcaccattcaacttgccatgtgcattgcngaacagtgagaactggngcccacacgaaanngctcagtttcnnccaccgctagccaaagtccttgactgttgaggatatatttcagtcatccaaacctttctcagaaaatgaactcagtttccatcggngcacagcccttattgtttgctaaaagttagtttcgggccttcttcctttttgtctgcgaggtcacgtctttttcttctgcctattgtgccgtttttnncctttttatggcaagtcaattttgtggcnatgtaaaatgcttgctcaactccactgtcattctcagagatttccactgggacgccatgcctctctttatatatatcactatggctaggggccaaactcagcccagtgaaatggattacatatcggagtaacacatatacaatcatatttacacagatacacactcatgccacacacgaaagaaaaaaaaaagggagaaggaacaaattttggaaaacgatgccaaggatgctacactacatgaaactacatgactttttttagcanagtaatttcaggcctctacataatattacatggttatggttcaattattagacagccaggaagtnatcccgagccaaaacaaaggaaggttgtaaagcctcattgtagacaaggcctgagcatccacagagaagatanaatgttttat

SEQ ID NO: 690030 - DNA, 160 bp, Homo sapiens
cttcaggaatgggctgtctttggcctaaccctcagacactggggctggcacaaactcttggtttcttcaacaggcgacttttactgtgtctcttttggttccattgtttggcgaccttcctgggcacagtttggtccgttagacttcccagttgaatttt

SEQ ID NO: 690031 - DNA, 149 bp, Homo sapiens
tctagaggatcgccggagccttaaccctacacacaatctgatatacctacttagtcactttctttttttttttgagatggggtcctgccctgtaattcagaattggagcgcagtggttccatcatggctcactgcagcctcaacctccc

SEQ ID NO: 690032 - DNA, 314 bp, Homo sapiens
gggaagggttagtaggtgatggtggggcatctgatggcgaatatagtctaatagttgaataatggtagcgagatagagattatagatgggaagtgaagcgtgtgtgtccattgtcatgtgtaatctaggtaagacgagttgattctcttgaatgaagtgacagctgtatggattggggattggctgagatttggattttcgctacccagtccccgtccacaggggtcacacactgcatatactccgtggtggtcatgaccaactcgtgatacactatgtaatctggggtgtagcccataccaaagagggagctg

SEQ ID NO: 690033 - DNA, 983 bp, Homo sapiens
ggttgaagaggagagtcacgagacttgctggaggactctccttaaacgtcccaaggaggcagaaaaccctgaaggagagtgagaagagaggcagtccaccttggcagagttcgaggaggtccccttcctatggtaaggtgcgaaaacgaaatacggcaacccttcctcatgtagtcccggcctcatggaccggaggagacctgtccccaagaggacagaaggaacgaggacggatgaaggaaaggagaagagggcatatcaatgtgacaagatgccgtgtagtgccctctatggccaatcagacgaatcattgagacgtccatgttcgtcacaccaagtgtgttccaactgagggaggtcctcctcgatcgcctgtttgcctgactgacatgatgctgtgcgttggcgtaactgagaggaaacaccttgggcacagtggctccgtgtcgaagaccgtgggggagaccctcgcatttaatagcgcaaggtaggcaaaaagcgtgggctatttccttcgtttcacaaatcgacagtgttatagcgcaacaagacgtcacagacggccaggagccaccggagggtggacatagtatacgcatcgcgtgcagaaatggaggagagcaagggccaatgcacatgacatgtacctcgtctagtgcgttagagcgtcaccccgaatacgcatctcattactggactgcttggagactccaggaatcacagtgttcttttccttcccacatggggcatagtggaaggttggaagcgaccaacgtgagttagttcccttatccacgcgatgagacgcatagtattatcccacgggctattactagctcagaggcgccgtagcggacaaactatggatcgcgcaccattccttgagcaccccctattctaccgccacatcctccttaagggcacttgcttaggaaacctcattgggagtccgggaatccatgggggtaaggaaattcggaaaa

SEQ ID NO: 690034 - DNA, 201 bp, Homo sapiens
tggcgaagtaagcagtggctggtgatcgtgatgacagcatgagtctcctggttctcgtctgagctgggctcatgggcctggagtcagccacggctgtgcgcccagtgacttctgctccaatcgagacccttatgttctgaacctgacccaggaggagacaggtcttcagctcagacatcctgaggctataatctcgggggg

SEQ ID NO: 690035 - DNA, 670 bp, Homo sapiens
caaacatgggggttctggtctaatttggcgtactggggcgctgtgtcctttacagcaggtacatggatgagtggttctgctgcactaagtgtcggcctaagttacccagagaccattgtttcgtttcttctcggtaatgtcttgatcattattttcactatggccaactcttaccccggttatgattggaaaatcggtttcaccttggcccaaagattcgtttttggcatttacggttcagccttcggtatcatcattagaattttgatgagtattgtcaattatggttccaacgcttggttgggtggtctttctatcaacatgatattagattcctggtcccaccactatctgcacctgcccaatactttgtccccaagtgttgccatgaccaccaagcagttggtcggcttcattattttccacgtcctcaccgcgctctgctatttcatgaaaccctaccatatgaactaccttttaatttggtcatgtgtagctacttgctttgccatgctgggtatagtgatttacttgactaagaatgcccatggtgtcggagaattgtttacctccactaaatccactgccactggttctaaaagagcatgggcttgggtttatatgatctcttactggttcggttccgtttctccaggttccaccaaccaaa

SEQ ID NO: 690036 - DNA, 164 bp, Homo sapiens
caatgacattgaggactgaggaacagattctcacagccacagtggacactgccaatgtcttctgcagattgacaatgccctgtctggcctgctggatgacttcctgcaccaatgtatgagcacagagttgaaccgtgcgcactgcagtgtggaagcctgacacc

SEQ ID NO: 690037 - DNA, 832 bp, Homo sapiens
gaagtggcggtgcgagggctgctgcacagcgagcggagccgcggtccggacggcagcgcgtgccccgagctctccgcctccccccgcccgccagccgaggcagctcgagcccagtccgcggccccagcagcagcgccgagagcagccccagtagcagcgccatggccgggtggaacgcctacatcgacaacctcatggcggacgggacctgtcatggacgcggccatcgtgggctacaaggactcgccctccgtcttgggccgccgtccccgggaaaacgttcgtcaacatcaccgccagctgaggtgggtgtcctggttggcaaagaccggtcaagtttttacgtgaatgggctgacacttgggggccagaaatgttcggtgatccgggactcactgctgcaggatggggaatttagcatggatcttcgtaccaagagcaccggtggggcccccaccttcaatgtcactgtcaccaagactgacaagacgctagtcctgctgatgggcaaagaaggtgtccacggtggtttgatcaacaagaaatgttatgaaatggcctcccaccttcggcgttcccagtactgacctcgtctgtcccttccccttcaccgctccccacagctttgcacccctttcctccccataacacacacaaaccattttattttttgggccattaccccataccccttattgctgccaaaaccacatgggctgggggccagggctggatggacagacacctccccctacccatatccctcccgtgtgtggttggaaaacttttgttttttggggttttttttttctgaataaaaaagattctacta

SEQ ID NO: 690038 - DNA, 87 bp, Homo sapiens
ggatttgctggtgcagtacaactaggcttaatagggacatgcagtttataaaaattaaacggaccaaagaatccccacccaaaaaaa

SEQ ID NO: 690039 - DNA, 394 bp, Homo sapiens
accatgttggattgctggtgataatgtaaaatggttcaggcactatggaaaaaaacagttcggtgattcctcaaaaagttaaacttggaattactatatgacccagcaattctgctcctgggtatatacccaaaagaattgaaaacagacattcaaacagatacttccacaccagtctttatagcagcagtatttgcactagctagaaggtggaaacatctcaagaactccagtgtccattaatggatgaatggataaataaatgtcatatatacatgcattggaacattattcggccataaaaataagtgaagttttgatacatgttggaacacggatgaaccttaaaaacaacaacttaatatgactagcttacccaatagcttttatagta

SEQ ID NO: 690040 - DNA, 1320 bp, Homo sapiens
  misc_feature (852)..(852): n is a, c, g, or t
  misc_feature (862)..(862): n is a, c, g, or t
  misc_feature (878)..(878): n is a, c, g, or t
  misc_feature (883)..(883): n is a, c, g, or t
  misc_feature (885)..(886): n is a, c, g, or t
  misc_feature (889)..(889): n is a, c, g, or t
  misc_feature (899)..(899): n is a, c, g, or t
  misc_feature (905)..(905): n is a, c, g, or t
  misc_feature (911)..(911): n is a, c, g, or t
  misc_feature (929)..(929): n is a, c, g, or t
  misc_feature (945)..(945): n is a, c, g, or t
  misc_feature (949)..(949): n is a, c, g, or t
  misc_feature (961)..(962): n is a, c, g, or t
  misc_feature (977)..(977): n is a, c, g, or t
  misc_feature (981)..(981): n is a, c, g, or t
  misc_feature (993)..(994): n is a, c, g, or t
  misc_feature (1007)..(1007): n is a, c, g, or t
  misc_feature (1011)..(1012): n is a, c, g, or t
  misc_feature (1019)..(1019): n is a, c, g, or t
  misc_feature (1090)..(1090): n is a, c, g, or t
  misc_feature (1101)..(1101): n is a, c, g, or t
ccctcttgtatgtgttgtctcctcactgcctcccccccacagtgttttcgctgatagcgcctcccactattgggccgccccgtgtggtttggtgttaatccgtccctgcgttttactactgtcttggtcctaacacacccgtctttctatattgggcgcggtgtaccctcggggaggaaccctctttgttgtgtctcatagggatcacctgcttggggccacccacttatgctacgtttggggggccggtttacttccaacaaaagaggatagctgttctctcgcccctacatcttcctccagcgatgtattttggtggggccctctcagctctcgtcgggttgcgtccacccccccgggggggggattataactctcgctgctgttttgtgtgtggtcctgtcagttaccaacattgttctaacacacgcgcagcacacatggacgttttccagtatgtgtgtatgtggtggttggtgttactactactttgggtttttggtcgccccacaatatgagggcttctccggcgttctaaaacacgagtgttttttattaaaacgcggtgtgagaaaattggggcctgtggtacacacacctcttgtgggggggcgcccacacagaaaagattttgtttttcgccgcgtggagtattcccgccgggagaacatctcaccacttgtgtcttgcagcacggcgtattattgtgggcgtagataatgttcttatagcctcagcatcggggagatatccttttgccgggtatatccccaccttaggaggcgcacccccgcgggtgggggcccactcccaacacgcgctgtccacaatggtgtcacacctgggttcacncccacagagncctgacacacacaganacgcncnntanattctcctgngcgtgngagtgnggccacacagaagagggngtgtgcccacacgcgntggngtgttgagtttnncacacacacgagaanatgnttatatgagaanngggccttcccacncctnntcggcgntgttcccacgtgttctggagctctctctgtgtctgtgtgcgcctcttcccgctcttcccccgcgtctcccncacacagcttntgcaccccctttcctccccactatcacacccccaaccacttttaattttttgggccacttatccccatatccccttatttgctgcccaaaccacacacatgggctgggggccagggctggatggacagacacctccccctacccatatccctcccgtgtgtggttggaaaacttttgttttttggggttttttttttctgaataaaaaagattctacta

SEQ ID NO: 690041 - DNA, 121 bp, Homo sapiens
ggatttgctggtgcagtacaactaggcttaatagggacatgcagtgtttcatttaatcctgccagcagccctgcaagggcaatactcttgttatttttgctcgaattcgagtcgaattcaa

SEQ ID NO: 690042 - DNA, 439 bp, Homo sapiens
gaagtggcggtgcgagggctgctgcacagcgagcggagccgcggtccggacggcagcgcgtgccccgagctctccgcctccccccgcccgccagccgaggcagctcgagctgctcggtggggcggggggaggggcagagaggcgagaggccagtaagccactgcgcctggttggaacgcctacagtcgacaacacatcatgcgcggaccggagagctgtcagagaccgcggcacaatcgtggggctacaatggaagtcgcccttccgcacgatggagcccgtccggtcccgcgtgtaaaaacagtccgatcacacaatcaacagcacaagcatggatagatggagatgatccatcggatggcgcaaaggaccctgagtcaaagtatcacacgtgaattggggcatgacacattggggaccacgaaatgtacgggtgaac

SEQ ID NO: 690043 - DNA, 872 bp, Homo sapiens
gaagtggcggtgcgagggctgctgcacagcgagcggagccgcggtccggacggcagcgcgtgccccgagctctccgcctccccccgcccgccagccgaggcagctcgagcccagtccgcggccccagcagcagcgccgagagcagccccagtagcagcgccatggccgggtggaacgcctacatcgacaacctcatggcggacgggacctgtcatggacgcggccatcgtgggctacaaggactcgccctccgtcttgggccgccgtccccgggaaaacgttcgtcaacatcaccgccagctgaggtgggtgtcctggttggcaaagaccggtcaagtttttacgtgaatgggctgacacttgggggccagaaatgttcggtgatccgggactcactgctgcaggatggggaatttagcatggatcttcgtaccaagagcaccggtggggcccccaccttcaatgtcactgtcaccaagactgacaagacgctagtcctgctgatgggcaaagaaggtgtccacggtggtttgatcaacaagaaatgttatgaaatggcctcccaccttcggcgttcccagtactgacctcgtctgtcccttccccttcaccgctccccacagctttgcacccctttcctccccataacacacacaaaccattttattttttgggccattaccccataccccttattgctgccaaaaccacatgggctgggggccagggctggatggacagacacctccccctacccatatccctcccgtgtgtggttggaaaacttttgttttttggggttttttttttctgaataaaaaagattctactaaaaaagtcgacgcgcccgcgaatttagtagtagtaggcgg

SEQ ID NO: 690044 - DNA, 500 bp, Homo sapiens
  misc_feature (23)..(23): n is a, c, g, or t
  misc_feature (140)..(140): n is a, c, g, or t
  misc_feature (142)..(142): n is a, c, g, or t
  misc_feature (164)..(164): n is a, c, g, or t
  misc_feature (187)..(187): n is a, c, g, or t
  misc_feature (201)..(201): n is a, c, g, or t
  misc_feature (203)..(203): n is a, c, g, or t
  misc_feature (211)..(211): n is a, c, g, or t
  misc_feature (229)..(229): n is a, c, g, or t
  misc_feature (251)..(251): n is a, c, g, or t
  misc_feature (254)..(254): n is a, c, g, or t
  misc_feature (269)..(269): n is a, c, g, or t
  misc_feature (272)..(272): n is a, c, g, or t
  misc_feature (276)..(276): n is a, c, g, or t
  misc_feature (279)..(279): n is a, c, g, or t
  misc_feature (281)..(281): n is a, c, g, or t
  misc_feature (284)..(284): n is a, c, g, or t
  misc_feature (286)..(286): n is a, c, g, or t
  misc_feature (293)..(293): n is a, c, g, or t
  misc_feature (311)..(311): n is a, c, g, or t
  misc_feature (327)..(327): n is a, c, g, or t
  misc_feature (329)..(329): n is a, c, g, or t
  misc_feature (336)..(336): n is a, c, g, or t
  misc_feature (366)..(366): n is a, c, g, or t
  misc_feature (433)..(433): n is a, c, g, or t
  misc_feature (446)..(446): n is a, c, g, or t
  misc_feature (448)..(448): n is a, c, g, or t
  misc_feature (467)..(467): n is a, c, g, or t
  misc_feature (471)..(471): n is a, c, g, or t
  misc_feature (488)..(488): n is a, c, g, or t
actaaaacattacgaacatttanagtcaaatatgagtgctttgaaagaccacttaactcaaagggccatgcttttgtccaatagtgaagtgcagtctagtcactttagaaagccattttctaggcaaaagctgtcaaaancnctaagtagctaatgcctgtggnccgtattgttgcttttatgtttncttaaatatgtttncnaataatanctgtaactgagatgtgcnccagttttctgtgaatgatagncanggatgttttttttantantatnatnantgntncagaacncagatctttatttttttncagcattattgtttgngnctgattncagtattgatttagaagtatattttttaanaattgtttttcttttactattttaagtattttcgaatgttattgcaagatgtaaaatatacatttgngtttgaaaaacgngncaatttttgggaaagttgngcancaataaatcttgtaatnttgtaaaaaaaa

SEQ ID NO: 690045 - DNA, 405 bp, Homo sapiens
  misc_feature (5)..(5): n is a, c, g, or t
  misc_feature (391)..(391): n is a, c, g, or t
aaaanaagcagggattatgtattctacctcatacttctgcacaacaaagaaacaaactaatataataagggttataatataaatacgagcatttcgttgaaaatctttagatcaggccaaagcaattcctatgaaaaaaatgcatgtaaatgttcataataataaagacgatggtaatagaaattgcagctactgtttcctgaggacttgttcagtgttttaggtctgtctcatttaacttacaacactccagtagagagattctatccaggagagaggatttgctggagatactgaaattaagagaaataaagtgacatttttctgggttacctagctgttaggtggcaaagctacaattcacccctccctgtagctttggaggttgggnatttatggttaatc

SEQ ID NO: 690046 - DNA, 801 bp, Homo sapiens
gaagtggcggtgcgagggctgctgcacagcgagcggagccgcggtccggacggcagcgcgtgccccgagctctccgcctccccccgcccgccagccgaggcagctcgagcccagtccgcggccccagcagcagcgccgagagcagccccagtagcagcgccatggccgggtggaacgcctacatcgacaacctcatggcggacgggacctgtcatggacgcggccatcgtgggctacaaggactcgccctccgtcttgggccgccgtccccgggaaaacgttcgtcaacatcaccgccagctgaggtgggtgtcctggttggcaaagaccggtcaagtttttacgtgaatgggctgacacttgggggccagaaatgttcggtgatccgggactcactgctgcaggatggggaatttagcatggatcttcgtaccaagagcaccggtggggcccccaccttcaatgtcactgtcaccaagactgacaagacgctagtcctgctgatgggcaaagaaggtgtccacggtggtttgatcaacaagaaatgttatgaaatggcctcccaccttcggcgttcccagtactgacctcgtctgtcccttccccttcaccgctccccacagctttgcacccctttcctccccataacacacacaaaccattttattttttgggccattaccccataccccttattgctgccaaaaccacatgggctgggggccagggctggatggacagacaagctttcctacctcatagacgtaccgtgtatgcctcggaataagggcgcaggttcga

SEQ ID NO: 690047 - DNA, 116 bp, Homo sapiens
gccactgcaagatattttcacaatgtctctaataaatctgcccttcttaacctacaactatctaggtaaatggctttaccacctgcaaaactgaccctaagtggttgctacccaca

SEQ ID NO: 690048 - DNA, 704 bp, Homo sapiens
  misc_feature (642)..(642): n is a, c, g, or t
gaagtggcggtgcgagggctgctgcacagcgagcggagccgcggtccggacggcagcgcgtgccccgagctctccgcctccccccgcccgccagccgaggcagctcgagcccagtccgcggccccagcagcagcgccgagagcagccccagtagcagcgccatggccgggtggaacgcctacatcgacaacctcatggcggacgggacctgtcatggacgcggccatcgtgggctacaaggactcgccctccgtcttgggccgccgtccccgggaaaacgttcgtcaacatcaccgccagctgaggtgggtgtcctggttggcaaagaccggtcaagtttttacgtgaatgggctgacacttgggggccagaaatgttcggtgatccgggactcactgctgcaggatggggaatttagcatggatcttcgtaccaagagcaccggtggggcccccaccttcaatgtcactgtcaccaagactgacaagacgctagtcctgctgatgggcaaagaaggtgtccacggtggtttgatcaacaagaaatgttatgaaatggcctcccaccttcggcgttcccagtactgacctcgtctgtcccttccccttcaccgctcccaagagcgctgcatcccctttcacnccgataacacacacaaaccaggtctaacaataagggccattagcgccaatagccccttatta

SEQ ID NO: 690049 - DNA, 910 bp, Homo sapiens
  misc_feature (645)..(645): n is a, c, g, or t
  misc_feature (827)..(827): n is a, c, g, or t
ggtccaggtgagagcggagggtgccagaggtagggggccgagaaacaaagttcccggggcgtggtccggggccgggtcggggctagcgcgtatgacggaccccatcctcgcgaaggcgaaggcttccaaactccagcggcgcggtcatcctcgggccgtgccggtctcggggcgaagggcgaccgtgagccagaggatcgcccagaacttggtcgtccagcatcgtctccaggcggagcgacttcttgcgggagatacatcaaggccagcacacgaaggtggtgagatggcagaagcaggatatagagaatagtctttgggttccagagcgcatgtgatcacacgcctaatgatgtccgaggtaggagaacaggcgttggccaggcactgggctccttgatggttattcctgagggacattaggatcaaggccgaagactcctgggactaaagatcgtgtgaagttggatctacgtgatcagattatgacatattccatcttgaagacagcttaatagatcgatctcgagtgcgccagttgcgattcaaccctcactagcggacagggtactataacgctgtgtacttcaattccgagctcatggtacaatggatatgggatgatcgtcacctgagtgaagccgnttgagctccaggcaggaggcatgataaaccccggaagcaagttgcgtgccaggcctaagacaggtatcaaagagcgtggcaaaagccgagtcagttgaacttgagtacaaagaggccggagggagtgcatccagcaaatgttgccggacagggacgacgaacaacaatctggcccgtacgtntgacgcgcttgtctcatacaagatcaccacctattcagtccaaagaagcatattgaccctggccaatgggcagaacctggaag

SEQ ID NO: 690050 - DNA, 730 bp, Homo sapiens
gccctcctccacctctccgccccctccgggcttggctctcccaggaggctacgactggagccactggtcccgcaggatccccgcgtcctcggtcgccgcgtccacgtccctctcgcgtccccgcccggcgccacgccgctcctctggtcggctccggcgggcaggcagctcagccggggacagccgattaatccttctgcaaggtaacgaactatcttgtccgtgtgacatggcacagacttgagtatggagggctaggcggaagtcagtcgagcaatcaaggcttatgtcacaaatcccccgtgatgcaggaagctgtgatgtcatcaagatatattggtggcagtgcccaataccagatatatagctgacatgatctcaggaaatggatacacaacatgtccagacttcttgtagggcaagagcctgggacccctctggcgactggtctatctccctgagggctgaaaacaagaatgccaagatcgtagagagatcaggcatcttgagttctgaaacaacagtgtcatgccaaaatggcacggggatctgcgggggactgtgccacatgatgagatactcagatcggcagggccgcttgctcgcagatctgaacttacacttaagacccactttgtctttcgcgaacctgagggatccccccagacatctgcgaccaactgccgacctgcagtgatatccttaccattctggcaacaggtccggccca

SEQ ID NO: 690051 - DNA, 872 bp, Homo sapiens
tacaatctaccctcagaatgcgccaattaacggacttcagtacgaggctggatgaatccacacaggatcatgaaccgttagtgtggagccttcgcccaaagtgtcagacacagtggttggagccctacaacgccaccctctcatccaccagctcgtataaaacacagacagacctactgcattgataacgaagctctactacgacatttgcttcagaaccctaaagctgaccacgcccacctataagtcgacctagaaccacctggtagtactaggctaccatagagtggaggtcaccacctgacctgcagctatgaccaggccagctcaatagctagacctagcgaaaataggctagagaacatggtacacagtatataccccggcatagcactaactatacatagcccggacatttgcacccactagaccagccggggcagccagcagtaccagggcgctaggacacgtcagcccgagactgcacgccaggaagatagataaagatagcacaagaacatagataggctagcctagcagaacacccgacacaatggaccgactacacatgaacggtatgccagcgagctatcagaggagacagcatagtccatagaaggacggcggatgagcgaaagtgcttaactgtcgcaaaacaaaaaacagcagactaattggtgtcgcagaaggataccccaaagaatgagaaacaacgggtgtctaggtgaaataccaccctacggaggggttaacgatgtcacgcacacttcattgaggagcagcaacggcagaccaggaggtgtgcgaggcgcaacacgaaaaagcacaaaagcaagaacggaggcaagagcacagacagataggggaaaggc

SEQ ID NO: 690052 - DNA, 129 bp, Homo sapiens
aggtcagagtgggggctgcatgtccagccaggcagcaccgagtctacaaagatgctattagatctgatccgcaggcaaaggatctatggatatggaaatagcaggaattggtgagaatccatatctcag

SEQ ID NO: 690053 - DNA, 258 bp, Homo sapiens
  misc_feature (50)..(50): n is a, c, g, or t
cctgagagcttcgatacacaccgaactggtgcgggggggggatgccgtgnccagctgtccgcccattgagtgacaacgcagacggcgtgcctccgcaactgcgcaccgacctgttgaagctgcatcaactggcgatgaggtgatccaggtgcggattcgagagcacgtcatcgccaccaatgacatgcgtctgttcggtctgcacctactggggcaggcgtcgctgcgcatggagcaagcgctgtggccagaagaata

SEQ ID NO: 690054 - DNA, 309 bp, Homo sapiens
ctggagagcgcacagctcccatcatgcttgactgattacctaactgcacatcgcctctatagttgtagctgcagactcaggttgctgaagtacggtggatctccttcaagactatgtacggagatcagggcattggccctgtgatgtcttacaaactagggaatgtagatgtatctgccattttaactcttttaatttttctgggcttacttagtcagctcacctatgaaactagcttgtaaaatttgacattaggaactatattctagttttatcaatttgtaggatagctttatttgttatatgttt

SEQ ID NO: 690055 - DNA, 374 bp, Homo sapiens
ctttgatgaatatagactgagtagggcaaggatactatgtgatcagtgatacctctgtggtacgagcaagggtggtatgtgagtattagtctacagattatggcaaatacagtgacaacaatcaactggtctcagattgacagtagcacagatatactcagtgaaggtaatgttcaggacaaatttcaagaaaactagaaaaccattctttacagctgaaatctttccctacccattgttatttccacttataagtcctcaaagagatgagaaaagggcggtaaggctaccttatacatttcctgcacaatgaaacataatacctcctccaggcaaagattcaagcagaactggcaaatatcttatcttgctct

SEQ ID NO: 690056 - DNA, 172 bp, Homo sapiens
aacgagcacacacacgcaggcacacactcccacgcaaaaacaaagcttttacaataatacaagcagtctacaacaaacacaaaactcagaaattattacaatgcttcctttcttaatacaaaagatgcccatcttggagtctatatacaatatatattttcagatggtttac

SEQ ID NO: 690057 - DNA, 250 bp, Homo sapiens
ttttttttttaaaaacctgaaacctgtaaactgagaagtctggagcctttttgcccctctgtaggggatgtgaagatttcaaaacctgagagccccttttttttgtttaaaattatgagaaaggccctaaatggctttagggtttgcctttttccccttaatgccccctttcttgggaccccctggtggggagggaaatctgttttttttttccccccaataaaaaggtaagatttttttttgcccctga

SEQ ID NO: 690058 - DNA, 476 bp, Homo sapiens
aaagtctggtgcctgctctgctgtgttttaaaaatctgactgttgcttatgaagaatggattagattcagatgaaaccagtgggataccgatgcagtctttacatcccagtgactcacacacagcttcttcccatcttagggctttcgtgctgtttcctttgcttggaatctaaacaatgtgtggtgctggccaggtgcgttggctcacacctgtaatcccagcactttcggaggccgaggcgagtggatcagctgaggtcaggagttcaagaccagcctggctaacacggtgaaacctcatctctactaaaacaaaaattagccgggtgtggtggcacacacctgtaatcccagctactcgggaggctgaggcaggagaattgcttgaacccgggaggcagaggttgcaatgagctgagatcatgccactgcactccagcctgggtgacagagcaagactctgtctcaaaaaaag

SEQ ID NO: 690059 - DNA, 194 bp, Homo sapiens
tcaccatgtggaggtggtcccggaatctcttgatctcaactgatccacccacctcggcctcccaaagtgccaggaccacaagtgtaataagccactgtgcctagccgcaaaattatcttttaattaaaaaaataggccaggcacacgtgcacgcctgcaatctcagcactttgggaggccgaggcgggcagatc

SEQ ID NO: 690060 - DNA, 309 bp, Homo sapiens
caccccaccccccaccccctggtttccctcactgcccaggttgatcaagtggctttttctggggcccggccagctttgagaattttttttcatccaccctttggcacccagccttttagggaaggagggatggggcatagtgggagaccccccccaaagcttagggtaagggcaggtaggggggaggctgtggaccttttcggaaagttttgggtttgtttttttttaaccgggcaaaattggggtcaggtccagctgtgaagaaaaaaatatatcaatgttttcccataaaaaacaggggctccctga

SEQ ID NO: 690061 - DNA, 661 bp, Homo sapiens
  misc_feature (608)..(608): n is a, c, g, or t
  misc_feature (629)..(629): n is a, c, g, or t
cagaaaatatctacaaatcacatatctaattaacatccagaatatataaagaactccaacaattcaacaatagcaacaaaacaatctaattcgaaaatgggccaaagacttcaacggacatttttccaaagatataaaaatggtcaacatgaaaagatactcaacatcactagctattagagaaatgcaaatcaaaacaataagacaccgctccacgcccattaggatagctattatttgaaaaaggaaagtaactgttggcaaggatgtggagaaattggaacctttgtccactgtcagtgggactggagaacagtaaagtcactgtggaaaacagtttggcaatttctcaaaaatttaagcacagaattactatatgatccagcagtttcacttcttagtaaatatccgaaagaactgaaagcagggactcccatatctacatgtacgccaattttcatagcagcattgtttacagtagccaaaggtagaaacatcccaagtgcccattaacagatgaatgaacaaaatgtggtatatatgcacaatggaatattactcagtctcgaaaaggaatggaattctgatgcacaagccttgaaaatatnctaaatacccaaactccaaanggacatattttatgatttcacttacttgagcc

SEQ ID NO: 690062 - DNA, 1964 bp, Homo sapiens
gcatccgttcttcatttattatctatgacttatttgtgatatatctatagcactgtcttacagtgttggcgagtcgttatttctctcttatacttatgtatctttctattattgcttttgttatctgtgctcttgatgctgacgtgctgcggatatggtggtctctgaattatgatgtgttcttctggctgatgtattattattttgttgttttatctattctgatctcctacatccaactgcttcggttatgatgtcgcatttatcatttgattattggttggttgagactttcatcactgatgtgcttgcacatgtagttttcacaaccttcatcgttgtttcttctctatgtttattttattagtttagtttgttttctctccatttgtatagtacttcctgagggtgtggtttgttctccgtgttcatacgtactttgtgttattatggtttttttctctatgtactttcttttgttgtgtgttggtgtgttggtttatctttttagtggtgctcttattgttgtgttttaggtgttgttattagaactgtatgttttgctgtgttggcgtttgtcgtttggttattgtcttcagtggtgtggtgtgttgttatgttgtttggttgtgttttgtgttgtggagcccatctcgcttcttttgtttttgttatattgccggctgtcttttccactatgtgtgtgttaaacaatcttattcgtctctcctttttggtggtggtttgtattagtacactcctatagctgtcgtttgttttttggtgttctccctcacttttgtattgtgtatctctgctcgtgttagggtgtcgtctcttcacccatgtgtggttgtgctctcacatatttactgcgcgcgtggttgtgttgttgttaatcatcctcctgcgcgcacgcgcggggtggtgtattgtttacagcgctgctcgtctctctatgatttgtggttgtttcgctgaggaggtcatcgcgctggtgggggtgcccgagtaatattattggctgcgccgcccctatgtgtggggtgctctcccagctctggttgttcgcccccagctcactcgtccgtcgctgcggctagtagagagatgagaggctgctgcgcacgcggcgcgtgctacgtctatatgagatagatattagatgtgtgatttatctcattgcgcgcgcacctcgtggcgccatcagtctctcttctctctcctcgcgcgcacacatacgcgcgcgcgggtgtcgtcgagagagagagagatcatctctcactctctatattctctccctccactcgcgttagatagagcctctcggctcgctccttcttcacatatattacgcgcgcgctgcgtggtttctctctctgctctcctcgtctttgtttgatagaacacacatgatatctctactagagagagagcgccccaaccgatagagagagtgtatttgctctctctctctctctacctccgcaccacagagagagagagagagagagagagaagaattatagataagagatagcatactatatattgatgtctctctctctagagaggtgttgctctctccactcgtggagacacacagacagatacataattatgttagataaaatatctctctccccactctatgagagaatatataatttatataatatgttgtgatatttcgcgccaacgctccgtgtccaccactctctcgcggtgtcctcctccaccccacacacctctgtggtgagataatttgcatcaaaccctcgcgcgggagcccttttgtgtttttttttttgttgttccggctgtttttttctcaataatttgggggggcacccacccacaaaatataataatataataataataaaataataaaatatataataataaataatataaataaaaaaaacatcgagcatctaactcggtcgaaagagtatgtctcc

SEQ ID NO: 690063 - DNA, 673 bp, Homo sapiens
  misc_feature (96)..(96): n is a, c, g, or t
  misc_feature (578)..(578): n is a, c, g, or t
  misc_feature (587)..(587): n is a, c, g, or t
cggatcggttgcagtcctggtagctggggtgcaaaagccacatttcccaatatgtggaagtatttctgtatcaacaaatgccagtcaccgtgggtntgtatgcagtctatacaagtcctgacagctccacaccaagacatattactggaaggtctccatgagagttgaggcagtcagagcataaagacagaaccacacttaccaccccagacgaggcactcactgcatgccaggcaccaggacacacatgtcatggacattatttagtgttatccccataaatgcccatgagatgggggctgttattcgcattttgcagataaggaggctgatgtttaacatgactaagggcttgtccaaggttctacagctagcaaagtagcaaagttgggattctaacccaggtttgcctgatttcaaaacctaagctctcttcacttgcccagacggaggcagaggagctcccagctgtattccatctttgctgagaaagcatgaaggagatgctgtgaacctggcacaggcacacaaggtcaagccacagggatcggtgaaacagcagtgaggccaggtggtanagatgtacncctcgtcctccgaccagcctcaccgcagtgccaacagatgacagtctaagtacagtaagaccacttttggctcaggtcaaaagctt

SEQ ID NO: 690064 - DNA, 398 bp, Homo sapiens
cagctctttgggaatcttttggcatccagggcttgcagatgatcttctctaatgtcatcattcttggctctctgccctctcactggctctccacgtctgcctcattcttcttcctgctcttgctctacagctgttcagctgctgctgcatccactgttgagcagccaactgccttgagtgacttgatggccctgctgtccctgctgttggggtcctatggctctaaccccaccaccaccattttgctcttgctaagtctcctttctctgtgttgttctagcgcagttctcaatactaaaggtcatcaagaaaaggccactcaagacaattttctctcattgggatataatttcctcttctactttttatagtattgtggtattagtcctgtcgacgcg

SEQ ID NO: 690065 - DNA, 472 bp, Homo sapiens
  misc_feature (287)..(287): n is a, c, g, or t
  misc_feature (294)..(294): n is a, c, g, or t
  misc_feature (333)..(333): n is a, c, g, or t
  misc_feature (365)..(365): n is a, c, g, or t
  misc_feature (383)..(383): n is a, c, g, or t
  misc_feature (414)..(414): n is a, c, g, or t
  misc_feature (444)..(444): n is a, c, g, or t
  misc_feature (452)..(452): n is a, c, g, or t
tgagatggagtcttactctgtcacccaggctggagtgcagtggcgtgatcttggctcactgcaacctccacctcccgggttcaagcaattctcctgcctcagcctcctgagcagctgggactacaggcgcctgcatcatgcctggctaatttttgtatttttagtagagacggggtttcaacatattggccagggctggtctcaaactcctaaccttgcgattcgcccgccttggcctcccaaagtgctggggattccagggcgtgacaacccgcggcccggccagnaatcgantttatatttaaatagttcataaagaaggcacttacattncattctcactttactttctattaagggcgggntaatacgggagtaagggnttttttaaagtcactggaaacatacaggaanttaaatgtagggatcccactcttctttgtnataaaacnggttatataatttatttaat

SEQ ID NO: 690066 - DNA, 311 bp, Homo sapiens
  misc_feature (70)..(70): n is a, c, g, or t
  misc_feature (72)..(74): n is a, c, g, or t
ttctagccatgtatttatttttactctgcatgacctggatgcacacagctgcctcgtatttgcatagacntnnncccccccccccccagttacccaggtattcctcgggatggtgtataaactggaatatgtatgaaatgtcagtaaaattcactttgctttcaatgtatatatacaaaaaacaacaactacatctagaaacacagtaacaaagcaggcagacgagccccaccaacatcaatccggaaggggtctcctataatgctacggggcccctttccatctcctgactaatcccttaactggttact

SEQ ID NO: 690067 - DNA, 890 bp, Homo sapiens
gccagagtcctcagtctcacccgtgaagtgtccgctagacccttcgtgacccagccctgctgaccagccacgtctctcatgtctcttaccctgtgcctggcagacgtgatgtgcggtacatctctagaatagacaggatgtatttcacacatgctgtctccctgaccccgtggaaactcccttcgactcccctgtaagcgtgctcatccattgagggatcaacacagatagcacgttccatccaggaagaccccctcccattcctttgttgctttctttagtcgtctatcaatcaattacccactggccagtgatagtgactatctagatgtgtatctgctccatctcggcactgtgagcagcttaatggcaggggtcagtgtaaatttgtttcttgtacccatcatctgacacgaagcgtggggctcaacagatgtcgtacgaccagagacaacggaagggaagggaccctggggagggtggcgagggggccccgaggagtgggagcacgactagacggacagatgcgaatcttaagatccaccatgtggattttatctctaccaagccaaaagctgtctggggatggcccggagcccccagggtggcaaggtacccatcgggagaaggtgagaccaggggcagtggtgccccacctgggctgaaagaaagtgcagaaggaggaagatgaccatctggccacgggcctggcgtacatgcacattgagggatccctccgggaccggcatggatcaacctctaaaaacttggatttcaggaaatccctgagcaccaaacaactacccgagggtgctaaacaaagcacgaatagcccgccccccacaccaacaacccatcaggcccagacccgtcaggcccgcagaaacccg

SEQ ID NO: 690068 - DNA, 291 bp, Homo sapiens
  misc_feature (116)..(116): n is a, c, g, or t
  misc_feature (289)..(289): n is a, c, g, or t
cacctaatcaccctcctccactcccacacatcagactggtggtgctcctgggcacaggtgggcacctgctggaaaagttttcagtgtgcttcttctgagacttgcccatgaggcgntggcaggaatgggggccatggatcctggcaaggatatattcctaaactgtccttgatggtgtaggtccctcctccttttctctgtggcattttgctttgtccatttgatgccatatctttacagatgggtttcagcaagatattctcaaagcatttcaagcaggaatgagccnct

SEQ ID NO: 690069 - DNA, 129 bp, Homo sapiens
tctagcaggatcttaaaggcaagtagaagaggtggtggccaacttaagtgctgtatcctggaggaggtccgggtcagcacagggcaaggtaggtagctagctgcctgacccctagtctggggtgctgtc

SEQ ID NO: 690070 - DNA, 385 bp, Homo sapiens
tgtcgtttacaggggggtatcacggtcgaacgttattgacgatgtcgctgacaagcaaagtcatgccatataaaaaaggatttggtccgtttgctcctgaagtgtataaatttccgtatccatactattaccgtgcaaacgagcaaactatagatgaagtagataaccaactcattgaatcattgaaacagtttttcgttgcggaagtagcccctgatcacggtagcagcaatcaaaattgaaccagtacaaggagaagggggatttgtccgttccgtcggcgaaatttatgcaagccgattccgtcgcatttgtgatgaatacggcatcgtccatgattgctgatgaaattcaaacaggttttgcgcgaacaggacgcctgttt

SEQ ID NO: 690071 - DNA, 170 bp, Homo sapiens
agtcacatgaggcagtctgctctgtcaccacgctgggtgcagtgctgtgatcttggcactcaactgatcctctcacctcagcctctcaagtagggggacctcaggtgtgcgctaccatgccctgcctggctaatttttttttttttttttaaaaaaacggtcttgctatg

SEQ ID NO: 690072 - DNA, 186 bp, Homo sapiens
agcggacggagtaggttctcgaggcggggcagcgagcggcggcggctccggggctcctcctcctccttggtggcggcggcggccgggacgagaccggcccggctcccctctccggcacccgcgcgcccaacccggcgccgggaacatgggtcggtccggaggcgggagtgagtgacccccgtagaa

SEQ ID NO: 690073 - DNA, 103 bp, Homo sapiens
gcttctgagtaccagtatgttgtatagcattacatggaaaatgagaagacaatttctgttgtgcatcaaccatggtgtatcatcacaggcttacgttcagcga

SEQ ID NO: 690074 - DNA, 135 bp, Homo sapiens
aaggatccccaagcacgtactacattactcagtgaacttgaaataggtccagaagtgaacacttagggtgcatttaccttactcctgaagatgggaagacacacggatgcttgccttaaaatatctgcctgagag

SEQ ID NO: 690075 - DNA, 550 bp, Homo sapiens
  misc_feature (208)..(208): n is a, c, g, or t
  misc_feature (269)..(269): n is a, c, g, or t
  misc_feature (336)..(336): n is a, c, g, or t
  misc_feature (358)..(358): n is a, c, g, or t
cacctgaaaagggattctaggaaacaagcaggacgaagcagccctgtaacacttcagaaaagaagaatgaagatggtgcgggaatgaagaaaaacacagctggctgggcctgtacccaacaaaggagcatttacagaacaaaccaatgtagaggaaaagttgtgttctgcagagaaaaactcgtgtgttcagcagagtgccaatttanaagttgcacaaaactcaccatcagtagaaaacatacagacttctcaagcagaacaagcaanaacccttacaggaggatattttatgcaaaatattaaactgtgcacccatttgaagagatagcagacngcattctttgagcgaccacgcncatcagaatttccttctaaaagcatcacctttacttccagaagcaccagccccagaacaagtacaaacttttcacccatgaggccacagcagcccaaccttcagcatctcaagtctagcccacctggatttccatttccagggcctcctaattttcccccacaaagcatgtttggatttccaccaaaaaaaa

SEQ ID NO: 690076 - DNA, 1040 bp, Homo sapiens
gagcgcacgagtgcgcgcaccctctcccctcgtccaccgctgccgcctccttcttctgccgctcctggtgctgcttgtgtgctcgtttggtgcggacctggtacctcttttgtgaagcggcagctgaggagactccggcgctcgccatggccgacgaaaagcccaaggaaggagtcaagactgagaacaacgatcatattaatttgaaggtggcggggcaggatggttctgtggtgcagtttaagattaagaggcatacaccacttagtaaactaatgaaagcctattgtgaacgacagggattgtcaatgaggcagatcagattccgatttgacgggcaaccaatcaatgaaacagacacacctgcacagttggaaatggaggatgaagatacaattgatgtgttccaacagcagacgggaggtgtctactgaaaagggaacctgcttctttactccagaactctgttctttaaagaccaagattacattctcaattagaaaactgcaatttggttccaccacatcctgactactaccgtatagttttctctattctttcatttcccccttccccattcctttattgtacataaagtaactggtatatgtgcacaagcatattgcattttttttttttttaactaaacagccaatggtatgttttgattgacatcaagtggagacgggatggggaaaaatactgattctgtgaaaataccccctttctccattagtggcatgctcattcagctcttatctttatattccagtaagttattttgctctcactgttttaacaaaaaaaaaaaacaacaacataaaaatccttgcataccttgttcaattggagaattttaatgtttttcatttatcattgtaaaaccaaggacaattttataacttttttgtacgtagctgttacatgtagggcaatctgtctttaagtagggataaattactctaaaacaaaaaagaatcctagatagttttcccttcaagtcaagcgtcttgttgtttaaataaacttcttgtttaaaa

SEQ ID NO: 690077 - DNA, 1242 bp, Homo sapiens
ccggccccttcagtaccgcctcctacactagaccatggtgtctcagacataatgggtgacttcaataaccacccagcagtgccactcgtgaagcccgcatgattctcgacccagcatcatttgaatggctattgttatccatgtgaaggatgcgagaaccatttccgcggtgggttagttgcgtccagatttcacttgcacaggcagtcttgcagcatagccgactataccagcacttgtgctctgtgcctgcaccatggggctctcgaccttgcagcacatccagatccaaggctgggcccctctctgcgcgccagtcgcgcaccaagcccgccaatcctagtctggcaggtctcagcatcacgggcacagggccgcacatcgtccactggacagctgccagcagctcagctggctaggagcacaggtaacgcgccccaccggccgagccaggcccacggattatcacaggatagggcccgtccgatcaaaacgcacgcgagctctacatgggcccatccagcaacattggacgcctttttgaccggccgttaacacggaagggggataaccaacacttgcatggactgcccctaggattaccgcatcccatgttccaatagattttaccccaggcgcgccgtgggcaccacgggcaaaggcggaacacccaagacccagcacaccgtcgggacacacacagcccacgcgcaatagtcacaccaaacacagcggcaaacaagacggccccccaaagaaggcgcactaaacagcttgcgaccgcattcccagaccaccgggacatacaacctgggccacaagtggaggcacggacagtgagtgaaaacacgcccacacccgtgacccccgggcccaaaggcgcacgactgtaccacaagtttcaagatgggcatagcgccaagaaatatagtgggaccacacgacccatgggcgttggcgattcccccgcataccaggtcgtacaacgagtaatccccacacgctagtcagacacgtacaaaccacagtggctggggctcctccgcaaccgcaccatcggcagagttacgtgcgagtagtttcatcacaacagcgcgcaaaaacactgggaaaacggcgtagcacgctattacacgtaggacaccccatgtgggccagcaggacgtactttatctcctaacgcgcgacacgctatacagcaagagtatgcaccgcaccaagtagcacatctgacaacgtttg

SEQ ID NO: 690078 - DNA, 1383 bp, Homo sapiens
gagcgcacgagtgcgcgcaccctctcccctcgtccaccgctgccgcctccttcttctgccgctcctggtgctgcttgtgtgctcgtttggtgcggacctggtacctcttttgtgaagcggcagctgaggagactccggcgctcgccatggccgacgaaaagcccaaggaaggagtcaagactgagaacaacgatcatattaatttgaaggtggcggggcaggatggttctgtggtgcagtttaagattaagaggcatacaccacttagtaaactaatgaaagcctattgtgaacgacagggattgtcaatgaggcagatcagattccgatttgacgggcaaccaatcaatgaaacagacacacctgcacagttggaaatggaggatgaagatacaattgatgtgttccaacagcagacgggaggtgtctactgaaaagggaacctgcttctttactccagaactctgttctttaaagaccaagattacattctcaattagaaaactgcaatttggttccaccacatcctgactactaccgtatagttttctctattctttcatttcccccttccccattcctttattgtacataaagtaactggtatatgtgcacaagcatattgcattttttttttttttaactaaacagccaatggtatgttttgattgacatcaagtggagacgggatggggaaaaatactgattctgtgaaaataccccctttctccattagtggcatgctcattcagctcttatctttatattccagtaagttattttgctctcactgttttaacaaaaaaaaaaaacaacaacataaaaatccttgcataccttgttcaattggagaattttaatgtttttcatttatcattgtaaaaccaaggacaattttataacttttttgtacgtagctgttacatgtagggcaatctgtctttaagtagggataaattactctaaaacaaaaaagaatcctagatagttttcccttcaagtcaagcgtcttgttgtttaaataaacttcttgtttaaaaaacaaaaacacaaaaaaaaaaaaaacaagcaacaaacacacaccccaccccaacacaccagccgcaaaaccgaaaccgacaaaaagacgacacgcgagacccaaaaaaaacaagacagaagacgcggcgggcacagaaaaaacacccgagggggcaacaccaagaacagcccaacaacaatcttgagaaacagccccacccaagagagtgaaatatataaacagccgcggccggcataaaacaagaccatagcaagcaaacaagacgcggcatctcggagaccccactggtggggcgaacaggaccccaccacgaactccgccggaaacaacagaggatgagc

SEQ ID NO: 690079 - DNA, 1012 bp, Homo sapiens
gagcgcacgagtgcgcgcaccctctcccctcgtccaccgctgccgcctccttcttctgccgctcctggtgctgcttgtgtgctcgtttggtgcggacctggtacctcttttgtgaagcggggaagactccgggcctgcggaagccagagtgactgagaacaacgatcatattaatttgaaggtggcggggcaggatggttctgtggtgcagtttaagattaagaggcatacaccacttagtaaactaatgaaagcctattgtgaacgacagggattgtcaatgaggcagatcagattccgatttgacgggcaaccaatcaatgaaacagacacacctgcacagttggaaatggaggatgaagatacaattgatgtgttccaacagcagacgggaggtgtctactgaaaagggaacctgcttctttactccagaactctgttctttaaagaccaagattacattctcaattagaaaactgcaatttggttccaccacatcctgactactaccgtatagttttctctattctttcatttcccccttccccattcctttattgtacataaagtaactggtatatgtgcacaagcatattgcattttttttttttttaactaaacagccaatggtatgttttgattgacatcaagtggagacgggatggggaaaaatactgattctgtgaaaataccccctttctccattagtggcatgctcattcagctcttatctttatattccagtaagttattttgctctcactgttttaacaaaaaaaaaaaacaacaacataaaaatccttgcataccttgttcaattggagaattttaatgtttttcatttatcattgtaaaaccaaggacaattttataacttttttgtacgtagctgttacatgtagggcaatctgtctttaagtagggataaattactctaaaacaaaaaagaatcctagatagttttcccttcaagtcaagcgtcttgttgtttaaataaacttcttgtttaaaa

SEQ ID NO: 690080 - DNA, 680 bp, Homo sapiens
catgtgtggaacatatgatcccagccgggcatagtggctgacgccacctacatgaatattcatagctcctcctgtagcctgttgaatatgtatgtttagccaacctcttcagcataaagctcctgcccaaacccctcctgctcctaaatgtctgtctctggtgttaaccagaggctgctcttcccaggctgctggatggctaccttgcaggctgtcacccttaacaagaaataaagtgtcctttgcaaatgcaaaaaaaaaaaaaaaaaaaaaaaaaaaaaaaaaaaaacaaagaacaaaaaaagataacgaaaaaaaagagacaaaaacaacaaacaaacaacagcggcgcggcggcgtcgcatcgaaaaagcccccacaggcggggcgccccccgctatgacgccgcacgcacgattagttggacagaacagcgaggcgcctcacacacaaagaggggggcgaagtataatcaaaaaagacgaacagagagcgagggcgcacgcccagggtaagacaacaaccaaaaagaccaagccaaaaccagacagagagacaaccgacccgcgccacacgagagggcaaacctactccatggagggagaaggcgagccaaccccccaagccctgggagggggagaacaaacaaaagcggggggacgacacacacacccccacag

SEQ ID NO: 690081 - DNA, 735 bp, Homo sapiens
gggctcacatgtgtaatcccagcattttgggagggtgaggcaggagaatctttcgagcccatgagtttgagaccagtttgggcaacatggggagaccccatctctgtaaaaaatcttaccaaaaaaaaaaaagggtgcggtaaaaatctcagttttattatatttaggggaccaccatcatctgtgttggcccatctgttggactgaacacgtaatctcatgggcgggcattatcgactggtatcggatattacctagagatttccttggtcctcaggggtatactcggtatagaattgtgccttagactattgcttataaaggtccctcagaataattcctctcaggggggttttggtcacccagcgggcttccacgagttgacaggtgcctatcggctatcacatctaatcgcgggaacaataatggggggggacactatctacacaacacacgtttaccttcaatttcacactctatgcaagctgttagttcaccacagctcaaatctaacaaaacagggcttacagaaacgttaacgtgttcccgggctaacttgtacccctttgtaacgcccgctgcacacctcctgtagaacgaacggcgagaactaattcgagagcagcgttaaactcgtcaatgcaggcattgttaccacttaggacacccagactacccccaagggcaattatcaggtgccttggggacacatcttaaacggcccgggcatcctag

SEQ ID NO: 690082 - DNA, 826 bp, Homo sapiens
ggggtggggtggtggtctggcgtgcgtcgggggcggacggggttgcggggtgcgcggcgggcacgtgtgtgtgggcggcgtgcagtgcgcggtgtgagtgcggggtgggagtcggctgctcggcgtgtgcgaggaggccgtgctcaggcggtgcagactgtgaggttcctcgtcgatgggcttctcaggtgcctggcggctccttgtctccgctccagtgcgaagccgtacatctaagccagaggagagatcagggtcagctgtgtccgggctctcagcgcagtgaggagttggccagccccctccggctgccacaccacgtaagttctcagtcccaacctcggggatgtgtgcagacagggttgtgtggaaccacagctggggcctgttccctctggaacgatcggtctcgctcatctgtgagtatgctgtggcccagcgtgagcgagccctgacgtccgccagagactcgagtgctctatgaggacagtgtcgcgcctctgccctccgcaacgtgcagtccctgggcacggcgggcccgtgccatgtgctggtaagcgcatgccgtgggccctggcgttgtggctctctccactccaggcggaccgtgggggccagtgaaggaagctcccggaaagagcagagggagagcgggtaggcggctgtgtgactctagtcttggcccttcagcaagctgaaggaacgataagaaactggaaaggaagatgctttaggaacatcgttttgcttttttaatatatatatataccttataagagatcctttcccatttattctgggaagatgtttttcaaactcagagaca

SEQ ID NO: 690083 - DNA, 150 bp, Homo sapiens
cgacagggcgatactgtctcgagagagaataaaaaataaaataactatttacatcttctcagttttaatttcaacagagtatcacgagatatacccaatataattaaaagctctttggggttctcaataattttttttgtattttttgta

SEQ ID NO: 690084 - DNA, 686 bp, Homo sapiens
  misc_feature (97)..(97): n is a, c, g, or t
  misc_feature (167)..(167): n is a, c, g, or t
  misc_feature (671)..(671): n is a, c, g, or t
tttagcactgacagactcagcaaccaggctctcctagtcctgctcccctgatctgtggcaggtactgctgctacaaaagacgggtcaccatgagagnactctgctagtcaaacacatatgacatggatctccagacctgacaggaccatgtccacctacactgatgnccatcggacatgaggtacgaagggtacgggtgaggtgaagcaagtgctgactccacccctcacagacttccaggtccagcccatagcatgcctttcaggtagtcgtgcgagacgatgctcagcacattgagagcactctcagcaactgaagctgtgggagtctcaggagctgacaggggactgctgggcacagtgggggcagaaatgctagtggagcaagagcgcgggggcagcggaggcttctcatcctcacaatcatgaggcatacaggtaatacggtgggtccaggtctacagctcaccctatacaggaagaagcagggacagcacacaaggcactggttgggctgagcatacaggccgatgagctcaccaagggtatggaagcggcgcacaggcacaccctgcgaggtatgcacagccaagaaataatctccatcaggcagaatgcgatacgtgtgaacatgcttctgatacatggaccagagcgagaagccacacgccnacgtatcgctatcac

SEQ ID NO: 690085 - DNA, 489 bp, Homo sapiens
ccttcataataacttccatattttattaatgatttaatattgtagtaatattttttggtatttgtttttacttttttgcttctcaaatactaaatcctgacttatttaaggattatgtttttcagaaggcttcctatgaaatatttatatttttaatattgtgccttcatcatttagttcttcaaaacaaggttaattgtaaggattccattttctggaattgtataatgttttatagtgattttgtttgagttctctcctaataatccagattgtttagtattcaactacttgtgtattattaagaacttgagaaggtgtttatttgtgactttgttttctcagcctctgtgtactgaggcatacttcatacgtattcttatattttattacataagaaatcctacagatcataatgatgtttcatatagataaattcattgtgttgtatactagtctgtctcattgaaataaatctctaaaagttaa

SEQ ID NO: 690086 - DNA, 239 bp, Homo sapiens
  misc_feature (11)..(11): n is a, c, g, or t
  misc_feature (22)..(23): n is a, c, g, or t
  misc_feature (31)..(31): n is a, c, g, or t
  misc_feature (43)..(43): n is a, c, g, or t
  misc_feature (74)..(74): n is a, c, g, or t
  misc_feature (77)..(77): n is a, c, g, or t
  misc_feature (89)..(89): n is a, c, g, or t
  misc_feature (99)..(99): n is a, c, g, or t
  misc_feature (102)..(102): n is a, c, g, or t
  misc_feature (106)..(106): n is a, c, g, or t
  misc_feature (110)..(110): n is a, c, g, or t
  misc_feature (117)..(117): n is a, c, g, or t
  misc_feature (127)..(127): n is a, c, g, or t
  misc_feature (130)..(130): n is a, c, g, or t
  misc_feature (134)..(134): n is a, c, g, or t
  misc_feature (155)..(155): n is a, c, g, or t
  misc_feature (176)..(176): n is a, c, g, or t
  misc_feature (179)..(179): n is a, c, g, or t
  misc_feature (220)..(220): n is a, c, g, or t
cggcacgaggntcgaactgaanncgcatcgncgagggcatccncaagcggccccctgacgagcagcggctgtanaanatgacacctttnaggccctgtncancganccgntttccancccgccaganctncccnatgtgatgaagccccaggacncgggaagcagtgccaatgaanaanccgtgcagtgaggacccccaagaggcccatttcccccaatnaaagagatttgggagtctg

SEQ ID NO: 690087 - DNA, 230 bp, Homo sapiens
tgaaaggaagtagcttactaataaacggacctccttcttcaagaaggcaagtaaggtagacgaagtcttgtatacgagtttctaacacttcgttttctagaggtcctcaagtaaggagaatagttggtctaatgccggtttaagttctatgtccataggggcaaaaatgttgtctacaagtacggggacgaagtacgttaaaaacttcacgacgaggccggtcgtcttct

SEQ ID NO: 690088 - DNA, 228 bp, Homo sapiens
cttttctgagactacttgatcaaacatttccaaaagaaaacacatgcttccacttcactgataacaaaatttaccgcagtttgcgccacctaagactctgacaacagcaatacaaaagtcaatttcacaagcgttaagatttcttcagacaaaatagatcattcacatcttcaagtcctttatgaaatcagttattactattattctttcctgattaccaccctgatc

SEQ ID NO: 690089 - DNA, 254 bp, Homo sapiens
ttagaataccctggtttctgcattgccctggtgatatagaataccttggtttctggattgccctggtgataacatgtatttttgattcataaagtcactctttagagacccaatgaatttggctctaaataggaaaggaggtatttgcaagtccggatgtacacagacattgaagtcccatcagtcccagagtgcacatattcaagtacccctacgtagtgcgcatccctttcaacacaaatatctctaaacac

SEQ ID NO: 690090 - DNA, 619 bp, Homo sapiens
aaacatgccatgggggtgagagtgcaagtagggttggggggcagtgggagtaatgtatattctttcctagaaagggtatttgccacaacttgagagaaatttcttctttctgatcacctgaagggcacggaaaatccaaactcttaggaggctgatgtctaaggctgggttgaggggctttgcagagtgactgcaacccaagtttaggtacccacctgggctcaccaaggctttttcatacagaggaaatggagtgggatctacaaaccccatcaaatcaaagtaagagggaaaacaaacacattcccaaaggcccattttaacccatttcctttattcaacaattgctggacttcaaaccctccagtttccctcccaggtgggaaggttaagaggggaaacttggtgaacccaaaaatttattgccaaaattaagccaagaggcttaaggcccccagggttagagggccggaagcactaacctccaaaactttggtttcctgggggcctggggaaattgggttaatcttggggtgggaccaaaaaaaccccaaatcggtagtttcctccttaggaagtctcccccttggtggactcttaaggaaatggttggttcctt

SEQ ID NO: 690091 - DNA, 165 bp, Homo sapiens
tggggatgggtggcagattggaaatagagaagtcagcatgggcttaatgagaagataagattggatcaatgaagacccctgagaagaaaaaaaaaaatgggagcaaagaattggcagttactcaagaaagaatgcacaggcagaggaaataaccaagtgcaaggg

SEQ ID NO: 690092 - DNA, 645 bp, Homo sapiens
  misc_feature (107)..(107): n is a, c, g, or t
  misc_feature (152)..(152): n is a, c, g, or t
  misc_feature (290)..(290): n is a, c, g, or t
  misc_feature (302)..(303): n is a, c, g, or t
  misc_feature (308)..(308): n is a, c, g, or t
  misc_feature (319)..(319): n is a, c, g, or t
  misc_feature (336)..(336): n is a, c, g, or t
  misc_feature (353)..(353): n is a, c, g, or t
  misc_feature (360)..(360): n is a, c, g, or t
  misc_feature (556)..(556): n is a, c, g, or t
  misc_feature (573)..(573): n is a, c, g, or t
  misc_feature (636)..(636): n is a, c, g, or t
  misc_feature (644)..(644): n is a, c, g, or t
gtcaagcagcccggagagaactgacggtccctgggcctcgaaggtcacccgggcggccccctcactgaccctccaaacgcccctgtcctcgccctgcctcctgccantcctcggcctgagtctcagcatggcggaatgggagcagcgatggnctagggaacctcgccctgcaccagccccaatcagacgccgctcctccaactaccgcgcttatgccacggagccgcacgccaagaaaaaatctaagatctccgcctcgagaaaattgcagctgaagactctgctgctgnagacttgcaaannaagangctggaagcangaggcggaagatcggcncgtagagaaggggcgcnctctgancacccgctgccagccgctggagttggccgggctgggttcgcggactgtcaggacttgttgccgacagctccacgcccgtgtggacaaggtggatgaagagagatacgacatagaggcaaaagtcaccaagaacatcacggagattgcaaattttgacttcagaagatttttgaccttcgaagcaagtttaagcggnccaacctgcgaagagtnaagatctctgcagatgcatgatgcaggcgcttttggggcccgggtaaagagtccttgacttgnggccactna

SEQ ID NO: 690093 - DNA, 150 bp, Homo sapiens
taggacgataaggtctgatagtataaacttatggaggtaggagtcagtggaggtggctgacaaaagagatcatttgccccaccacatatggcagcaaacgctggcaactctcccgctagaccacctactaaagtgcccagggtactatgg

SEQ ID NO: 690094 - DNA, 277 bp, Homo sapiens
atatgctgtctcagtctggtgagcagccagtatatatgggtgggggtcaggacagaagattcaataagagataatgaagaggggatggaggtggataccacaccaacagttacttggacagttggaggatgcagatgtggatcactgaaaatgatttatgcaagtttaagattctgctcctaagtgtaggagagaactgggtgcctcttccactcgggagtgacagtactgaaagtctttttccttttccaaaacccaacctgaaccagttctcgct

SEQ ID NO: 690095 - DNA, 141 bp, Homo sapiens
atcactttggcgtgctgacgcctggacctctggcaggtcaagtctggcaccgtgtttgacaacttcctcatcgccaacgatgaggcatacgctgaggagtttggcaacgagacgtgaggcgtaacacaggcagcagagaaa

SEQ ID NO: 690096 - DNA, 231 bp, Homo sapiens
ctgctctaagaggatcctgcggctgaactgctcccagtggctctttcggccagccagttcatgctcccggcggcttcccaagccccgttttgacttttggtggctctgcaggctcgaaaggccagcctcctgcctcccgaagcctgacatgcccaagcctctggctcaacagcggactctccacgccccagtagctctcgcctcactgcggttcctgggtccggagctcga

SEQ ID NO: 690097 - DNA, 255 bp, Homo sapiens
tgctttctaccatgttgccctggtggtgagccactggtccattgggccaatatatgggtaaacaaggcttatacaaaagagagtccagattcctaccgaggagagtgactactgatcagatttatttactcggaagctacactgagactacagtgtggactatggactggaattattggtactttactacattcttatttaatgagtgatcccccacaatatcccccaatgaccatgagaggactgccgcactct

SEQ ID NO: 690098 - DNA, 1107 bp, Homo sapiens
  misc_feature (777)..(777): n is a, c, g, or t
  misc_feature (825)..(825): n is a, c, g, or t
agagggaagaagtgcccagaaggtcggggctgtcggacggagcacagggtatgtgcttttactatagcgccgagacgggcatggaagttccgcagctagccgcgagctggcgcgctagctgggtcggctccatggactctgatcaccttcgatttccgcatagtggcaagcatgcatgatgatgcttagatgaacaatgagctcggcagcggcagtgccgcatacggatatccatccaaccgcaaggtcagaggcgacacatgccctgaacatgaagcatcaggcagcatgtccagtggggcctagtagctggcgtccaattcgttgcgagagcgagtctcaggatgagctcagaagagttaccgaaaccatcacccgaggcaatcggaggatcagagagctgagcccgcagataggcgtgtggaccacgacccgcgccatgttcttcctggagagaacgaacgtatgaatccgcgccttgaaacagcctttcgagcattgcttgaaggaagctggctcaagcatcatgtggaccctcccgcaagggacctggatgggaggtagggttacctggcttgacacggcactgaggatgcgtgctagtcaggccgatccggccaagttgccgcatgacgacgattaagcgactcaatgcacccatcatcagggttacagactcttccggccgcctggtggagtagagaatccctcaggagtaatgtgtgtgaaacaactatagtcagcctctggtgcaagagctcttcagtggttgatccngatcgaggtagcatccaaggtaacgccgtgcacgcagtctggtgtcgnggcatggtgcgggaaagcgcggggtggatgggaaagcgcctgatgggccgatattgtggggccacgttggagggaggctggtccccgcgtacgttggggaggcccaggtggagaatggcttggtgatgaagaggtccaacaagcacaacacgggggggcggcgggagggatccccccgggcgccggattgggccgtttgtggaagaggcggtggatcatgagtggtttgatacgggaaggggtaccctgtacgcggacgggagagcaccctgtggccactag

SEQ ID NO: 690099 - DNA, 248 bp, Homo sapiens
cgatacttggcgtgatctgtaatggcagcacagtagtactcggtccactgttagtaactcacagacgtctgtatagagcagtggcccttacagtgcccctccagactgcaaggctctgcctctatgcatccaggagagattggaggtggccggggggccacgggccagtgagatagaagagagtctcccctagcccctcaccaggcacattggtccctcgagagacgagacgatagaagctcagcatt

SEQ ID NO: 690100 - DNA, 537 bp, Homo sapiens
attccttatcactttggttaaatgaatgacttattttacaatgacctatgatcctatttcatggtatcaagtcttttaaacctttgatattttacaaactttccaaaatcaatttataaattgtcttttcctgacctaattaatcctttaagatattaggtcccctaaagtccaaaaatgacataatttggcttatttggtataaaaattagacagggagcattgtcaaatatgaaatgatgtttggttttctttgggctatatttgtataaatgttattggtatgtgttccaaaatgatgggaaactcctgtaattctgatttaacttagtgaacgttatcagtaattgtaattgttgttaaattattgtgtgccacagaggtaacacatttgtcaattgtgtctttgattatggctgccctaaaatttttgtcatccatggaccaatggtgtcttgttttggtcctttttaagtgggtcttattaatcaactatggaaacttaaacaggtggtcttaaatgcaaagttttcgata

SEQ ID NO: 690101 - DNA, 457 bp, Homo sapiens
gtgggagctttgtgaagggtggccctgagcgggcgtatgatcgatgcgcgtcgcgagcatgtggtgcgcagggttctgctgcgcaagccgggcctgtggctagtacggctcaggggaggtcgttgatcgctaaactgggtgcgcagtcgtgcaggcttgcgtatgcgcggtcgagtgcaggcgtgtcttaatgtggccaatggagtggcgtggttcacagtagttcgtcacgggattgcagtcttatgactgctgcctcatgctgtccttatagtgccgttctttgcagtaggtggtgcagacatgctcgtgagatgcatgcggattcgaatagaggcgcaatgggtgttctcggtgcatgtgctcacgttagacagactggcacgttgagcggcagcgaaagggtctgctcgttgcactgcgtgaaaaggtgtctcttgaatggcggtcaggtcat

SEQ ID NO: 690102 - DNA, 153 bp, Homo sapiens
aatccccgagacgtggagtatggcactatcgaagggctcatcaccaccaatgttggagacagcactttagcagatttatttggatcaattcggtggtacaataaggaaggtggcctctggcctcccttttctggatcaaagacaagtgctccc

SEQ ID NO: 690103 - DNA, 247 bp, Homo sapiens
tctgagtatcccccgcgcgcatatatcctaagtcaagtactgcgtgccactcttgttcacttcggtgagaagagactggaagccctggtggatgcctccaccactgccacttttattgaaagaaagtatctgtcaccccgctactcgggaagctgaggaaagagaatcgcttgaacccgggaggcggaggttgcagtgagctgagatcgtgccactgcactctagcctggcgacagagtgagactcc

SEQ ID NO: 690104 - DNA, 1100 bp, Homo sapiens
cctactctgtggttgtcctggatctcgtcgtgatgtcgactgcttggttgcgccgcgctcccttttgtggatgtgatcttcttggtctggtcccctctcccgtgtgtcggcggggattcgtcctctccgatggatccccgcttttgtgacacagacctgttcttctctgttgtgtcgcacacacgcggggtgtctactcccggtttttagccgcgccccctccctcccgagggatcccccctgtgggaaagtgttgatcctcccggccattctgctgccccccggagggttccccaagtgagaaccccttgtgcacatggaccccggggtgaacccaaggttcccctgggaccagatcccggaaaagcgcacagggtcctccccctaatgccaaaggccctttgacccaaggaaccccttgaacgtatggtccacgaaacttgagaagtccacaactgaagatgagaaccagagggacacaggtgtcatccagaattcactggagtcctatgccttcgacctggaagcccctgttgaagatgagaaacttcacaggccagattcaccgatgaggtccccccgcagatttctggaccacgatgtaatgaaattatccactggcttgataagaatccgactgctgagaaggcaagaatttggacctcccccgcaagagcctggagaaagtttgccacccccatctatcccccagctgtacccgagtccaggaggccatcccggaggaatccctgggggatttccctggtggtggagcctccctcccccttggtggtgcttcccccaggcccccccattgaagaggttgacttaacccccacccaagtgtaagatgtacccattgttcccaccaccactttaacaccatttgaaggaccctaaattctcgtacccaaattcttgtcccagttttaaaaagttaagctgctatagtaagttactgggccattcctccgtaacttgaatatggaaccatatgccccggggaaggaaatacaccttcgccacctttataacacccctgtattgtaagtgggaaatcccattttttaaataaaactatttaacaattggccccaata

SEQ ID NO: 690105 - DNA, 343 bp, Homo sapiens
aagcagttaatacagactcagggtcctgagcacatacaaccccctcagcttacgaaggtgtgacgggattaagagattaaagtaaagacgaggcataggaaatcacaagggtatagactggggaagtgataagtgtccatgaaatcttcacaatttatgttcagagattgcagtaaagacaggcataagaaattataaaagtattaatttgggggaactaataaatgtccgtgaaatcttcacaatttatgttcttctgccatggtttcagccagtccctccatttggggttcctgacttcccacaacaaatagtcaactttgagtctgtattaaactgcttg

SEQ ID NO: 690106 - DNA, 104 bp, Homo sapiens
acggatagcggatctgcctaaaatattattaaatgataggaatgggagatctgaaattgtatggctgaaggctacaaagtcacgggaatcgcctcagttgatag

SEQ ID NO: 690107 - DNA, 406 bp, Homo sapiens
tgggtaggacagtgggactgggtgctggatagaatggccttgatgggaccagcgtctcttccctgggggtgaaaatcaggctctgattccagatctcgcctccatcatgaagaagctcttgaccaagtacgacaatctatttgagacatcctttccctactccatgggctggcatggggctcccacgggattaaagactggagccacctgtgaccacttggcagctccacgcccactactaccccccacttcttgcgatccgcaacttgtccggaaagttcatggttggctatgaaaatgcttgcccaaggcccagcgtgaccttcactccccgaaacaaggccgcagaaaagattaaggggcgctttccccgaaggtacactaatttgccctggcgcagaaagac

SEQ ID NO: 690108 - DNA, 123 bp, Homo sapiens
catcttcgacggaggcattcatgagggtttttaaagtgtcctgaacagttctgtctctcaggataattttctgaaacatactgaggaaattctgtaactcttttacaatcataaagcacagaa

SEQ ID NO: 690109 - DNA, 239 bp, Homo sapiens
ccggccacattgtgctgtgcccctcttaatactcaccaataaactctacttcctgtccaaaaaaaaaaaaaaaaaaaaaaaaaaaaaaaaaaaaaaaaaaaaaaaaaaccccatttttttttttttgggggcgggggggggggggttttggaacaaaggggggccccggggggcggggggaaagtgtgggggggggggggtgccgcgcccccaaatagattcgcgacacacagtggggg

SEQ ID NO: 690110 - DNA, 912 bp, Homo sapiens
aggtactttttaaggaaaaaatttatatgccacagtttacatagacatttcagattcaacacgtactcttgaatataatggtttcttttacttggtcaaaatgcatgtatagcatttctttcatcttagttccttgtgttgcctatgtggtcctttatatattttttattggtatcgaagcaaaccaaaactatcttcacagaccatacagttcaatttggcatatcatttgtcgatatcgaaactacaaagtgtcacaaagttcacagtttagcccttttctagacaagtgcatctttcaacaattcaaccaatgctcctctttctacaattcaccgaaatttatgtgtgggaaggcaccaaaatgatttagtaagtgccactgcaatattccctttcaagtgtggcctacatttcaatcttcaaggatggaatgcatgtctgctccttgttctgaaaaatgtaggcatctactagattgttaaaaccacagtgcaaacatatacataagcctcataacacaaagattgtgcaatttgaaggcctggttaatttttggatgtagacatacctacaaacgaacacgggttcaaaatatcacagcgctgtacaagcttccttgggcttccagataatctcacaatggggtctacatagcacactcattactacttattactacctagttactactgcattgttgggaagcattagttacaacgtggccccgtttcaactatggaattccttagcaaaaagtgcatggttaaactggtgggtatcggtaataagtagtaaagtaagtcagtattatgacatttaccgttagaaaccaacgggtatgcagatctctcacatggttgcagagtacaggcgatacactcgatgcgtgtcgtacgtgcacagaaggtt

SEQ ID NO: 690111 - DNA, 307 bp, Homo sapiens
taaggaagggtccccagcgttgagagagccccaagttgagaacaataatgaacaattattgtatgaacaattgttagaaacagctaatcacaaacaacctgcgggcacaatgacctcattccacacgtagcacccttcagcaggaccctataaaactttcctccagcccttgcctctttgcaggcagccccttctctgctgagctgcccactgcaacatattttcacaatttctctaataaatctgcccttctttacctacaactatcttggtaaatggctttaccacctgcaaaactgaccctagg

SEQ ID NO: 690112 - DNA, 880 bp, Homo sapiens
gctgggtgagcggacgctgcatccctttctgctgcagtgaacctctcatcagaccgactgagggaagcggctgcccggagaccctgcccgtgccggtccacattctccccaggaagcctggacctctatggggcgggacctgggggagcctgagccgagccccggagccagccccagaacccatgaacctccagacaggggcgcccccgggcagcagccacgccagtgggccgagcctgccgcccgccagagcaagcatgagcgagacgcgtcatctgtatccagccgggccactgtgatgctttatgatcgacggcaacccagcgatggctccctgctggcaccggcgtccccaggccattcagcccgctgtcagatctaccacaaccccacggccaatttcctttcgccgtcgtggcgccaggaagatgcagcccgcacagacaggtggtcatacaactgtgccatcgtccggcggtgtccaagtatcaacccaggccaccgcccaacttccatcagctggcgcgcaccctccgcacaggtcctggaggccctcgaactcccgcgcagccaagcgaggcacatgccggcccccagcacatgcaccgcccggccatgcgcccacgctgcccctaaaggccgctagcgaacgcgacgcgactggcgacacccacgcatcgccaacacactgcacctagcgaaccaccccccactcggcaacacaggtccccagagaacatccgaggctcacacatcctactcgagtaaaccgcaagggactgcgcagacatgcaacgtcaacacaagccgacactgtacatgaacagtgcgccccacgcatcagctacagcatagcacacagaaagagaagccacgatcg

SEQ ID NO: 690113 - DNA, 82 bp, Homo sapiens
ggatttgctggtgcagtacaactaggcttaatagggactcgaattcgaggtgggggagaaaatccagataaataaatgagaa

SEQ ID NO: 690114 - DNA, 707 bp, Homo sapiens
gccccgaccactgaggctcttttctgtggcactgggctgccggtgctgtgacgtgctgctcagccatcccctgctctacgtgaagctgctcatccagtgtgtgtgtcatgagcctgatgccccccacccttgtgaaccaatgtgctgtgtgtgatgtgaatgtgtccatctatcttgcctgagcttcgttcacctactgccaagatacatctgttgcaatgtgtgattgggtaatgatatgtgtgcttgttcctgattgccttgagtccccttgtgctgagtgtccaactgccctctctacttgtgactctggtggtaagcatggaagaacgtgtttatcccctccagattgatgacttgatgcatggtatccgcaacaaaggattgatattgaacgacattcccctgacccgcgaaacgttgttgccggagaccgtcctacgagactgatggatgcactgtgtggtgtccctgcgagtgttggcccacaccacccttgcattgtcaatctcaatggctgccttgccttgcggtccgcgtcctgtgccgcgacgcgcgagcgccacactcacccgttggttgttcgctgcgcctccccttgcgcgccagcttcccccgcacggccatgtgctgcctgcgattctccgctggcgttccctccttcacctcctgtgccgcctggctccctcgtcccgcctgccctgctg

SEQ ID NO: 690115 - DNA, 420 bp, Homo sapiens
aggatcattagatggccaggagtttcagtacagcctggacacgatagcaagacccaatctctactaaaaaaaaaaacccagacaagtataggaagtgcaaaggccacaacggcaggaccacacgggagcattctgaggagtgacagaaagagcaggaaagtagtgggtgccacaaagccaacggcccgggagtccaagaggcaggcaggcccagtgagcacgggagaagttcgaaaatcacatggggcgccactagggcctctaagcattcatccctctgctctgggaggcgggcttgaggcagccactaaaagggacctgtttgagaacagaagcccagcagtctatttcccagcagtttccctgcctccaagcctaagtggccgtgagccaaagagggagtccatctccctattacct

SEQ ID NO: 690116 - DNA, 416 bp, Homo sapiens
ggagtcgggtagagaaaggcagcagtgctggtccagccggcgtcgcttgagcggtgagcagtgccaggcaggggcgaggggccgggcaagacccgagagtttaaggcaaagcagggcaagggtgtacgcagcccaaggcgggtcaggctttgggacaattgaggggcggcaaccggggtgaccggcagtgcatggcccgagtaacaggggctgggaggaacccagaatggcccttggtccctgaaccctccacttccaggcccttgtgcaaggcaactggggggaacttctgtccccaatttggttgagtccctgtggccaacttactgggtggccaggggaagcgtagtccttcccttggccccaaaggtctagggtgggtcaggcagaaagcgttgtccggtgtttgaagggac

SEQ ID NO: 690117 - DNA, 128 bp, Homo sapiens
gctatggggtactcattgtcatagctatgcccttgtgtgcaatttgcttcgtcactacccgtctcaatatccaaacagctctaccttaacatggtctctcttatagcaatccctcacgcacacaagct

SEQ ID NO: 690118 - DNA, 342 bp, Homo sapiens
agccccactctaagggagcaggggacctacagcacaccactgtttccccagtcactccctctaaatactcacggccagggcgcgtccactcttcccccctgctcctcccgcttttaaaatgtcaagggacagcattctccaccagttgctgaggctccgtcagccccttttcaccttttgttacaattccctttccccggggccggggtgagggcacattcaggactagaacgccctctgggcatggggtggacatggcaggtcagcctgtggcacttgcgcaggtgcgagtggccagcagaggtcacgaataaactgcatctctgcgcctggctctctacc

SEQ ID NO: 690119 - DNA, 945 bp, Homo sapiens
  misc_feature (15)..(15): n is a, c, g, or t
  misc_feature (942)..(943): n is a, c, g, or t
ggcggtgcgggagtnaggccccggtcttcctcctcgtcctgccgcaggccagaacccctgaggtattcagctgcgcgtaagtctggccggtgcatctgtctccgaatgccccccaagaaacaggctcaggcgggggcaagcaaaaaggcggagcaaaccaagagacgggagaagatcatcgaagacaaaacttccggtgggaagaatcagcgaaaggagcaaacgcaacagaaagtttcatcagggcctgcccaccccttccacgtcaccattggggtccaaacaaatttccacgtcaggtaggcaccaagaggtgacagcttgcaccacgcaaattcggaagagggctgacaagaaaggaaaaggattgcagggagctaaagtgaggtggtacaaactgtgtagttgctggctctaaaaaaatacagtaaggggtggcagatccccagagtctgtagtatgtgcttcttcagggcaggaccggtgttcctacagggagcatacatgtgtaagttctcccaatgaatttgactctggagagcacactgtgaacacggcgaggggttacattgatgcagagatgaagattttgacaaaggatactctgggatcatggggatgagaaaaagcttggaagaagtgtgaacagaagccggtgaggggaaaggaaaaccaagaactcaagttgtgttgaatgctttcttgaaggtatggaaccaaaggttggtggttgggatgcctgaggggggaaattggaggatcgggcggcatccgtgatggtgaaaaggtacagacgaggaggggaattgaagaaaggagaggtgccggcaagtaaactgaattgcgacaagaacagatgtttagatggagagtgggcaactaggagtcgggatgaaatataggtgtgttgtcttatattatatatgttgtgtagttataaannaa

SEQ ID NO: 690120 - DNA, 174 bp, Homo sapiens
cctctagtaagtactggaatccagaggttagaacatgggaagaattatagacttgcctggaggtgcaggcctgctatgacttgcaggtctgtctacagatagcattttatctaggagcagaagaggtgatagtcgaggtgatcatcgaagaatagtctggttctacggcgtgtg

SEQ ID NO: 690121 - DNA, 545 bp, Homo sapiens
  misc_feature (417)..(417): n is a, c, g, or t
ggtatttattgtcaggtactgaacaagaagattcacgccgctcatgtttaagacctgaactctgagatggtttaaaggtacgagctcataaagatggggaggccgaggttacagaaaaagtcataaatcaatacattgaggctatacattggtttgactaaaaatgtgggacatcttgaagcagggcctctaggtcataggtagattcaaagactttctgaattgtgattggttaagaagcaaagctttgtctaaaatttgggatcagcagaaaagaatgttagctttagctcatgggtttaactgcctccctcgggaagaaatttagaacgaagaatggtgatcggagttcagtcctcaattgccccttatctgagttctatgtgccaatggaatccgttggtgggagtttggatntctgtaaaccaactcaggaagagaggttaaaatgttatctgtaatttctatagggaacaaacatcttgtgatgctaactgctttagctattggtttaagctacgttttgcttttttgctgatcaaaat

SEQ ID NO: 690122 - DNA, 136 bp, Homo sapiens
tgcggcgatgggtgtcgtcggcggtgaagaacagggcgtcggcagtgtggatgtagttgggcaggcgttcggcctggttgcggcagccggaacacgtcgcccagttccgccagtcgaggtgctgcaccgatttgcc

SEQ ID NO: 690123 - DNA, 756 bp, Homo sapiens
ggagagctctcgaggcgagcgcggcgcagcgcagattaaaaatcaagaaatataaaccagatgtagcacgtttctagacatggagaaccaagcccataatacgatggcgaactctctccttgtgcagcgctgagcttcaggaattcaactggaacaaactagacatcactggtaaagcaacaagcacaactggctccggcgaaaagcacaaagatgcgggcttctggaagaccacgattagcactcttcgggatcaagaattggcacaactgcacaaacttgatacaggatcagaaaggtcacgcaggtcactgaactacatactgttcaaccaatagctacctatcatcacgactgtcaacatatagtaattctcatcagcaatatgtccacaactccatcacatacttgaagatcaagcgcatcagcaacacgccatcgcattcgctcgacaatcgctgtcaggcaaataatcaggctcaacttgtcatcatactcaacatcacgtggaagacatccagcaagcctcacaatccccatcagaaatgctacaaggcccgcaaatcagaacgcacaggaactagccactacggctcggctacacagatgccacaaaccttgctaaacagaagctaacggcaaccacacaatttaaacacctattcctaattggtcaaaaaacgtacataggatcaacgccaacgttcacaccacatgaccaagactacctcatgcgacatcgcagtgccggacaag

SEQ ID NO: 690124 - DNA, 261 bp, Homo sapiens
cgtgctgattctagaggatccctcatcccgagtagctgggacacaggcacacaccaccatgtccagctaatttttgaatttttttgtagagacggggtctcaccatgttccccaggctggtctgaaattcctgagctcaagagatctgcccgccttggcctccgaaagtgctggggttacaggcgtgagctactgtgcctgtcctatggttttaactggtccttaaagaatgattttgcatagagtacaacctgccggtgg

SEQ ID NO: 690125 - DNA, 239 bp, Homo sapiens
tgcatcatcttgctattatggttaacaggcgtgtgggtctctccctgggacatgagggcatagttaaaattccctgggtggaattaatgcctggattcattgctcctccctttcaggacaacagggaaaggatgaagaggagcagcagggttgggacccatcctcaggagcatgtgtcgggcaccctggacgctgcctcagggtgctgtgcacacgtgtttggcactgtgactccagac

SEQ ID NO: 690126 - DNA, 102 bp, Homo sapiens
ctttggcgcggattctccctagctctcggtctccaccatagcctccacctacggctcctcccttaggccctgcctggagcttcctatcaccttcccggctct

SEQ ID NO: 690127 - DNA, 486 bp, Homo sapiens
  misc_feature (113)..(113): n is a, c, g, or t
  misc_feature (486)..(486): n is a, c, g, or t
cgcggtggctcacgcctgtaatcccagctctcagggaggctaagaggcgggaggatagcttgagcccaggagttcgagacctgcctgggcaatatagcgagaccccgttctcncaaaaaaaaaaaaaaaaaaaaaaaaaaaatgtgtgtgcggcgccgcgcccgcgggccccgggaaaaagcttctaagaaaccaatccggtgggggcgcgcgcgggggcccaagaagggaaggtgaaaccgggcgcccataacgcgggtgtcccataaggagaaacccggggccagaggaaaaaggcggggggaatctcccacaccaaaaaacaaaaccgccgcgggggcgaacccgagagggttctcggacaacaaatctccagaagagggaagtccggaggaggcccaaacagaggggggaactttaatcaaagcgggaggttccaaagggaagccccgaatatcaaattaaccccccggcccggggggaacn

SEQ ID NO: 690128 - DNA, 111 bp, Homo sapiens
  misc_feature (10)..(10): n is a, c, g, or t
  misc_feature (44)..(44): n is a, c, g, or t
gccagcctanaggaggaaaagcaaggcacagaaggatgttcttnaggaggaagcagcactaaaagcatctgagtcaagatgagtgggaaaccatctcaataaacacagggc

SEQ ID NO: 690129 - DNA, 472 bp, Homo sapiens
ccggtttttcgagtgaaggtagagaagtggcaggagcagtacagaaagtaatgaagatacacggaaagctatggcccgtgatagagaccaacgccagaggcttattaggtcagcagtaggagaggctcagaagggtagcctctcgggatagctgcacgcagacgatgagggctcgtttcagctgctcataggtgacgaacatcaccacgttccaggaacccaatcggagaaaggagggcatgaaccctttgtagaaggctcggggccccctccttctggtacgcatggtatagtgcgcacagtggccagcgctactgtactggcccaggtcagagttcatgtatctcgtcttgaccacgtctacaggggaggcgatgacagtggtgcagaagcctgccccaaaggcagaagtgaagtgacaagggaggtcatctgtcatgaggttggctttcaggagggcatccttgattag

SEQ ID NO: 690130 - DNA, 1044 bp, Homo sapiens
gccgctgggtgcctgagagaagcccctgcccagaggccgcagcgcccccgccggggcctgctggactcgcgacaacttcaccaaggcgccgtcgtgggaggcgagcgccccgcgccgcgcgcgaggacgcgggcactcaggcgggcgcgcaggcctgcgtctcagtggccgtgagccccatgtctccgcaggacggcgctgggggctcggccttcagcttccaggcggcgccgcgcgcgcccagcccgccctcgcgccgagatgcgggcctgcaggtgtcgctgggcgccgccgagacgcgctccgtggccactgggcccatgacacctcaagccgcgcgccgcccgccttccccgaagtgcgggtgcggcccggctcagcgctggcggcgctgtagcgcccccggagccggctgagcccgtgcgagacgtgagctgggacgagaagggcatgacgtgggaggtatacgggccgccatggaggtggaggtgctgggcatggcatccagaagcatctggagcgacagatcgaggagcacgggcgccaaggggcgcccggcacgcgccgcgcccgtgccggccccggaggttcgggctcggtgcgcacctggccccagatggcgccgcgaggcgtccgcccggcctgtacgcgcgctgtgcagagtgtgcgccggccgggtgctgtcgcgggcggaccacggcgagtgatctgcccatttgtacgccgagttcagacttctcaggctccttcttgatcacaggccctaggaagggtccctctggtgccacaggcctcgaagggggtgtgcagcactagggtggtgcgtccggtttttcaggccctccattccaatacagagaacccttttacaagttcctcgtggcaagaaggcagaaaccggtcagctggagccaattgtccctcacagcctagagtcactcccgcactggacacggggcgttagacctacatcacacccgtaaggggagtctaacagctaacgggtggccggggagacccacaggagatatctcggaacaggcg

SEQ ID NO: 690131 - DNA, 164 bp, Homo sapiens
  misc_feature (78)..(78): n is a, c, g, or t
gtaaaattcagctcatgacccctaactgggccctcttagcctcctaatgacctccggtctagcatgtgatttcacttncactccataacgtctcatactaggcctactaataacacactaactatataccaatgatggcgcgatgtaacaggaagaaacaaggg

SEQ ID NO: 690132 - DNA, 689 bp, Homo sapiens
gtattcatccttctggtccaaagtaaactggctacaatttctgattctaagggaaaacgcttcatgcaaccagatgaaactcagggctctggtggggagagccttactctgatactttccatcatgtcactgcccactgggctgatgtttaaaaccttccaaaaccatcacatggatggctagggacaggactgtgccgccttattacacaatgaactcagctcaccatgctaagaagactgcctctttccaggcaagattttactggagcaacataaccggagggtgtgattccaaaataccttcctttccaagccccgggtagtgaataaaggtctggaatttaggttatatgactaagggcgacagaggctgctaggcatctctgggcaccgtcccagtggcttagggttggaggctacactggcaaaacaatggcactgaataactagctcgtgtaaaccattcatctacagcaagtagaatcatcagttttgcactagagcaaggaagcacatgggtctcctatgagagctaatgccagaattcacatgcttagtaaaatataggatgaggttctttctatattctgcccctccagaggccaatgggtagggagttcctttgccttctgagtgcctgatgtcccagcctcacaagacctgtaaacacagcgttgccaactggtg

SEQ ID NO: 690133 - DNA, 924 bp, Homo sapiens
  misc_feature (464)..(464): n is a, c, g, or t
ttttgagatggagtcttgctctgtcacccaggctggaatgcagtggcacgatcctgtctcactgcagcctccgtctcccgggctcaagcaattctcccgcctgggcctcccgagtagctgggattaccggtgcccaccaccacacccagctaatttctgtattttcagtagagacggggcttcaccacgttggccaggctggcctcgaactcctgacctcaggtgatcctcccaccttggcctcccatagtgttggaattacaggcgtaagccgccgtgcccagcctggaaggttcttcttctatatatggaatgtgataatatctttggaaaggagactacagtaggttgtagacatactataaactctaagacaactactaaaataataaaaagttatggcagataagcaaacaaggagataaaactgaactgtggaaaaatagtcaatccaaaagaaggcngaaaagaaagacaaagaacagatggaaggaacagaaaacaagtagcaagatggtagcttttcacctggccacatcactaattacattaaatgtaatagtctaaacacccccaataaaaagatgtggattgtcagactagaataaaaagcaagatcactctataagctgcccagagaatctcactgtaagtaaaagacacacattagttattgaaagtaaaggaagaggaaaaaacacaccgtgctaacacagaaagaaagatcaagtggcaatattaatacaaaggtagactttagagcaaggaactggcaataaagaagatcctttcataatgataaaatcatgaccttggattaggcaaagatttcttagacacaacactaaaagcatgatgtataaagtaaaaattaatacattgggctttgccaaaattaagaacttcggccagtctaggtggcgc

SEQ ID NO: 690134 - DNA, 288 bp, Homo sapiens
tgaacctcattgtttttaaaattattcataagaggccaggtgcattggctcacacctgtagtcccaggactttgaggagcagaggcaggaggatcatttgagtccaggagttcaagattagactgagcaacacggggagacctcatctctacaaaaaatttaaaagaaaattaattgggcatcatggcacgagcctgtggtatccgctactcgggaggctgaggtgggaggatcacctgagcccaggaggttgagacttgcagtgagctgagttcacaaccactgcac

SEQ ID NO: 690135 - DNA, 944 bp, Homo sapiens
ggtactcaggtgcgtgcgcgcgagctatggatctgggcaccaagaatgtacgaaggcgaacaagatgccgtcgagtctcttcctacctgtccgaccgggcctccgcatgctgctccgtgttgtcacctgtcgcggagagaattcctctatcggaggaattctcgcctgcctatctagcgagaactatgactcacgcacccagtgattcagtgagtcaaagcctcccttttttgcaaagacttcaccactgaagcctctggcatagattctgctggacgaatctatattctaatacgagccgtggatggcagacccgattgtacaagcacgtgagtcaaatatttgtaccttcgtcccgcacgtcgatacaatccgtatccctcgtcctcttgggattgcttacttctccgtagccggagactagagttgtgagcatctgagaagaggcgagatagatcgctagcgattttgtctcctgaagatatttcagagcctgaagcgaggaaagttgccaagagggtatcagaagtcggtcttcactggagaatgactcgcgagaactcaacgtcgtggtgaccgcgcctccgaagcctcttcctttcaaaggaacaagtctaccgaaacgtcgcaacgcattccagggaatgaggttggtgttaaactacacgcccagaagggcctgtgaactacgttggcatggggtcctgtgaggacaagatgttttgaaaccgatgggtcactctatctgcaatacatgccatgcacctgggtggtatcttgcgcgggaaacggaaacagcacagtctactgatgaacttgtatcctggcaggaatttacaacttgtcactaaagagtggtaggacagttgaagagctttattgtaggaaagagtgggcgtgaaccactcttgaccaagaactcagaaggtctggtggtggggtcc

SEQ ID NO: 690136 - DNA, 251 bp, Homo sapiens
ggcaaaatctcgtgagtatctgcgcacgaataccttaatcatgatcacacactgtctcctgtgtagtaaaacataataagtagttcccatctcctgcattcagactactgaatactaagtatatagcatgtggatgtgtcctactagatatcactgtcactatttacattacctgtattgggaggaaattctatatagtagcaggttaaaacacatgattccggtcgaaaagtaaaaactgttaagatcta

SEQ ID NO: 690137 - DNA, 110 bp, Homo sapiens
ctgtatacatttttttcaagtacccaaaatatccatgtatgaacatagcatgttttatttacccacttcatcagctgatgaacatttgggtgtttccactttttgtctat

SEQ ID NO: 690138 - DNA, 112 bp, Homo sapiens
caccataccgactacaagcagatcattcacttgtctcttagctgtctagctttttcaactttcgagagtctttcatatatcatacactctggaattgtcacctgcaatgatg

SEQ ID NO: 690139 - DNA, 391 bp, Homo sapiens
ctcgaggccaagcaaacgccggccgacctggttgaggatcagccggatcaggggcttggtgcgcgcgatgtcggagggcggcacgacgagatagagcgtcgacggccgcgctccgcctacgatgtcggtgatgcgccagtcgcagcgccgcgtgactgcggcgacgactggatcgcgatagaggccgagaaaggacatggcggtcgagagcacgcctgagcgttcgttgtccgatttgttcagcagctcgcgggcagcggaggcgatgacgggatgcggtccggccgcgccaaggtgcgcggtcttcatcatggccgcgagcgtcgactcgatcgggcgtttcgggtcggacaggaaggcggcgacgccggcgagcgtcttgtcagcctcg

SEQ ID NO: 690140 - DNA, 156 bp, Homo sapiens
tgctcatagttactcttgagtatcctcaggtgagcagtggcctacgagagttgtacacgggggctctgaggcctgtacctagtgtctccagcaacgagggcgctcagtacagaccccaatatccaccttgactacgggataccgaagctcgaactt

SEQ ID NO: 690141 - DNA, 102 bp, Homo sapiens
acatctgtgtacttctgcgccacgagtttaccgagggggctgtggggaggccgtacacgcaatgagcagttcttcgggccagggacacggctcaccgtgcta

SEQ ID NO: 690142 - DNA, 271 bp, Homo sapiens
atgcaacccggatttctcggatcaagcatcactgaccctggatatcgcagcgttttgctcctcaatgaaatacagcttatcgcatttcttcacagggcgcgccccatgcttcttagcgcgcttgccaaactatgagctcatctagtcatcaatgaggtactctgagcagtccgatcaggtcattgtgataataccgtacatcactgctgtttcctcgctgaccgtccactccatctaccgggtcatagctgttcctgaatatagatagagg

SEQ ID NO: 690143 - DNA, 257 bp, Homo sapiens
agccgctaccgttgtcgaagaacaacggcattctaagagatgtatttaatgaaattgagcttatccatgtaacgaatgaagggaatgagacccctgaagaacatcaggtcacccgtaatttccgaacccatttaattaggggtgaaaaagcattgacctttgcaaaattaggagttagagcaattctttcccaaaaattatttggttgaagggtatttattagttaagggccgccttttaattaatttccccaagga

SEQ ID NO: 690144 - DNA, 171 bp, Homo sapiens
  misc_feature (52)..(52): n is a, c, g, or t
  misc_feature (67)..(67): n is a, c, g, or t
actaggccacggttggctactagtccactgtttgctactagtccacgtttgnctacgagtccacggnttgctactagtccacgcttggctactagtccacgtttggctactagtccacgtttggttactagtccacggtttggctgctcactgtaggtcagtccccgccca

SEQ ID NO: 690145 - DNA, 449 bp, Homo sapiens
  misc_feature (50)..(50): n is a, c, g, or t
  misc_feature (53)..(53): n is a, c, g, or t
  misc_feature (87)..(87): n is a, c, g, or t
  misc_feature (167)..(167): n is a, c, g, or t
  misc_feature (223)..(223): n is a, c, g, or t
  misc_feature (309)..(309): n is a, c, g, or t
  misc_feature (315)..(315): n is a, c, g, or t
  misc_feature (325)..(325): n is a, c, g, or t
  misc_feature (381)..(381): n is a, c, g, or t
  misc_feature (385)..(385): n is a, c, g, or t
  misc_feature (436)..(436): n is a, c, g, or t
taccgagcctggaaggtgcagcggcccgagcccagctgccggccgcgcanaantaccagccctccgacgctccccttcgagcgcganacccagtaccagaaggacttccgcgcctggccgctgccgcgccgcggggaccacccgtggatccccaagcccgtgcaganctctgcggcctcccaggcgtcggcgcccattactacggggcgcccaagacgccggnccgcagagccaagagcgactaggccagtgacagccgccgctgaaggcccgggaagacaggaagagcggcccccggcggagcgggtnggcctnggcggccggnaaagagcgtccggggcggacaaacgacaaaacaaccaaggaaagagcacagggccngccnggaatagtagacgtccgcgaccgtaggggccttggtgggcacggagacagnacgcccgcttgcc

SEQ ID NO: 690146 - DNA, 535 bp, Homo sapiens
gtgcctgcttttgttgatactttcttactgtaaagctctccataaatagtgaaaatgtttggtaaatttattgcaatttaaaattggtgagttcctttattaaattaattgctatgttattggagaatattcatcaaattggaattagaggatgtctacgcacaagtcagtgtggggggaaatggtttcatttggtcggacaaatgttgagtttgaacagttgtattctgctagctagttgactgaatccagcctctttctaaagctaactttctgtgtgtgtagagaccctgatgccacatcccatacatttcttttttcttttctttttttttttttggaaactggttgtgtggtttcgactgcaaagcagatcttatttttgattaatacatatgaacaatttaatcctatttcggaaaatcagtcatagtttttctggcatagataattttcctgttgattatttcattaatctggtaattttgagtatgatagcatttcatttcaaatataccccgtaatcgccttaaaa

SEQ ID NO: 690147 - DNA, 110 bp, Homo sapiens
ttgtttgctttaagaatgcagagctggcggggcatggtggctcatgcctgtaaccccagtactttggaaggctgaggcaggtagatcacttgaggtcgagaggtcgactg

SEQ ID NO: 690148 - DNA, 274 bp, Homo sapiens
taacgcgctgatagcctcccaaagtggtgggattacaggcatgagccaccgtgccgagccttccttgaagttttttgtttggttttgatttgttttgttttgttttgttttgttttgtttttggagatagggtctcactctgttacccatgctggagtgcagtggcacaatcttggctcagagcaacctctgcctcccaggctcaagcaatcctcccacttcagtctaagtagctgtgaggattgcttggcctgtgaggcagagtttgctctga

SEQ ID NO: 690149 - DNA, 108 bp, Homo sapiens
acacttcataaccatgtagcatataatgaatctaactcctacaccctccatttcatttccgctccttttacaacttctgcaggatcatcttcgtcatcatcgatcgat

SEQ ID NO: 690150 - DNA, 228 bp, Homo sapiens
gttactagcagatcatatctgaccaacagtttaaatatagaaaatgaaacctatactagtgaagaacagaattacactgtataacataagcagttcacctttcaagaaacaatcatacagtgggggagaaaaggccagttttccccaactgattatattccagtataggcaactgtttaacatgctatttcagtgtttatcataacacgagacagtgtttacaaaata

SEQ ID NO: 690151 - DNA, 141 bp, Homo sapiens
gagtggtgcgaagaacgtagtttacgccgatgaatatgatcagtgaaatggagtttatggcgtacgctttggttcatagtgcgttgtacgcctgtagcaataggggaaatcagatgcaatgaagcctcctatgatggcaaa

SEQ ID NO: 690152 - DNA, 926 bp, Homo sapiens
gtatggtgtaagtctccgacaagaaaaaaaaagaaacaaacactgtcttgtccatcagtaacactggcaatcttcctgtataaccactctccttagggatggtactctgaagacaagcaatggtccgccctcttgagattcgttcaaccttgctgattccataatgagcagaggtgtacgcgaaattgtgttactgactgatagccttcagcatacaacataccccatagtgacctgacctgtgtttacacagtcgtctatattgtaaactcattccattctgagtctttctggatgaacttggctatatctgaaatctgctatctgagtgaggactccaagaatgagcatagatctgggcctgattaagagtagagtgactattaacgaaacatagagctttctaggaggctactaagagtcaaacgtttcgataccaaccgatgttatggatatatcttgagtattccgaatcatgcaaaaacacgaagattgtccctgcctactacgaggacagactgatgtggaacttctgcacctggtcaacttaacttgtaacgcggacgatgctgtgaaaacactaccggtttgtctgatcattgctcgtgcagtttgagtactggatactcccttattccagttgcttgcaccacgccctggtcttggaacctataataagcaggtgtgaagcgaaatcctatatccagctgcctgcagtttaattcgaccgaaagagtgcgtccacttggaggattttcttttaccagaccagttcgcatcggaactctgtggcctgtctgatagtccacatggccaacgttacggcaaggcccaacgaaatacaggttaggtagactcggggaaaaaggcgttgactcacactgttcccataaatttggggccaggaccaaacgggggccaagaat

SEQ ID NO: 690153 - DNA, 609 bp, Homo sapiens
cagaagttggaccatagaccacccagaagccgcgcgtgtgcagtacgtaaatgaacatggacgtacctggttcctacgtgatccatgggcctgagtagtgctggatgctcaccactgaaaacaacgcccgcgggggaacgcggaggcgttctggaaacaaggatccaagatggaggttgcctgagggtccagtgtagggggatctatcaacgagggagtccgcatcgaacgcgatatcatctgaggcaccggcggcggtggcagtacaaccggagcccccgccccagcaacatactccaaattgaggccaacgagagtgaggaggtccggaagccggagatctttgcccagtggtggagatgacatggaggtcagcgccacagaactcatgacacacttctcaataaaaggtgtgacacgacacccctgatctgaagactgatggtgtggcatggacaacatgtcgcagcatggtggccgtgatggatagcgaaccaacaggcaagctgggcttgacggaaattcaagtactgtggaacaacatcaaaaggtggcaggcatatacaacagttcgacactgaccgatcagggacattgcagagagaaccc

SEQ ID NO: 690154 - DNA, 172 bp, Homo sapiens
tggagctagcgccccgtgctcactggctagacacctcaaagacataagcaatgcgcaacagggtctcctgtagtgtctctgattggtcgaccacctgcaggatggtgaagttctccagcacgctgtacatcatgtacttctcagggacgtgctagagcttgtggatcaagtc

SEQ ID NO: 690155 - DNA, 376 bp, Homo sapiens
cttcagaaaatggactaagacaacacactactatgaagtgcccctaagagattaaaaataagtgctgttactgcctagccaacttcaaacggtactttccttcacctaatgcttattagccatgtcaatagaccctcccttcttcaaaatcctattcctaaaaatctgaaatgattaattccttctagtccatgtaagtctagtctatttttaaatttttatttatctatttttggggcttttttgttgcttttgtttttgagacggagattccctctgtcacccaggctggagtgcagtggcgcgatctcggcttactgcaacctccacctcccaggttcaagcaattctcctgtctcagtctcccaagtagctg

SEQ ID NO: 690156 - DNA, 200 bp, Homo sapiens
tggaccagaaattgttatttaatataataaaatgtattagctgggagcggtggctcatgcctgtaatcccagcactttgggagtgccaattgtgggcagatcacgatggtcattgagatctggggtgatcctctatgagtctgaccttgcatgtgcatgcaatgcttgtgcacttggcctgctctgttttacgaactgtc

SEQ ID NO: 690157 - DNA, 283 bp, Homo sapiens
  misc_feature (55)..(56): n is a, c, g, or t
  misc_feature (110)..(110): n is a, c, g, or t
  misc_feature (169)..(169): n is a, c, g, or t
  misc_feature (213)..(213): n is a, c, g, or t
  misc_feature (215)..(215): n is a, c, g, or t
  misc_feature (218)..(220): n is a, c, g, or t
  misc_feature (222)..(222): n is a, c, g, or t
  misc_feature (224)..(226): n is a, c, g, or t
  misc_feature (271)..(271): n is a, c, g, or t
  misc_feature (280)..(280): n is a, c, g, or t
  misc_feature (282)..(282): n is a, c, g, or t
gtttttctgagtttctcgtaatgctcatttttacatgctgctactagctttcccnnttaaaaaaagtaaaagttgctgctttctaaaatattaattgccttatatttganagtgccattgcaatcgtaagtagactatgtatttcctataatgatgtctgatatttaantaggaaatcagacaaacaatattcagaaagtttaagcatataancnttnnntntnnnacttgcctaaatccctgtattccaaaacctgctgcatcataatanatatatctntnt

SEQ ID NO: 690158 - DNA, 891 bp, Homo sapiens
ccgtggggatggcaggttcggggaggctggtcctacggccctggattcgggagctgattctggggtcagagacaccctcgcagtccacgagccgggcagctgcttgaggtactacagtgacgccgaggtccgcggtcgcgggcccatcccacgcccctgatacgtccgacgtcggggtccacgctgcttgtgtctgacggtgacccgagcagtgtcctgatgcctggtgacgcgggaggccctggagcacctcggactgggaggatgaaggagttcggcttccgcgggacagatgggccgtgctgcgtgctgctgcaggactgtcggggttcatgtccaggtcgctgagggcggcgcgcccgcagacttctatctccaggtggaccgcttcagcctgctgccctcggcagcagccccggctacgtggtgcctggttgctaccaatgaccttagatgttcagcacagaagctctatgagctgccttgcaggagcaccgtttgcacgcagctccacctcgtcgcaatgccaggcctgatcactgtcccagccttcctggatgcaaatgcggcgagagaccaggagcgatcagggggcactcgttgtgcctggctgaaacgcctgctgcacactggagcgtgccctttgcacatgcacccacctgtcgacccacttgggcttgctcatcgcatgcaggcctcgggcagacgctgtgtacgctgtcccccagctcaatgctgtggatctctgagcatgaccagctaagtcctgcgccttcctgggcccttgccgagggacccagggccctgagctgtcccctgcatgacccggctctcgcggagccgatctctgaccgctcgttgcctctctccttcttacctcagtctcggacc

SEQ ID NO: 690159 - DNA, 783 bp, Homo sapiens
  misc_feature (745)..(746): n is a, c, g, or t
ggggggcactgtcttgactggcggggtgggggggaccagtgcccttgtgggattggcctgacccaatactcataacgagaggctaagaattgtcggcacaaagattctagatgttcttgaggaaatccctaaaaatgctatggtatcacaaagtatacagaacatattacatttgacaagctggctaggggtataacgtaaccagatgttaaaaatttaaaagaccagcttgaaagcggtcaatcataacaggagatacttcattttgaacataaactaattctgccaggaaaattgagggaatggaaactcttgtagacattttttgaaaagccttctgccgatcaaaggaaaagggcaatctgattattaagtgactttggcaaaattcatgggaaactgatggaataaacaattcgtttattaacaaaagcgtgttcttattactgacttcttgataaaccaaaaaagtggccttgaaaaatatgttggggatctggtcaaaattggatgaaaactggtcacacttgtcataatacaatcaattttccgcgtgaataaaggtgctcaaacaccagtcttttgtaaaggatggccctttttctgtagaacaagaaaagcctatttaaaataatttctgaaaatattagaaacaaaaaaattcctctcaatttttttcaatgcaaaaaagcctctctcaaaaaagaaaactgtcctttaatatgcacaatagaaagtaaagganngcacagcccccggggaggggggggcccttccttttct

SEQ ID NO: 690160 - DNA, 236 bp, Homo sapiens
gctttattctggcaagtatttttaactatcctaaccacccaattttgttctttaatctttgcattaattctatgacataacacctgtttccccattaattttttttaagtgaggcaacaaaatcatgaagaggatgtatcactctactgtgtcacaagaatgaaacatggtgtgggatactttataaacgatctaagtgccacagactatcccctttttgggtctcctgtcgacgc

SEQ ID NO: 690161 - DNA, 904 bp, Homo sapiens
  misc_feature (748)..(748): n is a, c, g, or t
ctacaaaaaagaatacaccacatcccacagtccaggcaaagaatcacacgttcatattataaaagtttcaaactagatccctgcttgatctttcccctctacagtaaagcaaataactgtggcggggtgggggggcatgttttgtttgtttgttttgatgagagctgtggggagcatccttttgagagcagcaggaagcctcccccaaagtctcatatacagctaagggtatgtcacctcccttctctttcataaagttactgtcactcttcgacagacattcccaaatattggttttatgagtcctaacggctcctaggcagcctataactgtttcccattggttagctcagttcagacccagatggtggcccacttcttcctgttgtcagccagtggcctggggaagaccaaagagcccttaacacggagccttcacaaatggaaatagctgcatttcagtggcagttctatcttgtaatgttgcctatagctggaatcctctgtcattgtttctatgaaagtaagttgagagtatgaaaatatatattccaaaaccacagtattatatgacagatgttcttctgttatacaaagttatggactattttatagtcagagatgtctgtctttgcagggaaaacaacaataagccctctgtaggggagagatataaaagcatgtactggactgagcagtaatgtcttaaggaggagccctacagtgaatcaactgcccccaaatgctnatgacaacaggcaggttgtgggtcagggtgtagtcctgcagaaactgcctaatacttatttcttgcatacaggactgatgggcggcgctggtcttaggccttctttgccctattcaggatatggataacacgttcgcggagataacacgttcgcga

SEQ ID NO: 690162 - DNA, 139 bp, Homo sapiens
  misc_feature (47)..(47): n is a, c, g, or t
gcacacgcctgaactgtgaggttctcagaatgagttatctggaaggncgatccaagtacatgaagatgtgattttctggtgtccagagtaacctcttcactttgggtctctggcaggcccctattccctttatggattc

SEQ ID NO: 690163 - DNA, 651 bp, Homo sapiens
  misc_feature (144)..(144): n is a, c, g, or t
  misc_feature (536)..(536): n is a, c, g, or t
attccaaaagttgctgaacttattgccaaagaagatgtagacttcctgccctacatgagctgcgcagggggaatccccaaggaagccgtcaggaaccagtctctgttagcatcctctgagtggccagaattacgttgatccaangcgacgaacatatggaaaattccattttccataaaaggaaaagagtggaattagtctcagccagaatgttggctgaacgattttgcacagacggatgccgttaggtgtactaccagctttcacatccaaatttggcaagcgtggacgtagtggtacaacaccctataggtatttcagagtcggacagagtctatgtaaaatcaaacacgcacatctgaatccactatttaacgaacagtcaagtccatgcggaaaaacatctatcttctagacttttttctccatatttttggcatccggagccagttagggttccctaatcttaaccccagaactgcccggctgctcaacagatccttgcttcccttgtcttttggcctcgatatcggtcnagggagcatagtttacggttcaagctgcgtcatcccgaagaaaagttttgaatgcatctccaattcaagccaaaggcccttgttgccttgggcacctttggttggcttgaactgg

SEQ ID NO: 690164 - DNA, 836 bp, Homo sapiens
agaatttaatggactgtgaatttcaaaaaaaaaaaaaaagatcggtcaaatgaacttttacagaatgcatttaaaaaaaaaaaaaaactctcctgtgtgtgttgggctcagaaacaacttgtgctactttactcattttgggtattaacagagggaaataagtacttttatctcattttatggggtaaatttttggaaaacttatggcttaaaagttgcattacaaaggggaggatggggggagagaccatatttaaggcaagagatatggggaagaaggtgtacatgtctatatttttttttccacaaattttatctaaattgggcgcctgagtggtaattatgtgtaacctcttaggcgtggtaatctatatttcgggagaatatattaccgtgtgggtttccccaaaaaccccagtgtttatatatccccggggggggatctcaatatatcaaaataacgggttcgtgagaaatatataaagtctgtggggggcacttctttaaaaacaacacggtgggggatatctccatctgtaacaccatctatttgtgttgtttcagtgcagaaaaataacattttacacacacctttgggagattccccctagtgagaaaaatattccacacctatgagggaaaagacaactctaacaacactctttaaaacagaagaaggggacaatcctacccaaaagctatgtctgtgggccaaacagccgcccacactattatcaccaaaagtggggggggtagaccccaaaagaaacatttttagaaaggggtgtgaaaaagtttgaggaaacgcacacaaccacctagatattttaaggaga

SEQ ID NO: 690165 - DNA, 439 bp, Homo sapiens
ccagaagataactagttaatcacactagtttcagaatatgaaatgtagaggaattttttcttttcctttttcatttcattctctgtttaccaaacaaaacatgactgactgtttcatcactctccagcacctgttgtttcctgggacatggatgaagctggaaaccatcattctcagcaaactattgcaaggacagaaaaacaaacaccgcatgttctcactcataggtgggaattgaacaatgagaacacttggacacaggaaggggaacatcacacaccggggcctgttgtggggtgaggggatgggggagggatagcattaggagatatagctaatgtaaatgacgagttaatgggtgcagcacaccaacatggcacatgtatacatatgtaataaacctgcacattgtgcacatgtaccctagaacttaaagtat

SEQ ID NO: 690166 - DNA, 130 bp, Homo sapiens
tgctgggattacaggtgagagccaccacgcctggccgattttttgttgttgttgtctatgctggggtctctctccatcacccaggctgaagtggaggggcagagtcagtctccctgtgtgctccagtcca

SEQ ID NO: 690167 - DNA, 134 bp, Homo sapiens
gcaatcaaattagaactcaagattaagaaactcactcaaaaccacacaactacatggatattgaacaacgtgctcctgagtgacttctgggggatttagcggggtgatgcctgttgggggccagtgctaaacac

SEQ ID NO: 690168 - DNA, 637 bp, Homo sapiens
gtcagaaaagaggtgccagggccgggctgggacagtgaagagtgctgggcagtctgtggtcctctgtatctcaactttttcatcttaaaaaaacaaatagggttgtgtgtgtggctggtggtcataaggtcctttctggctctaataaccatgagcttctgttatgaagctgggacccttagagcctcaggatgatcctctgttgttgtgaagccccaatcaggtgctaggcaccatagtggcacttagctgaagctcctctgtaactccgtgtgggcccgttgccttgcacctacgccccgacagctgctgcagtgctccggtgagcagcacatggcctgatggagcttctggagaagatgctggcctcagcttggcaaatggcagattctcccaggacgtgcactcctcgtggatctgcactgggctgctctagctggcatccttctctgcccaggagcgcaagggcagttcggaggttcaccaagacagtctctgtggaaatggaccaagtatagaaggctctcagctttcctgcgaaataggctgcactactctcaggtgccatcttatgcttccgtgcggacagcgcctgcgacaaagctttgtcctctgccctggtagccctggtgccctc

SEQ ID NO: 690169 - DNA, 121 bp, Homo sapiens
tgcgagaatcgcacggaggcggtgaccccgctcatggtgcccgacaccagatggttgagttccccagtgggggtgacagtcagcttgagggtgctgacacagcacttagcctacgccttct

SEQ ID NO: 690170 - DNA, 169 bp, Homo sapiens
cagcaggcagaaagaagcctctgtgggttgaacagtaaccagcagctccttgccctggcagcccggcatcgcactctccatgtccaggagctcatccacgcaatctccattctgggtctcctcttcctggcagcgagaggcgcggagctgctccaggaccactcctcta

SEQ ID NO: 690171 - DNA, 411 bp, Homo sapiens
  misc_feature (310)..(311): n is a, c, g, or t
ccctaagtccactggtgggggtgctgtcaaattcctgggtttagctcgttcctctggatggcgatctctgaagctgatcgtctagaatctttctgcggccatcacatcttgcttctgggcttagctccagaggatccctgagtatgggtgccactcttagctcagacagaagtcatgttcttagcgttcaggcaagtcagcctttgcataagacaccctgtcgtcgggcaggaatttgccgttacaaatcccaaacccatgacagtaggaatgtcaccccatgcttcacatatgcattatgctctgaacnnagggcaactatgaccatgcttccttaatctttattgagcaaatatatggccaaggttattccctagacactgtcatcctagtgccgagaagaacctgcta

SEQ ID NO: 690172 - DNA, 164 bp, Homo sapiens
ggggggggccccccccgcccccccccccgtttcctttttgtttttggtttggggctccggccccggccctttgtccggggccgttttttaatatttttttagcggggggcctttttaccctgggggccttttccaaggggccccttaaagaaaggggggcccca

SEQ ID NO: 690173 - DNA, 237 bp, Homo sapiens
  misc_feature (11)..(11): n is a, c, g, or t
  misc_feature (13)..(13): n is a, c, g, or t
  misc_feature (221)..(221): n is a, c, g, or t
  misc_feature (233)..(233): n is a, c, g, or t
ggcgcttacantnatttaaatcttgaatttaatagagtctagtgaaaaaaatgagtgggaagaatgaatataaaagtaataatataaggaaaaagggaaagtaaactatttagaatgtagttttgttatattcccagcatttcaatatttattagttacttgtaaattactgtggctgtgtagtttataaatgtctgtgcactatattaattagaagaccntagaacatgccnacac

SEQ ID NO: 690174 - DNA, 933 bp, Homo sapiens
  misc_feature (790)..(790): n is a, c, g, or t
ggaagcgtggcggctgcagactgtgggtaccgggtccgagaggactcagcgcttttctcgtccgtgccatggcgcctgcgaaagccacgaagcgtggtgcggatagctagtaggtctacgacgagctgatgatggcatattcgggagctcggagtacgggggagggtcgccaggtcgaagtcggtgtactgcccacttggacgacgatagtggacgcggagatcacgcgcatgattggatggagaggtcgaagtgacattatatatggggaggaattgagaagtgaattgagcatagttttagggccatgatggtaggtagaaactggtggccaagaatatggagggtaatgtcattacaggccaatacaggaggtcatgcaattatgctttgattaccaactggggattcgctagagaggagagagctggacacgttttcggctatgaccgaaactattatccatctattcaaagccatattctaaaaggtttaagccttctactctttattgcatgggggcatttacctcctccgcaaggctgagtatccaggactggtgttcatggtaagcattgtgtcaggggtggattagaaggccacaaatcattcgcaagaattgggggttggataggtgaggcattattggtggggatatagttgcagtgcaaagagacagggcaacaacccttggttttagaaagtttaactgagaggactgcaaaagaagaaggctgagtttggaaagggaaacagggagtggggttccagaaggggaatcctatggagngccatttaattcctgattggtaaaagcgggaggaatttcgaccaaggaattttcgcattacaaaatagcaaaaaggcatgaaaactttgagcaggggtgggatggaaatttcctcattaatggccggaaaaatgggttacctg

SEQ ID NO: 690175 - DNA, 129 bp, Homo sapiens
tacgtctcgcgctccccagtctgctccagctcgtgtagtgtggacatactggctatagccgtgtgcatggcctacttttcccttttaatgtagataatgtctccacctcttttcatttccacatggtct

SEQ ID NO: 690176 - DNA, 213 bp, Homo sapiens
  misc_feature (4)..(4): n is a, c, g, or t
  misc_feature (11)..(11): n is a, c, g, or t
  misc_feature (15)..(15): n is a, c, g, or t
  misc_feature (145)..(145): n is a, c, g, or t
  misc_feature (203)..(203): n is a, c, g, or t
  misc_feature (210)..(210): n is a, c, g, or t
ccgntgggcgnggangaggagcgccgggctggttttaatttcctcatgttttgcctgcactcacgccccctcctggcgtccccgcatcacctcgctccgccgccgccgtcgccctcagcccgcggcgccgcgtcatggaggcgantgactcaggcctttcagcggcggctggagctgaggctctggctggggaggagcgcaanatgagcntgg

SEQ ID NO: 690177 - DNA, 716 bp, Homo sapiens
ggacggagaacgtgaccttgaagaagccagaaattttccaaaatctcaagaggagagtgttcgagctccgtgatctgaaaggaatgctagaagtgttagagagctgacagatgtccagacgctaactggatgaagtttggctctgtgttcccccaggcctgatgtgcaggtggcacgatctcggttcagtgcaacctcctagctctcagattcaagcagttctcctgcttcagcctcccaagtagctgggattcaaaggtgccaccacacccctggctaaattggtattgcagtagagacggggttaccccatgtggttaggctcgtctacgaacctctgacctcaggtggatccacccgcttgggctcccaaagtgctggattacaggctgtgagcaaggggggccccaagccgggtgcttattttcttacaactacttttgggttctaaaaaacttcacatttacttaggtgctacgtgtcgactgcatagtagggtgacctagacgttacaaataccctatattgacttatattgtgggaaatagctagaaagagaggactggaagttctcaaaacagaggaattgacccataattggacggtggatggatatggtattaccgtggtcggttataacgcgagggatactgtgtcaaaactcaaactgtacacataatttgcctactatttggcaataaggcaaataaacaaac

SEQ ID NO: 690178 - DNA, 436 bp, Homo sapiens
agacaaatggccagaaatatcgctgaattctttcgctcagtatatgggaatcatccctgcaggaaagagaatgcgacccctgaggtggggtctatagatggccgccttaggtgtggacatcttctatggtcgagactgtagggatgaaataaaccccagtctcccatagtgctcccaggcttattaggaagaggaaattcccgcctaataaattttggtctatatcggttgctctcaaaaccctgtctcctgataagatgttatcaatgacaatggtgcctgaaacctcattagcaattttaatttctccccggtcctgtggtcctgtgatctcaccctgcctccacttgccttgtgaatattctattaccttgtgaagtaggcgatctatgtgacccacaccctattcatacactccctacccttatgaataact

SEQ ID NO: 690179 - DNA, 212 bp, Homo sapiens
gggctgcaggacctcccaggagaaggtaacaccaaacgctggcgatagcaacagtccgtcctagaggcattttaggtttagtctataagagagtgagcgagactacggatttcaccattggtgctttcagctaagaggctgggagcgtggggtgaattgaagaaggcagttcgggcctggggcagggagaggaaaccccaaactattgttaa

SEQ ID NO: 690180 - DNA, 699 bp, Homo sapiens
cagagaactaggctcgagagtttattgcttacaccatatgtcctgccttaaattccgttaaaggctgttcatagctcttcagacaattggtactctactctgcgtaaatattgattccttctgacacgggagccagggtatagcctacgagacatatcacgactggaaggtgacgcgtgtctcctgctcgacctaagccagtatgctttacgctccagctatacggcttgcaagccccttgcgggctcagggaactgctcgcccagtgtgcactgtgagtgtgatagcccacccgtgcatgagggaaggtgaccgcccaggtgtcccacataccactgaatctggcttacaaggcggatggaagcacgtactcaccgcctcaggggctgcggcctatgcagctgcctatatgcatctgtgtaaacaccctgaccaacacaagtgacagcactagctgaatgcatggtaccgcacactcccattgtagcacgttgcctattactatgctacggttcacacgagaagactacatgtcactatgctaagctccatacgggctcctgcttatatcctgcgcaccctgacctgtaatggtgagtgatatggccttcctaaccacactgatctccacttgggctatcatttcccggtgacgtgactcggccgatgctcctgcgctagcgcatgcttcatgtcggc

SEQ ID NO: 690181 - DNA, 151 bp, Homo sapiens
ggaaaaaattgtattgaaaacccttagtatgccgttgataaaaggaatttgggataattatggtgggggattattttttatacggtatgggccaaagctttactgctgtggaaagccaactgttttaataaaagatttcccttccccccca

SEQ ID NO: 690182 - DNA, 1094 bp, Homo sapiens
gacgggtgctccctcccctcgctgctcaccttggttcccaagagccgggcggccgcaagacggggtctggccatgttgcccaggctggtctcgaactcctgtgctcaagtgatctgcctgccttggcctccaagagtgctgggattacagctccgactcagattttgaacggatgtttggcatgttataccacagtgctacattaaaaaccagtcatgtggatgtggcacgaccacaacaaacaaacaagaacacacacaaaaacacactgttgtggggcggcaagaggacccacaaagagaacgtgttcacagaaaacacaatggtagagggacgcctggggcgccactgatggggtcaaagtgacaccagtggcgacaacaaggtggcacacaaagaagaagacacgcgggcacaggtgcaaactgagctggtggaattatctacacccaagattaaaaaaagccgcaccgggatgaacacgacgcaagccgtttacgacaaacccaatatccacgagagcggcgctaacacggagggggacaaaaacgggagacagtcataacaaggagcggactccccagcggcgacgccacgcatcaacaatcaacagccccgcggtccggggtgaaacatcagacagcacagcgagcagagacaggcagactgaagtcagagagcagacgaacgaaagcaaagaggacgcagaaagccggacagaacagacaaacggagacacgcaagcaagacacaagaagtcaaggaacgaagcgcgcgaagccaagcacgagaggagcaacacacagacatcagaaggccagcacagacggagagagcgacaaaccaaaacgacacaaagacacgagggacgaacagacacacgcagagcagacgacacgaggaggacgagacaaagcgacaagaggaagaagcacgagcacagaaagcaactacacccaaccgacggaagagaaagcacgagagcgcagcgaagaaaaagaagacgcagacagacaaccagcgagaagaaggaaaggacagaaacaacgagacatagcgcagctcaacgaacaagagggcagaagacacagaag

SEQ ID NO: 690183 - DNA, 627 bp, Homo sapiens
cgaggaaacagtattatcgaggagacagtatacacggagcatactgtatcaccgtagacagcggaatcacactagagtgtttccatcgagtgctcatagcatgtgtgtgaacaacacatagtggagcaagtctgaatcaaactattctttcattccagttagtgccaatattgacatgtacaaaaaacttagcttagtattcagtctactattgagatatctcagcctgataggatatgatatgatggctggttagatagtaagttcaatttctaagttcacaaatataattgaaatgttgtgcaaaaaaactcttaaaatcaactagtttcaagatcaacagcctgggacagacagaatctaaatcaaaaagccatttttacttgtgaaaataaactaaaattaatgtaaccaatttgaaaagtttcttttaaacaatctagacaagagtctagcctgtctttggtgcagaacgttagtacgtggcaaaatgaaattcccaccccagaatgtcagctctgagggggcagcgattttgtgcctgtatggtccatcactgtatttccagtgcctaaaagagtacttggtacctggtaggtactcagtacatattgaatgttaaattca

SEQ ID NO: 690184 - DNA, 211 bp, Homo sapiens
cgaggatccctactaaatgctgtcaatagaaaagaatggatgagcttcggtcatcagctacatgagtcaggcacggtggcagctttccattttagtcagtttgccagtatgtaaccagacagtacatcaattaaggagctttaatctcttaaggacattttttccttagggaaaatgaaccaaaaaattaaaaccattttattacccaggt

SEQ ID NO: 690185 - DNA, 408 bp, Homo sapiens
ccaggctagaagattaccatgtccattcgtgacagtcccttttgtacggacgagtaccatgcataaggatagcactggacatgttgcttgtatctttttaaatggaaaaagaacatccatagtgtaagatagctctgcagccagaaatggtcttctcacggaacatatacatctgtgaaatcaatggacagaatgtcattggattgaaggactctcaaattgcagacatactgttaacatctgggactgtagttactattacaatcatgtcctgcttttatctttgtatacatattattaagcggatggcaccaagcattatgatatagcctatatggaccataccattcctgaggtttaaaattcactgtcagccatggaaatgtagctgtacgtctccatgacttc

SEQ ID NO: 690186 - DNA, 730 bp, Homo sapiens
  misc_feature (140)..(140): n is a, c, g, or t
  misc_feature (235)..(235): n is a, c, g, or t
  misc_feature (276)..(276): n is a, c, g, or t
gagatgagagtagccatacagggaggagaatgagatcctgcccccagaccatctgaacggggtgaagctggagatggacggtgcacctcaagtcgcggcttccaccaggaggtcgttccctaggcgagaggaccatgggntggcgttatgagtgaggatcgcggagcgcagcggcgagagcacagaggaagcatgcagtggtcagtcgtattgtccagaggtggagtgtgaacanctgaccgtgaacgatcagctgccaagggacgatgcaggcgncctggatcatggacgaacgacggcgcggagccacttccacgagaggccagtggagggacgagacaagacacagcttccgctgccgctggacccgtgacggggacaggtcacggtgtcgttggcgacagagcatactaaggctgaagctctcttggggcgacgtacacaggccagtagctggagaaggcacgggttgccgacgacctgtcaggcttcaacgaaggaactcaccgtgtggtacgaggaacatgacatggaacgatcgctggcagaaacctgaagggaccgcgtggatagcgcacgcgcggaccatgcccacccgtgtcgagtagcctggttggcttcgtacgtgaggtgaggagaggtatcctggtcggtagcgcgtccaaacctccgacgacacgagccgggcgtggaacttgctcaggggttcaatggggtgaaaggagcattg

SEQ ID NO: 690187 - DNA, 176 bp, Homo sapiens
  misc_feature (4)..(4): n is a, c, g, or t
gtantgtgcaagttgggtatgcgagcagctcaccgcatttccagatgggtcagagacttccgtagggccctggtatcctttgtggccacaaacaccacaggattgggtggcatcagctgttgtttatgtttcttgactgcttgtgcttgcatggcttgtgatgctatgcaacctgc

SEQ ID NO: 690188 - DNA, 474 bp, Homo sapiens
  misc_feature (275)..(275): n is a, c, g, or t
  misc_feature (277)..(277): n is a, c, g, or t
  misc_feature (279)..(279): n is a, c, g, or t
  misc_feature (329)..(329): n is a, c, g, or t
  misc_feature (363)..(363): n is a, c, g, or t
  misc_feature (398)..(398): n is a, c, g, or t
ccaggctagaagattaccatgtccattcgtgacagtcccttttgtacggacgagtaccatgcataaggatagcactggacatgttgcttgtatctttttaaatggaaaaagaacatccatagtgtaagatagctctgcagccagaaatggtcttctcacggaacatatacatctgtgaaatcaatggacagaatgtcattggattgaaggactctcaaattgcagacatactgttaacatctgggactgtagttaacctcgtgccgaattcggcngnanagcacaaaggaagtgaaataatggactttggagactcagaagggggatgntgtgtggggcaagggataaaaaactacatattgngtacagtgaacactactcgggtaaacaggtaaacnaaaatctcagacttcaccattaatacaattcatctatgtaatcaaaaactacttgtatcccaaaagctattgaaat

SEQ ID NO: 690189 - DNA, 201 bp, Homo sapiens
  misc_feature (108)..(108): n is a, c, g, or t
aagatggcggctctgactcctggagagcggtcgctccggatgcctctgggtccttatcttatcatcctcttcttattttccctattcgcctctcttttcttctctccncctcctttaccccttcctctttcctctccttctccttcctcctttttttccttttcctccctttcatttttccattctctccccttcccctcc

SEQ ID NO: 690190 - DNA, 417 bp, Homo sapiens
agaggatcccccgtccgtcgaccgctggatttgactcagataggacccccttatggtgtctccatcttccctatttattttgggcccttgtgggctacattgtagatcaaagccaaggcccccaggaaggtgacatactcctggaagttcacctcctggtccttgttccggtccaagtcttccatcagccttgcaatttcagcatcctgcagcttcgagccaatggtgagctccttctggatcagctccttcagctccttcttgctcagggtgtgcttgtcaccctccctgccggagtacttgtggaagatggccacgaggaggccaatggcctgatccagggggcatgccatggctgagggctgggcttggagcggtagggaggcggccaaatgcgacgcgagcggtcgacggacg

SEQ ID NO: 690191 - DNA, 1080 bp, Homo sapiens
tcatgtaactataactggtattaagtgtagctgagtgcctggtgtggctggctgtgctgatgtggggtgttctgggctgtgctgtgctgtgctgggccctggcggctgggcctgattgagcctgggctgcaatggagctggaagagccctgagctgggaagaatgttcctgcagcaatgcctgcatgcctgtgctgctgcataccctgtgtgctgtgctccagtgtgaccatgacgcaccgttctgaccttcctgcactgtggcaacgactgcttgactgacgcaacgatgaacacacgatgccgccagcgctgtgcgctacgactcctaccaaccatcggtcaatggcgcaacgccctgacctgaacacgtgcgctgccctgtgctgccatgactggctgtccagtcttcaaagcatgcctggctgaccaacgattaccaaccaccccagcaacaaggtcaagagcgacccgcacgaaggcgcgtggaccagccgcgccagctcttctgcggagacacgaagctgagcggcctgaacgccttcgacattgctgaggagctggtcaagaccatggacctccccaagggcctgcacgcgggcgctgggacctggcctgcacggatgagacgctgctgtcggccatcgccagacgccctgcaacactagcaccatgcccatcacgggacagctctcggccgccgtggagaagaaccccggcgtatggctcaacaccacgcagccctgtgcaaagccttcatggttgaaccgacgaggacctcaggaagcacggaaagagcctggtgcagcaggtgcggaacccgctgagcgaggcgcctgatggccgacaatgctggcccacgctcgacgagctggccctgaagcgcgaagagcagtggccaggcctgcgatgaggacgagaaccacgaaccccaggcaccgaccagcaacacacagccccaccccgcaccaggcacgcagaaacacaccgagacaacaccccccaggcacccccgcgcaccccagagaccgcaaacacagccccccccacccaagacacacaacgagcgaaaacccacaca

SEQ ID NO: 690192 - DNA, 180 bp, Homo sapiens
tagtgattacagtcttagacttacctcgcacttacctcggagcttacctcggaccttacctcggagccttacctcggagccttacctgcacgtgttatcttctaagagggctcatgtacccatgccacagtcacgcccagaaacactcgctgattgctgactagggtaatgggctccgcc

SEQ ID NO: 690193 - DNA, 369 bp, Homo sapiens
tgtaagccactgccatgtaaaactctcctaccgcttgcaaaaggaaaactacattcggaaggggaagatgcccaagaagaaaatcgagacggtaagtgcagcacttttctaaagtaaacacacaaaatgattgccctgacgaaggtggatgcaaaactatgggaccggtgcgcacaacccacatcgcacaccccgccagctccgtgtgacgcccccagccccgttagcagaacggactaggcaccccaacctttctcggagggaaaatgcacgagtcagggccgcgatcccctccgccctggcacacagaatgtctccgggaatcgcccacacgagcccgggtccgccgtatccttccggcggcggccg

SEQ ID NO: 690194 - DNA, 243 bp, Homo sapiens
gactatgatgcttatgaatttgatgtgcccgggtttaggctttagggaatgcagtgggctctttatataatagagtcattttacgattcatttatctatactgttacattttgcctttccacgtctcttcttaggcacaccttgaaagtccaagtaaccttagattgaagggtatgctacctattgaaaccactcttcaacaggaagcagggaaatgtgaagtgacttcagtaacagaagaat

SEQ ID NO: 690195 - DNA, 634 bp, Homo sapiens
gatgctcggagacaacagcacgcatatcacaggacaacgaataaaaactcccacctcttacgttatacaaaaatcaactcacaattgaccaaacacctaaatgtcatagccgaaatgtaaaactgctagaaagcacaacacagggtaaacacttcaggatatagggtctgcgaaaatatttgcacagcataagaccttaaaaacacaggcacacaaaatcaaagatgaacaagtaggatttaatcataaatggacaaagtttctgcacagcaaaggagaccatcagcagagtggaccagacagcctacagaatgttaagaaagttcaaacaaatccaatgatatttatccctaggacgcaacgggaccgggttaaacatagggaaaccaataaatgtgatgcaccacattaaagactgatttacaaaatatattgtctcaaaaggattccaaaaacgctgttgagaccattcatcactcttttatgataaaaaaagaaaaactgttaatgcagaaggaaattaacataataaaggctatctatgacaagccccacaattaatattatcctcagtacttagaaaggcaaatcttagcccggcccagtggttcacgcttgtaatctcaatgctttt

SEQ ID NO: 690196 - DNA, 275 bp, Homo sapiens
gaaacctcatctctacagaaataaaataaatactagttagtgtggtggagtgttcctgtattcctagctactcaggagcctgaggcaggaggatcacttgagcccaggagttcaaagatgcggtgagctggagtgctgtggcgtgatctcggctagtgaacccccgcctcccaggttcaagcagttctgcctcagcctcccgcgtagctgggattacaggtgcctgccaccacacccggctgatttttgtatttttagtagagatggggtttcac

SEQ ID NO: 690197 - DNA, 187 bp, Homo sapiens
  misc_feature (16)..(16): n is a, c, g, or t
ctaggaaagctcatgntaacctattctctagacatcgcgattagagttgtgagggagtgtgtagattgatgagatgatgatccaacccgaggttgctgttcaagatgacagtatcaggagtccgcacttcagattactagatgaggagggactgctctttaattatcaggtgatgtttgcggggatg

SEQ ID NO: 690198 - DNA, 1050 bp, Homo sapiens
ggacgtactattgtctgactacaatattcaaacggagtctcctcttcatcttgtgtatgagacttcgtggtggtgctaacgaaaacggacacgaagaagtcttaaccacctcccaagaccgaatacacgcacacacgacgaccacgacaggttacagctggcctgtacctgaccactacttactacaccggtggactgacgaaactggccaaacttacgatcgcgcttcgatcgagacgtgcccctatcatgcactgacatggtgcgtgcatgggtgctgatattaatgggcacagctcacctttcgacccagaacacttactctgttgggcaccagtgatatggtccatgaccttataacgtggtgtcttcagccaacaaccccagcaacgcacaaacggtcacttgggtaattgacgcttcaacttacaccaaagtacccacatggcaagacgcacaaagcacacacagcccgaacaccacccaaacccaagaccaaacgaaaacacaaagcaaaacacccaaacccggcgcgcaccaagcaccgaccacgaccgacccaccgccgcgcgacacagcgcaaacacgacagacccacagaccgagcgcactcacacgaatccagccagacacacgggccggggggccgcgccgcgctggcactagctaaccgagatggaagacgcgcagtagcccgcacagaaggcacaagcaggacagcgtacagcccgacggcgcaagataccagcccaggggcaccgccgtcgggaaagcaagcgggagaaacggcacgcccgccgagaccgcccacacgcggcccccaacccccaccactcaactgcgagtcagccgccgccactccacacccacctcgctccactcctctatttaccctccctgaccccgggcgaccggcacactcgaccggacaaccccctagcgcctcgagagccgagccctagcgcccagcgagtagagcaagaggaacaagcccacccaacgcacccgcaaatggccgagccgggagccgcgaccacctccgcaccacca

SEQ ID NO: 690199 - DNA, 708 bp, Homo sapiens
aaatgtactagtaatttacaccgttaagctttagagaccgaattccattccaccagtttatcgacattagccatctgtaatttaaagaacaaaacaaacaaatcaaaagactgtcttggtagaggtcgtaatgagactcaacatgtactgccgttttcgcagtctatttatgacagtgtctttaagcagcaaatgagatagagtctaaaaaatgtcctgtcacttccattataagaagatctggattcatatctaagtgtatatgataatactgtaggcagttaagagtgcagaacaagtggtactgttgtctctaaatttaactcactttggtgtcttctgtgtactctagttcgaaacacacagtactagttttgagcatgatcgttgatttcttgatgaaatgctaatcttcagcccgtaccaaaaagtagagtggagcctctttgcactactactatcaataatagttgtgaaatcacgtctggatgtcttgtaacgcatttttttaataggctgacattagaagtaaaatctaaaaaagagttgtaacagaactggggcaagatactgagatatattactggtataatcacaatattttagtacgtacaccgtttatggactaagaaataattattgctaggaatgttgtcctgccatcagaagaaattatttgttcttgccaggttaggggattttgaagat

SEQ ID NO: 690200 - DNA, 865 bp, Homo sapiens
  misc_feature (54)..(55): n is a, c, g, or t
  misc_feature (634)..(634): n is a, c, g, or t
agcgggggggtgcggtgtacgaggcggtccagactataaaagcggctgccggannagcggccgtgcacctcattcatttctaccggtctctagtagtgcagcttcggctggtgtcatcggtgtccttcctccgctgccgcccccgcaaggcttcgccgtcatcgaggccatttccagcgacttgtcgcacgcttttctatatacttcgttccccgccaaccgcaaccattgacgccatgtcgggttattcgagtgaccgagaccgcggccgggaccgagggtttggtgcacctcgatttggaggaagtagggcagggcccttatctggaaagaagtttggaaaccctggggagaaattagttaaaaagaagtggaatcttgatgagctgcctaaatttgagaagaatttttatcaagagcaccctgatttggctaggcgcacagcacaagaggtggaaacatacagaagaagcaaggaaattacagttagaggtcacaactgcccgaagccagttctaaatttttatgaagccaatttccctgcaaatgtcatggatgttattgcaagacagaatttcactgaacccactgctattcaagctcagggatggccagttgctctaagtggattggnctatgggctgggaagtggtgcaccagactgggcatcctcgggaaaaagccattggtctttaattcggcctttccttgcccgattgtttccaccattccaatccttcacgccattcctctagaaaagaagcgccgatgtgggccaaatatgatctgggaggctgtggacccaaaatcggggaaacgtgtgccaccagggtgtccaccaagacaggtctcgctgcaacatatg

SEQ ID NO: 690201 - DNA, 690 bp, Homo sapiens
agaggacccgaagtcaccgcgtatcaactccgtaagtgaggatttagcatcagacactacgcctcttttctagggcttatcaattcagaagctacacaaagtgtgcgctgtcatcattaatccactccattcatcactccgatacaggatcgccacggctctcgaagcgacggaatgaccgtttttggccgactctgtcgttcgtgaaggacagcaatcggccaacccgatacccagagctaaacccccggtatccggtacacaacagaatcatatttctccgccatccgcctctcgattaccactccccccaaagcttcggcaatacctcgactcgcaccattctgcgtcgcaacaggatagataaagtgcttcgccaccacccactggctagcccactgaacaaccgcccgcaccgcttcaccaccaaaccccagcccgtgtttatcttcacgaacccagatccccaactccggtgtttcactgccggtatggtgcagcccgaccaagccggtaaaacgagcacctacccgctccctgaccgtgaacacgatgtcgctgccatccgctatcgcaggcagtcactgcccccagacttgcgcgtactcttgcagcgaggcaggcggttcccaggacatgtagcgagtcagtgccggagtgatacaagcgaaagactcaacagggtcctgc

SEQ ID NO: 690202 - DNA, 881 bp, Homo sapiens
  misc_feature (54)..(55): n is a, c, g, or t
  misc_feature (516)..(516): n is a, c, g, or t
  misc_feature (540)..(541): n is a, c, g, or t
  misc_feature (545)..(545): n is a, c, g, or t
  misc_feature (553)..(553): n is a, c, g, or t
  misc_feature (649)..(649): n is a, c, g, or t
  misc_feature (659)..(659): n is a, c, g, or t
  misc_feature (664)..(664): n is a, c, g, or t
  misc_feature (666)..(666): n is a, c, g, or t
  misc_feature (697)..(697): n is a, c, g, or t
  misc_feature (724)..(724): n is a, c, g, or t
  misc_feature (726)..(726): n is a, c, g, or t
  misc_feature (728)..(728): n is a, c, g, or t
  misc_feature (733)..(733): n is a, c, g, or t
  misc_feature (737)..(737): n is a, c, g, or t
  misc_feature (746)..(746): n is a, c, g, or t
  misc_feature (753)..(753): n is a, c, g, or t
  misc_feature (756)..(756): n is a, c, g, or t
  misc_feature (814)..(814): n is a, c, g, or t
  misc_feature (873)..(873): n is a, c, g, or t
agcgggggggtgcggtgtacgaggcggtccagactataaaagcggctgccggannagcggccgtgcacctcattcatttctaccggtctctagtagtgcagcttcggctggtgtcatcggtgtccttcctccgctgccgcccccgcaaggcttcgccgtcatcgaggccatttccagcgacttgtcgcacgcttttctatatacttcgttccccgccaaccgcaaccattgacgccatgtcgggttattcgagtgaccgagaccgcggccgggaccgagggtttggtgcacctcgatttggaggaagtagggcagggcccttatctggaaagaagtttggaaaccctggggagaaattagttaaaaagaagtggaatcttgatgagctgcctaaatttgagaagaatttttatcaagagcaccctgatttggctaggcgcacagcacaagaggtggaaacatacagaagaagcaaggaaattacagttagaggtcacaactgcccgaagccagggngaaaggggggaggaggggaggggnncggngagggggnggggggggagtgcaagacagaatttcactgaacccactgctattcaagctcagggatggccagttgctctaagtgggggggggggggggggagtgncacagactgnatctntnaaaacattgtcttattttcttccttccattntccacatcaatcatcagccattcctanananaggcnatgngcctatttnttttgtnctngcaccaactcgggaactggcccaacaggtgcagcaagtagctgctgaatattgtagancatgtcgcttgaagtctacttgtatctacggtggtgctcctaagggacacaaatacgtnatttggta

SEQ ID NO: 690203 - DNA, 649 bp, Homo sapiens
ggtcggcagcggtacagcgaggtcggcagctggcacagcgaggtcggcagcggcacagcgaggtcgtgcagcggcacagcgaggtcggcagcggcacagctgaggtcggcagcggcagcgagtgtcggcagctggcacagcgaggtcgtgcagctgtgcagcggcggtcggacagcgtgctgcgctgctgtgcatcttcctgcggcactctgacatcatggctgaccacggccacgcatggcgacctcgtggctcgcgcgcggaaagcggctgctcacaagaggaacgacatgactcaacctgtggaattcgagaccagcgaggaggtggatgtgacccccacgttcgacaccatgggcctgcgggaaggacctgctgcgtgggcatctacgcttacggttttgaaaaaccatcacgcaatccaagcaaacgaggcaatcaagcagatcatcgaaagggagagatgtcatcgcacagtctcagtccggcacaggaaaaacagcaccttcagtatctcagtcctccaagtgttatggcatattcaggttcgtgaaaactcaaagctttgatcttgggtcccacaaggagagttggcgtgtgcaggatccaggaaagggggctgtttgctctcggtgaactaccattgaat

SEQ ID NO: 690204 - DNA, 274 bp, Homo sapiens
  misc_feature (48)..(48): n is a, c, g, or t
  misc_feature (78)..(78): n is a, c, g, or t
  misc_feature (85)..(85): n is a, c, g, or t
aggacagactgtgctcgacacttagaccgggatttggtaggccaagtntgctaagtgtacaatatattttttaattanacacctnaaacaaagaaatgtggtcactaaaaataaaagtatatatataggaattaatgtcctcttgctatagtcaagctgttagctatagttaccaaggtattcatgttactctaactctgcaaaagtgcatgtaatctggtagcaatgtagatattcaaataaaggcatttacataataaatttagggtagatg

SEQ ID NO: 690205 - DNA, 600 bp, Homo sapiens
cccagtagggactctgtgtgggggctcccacaccacatttcccttctgcactgccctagcagaggttctctcccctgccgctgagagggcctctcccctgcagcaaacttttgcctgggcattgaggcatttccatacatcttctgaaaactaggcggaggtttccaaatctcaattcttgacttctgtgcacctgcaggcttaacagcacatagaagctgccaaggcttggggcttccactctgaagccacagcccgagctgtatgttggcccctttcagccatggctggagtggctgggacacaagacaccaagtccctaggctgcacacacatgtcaggggctgccctgacatggcctggagacattttccccatggtgttggggattaacattaggctccttgctacttatgcaaatttctgcagctggcttgaatttctccccagaaaatgggtttttcttttctattgcatagtcaggctgcaaatttccaaacttttatgctttgcttcccttatttataaggggatgcctttaaaagcacccaagtcacctgttgaacaattttgctggttaaaaaatttctttccggccgt

SEQ ID NO: 690206 - DNA, 215 bp, Homo sapiens
  misc_feature (33)..(33): n is a, c, g, or t
  misc_feature (79)..(79): n is a, c, g, or t
  misc_feature (154)..(154): n is a, c, g, or t
  misc_feature (195)..(196): n is a, c, g, or t
atcgtagaacagaaaaagatactagtggaaaanctagagaaacctgaataaagtctgtatattagttgatagtattgtnccactgttaatgtcttagttttgataattatactatagttatgcaagatgctaacattaggagaagctggatganggatatgtcatagctccctgtactatttttcctatttcctnntaagtctaaaattattcca

SEQ ID NO: 690207 - DNA, 946 bp, Homo sapiens
agcgggctttcttgggaagatggcggctgtgtcggctgtatgctccaccagtctggaggctactctctctgataacgtgtccgtcgacggaatgccgctgcgtagcgtaagccgattttgcatcacgcaggcggatacaagcttccaaaggtccggagaaattgcgtgacgaccatcgctctggggtggctcatatacaggatggcatagtctcttggcaggcagataccacgcagctcactgcacagggatggctctgttgctcgaacaagaactgatcacgaaaatacactgtcatatctcctatatattctattgtttggtggtgctgggcacaggctgctgagcgacagcacaatggacgagacgcgcaagctccatttcctgtccaaaacttggtgaggctccactccctctccactgggccgtcgttccccagaagtggttgagcagttgcaaatcgggactgcgtgacatcagactgactttatcatgcgtactcgacgggttaccatttcggtgtcaagggcactagttttagcggggagtaggatgttactggaaccttcaccctctaacaggcaatctaatcctacaatggattcacactgactaaaggttgccttatgtcaccatggggttctggctccttggcagcaattggctgtatttgaagcataagtttaggccagacatggaggaggagggaagccaagaatctggtgaggcgaagccaatcgcaggctggcaatcttcaacgacctggggctcccgggagcaacattgacctctgcgtcatcagcaagaacagctggatttctccgcccatacacagtgcccaacaaagaaggggaccaaggcttggccggtacaggtgtgagaaagggactactgcagtcctcactgaagaaatactcctctggagattgagggtgctggagaaacg

SEQ ID NO: 690208 - DNA, 115 bp, Homo sapiens
aatgcattacgggagtggtgatgactctaaagcgagcattgctgcttcaagcatctgtattccaaaggcacattttggacccgccctgtgatccatttaaccctgtagttacggt

SEQ ID NO: 690209 - DNA, 110 bp, Homo sapiens
gctgcgttttgcgaggctgctagaactcatcaaaaagctatcagtgggagtagagttgaagtccttagagaggattatgatgcgaccgatagtgaccacgcaaactgggc

SEQ ID NO: 690210 - DNA, 862 bp, Homo sapiens
cgcagactacttacggctaggtacgaggctgggtggtgcgcggcatggcgctactagatgtatgcgcgagcccgctgaggcagcggcggaatcggctctcccgtgttgcgggaagcgggcgtcgatcggacccgaggacactacagtttctctatgcgatctccagagctcgtttgaccccggggaatgcagtccacagaattcttccatgtccctgggtggggactgacgaaaggaacgttcagatgagatggcccatggacctacccacgctcgccgttcaagttccagcatggagtgattgaatgctagtggattctcgggccttcagcctgggtccttacattagtgccttacgggtgaacaaggtgattgagattaacccgttacctgcattggtaccgatgtctggctgtgcatcagacgtgtcagtactggggagcagccttgcgtggtcagaggaaatgcaggctgtacatatctgtgaaatggagaacgtatttcagtgtcggaagtctccaagctgctgtccgaacatgattgtgccagtaccggggcgatggacctctctatgggcagtatgatctgtggctgggataacgaagggtcctgggactctactacgtggatgaccattgggactctgggtctcagtgcaagttttgttctccgactgggtcgtgggaacatcgttagtgcctacgggggtcttggcctgtgggtaatcgggctaatcttagcctgaagcaggctatgagcttggcgcaggggctattgcttatgcactcacggagacctgctattctggagggggtggtccatattgttccacttttagggaagatggtttgggttaaagtag

SEQ ID NO: 690211 - DNA, 1159 bp, Homo sapiens
  misc_feature (376)..(376): n is a, c, g, or t
gacataccattccctgagtccgatatgtctcgcttcgtgcacctataactagtgctcgactggcctaactcatctccttcctagtgcctgagagcgctcatcccatgagatcactccacataagcatctcaaggttctcaatctacgcttcaatccctaagtacgaaatcagatggtaaaagtctaaactttctctgcacacttcgctcatcgttgtctcgggtcttcattccgatcctgaccacttagaatgttcgacgttactgcacacccagattggcagtaagcaagccatctagtaacacaatgtatgcgcatgcatattactcaatacttatggtctcttatctcagacttaacggcacttagcgtcgtntatcttaatcatcttatgttaactttactcacatgatattcgaccaccccacttcgactaaacggataggacgtaattagacgcttgctcacgatgtattgtaaaacaacaatagaattgcacttctctagttacaaccacctgcgccaaatgattagatctaataaggtagtggcatccgcacggaaccacttgatcacagcccacaatctatcgcataggaaagcgctcgtgataaagcatagcccgctactattgtagaatatgggaagtgaacgtgtcccatcaatatcctgccctctgacatgcgtcgtgtttttccaaattactctgaactactgactgtttacctatcacctgtaacatcttgttacctgaccacccacaacacctgcttacgcgggtataataaaaataaacttggtctaaacaatgcgaccaattgactgcttcctgttctaatacatttcataacctattttgcaagctggctaggtcttccagtgttttttgactcgcttattcctcggaagcatgcgctttgcatcccaccagggctaagcctccataaggaggaggcttgtgcaaacctttagcaagggtgagggacgccagcaggaaatttcttcctttattcccaaacattccaaccattccttggcggcccaggatttgtgacacctccttccaaatcctccttggcacttccaacaggcttgttacgcaatagtttaacaccgttgcattaagttaactttccacattcacataacctgctctacc

SEQ ID NO: 690212 - DNA, 699 bp, Homo sapiens
ggctaggtacgaggcctgggttatcggccgaggccccccacctatgttgacctgaaccacctggtgtctgctaccatgagtggcggtcaccacctgcctgcgcttcccaggccagctcaagtgctgacctgcggaagctggctgtgaacatggtcccgttttccccgagcttgcccttcttcatgcccggctttgccccactgtaccagccggggcgagccagcagttaccgggcgctgaccgtgcccgagctcagccctagcagatgtttgatgccactgaaactttgatgtgcttgcctgcgacccccgccgtggccgcctaccttgtagcaggcttagcccgtccgctgatatcaagggggcctgacgatagtcctattggaatgcgaggtgcgtactgacgacaaatagcttgatatcgttccatatacactagataaatcaggcatctatttagtcgagtggatccccaacaatgtaacatacgtgctgtcttgtgacatccctaccttctgggggtctatgaaaatgtcctgccacctttcagttgtgccatcagcagcgtgccagtccagtgagctgttccaagcgcagtctccgaggcacgttcacggcgcactgtgccgggctgcaaggccttcctgtcactggttcacgtggcgagcgccattgtgcacgacatggagtccaccgaggc

SEQ ID NO: 690213 - DNA, 105 bp, Homo sapiens
tcatattcacatggacaataacaaatgcacttatggaacatacaccattagtgagtttggacagatatgcctggggggaaatttaaaaactggattaattttatg

SEQ ID NO: 690214 - DNA, 329 bp, Homo sapiens
agcctgatttaggccctgctttatcccggggcttcccccctgaaattaataaaacttatttgggtcccttgaaacttggttccccgaaaacccctttttggtttataatccccttttatgcccccccgcccttaattatctacccctgatgaggggtttaaactgggtagcacaaacacgaggcccccccttttgggaaattttaaaggaagaacccctttttaatgagatgaaaatatttaccgaattttaaaagctaatgcccattttgagaaaaggtttggggggtatattgctatgtaatttaataacctgattttttggatata

SEQ ID NO: 690215 - DNA, 990 bp, Homo sapiens
agcggagtcgcctgcgccaaccagcttctcaagcttgtagtcgtgtcgctcgcctggggtactccgctgggcggcgacgggcgcgtgggggagggggttcgggccgccacccgcgagcagaggacgcagagatgtgctgcacagcaggaagggcccgcgggctacggaggccagcaggcccctcgaggcgagtgatggggccgagtcgattcgacgcgggacatagcagggcaccgtgcgccaggtggctcttccgagcgggaccacgcgactggcaggcgcccgtgagaaggaggctccagtgcagggtcgggtctgcgctggcggtcggccgctgtagggtgctggccggaccgggcttggactgtggactgggggggcagatgagcgactgaggaggcgcgctcggtcaccccgaatccggcggtgttcctccggcctactcgtattccgtacacactgctacgtcgacctacgttcagttgtagcccttgaacggtgtggaacgggggcgaaaatggttgatagcaaaaagttaacatatggacgcgacttgtcgtcaaattggcacacgaacattagcaacgagatgcgtggacatgtggcaggcagctacaaagggactccccgcgagagacagagccttacccgtgggtccttgagacccacgcgcccttgaaagcggcccccagacaagcggtttcgttagaagacactcacgaatggggtgcatcgatgtgccatctgggcctgacatgtgccgtcacgacgcgtgtggaagacagaaagtctcggctcttcgccagttgtacccccagatggaacatggaaagggcaagcaactcccatttagaagcgtgacgtgtgtgaagttcgcacatgggtggggacacgaaggcaccccaaaggaaaactaacagtatgccgtcccccacattcctgattctggttggcaattaacctggggctcctggggcgatttaaccgtga

SEQ ID NO: 690216 - DNA, 320 bp, Homo sapiens
  misc_feature (218)..(218): n is a, c, g, or t
  misc_feature (261)..(261): n is a, c, g, or t
gaaccactgaagataaagattatgtatatatgtatttaaagggatttattatagggatctgaccgcatgccattgtgggagctggttaaacagtctctgtaaggctgttgtctttgcatctaatgctggagcttgaagtctgcagggcaggcactagggaagggaagatggatgtaaagtgtgggagaccgaggacacagtggagcccacgagcacgngctggaacccacgaggatggcctggaacccatgtcagtctctnaccacctccagcttcgatgatgtgggtgtcctgcagaagaagctggtgcccttcctcac

SEQ ID NO: 690217 - DNA, 129 bp, Homo sapiens
tggtaccggatgggcgacatttcaagattattgtgtttaaggccaggcgcaggggctcacaccggtaatcccagcacttggagaggttgaggcgggcggattgcctgaggtcaggagttcgagaccagc

SEQ ID NO: 690218 - DNA, 425 bp, Homo sapiens
ttaaatttattaataccacctccttggttcatcaccaacataccctacatcatcaaggggctgggggtgttttttggtttggtttttacctggcttgcatgcaaaggacagggatccatggattagggaacaacggatgaaaaagcccccctcatttgaacctaaacattgcctttgcttggtgaaaaaactgtgttaactgtcctgacctggacgattacgtggggaaaccccccccccccttgcaggcttgttgcctgtttaaaaaaggaaaaaaacccggcgctggcaagtgataggaaccttttggcccaaggttaaaaagcaggcttacatggctggcccttaagctttataaaatcatgtgggctttgaaattgtttttttatgggtttagcaaggatttaataaacccctgtatagta

SEQ ID NO: 690219 - DNA, 804 bp, Homo sapiens
  misc_feature (517)..(517): n is a, c, g, or t
  misc_feature (525)..(525): n is a, c, g, or t
  misc_feature (529)..(529): n is a, c, g, or t
  misc_feature (571)..(572): n is a, c, g, or t
  misc_feature (579)..(579): n is a, c, g, or t
  misc_feature (602)..(603): n is a, c, g, or t
  misc_feature (611)..(612): n is a, c, g, or t
  misc_feature (631)..(631): n is a, c, g, or t
  misc_feature (666)..(667): n is a, c, g, or t
  misc_feature (681)..(681): n is a, c, g, or t
  misc_feature (713)..(713): n is a, c, g, or t
  misc_feature (724)..(724): n is a, c, g, or t
  misc_feature (756)..(756): n is a, c, g, or t
  misc_feature (804)..(804): n is a, c, g, or t
ccgccgctctccgaggctcctgaaagttgcaacctctccctctcggcgaatttgggggtttctgaagcgcgcgaggtaaaccaaggttttgctcatggctcgtactaagcagaccgcccgtaagtccactggaggaaaggctcccaggaagcagctagccaccaaggctgcccgtaagtctgctcccaccactggaggagtgaagaagcctcaccgttaccgccctggaactgttgctcttcgtgagatccgcaagtaccaaaagagcacggagctgctcatcaggaagcttccattccagaggcttgttagggagattgcccaggacttcaagactgacctccgcttccagagccatgcggtgctggcccttcaggaggctgcagaggcctacctggtcggtctcttcgaggacaccaacctgtgcgccatccatgccaagcgggtgaccatcatgcccaaggacattcagctggctaggaggatccgtggcgagagggcttaaggtggctggtgnccttgccnttgncctggtgggcgaaaattcgctcctgggggctgggccattctnngtgtctngcgttttggcgctggcgtgaacnnacttatcnnatgtgtccgtggggaaacntacttaattactgggtccgtgtgtacgtaatggtnncagctagcgttacntcctggttggcccaattacttaatggcttccngggctagaagncgtggggaatccacttttcggtttcccggtanagggatccggttcttttaacattcaattccaaccctggcgtgggagan

SEQ ID NO: 690220 - DNA, 398 bp, Homo sapiens
cccaggtgggagtgcagggctcagtctggactcacggcaacctctacctcccaggttcaagtgattcttgtgcctcagctacctgagtagctgggattacaggtgcgcaccaacatgcccggctactttatgtatttttagtagagatggggtttcatcgtattggtcaggcgggcctcgaacttctgacctcaggtgattctcctgccttggcctcccaaagtgctcacaggcatgagctaccgtgccggccaggaatcttttatgtgcaacgttgtcagctgttaatgctcctatttatgaataggtcaccttggtttgaaaaaagcgtacaaggttttctaactccaaatctttccagccacaatatggctacgttaagcagaacaccgtcgaag

SEQ ID NO: 690221 - DNA, 215 bp, Homo sapiens
gggtagtcgggaggaacatgaaagtgatatgcttcttagatacatctagctggttgtaacctacttggtgctgagtggggcctccttgctctggagggggtcttcgtccatccttggtgggggggggtgcctcagccccttttcaggcctaagaaccgtctctaagagggtcaggagaactgggtccgccgctaggacagtgtattacaccccgt

SEQ ID NO: 690222 - DNA, 222 bp, Homo sapiens
gagtcaggatatatctctggcacagatactcggaatccactattctctacaaatcaaatgaacagatggtaaggatgtatccatctaggctttcatctaactacagggccatcctatcttcgccaagaagaagctaacagatttactgcaagcaaaataaggccttccttagaaaataacttctaggtcctcaggaacaaatgatgattagatccccaagtt

SEQ ID NO: 690223 - DNA, 444 bp, Homo sapiens
ttatctattgaacatactactaaaagaaagttactatttatgataatccgtttactgcatagaacatctgtcggacttttgctattaatcattttcatattcttcctatggtcctctctgttcacagaaatatcatctttgtaaacaatcttgtgtgagtacttaataaatcataatattgattcatttgaccatattaccataatcaccaattttaacagtctcctacattttttctatatcacttttcttgattaccatatgtctgtaataagaacacgctctttatataacagaatatttaattacatcagtttcccatgaacacaccagagtcacttaataattatattggccatttccactgatcggcaggaggctcttccactaatggctcccatagtttccattccctcatttttcttgccagatttagttcatgtc

SEQ ID NO: 690224 - DNA, 177 bp, Homo sapiens
gattcgaggatgtcagatgtaatgtatctgcctcctataagaaattctgggcatattataatagacatatctcagaagattgtgattgccttcatgttgtggagcccatgcctgttccgggggcctaatgtagaagcatactgtctacgctgtgaatgcaaatatgagggaagaagc

SEQ ID NO: 690225 - DNA, 797 bp, Homo sapiens
ggtactcaggcgactgaggtaggagaatcacttgagcccaggaggcggaggttgcggtaagccaagatcgcgccacggcactccagcctaggcaacagagcaagactccatctcaaaaaaaaaaaaaattgctgaattccaggtgggggggtttggcttgggttgaaattccagtttttacccagggttggtcggtagaaaaggggaggaatatttggatccgggtaagtgtgacttaattttccttggatacttataccaaacgtcatagttccttaaagcttagctggggccaggtacaggggcttcacaccttgtaatcccagcacttggcgagcgccgaggcaggcagatcatggggaccccaggaggttcaaggaccagcctggggcaacttggatggagactctggtctggtgccaaaaaattccaaaatattaggctggggcatgggtggagtcatggcctggtaatcggtagcacttgtggaaggccgaggcgggtggatcgcctgagctcaggagtccgagaccagttggggtaacacagtgaaaccccgtttctactgaattaccaaaaatttagcaggccgtggcatgtgcctataaatcccgggctatcggggaaggctgaaggcaggacgcattggcttgagccccgggaggccagagttttgcattgaagcccgagattggtgtaacctggtttccccagcctggggcgaccgaaaacacaaaacacaaaacaaacacacaacccttttggggcccgctctcgggcctcaaaaattttaaacc

SEQ ID NO: 690226 - DNA, 309 bp, Homo sapiens
gtaataatatgtatctatgtaatgtgaaaaataacagagaagcaatgtggtacatggaaagacagaggctttgaattttaaaagatttgaatttaagctttttggatttgaatttaagctctgtttctttctttctttttttttggagacagggtctactctgatgtccaggttacccattctgtggccactgcagcctcgacttcccaggctcaggtgatgctcccacctcagcctcacaagtagccaggactacaggctctcaccaccacgcccgtctaatttttggtggtcccttcttgtactagg

SEQ ID NO: 690227 - DNA, 334 bp, Homo sapiens
agatcgcagaggcttttcttcaagattctcagtcagagattcctctgcagcctgtgtgtgtcaccattggtgacctgcggcagtatgtacttcagtgcacctactgcttactgttgctttaggcactaattgctttctgggtttgaaagatgcagtggttcccccccctcccgaatccctttctacatgatgccctcctgaccatgaagccgaaccagagagagattttttcccaattggctctgtgactggcatctaactttatgatagggagggtactacccaggggactttagggagtgacagccccttatttgtacctaaccccttgacc

SEQ ID NO: 690228 - DNA, 428 bp, Homo sapiens
  misc_feature (374)..(374): n is a, c, g, or t
caggtctcgctctgttgccccaggcctggagtgcagtggccacaatcacagctcactgcagcgtcaaactcctgggctttaagggaatcttcccaccttggccttccatatagctaggactacaggcatgcaccaccatacctggctaatttttaaatttttggtagagatagggtctcgctgtattgcccaggctggtctagaactcgtgggctcaagcaatcctcctgcctcggcctcccaaagtgttgggattacaggtgtgagccatggtgcccagccaacaaattttccatgaagccaaatggtaaatattttatctttgcaagccctgtggtctctgtcacaaccacgcatctctgctgtggcaaaanatcaccttaggctgcacaggtgggtgtggctgcgttccagtgaagcttgattca

SEQ ID NO: 690229 - DNA, 503 bp, Homo sapiens
taaatacaaggagggggctataaacacccagtacagacatatccacaaggtcgtaaatgcttgctaaaaaaatagggctggatcttatcatgccctgttccccttgttctctgtgccagatcttcagttgccccgtgccatacagggattctttttctcatagagtaattcatatgaccagtttttatgacctcctttgggtctgaaatacttttggacacagaattcctttttttttaaaaaaaaacagagatgggggtcttactaatgttgcccaggctggttgtcgaactccggggctcaagcgatccttctgcctgggcctcccgaagtgcaggggatggcagcgcataaagcataccatgcggggcctgacccataatctcaagaggaggatttataaaaccatatcggtaaccacactgatggggcgtacatagttcccattttggccccaagtggtagtcatccaccttaaagcagaaaaacaaaaaaacagggga

SEQ ID NO: 690230 - DNA, 1452 bp, Homo sapiens
  misc_feature (696)..(696): n is a, c, g, or t
ctacttgtggtcctttataatgagggtcctgctttgttgggaggaagaggtgtgcgcccccccctgtcgtcaagcattgtgtgtgttataaactagcacccaccgacaggaaagtaagggtggtgtgtgcctctacagtaaagcacgctcggcacacaaaagaatttattaaggggcgcggcccgcctctcccttttgtgggccaccaacaaggaatgggtggttgcctacaaagaaggcccgccctctttggtgtgtgattatgctcctcgccctcctcattggtggcccgccatgacagatttatttcctccgcgctggctgtccatacaaagtgagtgtgtttgttcgtactaagccgccgcatgtggcgccccccaccggagggtccctctccttcttataggagagtgtttcgccgcctgcaggctcctccagcatcgttgatgaagtggggggggctccccccccggcttggcgtggttatttacctgtctcctgtttgtgtgtgctccgtctcccttgtttcttttctcgatgccaggcgtcctgtgacgtgcgttgtgcacacctcttctctgcgcaacagaagagttgttgtcccccctcatcaccgcccctcatatagaagagagaaaattggtggtaataccccaccacccctctggaggacaccacaggttgctctccttctcngcggtgggagagatttcttcggagcagagaagagagagagagagagatttggggggtgataaaggctcacagcagcattagtcacctcttcaccagcgctctgttatgatctcatcatctcatagagaagggggagagactctttttgcgtgttgtggatatagagattccccccctctgggtgtgtgttctttccccaccaaccacccccctccgaagatcatctagggtgtggagcaccacagagaggctctcacaaacagagagggcccctctctctctgatacgcgcgctcatagcgcgagagagtgtagagatatagagagacacatctctcgagctcttgcgacacaccacacatagagtgttctctgtttcggagacacacacgagacacaatattctctcaaggctatatagagagagatagttcctcacacacacactccacagagaatatgtggagagcggcgcacacacactcttctatatcacacagagagtttaaactctttgtgacaccacagggagacacacaattctccacaactgagatccacatcacactcacatgtaaggctatagcctgttatgagagccttgcacaacctttaataagcccgacagcgtgccccacatgccaactgtgagaagtaacccaaactggtttttgggttttttttccccctccagttttaaaggttaagggtaaaggattttaaccccttaattaaataaaaccttggttttccagga

SEQ ID NO: 690231 - DNA, 1710 bp, Homo sapiens
aagtcgttaacaaagaacagttgcatgttactgaaagaaagggtgtccaggccttactcatcgaagtggtggaaaccccaaaatatgtagactgacgaagcgattttgccaactgctatgttcgagagttattatcgagtgttggaagatgacgatcacgatcagagaattctaggacgagagtggtagtgtacgtggaatcgattcgtccatcttaggaaatggtgtgttctgtgatgttggttgagcatcgttccttgcaatggactggtaatctaggaaacatgccatgttacatccttttgtaccagagttctcagcaggaccgcaaaaccagtgcctagcaactcattggactgtgcctctcattctgaaccgttgtagacgcgctgtacgttgactagcacattagaatagtcagagcgatgagacacggctagcacgaaacggtgcagcaatactgtggagtgtagtcgactcttagcagagctactacaagggcctaacgcgagcagctagacaatgttaattgtgcacgcgatagttcgtaccagccccaagagggttgacctgtgcatataactatcacgttcctgcccgtgggtgaaataagagtgatagggccaaagctccttggaccaacgggccactggagtacgacacttcttccgccacccttacggacatattcacacgcacatatgtggacgcgtccttactggtttgaatccattgctacaacattccacctttggtacaccgttagcgcgaggacggacaagttcggcgacctatctgttcaccgttcggagaggcttgaaagagcccccagttttaaccaatttccacttggttatgtaacatcactttttgagcgccgtaatcccgtggtgacgtcggcgcgaacaaacatgtggaccataacgtatataaaaccgttaaagaaatatggcacgtccttgggcaaagaaaccttttaaatcaaccctttaatggaacagtttggccccccaataattatgcttttgtgtccaaacccctactgaggacagcggcccagaaagggttcccacacgattcaacacacaggcaccactggactttcgttggcacaagacaacaagacgcataaatttcggaaaccacacgttttgtcacacagcttgtggacacaatgtttccatcaacaacaggaacacgaggcgcaactcgcagcggagaatctgacgaaaccctttaaatagttggaaacgtaaccaacactgtatgatttgggtgccgggcattctggataacaccattacacaaacacgcccaatgaaaggatatataccggcgcatttttaaccatctggcacaagccaattgttttctgccacatcaaggggagatggaattggagaaccccgaggggacttgagtccccaacaagaggaccagggttccccacgtggggccaagcgtgtagacccgctggacacaccatcgaaagacacggcgggaccaaacagtcagagagagatacaacagacaatctgccacgagaagcgcagagcagaaaaaagcggcgattcacaggacgatcactgatgacagaacaagcgagtcgatcatctcacaccacgatgagcacgagggacgaatcgaaaatgagaagcacaccagaaagacagacacatgagacacatcgagcgcagcacgaccgatcaa

SEQ ID NO: 690232 - DNA, 172 bp, Homo sapiens
cccttcccggatgatataattttatactcaaaaagccctaaagactcccccaaaaagctcctggaactgataaataacttcagtaaagtttcagaatacaaaatcagtagcattttttaacatttgagagtcaaaccaagaacccaatcccattttcaatagctaaaactga

SEQ ID NO: 690233 - DNA, 530 bp, Homo sapiens
taagccaaaccatatacccaaataaagtataggcgatattatagaattctggcgctttagatatagtaccgcaagggaaagatgaaaaataataaccaagcataatatagcaaggactaacccctaatacctatctagcataatagaataaactaagaactaactaagcaaggagagccaaagctaaagacccccgaaaccagacgagctacctaagaacagctaaaaagagcacacccgtctatgtagcaaaatagtagggaagatatataaggaagaggcgacaaacctaaccgagcctaggtagataagctaggtagtaccaacgactagaatctaaaatatcaaactaatacaatattagcactcacagaaaccctactacaaatacctcctatagtaaacatattaaactatgtaaagtaccatacagagcgacacacgctactgaaagagacatctaacggaaacaaaatactatagttaagatgacgagtaaacaacaattataagcagcccataagcacgga

SEQ ID NO: 690234 - DNA, 1678 bp, Homo sapiens
  misc_feature (976)..(976): n is a, c, g, or t
ggtgctgtggactaccatgtatctctcgctgctgggtgtctgcatgggctgtcggcctggaccttgccagccgcaatggcattccaagttcgcaccacatcatggcacacttttgcaaagatcatccaccatggagcactcaaagtcccatcaaaaacacatcccagcaacaattcacccacagtctcatggcaacacattgtgtcagctggcaagccaacacacatcatcgccctgcagctcgcagcagcagcagcatgacaaaccaaggctctgcaacatcatcatcgtgcatatcggggaatcatattcagcgtacttgttcatggaacacacatgcttgcatcatccacatggagagcccttgcaagcaacacagcacagcacaaacacctcacattcatttgagtagttgtccctcaaagcatcacgagcgcacgttgtgtagtgttggctatttccatttcactccccatttcgctcacacacaaggaatgcaacacagcctgcagggtgtgggctaacaacttcacacccatgccatgccttgtgcgcaacagccaaggttcatcggcattcgttagtggcgcacatcttggggtacggaccaccaacatcccaccagtggcacttcaccttttcaattcacgcgcaactccagatatacgtgcacccacagttcttccttggattggcgccaataccacaggaccggcacactgttgcgaggaccggacacaaggcccccccaccccacacgtatagagggtgccggacttggcggttccacgaatccaacatctgcgaccctttgggacactttaactttacaaaataaccttggggaactagttggacacgcttctcgcatccgacagggcactcccccagtccaatctccgtatcgacactaaccaacatacccacggggtactaggatcacatatcatcccctagatgtaagcacccagacaangtaaacacaaagtcgccgccacatactaatattcaccaccaatataacttacccgcgcagtatcgctcagttgtgcctttcaactaaacaaattacgctatatactatatagtaccgacactactatggcaatcgtaccattcagacgtatgtccgtcacccaattatccacacacgacaacctacacacactctgtgctaaccaaccaacactagtctcttcactacattcactcaaacagtatgatctccacaacacactacataacacacagtacccacccgatcatcccaactcctgtccatatgacataccagacacgtctaattccattagctttccaatactactctaaacaactcacatctaccagacagacggcctatcgacagacaatgagccacagaactcacgaggcgtggaagcgacgatcacacgacgcatatacgacgaacgagcaaagagagacgcgagcaagagagaataaatccgcatgctcgctaccactcacaacagtcaaacagcgaaaagcaacgcagaccacacaacaacagcagctgaagggcgcattgagacgcaccatactcccatgcacgccacggcaactcaccagctgcaatgacaggcaagcagaacgcagaagcagagggaccgaaacagaagcagcggaggacagcgcagacggcgagcgccgcgcacga

SEQ ID NO: 690235 - DNA, 381 bp, Homo sapiens
  misc_feature (16)..(16): n is a, c, g, or t
tcatactccttatgcncatccctccttatgctcatccctccttatgctcatccctccttatgctcgatccctccttatgctcatccctccttatgctcatccctccttatgctcatccctccttatgctcatccctccttatgctcatccctccttatgctcatccctccttatgctcatccctccttatgctcatccctccttatgctcatccctccttatgctcatccctccttatgctcactaccaccttcactcacagaccacaccttcgccaaaccattccacccaaataacgtcatcggcgatagaaatagaaacctggcgcaatagatatagatacgcaagagacagatgaaaaaattataaccaagcatcata

SEQ ID NO: 690236 - DNA, 333 bp, Homo sapiens
  misc_feature (16)..(16): n is a, c, g, or t
tcatactccttatgcncatccctccttatgctcatccctccttatgctcatccctccttatgctcgatccctccttatgctcatccctccttatgctcatccctccttatgctcatccctccttatgctcatccctccttatgctcatccctccttatgctcatccctccttatgctcatccctccttatgctcatccctcctttatataaatgcgtaggggttttatgttaaattgtcctttgacgtatacttgaggagtgtgacgggtgttgtgtacgcgcttcagggccctgtacaactacagcactctactctccgtatactgctaaat

SEQ ID NO: 690237 - DNA, 263 bp, Homo sapiens
cccttaacggttctgacagaaacgaggctaagtcaccccttcagcatcgacgtctttaaggattacatctatgtgttcaacttacttcaataatcgtgtcttcaagatccagtaagtttggccacagcccttggtcaacctgacagggggcctgagccacgcctcttacgtgctcctttaccatcagcacaagcagcccgaagtgaccaacccatgtaaccgctagaaatgcgagtggctctgcttgctgagccccagtgggc

SEQ ID NO: 690238 - DNA, 216 bp, Homo sapiens
cagacatttgcgatggcagtcatttaaaaacgaaacaaaacacactgattacaacaatcaagcagaagctggtatattagaataagtgcgtacaggccgggagcggtggctcatgtctgtaatcccagacactttgggaggccaaggtgggtagatcatgaagtcaggagtttgagaacagcctgaacatggtgaaaccctgcagggacccactcg

SEQ ID NO: 690239 - DNA, 201 bp, Homo sapiens
agttcctggtccccactaagtagaataaagaaaaacggttataaataaaaaaaaaaaaaaaaaaaaaaaaaaaaaaaaaaaaggggggtgttgttcccctccccctctgaaaaccactattttaccggggggtgttcctttctttaagagaggggggagttgcccccacacaacaagaataagagcaaatttaactccagg

SEQ ID NO: 690240 - DNA, 164 bp, Homo sapiens
gtatccccaccaggctgggccccagtattacgacttcataatacactgcctgtcatctgatcagcatatactgacttgtagccattaagtaacttacttcttatgttgctctattagtatgttgtaattgtcttctttaaattttgatttttcactgacggtga

SEQ ID NO: 690241 - DNA, 344 bp, Homo sapiens
  misc_feature (334)..(334): n is a, c, g, or t
aagcatgtgcaaacatgcccggctaatttttgtatgcttttgtggagacaggctttgccatgtttgccaggttggtctctaagtgatccacccgccccagcactttgggaggctgagttgggtggatcacctgacatcaggagtttgagactagcctggccaacatagcaataccctgtctcaaagatacaaaaattacccaggcttggtggtgtgtgtctgtagtcccagctactcaggaggctgaggcgggagaatcgcttgagcctgggcggcaaaggttgcagtgagccgagaccatgccactgcactccagcctgggtgacagagtganctccgtctgg

SEQ ID NO: 690242 - DNA, 1121 bp, Homo sapiens
  misc_feature (353)..(353): n is a, c, g, or t
  misc_feature (952)..(952): n is a, c, g, or t
  misc_feature (998)..(998): n is a, c, g, or t
  misc_feature (1028)..(1028): n is a, c, g, or t
  misc_feature (1048)..(1048): n is a, c, g, or t
cggcacgaggagctcaccacctacaacatgctcctgaaaccccccctgtaacagctgaacattgtgctcatagactctgtgctgagtatcatttcagcacttccagaggataagggagtagacctcatatgtcctggagaaggccttcctcagtacccatgccaacactgaaactgtgtttgaagcctttctgctcctcagcttcaggcaccaccactgacctgggacagtgaatcgacaatgccgtcttctgtctcgtggggcatcctcctgctggcaggcctgtgctgcctggtccctgtctccctggctgaggatccccagggagatgctgcccagaagacagatacatnccaccatgatcaggatcacccaaccttcaacaagatcacccccaacctggctgagttcgccttcagcctataccgccagctggcacaccagtccaacagcaccaatatcttcttctccccagtgagcatcgctacagcctttgcaatgctctccctggggaccaaggctgacactcacgatgaaatcctggagggcctgaatttcaacctcacggagattccggaggctcagatccatgaaggcttccaggaactcctccgtaccctcaaccagccagacagccagctccagctgaccaccggcaatggcctgttcctcagcgagggcctgaagctagtggataagtttgcggaggatgttaaaaagttgtaccactcagaagccttcacgtgtcaacttcggggacaccgaagaggccaagaaacagatcaacgattacgtggagaaagggtactcaaggggaaaattcgtggattgggtccaaggagcttgacagacgacacagtttgtgctctggtgaatgacatcttctttcaaaggcaaatgggagagaccctttgacagtcaaggacaccgaggaagaggacttccacgtggnccaggtgaccaccgtgaaggtgcctatgattgaagcgtttaaggcntgttaacatccagcactgtaagaagctgtncagctgggtgctgtgatganatactgggcaatgccacgcatcttcttcctgcctgatgaggggaaatacagcacctggaaaatgaatcaccag

SEQ ID NO: 690243 - DNA, 604 bp, Homo sapiens
ccagtatacttgtgcgagatgagtgaagcagattactcaaatgtattacttgatataggaaaagagtagaacttgtgcatattaactttgaaacgggaatgtggtcaggttccggggagtggtatcttatctgactagcccaggttgagcctaacgtaaccaaaagttcagtagcaagtcgcgttcggctgggcacatcgctgtcgcggctgctgctagtggtggtgggagtgggaaggataggaggattttatattcaaagcccagactatagtattatgtcttcggaaaaatggaaaggaaccttcctgcccctatagggatgacataatcagtatcatggcaaggagctctgggccccacatggtcttgtgagccaggggaagtccggattgctttggctgagagtgagcgtagtagagcactgccgtatgcatggaccggatcatatggttgcaccttcgggaggtctacaagaacagtagattatctcatgtcagaagagacttgagtgcatgtctgccctgtcctcatgacatggcatcggttacctggacagatactctgatgcgcctcggatgtctgtccacataaatgcaggggt

SEQ ID NO: 690244 - DNA, 1037 bp, Homo sapiens
  misc_feature (353)..(353): n is a, c, g, or t
  misc_feature (868)..(868): n is a, c, g, or t
  misc_feature (914)..(914): n is a, c, g, or t
  misc_feature (944)..(944): n is a, c, g, or t
  misc_feature (964)..(964): n is a, c, g, or t
cggcacgaggagctcaccacctacaacatgctcctgaaaccccccctgtaacagctgaacattgtgctcatagactctgtgctgagtatcatttcagcacttccagaggataagggagtagacctcatatgtcctggagaaggccttcctcagtacccatgccaacactgaaactgtgtttgaagcctttctgctcctcagcttcaggcaccaccactgacctgggacagtgaatcgacaatgccgtcttctgtctcgtggggcatcctcctgctggcaggcctgtgctgcctggtccctgtctccctggctgaggatccccagggagatgctgcccagaagacagatacatnccaccatgatcaggatcacccaaccttcaacaagatcacccccaacctggctgagttcgccttcagcctataccgccagctggcacaccagtccaacagcaccaatatcttcttctccccagtgagcatcgctacagcctttgcaatgctctccctggggaccaaggctgtcctccgtaccctcaaccagccagacagccagctccagctgaccaccggcaatggcctgttcctcagcgagggcctgaagctagtggataagtttgcggaggatgttaaaaagttgtaccactcagaagccttcacgtgtcaacttcggggacaccgaagaggccaagaaacagatcaacgattacgtggagaaagggtactcaaggggaaaattcgtggattgggtccaaggagcttgacagacgacacagtttgtgctctggtgaatgacatcttctttcaaaggcaaatgggagagaccctttgacagtcaaggacaccgaggaagaggacttccacgtggnccaggtgaccaccgtgaaggtgcctatgattgaagcgtttaaggcntgttaacatccagcactgtaagaagctgtncagctgggtgctgtgatganatactgggcaatgccacgcatcttcttcctgcctgatgaggggaaatacagcacctggaaaatgaatcaccag

SEQ ID NO: 690245 - DNA, 393 bp, Homo sapiens
ggtgcacagcgtgtaattaccttgagaatgggaattcctggatcaatgcgacctctcattcaagaaatgctgtagaattctgaaggacatgagacccttgagcccaaggtcaagtgggaacacagcagagcacaggcctagcgatcttacccagattagaggaaaacagtggggtcaggcagtcaccacttgtgcaataagacattttctaggtactctaaacatttcccagaacctctagattcaggagttaaaatgcgagaacatttttactggtggttagattttggactggaaagatatttctcaagaaggagccagaaggtttcatatgtgtcaatatatatactcctcactgtgtgacttacctagagataccaactttttcatttt

SEQ ID NO: 690246 - DNA, 820 bp, Homo sapiens
  misc_feature (353)..(353): n is a, c, g, or t
cggcacgaggagctcaccacctacaacatgctcctgaaaccccccctgtaacagctgaacattgtgctcatagactctgtgctgagtatcatttcagcacttccagaggataagggagtagacctcatatgtcctggagaaggccttcctcagtacccatgccaacactgaaactgtgtttgaagcctttctgctcctcagcttcaggcaccaccactgacctgggacagtgaatcgacaatgccgtcttctgtctcgtggggcatcctcctgctggcaggcctgtgctgcctggtccctgtctccctggctgaggatccccagggagatgctgcccagaagacagatacatnccaccatgatcaggatcacccaaccttcaacaagatcacccccaacctggctgagttcgccttcagcctataccgccagctggcacaccagtccaacagcaccaatatcttcttctccccagtgagcatcgctacagcctttgcaatgctctccctggggaccaaggctgacactcaccatggagtcctgcagggcctgaatcttagcctcacggatattccggcagctcggatacatgatagcttccaggacctgctacgacggtgaaccagccggagagccagctgcatcttaccaccggagatggcctgttgctcaccgatggcctgctagtggatgggttcttggaggatgtcgaacgctttgcctgtggacgccttaactgtccggtacgggggtggctagaacctgctcagggggacgcgggtccacacagagagggggacgactcgggggagctctgccc

SEQ ID NO: 690247 - DNA, 182 bp, Homo sapiens
caccacagggggatggacacactaaaggcgatggacacacgaatggggatggacacaccaagggggatggacacacaaagggggatggacactcaaagggggatggacacacaaggggggatggacacacgaagggggatggactcacaaagggggatggacacacaaagggggatggacac

SEQ ID NO: 690248 - DNA, 335 bp, Homo sapiens
ggaactcgaatgccattctttccactctcatttgccacgtgattgtggggtggaatttttatcttttttctccctactgtgcatactgatttaattttaccaaatgtagacaaatttctttggccaccattggtttggccaccattggttcttccatccattttttttctggggtgaggtttgatcttagtgaagcctagtccaggttatgggtcttactgtgtgagctgctgaccagagtatcagtatcgcctgagagcttggtggtgcaaggtttcaagtcctaccccagacctactgaatcagcctctgggggtgggacaccgtctttgttt

SEQ ID NO: 690249 - DNA, 938 bp, Homo sapiens
tgggcaaggatgccctcttcacaattctccatgacctccgtacccctaggaccggttttcagtatcattggatttgccaagccggatcaaagtatgttgaaggaccacttgatatcagtcactcctagtacagtcatcaggtatggtgaaagtgtacattcgaccatgatgtcacccactgtgaggtgcacagacatcaacggggccctgctagagggccatcaggctcctcaacaagtacgtggcccacagtggcacttggacgacccggagcgtgtccctcatcgtcttcctgacggatgggaagcccacggtcggggagacgcacaccctcaagatcctcaacaacgagccgagaggccgccgaggccaagtctgcatcttcaccattggcatcggcaacgaggtggacttcagtgctgctggagaaactgtcgttggagaactgtggccgtctacgacggcgcgtgtcacggaggatggagggacgctaggctcgcagctcatcgggttctacgatgaaatcaggaccccgtcctctctgaccatccggatcgattatccccccagctcagtggtgcaggcacaagaccctgttcccaactacttcaacggtcggagatcatcattgcggggacctgggtggaccaggaagctgggatcacctgcagcagtggagtgtcaccgggcagcacagtaaggaatgcatcatcctgaagagcaagaatggtgcctgtgcgggcctcgaagcggacacgatgtcccaggaagcgccaggctgagggctgaaaaggggcccaccacatggggcttcggggtcccacgcaagggcggggccggggaaggaagacggcaaagacgcgagaggcacacgcagaagacggtcaacctaacaaagggggcccctacacgagccgtgttgcacaggaggaggcggc

SEQ ID NO: 690250 - DNA, 436 bp, Homo sapiens
  misc_feature (3)..(3): n is a, c, g, or t
  misc_feature (39)..(39): n is a, c, g, or t
  misc_feature (57)..(57): n is a, c, g, or t
  misc_feature (112)..(112): n is a, c, g, or t
  misc_feature (155)..(155): n is a, c, g, or t
  misc_feature (425)..(425): n is a, c, g, or t
  misc_feature (430)..(430): n is a, c, g, or t
cantgtggtaagttttgaagttcgcaaagtgtaagaacncccattgttattgttttnccaagattgttttgtcctgttttgggtcattataatttaggatcactttgttatnaccctgcaaagaagcccaggggagattttgatagtgattgccntaagtcctgtaaatcaattagggaatattgccatctgaacaatgttaagtctttcaatcaatgaacattgaatttatttccatttatttaggttgtctttagtttcttttgacaacattttgtacttttccatatacaagtctggcatttgttttgttaaatttattcccaagattgtttttctttttgataccattgtaaatggaatcattttcttaagttcatttcagattgttaatttctactataaagaaatacaattgattttgnatatngatatt

SEQ ID NO: 690251 - DNA, 835 bp, Homo sapiens
  misc_feature (1)..(1): n is a, c, g, or t
nacgtagggtgagggggggagggagtaggagagcacgcccagcgttttggtccgtgtttcgtgaacccctggttaacgcctttgttacgcgcgttttttgccgcgccccgtcccctgggagtgcacgagaattgtttattccgacccactatttgggtgcccaaaacctaaagggttcccaaaggtcggcaaattgtgcctgacaggatgtgcaaattttggccaaaaacagtttggccggtgtttggccaagctatgccagaaaggggttgcccgtcgtcgcgacaacggcgcgattgttacggggcccctccccgcaagggtggtcccctgattcaggggcctgggtccgcacccgtggctgttggccctgcccgtcaccacatggcgctgggtcaccctgcgggaaatataggagcggcggtgccccagcgacacacggggggcgtggtcccattgggggaccactgtgcgtgtgcgcctcggttaaagttgcgtttcgcttgtcgagacacgccaagccaagtctgtgtgaaacagggggcgtcagcatctaggtcgagaatgggcgccctcgcccctatgcgtctgtaagattcccgctctccgagaccgcgggttcagaatccccagtcctgtcccccatatttgtttctatcaccatggctggtcaccaccagaacaatttggctttttttggatatccggcatcttgctaatctgtctaacccccgatgacattctcgctatgcgcccccagttgctcccgccgacagcgaccacccaatgacacagttctctcccaccaaaaaaatcaatttccccccaaaaatac

SEQ ID NO: 690252 - DNA, 1301 bp, Homo sapiens
tctacgggcgtataaaccggtcccggaaagaagattccatatagaccgactgcagaaatgggagtgtctgcaccggtggctcggagatggaggcttgtcgcggtgaggtgcgcagaccgatggttcacggatagatgtgattggcggtgaagcctggagacacccagaaatagctggacgcgcatgtggaatgatcggtaagaggggtgttgtgagaacatgcctttcatttccacggaccagtatggtcatatgcattcatggatgcactcgtcatgtgcgatcacgtaacgaggtcatgcatcccccgataaactcgttactacaggctattcatgaagggtgaacattaccattcatccatggcactccggagttgcttgatggcttggcacatcgtatggctgtgaacctcactatgatgtaagtgagcaaggttctcggaaaccatgcctagctcatagaggtgtgtgacgacgggtccctgtttcagaaaatcgaactcaggaggcgcaatagagggcttgttgtagcactacttaccgtgagaaggacctggaatgtggtgaaggtggacggacctgcactagaaccgaagcaaggaaagacgtcggccgcggttgagggttgcttttcggacacgggaaccagagaggtacccagatttggactaaaggctgccttccatgggctccaagtgttgagcttgtgcgctgaaagaagtcggtaccatttatgtaaaccgaattgggaagaaggaaggcaatcacggtcaaaggaattttctgtaaccttattacggttcatcacgtcccttaagacccttggggagagaacccaaggagcttcggaacaagttggaacccccttggggacaattcgagaaaagggacacgggaattatattggttgcacgctggcttaaaaaggcacaattccgagagacgcaaacaaagcgcccgtggttcccagcgagttcgtttggggatgacaatatccatccgtttttcacccaaggaaagagacttgtgtgtcccccaaggaccaagatggcaacgaaccgatcgaaaagaaaggggccaagaaatttcctttctggttaatcgacggcaaggaccatcccatttccgccgttgggaatgggtgtggcccgttccgttgcccccattggggattcctggggaagttgggagaaagctttggctctctttggcacgcaatatattcgaccggttcaccattgctttgctagaagaagaagttggcacttttaagaagtgattaatttcccagagaggaga

SEQ ID NO: 690253 - DNA, 216 bp, Homo sapiens
ggcacgagaaaagagaacagaaaacaacaaaagaatttttgtttggactgttttcactaacagtgcacataactggagttttgaacgcttaaggcatcattacttgggacaattttaatgtttattatttacatcactttgtgatttacacagggtttcaattctgtaattacatatttgctcttcaaagggtccaattctcatgtcctttggatt

SEQ ID NO: 690254 - DNA, 201 bp, Homo sapiens
ggtggtgggggtagcgggccgcggcgggtgtggggggggagtggcgtgtcgcatctatttttatttaaaactcacagcaggccaggcatgatggctcatgcctacaatcccaccactttgggaggcgggggcgggcagatccctggagctcaggagttttaaaccagcctgtgaaacatagtgaggccccatgtctgagcc

SEQ ID NO: 690255 - DNA, 348 bp, Homo sapiens
ggccattatggccgggaagagagacagggaaatgctgtaaccgcggttaacacgcacgtgaaggttggttaaggggaagacctgggttttagtcctgtctccatcaacctcaggaaagggaacctcatggaaggaagggaaggcaatgccgaggatgtgctcctgagcaggtgccacaattcttaacctgtaagattgctgacagaaaagtgagacctcttccaccccagggtctcctaagagaatgctgctagccaaaaaaggatctgctgataattgaggaagagcatctttaaaaggacactcaactacatttcagaaccttaaggatctaagggttggttctac

SEQ ID NO: 690256 - DNA, 127 bp, Homo sapiens
ctcgcgctcggttcccctactcttactacttaacactttacacggtacgtttacaaccttactaacacactaccactactttggctgacaggacttacggggactcctctacgacgtcgacccggca

SEQ ID NO: 690257 - DNA, 388 bp, Homo sapiens
  misc_feature (158)..(158): n is a, c, g, or t
  misc_feature (318)..(318): n is a, c, g, or t
gccaaaaaacctttttctttataattttggggggggaatttacttttttccccacaactttttggggggcctatcggaaaggcccgggggtatcggggtacccgaagggaatcccccaagaaaacacctttttttttgggagggtcattcatttctcnaacagcaagtaaaaattaataattttcatgatttgaaaagccttcgctttgaagggaaaagtcctaatagtagaagaaccccccataaacctggaggggttatatggatgccccccccccctcccccccatttgaagaacccgtatacataaaattttgncaaaaaaggaaggaatcgaaccccccaaaggtggtttcaagccaaccccatggcccccatgactttttca

SEQ ID NO: 690258 - DNA, 331 bp, Homo sapiens
tactttcaataattaattaagatattattagattttggaagggccagggaataaagaaaattaaaattaaagccttaggaaacgttcccgattcaagaccctaaattaaaatacagctgctgggcaattataattacattcaaagggaaagagaatttgactcataaatagaaaagcagtttccaccaggctttcaagtacggttaatcccaaaacacaggtgcctggaagatcctcagccaccccttttattcaaaccccaacccttggggactgcctgttgggttcacagaatgttttttactcaaaaggacctttcatccttaaagcc

SEQ ID NO: 690259 - DNA, 282 bp, Homo sapiens
  misc_feature (7)..(7): n is a, c, g, or t
gggaganttagaggatccccgacgttgtacctctgcaggtaagctctgtagggtatcgcaaaaaattctctcatagccaacttttcatgaaacgagagctcttctcattcctgtgttcgtagattttccattcatggattttttcacacgggaccaggatcaggaaacgtgtatttggtgaacaatttccgcagggcaaaaaaccacagaggggtaaccaggacccgtcgggggtacccgaggctcgaatttcggtactcaatggtcataggctgttttcct

SEQ ID NO: 690260 - DNA, 211 bp, Homo sapiens
gcggccgtgttagcggctggtgcatcgttgtgtaattgctgatgtctcagtgaagctgccatgctgcaaaggcctgggtgtggatctactgctaataggggagaggaggatgaatttctgggggtgaacatgggtccctctaggtgaggggaacaattttctgaagagctgattttccttctgaaaggtcagaggcaggacctctttggtg

SEQ ID NO: 690261 - DNA, 105 bp, Homo sapiens
tatcaatcgagccgtaccttcggtgcgatgatcagtaccttggcttttttcaggttcaactggccttcccggccgacgccgggcagggtgatgtggcgtacgtag

SEQ ID NO: 690262 - DNA, 294 bp, Homo sapiens
  misc_feature (48)..(49): n is a, c, g, or t
  misc_feature (148)..(148): n is a, c, g, or t
ttttggggggggccccccggggggggggcccgggggggggttttaaannaccccccccctaaggggggggttttttggttttttcccccccggggcccgggggggggggggggggggccccccttttttgggggcccccttaaaaaangggggggcccccctttttttttttttttcccccccaaccccttggcccccccccttttttctttgggcccggggggggccccccccccccaagggggcaggggggcccggcccctttttttttattttttttttttttttttttta

SEQ ID NO: 690263 - DNA, 280 bp, Homo sapiens
ggtcgaccaataaacagcatgtggtttttattgggtggagggtggaaggcaatccagagaaggaaacaagcccaggtgtgcactagggctgaaggtcactcagataaaaaaaaaaaaaaaaaaaaaaccctgactggacattaaaatcagagagggagcctttaaaataccagtgctggccaggcatggcggctcacacctgtaatcccagcactttgggaggtcgaggcgggcagatcacgaggtcaggagattgagaccatcctggctaatgtcgacg

SEQ ID NO: 690264 - DNA, 190 bp, Homo sapiens
  misc_feature (182)..(182): n is a, c, g, or t
gatcagaggatcctagttaagggctaccgtcatccattgtgatggtctggccccactcagtgactgaccaaaatactggagcctgggagagagcttggagcctgctatccgctggctatgggaggggctgatgccagatcctgaggttccgtgaaaacaggtaaacagcaccccggttgtcnctcctctc

SEQ ID NO: 690265 - DNA, 444 bp, Homo sapiens
ctgcggaaaaagacaccagtaaaagagcctcagctgggcacagatggcggatgcctgtcgtaccagttactcaggtggctgaggcaggagaactgctcgcatcccagacgtggaagttgcaaatgagtcgagatcgtgccattgcactccagcctgggcaacaagagagaaactccatctcaaaaaaataaaaataaaaagaatgaaggcttaccaagaagcctaccccagattcaaaacatagggaacatgcaagggcccttacgatgacagttctttgccaatctggtctgccatcccttgacacccaccaggcttgcaggcgtcttaagcagttccgggcagcaagcttgcagtgtatcctaagccctctgtgagggaagctggtatggaaagagccaaatacaacagagaaggaaaactgagagtggttcattggagtca

SEQ ID NO: 690266 - DNA, 1486 bp, Homo sapiens
  misc_feature (149)..(149): n is a, c, g, or t
tgttgttttatgtgttggtttgttgtgtagtgctgtgtggtgtgtttttgtgtgtgttgtttgtgggtgttgtatgtgttttgtattggtatttttttgtgttgtttttttttttggtgtgtgtgcctgagagtgagatggtgtgtggncgcttatatcacttgtggtgtcaacacccctgttgggtccccctttttatttttgggggcgccgcgctgggtggacccaaacacggggttgtttttatctgtggtcctcgtgtttgttttctgtgtttctatatggtgtgagcgccctcggggggacaatttttgtcctcagggggctctccccttgtgtgtgtttggaatatgtgtgttgtgtgtctcctctgtgggggccacaagtgattgctctctcctgggtggttgtgtccgtcggtgctttatttttcctgggtggctctgtgtggtgtcgccccctctgtctcgtcgcacaagaggtgggggggtcgtccccctcccccctgggggggttttttttgcgctgttttcttctgcctgcccccctccttttcttgtggtttcctcccccgccccacaaaggtgtgttgttttgtagcggcgcgcggcttgtttatggactgttgtgtggttggggtggggggagacacccacccgctgtgtgggggtggacacaaacacactctctgtgtttgtggggcgcggcgcagctgcttacacgctccattggggggattggtggcgctgcgcgcgcttatatattgttgtgttgttttttgttgtgtttttgtgttgtgtgtgtttgttgttattttttattgtgtgggggcgtgagagctcctcgcgaggggttttataaacactcgtggtgcgcgcgcgcgagaagtggggacgcaccacacgccgcgcgggtggtgggcgagagagcgcttctctcctcccacggtgtgtcacacacacggtggcccagcggagctctttgtggtgtgccaccacgctgttgtttgtttttataatatagcgtccgctcttctctctccacatatgtgtgagagagaggcggtgtgttactcacaggagagatctctcctcttcccctctctctttaacctcccccccctgtttttccttaagagagagagaatgtgcgccccccctctctcttctctccacaggcgcaccacccgcgcgagagggggtatatatcacccttgtgtgtttgtgtggaaaaatatatagaaaacccacaatttttttataaatttgtcccctcaaaacctttttatatatttgtgtttatattttgtgaaaaaaagacccctctctggtcccccccctccccccctcttttgttccccccccccaagaaaatatttaagctttttgtgttccccgcgcgaggggggggggggcccccccgcgggttccccgcaccccgacactttagagagccccccgttgaataaaaaggcccccccctctta

SEQ ID NO: 690267 - DNA, 105 bp, Homo sapiens
acttagggtggctctctggtgagttttaaaaacagttattaagccaactagtgaccttccttcgatgacatattctactatgatagtacgttattcttgtacatt

SEQ ID NO: 690268 - DNA, 243 bp, Homo sapiens
  misc_feature (240)..(241): n is a, c, g, or t
aaacgttcaaagactaagaggcaaatgcagactcagcatgagtgagagaaaaagaggagagtgaggcagagaccttgtgatcttggagcagttgtaaagttcaagaatgaatgactccactggaaatataggacaacaccaagtttctgagaacttatcagggcagtttctacacaaaacctgttgcaagcatcccagagaatcacttttgaaatggaaagggcccagagcctagggccnntt

SEQ ID NO: 690269 - DNA, 1979 bp, Homo sapiens
  misc_feature (703)..(703): n is a, c, g, or t
atattatgtcagcaagtaattaacttatgtttaaaaggtggccatatcatgaaaccttactttaaatacaatagtttcaaagtaaggtttcatattatgtcagcaagtaattaacttatgtttaaaaggtggccatatcatgtaccaaaagttgctgaagtttctcttctagctggtaaagtaggagtttgcatgacttcacactttttttgcgtagtttcttctgttgtatgatggcgtgagtgtgtgtcttgggtaccgctgtgtactactgtgtgcctagattccatgcactctcgttgtgtttgaagtaaatattggagaccggagggtaacaggttggcctgttgattacagctagtaatcgctgtgtcttgttccgccccctccctgacaccccagcttcccaggatgtggaaagcctggatctcagctccttgccccatatcccttctgtaatttgtacctaaagagtgtgattatcctaattcaagagtcactaaaactcatcacattatcattgcatatcagcaaagggtaaagtcctagcaccaattgcttcacataccagcatgttccatttccaatttagaattagccacataataaaatcttagaatcttccttgagaaagagctgcctgagatgtagttttgttatatggttccccaccgaccatttttgtgcttttttcttgttttgntttgttttgactgcactgtgagttttgtagtgtcctcttcttgccaaaacaaacgcgagatgaactggacttatgtagacaaatcgtgatgccagtgtatccttcctttcttcagttccagcaataatgaatggtcaacttttttaaaatctagatctctctcattcatttcaatgtatttttactttaagatgaaccaaaattattagacttatttaagatgtacaggcatcagaaaaaagaagcacataatgcttttggtgcgatggcactcactgtgaacatgtgtaaccacatattaatatgcaatattgtttccaatactttctaatacagttttttataatgttgtgtgtggtgattgttcaggtcgaatctgttgtatccagtacagctttaggtcttcagctgcccttctggcgagtacatgcacaggattgtaaatgagaaatgcagtcatatttccagtctgcctctatgatgatgttaaattattgctgtttagctgtgaacaagggatgtaccactggaggaatagagtatccttttgtacacattttgaaatgcttcttctgtagtgatagaacaaataaatgcaacgaatactctgtctgccctatcccgtgaagtccacactggcgtaagagaaggcccagcagagcaggaatctgcctagactttctcccaatgagatcccaatatgagagggagaagagatgggcctcaggacagctgcaataccacttgggaacacatgtggtgtcttgatgtggccagcgcagcagttcagcacaacgtacctcccatctacaacagtgctggacgtgggaattctaagtcccagtcttgagggtgggtggagatggagggcaacaagagatacatttccagttctccactgcagcatgcttcagtcattctgtgagtggccgggcccagggccctcacaatttcactaccttgtcttttacatagtcataagaattatcctcaacatagccttttgacgctgtaaatcttgagtattcatttacccttttctgatctcctggaaacagctgcctgcctgcattgcacttctcttcccgaggagtggggtaaatttaaaagtcaagttatagtttggatgttagtatagaattttgaaattgggaattaaaaatcaggactggggactgggagaccaaaaatttctgatcccatttctgatggatgtgtcacaccttttctgtcaaaataaaatgtcttggaggttatgactccttggtgaaaaaaa

SEQ ID NO: 690270 - DNA, 366 bp, Homo sapiens
  misc_feature (142)..(142): n is a, c, g, or t
  misc_feature (209)..(209): n is a, c, g, or t
  misc_feature (232)..(232): n is a, c, g, or t
tactttccacaggtcacacgacctgacctgactatttacaactcacacgaacctgacctgactagatttacaggtcacacgatcctgacctgactagtttacaatcacacgatcctgacctgactagttacaatcacacgancctacctgactagtttacaatcacacgatcctgacctgactagtttacaatcacacgatcctgaccntgactagtttacaatcacacgancctgacctgactagtttacaatcacacgatcctgacctgactagtttacaatcacacgaccctgacctgactagtttacaatcacacgatcctgacctgactagtttacaatcacacgatcctgacctgactag

SEQ ID NO: 690271 - DNA, 1521 bp, Homo sapiens
  misc_feature (2)..(2): n is a, c, g, or t
cnaggctcgcatgcactactggcacggcgctagcttgagctctagatatactagtgtggctccccggtgcctgctatcgccactgactaggattttttctgacgtgtggctcgatccttctgtgcgtcgtattggcgccctgtagaccatctgagccttgtgctcgccgcccggtactgaatggaacaacacacaaggcatgagagtagcttggcgacaggaaagacgcactcgtcgcctagatatgcgctcgtctcgaggttgcccacatcttcccgtagtatgggcagaccaccaggtcgtactgttggtataccacgcgacacgagcacacaggcacagagactgcatcagatgccgcagctaacagattgatgcccctgacgaccattcctgacctgagagcacacggagggtacccaacaacgcgaaggataacgtcaattcaagtgggataggccactcgctcggagatcctacccggagcgcgagagcctcgtcgtttgcgcaccgaatccaacgacgtttcatttggcggtccccaccgttgagggtgtttgggataccttgtagtggatccattaactcgcccaaccatttcgtgacctcgattacaattttgaggaggattgcacgcacttggtaagttggtgcccaggaacgtaaccaccccaggggtgaaagccatcggcagacaccgggttgtctatttcgattctgagtgtagacttcacccacggcgacagtttagtatcgaacacgtgagtagaatcgccgcaccttttgcacggaacacacttgatgtccgctgaaacaacaaattccaattcccgcctatgacgtttagttggctcaaggaacggcgtaccacactggttccctaggttccccgcgattgtagagtcgacaagcagcgatctcgattatgccctttcgaggacattggggaatgcccctaagtgtagaccatcccgcatagttcgcaaattcgccccgcccattctgttacaacgcacaagtgcgagtaggccccattccactccagaaggcaaacttggcaggaagcaaaccagaaaagtccgccacctgggccttcgtttatatccgccaaaagcttggtttgcgcacggctctaggttctgctaacctatgcgatgcgcattccaggttttgtacaatgccaagccccaagcataggaggctcgtatccaatgacgcacttgcggcatccggtcacatgcctgaaatgcgtgcaaacccacgccgtttggataaggttggcgtaccaacttttgcccttggacccccccccactctgttgccattcagccactctacattgtctcatctttgtcgacaaacattccgtaatggtgccatccctcttcgagcaggccataatgggtgaagcaatatcggaggatatgacaatagcgcgacggccgccaccaacagtcaaagagaaactaaatgggctccgttacccccatgtgtaaggggcatgtctacatcatgtcacat

SEQ ID NO: 690272 - DNA, 745 bp, Homo sapiens
ggagacgtacttcgccgagactcgtcggggatttcctgcttcaacagtgtgctttgtgacggaacccggcgcgtcgtttcgcccacctccggtccggccgtgccattagtccagcacctccgtcaacctcttcaccgcaccctcggtactgccccaaggcccccggcgccgcttccagcgctcgacgcgagactcatcactgccacgcccggcacgtccgacactctacccttcagatcgtccgcctattgagcgacccgacgtgcaccctcgcaaggtgcgcccagaaactaccaaccaggaactcagaaggcccgccatcaacccgccaagatcaacctgggagctctacgcctcctacgttatacctgtcccattgtcttactaacttttgaaccggcgatgcatgctggctcttgaacgaacctttgaccaaaacgtactttcattcaccaaatctcatgagcgagcagggaacactgctgagaaaactgattgacgctgcaagaaccaaccgaggtggcccgaattcttccttcaggatattcaagaaaccagaactgttgatgacctggtgagaagcgggctggacatgccaattggcagtgtgcaattacattttggaaaacaccacatgtgcaactcagttcactaactgggaacttgcacaaaactgtggccactgaccaagaattgaccccccaatttgtagtgaccttccattgaagaacacatttaccctgac

SEQ ID NO: 690273 - DNA, 222 bp, Homo sapiens
aatttaagggctttgggacttaagttactgaaaaggaggtagaaatactctttcattcaaggtcaatcagtttgcattggcttctcatttcttttggggattgtggctttgattcagccaaatactccactattgagtttgatttccttgggtatgcattgttcgtttaaccagtactttaaattgaggctgaggtactgcattaaaggtcctcagtaaaga

SEQ ID NO: 690274 - DNA, 341 bp, Homo sapiens
catgctgggagctgtgtgtgtgtaaaagctgctagataggttgggagctttgcttgcgtggggttcacagctgacggtagaaactggtcgtgactggtatgcccctagggagacgttgggactgtagaggctgacgggaggcagaggctgggcctggaggatccaccaagatgcaggagctgggcctggagaggctgcaaagaagcatgagctgggcctggtgaggtcaacttgagaaagttcagggccaggagagaaggctgggaggcaggagctgggtctaaagaggccattgtaacgatggagctgtgcctgtggaggctgttgtgaggcagtagcct

SEQ ID NO: 690275 - DNA, 667 bp, Homo sapiens
  misc_feature (399)..(399): n is a, c, g, or t
  misc_feature (405)..(405): n is a, c, g, or t
  misc_feature (409)..(409): n is a, c, g, or t
  misc_feature (457)..(457): n is a, c, g, or t
  misc_feature (472)..(472): n is a, c, g, or t
  misc_feature (482)..(482): n is a, c, g, or t
  misc_feature (484)..(484): n is a, c, g, or t
  misc_feature (489)..(489): n is a, c, g, or t
  misc_feature (492)..(492): n is a, c, g, or t
  misc_feature (512)..(512): n is a, c, g, or t
  misc_feature (526)..(526): n is a, c, g, or t
  misc_feature (528)..(528): n is a, c, g, or t
  misc_feature (530)..(530): n is a, c, g, or t
  misc_feature (534)..(534): n is a, c, g, or t
  misc_feature (564)..(564): n is a, c, g, or t
  misc_feature (575)..(575): n is a, c, g, or t
  misc_feature (579)..(579): n is a, c, g, or t
  misc_feature (584)..(584): n is a, c, g, or t
  misc_feature (598)..(598): n is a, c, g, or t
  misc_feature (612)..(612): n is a, c, g, or t
  misc_feature (623)..(623): n is a, c, g, or t
  misc_feature (654)..(654): n is a, c, g, or t
gaaaggcttgtaaaaaaataacggcaaatgtccggttcctctccccaagcaaagatgtccttttccatagaccgcccatagagattaacctgaaaattaagatccaccccctccagttcttgtccggcccgctggccttgtttctcttgcggtgtttaacgttcccttgtgtcgatatttcctttcagacaaaggaaataaaggccgcctgaagttctggtgcacgaatgtaaagagcatggaaatgctggtgaagcacaaggccaataacatcctcacctagggccccctggttccccgtcgtgtctcctttgactcacctagagaggcgtttgcagccaatgaagctggctgctcagacggtcgacattgaatttgggtgggggttgggatcctgtntaaagnacanactgttcttgctctaaaaacaggactgtccctgatgggagccaggccncagggaggaggcttntttgtgggtntntcctncanagggtgggggtctcagggtnttaggtgatacggnananaaanaacgtgccaggcaggaggccccctgaagtntgtgtactccnaggnggatntccatccccatccncctgtacggacatnttttccgttgnggtttgagaatgttcctataataaacccctntgctttgttttta

SEQ ID NO: 690276 - DNA, 293 bp, Homo sapiens
  misc_feature (259)..(259): n is a, c, g, or t
tgacaggagcttagcacgagtcttggagagtgggtgtggtcagctgacttctttctagatcactattaagccattctgctgggaatgatatctggttgacctgagtgcacagtcaagtttaggggacagggcagagggcaaggaacaaaaagggagacgaaggaaggaatgagcaaggcaggggaaaagaggaaggaggacgaactggtaacaaggtgtgggcacggagtgtggctagcagagcctctgagggaggtgngccccaccagaacagaggctccctctgcctgggg

SEQ ID NO: 690277 - DNA, 866 bp, Homo sapiens
ccatgcatcgtattcacacttggtgcgacggcaacatcatgaccattggatggataacagaggtctatggatattatgatgagctgccaaaaccgaatatggaaatgctaatgcctgtagatactgtaccacagttgatgacgtgctcgcagaagcggtttcagtagatgaccagattgtgtgtatcctatgcagattaatctcctgagtatctcaaaactacgtggatcaaattcatagaccaatcggaaacgggaatcgaggaatagttccttcaataacaggtaggcattattagtgatcgtggtaatgcgtcgagatcgcttgacagatgtggatcaacgttaggagctcatcaatcgcccgatgagcatgattcggctatattagcgtagccaaaccgcgcttaccatcctatatgtaacatttgttgcataatcacgcgaacttaagaaactgccattcgttgtccacgaagtcagcatcatactaggttgcacgtaagtgctataactggtatgttggatgcagatagcttgcgtgacagtcattggtctgctcctgagttactggtctatgcggtgtgctcggaaatgattgctctcgatcagtcggtgctgtgccaagatgattgtaagatataatcaaagtatgaaccaaaatgctatgatatctcggtcaagttgtccagatatcttgaaccgtgtaatttcctcccagaattgatcgagacccataatatcccttgtgaaggctgtacgcacatacctgctgacgcgcattttttctgccctcttcttacccccaaattgtccctttgtaatttaccctctacaatatacttttttaattggggcactcttgag

SEQ ID NO: 690278 - DNA, 111 bp, Homo sapiens
  misc_feature (14)..(14): n is a, c, g, or t
tctgttctgtggancaggaggcagttgttttccgtccggcttctcccacaccgaagtgcgcgcctccacctcatggaagactccgatggatatggacatgagtcctcttag

SEQ ID NO: 690279 - DNA, 827 bp, Homo sapiens
  misc_feature (22)..(22): n is a, c, g, or t
  misc_feature (143)..(143): n is a, c, g, or t
  misc_feature (145)..(145): n is a, c, g, or t
  misc_feature (177)..(177): n is a, c, g, or t
  misc_feature (246)..(246): n is a, c, g, or t
  misc_feature (330)..(330): n is a, c, g, or t
  misc_feature (355)..(356): n is a, c, g, or t
  misc_feature (371)..(371): n is a, c, g, or t
  misc_feature (436)..(436): n is a, c, g, or t
  misc_feature (446)..(449): n is a, c, g, or t
  misc_feature (453)..(453): n is a, c, g, or t
  misc_feature (461)..(461): n is a, c, g, or t
  misc_feature (466)..(466): n is a, c, g, or t
  misc_feature (481)..(481): n is a, c, g, or t
  misc_feature (490)..(490): n is a, c, g, or t
  misc_feature (502)..(502): n is a, c, g, or t
  misc_feature (520)..(520): n is a, c, g, or t
  misc_feature (525)..(525): n is a, c, g, or t
  misc_feature (532)..(532): n is a, c, g, or t
tgatctcgccgcggttccgcgngcctgccgcgccgccgccagcagagcgcaccgggccgatcgggcgagtggccatggcgggcgccgaggactggccgggccagcagctggagctggacgaggacgaggcgtcttgttgccgntngggcgcgcacacgccggggcccgcgagctggntgcgctctactcgccaggcaagcgcctccaggagtggtgctctgtgatcctgtgcttcagcctcatcgnccacaacctggtccatctcctgctgctggcccgctgggaggacacacccctcgtcatactcggtgttgttgcaggggctctcantgctgacttcttgtctggcctggtnnactggggtgctgacncatggggctctgtggagctgcccattgtggggaaggctttcatccgatccttccgggagcaccanattgacccannnnctancacacggnacganttcatcgagaccaanggggacaantgcctggtgagnctgctgccgctgctaaanatggnctacaanttccgcacccacagccctgaagccctggagcagttatacccctgggagtgcttcgtcttctgcctgatcatcttcggcaccttcaccaaacagatccacaagtggtcgcacacgtacttgggctgcactgctggggtcaccctcctgcaggactggcattgtcattcctgccacgtaaacagcatcgaatccaccacgtttcaccccaagagacctactttctgcatcaccacaggctggctcaagtaccctctggagaagataggcttctgggacgccttggagacctcatccg

SEQ ID NO: 690280 - DNA, 1905 bp, Homo sapiens
  misc_feature (1905)..(1905): n is a, c, g, or t
aaatacagcctcaacagattaaaaaacaaaagtcacacttaagtgatccttctagtcacatcagcagtgttctgccttatatgtagtagtttgggcatcatcaatcccttccaccaccagcccctgaagggcaaaggctcaatcttcacggcatcaatcccacgtgcagcatttcccaccacaagcagcaaaagcaccacgccatcagtgcaacatagtccagtacttttccagtcacatcgcagtgcatcacctattcacagggccacatcattcggcactcgttctggaccaacccaccacaccataacatcaagcttagcacaccagcatccacaggcattatgcgcatcccaacgcacacagttgcattcactgtgcaggtggtatcagggcattgcatcactttatggacattgtcaaacacagcacaggccaccatccacctcttttgtcgccccacacccatccacataggccatttacagttgatcttaccacacaacacaacaaggcacggtgcacaccatggtagcaacacaaaacacagaagaacaaaacagccacaaatatcgcgcgacaacgcattggccttaggcataccacacatagtgatacaggtaacgatacaactcattacacgtggaacgtgcacactgcttcttggttcacttcagttcacttcagaacattccacccattggaggactacacggcagcaataaccaacgacacagactggacactctggcttatcgcacaccacatatccctacacgtgaacacatctggttaggccgatacacacatccacacggtacattcaaacaacaccaccacaccacacgcaactatatcacattacttcattccattctacacaccagacagacaatagacaggaagaggagagaaatcggttcgaccacaaccacaaggaataccataaagcgacaggatatgacccccacacaaagtagtgcaccgtgtgacacacacacaaaaaagcgcgggcgaggccacatggcggcccaccaatggcgaccacaaacaaaattcaccaccatcgacacgcaaattccaacgcacaccatcaacattgcgaaaaacgaggggcgacaacaacgaaaacgcaacacaccccgacaccaagacctacactcacaatcatcacccacataccgatgggaaaagagtacccccatctagcacaggcaacactacatcgcgcacaccacaccgcgtactacaacaggtgcacaagatgacaagactgcgcaagccacacaggagtctaacacgcaagcaagcgacagacgctgcaacaccacccaacgagcagcatacaacaaccaccgaatacacagaggagaacaccacatggcactcagatcaacacagtgaaagaacaaaacaccgacccaggtaaaacaccagcccacaaaccacagacaaacactgccgaagctgtgacaccgaggcacacacatcaagcaaccaacaccgcaagcacacaacgcaacaaaggatggacacaaccaagatgcgggcactgctcacagcacacaaagagcggcaaccgcttccatagcatacacactaaaaacgagctatcaaataactatttaataatacacactactacttacaatttataatactacaaaaaatagaataaagataacacagacacgaaaacacgacataatcacaaacgcaagcaaactcatctcatccacctctacatcatatcacattaaagacaaaactacacatcacaacagaacacatacacaaccacaaaactcaaataaaaaaaataacatctaataacaaaaactcaccaacagaaacaacaaaaaagacatctctcgatactctatatctacatcaaccacactacan

SEQ ID NO: 690281 - DNA, 386 bp, Homo sapiens
  misc_feature (34)..(34): n is a, c, g, or t
  misc_feature (377)..(377): n is a, c, g, or t
  misc_feature (379)..(379): n is a, c, g, or t
  misc_feature (381)..(381): n is a, c, g, or t
gccccccggtatgttgcccttgccatcccacagnggagcacctttccatttattaatttatttgtaaattagaattattaatatactcccgagttaatagccccgaggttgatagaaacccacttggagggaaaactaatgcaggaacagaaaaccaaatactgcatgttcctcatttataagtgggagctaacattgagtacatatggatgcaaagaagggaacaacagacactgggaaaggagaggatcaaaagactccctgtggagaactgtgcttattgcctgggtgatgaaataatctgtacaccaaacctcgctaacatgcagtctacctacataacaaacctgcccatgtacccctgaacctacaattanantnatttt

SEQ ID NO: 690282 - DNA, 480 bp, Homo sapiens
cctacaaccttcctgtactatttttttttcttggcttgtaaatgtgtgcttataatttctgcaagtcaaattgtgatgcagatgagatacaagtataaacttgcatggtgcatccagaaaataaaaagcacaagtatacaggtttagttcaacagcttattcccttataaagaaaaaaaaaagttttgaattaatagctagtttatcttcagttgtaaaaacttggaggtttaaacaaactcaagattttatatacagctaaattattttacatttcccaaatcttccacagttacagcatttttaaacaatagtaaattgctctcattcacagactctcacgtgtttaagacttatttccacattcccaattctcagattaaaaattttcacaattatattaaatccatttgagaatttctgttccacaaattacgagtttttagaaattctgattttcaaattttaaattacaaaaat

SEQ ID NO: 690283 - DNA, 1196 bp, Homo sapiens
ttgtgtaatattggttaatgatgatacagttaatatgtttaaataaattttgttgttattttcttatataacgactagacatatagtatagaatattttaccgataatttacacattgggaaatatatttgatatgaattccaatgtcgctggttttgtcaatttgtgataatataattaagggtgtatggatgtttattgaagtggttaatggatagaggggtgaggtgtaggcagtttactatgagggggttattatatttgcagtggttgaagggcatcatttccgattagtagtgtcttacaaggtgaaggaagactgtgacgaggtacgactaccatcggatgcaaaaaattgtcaacccttccggctaaccgatggaggtcatattccggcttaattcgccgcccacccatgccgttgctaataccttatttctgatggctgggatctgcgccaagcagcttccagcgggaatggcgtatacgtgtgaatccgaattctgcttgtcatgtgtcttccgaggccccctatggtattgcaatcgttttctcttttccagcctctggtacgcgttggtctctgactgggcattgtatttgagctggaagctgcaggtcacgtaggagcatcggtgacgtagcgagcgaacatcgtagatacgtttgtatgctcagcgtgtcgcactagtgtcctagtcaataggagctgtatttgccagtcatatggaggctgtcattcagctgaggttcccctagttctcaggctacacccgtagaccaatacctatcgccaataatccagtttcactagtcatagttcagtcggctgtaaatcgtaagcgtttcttcccagcaacactttgctcggcctatccggaagtgccccgacgttagctcggactaccaccgatgcatacaccacatgaaacatcctatcatctgtaggctcattcatttctctaacagcagtaatattaataattttcatgatttgagaagccgttcgcttcgaagcgaaaagtcctaatagtagtatagaaccctcacataaactctggtagtgactatatggatgccccccacgcgctaccacacattcgaagaacccgtatactataaaatctagacaaagaaggataggaatcgaaccccccaaatcaacgtctcaagccaaccgcctgctcaagctgggg

SEQ ID NO: 690284 - DNA, 417 bp, Homo sapiens
gaagaaaatcagatggatctgtgtcctctagctgcaaataacaagtaaaagctataaaagatactgagagcagagaacgtctctacacaaaagacttctgacattacacctcagcaagcaacagctgttgtccaagcaggaaatttccccacaacagccctcaaggtctgcacagcacattcaagatgtcagcaggcaaaatctcaagcaacacgttcagcccatcaaagcaggcaagcttccacaggttctcgatttctgcaagcaagtcaagcaacatccagccagccacctccctggcaaacaaatccattgtccatgaggcaatccctaaaactcccaggcctcagacgcagtcagaatcatgctgagattaaagccatttctactccagcatgacataaacgcaggtcaaag

SEQ ID NO: 690285 - DNA, 102 bp, Homo sapiens
ttcatgtattgctgcttctctctctacggcctcatccaggtaccgctgcttttccgttggctgcagacttgctaccagtcggacgcccatgcatcattggtg

SEQ ID NO: 690286 - DNA, 491 bp, Homo sapiens
acgctagctcactgttcaggcttatccatgtgaacttctgcctctgacggtacgcaggtataccatctatgacacatctgtctagatttcatacctgagcttatagcacaggcagaaccgttgagaaaaccagatatttgctatccaagtagctttctcaactggtgatatacgaatcatagcattaccaaagtcattggtggtcttagcgtcagtcagggacttttacagttacaaggtaagcggtatgcttttatgccaatcgcaagtggctcttttgtgacattcctcctgttgaggatatatgtcttgcgatcaaatagggcagttgtgcctcgatgtgcactcagacaagagacatgatcattattaccgtctcacaaataaggagaaccagggaggtccaatctgtaagatcatctataaaggatccggacacgaacatggatcctgatgtcgctcgtcatgatgaagacagtatgaataatatt

SEQ ID NO: 690287 - DNA, 523 bp, Homo sapiens
ttttggaagttgaagctggaggattccttgaagccaggagttcgagaccagcctgggcaacaaagcaagaccctgtctctacaaaaaataaaaaataaaaattacctgggtacagtggcacacacctatagtcccagctactggagaggctgaggcaggaggattgcttgaagccaggagttcgagaccagcctgggcaacaaagcaagaccctgtctctacaaaaaataaaaaataaaaattacctgggtgcagtggcacacacctatagtcccagctactggagaggctgaggcaggaggatcacttgagtccaggagtttgaggcttctgtgagccatgatcggaccaatgcaccccaacctaggcaatacagagagagagagaccttatctcaaaagaaaaaaaaaaaaaaacattgagtctgggggttaatagcacagcaatccaccattttatctttgctgcccaagacaacaaatatggacatggctttctgttccttaaacccttttaaaaggtt

SEQ ID NO: 690288 - DNA, 164 bp, Homo sapiens
  misc_feature (64)..(64): n is a, c, g, or t
  misc_feature (74)..(74): n is a, c, g, or t
ttaaggatcccacgctcctgtgcaagcacatcatgtctatctgaatggagctctcaagaacaancattgcttangaagactgcgctggaaacttattttaataacacccatgacaacactctccagatctgcttaccatcattcatgacaacaaagcagtctgg

SEQ ID NO: 690289 - DNA, 363 bp, Homo sapiens
ggcctggaatggcccagggtccccaaggcaaagttggggttggtcccagcctgaggctccaggtgatgccctcagctccccgggggggggttccccatttagttgggtgcaggggtcattgcttgtcagctcagggcccttttcccgcttgccttttcccctacatttgtgcctgcacatccagaaatgcctcctttccgctgcctccaggaagccccccttgagcccgggtcaagggttgcagcacttcccgttagaacacgccccccctcactgttttttttgccttacagcccccatgggaaaggtgcaacctttttgttttttttaaagaaagcccaaccttaaagggttttccttgca

SEQ ID NO: 690290 - DNA, 389 bp, Homo sapiens
gatgaggagaccatagcaagccactagaaccaaggccagctgcagtgttgatcgatcccaatcccgaataaagaataaagatctctcaaaaaaaaaaaaaaaaaaaaaaaacacattggtgggggggcagacgccacagaaacagcattcaaaaaacaatctcggtgggcggccgggggcccaagagatggaagtacaatgggcacaaacacggggtcccaaaggagacactcggggccaagagaacatggaggtgtgtttccacccaacattaacacaacgcgccgggggagacacagagaggggttgtgaccaactccaacgagggggacaagacgacaaacagcgggcccacaccacaggagtccaacagagaggccagaaaaaaa

SEQ ID NO: 690291 - DNA, 301 bp, Homo sapiens
  misc_feature (33)..(33): n is a, c, g, or t
  misc_feature (66)..(66): n is a, c, g, or t
  misc_feature (101)..(101): n is a, c, g, or t
  misc_feature (223)..(223): n is a, c, g, or t
  misc_feature (289)..(290): n is a, c, g, or t
gcccatatcagggctggtctctgtggaactcancccagggctgcctcctctttgtcacccccaaantggggcagcccagggacagcccagggtgtgttcanaatgggttccttctgcagggcaggaagggcagattgttaaagggctgcggcccagaccaccctggtccctctccgggcagtgactcagacccacactgtgccgtgcagactttgccctgcanacccgcttgacggcgcactgctcacttctggggggccctttcagaggcacttttaaagcaaataanncatttattgtt

SEQ ID NO: 690292 - DNA, 284 bp, Homo sapiens
ggtgcgacctaaagaaaaacaaccagacaggtgcccaatgacacttacaaaggtgatttattatcttgccaagtttaggctgggcatggtgactcatgcctctaatcccagcattttgggaggctgaggctggtggatcaccggaggccaggactttgagaccagcctgaccaatatggcaaagcatcgtccctgctgaggatacaaaaattagccgggcatggtggtgtgagcctgtagtcccagctactcaggaggctgagaacaggagaattgcttggatt

SEQ ID NO: 690293 - DNA, 144 bp, Homo sapiens
ctagaggacccttcatgtcaggcttcatgccgtcagaggagtctcaggagacaggaagtggctgtgctccacagttgcaggtgagcgtggcggtgccctgctcaggcactgcaggaagcggcgcttatgctctgcactgttgcc

SEQ ID NO: 690294 - DNA, 882 bp, Homo sapiens
  misc_feature (882)..(882): n is a, c, g, or t
catcgataataaccaataatcatacaaatcaataaaaaaggaaaccccttaaggtttagccacagaagaggcttttatccctcaccacctgtttttgttccagcaccaggaaccaatgaagaagatggtggggttattctttctcgggcgatcactgcgaccaaaatgaaacgaaccatctcctaaccttccctgcccgtattatcaaatacatcagctctattctacgccacctgcgcatacacccattcgtttccactcatacacccattctcatttttttttcttcacaaccaaactacagcccctctcattccagtccgcgtacctcagccgccccgcccacctcctacacccccccctccacaccccacaatgagcgatctgcgaaaatatcaaaacaaaacttcccccacacccttcacactccttccgagactcttgtcgccccgagctatccatctcataagatacccctcgcccccggcctctcactattacaaataacacatcaatataaactttccccctcaaactacagccccccctaaacctcaactcgtgcccaaccgacattaaatctaagcaacctgccccctcccgagcttttacacagatcatttctcatcatacttcacttttcgccgctccccgtacaacataacaaactcccaccacaccatccacctctccctcaccccgcccacacacttagctctctatactccccatcccatcgctcccacactccgacctctcctcatcgctccgttttgtccgattaccgattaaacacatgaattcgaaaccactctgcctctcatcacgcagacccctcaacaccctcgtcccaactcacactcttttctctctttctccttn

SEQ ID NO: 690295 - DNA, 411 bp, Homo sapiens
  misc_feature (52)..(52): n is a, c, g, or t
  misc_feature (56)..(56): n is a, c, g, or t
  misc_feature (93)..(93): n is a, c, g, or t
  misc_feature (96)..(96): n is a, c, g, or t
  misc_feature (111)..(112): n is a, c, g, or t
  misc_feature (137)..(137): n is a, c, g, or t
  misc_feature (142)..(142): n is a, c, g, or t
cacgagggcacatgcagtccatcgcgccgctgatcgacctgccacaggtcanacgncgcctgatgcgccaaccacgattccgcgctcttgccnaangccatttcgagccgnnccgccatttcgggcgtgatggaggnatggncgttgacgatctcggacagcgttttccgggacacgtccaaggcagtggccgcctcggtgatggtgagcttcagcggttccagccagagttcatgcaggatctcgccaggatgcgggggattgtgcaggcgcatggtgtgtttcccttggtgggatgagagcgaatcgaagcgcaggagattgcctcaacgcgctgccccactcttccagaaaaaagcccccttcaaaccctcacctccaccgtccgaaactgctcgttcgactccagga

SEQ ID NO: 690296 - DNA, 127 bp, Homo sapiens
tcgggattctgatccaacatcgagatcgataaaccctattgttgatatggactctagaataggattgcgctgattatccctagggtaccttgttcccgtatggtcaagttattggatcaattgagta

SEQ ID NO: 690297 - DNA, 1143 bp, Homo sapiens
  misc_feature (884)..(884): n is a, c, g, or t
  misc_feature (888)..(888): n is a, c, g, or t
  misc_feature (892)..(892): n is a, c, g, or t
  misc_feature (909)..(909): n is a, c, g, or t
gccttctctcgccaggcgtcctcgtggaagtgacatcgtctttaaaccctgcgtggcaatccctgacgcaccgccgtgatgcccagggaagacagggcgacctggaagtccaactacttccttaagatcatccaactattggatgattatccgaaatgtttcattgtgggagcagacaatgtgggctccaagcagatgcagcagatccgcatgtcccttcgcgggaaggctgtggtgctgatgggcaagaacaccatgatgcgcaaggccatccgagggcacctggaaaacaacccagctctggagaaactgctgcctcatatccgggggaatgtgggctttgtgttcaccaaggaggacctcactgagatcagggacatgttgctggccaataaggtgccagctgctgcccgtgctggtgccattgccccatgtgaagtcactgtgccagcccagaacactggtctcgggcccgagaagacctcctttttccaggctttaggtatcaccactaaaatctccaggggcaccattgaaatcctgagtgatgtgcagctgatcaagactggagacaaagtgggagccagcgaagccacgctgctgaacatgctcaacatctcccccttctcctttgggctggtcatccagcaggtgttcgacaatggcagcatctacaaccctgaagtgcttgatatcacagaggaaactctgcattctcgcttcctggagggtgtccgcaatgttgccagtgtctgtctgcagaatggctacccaactgttgcatcagtaccccattctatcatcaacgggtacaaacgagtcctggccttgtcgtgttgagacggattacaccttcccacttgctgaacaaggtcaagcctttntggntganccatctgcctttgtggntgctgcccctgtggcttgctgcacaaagctgctcctgttgtgtgaagcccaagctaaggttgaacgccacggaagagtcggagagtcggaacgagcactatgggcattcggtcctcttggactaattcaccaaaaaaggaaccaattagccaggttgtactgtggacaaaccaggcaaccttacgggctacgttctttacaaagtcacgacaaacacaaaaacgacacccaaac

SEQ ID NO: 690298 - DNA, 164 bp, Homo sapiens
  misc_feature (68)..(68): n is a, c, g, or t
  misc_feature (161)..(161): n is a, c, g, or t
acctctagtgtgtggagtagatgcgagtagtacgaatataatagtaactagatgtatgtagggtgtcnggagaactgctatatcatcccaaagggcattatcgagaatcacaaaaacatagctcatcatcccaccatcatagcaccatcaccctccttaanctc

SEQ ID NO: 690299 - DNA, 391 bp, Homo sapiens
  misc_feature (55)..(55): n is a, c, g, or t
aagaggtggataatgtttcctaaagtgaatggcatgtgtaccaacctctgaaggntaaatactgtaagaatgcagtctcagatgaggagcatgagaaaggaattcagacgagttggaattgcatgctttggtattatgtggaggagaggaaaggagataatattaatgatagaatgacaaagttgagttcttaaacattaagaaatttttaatgtttttccaatatttcttcaaattttatcattcatatagatcacaaaactgagtgatcatgagagaaaccaaacattgcctatcttcacttttagacacttggaaagaaactgcagcatttttcctgaaggtcagcagatttccagtgacgtcaccttaattattccccactgtacac

SEQ ID NO: 690300 - DNA, 1031 bp, Homo sapiens
  misc_feature (772)..(772): n is a, c, g, or t
  misc_feature (776)..(776): n is a, c, g, or t
  misc_feature (780)..(780): n is a, c, g, or t
  misc_feature (797)..(797): n is a, c, g, or t
gccttctctcgccaggcgtcctcgtggaagtgacatcgtctttaaaccctgcgtggcaatccctgacgcaccgccgtgatgcccagggaagacagggcgacctggaagtccaactacttccttaagatcatccaactattggatgattatccgaaatgtttcattgtgggagcagacaatgtgggctccaagcagatgcagcagatccgcatgtcccttcgcgggaaggctgtggtgctgatgggcaagaacaccatgatgcgcaaggccatccgagggcacctggaaaacaacccagctctggagaaactgctgccccatgtgaagtcactgtgccagcccagaacactggtctcgggcccgagaagacctcctttttccaggctttaggtatcaccactaaaatctccaggggcaccattgaaatcctgagtgatgtgcagctgatcaagactggagacaaagtgggagccagcgaagccacgctgctgaacatgctcaacatctcccccttctcctttgggctggtcatccagcaggtgttcgacaatggcagcatctacaaccctgaagtgcttgatatcacagaggaaactctgcattctcgcttcctggagggtgtccgcaatgttgccagtgtctgtctgcagaatggctacccaactgttgcatcagtaccccattctatcatcaacgggtacaaacgagtcctggccttgtcgtgttgagacggattacaccttcccacttgctgaacaaggtcaagcctttntggntganccatctgcctttgtggntgctgcccctgtggcttgctgcacaaagctgctcctgttgtgtgaagcccaagctaaggttgaacgccacggaagagtcggagagtcggaacgagcactatgggcattcggtcctcttggactaattcaccaaaaaaggaaccaattagccaggttgtactgtggacaaaccaggcaaccttacgggctacgttctttacaaagtcacgacaaacacaaaaacgacacccaaac

SEQ ID NO: 690301 - DNA, 225 bp, Homo sapiens
agagatacatccccccctggcatctctggagaggaagaaggatggggtgtgcagaaggggctttccccaaacggctccccaggctggcacttctgggccggtgccccactcagtccctgttgacctcccccaccccccgcgaaagaggaaccaaaaccagaaaagaacaaagcatcctccgccccggacccttgaggctgggtctcccccagccctgccactttc

SEQ ID NO: 690302 - DNA, 124 bp, Homo sapiens
tttcagaacctaggggtcctactccaggggaggcagctccatctcgggaagaccaatctgcagagaacgagtcctagtcaagtggaacctaaattctcagtttacccccggaagggagcccaaa

SEQ ID NO: 690303 - DNA, 352 bp, Homo sapiens
tgagccggaatctcgctctgtcgcccaggctggagtacagtggcgcaatcttggctcctggcaagctccacctcccgggttcacgccattctcctgcttcaggctcccgccaccacacccggctaatttttttgtattttcaatagagacagggtttcaccatgttagctgggatggtctcgatctcctcacctcgtgatccacctgcctcggcctcccaaagtgctgggattacaggcgtgacgaccacccccggccgagacatggtacctgttttttaattaacctattatcctttaaatacagttctctagtgggcctctctgatgttgcttatagaataaaacgtcga

SEQ ID NO: 690304 - DNA, 877 bp, Homo sapiens
  misc_feature (104)..(104): n is a, c, g, or t
  misc_feature (132)..(132): n is a, c, g, or t
  misc_feature (141)..(142): n is a, c, g, or t
  misc_feature (291)..(291): n is a, c, g, or t
  misc_feature (308)..(308): n is a, c, g, or t
  misc_feature (320)..(320): n is a, c, g, or t
  misc_feature (331)..(331): n is a, c, g, or t
  misc_feature (345)..(345): n is a, c, g, or t
  misc_feature (347)..(347): n is a, c, g, or t
  misc_feature (370)..(370): n is a, c, g, or t
  misc_feature (384)..(384): n is a, c, g, or t
  misc_feature (419)..(419): n is a, c, g, or t
  misc_feature (441)..(443): n is a, c, g, or t
  misc_feature (476)..(476): n is a, c, g, or t
  misc_feature (483)..(483): n is a, c, g, or t
  misc_feature (517)..(518): n is a, c, g, or t
  misc_feature (587)..(587): n is a, c, g, or t
  misc_feature (603)..(604): n is a, c, g, or t
  misc_feature (629)..(629): n is a, c, g, or t
ctcccccaggatgttgcggaggctgctggagcggctgcacgctggcctgcttgtgggctcccagctggctgtcatgatgtacctgtcactggggggcttccgangtctcagtgccctatttggccgagatcngggaccganntttgactattctcaccctcgtgatgtctacagtaatcctcagtcacctgcctggggccccagggggtcctcacgctcctcaaggtctgccctactgtccagaacgatctcctctcttagtgggtcctgtgtcggtgtcctttagcccangtgccatcactggcagnatgattgtggangctggaagtcnccgggtagaaccangngggccggtaccggcctgcaggtngtgagcgccgctcncgaacagccatcattgtgcctcatcgtgccctggnagcacctgctgcgtcctgctgnnncgtaccgacctgcaccccttcttgcagcgccangcagctngcttgatggcatctatgtcatccaccaggctggnnaatggaacatttaacagggcaaaactgttgaacgttggggtgcgagaggccctgcgtgatgaagagtgnggactgctgttcttgnnacgatgtggacctcttgccagaaantgagcacaatctgtatgtgtgtgagccccgggtgaccccgcctatgttgccgtcgctatgaagcaagttgtggataccagcctcccgtagcccccagtacttcggattgagtctcacgcacttactcctgaacaggtacctgagagatgcaatggcttccccaatgaatactggggctgggggtggtgaaggattgacgacattgctaccagggtgcgcctgggtggaatgaagatctctcggcccca

SEQ ID NO: 690305 - DNA, 1100 bp, Homo sapiens
  misc_feature (841)..(841): n is a, c, g, or t
  misc_feature (845)..(845): n is a, c, g, or t
  misc_feature (849)..(849): n is a, c, g, or t
  misc_feature (866)..(866): n is a, c, g, or t
gccttctctcgccaggcgtcctcgtggaagtgacatcgtctttaaaccctgcgtggcaatccctgacgcaccgccgtgatgcccagggaagacagggcgacctggaagtccaactacttccttaagatcatccaactattggatgattatccgaacagcagatccgcatgtcccttcgcgggaaggctgtggtgctgatgggcaagaacaccatgatgcgcaaggccatccgagggcacctggaaaacaacccagctctggagaaactgctgcctcatatccgggggaatgtgggctttgtgttcaccaaggaggacctcactgagatcagggacatgttgctggccaataaggtgccagctgctgcccgtgctggtgccattgccccatgtgaagtcactgtgccagcccagaacactggtctcgggcccgagaagacctcctttttccaggctttaggtatcaccactaaaatctccaggggcaccattgaaatcctgagtgatgtgcagctgatcaagactggagacaaagtgggagccagcgaagccacgctgctgaacatgctcaacatctcccccttctcctttgggctggtcatccagcaggtgttcgacaatggcagcatctacaaccctgaagtgcttgatatcacagaggaaactctgcattctcgcttcctggagggtgtccgcaatgttgccagtgtctgtctgcagaatggctacccaactgttgcatcagtaccccattctatcatcaacgggtacaaacgagtcctggccttgtcgtgttgagacggattacaccttcccacttgctgaacaaggtcaagcctttntggntganccatctgcctttgtggntgctgcccctgtggcttgctgcacaaagctgctcctgttgtgtgaagcccaagctaaggttgaacgccacggaagagtcggagagtcggaacgagcactatgggcattcggtcctcttggactaattcaccaaaaaaggaaccaattagccaggttgtactgtggacaaaccaggcaaccttacgggctacgttctttacaaagtcacgacaaacacaaaaacgacacccaaac

SEQ ID NO: 690306 - DNA, 92 bp, Homo sapiens
gctggtacggtcggaagtcgtggatcgccgccatctcttccgtgaggcgcgctgagacccggaccggccctcctgagaggatgccggtgcgg

SEQ ID NO: 690307 - DNA, 520 bp, Homo sapiens
tggttctgtgctcaagtgagtggcttcattcactattcatcctttgtgactggcttatttcattcggcataatgtcctcaaggttcatccatattatagcatgtgtcactatctccttccttttgaaggccgagtaatactccactgtggtgttggaccacatttttgtttatccactcacccctctatcaacacctgggatgtttccatatcctggctattgtaaatagtgctgctatgaagatggatgtacaaatatctgagtccctgctttcaattcttttgggagtgtatcaagaagtagagttcctgaatcatattttttaattttttgagaaactaccatactgttttccatagcagatgcaccattttgcattctcaccagcagtgcacaagggttcccatctctctacatcctcgccaacatatgttatttctggttctgaaagtggtcattctggctgggtgccatggttcacaccagtgatcctaatactttgggaggcacagatagcag

SEQ ID NO: 690308 - DNA, 914 bp, Homo sapiens
ggatcccaggaatcctgtgagcgtgcaccagtgagcagagcagtcatctacgcgtccatctgacttctggcaacgaccgtggtgtcacacccgcggtacctggagctgctggagcgcacgagtcggcccctcaaagatcctgacggcaccaggtgctcaacgacccgtgacgatggaggtggagcatctgatcctcggtcgagtgcaaaggcactcacttggcaacgacggggcgcccactacatcctccgacctgcatgcagcaccttcccccacggacactcaacttcctgccccgtgccatgggcgaggacgctgccctgagggaaatagcgccccagacgaccgtgaattcccacacgtcgtacaaccgagaacaaagatatgatgacatgcggcccaaaggagcatgaataggaagtgactattcaagggaagcagaaggataagcgtcctctttaatgaaagctggtccgctttgcagcatgaatgcaaggaccagaaacgaacagacccagcatggaacgaacccacccacgcacaacactggaaaaagcggatggcaccaatcgcatccaattaggagcaccaaaagctgaagggagtccatacgaagaaacgtgagtgaccgagaaaaagtagaaggaagcgaaggggcaacaagaagacaaaagaaagacaggaacgaaagaagaaaacgaagcgcggcgagacagcaccaagacgcgagataaagcaagacaggcagagggaagccagcagaacaggagaaagacgcgagaggggaacagaaagaggacgaaggcgacaaggcagagcgagatcgaacgaggaggagaagagggagagagagaagaaccgaaaacggagaagaaaaacaagagagcacggggggaggggagacgcagggcgac

SEQ ID NO: 690309 - DNA, 349 bp, Homo sapiens
  misc_feature (315)..(315): n is a, c, g, or t
attcttctgcctcagcctcccaagtggctgagactacaggcgcgcaccactacgcccggctaatttttgtatttttaatggagacgggtttcaccgtgttggccaggatggtctcgatctcttgacctcgtgatccacctgccttggcctcccaaagtgctgggattacaggcttgagccaccgcacctgggcagaggcgggtaaattttgattttactttttcatatagcaggggctgccatctcttatcccccaaccccatgacagggcagctgtgggggactgcagtttccccattcctcgttgcagcttgntgggacctggggggtgaggcaataaagggacctt

SEQ ID NO: 690310 - DNA, 768 bp, Homo sapiens
  misc_feature (334)..(334): n is a, c, g, or t
cgccgccttttcatcccgcgcgtccagtctctccacgccgccttttcctcccgcgcgtcccgtctctccacgccgccttttcctcccgcgcgtcccgtctctccacgccgccttttcctaccgcgcgtccagtctctcaacgccgccttttcctcccgcgcgtcccgtctccccgccgccttttcctcccgcgcgtcccgtctccgcgccgccttttcctcccgcgcgtcccgtgtccatgtctcctccttgtaacattggagagatttccttcactttgtgcctttttctccatcgattgatttctttgttttacgtttaacaattaaagtcnaatttctaagagtgtttgtttcctctttattttttattcacagcatcccctccgtgtttttatgttcttgaggatttcaattaggttttccttctccctgagttctcatctgttccctaattatctcttgtttcctaaagggtccatttttgttttttaatcgttattctcctcttactcctctgtgagtaaatctctgtggttattcattcgtattaaagaccaaggaactgaattgatttttcttgatggatgagatgggtctgtataatagtagctacatccattgcccactcacacattctatcattaactcatttaatctgcacagtagccctatagggcagagtttctctcattgccattttacagaatagatgactgaggaccagagaggttaagaaattatctccaggacgcgccatcgtgcgctt

SEQ ID NO: 690311 - DNA, 353 bp, Homo sapiens
tgggtacagtgacgggcttatgtacagggtcttatccgtagatggtaagttctgggtatcaggctcggtatgaacatgtttaacctctattattgaatatacaaaagttataagaagcaattacgataaccaaaatttccagataagctctatcctcatatccattttctactacacaaggcaggtggacttggcacattcttatccatttgttttacaacgaaacaaagctggtgcctggtgaagaccaaactgacttgcgttgcaggctacattagcgtacgtggcaaacggcacaacgtagcaaccaacggtctcacgggttcagatgcttttggcaccatatcactggt

SEQ ID NO: 690312 - DNA, 280 bp, Homo sapiens
aacattttcttatttttcagggagaaccaacttaataccacgaccggaaataaaacgggcacccctccctgaggaccggggacttccacaggttaccaccggcagccaccccgggggcaccacccaactcagagccggctaaacttggggcccaggccctgaaaaaggccaactgcccaaggaacttaaaactcggggggccctaaccaacccggtgaaccctggggaaccgaggtccccgggcaccccaaacctccagccagctcgggccacccaaccg

SEQ ID NO: 690313 - DNA, 353 bp, Homo sapiens
  misc_feature (164)..(164): n is a, c, g, or t
  misc_feature (263)..(263): n is a, c, g, or t
tgagaggtcctttggctcctgggactctgcccgcagcccacgggggcctggaagtaccagggggactgtaggcccccaggttccccaggagagaggcgggtcacaatgtgagggcttgggtccagagcacctgctgggttgattctgttttccctgtagccagnccatgaatgcccagagactctgcagaacatcagctggtgctgctacctttaaagcatttgtgatcagtctcttgtttagctatgattcattagttgatnctgaaattgctcttattgaaatttgatagatagcattaggattgttaagtactgtttttcaaataaagattgtttaatataaaaaaccca

SEQ ID NO: 690314 - DNA, 138 bp, Homo sapiens
tagaatcacgctcggtacccaccactcctatagatcagtgctcttccgcaatgctgaacaaacggctaatcatcagcctaataatgactaatcacatactataccttccaccacaaaaatgatatctatacatcaaca

SEQ ID NO: 690315 - DNA, 292 bp, Homo sapiens
  misc_feature (124)..(124): n is a, c, g, or t
  misc_feature (147)..(147): n is a, c, g, or t
  misc_feature (168)..(168): n is a, c, g, or t
  misc_feature (213)..(213): n is a, c, g, or t
  misc_feature (221)..(221): n is a, c, g, or t
  misc_feature (252)..(252): n is a, c, g, or t
  misc_feature (261)..(261): n is a, c, g, or t
  misc_feature (268)..(268): n is a, c, g, or t
  misc_feature (280)..(280): n is a, c, g, or t
  misc_feature (282)..(282): n is a, c, g, or t
cccctgggggttgcaggttggggtgcctcaggcccctccttcagcctgtggccccctttggggcacgatgggggctcccccctgcccagtttgcccctcgggttgggggagtatcccaggcctntttgtgggacctgggcccctgangggccttttcagcccgttttnaggacaaacagtcccccaaggtagggtacatcccccccccccagntggtttgnttggatttcctccagcccccgggggcatggnccccctttnttttatncaaaattaaaancnagtttttcca

SEQ ID NO: 690316 - DNA, 201 bp, Homo sapiens
ccctccccaactcccgacactcagcagactggtttttaaatttttttctttcttggacattcttacaacatattttttgacttaagaatgacatctttagacgcatttcagagccaatgatgatatttgctttagataattattatattattataaaaaaacccatattattttgaattcaaataaatttttatcctggta

SEQ ID NO: 690317 - DNA, 491 bp, Homo sapiens
  misc_feature (8)..(8): n is a, c, g, or t
  misc_feature (89)..(89): n is a, c, g, or t
  misc_feature (91)..(92): n is a, c, g, or t
  misc_feature (100)..(100): n is a, c, g, or t
  misc_feature (111)..(111): n is a, c, g, or t
  misc_feature (114)..(115): n is a, c, g, or t
  misc_feature (125)..(125): n is a, c, g, or t
  misc_feature (140)..(141): n is a, c, g, or t
  misc_feature (147)..(147): n is a, c, g, or t
  misc_feature (150)..(150): n is a, c, g, or t
  misc_feature (152)..(152): n is a, c, g, or t
  misc_feature (158)..(158): n is a, c, g, or t
  misc_feature (161)..(161): n is a, c, g, or t
  misc_feature (166)..(166): n is a, c, g, or t
  misc_feature (174)..(174): n is a, c, g, or t
  misc_feature (186)..(186): n is a, c, g, or t
  misc_feature (194)..(195): n is a, c, g, or t
  misc_feature (199)..(199): n is a, c, g, or t
  misc_feature (205)..(205): n is a, c, g, or t
  misc_feature (208)..(208): n is a, c, g, or t
  misc_feature (211)..(211): n is a, c, g, or t
  misc_feature (214)..(214): n is a, c, g, or t
  misc_feature (216)..(216): n is a, c, g, or t
  misc_feature (223)..(223): n is a, c, g, or t
  misc_feature (227)..(227): n is a, c, g, or t
  misc_feature (237)..(237): n is a, c, g, or t
  misc_feature (260)..(260): n is a, c, g, or t
  misc_feature (277)..(277): n is a, c, g, or t
  misc_feature (295)..(295): n is a, c, g, or t
  misc_feature (299)..(299): n is a, c, g, or t
  misc_feature (307)..(308): n is a, c, g, or t
  misc_feature (336)..(336): n is a, c, g, or t
  misc_feature (340)..(340): n is a, c, g, or t
  misc_feature (345)..(345): n is a, c, g, or t
  misc_feature (455)..(455): n is a, c, g, or t
  misc_feature (486)..(486): n is a, c, g, or t
agttgtgnggtttctccaagataaatttaacagctccagcttcagtgtttatcaaaatacaaaagaaaaaagtagaggttgtctttttngnngggaaatnggacccttgcnggnngggggagagnaagctagatgagagnnggaggnggngnggtcgnggnggggngggggtgngggggggggggntggggggnntggngggggnggnggnggngnggggggngagntggtgggggngtgtgtgagggggggggggtgtnggggagggggggggggngtgtggggagaggggggngggngggagagnngggggggtgggtgggatagggtgggtgngggngggtnggggggggtgggcggatagtggggtgggtgtggggtgggagggtggggcctgggaagggtgggaggggagggagaagcagatgggtatggaatgcagggtgagggaaggngaagggagtgggggggatgtgtagtgtgagnatgga

SEQ ID NO: 690318 - DNA, 947 bp, Homo sapiens
  misc_feature (182)..(182): n is a, c, g, or t
  misc_feature (184)..(184): n is a, c, g, or t
  misc_feature (192)..(192): n is a, c, g, or t
  misc_feature (198)..(198): n is a, c, g, or t
  misc_feature (625)..(625): n is a, c, g, or t
  misc_feature (710)..(710): n is a, c, g, or t
  misc_feature (785)..(785): n is a, c, g, or t
  misc_feature (817)..(817): n is a, c, g, or t
  misc_feature (829)..(829): n is a, c, g, or t
  misc_feature (844)..(844): n is a, c, g, or t
  misc_feature (847)..(847): n is a, c, g, or t
  misc_feature (887)..(887): n is a, c, g, or t
  misc_feature (903)..(903): n is a, c, g, or t
  misc_feature (928)..(928): n is a, c, g, or t
  misc_feature (932)..(932): n is a, c, g, or t
aaagggaagctgtgacgtgtagattatttacggggcagactggtaagcgtgccctatcgtttgtccagcagaagtttacgtcttccagtcgttaagtcttttttgaaatagtctgtaaagtaagtggacatgccggtataacgggttaacagtgtcaaaactggggtagaagggattttatntnttcccaanagggtnccatctttgctatctgttgatcagccttagaaaatctaagtatgatcaataaattttaatggttgatggcatcctgtgtcagctggagtagttggttgtgaatattaaaacctagtactattttccctcagtaacatgtaattgctacattttttataagaaggtatggttagaaaaaaatgtgaaagatcacttaaaccaaagccagttacaaggagtaatctctcctgttggtttaccttcacctcagaactacaagaatattacaatacatagtgaatagttgtctgtgacatttctaccagttgtttcagtaacatattggtcttggcatttcttggcactgtggttctgctgttattatttgttgatgtcttattgtttgtgagccttttgttttttttttaaagaaaaaacaaaaactaanttgggactaagttatgttaaaaattgttgttcagttaccaaaaaaatttatttttcctcaaaatcccctaaaatttcctgaattnccattccaagttctttttaaaactcctttccctgcctgaaataaccaaaaaaactttttaattttcccacctttncctaataattccctaaaaaaaatttttgaaanaaatgccttttnccaatttgaaaatgnttnttggccataccttttttttgcccgaaaaaaaattttttcnctgttaaaccacaaantggcccttggtttccaattttttgntttnttaaaactggaactt

SEQ ID NO: 690319 - DNA, 237 bp, Homo sapiens
tatggcatcatttcctggaggtcaacatgaagggctttgacatctgctgtggctctgtcctctccgtttatgtgggctcggggcctccctaggccactggcctccaccgctatgtctggctggtttacgtgctggactggccgctaatgtgtgacgtgcccatcctctgctaccgttctggtgaccaccgtggcatattcatggtggcgtccttccgtaaaaagtatgtgctcagga

SEQ ID NO: 690320 - DNA, 413 bp, Homo sapiens
  misc_feature (91)..(93): n is a, c, g, or t
  misc_feature (100)..(100): n is a, c, g, or t
  misc_feature (106)..(106): n is a, c, g, or t
  misc_feature (115)..(115): n is a, c, g, or t
  misc_feature (122)..(122): n is a, c, g, or t
  misc_feature (162)..(162): n is a, c, g, or t
tctagaggatcgccaaggttacatcacggggagggaaactccttagggggacacttacagatcttccttctgcatccattcaccatgcttnnngtaagtntcgatnttgatgttntccccanggttacagaagagaatggtgagcaattgccatgttacttngtcatggtaagcctacaagaagttggaggagttgaaactaagaactggacggtccccagaaggctcagcgagtttcagaatttacaccggaaactcagtgaggtatgaatactcatgaacgcagtattctagaattactgcacaagagctcatttcaattttacacataagaaagctgattaatcttcttcctttgctgttgatactggcacagtggcattttcatcctgacatttggaaatttactcata

SEQ ID NO: 690321 - DNA, 157 bp, Homo sapiens
  misc_feature (9)..(9): n is a, c, g, or t
  misc_feature (27)..(27): n is a, c, g, or t
  misc_feature (116)..(116): n is a, c, g, or t
  misc_feature (149)..(149): n is a, c, g, or t
ttcctgggntgaatctaaaataaattntgaaatgggttagggtagagtgaaccatcatcttactttactttccggatattcttgtattcctttccctacgtgttaaagacctacanattttccttagctccccagtgcagtggacatgnttcaggtc

SEQ ID NO: 690322 - DNA, 213 bp, Homo sapiens
accacccacccccaccacccaaccttagggttacaagtaaagatgttccccaaaacttctggctgattttatggctaaaaagttttcattggatttattaataacccatgttttaccttttgaaaaaataaatgaaggatttgacctgcttcactctgggaaaagtatccgtaccattctgatgttttgagacaatacagatgttttcccttg

SEQ ID NO: 690323 - DNA, 103 bp, Homo sapiens
gagttgtgggaggaagagagggctgggaaggtaagtgtgtgcattggtgtgtgtgtgagggttcacctgccaatgctgagtacgactgagcactttaggtcta

SEQ ID NO: 690324 - DNA, 100 bp, Homo sapiens
ctagagttcccaggcacagctctactttaattgtttctgaaacccttaaagtaaggagcagcaatttcctgtaatagtgcaatagtaaatatttaggcta

SEQ ID NO: 690325 - DNA, 367 bp, Homo sapiens
ttcaaccgggcgaaaccatctttatcgaaaatggcagcagcaatgccctactcgcccggactctgggcgagcagaagaaaaatgtcactatcatcacggtcagcagctacatcgcgcatttgctgaaagacgcgccttgtgaagttattttgctcggtggcgtgtatcagaaaaaaagcgaaagtatggttggccctttgacacggcagtcatccaacaggtgcatttcagcaaagcatttattggtattgatggctggcaacctgaaactggatttaccggtcgcgatatgatgcgtaccgatgtggtcaatgccgtgctggaaaaagagtgcgagaatagtcctgactgacagctcgaaatttgg

SEQ ID NO: 690326 - DNA, 135 bp, Homo sapiens
actgtaatatgtatttactcactacttgaaatgtgtcgttgtatttacttgcctgcagaaggtcagcccacaaagcagacttacctgttctgtacttctgggccagcacagatcctgagcccatagtaggtgctc

SEQ ID NO: 690327 - DNA, 237 bp, Homo sapiens
cggtcatcgtcgtggtcgttgggtggaaagataagtgaatataatatatgggcttggagtcagataaattgtagtttgaatactgtctcaaattcttattcattgtatggcattcatcaactgagagtctgcttatcagtctggtgggataaaggaggtaaaataatcactctccaatgacaaatttgagtatctgtttaattttgacaacacatttgaaaaccacgacgacgacga

SEQ ID NO: 690328 - DNA, 238 bp, Homo sapiens
caccggctgtgtgtctggcactaggtgagtgtccgagtttctagtatccgtgtcatcgtaactagtgaatctgctctctttctgccccgcccttcgctacggcttcatgcatatctcccccattgccaacactctgtaggcggactcccgctcccgccctttctcctcatgcacccggcctcgtctctgtagtctctgcacttgtctcccattaaggtcccatccatggtgcggcgga

SEQ ID NO: 690329 - DNA, 1105 bp, Homo sapiens
  misc_feature (585)..(585): n is a, c, g, or t
  misc_feature (661)..(661): n is a, c, g, or t
  misc_feature (668)..(668): n is a, c, g, or t
  misc_feature (685)..(685): n is a, c, g, or t
  misc_feature (692)..(692): n is a, c, g, or t
  misc_feature (704)..(704): n is a, c, g, or t
  misc_feature (728)..(728): n is a, c, g, or t
gtctcgtgatttggcttcttcctcggcgttttgtccaattcttgttcttatttagtgtaagcttgttggtgtatcttgtgatcttgtttcatacttatttggtttttgtcgtcatttcctgttatgatgttttccttttattgcacatgatctgtgattttccctggctcaatacctaatctcttgccattttactgggttttttatagctatcctgatgtgtcttttttcttttcacattagtttgtgtcatttttaccatcttctttgtgatttcttgtgtgggttccagtcatttatgtattcggtttcctgctaaactttggtatgttttctctgtgtctgcattgctctgtatatgactgttcctagggaacctttttttacaattgatgggactgaccatcttctcacaacttcaggtacttcactgtgtcccggtacatgtccccatgaagatgaagtccagtctacaatggacatgctcctggggcctccctcaagtcctgtgtgtattgaacggcacagaggcggcgctagctgagccacctaaatcccaggacggtaagggccgggcggggccancctgccgcaggctgtccgcagcagcaagatcgcggctgtcggcctgcaagcagcagtgaggctggcagcctgcagncgtgtcnaggagcccgccaggtgnccgcgcnaggcctcagtcntcctgcgggttccgccgccctccnggagaggtggccgccatgcttcttgtgccgaccacgccccaggacctccggagcgccctgcagggccgggcagggggacagcagggaccgggcgcagccctcccccttcggccgcccggcagtgcacgcggcttgttgacttcgcagccccgggcggagccttcccgggcgggcgtgggaggagggaggcggcctccatgcactttatgtggagactactggccccgcccgtggcctcgtgctccgcagggcgcccagcgccgtccggcggccccgccgcagaccagctggcgggtgtggagaccaggctcctgaccccgccatgcatgcagcgccacctggaagccgcgcggccgctacgtctttgggtttggatg

SEQ ID NO: 690330 - DNA, 217 bp, Homo sapiens
caagatctagaaaatagcttcagaagggcaaatccaagaattattggccttaaaggaggtagagagagagagataatggtggaaagtttattcaaagggataataagataccttcccaaacaaaagatatcacagtttaagtacaagaaggttatagaccaccacgcagatttactaaaggagattactcacggcatgtatacaccctacccaggtc

SEQ ID NO: 690331 - DNA, 945 bp, Homo sapiens
ggtacccggagcacggaggatctcgccgggttaacgttcacctcggtgtgctgctgcaaccctccgcttcctctcctaggcgacgagatcccagtggactagaagtgcaccatgtctattgcgtcaagatccatggccgagggatcatctttgacggtctcgcgcggcaatcccaacttcgttggacggttgatctcgttcagccttcaaaaggtcgtcttcaggacgcttgcgtgtgcccatgtggtgctttgcagatctggtatctatcgaggccctagatgctcccgcgtgacattgatagagactgcgcttatgattgggcgaacgtggtgtcctcctaaatggctgtatggagcgacttcccattaaagaactctgattggcgcctggacctcggtgtagcgaaccgaaaggtgaactgtgcacagagacacaggagaacgcatgttgactacaacacctggatgtgatgcgaccgatgcgagtgggaacaagagcaaagtactagtccgaagggtttggtgtcgtcgagagcggccgctttctcgcgtgctgttgttcgcctctggccagttgtgccctgagtcgtgtgccgtcctgtctgactaaggagcgggtccccacactagtctcgggcccctgaattacgcttgaacttcgagctcggtcatactaacttgaactgaccattccttgacacggttcaaccgcgggtaacaaaggagttcatccattgggcacggattcacactgctaggtggaaccatgggtgaggcaatgcattcgagggttcgcattgaatccttccacagtcacgattggcactgaaaaggttccacgggaaggccaatgggcggtttcgcgagccgggagcgttcacccgcagagctcgaagtgaatggctcagtcaaccgacagaaaattatgggaggagattgccac

SEQ ID NO: 690332 - DNA, 642 bp, Homo sapiens
  misc_feature (12)..(12): n is a, c, g, or t
ctttggaaagcnttcccaagaaagatggaaacaaagaagcccagactctgaagactacaataaatacataattctagatcgcgagcggccgcccttttttttgtccgccacacgtaactgagatgctcctttaaataaagcgtttgtgtttcaagttaaaaaaaaaaaaaaaagaaaaaaaaaaaaaaataaaaaaaaaaaaaaaaaaacaaaaaaaaaaaaaaaaaaaaaggggggggggcccgagaaacctcccgggggggccccctttgttcgacgagctttttgtgagaagaagggggctgccaaaagataggtgtctgttagaaaaacatcagaaaacgggaggggagattaaaacaacaccggaagtgataggaggggcatagaggctatgaggtcggagggatgtctcttgagagaagagggaaactattctttattggtgggggggggggaagaactaggtggaaaaagtacgcaccggagaataatgtttaagaggtggtaaagggtaaatattcatgacttggagggcggtttattatggtggtctagacgtcacggggatatgatggagggaggggttagaaaaatgtgttctctacggagaggtgatatctgaatatatgttttccgggg

SEQ ID NO: 690333 - DNA, 639 bp, Homo sapiens
ggccgggcgcgggggttcacgcctgtaatcccaggtctcagtgagggtaagcaggcgggaggataggcttgagcccagcgagttgctgaagtacctgtcctgggtcaagtatagcgagaccccggttctcaccggaggcacaagagaagtcaaacaatcacaataaaagcaaagtcgacgcaccacggagagggctatgaaagaactgtaaatgataccagaacgtaaggaggcgcgtcgagtgaccgaaatcacgtgtcgtcaggcaaggcacacaataggacggtcacccgaagacagaacacgagatagacaactttggtgggaaatcgatgctcaacaattacacaaaagcgcgcgcgggagggtaacgaacgggcgtgtggtggagaaaaacagactcgagacgagtgcgtgcacacggggccgggcttccaaaggaggagagacacaacaagtggagaggccacacagggcgagaaggaaaagaaactaactacatatgggccgacccacaagccgggaggggggacagaatggctcccagaaaaaataaccaaagaaagaaaaaagcaaaattccaaaaaaatttggaacagacgccaagaagaagaagaaaaaggctaaaccgaaggaata

SEQ ID NO: 690334 - DNA, 756 bp, Homo sapiens
  misc_feature (1)..(1): n is a, c, g, or t
  misc_feature (70)..(70): n is a, c, g, or t
  misc_feature (126)..(127): n is a, c, g, or t
  misc_feature (134)..(136): n is a, c, g, or t
  misc_feature (144)..(145): n is a, c, g, or t
  misc_feature (157)..(157): n is a, c, g, or t
  misc_feature (162)..(163): n is a, c, g, or t
  misc_feature (194)..(194): n is a, c, g, or t
  misc_feature (196)..(196): n is a, c, g, or t
  misc_feature (218)..(219): n is a, c, g, or t
  misc_feature (222)..(222): n is a, c, g, or t
  misc_feature (227)..(228): n is a, c, g, or t
  misc_feature (254)..(254): n is a, c, g, or t
  misc_feature (289)..(290): n is a, c, g, or t
  misc_feature (293)..(294): n is a, c, g, or t
  misc_feature (319)..(319): n is a, c, g, or t
  misc_feature (338)..(338): n is a, c, g, or t
  misc_feature (567)..(567): n is a, c, g, or t
  misc_feature (586)..(586): n is a, c, g, or t
  misc_feature (603)..(603): n is a, c, g, or t
  misc_feature (607)..(607): n is a, c, g, or t
  misc_feature (630)..(630): n is a, c, g, or t
  misc_feature (744)..(744): n is a, c, g, or t
ncccccggctactgcctgggaggaaaccccgctgttcgcgttgctcacattcgccttttcgagtacaaanacagcttcaaggggcctcacctgtgtgcagagcgacgggaccttgcccttcttggnncactcgnnnaattctannccaaattcaaancaaannctaatatcaccaactttaaaaaaccaaaaangntcagtgtggacaaaaacaaaannggnctttnngaactgggaagttgaggtgacatttnttttttttttttttttttttttttttttttttttnnctnncaattttggtatgcagaaaaacaangcttggagggccctgtgtntggatcagctgatctgtggaatggtgttggaatattttttgattcttttgacaatgatggaaagaaaaataatcctgctatagtaattataggcaacaatggacaaatccattatgaccatcaaaatgacggggctagtcaagctttggcaagttgccagagggacttccgcaacaaaccctatcctgtccgagcaaagattacctattaccagaacacactgacagtnatgatcaataatggctttncaccagataaaaaagantatnaattttgtgccaaagtggaaaanatgattatccctgcacaagggcattttggaatatctgctgcaactggaggtcttgcagatgaccatgatgtcctttcttttctgactttccagttgactgaacctggaaaaganccgcccacacca

SEQ ID NO: 690335 - DNA, 694 bp, Homo sapiens
  misc_feature (222)..(222): n is a, c, g, or t
  misc_feature (236)..(236): n is a, c, g, or t
  misc_feature (391)..(391): n is a, c, g, or t
  misc_feature (422)..(422): n is a, c, g, or t
ttatgaggggtttggtggcgcggtcgggggggcccccgctgtttttccctataaaacgcggggtctccctccggtttttttgtggggggggggatatttttccccggcacttttttctctggcttttttggcccttttaaatgttgtttaaaaacgggttggggggggggtttttcgggattttttccccccggtgggggggggttttctaaaagccccccngcccctctgaaaanattttttttaaaaaagggggggccgggaacccaggtgtgtcccttcccccttccggggggggttttccaaaaccgggtggccttccctgctggttgagggtttttttccccccccctccccgtggggggggggacattgggcccccgaaaaaaanaataaaaccccccccccccgggtgggggggnggggggtttttttttttttttaaaaccccccccggggaaaaaaagggggggggccggggggggttttttttttttcctttttggtttggggttttgcccccccccccccccgaaaggggcttttcctttttccggggtttttttttgggggggggccccgccccccccccccggggtttttgggggggggggggggtttttggggggcccccctttttttttttttccgggccccccggggggttttttggcccccccccccccctggggga

SEQ ID NO: 690336 - DNA, 124 bp, Homo sapiens
atacaacatattcaatcgagctcgttaccccaggtagactaacactactactaatcagccataatcatacaaagcccccgcacaacaggatcctcccgaatcaaccctgacccctctccttcat

SEQ ID NO: 690337 - DNA, 423 bp, Homo sapiens
tgcggtggctcacgcttgtaatcccagtcaataatttgggaggctgaggtgggtggatcacctgaggccaggaattcgagaccagcctgaccaacatggtgaaaccctgtctctactaaaaatacaaaaattaactgggcgtggtggcggagtgcctgcaatcccggccttttctttctttttttgtggagacagtcttgctctgttgcccaggctggagtgcagaggtgcaatctgtggttcactgcaacctccggctccacctcctgggttcaagcaattggtcctgcctcagcatcctgagcaagtcgggatttacacggcactgcggcaccacactccaggctcactgatgcaactcgtcggcggcctcaccctcgcacacggagcccagaccggctgcccgccccgcccagacccccc

SEQ ID NO: 690338 - DNA, 1042 bp, Homo sapiens
  misc_feature (15)..(15): n is a, c, g, or t
  misc_feature (33)..(33): n is a, c, g, or t
  misc_feature (39)..(39): n is a, c, g, or t
  misc_feature (941)..(941): n is a, c, g, or t
  misc_feature (1041)..(1041): n is a, c, g, or t
acgggacaaccaaantaaggctaggtcgaggcngggtgntgaatcggccgaggcggcggcagggctgagccagcgacgccctccattcactctccgcgcccgttctccggctgtcctcccgttccgctgcccgccctgccaccatgacggaacaggccatctccttcgccaaagacttcttggccggaggcatcgccgccgccatctccaagacggccgtggctccgatcgagcgggtcaagctgctgctgcaggtccagcacgccagcaagcagatcgccgccgacaagcagtacaagggcatcgtggactgcattgtccgcatccccaaggagcagggcgtgctgtccttctggaggggcaaccttgccaacgtcattcgctacttccccactcaagccctcaacttcgccttcaaggataagtacaagcagatcttcctggggggcgtggacaagcacacgcagttctggaggtactttgcgggcaacctggcctccggcggtgcggccggcgcgacctccctctgcttcgtgtacccgctggatttcgccagaacccgcctggcagcggacgtgggaaagtcaggcacagagcgcgagttccgaggcctgggagactgcctggtgaagatcaccaagtccgacggcatccggggcctgtaccagggcttcagtgtctccgtgcagggcatcatcatctaccgggcggcctacttcggcgtgtacgatacggccaagggcatgctccccgaccccaagaacacgcacatcgtggtgagctggatgatcgcgcagaccgtgacggcgtggccggcgtgtgtcctacccttcgacacggtgcggcgggcatgatgatgcagccggcgcaaggagctgacatctgtcaccggcccgccatgtggggaaactccaaaaggggcaggccctcagggggggccncgccggggaggggccccgcgcaaacaagaaaggggcccacacacgggaaaaaaccgcacacaaatttgccttagctagccttttgttgttttttcctggng

SEQ ID NO: 690339 - DNA, 759 bp, Homo sapiens
  misc_feature (26)..(26): n is a, c, g, or t
  misc_feature (34)..(34): n is a, c, g, or t
  misc_feature (49)..(49): n is a, c, g, or t
  misc_feature (65)..(65): n is a, c, g, or t
  misc_feature (70)..(71): n is a, c, g, or t
  misc_feature (79)..(79): n is a, c, g, or t
  misc_feature (91)..(91): n is a, c, g, or t
  misc_feature (103)..(103): n is a, c, g, or t
  misc_feature (106)..(106): n is a, c, g, or t
  misc_feature (124)..(125): n is a, c, g, or t
  misc_feature (129)..(130): n is a, c, g, or t
  misc_feature (174)..(174): n is a, c, g, or t
  misc_feature (183)..(183): n is a, c, g, or t
  misc_feature (188)..(188): n is a, c, g, or t
  misc_feature (200)..(200): n is a, c, g, or t
  misc_feature (222)..(222): n is a, c, g, or t
  misc_feature (248)..(248): n is a, c, g, or t
  misc_feature (274)..(274): n is a, c, g, or t
  misc_feature (278)..(278): n is a, c, g, or t
  misc_feature (284)..(284): n is a, c, g, or t
  misc_feature (293)..(293): n is a, c, g, or t
  misc_feature (306)..(306): n is a, c, g, or t
  misc_feature (368)..(368): n is a, c, g, or t
  misc_feature (385)..(385): n is a, c, g, or t
  misc_feature (395)..(395): n is a, c, g, or t
  misc_feature (412)..(412): n is a, c, g, or t
  misc_feature (415)..(415): n is a, c, g, or t
  misc_feature (419)..(419): n is a, c, g, or t
  misc_feature (431)..(431): n is a, c, g, or t
  misc_feature (434)..(434): n is a, c, g, or t
  misc_feature (441)..(441): n is a, c, g, or t
  misc_feature (497)..(497): n is a, c, g, or t
  misc_feature (508)..(508): n is a, c, g, or t
  misc_feature (522)..(523): n is a, c, g, or t
  misc_feature (526)..(526): n is a, c, g, or t
  misc_feature (535)..(535): n is a, c, g, or t
  misc_feature (577)..(577): n is a, c, g, or t
  misc_feature (612)..(612): n is a, c, g, or t
  misc_feature (614)..(614): n is a, c, g, or t
  misc_feature (618)..(618): n is a, c, g, or t
  misc_feature (661)..(661): n is a, c, g, or t
  misc_feature (679)..(679): n is a, c, g, or t
  misc_feature (695)..(695): n is a, c, g, or t
caccattttttataccaatctccatntttttttnaattctatttattanttttatatcttttttnacttnncctccttntatcttctcttnattttccttttnctnaattttttacctttcacnntcannactttttacactctcatttccccttactttcttaattacttctnccccttctntcatnttcccatccttntctattatatctactccaatanatacactcttcatatctattactttntttattatactctttttcctccctanttcnccatcntttctcctntttacatttattncaacacctccttcaactactttttccacatatttctcctctttcattatataacccttttcnctctctattactaatcnctttaccatnatcttcttctctccctntcnattntttacatctacnttntctctcncctttatcactatctttctttttatcctcatcttctctatttcctcctcctcttcntttacttctanattctcactctttnntantttatcctncttcccaatcttcacatcttctacacttttttctctcatttnttccatttttcatcccctcttatttttcttcttantntatnctttacatctctattcattataaatatttcaaatacacttttnctcacatctcctatatcntttcttcctaccttcnctcctttcaccccctctatctccccacccctcttctttctcccaataaaatcatctttttcttt

SEQ ID NO: 690340 - DNA, 498 bp, Homo sapiens
gatccccgcaaaggagccaggagcgtagcgtccttctggaggggcaaccttgccaacgtcattcgctacttccccactcaagccctcaacttcgccttcaaggataagtacaagcagatcttcctggggggcgtggacaagcacacgcagttctggaggtactttgcgggcaacctcctgcctgtagatggccggggaaggctctagaaaaggggcgcattgcgatccaaccatcggcagccgattccgtgtcttgatcacggggtgggagggaaccgtggcgtccctgcgtggggcccatgggtgagacactccagtactgagacctagagtccagatgcttgtaggagccaagtcgtgttctaagtatttatttaaaacaaaagaatcacgttttcccatttcttcagcgctagcccctgttttgcacagccgagtactggcgagtatgttctatgttgggcctcctgctgcaaaacaataaacagaggacgcaga

SEQ ID NO: 690341 - DNA, 671 bp, Homo sapiens
aaggctctagaaaaggttcgcattgcgatccatccatcggcagccgattccgtgtcttgatcacggggtgggagggaaccgtggcgtccctgcgtggggcccatgggtgagacactccagtactgagacctagagtccagatgcttgtaggagccaagtcgtgttctaagtatttatttaaaacaaaagaatcacgttttcccatttagaatcctcaaccgtgcggaccatcaaccttcgagaaattccagttgtctttttcccagccgcatcctgcctgtagatggccggggaaggctctagaaaaggggcgcattgcgatccaaccatcggcagccgattccgtgtcttgatcacggtgtgggagggaaccgtggcgtccctgcgtggggcccatgggtgagacactccagtactgagacctagagtccagatgcttgtaggagccaagtcgtgttctaagtatttatttaaaacataagaatcacggttttccattttgtaaaataaaaaatccacttttcaagtcattgtcatgcctatggttccatgtttgtacaagctccattggggtggtctatttcaaccatgaggcagctcgttttggctccttaacaagcaggaatttgcatggtggcccgctttcactacgatatttttcctcttgcttt

SEQ ID NO: 690342 - DNA, 352 bp, Homo sapiens
  misc_feature (352)..(352): n is a, c, g, or t
cagagacgctgttattcagacattatgatctcgatgcgcaaatggcattgcacatcctcgatttgccggtgtgacatatataccggctgccggatctggcgcattactggaactcaggagcgactgcagaaggggccaatgctcatggtatcgccacgctaagtatcagacatcgtgctcatgacatcacttgcacactatcgctgaacgaagtccatttactgacaaatgcctagtcataccgtaaggtgtagggccatgtctaatggtttgaacgtgaactcgtgcttagctcctgacgttcaggcacatgcacacgccttggaccctattgatcgacataccactgtgn

SEQ ID NO: 690343 - DNA, 284 bp, Homo sapiens
  misc_feature (1)..(1): n is a, c, g, or t
ntgctgggtgatctagaggatcccattaggcgcgttctgcgtggggcccatgggtgagacactccagtactgagacctagagtccagatgcttgtaggagccaagtcgtgttctaagtatttatttaaaacaaaagaatcacgttttcccatttgtacttcagcgctagcccctgttttgcacagccgagtactggcgagtatgttctatgttgggcctcctgctgcaaaacaataaacagaggacgcagaacgcgccttaatggatcctctagatcacccaca

SEQ ID NO: 690344 - DNA, 251 bp, Homo sapiens
  misc_feature (1)..(1): n is a, c, g, or t
ntgctgggtgatctagaggatcccattaggcgcgttctgcgtggggcccatgggtgagacactccagtactgagacctagagtccagatgcttgtaggagccaagtcgtgttctaagtatttatttaaaacaaaagaatcacgttttcccatttgtacttcagcgctagcccctgttttgcacagccgagtactggcgagtatgttctatgttgggcctcctgctgcaaaacaataaacagaggacgcaga

SEQ ID NO: 690345 - DNA, 443 bp, Homo sapiens
  misc_feature (30)..(30): n is a, c, g, or t
  misc_feature (34)..(34): n is a, c, g, or t
  misc_feature (246)..(246): n is a, c, g, or t
tttggaggaagggggaggggggcccaaaancaanacccccctccccggggggtgggggatttttttaaaaaagtgggccccccggttttcccccttgaaaagggggggggggggcccccccatttatttggggttggtcccccctttgggccccccgggttttcccttttttgttcccggggggattttgggggggaatgggggggggaaaccattttcccccggggacccgttttgcctggtttnggattttttacccccccccatagggggtttgggcccccggggccaaaatttggggggggggcccccctaaacccaaaccccttcccccccaaaaaattggggccggttaaaaaaccctgggggggggtcccggtttgggggggttccccgggggattttttttaacccctttaaaaaacccccttttttttttttga

SEQ ID NO: 690346 - DNA, 282 bp, Homo sapiens
gcggccgcctactactactactactgctcgaattcaagcttctaacgatgtacggggactgcgtggggcccatgggtgagacactccagtactgagacctagagtccagatgcttgtaggagccaagtcgtgttctaagtatttatttaaaacaaaaaaaaaaaaagaatcacgttttcccatttgtacttcagcgctagcccctgttttgcacagccgagtactggcgagtatgttctatgttgggcctcctgctgcaaaacaataaacagaggacgcaga

SEQ ID NO: 690347 - DNA, 2338 bp, Homo sapiens
  misc_feature (122)..(122): n is a, c, g, or t
  misc_feature (2136)..(2136): n is a, c, g, or t
  misc_feature (2157)..(2157): n is a, c, g, or t
  misc_feature (2160)..(2160): n is a, c, g, or t
  misc_feature (2162)..(2162): n is a, c, g, or t
cacggatcggcagcgggactgagccgcgcccacgtggaagccgccgcaggcttcgcgcggggccccccgggtgcacgcgggcagggccggggtctcccgacgcacgaccccggagagtgttnaaagggtcggagctgcccggaggcggcggcagggctgagccagcgacgccctccattcactctccgcgcccgttctccggctgtcctcccgttccgctgcccgccctgccaccatgacggaacaggccatctccttcgccaaagacttcttggccggaggcatcgccgccgccatctccaagacggccgtggctccgatcgagcgggtcaagctgctgctgcaggtccagcacgccagcaagcagatcgccgccgacaagcagtacaagggcatcgtggactgcattgtccgcatccccaaggagcagggcgtgctgtccttctggaggggcaaccttgccaacgtcattcgctacttccccactcaagccctcaacttcgccttcaaggataagtacaagcagatcttcctggggggcgtggacaagcacacgcagttctggaggtactttgcgggcaacctggcctccggcggtgcggccggcgcgacctccctctgcttcgtgtacccgctggatttcgccagaacccgcctggcagcggacgtgggaaagtcaggcacagagcgcgagttccgaggcctgggagactgcctggtgaagatcaccaagtccgacggcatccggggcctgtaccagggcttcagtgtctccgtgcagggcatcatcatctaccgggcggcctacttcggcgtgtacgatacggccaagggcatgctccccgaccccaagaacacgcacatcgtggtgagctggatgatcgcgcagaccgtgacggccgtggccggcgtggtgtcctaccccttcgacacggtgcggcggcgcatgatgatgcagtccgggcgcaaaggagctgacatcatgtacacgggcaccgtcgactgttggaggaagatcttcagagatgaggggggcaaggccttcttcaagggtgcgtggtccaacgtcctgcggggcatggggggcgccttcgtgctggtcctgtacgacgagctcaagaaggtgatctaagggccgcggcctcctccacacacacacacacaccaggggaaccaagagaaccacgtagaatcctcaaccgtgcggaccatcaaccttcgagaaattccagttgtctttttcccagccgcatcctgcctgtagatggccggggaaggctctagaaaaggggcgcattgcgatccaaccatcggcagccgattccgtgtcttgatcacggggtgggagggaaccgtggcgtccctgcgtggggcccatgggtgagacactccagtactgagacctagagtccagatgcttgtaggagccaagtcgtgttctaagtatttatttaaaacaaaagaatcacgttttcccatttgtacttcagcgctagcccctgttttgcacagccgagtactggcgagtatgttctatgttgggcctcctgctgcaaaacaataaacagaggacgcagaggtcctcctgcctggccacgcacctctccacagggcggcctggggtctggagatgggcgctgggcccacgggacgcagatggggccacgctctgcccgtggctggcccacgttcctggtctgcagtgctgcctcctccccagcacccctggggcacagagggcagggtcacagctgggaagaggcggggggtagaaaccaaggctggcagaagtgtagccgggctccctgataaatgctggaggaccccagggcacctgcacttactgtaccctctctgagagcatttgtatgatctcatgtctcagctctggaggctggaggtcccagaaaaccaaggtatggtagattcagtctctggtgagtacccagttcctggcttctagatggcgccttctccctgtgtgtcctcagatgatggatgaggccagggtgctctctggagtcctttctgtaagggcactgatcccatccatgaggcctcatgactcccaaagacccccactttccaacgccatcacttgggagaggggcgttttcagcgtgaatcttggggaanctgaaacagggtgacacctgngtncntctcactctgtagctcccgaaggccactccagcccccattccaacatgaacagtggaagtggtcggggtccccaaattggcagctgtggttccccggggttcacccgtgagaaatccaccccaagggggtcccccccgcgagggaccaaaagcttccttcaagcttttttttggtc

SEQ ID NO: 690348 - DNA, 911 bp, Homo sapiens
  misc_feature (7)..(7): n is a, c, g, or t
  misc_feature (74)..(74): n is a, c, g, or t
  misc_feature (89)..(89): n is a, c, g, or t
  misc_feature (109)..(109): n is a, c, g, or t
  misc_feature (124)..(124): n is a, c, g, or t
  misc_feature (162)..(162): n is a, c, g, or t
  misc_feature (178)..(178): n is a, c, g, or t
  misc_feature (243)..(243): n is a, c, g, or t
  misc_feature (245)..(245): n is a, c, g, or t
  misc_feature (303)..(304): n is a, c, g, or t
  misc_feature (361)..(361): n is a, c, g, or t
  misc_feature (442)..(442): n is a, c, g, or t
  misc_feature (445)..(446): n is a, c, g, or t
  misc_feature (450)..(451): n is a, c, g, or t
  misc_feature (454)..(454): n is a, c, g, or t
  misc_feature (462)..(463): n is a, c, g, or t
  misc_feature (695)..(695): n is a, c, g, or t
acaaaanactgatgacaaatttttaggtcaaggtagtatccattaaaaagtactgatttaaaaaactaaataanttaaaactgcaacangcaaaaaagaaaaccaaagnggtccacaaaaacantctcctttccttactgaaggttttacgatgacattgtnatcattaacacaggtnttttactactaaacttaaatggccaattgaaacaaacagtactgagaccgatacttccaccactnantaagagtgggagtggcaggtataagggataatattcatttagccttctgagctttctnngcagacttggatgaccttgccagccccagcagccttcttgtccactgctttaatganacccaccgcaactgtatgtctcaaatcacgaacagcaaagcaaaaaaaaagaaaaaaaaaaaaaaagctctaaacaaaaanggnnatannaanaaccatannaacaatggcagcatcaccagaattcaagaatttagggccatcttccagctttttaccagaacggcgatcaatcttttccttcagctcagcaaacttgcatgcaatgtgagccgtgtggcaatccaatacaggggcatagccggcgcttatttggcctggatggttcaggataatcacctgagcagtgaagccagccgcttccattggtgggtcatttttgctgttaccagcnacgttgccacgacgaacatccttgacagacacattcttgacattgaagcccacattgtccccaggaagagcttcactcaaagcttcatggtgcatttcgacagaatttacttccgttgtaacgttgactggagcaaaggtgaccaccataccgggtttgagaacaccagtttccactcggccaacaggaacagtaccaataccaccaattttgtag

SEQ ID NO: 690349 - DNA, 1578 bp, Homo sapiens
  misc_feature (122)..(122): n is a, c, g, or t
cacggatcggcagcgggactgagccgcgcccacgtggaagccgccgcaggcttcgcgcggggccccccgggtgcacgcgggcagggccggggtctcccgacgcacgaccccggagagtgttnaaagggtcggagctgcccggaggcggcggcagggctgagccagcgacgccctccattcactctccgcgcccgttctccggctgtcctcccgttccgctgcccgccctgccaccatgacggaacaggccatctccttcgccaaagacttcttggccggaggcatcgccgccgccatctccaagacggccgtggctccgatcgagcgggtcaagctgctgctgcaggtccagcacgccagcaagcagatcgccgccgacaagcagtacaagggcatcgtggactgcattgtccgcatccccaaggagcagggcgtgctgtccttctggaggggcaaccttgccaacgtcattcgctacttccccactcaagccctcaacttcgccttcaaggataagtacaagcagatcttcctggggggcgtggacaagcacacgcagttctggaggtactttgcgggcaacctggcctccggcggtgcggccggcgcgacctccctctgcttcgtgtacccgctggatttcgccagaacccgcctggcagcggacgtgggaaagtcaggcacagagcgcgagttccgaggcctgggagactgcctggtgaagatcaccaagtccgacggcatccggggcctgtaccagggcttcagtgtctccgtgcagggcatcatcatctaccgggcggcctacttcggcgtgtacgatacggccaagggcatgctccccgaccccaagaacacgcacatcgtggtgagctggatgatcgcgcagaccgtgacggccgtggccggcgtggtgtcctaccccttcgacacggtgcggcggcgcatgatgatgcagtccgggcgcaaaggagctgacatcatgtacacgggcaccgtcgactgttggaggaagatcttcagagatgaggggggcaaggccttcttcaagggtgcgtggtccaacgtcctgcggggcatggggggcgccttcgtgctggtcctgtacgacgagctcaagaaggtgatctaagggccgcggcctcctccacacacacacacacaccaggggaaccaagagaaccacgtagaatcctcaaccgtgcggaccatcaaccttcgagaaattccagttgtctttttcccagccgcatcctgcctgtagatggccggggaaggctctagaaaaggggcgcattgcgatccaaccatcggcagccgattccgtgtcttgatcacggggtgggagggaaccgtggcgtccctgcgtggggcccatgggtgagacactccagtactgagacctagagtccagatgcttgtaggagccaagtcgtgttctaagtatttatttaaaacaaaagaatcacgttttcccatttgtacttcagcgctagcccctgttttgcacagccgagtactggcgagtatgttctatgttgggcctcctgctgcaaaacaataaacagaggacgcaga

SEQ ID NO: 690350 - DNA, 1555 bp, Homo sapiens
  misc_feature (122)..(122): n is a, c, g, or t
cacggatcggcagcgggactgagccgcgcccacgtggaagccgccgcaggcttcgcgcggggccccccgggtgcacgcgggcagggccggggtctcccgacgcacgaccccggagagtgttnaaagggtcggagctgcccggaggcggcggcagggctgagccagcgacgccctccattcactctccgcgcccgttctccggctgtcctcccgttccgctgcccgccctgccaccatgacggaacaggccatctccttcgccaaagacttcttggccggaggcatcgccgccgccatctccaagacggccgtggctccgatcgagcgggtcaagctgctgctgcaggtccagcacgccagcaagcagatcgccgccgacaagcagtacaagggcatcgtggactgcattgtccgcatccccaaggagcagggcgtgctgtccttctggaggggcaaccttgccaacgtcattcgctacttccccactcaagccctcaacttcgccttcaaggataagtacaagcagatcttcctggggggcgtggacaagcacacgcagttctggaggtactttgcgggcaacctggcctccggcggtgcggccggcgcgacctccctctgcttcgtgtacccgctggatttcgccagaacccgcctggcagcggacgtgggaaagtcaggcacagagcgcgagttccgaggcctgggagactgcctggtgaagatcaccaagtccgacggcatccggggcctgtaccagggcttcagtgtctccgtgcagggcatcatcatctaccgggcggcctacttcggcgtgtacgatacggccaagggcatgctccccgaccccaagaacacgcacatcgtggtgagctggatgatcgcgcagaccgtgacggccgtggccggcgtggtgtcctaccccttcgacacggtgcggcggcgcatgatgatgcagtccgggcgcaaaggagctgacatcatgtacacgggcaccgtcgactgttggaggaagatcttcagagatgaggggggcaaggccttcttcaagggtgcgtggtccaacgtcctgcggggcatggggggcgccttcgtgctggtcctgtacgacgagctcaagaaggtgatctaagggccgcggcctcctccacacacacacacacaccaggggaaccaagagaaccacgtagaatcctcaaccgtgcggaccatcaaccttcgagaaattccagttgtctttttcccagccgcatcctgcctgtagatggccggggaaggctctagaaaaggggcgcattgcgatccaaccatcggcagccgattccgtgtcttgatcacggggtgggagggaaccgtggcgtccctgcgtggggcccatgggtgagacactccagtactgagacctagagtccagatgcttgtaggagccaagtcgtgttctaagtatttatttaaaacaaaagaatcacgttttcccatttgtaaacaacacccagcctcgctacctagcctagtgtgtgtgtcttttttttttttctatttttttttttcttgg

SEQ ID NO: 690351 - DNA, 459 bp, Homo sapiens
  misc_feature (41)..(41): n is a, c, g, or t
  misc_feature (63)..(63): n is a, c, g, or t
  misc_feature (109)..(109): n is a, c, g, or t
  misc_feature (354)..(354): n is a, c, g, or t
  misc_feature (448)..(448): n is a, c, g, or t
ccagggggttcgagttcgaacagctgaggtttgaggattgnttttattagggccttccacggngacctcaatgtcagttttctttgaattactcccaccacttcgtggncttttgggggactgcaaagctctagtgtttattttactagccatcccaggaggcaagtaggaaataactagttcaggttttttaacaacgaacttgattttattactcccgtggacgatcctttcaagtcgtggaattccaaaccaggtagggcttcggaagggaatcccctctggcaagccttccacatagaagaactccgggtttgattcaaacacaggatatggtacttttactgcctcggngagtccaagagcttgagcaaatttcaaattaaaaatctcttccacttgctttcgtagcttggtaattctgacactccaatcttctttgactggngtattcgttct

SEQ ID NO: 690352 - DNA, 2428 bp, Homo sapiens
  misc_feature (122)..(122): n is a, c, g, or t
  misc_feature (1623)..(1623): n is a, c, g, or t
  misc_feature (1629)..(1630): n is a, c, g, or t
  misc_feature (2428)..(2428): n is a, c, g, or t
cacggatcggcagcgggactgagccgcgcccacgtggaagccgccgcaggcttcgcgcggggccccccgggtgcacgcgggcagggccggggtctcccgacgcacgaccccggagagtgttnaaagggtcggagctgcccggaggcggcggcagggctgagccagcgacgccctccattcactctccgcgcccgttctccggctgtcctcccgttccgctgcccgccctgccaccatgacggaacaggccatctccttcgccaaagacttcttggccggaggcatcgccgccgccatctccaagacggccgtggctccgatcgagcgggtcaagctgctgctgcaggtccagcacgccagcaagcagatcgccgccgacaagcagtacaagggcatcgtggactgcattgtccgcatccccaaggagcagggcgtgctgtccttctggaggggcaaccttgccaacgtcattcgctacttccccactcaagccctcaacttcgccttcaaggataagtacaagcagatcttcctggggggcgtggacaagcacacgcagttctggaggtactttgcgggcaacctggcctccggcggtgcggccggcgcgacctccctctgcttcgtgtacccgctggatttcgccagaacccgcctggcagcggacgtgggaaagtcaggcacagagcgcgagttccgaggcctgggagactgcctggtgaagatcaccaagtccgacggcatccggggcctgtaccagggcttcagtgtctccgtgcagggcatcatcatctaccgggcggcctacttcggcgtgtacgatacggccaagggcatgctccccgaccccaagaacacgcacatcgtggtgagctggatgatcgcgcagaccgtgacggccgtggccggcgtggtgtcctaccccttcgacacggtgcggcggcgcatgatgatgcagtccgggcgcaaaggagctgacatcatgtacacgggcaccgtcgactgttggaggaagatcttcagagatgaggggggcaaggccttcttcaagggtgcgtggtccaacgtcctgcggggcatggggggcgccttcgtgctggtcctgtacgacgagctcaagaaggtgatctaagggccgcggcctcctccacacacacacacacaccaggggaaccaagagaaccacgtagaatcctcaaccgtgcggaccatcaaccttcgagaaattccagttgtctttttcccagccgcatcctgcctgtagatggccggggaaggctctagaaaaggggcgcattgcgatccaaccatcggcagccgattccgtgtcttgatcacggggtgggagggaaccgtggcgtccctgcgtggggcccatgggtgagacactccagtactgagacctagagtccagatgcttgtaggagccaagtcgtgttctaagtatttatttaaaacaaaagaatcacgttttcccatttgtacttcagcgctagcccctgttttgcacagccgagtactggcgagtatgttctatgttgggcctcctgctgcaaaacaataaacagaggacgcagaggtcctcctgcctggccaaaaaaaaaaaaaaaaaaaaaaaacaanaacaannaacaaaaaagaaaaaacacaagacaaaaacaaaaaaaaatcaaaagaaaaagaagaaaacgaacaacagaacagaactagcacagaagactaatagtataggagagacaacacacgagcaggaccacacgaccagacgcatcggacgaccgcaaacaagccgtccctgcccatgcagctatctaaacgaccacgaggcatacacaaaacgtaagcacatacagacacactataaggggcaacagccgaccactggcacggacctatgagcccacccctactagcaagaacaagacttgatccggagctgggcaagccgtacacataagaagagaaagaacaataaaattctacagagtaaataagaaatgcagataaaaaagtaacagcagggacacaacatgatcacttgagtatactaatttgatcaaaataattgaaaactgaaggatattaaaaaaatcaaaaaagatatctgaaaagagaaagaaaaaacactaaaatagcgaaataaacacactaggagaagcaaacatacagacgagaggcagaacaatgaagcgcaacagacaaaactacaagagagaagcgggagacaaaagcaggcaacgactagcactgagacagtgagcaccaacaaaaaccgaaagcgaaaacgacagagcaccaaacctagaaaccagcgcacagcacggcaacgccacgaggccacacaaaagcaaccgacgagagcaaaccaacgacgagaatccacagcgcaagtcaaaaacagacacaacaaacacagcccgacgcgacn

SEQ ID NO: 690353 - DNA, 170 bp, Homo sapiens
cacaaaagacgcctacaagaagtacatcaaagattacatgaaatcagtcaaagggaaactcgaggaccagagaccagacagagtaaacccttttatgacaggggctgcagaacaaatcaagcacatcctgctaatttcaaaaactaccagtctctattggagaaacatga

SEQ ID NO: 690354 - DNA, 284 bp, Homo sapiens
  misc_feature (127)..(127): n is a, c, g, or t
  misc_feature (165)..(165): n is a, c, g, or t
gtctctcgtgcagctgcctggtcatctcagttccgcacggttgggccgcctagaaagctctgcagcatggtagatcgatccaggctctctactgatttaaggtcaggtcagatgaagtatcctagtntcaaatacaggagctgtgcttgctgtgtgcagcggacncagcacacacggccagttcctatcctagtgggtgatactggtggggaggattgtggccagagctgacccctccccaagacatccctcggggctacctttcctcctcctgctccccccgg

SEQ ID NO: 690355 - DNA, 254 bp, Homo sapiens
  misc_feature (89)..(89): n is a, c, g, or t
  misc_feature (122)..(122): n is a, c, g, or t
  misc_feature (133)..(133): n is a, c, g, or t
  misc_feature (145)..(145): n is a, c, g, or t
  misc_feature (226)..(226): n is a, c, g, or t
tatgtgcgcttcggcgctgctgtggtgagctgagcgtggttctatgacaagcacatctggctctccatatgggacccggcacctcgtangctgtttcactcgcatccagagggccacctgcntgcgttctccntcatctgcctcnttcctgggcgccaacgccgtgtgggtacggggctgttggtgactctgctctacagcaccggggcaatgtgtccacggctgnagcccggcttgagcgtcgacacatgtcg

SEQ ID NO: 690356 - DNA, 156 bp, Homo sapiens
tcttccggcagtagggactcatgggcagtagtctggatgagggagatacaacttcctttggaaactccggcgatacaactcctatgatattagcagagacacccggtatgtttcgaaaggtatatgctggatcacagcggtaaccatttcgagatg

SEQ ID NO: 690357 - DNA, 206 bp, Homo sapiens
gccagttttaagctcacttgagtgaagtttaagtcacaagattctgtttaacatgctttccttgttttggaaacaaccaaaaacttcccttttttgttacgggattttgacctacaaatcctaatcatgtttaaaatgagccggtgctgggtagatgactattgtgcctgcgcggttcgactcatatgttaaggagaagttgaaat

SEQ ID NO: 690358 - DNA, 107 bp, Homo sapiens
atccactatagatttttcaatgtatctcaaggtacgggaacagcagtaaaggtactgaaggagacggtcagattactgcaattctggaccagaagaactatgtagaa

SEQ ID NO: 690359 - DNA, 713 bp, Homo sapiens
gtctttagaccgtgcgagtcaatgcctgactgacactgcgtgatgcccagggtaacacagggccacgctcaacgtccaacttcttccttaagatcatctcaactattggatgatgatccgaagtggacactcgtgagaacagacctggtgctctacgatcatatgcagcaaatgctgatgtaccttcccagaacggctgtgctgctgatgggcacacaacaccatgatgcgctaggtcgtccgagggcacctggaaaacatcccacctctggagagactgctgcctcattaacgggggaatgggggcttagtgttcaccaaggaggacctcactgagatcagggacatgtggctggccaatgacgtgccagctgctgcccgtgctggtgccatgagccccatgtgaagacactgctcctacccatagcactggtctaggacccgatatgacctgctttgtacaggctgtaggtgtccccgcttctcgcggggccccattgaaatcctgagtgatgtgctgctgatcaagactgtgcacaaaccgagtacgcagcgaggcactctgttgaacatgctcaacatctggaccttatcctatgggctgagtcttcacaggtgttgcacatgtgagaatctccacccttgggagcttgatgtccaacatgctccgcttctcgcttggtgggcgccccctgttggccgtggctgcctgc

SEQ ID NO: 690360 - DNA, 1382 bp, Homo sapiens
  misc_feature (33)..(33): n is a, c, g, or t
tcgagtgctcttcgtcccggaatgtcgcccggnggatgtgtcttacccacactgtgttctgttagcgcgcccccactggggccccaggagggcctagagtactctggcccgcgggcaagattttgggcgccccgggggcccacgtcgggggtttaccctgcgcgcgggccttctttttggggcgcttcttgttcttggggaccgcctcttttaatgtcgccccggggaccggctgtggggttgcccccgccaccaatgatacccaggcgttgctcaggagacattctcttggtgacacatctgtcgtggtttccgggtcgtttcgttaaaaaacgcggctcggccaaaaatacccccagcacaccaaccggcggtggtggcgggacgggccaaatatctgtgcgcaccggagcgaatgtcgcaaatgacgggggatgtccccgcgccacaaccgggtccccgaagagcaccaatagtcgcggggtgtacccgcggcgcgcttaagataggggcgccgcttcccgcgggttcgagaaccccccccacaataggggcgaacaaaggggcggggaattccccgacccggcgcgggcgttccgagagaggcgccgggggggccaccccgcgcgcgcgggggtctccccccgcggggttggcactcgcgcggggcacagcgcccgcgtggagaggccctcacacgcgcgaaatgggtgcgcgataccgcgggtcacaagaaaacctcgcgacacacacggcacaccacacggtgtcccgctgtcgcccgcgcttgtgtccacacacacacacccacgcgagaggtggagaggggcgctctttgggggagaagaacgcgcggagaggggggagcgcagcctgcgtggaaccccttgtggcacacactgtggcgctgtcttctgggaacagccacactgtgggagagccgggagaggctgttctgttggcgcgctttccagacacacagggggggcaccctctctgtgtgtgtttcctctgtcacgattcacgcgggtggagcacgcgatatggagaagccccacacccggggggcacaccacaagagaggtccacacgggcacagcccacagggccacaacacacgcccacacaaacgctggagaaggccacatggagaaggcacatctttctacatcacaagccctatggtgtggagagccctcttgcacagggtctctcgagtgaactcttgagagtgtttggagatggagatgggtggagatggagagggtggcacaggtggggcgctttgcacagggccacacttttggcacagaagaacctttggggtttttataggggtcctcaagatgcctttgtgattaaaaaaaagattggtttatgga

SEQ ID NO: 690361 - DNA, 125 bp, Homo sapiens
gaacgggtgatgcgtgttgttgagggactggcctggaaaaggccagagtgtcagtgggtgggggtctgctgctcaccacgccgatgaggtcgccgcgagcgtactcgcccaccagctccttactt

SEQ ID NO: 690362 - DNA, 254 bp, Homo sapiens
gcagattggggcatactcgaggctgggtaggacgatggacctgcagcttcccaaggaaagggtggacactggatgtagctctcagaaaccagaatcttgataagaaattgaagttgttctcatattcatatatgattatcataactcctgatttttcttttctttttttgagagagggtcttgctctgttgcccaggctggagtgcagtgacacaatctcagctcactgcaacctccacctcctggactcagca

SEQ ID NO: 690363 - DNA, 1024 bp, Homo sapiens
  misc_feature (805)..(805): n is a, c, g, or t
  misc_feature (1024)..(1024): n is a, c, g, or t
ctacttaacctacagcattgtacaattagcttagtaacactatggaataagctaaaacatatcacagttttatacatgggccaaaacatgacattgagtatgtggtcacatgcaaaacacggatgacatgacataacaacactcttgggtggtgactgaggcatcacttagaaggcccagacgacttttccactatttcacagcatttccttttctcagaaggactcttaatatttccatgtaaactctagatcttgggagcaattaagatggcattacaatttctagggagcattttaaggaaacaggtccgggctcttttcataatttccatgtctatacagtatggaattataatacgaaacatctttacactgagtctgggcttctgggcactttggcacttattcaggggcaaaaagtctttcgattacttatgcctctatagagcttaatttctggagaaattcaacagtcattttcaccagcataatctatatctcacggaataactacataggacaaagtcagcttaactcattttacaggccctaggtatctacattactaatataatcggatacgaccttgccaaatctggccgtgcacttcagctcaatacgtagtaccaaataaaccttcatcattgaggacatggccaagtctactcacggcactcacctctaccattggattccttcaatactcacacttccagtgtacaacaccggtggttacttctctcaacaacatttcggaaaccaagtacctggttaaactgtccaatcccagcaacgcatgtcgncaacgcacgataccttggggaaccaagtttgggaattgtgcaacaacacatttgcacgacgaattggctacaccagggcacacacacctacacctttacaacctcacgcatgctacaacagcgccaagaccacttcgtaatgtcggaacacaaccgactatcggtctgacacactaaacaccgtgtcactccccaaaatgtgtcaactgcccgtcgcan

SEQ ID NO: 690364 - DNA, 482 bp, Homo sapiens
ggggggggggttttaaaacccgtttttttccaagggtttttaaagcatgaaaaagctggccctacataattttgaggggcggttgttttcctttggggggccaatttttttcacccggggctggaaattaggcctgaacagggtcccctgagtgaggctggtggatttggggggggggagaggggaaacagggctccctttaatcccacgaagtcttggaaaaggggggatgggacaaatccagcttaggctttggggacatgtgcaaagggggattcctgcggggggatcagcctgctccataggcagtcaagtgttccccttttattccaaaaagacttcaaggcaaaaaggccagggggggcagatctaactttggatgtaagcccaggaggtttcccgtttagattttaaacccaaatcatccgtacttaaataaaccatattttaaaaataactggccatattattcggcgggaggc

SEQ ID NO: 690365 - DNA, 135 bp, Homo sapiens
tagaggacgcgcaaagatcttgactgcattctgctctgccctagaggtctgtggaaattgaagtgattattgacagtatctggcagaagaaatttctaagcagcaaagtgttcaagatgtacctgactgcttcta

SEQ ID NO: 690366 - DNA, 228 bp, Homo sapiens
ccacgcgagtggcccccgggctctcacggcgcagcgtgccccttcgctccccggaccgccaccgttcgggaccggcttgagccgcgcaacttccgcgcacacgtggtgccggggcagggaatcccactcatgccaagaacgtgaataaggaccaaggctgaaccgaagctatctctgcgatcaggcggaagaagcgtctcatgatctgagtgccctggctgacaggaa

SEQ ID NO: 690367 - DNA, 254 bp, Homo sapiens
  misc_feature (109)..(109): n is a, c, g, or t
cctgtggtcaggctgatcgtgaatcctgactcaggtgatccgctgcctcagcctctgggattataggcgtgagccactgcgcccagcctccagttttcttttctttagnagcagcggttttaaatcctgttgggcttcaagttctctgagaaatttactatgtctctccacaacaatgagctcccatatttccacagaacacagtcacatgtcagctcagctgtgtgggtacgctctgctgtgccggggtaccg

SEQ ID NO: 690368 - DNA, 312 bp, Homo sapiens
ggtgagtagtgtggggggtggcacgtaatcctccacacgaggcatactcagtacagtgtgtccgtgcaggtaggggatcccgcggcatcacgtagatgcggtcaaccagacatgcagcgggtccttgcaccatgcgccagactggtgctctgactcgtgtgtgggggtgggctccagaagctactgcagggtccctgggcacacgaagatgtaagggacacagtcgtactgcacctccaggtacttgtaggtcccaggacaggggtcaggaaaggcatccgagccggcgaccaccacgcactgtctgcggtt

SEQ ID NO: 690369 - DNA, 1328 bp, Homo sapiens
ttgctgcgtttgggccccggcttggttctccctggttttttctacgtggctgtgccctctcctctggtggttttcgttggaccctcttgtttttatctggctggtctccctgccctgttcctgtgatcgtggacattttccctgtttgtgtgcacatgcggtgacctccctcgactggtccctctccccgcgtcgtgtcacattggcgtgccaaatttctggccccttgcgtgacacccttgacggttgggctttccctacttgcccccttggtggtggcctgccctgggtcattgtgttaacccgtcaagtccccatcgcagcttcttagggttgttcttggagtcccatacccccgtgcccgctgggcccaattcgatggcaagccctttgtgttcctccgtttatgtgcccttgagcctcggttcccgtcccctttcgggcattggacctgcacagtgcttgacctccgcaatcccatgggtctaacgttgacgaaggtcaatgacctcgggcttcatgtaaagcacctctgggcgtctggatgatcccccgctatgggtacgcgccccccggtgtgccttgaagactgcgctcttgctcaactccctgctcccgccctgcccaccccccctaagctggaagccacaaggaggaatatcctacgcgcggatcaaacggctctatacctccgccggcccacaagcaggagccgtgcgcccagcacaacggctcagaggcccgcccagccccgcaaaacggggaggcggctccatccatgtccgtgccgccccacagaccccccaatatacgggtcgaaggccaaaggcggtccaccagctagaccaggttgcttggggacgggtgggtgcttatatatgtagaaactgtaggatttctgttgttctctcgtggtctcactttgttacattagtttctgtccccgggagcctcacgggctactgagagactgtgctccaggccagggggttacacctgccctccgtggtccctacactgggctccaggggcttctggtgcggttccgggaagaagccacatccccagaggtgacaggtgagctcactgcacacaccaccagcctctgacttgactgtgttgtcacagaggtgaggctgggccatcctggtctccagcttaaacaggagtgaactccctctgtccacaggcctcccttactgggccccatacagcccaaccctacccctcctcacatgggtcctgcaggagaggagacccagccttgaagtggggatcagtagaggcttgcactgccttggtatacggacccggagacgtggctaacc

SEQ ID NO: 690370 - DNA, 728 bp, Homo sapiens
  misc_feature (44)..(44): n is a, c, g, or t
  misc_feature (267)..(267): n is a, c, g, or t
  misc_feature (362)..(362): n is a, c, g, or t
  misc_feature (384)..(384): n is a, c, g, or t
  misc_feature (434)..(434): n is a, c, g, or t
  misc_feature (491)..(491): n is a, c, g, or t
gatttggggtggaagcgatagctgagtggcggcggctgctgatngtgttctaggggacggagtaggggaagacgttgctctcccggaacagcctatctcattcctttctttcgattacccgtggcgcggagagtcagggcggcggctgcggcagcaagggcggcggtggcggcggcggcagctgcagtgacatgtccagcatgaatcccgaatatgattatttattcaagttacttctgattggcgactcaggggttggaaagtctngccttcttcttaggtttgcagatgatacatatacagaaagctacatcagcacaattggtgtggattccaaaataagaactatagagtagacgggnaaaacaatcaacgcttcatatntgggacacagcaggccaggaaagatttcgaacaatcacctccaagttatnacagaggagccatggcatcatagttgtgtatgatgtgacagatcaggagtccttcanataactgtcaaacagtggctgcaggacatagatcgttatgccagtgacaacatgtcaacaacaatggggtagggaacaaatgtgatctgaccacaaagagcagtagtagactacaacaaccagcgacaggaatttgctgattccttggaattccgttttggaaaccagtgctagaatgcaacgactgtagaacagtctttcatgacgactggccgtgagatcaaaagcgactggtcc

SEQ ID NO: 690371 - DNA, 519 bp, Homo sapiens
cctaacggagctgactattgagaacatgtgtgggcagagactgtcaacacaggccatcatttctcatggggcaggaactctgtccatgttgctgggctctgattcaggtcaagcacaaagccgcggtctgatgagacatagaggctggaagaaccagggcaggaaaaggctgcatcttatggtctcaaggctgatcccagggaggctcccaagttccttctccagccgctttggataaccacttactaggttattgctccctttgtcaggaagacatacacttgagtgccctggatcagatagactttatcatcccaggaaaaggcagcatctactgttgaaggaccctgaggccagtgatgagcaatgggccagctatgccatccatcacggctggagtccagacgccagtagtgggagccagtgaaggcataggtggcaccgcgatggtcagacagcagtgcagtcaggccaggatctgggctacaacgtgaatgcataggatgggtgctatttcca

SEQ ID NO: 690372 - DNA, 141 bp, Homo sapiens
ccagcacatgaagaagggtgtgaaggctgaacaatcatggattatatctgatcaattgtagcttataggaaattatatgacagtttatagcacgggttctatgaaaacgttatttataatagaaatcaactcaaaactatt

SEQ ID NO: 690373 - DNA, 325 bp, Homo sapiens
  misc_feature (6)..(6): n is a, c, g, or t
  misc_feature (43)..(43): n is a, c, g, or t
  misc_feature (76)..(76): n is a, c, g, or t
  misc_feature (90)..(90): n is a, c, g, or t
  misc_feature (99)..(99): n is a, c, g, or t
  misc_feature (116)..(116): n is a, c, g, or t
  misc_feature (120)..(120): n is a, c, g, or t
  misc_feature (139)..(139): n is a, c, g, or t
  misc_feature (149)..(149): n is a, c, g, or t
  misc_feature (167)..(167): n is a, c, g, or t
  misc_feature (236)..(236): n is a, c, g, or t
  misc_feature (243)..(243): n is a, c, g, or t
  misc_feature (252)..(252): n is a, c, g, or t
  misc_feature (263)..(263): n is a, c, g, or t
  misc_feature (267)..(267): n is a, c, g, or t
  misc_feature (271)..(271): n is a, c, g, or t
  misc_feature (277)..(277): n is a, c, g, or t
  misc_feature (282)..(282): n is a, c, g, or t
  misc_feature (293)..(293): n is a, c, g, or t
  misc_feature (295)..(295): n is a, c, g, or t
  misc_feature (313)..(313): n is a, c, g, or t
aaatcnatctggaatcaaaaaacggtggattttggcaaatggnccttgggcccccccccctcatccctggtttggncccctgttggccanagccctttnccctgagcccccccccnacanaatgggggccagccccctngcctgcctgngtttctcccccaaccccnttaaatggggagggaaaaggaggaaaggggagggggcctgcccccccctcagggatttgggagggcccngcccccntgggctttncccttccctgngggntctntccccnacccntttgttaaaancnaacctgaataaaactccnagttttatatta

SEQ ID NO: 690374 - DNA, 818 bp, Homo sapiens
gcctgggcgtggtggctcacgcctgtaatccacagctgcttcgtggacggcgcgatgcgtagggcgaatctcatcgatcgtcactagatttgatgaccttttctctgcgctatacacggtgaaccgcccggtctctagctacagatactagcaacaaaattcagtctgggcgttacgttgggcgatgcgctatctatcggagacgtgcttactcgagaagtgctgagcgcagcgacgaattgtgcgtgttgacccgcggaggcggagcttgcagtgagccgagacagcgccactgcactccagtctgggtgacagagcgagactctgtctcaaaaaaaaaaaaaaaaaaattgtctttttgattttaccaattttccttggatttggaaagggctttttacgcaaccggtgactttcgggtttaccaaaaaggctcagaacgacaacgactggtcgtacattgactcatacggttaatttttcacctttcgcaatatagttcctatttcggacacttgtcctggttggcaactcaggattgcaagaaccccaagtgtcttagcaacctccggttcacccttgggcgctttttctaacgcagctttttctaccattgggaagaccccgaggaatttttccccagacatttccacgcgcattttactaagtgactctactggaacaatcctagcgtaagaactcccggggggggcgaatgcgcgaactttgtgacgtcttcacactgttcgcgccttttacgcaacacgcgttgtcccccgggtccctggatcgtattttacctagcggttggaacccaa

SEQ ID NO: 690375 - DNA, 524 bp, Homo sapiens
ctagaggactcagatagagcatacccctcaccaagcttgctttatcatccttgggtgtctttgacaatgcatcccctgctttcacatgctctagtgttccttcaccaggcctttgtcgccccacgttgggcagccaggaatgttggggtgatcagatccaacaccaggccttggggcaacgaagtctggcagagtcaaaggaaagagaaaagacagtttgagagagaaagtgggtccaggtggccaacgcaagtatggaggctgtgaaggccctgagctctggaagcccagactatttattggtggtcaaacaaagaaacaggtggtgagaatgtgtgggtcaaaagggcaagcacatgatctacagctgtgatagtttagcatttcctttgaagcatatggaacatattctgctacttgagataatagggagcatgttcttccagtttaagctagaagcaaggagccagcaagtctagactcattccagaggccacgaggggtatggctctgatcgggtaccg

SEQ ID NO: 690376 - DNA, 113 bp, Homo sapiens
tcattcttccagtctatcagcctagctctctcacatttagtatacttcttgcgggggctctggaacaagccttggataatgagatccatgtcaacttcctcatactacagaac

SEQ ID NO: 690377 - DNA, 221 bp, Homo sapiens
ggtcgcagtaaaagagagcataccattgccattcagagaattcctccagaaatgtaaaagggggcagtaaaaacgggataaccacctttacttttgtgcaagacaaagtattttcctgcttcagatgagtggaagcacctctctttaccttgaggacccagtcctatggtatttaattacactgtcgggagcatagaatggtctggcaccgtgccctctcc

SEQ ID NO: 690378 - DNA, 400 bp, Homo sapiens
  misc_feature (268)..(268): n is a, c, g, or t
  misc_feature (373)..(373): n is a, c, g, or t
ttgagacagagtctcgccttgtcacctaggctggagtgcaatggcgcgatctcggctcactgcaacctctgcttcccaggttcaaacgattctcctgccttgagtagctgggattacaggcacctgccaccatgtccagctaatttttgtatttttagtagagacaaggtttcaccatgttggccaggctggtctcaaactcctgacctcgccgaactccacccgaatcggtctcccaaagtgctaggattacaggcgtgacaaccgnaacctgggggcatctagggttgattccgtatctttgccattgcggaatagtgccgcagtgaacatacatgtggcgtgtgtctttaggtaggaactatttatattnctttgggggattattacccagttaaag

SEQ ID NO: 690379 - DNA, 372 bp, Homo sapiens
aaagggatctggagtatgtccgcgacgccaacgctgaatacattgttcgtgaaacatcttttccaagtttaacatgccagtgtcgggcattgccactatgcccccgttatcgtcaattttctcaagacatatctggcattctgtcgtgcacgttggccaataatctttaaatagtttgaacatatagtaatttctgtcttttaaacaaaaggtgcagaacataatgacgtggccttactccaacagttttaaacttatcaaagcttatcaaaaacactctaacacgtaccaaagttgtacaaatcacaaatataaaagtgtcttgttgaaaaagtggacccaagacgtcatgtagacgcggccgcgaattta

SEQ ID NO: 690380 - DNA, 501 bp, Homo sapiens
cacaaggccctggcgtatatatctgtggaatgaaggcatgcctgtctgcacgaaaagcacatggcatagtgctatgtatacagtaggagttcaattaatgtgagtttgtattgttaagattttgggctgggagtggtggctcacagccaggtgcagtggcttacaactataatctcagctacttgggagactgaggcaggagaatttcttgaacccagaagtttgaggctgcagtgagctatgattgtgttactgcactccaatctgggcaagggagcaagatgtgtctcaaaaaaaaaaaaaattccaataaatacttgaaaagttgctcaacatcatgggccgttagagaattgcaattcaaagccacaaagagataccattttgcacccactagggaggcattactcaaataccaaatgttggtgagaatgtggagaatttgaccccctgttacattgctggtggcaatgaaagtggggcatctgctgtgaaaaacaa

SEQ ID NO: 690381 - DNA, 988 bp, Homo sapiens
  misc_feature (13)..(13): n is a, c, g, or t
  misc_feature (78)..(78): n is a, c, g, or t
  misc_feature (198)..(198): n is a, c, g, or t
  misc_feature (974)..(974): n is a, c, g, or t
  misc_feature (976)..(977): n is a, c, g, or t
tttagttttatcntccttttctttgagagttcgtgaagaggaaaccaagattgggacctgatggagagtgagagcatntgaggggtagtgggatggtggggtaccagccactggaggggtcatccttgcccatcgggaccagaaacctgggagaaacttggatgaggagtggttgggctgtgcctgggcctagcacgnacatggtctgtcctgacagcactcctcggcaggcatggctggtgcctgaagacccccagatgtgagggcaccaccaagaatttgtggcctaccttgtgagggagagaactgagcatctccagcattctcagccacaaccaaaaaaaaataaaaagggcagccctccttaccactgtggaagtccctcagaggccttggggcatgacccagtgaagatgcaggtttgaccaggaaagcagcgctagtggagggttggagaaggaggtaaaggatgagggttcatcatccctccctgcctaaggaagctaaaagcatggccctgctgcccctccctgcctccacccacagtggagagggctacaaaggaggacaagaccctctcaggctgtcccaagctcccaagagcttccagagctctgacccacagcctccaagtcaggtggggtggagtcccagagctgcacagggtttggcccaagtttctaagggaggcacttcctcccctcgcccatcagtgccagcccctgctggctggtgcctgagcccctcagacagccccctgccccgcaggcctgccttctcagggacttctgcggggcctgaggcaagccatggagtgagacccaggagccggacacttctcaggaaatggcttttcccaacccccagcccccacccggtggttcttcctgttctgtgactgtgtatagtgccaccacagcttatggcatctcattgaggacaaagaaaactgcacaataaaaccaagcctctgnannacccccccccc

SEQ ID NO: 690382 - DNA, 1029 bp, Homo sapiens
  misc_feature (5)..(5): n is a, c, g, or t
  misc_feature (98)..(98): n is a, c, g, or t
  misc_feature (125)..(125): n is a, c, g, or t
  misc_feature (129)..(129): n is a, c, g, or t
  misc_feature (132)..(132): n is a, c, g, or t
  misc_feature (173)..(173): n is a, c, g, or t
  misc_feature (219)..(219): n is a, c, g, or t
  misc_feature (228)..(228): n is a, c, g, or t
  misc_feature (234)..(234): n is a, c, g, or t
  misc_feature (243)..(243): n is a, c, g, or t
  misc_feature (247)..(247): n is a, c, g, or t
  misc_feature (259)..(259): n is a, c, g, or t
  misc_feature (267)..(267): n is a, c, g, or t
  misc_feature (1015)..(1015): n is a, c, g, or t
  misc_feature (1017)..(1018): n is a, c, g, or t
ttgangagtttcgtggaagagggaaagcccagggattggggaacctggatgggagaagtggagaggcatgtggagggggtgagtggggatgggtgggngttacccagcccaccggggagggggtncatnccnttgcccccatccggggacccagaaaaccctggggaggagancttgggatggagggagtgggtgtggggctgttgccctggggccctnagacaccgnaacatnggttctgtncctncaccaggcactncctgcggncagggcatggctggtgcctgaagacccccagatgtgagggcaccaccaagaatttgtggcctaccttgtgagggagagaactgagcatctccagcattctcagccacaaccaaaaaaaaataaaaagggcagccctccttaccactgtggaagtccctcagaggccttggggcatgacccagtgaagatgcaggtttgaccaggaaagcagcgctagtggagggttggagaaggaggtaaaggatgagggttcatcatccctccctgcctaaggaagctaaaagcatggccctgctgcccctccctgcctccacccacagtggagagggctacaaaggaggacaagaccctctcaggctgtcccaagctcccaagagcttccagagctctgacccacagcctccaagtcaggtggggtggagtcccagagctgcacagggtttggcccaagtttctaagggaggcacttcctcccctcgcccatcagtgccagcccctgctggctggtgcctgagcccctcagacagccccctgccccgcaggcctgccttctcagggacttctgcggggcctgaggcaagccatggagtgagacccaggagccggacacttctcaggaaatggcttttcccaacccccagcccccacccggtggttcttcctgttctgtgactgtgtatagtgccaccacagcttatggcatctcattgaggacaaagaaaactgcacaataaaaccaagcctctgnannacccccccccc

SEQ ID NO: 690383 - DNA, 102 bp, Homo sapiens
aaagctgaagtcggctaggtttgcaaagctgttgggctgagcactcaggcattacaactctcagaactgcggcggctctggactgcagcctcccaagctcca

SEQ ID NO: 690384 - DNA, 157 bp, Homo sapiens
catattatagcatgggactacgcctataccttctgcataatgaattacctagaaatactttgcaaggagagccacagctaagtatccccgataaccagacgagctacctatgaacagctacaatagcacacccgtctatttcgcatacatattgcga

SEQ ID NO: 690385 - DNA, 634 bp, Homo sapiens
aagctttaagaccttcctttgtgcgtcccggtccagcactgtacgtgagcatgtcatagctgttccaagaagatcttggtcatgactggtgctggtttctcaccgataaaaacgcctgggggaccggaatttttggaacaattccaattgaaggtcactgagggtcgaataattggactgtatctaagcgggagtcaaagtggagctgggaatcgaaattaagtgcgcgggcgttggaaataaaaaggtgaatcgtccttgtgagtctccttatccatgttgagatatgaaagggaaccaaagtagtcataatctttcaggccaaagagaaaatggcagcgattcaatataactctgagaagatggataaaatctcctccgtgtgtcaaacaaggcatctccaggtcgatgataaacgacgcgcgattggccagatatgatgaaccgggaccagttctaggcgacggaaaggaaggagaacgacgtcatcataaattcctcggaccatgcacacaggctaatgaagacattccatcaagcgtgagaccggactgtaagctgtcggctggacgaaattaatacctgagtcattgcgaactagactaaggccattgatttcctaattcagtgctct

SEQ ID NO: 690386 - DNA, 305 bp, Homo sapiens
ataaaaacagccaacaggtatatgaaaaagtgctcaacatcactgatcagcagggaaatgcaaatcaaagccacaatgagataccacctcacacctgttaggttacatctgctattgtcaaaaagataagagatagcaagtgtcagcaagggtctggagaaaagggaatttttgtatactgttggtggaatgtaaatcagtacggctattgtggaaacagtgtagaggtttctcaaaaattaaactatcatacacccagcagtcctgtgctgatagataccaaggaatggatcttaaaaaaaaaa

SEQ ID NO: 690387 - DNA, 829 bp, Homo sapiens
atcaaaagatctgtagaaaatcaggaaagtgttgaaatgataaatgatctagaaagttagtacggtaacaagtcctagcagaatgatcagaaaatggagaagtactagttgagatagcgtatcgttgaaaatacaggaaataagcagagatagataagatccagtgcacagaatgcagtctgtcgtattaaacatgttagaagggtcagagggagagaagttgaagtccatcagcatgagagacgactccaaccttgagtcatcatcagttgactagtagcacagcaagaattctgatcatagtctgccataccgtagaaaacgtggtagaccgaagaaaaatcaatccatctgagagatgtaggatgctaaggctgtacggaagagaggaagccccacgaagaaggacagctcccagtcattagaaggagatctgacaagaaatgaccccagctacatagtgagaaagtgttgatgtgggagaacgcagctttcggcaaatccagttgcagtgcgcaagacgaggaactattcgagggtgatgagcgctaagaaaaaagttacaagaacagactgacaagtcaagccagaaacgttcattgcactcagtatcagaagaacgcacagatgaagatgactacataaagaaacaagatgagcaggaagaaagagatgctcgccgcaagcttccttcactaaatcgatcccgcagcagcacgactcggtctagcaaggccatctatgtagccggacctttctgaacaaacaatgagcctttatttccccaggtcagaaagttccaggaagcaaaagtaaaaaatagaggccc

SEQ ID NO: 690388 - DNA, 311 bp, Homo sapiens
ttacccgagatttccccttcaactataaactacattcctctcatagttatcttggcctctgtattagaataagcaaaaaaaaaaaaaaaaagaggaagatattccccttgggggttaaaaccccggggggacccaaaagggaaaattccttcggaaattaaaaattgggaaggggggtttaaaaaatgggggggaaaccccctggccccccaaaaaaagggttaaaattaagccaattggccttttttgtttgtggaaaaaaatcaaaaccccccggccttgtgcccctgggaggaacaaggggccccccc

SEQ ID NO: 690389 - DNA, 727 bp, Homo sapiens
cagcacgggatctgatcttatccgatccacgtccctgggaccagttctatccggtagattctctgtgaccccttcggaggcaagggaacaaggcaaagaacaaacctggacatgacagtcgcagcgtacctcatgagtgcaggcagtgctgcgcaagccgacggatgacccattgttaaggtcgtgaccccgattcgtggcaaagatgggagcgtgtgtggcatcgactggcggccagatgacatctgccaccatttctgcatgtctcgcagtctctcgctctgcctgcttgctcagaaagacgcgctggctttggccaacagaggctcagccccagggatctagagagtgtacagaacccaggctggaaggatggcgtccaagctacgggtgtaggactagtcctcactgtcagtggagccaccagaagcctagatgctgtaaccaaggtagggtttctacggttcccaccatgaggactgagggaatcctgtacaggatgtacgcagggtagatggggagctaggattgggacctgctctgaacagctggacacatgagctctggatgagtatggtagggggttctgaacgaatcaccatgtccactctcccaaatcaggcccggccccctttggcttggagagcacttcaagccccacccacccctagaactgccattacccagacctctgtctcccagccaaccaccttggaactgcctctgt

SEQ ID NO: 690390 - DNA, 197 bp, Homo sapiens
gagccgcaagctcagggtgagctggcacattaagatttcaaaacacaaaagggaaactcacacataagttagccaataaactcaagagataggaggaaaataagggagaaatctgagagcatctttgaaatcagtatgtttaagatctaagaggaaaagaaggaataacatatacacacaaaaaaacaatgaagaca

SEQ ID NO: 690391 - DNA, 353 bp, Homo sapiens
gtatccccgcacccggcgcacttctgggaagcctgacacagccggatatgatcacaccttctgggccacggggatgctgctgcttgggatgtaaggggcccagcagtgcgggggagtctggctgcccctctagccctgtgagtggggccgggaagctgaactgtctactgcaaaaatacggatcgataatcgacctcatccagaggaggccagtgtgtcactatggactgtctcacgcagggatcctcctggggaccaccacactacgtcggtggtgagaactctccaggtccggggacctccggtggccacggagaccacgtgtcagtggccaggataagtgcgcctgggtt

SEQ ID NO: 690392 - DNA, 320 bp, Homo sapiens
  misc_feature (23)..(23): n is a, c, g, or t
  misc_feature (60)..(60): n is a, c, g, or t
  misc_feature (98)..(98): n is a, c, g, or t
  misc_feature (197)..(197): n is a, c, g, or t
  misc_feature (224)..(224): n is a, c, g, or t
  misc_feature (230)..(230): n is a, c, g, or t
  misc_feature (251)..(251): n is a, c, g, or t
  misc_feature (285)..(285): n is a, c, g, or t
  misc_feature (309)..(309): n is a, c, g, or t
gctgggacggcaaccacccagcngggcagttgcgtactcaggttggcaaccagggtgttncgcaactgttgatccaacgggctggccacaagttgttnttggcaatcacatacttcacatcactggtttgataaaccacaccattccccgccagatagtcaggaacagtgacctgctctacccataacagacgattnccctggctggcggtactttgtgtaccnttcttncaccacaggtaactcgtaatnagtttttattaatttccgccggagctcccatccngcccagcccacagtgcttgcaatncgttcaattag

SEQ ID NO: 690393 - DNA, 127 bp, Homo sapiens
cctccttaggcaactggtgggtcccccgcccgggaggtcaccatattagatgccgaagttattagcggacacccgatcggcatagcgcactacagcccagaactcctgggctcaagcgatcctccca

SEQ ID NO: 690394 - DNA, 142 bp, Homo sapiens
cgctactccgccctgttcccccgtgtggcctacggacccacgcgctacaattacctaacacctcggccagaagaggagaggacgctagcagcacaagagaagcacacgccggatgcactgaaacggcttccccgagacattg

SEQ ID NO: 690395 - DNA, 373 bp, Homo sapiens
tccataaggtgtgccacagtcaagtgcgtaaagcacgcccgcgtttcgagggggctcctcctgccatacgggagaatcaccgggaatgctcagtaagttcctgacggtactcgaaaagctaaacttcattttccagtggacccccatggggaaacgctgtgcttaacgggaaagccactctgcttgggagaaagcccctccaggctctcgggctggctgaacacagctggacagcagacatcccgctagggcggcggggggaggcgaggcctggcacatgcacatccagggataacccgaagcgtgaggttgtgcagaacggtgcggggcctctcgacctggcccttcagtgggttactgttgcttatccagg

SEQ ID NO: 690396 - DNA, 865 bp, Homo sapiens
cggtaacagtattgaatggcatcaaaacattttcatttgtaatgtatttctttaacaagtggttaaaaaaagtgtccaagcagccgggcgcagtggctcacacctgtaatcccagcacttgggaggccaaggcgggtcaatcacctgaggtcaggagttcgcaaccagcctggccaatatggtgagaccccatctctactaaaaatgcaaaaagttagccaggcatggtggtgggcacctgtgatcccagctacctgggaggctgaggaaggagaatcgcttgaaccctggaggcggaggctgcattgagctgaggtcatgccattgtactccagcctgggcaacaagagcaaaactccatctcaaaaaaaaaacaaaacaaaaaaggtccaagcatggtgacatccggttttccacaatatttcggggggtatcacgtttcgggtatggtcacattcccattttgggggatcctggcttctatgatacttttgacttccttacctttttgggcacattgggttctggtaacaagatccctggccaataactggcaaaatgaccaactaatagcggcgatatctcagaaagggatttcccacatcgtaaaacttcggggcctttaaaaacggtggttgtccccccccaaacaatagaattccatgttacagttcacaacaaggtggtcctttcccaggttgtaacaacgtcggcctggccacactggtccactttttctgtcccccactagttacttatggccaaaaaccaacgtgtttaagacccgtggttgggatattacaagatatgacaagattggcgaagtggaaactctaaatttcattacacagcgagggcactaccg

SEQ ID NO: 690397 - DNA, 342 bp, Homo sapiens
tccccctcagtgagggaatacccatgtgcagagctctttgggcctggatatgggctcgggtggcaagaacagagagaaagtgctccgtaaaagtagctggaatcgggaggtgggcaagctcttccctggaggggaagagcttcaaccaagagggatttgaccaggaggttcacccccctttccacccaggaagcccctgcagacagtatgtgttttaggctttgctggccaaatggtctctgccgtgactactcagctctgccattgtggctgcagagtgaccatagaccttctgaaagtgaatgagtatgactgtgttccaataaaactttattgacagaa

SEQ ID NO: 690398 - DNA, 218 bp, Homo sapiens
  misc_feature (5)..(5): n is a, c, g, or t
  misc_feature (65)..(65): n is a, c, g, or t
  misc_feature (172)..(172): n is a, c, g, or t
  misc_feature (202)..(202): n is a, c, g, or t
gtgantttggcaataagttgataacttacatgttgggagtcttggaaccactcccagatttgctnatttgctggaagggctcacaggcctcaccatgtagtcctagtcatggctcttgtgtattactgtgaatggatacaaagcaaaatttgcaaagggtaaatgtgtatgnggcaaagtgtaaaggaaaaccaggtgcaancctccaaagttccttt

SEQ ID NO: 690399 - DNA, 101 bp, Homo sapiens
gggtgcggcgaggtatcaccgtcgatacctcaaaacgacaccttacaaccctaatattaacaaacaggaaacaatgacattttttagtttaatcaataatt

SEQ ID NO: 690400 - DNA, 120 bp, Homo sapiens
  misc_feature (71)..(71): n is a, c, g, or t
  misc_feature (120)..(120): n is a, c, g, or t
agcggagttaggggcaaaacaggaggcgtttccctacccgcatacatccccgtccccgagacaccaatccnggcgtgtgctggccgtagttgtgttggtgcctggtggcggcgtgttcgn

SEQ ID NO: 690401 - DNA, 1338 bp, Homo sapiens
catttcccagtgattactagggcctggtccctgaggaggaaatttgaatgggtccatttagcccttccatagcctaatccctgggcattgttttccacatgaggttggagggttaggaggtgtcactagattacacatcattcaaacaagaccccactctagaacatttttcagatgcttctggtgtagcacacccaaagggtgaagctatttatctgtagtaaactatatatctgtgatattaatgcaacatattaacaccctggcatccagtccatttgcatccagtcatcacattctttaacagttaactttgtccagcaggcaaccaacaacgggtttcacaacctgcattccatcaatcaacattcatctgtcacgttccttcgcatcatgtcaacctttaggtgcgtagtgatttctatcgagtatataatcaaaaccaagaagatgtccataggggtcccataccaaatggtcatccaggcaagcagcttgagcaaatggataaaggcagacatctatcgtaaggtcttcaatctacagagacacctgcagtccccaagtccaggacgccacatcaagcccaacatctccatggcaagacccaaggcagggcacagcactgaaaacaagaaaaaaaagacaaaaagacaaacaacacaacagagacaaacatggacccacaaggataaacaccagacactgacacagagaaaacaacaggatgggacaagaagaaaggcaccagaacaggaacatagcagaagcaacacacgggcacacaagaacacacaaggacaccgcaaaaggaaacaacacactaacaaatagcactgacagataaaccagagagaccacatcagaacaagacggatggacccacacagccacacatcgcacaaaccaacaacacgaacgcaacaacagacaaagatagcacacaagaagaaacaaccccaaggcaaagaaaaaacacgcacaacgaacacgacacccccacaaacaacagaagacacaggaagacagaaggcaaacacaaaacacacacgaaaagtcgaacagacaaacacagatagtcacgagaaagagaacacacaacgggacagaggacgagagtgaagcaaaaaaaaaagacacaaaaaaacaagcgagaaccaaaacacgacgaaagaagagaataacacagaaaggagaacagaagagaacagaataaagcaaaagaaaaaaacagacaaacaaacgcgacccacaacaacaaggaacgaaaagaaaaagaaaaaggagaaaaagaagagaaaagaaggaaagaagaaaaacaagaacaaaggaaaaaaa

SEQ ID NO: 690402 - DNA, 128 bp, Homo sapiens
tggctatcacggccagtcaaacatttgaacattcctcccttcaaaacatgctgaacagcggggatattaaaagcaaagacacacacacaacatctacaataaaacttgtggacagaatatcccagtaa

SEQ ID NO: 690403 - DNA, 155 bp, Homo sapiens
catcccatacattgggacagacctagtgcgataatctgaagatgctactcagatagacagtcccatcctcacacgattctttacctttcacttcactcttgcccttcattattgcagccctagcagcactccacctcctattcttgcacgaaacg

SEQ ID NO: 690404 - DNA, 844 bp, Homo sapiens
ggagccaggagcctgccatgaggtttgagaacagagtgctgttttagagctggcagcagcatctcagcccaagagaaggttatattcccagaggatgtcagtcccaaggaccagtagctgccatcagttggattctgaaaactaactggcatcaacactgggtgtagaaacatgcttgccttatgtatcagaggacatgctcagcagatccaagagatatattggcaactttttctagaaaaggcacatgggtatcattcattacattcttgagttttttgggttttttttttttttttggaaacagtctgtgctgtatggcccaggctggagtgtggtggcccaatcacagctcatggatcctcaatacaccacaggcctaagcaatcctcccacctggtagcgggggactacagctcacagcacaccgggctaaaatttttttttggtgagagggattctctatgtggcccagggggtctcaggctcggggctcaagagggtcctccggctcagttccaagggcacaggccagttgtagcttggtcctggcatatgcccaaaagaggtactatacctttacggaatggacttccataaactgggccctatgtgggggggcaagttccttaaagggcggaaatggtaaaattcctccggaaatgtttctccaggccgtaccaggacctattacaacagaacggaagggtctggggtcatctctgaagcaaaagagaaagaagagaaaggcacagcagagagcgacgaacacagacacgacaccacgaaaaaaaggggggaaacagaggagcagtcccttttgggccaggaaaagcgcggacaa

SEQ ID NO: 690405 - DNA, 621 bp, Homo sapiens
  misc_feature (21)..(21): n is a, c, g, or t
tatgatccccctatgtggtanggttataatcaagagatacaatgaaggatagtagatgactgatacagtgtacgagcgcagaggctgcgagagggggtgtcgactagcacagaacgtgaatggcaataaaggaatgagtatagtctagcgcggtttgagtggcgtaggctgtaggataactgagatgattagagcaataagccaagaaatatgaatgctgcatagatatgcagatactctatgtaatgaactgtgtgagttgtttacgtatgattcagtatgatgaggatcgttactggagtttcaagtcggtaacagatgatagcgtgtctaaggggccgcgaatgagatagtggacggagtggaggacgtgagcatagaaggggagccgcagagaaaggcgaaaagtgagagaaaggagaagggatacagtcgcagcacgaggaagccaaaggcgagtaggagcctaggcgacgaggtacagctatcgcacgggacatgagagacgacggagaccctgcatactggcgggaggtgttttatgtgcggctgtgacatacgcgctcaatgagtaacgcattaaggcctaggatggatgcgtggagcagacaggcaaccggt

SEQ ID NO: 690406 - DNA, 914 bp, Homo sapiens
tctcatacaatataaaatatatatatactataaaaataaacagcaataactattgtcgtcgctacacgctgttcaccagtcttaccctctatttagcgccgaccacaatttttgccactaccctatagcgagtcacctgtagaccgctatctagtagcctctccctctctactagtggacaccctttatctcccttgggaagccctctttcttacaggtgctattacacgcgccgtaaagctggtccttaaacgagctctgctcgctatatgctcccaaaagttctgtaatcatcattcattattggaacggtcctctttggatttcttgcccccgcaccccagtgtatttacttggcccaagaactaaggggcactatgtctccgtatctggctgagtcgctactatctgttgggccccagcccattcctttgagccagccacttctcacccagcttgttagaggcggtgctttatccgccgtcaggaaacttttggagagaatgattggggccccccctaggtgttctatgtatcgattcgggatgttcttctccagtctctggatcgtctcataaagtatctggccccactttttcccacagagaacatttccgcaacctcttagatgccctcctccattttcataaataatctgatccttcggtgtttttgtttatgcaacaacgtgcaccccaaggtcatagtttttccccccaaggtcatgcaaataaaaaaccgccacgttcaccacaacatatcggcccatgaaccgccccaatctccccgattcttcccatcagggaaacacccagcatgcttacaattaacgcccacgcccacaaattttcttcacttcatcccccaggctttttcgggcttattccaacaaatgttccctgttccacatgaca

SEQ ID NO: 690407 - DNA, 385 bp, Homo sapiens
ccgcgactatagactcgcatggtgcctagtgttccaggaatcccaggtccttcctctccccgggccgacagttagaagcaaaaatgccacccaaagctgctttgacccagcaacatcctccagttaccaatggtgatactgtcaaaggtcatggtagcggattggttaggactcagtcagaggaatctcgaccgcagtcattacaacagccagccacatccactacagaaactccggcttctccagctcacacaactccacagacccaaagtacaagtggtcgtcggagaagagcagctaacgaagatcctgatgaaaaaaggagaaagtttttagagcgaaatagagcagcagcttcaagatgccgacaaaaaaggaaagtctg

SEQ ID NO: 690408 - DNA, 198 bp, Homo sapiens
agcttagacatcgagtatactcaggggatctgacggtgacgttcgagtacttctgtgtctaaatatatatagactacatgggcatgatctcagagtgtgaggtaaatgtaatctggaataataagtgtcttttacctagattacatctctcatttggagtttggcaatgaaactgctattgaaacttctaaaactagg

SEQ ID NO: 690409 - DNA, 100 bp, Homo sapiens
tacatgatacgactcgagttagtaccctctaataaatctgcccttctttactacaactatcttggtaaatggctttaccacctgcaaaactgaccctagg

SEQ ID NO: 690410 - DNA, 151 bp, Homo sapiens
gatgggtaggatgcggtaggtaagctggtattgagtagtatgtatgtcccagcgtccctccaaagtagtaaagttaaaatccgggatctcagtatatgagtaatccgataccagtatcgagttggtcgtactatatatcgttttatgatgt

SEQ ID NO: 690411 - DNA, 123 bp, Homo sapiens
  misc_feature (15)..(15): n is a, c, g, or t
  misc_feature (73)..(73): n is a, c, g, or t
acgctttatacttcnaacgctttatacttctcaacgcttctcatttcatttcccggtatgaagtataaagcgntgaggaagtataaagcggagaggaagtataaagcgttgagaagtataaag

SEQ ID NO: 690412 - DNA, 470 bp, Homo sapiens
tacacgcacactccacactaggtttcttgatagtgtccagatagctgtagctctaggtgcagcctgagtccgctgcaagaggattcagatgtcgctcttgacgagttggtcagtgaactcctgatagatcgagttcgtgcatacagtctcaggccagatatctgtggccaggcagctgaaggttctacacatggcttcgcagcagacctgggtgaacttgtccaggtggtcagagctagctcgtctgtgatctgtctgtcatcatggcatctcactcataagcagcttcttaggctcaggctacgatgcacgatggtatgtgcctctagtgcgcaggtataatacgcttgcagctcagatcccctccggcccgtcacctagtaagtctcagtgtgcagcttgccgatcctgttgcctcagcagcctctgcgtacatggtctatctaaagcttgatcataataatgtccag

SEQ ID NO: 690413 - DNA, 488 bp, Homo sapiens
ttaatcaagaacattatgtgaaatacacactctggtaaacatctgaattcatccatcctaaaattagactttaagaggcaaaaaaaaaaaaaaaaaatcatatagattttaacactaacaagcctaccagaataatgctgatggcaagccattaacagctttaaatgctgactgtaatttggggaaggggagaaaaagaaaatatttgttgtacctatatttaaatacatctgttagtgagacttctttaatttaagggattttaacaaaaggacatactcctgagcctcttggagtttttcaagcttcgtttttaaacctcgtgaccttttcacctaaaggaatcttcatacccctccggatctcaaattaactgtatgtgtataagtcacaaaaccctcccaatgcgaacaacgttgccgtcaaatgtcaccaaagctatctctcctttgttcaccctctctgctcatagcccatatatctgtatc

SEQ ID NO: 690414 - DNA, 1013 bp, Homo sapiens
cggcaatgctgcgacactactcggaatgaatcctgatggattacctcctgcacttaggatattagttgtcgaatgtatgtgtactggcttacctctcgtagttcgatcctatacacagtgagtcgaattcaaatgtgggctatgagtgtcttgttgataggcctcatttcgacatattcaatccgcgagaagatttccgtattatacgggttccatgggaatccactacacagtaaacaactcattgggtagtaggattgtgcgtaatgggtagtagtcgccctctcatacacataggcgaccacaaatgtccgaatgaaaaacccccggtatacgctcggttttcctagaacctatttgggggggggctcttttacctcccacatacaaccgtgttaagcagaacacataacgcgcgatgtaccttcgagtgagtttgtggtgagagtggaaatccatagagctccccatggacttatgagagacaataagaggcgtggagttctgctttattacctttaaggaagaagaaccagtgaagaagataatggaaaagaaatagcaaatgtggtcttagtaaatgtgacatagaagtagcatgtcgaaggaacaatatcaggaagagcaacagtggggatctagaggaggatttgcgtgaagagctcgtggcacgagggcggtagggcccagtcacacactggagaccagggaatatagtaaccactggcactgcaagggtaatggcaacaatggatattacaggccatgggtacgggggtcaaggcaggatatgactaacccggtaacaccaaccaccagaggggcaggcgatacaggcaccagagcgggtatggggaggcatcccgccagggtcctcaaaagcaacacacaaaaaaatccaatggaactacccaaggtgggaacaactcaaggcacaacagacagggccgccgcgcaaaagacgcacagtagcgcagcacaagtgaccgcaaacccacaaaagcgacgaacgc

SEQ ID NO: 690415 - DNA, 184 bp, Homo sapiens
tggatacttgccctgtactcccagacatcactggtggtgtgcctgctactctcagcactttgggaggccagggcaggacgatctcttgagcccaggatttcaaaaccagcctgggcgatatagtgagacccaatttctaccacaaaaacaaaaagcaaacaaagagaacggataagacactgca

SEQ ID NO: 690416 - DNA, 156 bp, Homo sapiens
ttataactggggaactggtactggaactggaacgacgacctggaactggacgaactggaacgggaactgggacgggacgacctggaactggaactgccagaactggacgacactggaactggaactggacgacccggaactggacatggacgaact

SEQ ID NO: 690417 - DNA, 514 bp, Homo sapiens
  misc_feature (201)..(201): n is a, c, g, or t
ataaaggcagatccctgatgggcccgaggctcaggcggaggcgtgtcctggggagcgcacctactcaggagctgtgtcaaccagaaccccatcgccgcagcccctggtttctcgccgcctcacgcggaagtctacaaatgcatcaagaacgcggtgaagcagaagcagatacggcgcggggtgaaaagaggtccagaaatntgtgtcaacacaagcggacgacaacagggcatcatgggtttgggccaggagacacattgcccaatttgagggtatacgtgccaatctcccaagtccattgtttgagcgcctgaaatttgggcctaatgtctatatccccttcttaaggagggaccttgggtttgcagccggaaggctacaaaggggcacaaccttgtgtgcatacagggacaagccccaatgaggagtaccagggaggctaacaatgaatgccttgaagaagttgcagcccttgcccatacccatatgagggctccggaagcacctgggaact

SEQ ID NO: 690418 - DNA, 187 bp, Homo sapiens
atagccggtccgcatcttgccccatcagaaacatgcagtcctttccttcgttagagctcagttcttagactgctggagggcttcagtgtagtaatctatatcatgtccccaattttttttttttttttttggaaatggagtctcgctctgtggcccaggctctcttcctgttgggccgcaaaatgcg

SEQ ID NO: 690419 - DNA, 139 bp, Homo sapiens
ggctgactttagagtattcccccctgtctgctaccagatcttgtcaggaatcatgcacatagaatttataattaagagcataccgctctgataccactgatccatatttatcagaggaacgacatgaataacacattgt

SEQ ID NO: 690420 - DNA, 113 bp, Homo sapiens
caaccatctgatatcttccttccatctcatctcccttcctcttctcttctttcctcctccccttctatgccttgctccctattctccttactctatgctcccctccttccctc

SEQ ID NO: 690421 - DNA, 432 bp, Homo sapiens
  misc_feature (387)..(387): n is a, c, g, or t
  misc_feature (405)..(405): n is a, c, g, or t
  misc_feature (428)..(428): n is a, c, g, or t
atttatttccttatccttcccctccttcttttgcagttttaaattgacttgaactacaaaaacaccaaccaaggttttgacaatggtttaaatctgattttactgaagactttttttcttttttctttctttttccttttttagcattgcagaaattgaagagaaacaaaagatccctttatggcatttatacttatatttacagagtggagtagtggatggaaattagtagagatggaaaatcctggtgacatttcataaatatttttaaaggctgttagcatcttttgccattcattgcaattattactttggatctgtctgatccttaatcattcaaaatgtgctgctcagaaaatgtggtattatgaggaagatagaatatgncaaaatgcagtgtttctnatggcattaaagttttttttttnaaat

SEQ ID NO: 690422 - DNA, 426 bp, Homo sapiens
gcaggggccatgctggtggctcgtgcctgtatcccagaactttggaagctgagcagccggatcacttaggtcaggagtttagaccagcctggcagcaaggtgatcctgtctctacttgagtacaatcaaaaattagcgggtccagtgactgcgcctgtcatccagctcttggcgacagtgaggcaggagaatcgcttgtccccataaggcacaggttgcagtgaggcaagattgcgcctctacattccagcctgggtggcagagcgagactccatctcaaagccaaaaagcaacctagcatcatgataaaagggtcatttcatcaagaagataaagacatttctcttttgaaatatattcttatggatattttgatccccgccgtttctttgtgttgggcacattccaattcttatcttctggctt

SEQ ID NO: 690423 - DNA, 192 bp, Homo sapiens
tggtgccgtgcgaaaaagctgccttcgacgtgcttctgagcctctgttaggccgtgcgttgctgtttccatggctgctgtggtggtgtaactgcgtatccggatcgtagtttctggaggatctggataatgcctcgggtatttacgcctctgagctggagcttgcccctgtgaggacttcgccgtattctgt

SEQ ID NO: 690424 - DNA, 266 bp, Homo sapiens
gattactgtacgacctactgtaactactcctatattacttttccacagctttatagcaacctatatgagggaggtgatgtgatgagtggcatatattgcaaataaggtaactgaggcagagagagagaaagcaatatccataagatcacacagctgaagggtgagagctataaaaattgctgggaatgaggggccatggtatctaggccatggtatctaggaccatggttacagaagctgtgataccaacccatacttccactatg

SEQ ID NO: 690425 - DNA, 199 bp, Homo sapiens
cgtctccgtgagactccacccaatgacctgaggcaattctcaggcctctactagtcaagcaagcctggcttgtgctgatggctttcctgagcagtcataaacttacagtgatctcccggggttccccttcgttgccctcgctttctgtgctcctttactgggacttctacaactacctgtgcccatgtctcacggagag

SEQ ID NO: 690426 - DNA, 132 bp, Homo sapiens
  misc_feature (105)..(105): n is a, c, g, or t
tttagagtagaatcaccacttattcccctgatcttttccaaacttacccaatcattgagcatgcttgacctgggcttctgagacagggcctgtcaccccggctgnagtgcagtggtatgatcgatgactcac

SEQ ID NO: 690427 - DNA, 391 bp, Homo sapiens
tgactaggtagtccgatagggtgaggatgggaccaccacgactcatcttcacttgtactcgttaacaggcattgaatccagctctccagaggtgagaggctattggggtaatgattaaaaaaaaaaaaatcggtagtattctactgtgatattaataaactggtgggagtctggtttcactgcccatgaaccataccagcaacatgcacatggcagagaggagctgagagagcaaaggggtgggcctggagcccccgagggtcccttgagggatctggccaacccccttctaaaaatgatgagacagcagccatagctgagatcaggactaagcttgagtgttagccagctggccgggttcagtccaggtgtagttaaagatgggtacggg

SEQ ID NO: 690428 - DNA, 664 bp, Homo sapiens
aagatggcggtcttggcacctctaattgctctcgtgtattctggtgccgctgcactttcacggatggctctgccccaagctttagtaacttgatgattggggcctggctctatgttgggctatattcatgtgcaggaaactgcccgacgctacctggccacggtcctgccacccaatgcgcaagcacggtaacccgtgtgcactttgacctggcagagcaagtggcagcatcctgcatgtattctacagtgccccattgtgcatgcaatgaagcaacccgcagatccatacactgtggaggcaaacatcataggcaacatttatcatgtctcaggtacagagtggccaacacaatttactcttgcttccgctttgggatattctgcattgggcctacatttacatacacactctgcatagtgtacctgatgacgtgcaaaccccaccctatatatgggccctgagtatctcaagtaccttcactgactaaagaccattgatgaggaactagaacgtggacaagagggtcacttggattgtggaagttcttttgccactttggtctaaatgacatgccaactacatttggccccctatctatggcgtgagctctccccttaacgtatcaacttgtacctgggctacaattttggcgaacggtgga

SEQ ID NO: 690429 - DNA, 396 bp, Homo sapiens
agtatagtaagactctatgaggcaacagatgttatgaatctcaggcagtggtcttggcagcatgagatctacatgtcagctaagcggtcgtggtatttctcggaacccatacggcgcatcacgtgcagccgatgaatgttgactgtgatatctagacatgtttcagaaggaatccaggccctctggtggtggtggccaagaagcgaacgtcgacttgattgtctcctttctgcatgacttaggctggccaaacaccgaagacactttccattttagccctaaacccagctcatgattaggtatacaaggcataacagaacaagttgtcaggacgagcatttgaccaagtacaaagcaattctggcaaagctgcagttcatccagctagagacacgc

SEQ ID NO: 690430 - DNA, 430 bp, Homo sapiens
tgctcggtccccctggcttgctcaggtctcggatttttctcgcagctcaaggcaggagagctttgattccatcctgcatacctaagagctttcatcatggctatttgctcttcagatgaacccatccagtcctagctgaagcctgcatgtttctctgacttccatgatcctctgtcttctgcttttctttacgttttcattaaatgacctcaacacattgtcttccccaactgcttggtctgtccctgtccataatataacagtttatatccacactgtttttccaatgacctcaggctagactttaaacacaaaaatatctacagtcagaggtagacccttccccaacagtctttggatacagtatatatgcgtcataggtctttccatctgaagctttgattgggagaaaatcatagcaggaatccct

SEQ ID NO: 690431 - DNA, 144 bp, Homo sapiens
  misc_feature (11)..(11): n is a, c, g, or t
  misc_feature (40)..(40): n is a, c, g, or t
  misc_feature (127)..(127): n is a, c, g, or t
gtcaaagcgtnatggagtggaagtgaaatcacatggctangcccggagggtcattaggaggggctgagagggcccctggttacggcgtcatgggctgggtttgactatatttgataggcatgtgatngggtgggggtcataacg

SEQ ID NO: 690432 - DNA, 148 bp, Homo sapiens
tacctctcgacgctgggaatcggtcctggtctatcagcgcaaagcgcacgtgatcgtcgccatactcaccaaaaccaatccccggcgatacacgcaccttcgcctcaagcagcagcttcttggcaaattccagcgaccccatcgcggc

SEQ ID NO: 690433 - DNA, 186 bp, Homo sapiens
cgagcagtgtcgggagcagcacgctgccgagctgatcccgaacatgctgtagctcctcctccttgcccttcagctcgggagcgtgctgctcccgacactgcttgaggcgctgctctagctacttctattgaacatgcatggaatggacggcggcgatgcagacattgcgccattgcgctccaggct

SEQ ID NO: 690434 - DNA, 753 bp, Homo sapiens
  misc_feature (33)..(33): n is a, c, g, or t
  misc_feature (88)..(88): n is a, c, g, or t
  misc_feature (116)..(116): n is a, c, g, or t
  misc_feature (142)..(144): n is a, c, g, or t
  misc_feature (205)..(205): n is a, c, g, or t
  misc_feature (233)..(233): n is a, c, g, or t
  misc_feature (264)..(264): n is a, c, g, or t
  misc_feature (270)..(270): n is a, c, g, or t
  misc_feature (289)..(289): n is a, c, g, or t
  misc_feature (298)..(298): n is a, c, g, or t
  misc_feature (300)..(300): n is a, c, g, or t
  misc_feature (310)..(310): n is a, c, g, or t
  misc_feature (312)..(312): n is a, c, g, or t
  misc_feature (356)..(356): n is a, c, g, or t
  misc_feature (387)..(387): n is a, c, g, or t
  misc_feature (474)..(474): n is a, c, g, or t
  misc_feature (501)..(501): n is a, c, g, or t
  misc_feature (504)..(505): n is a, c, g, or t
  misc_feature (511)..(511): n is a, c, g, or t
  misc_feature (561)..(561): n is a, c, g, or t
  misc_feature (569)..(569): n is a, c, g, or t
  misc_feature (614)..(614): n is a, c, g, or t
  misc_feature (633)..(633): n is a, c, g, or t
  misc_feature (641)..(641): n is a, c, g, or t
  misc_feature (738)..(738): n is a, c, g, or t
aaaggagtaaaagaagtgatgaaataagagtancatccatccaggaaaggagtgaacaactacagctgcatggggacaaaaatttttntgagattagttttaaaggttcatgaatnaaagttttcaaatgaaaacaggtagnnntcttttcctgtagggtttccagctcactacccaaaagacttgagtaattatattaaggcangtggaagacaccataggacttgaatggnaccttgtcctttctctgccagtaatggaatngaacanaatatggtacagggaaaanagaatttgnanggtggggcgntntggtagaagggaaagagcacgcaaagcaaaaggccacagagggntccctgagaatccagtacaactaagcgaggncttcaactgtcaagacaaactttgcaactggatcccggtgggacagtgccctgcagcgaggagtactgtatatgccaatgagagggnccagcttccaggaaccgttacaatggngtnncgagtnattttccctctcccacttgcattcgagagttagaaaacacacaaggtggncttgattntcactcaccacaatccccctgtacagaggggtctgtttctaagtntggaacctcaacacgaggntgggatgnttcacaacgtgctctctcccactgtcaagccatctttggtggtcttcccacagtgcttcccccatcctctcacactcctgtggagggaccatggganggggcaggaggaaac

SEQ ID NO: 690435 - DNA, 323 bp, Homo sapiens
  misc_feature (42)..(42): n is a, c, g, or t
  misc_feature (63)..(63): n is a, c, g, or t
acaggccctcagagtgctctgtaggagctgtagactgggaanagaggccaggcgtggtggctnactcctgtaatcccagcactttgggaagccaaggtgggctgatcacttgatcccaggagtttgagaccagcctgggcaccatggtgaaacctcgtctttaccaaaaaatacaaaaattagctgggtgtggtggtgcacacctgtagtctcaactattggggaggctaaggtaggatcacttgatcccaggaggcggaggttgcagtgagttgcagtcacacccctgcactccagcctgggtgacagctagaccctgtctc

SEQ ID NO: 690436 - DNA, 152 bp, Homo sapiens
  misc_feature (139)..(139): n is a, c, g, or t
acatggtgccctacaagggatgtggtatggaaggtaagaagacatgggttccagaactccttctggcagtgagtaactcgcaatgtgggcagagaactcaagctcttaagggctcattcatcccccctaagttggaaanaacggcacgtgca

SEQ ID NO: 690437 - DNA, 307 bp, Homo sapiens
cgacgaagccttctgaatatggtgcggattcgacggagagaaaaggggtgcttccatatgcaagagcattcatgggtctccagattagccagtcaaaggagggggcaaaggggcaaacctctaaaatcaatcaccacgaaagggtgacaaatgcagcagggtgttcgctcatgaaaaataattcagtgaagaaaatccttctttgaaagtagaatacatagctaagaaaaaggagtgcaaagatgaaataaataagaataagttgataaaagtgagcaataagttactatatatccccagttatgga

SEQ ID NO: 690438 - DNA, 449 bp, Homo sapiens
gatctagaggctcccccaatgatggtctcagctcaaccaactgcactgaaaatgtttggggaaaatgaaataataatgaaaaagagcaatacaattaaaaataatacagatttaaaaacaatatagtataacaactatttacatgacatttacattgtatttggtattttaagtaatctagagattaaagtatacggggaggatgtgtatagagtataggcaaatattaggcattttatataagggacttgagcatccgcatgtattttggtatccaagggatcctggaaccaaacttccaaaggacaatcctgtgccatttgtatgttgtttgtgttcagatgttagggttttcttacattttttgtattttgaggggtgttatggtacttttttccttaaggaaagctgttatactcactaaaacataagccactgaaaagctgtca

SEQ ID NO: 690439 - DNA, 705 bp, Homo sapiens
  misc_feature (507)..(507): n is a, c, g, or t
  misc_feature (639)..(639): n is a, c, g, or t
gggtgatctagaggatcccggatgtgaaataggtaggtagtagtttctctggtcgtactcaaaactgactaggctagttcatgtccaaaagcttggtcaaatggcattattagataaccactcttacaaacatcaggtactatttatttctttatttagagacaggttctcgctttattgcctgggctctggagtgcagtggtgcaatcagcgctccctgtagctttgacctcctgggcaaaagtgatcctcccacctcagcctcccgagtagctgggaccacaggcacatgccaccacacccagccaattcttatattttctgtaaagacaggttctccctatgttgcccaggctggtctccaactcctgggctcaagtgatcctcccaccttggctttcccagagttctgtgattacaggcatgagcggcagccctgggcatggtacattttgatactctcaacaaacacataggctgagttactagttatagtatatgtttttngtttgtctggttaggtttttcttgagacagactctcactctgccttccagtctggagtgtggagtgcagtggagcgatctcagctcactgcaacctccacctccctggttcaagtgattctcctgcatcagnctcccgagtagctgggatacaggcatgcgccacacgccggctaattttggtatttcagtaaaatgg

SEQ ID NO: 690440 - DNA, 512 bp, Homo sapiens
acctcctaccccacgaggtgtacctcagattgagtcacttttagacattgatgccaatggtatactcaagtgtctctgctgtggacaatgagtcgggaaaatgagaatcaagattactatcactaaatgacaagggcgcgtttgagcaaggaaagacattagaacgtatggtccagagaagctgagaagtacaaagctgaagatgacaagtcagagggacacggtgtcatccatgaattcacttgagtcctatgccttcaacatgaaagcaactgttgaagatgagaatcttcaaggcaagattaccgatgaggacaaacagaagattctggacaagtgtaatgaaattatcaactggcttgatgagaatcagactgctgataaggaagaatttgaacatcaacagaaagagctggaaaaagtttgctaaccccatcatcaccaagctgtaccatcagtgcaggaggcatgccaggaggactgcccgtgggtaggaggtgtgtaccgagctc

SEQ ID NO: 690441 - DNA, 253 bp, Homo sapiens
tgtcataccccttcgtgagggtgcaggttgcctgagagttcatcagtacagtcttcatcttttgaaaggcgggatcgcttatgttggtcaaacgtgaggggaaaaaagcacgacctactgcacgaaggggaagatccaagcttcgaaagatatcccaacaaatatcagtgcactccagcaagaaaatgagcctccaccaccaaggaaatgaccttgagagaatcagccagggcgagcaagtacgagcgggagg

SEQ ID NO: 690442 - DNA, 1833 bp, Homo sapiens
  misc_feature (196)..(196): n is a, c, g, or t
  misc_feature (235)..(235): n is a, c, g, or t
ggcccaacacctacagactggcggattgcatgcggggctgctacccgccggtgcggccgctgtgcgtgcgtgcctggtcggcccctggcgaatgggaggaatccggcgggtgcgtgttccgttggacgagtgtgccgtccggtggtgttccggaggcctgggtgtgttgcgctgggcggacggacggcgtcgccgngaggcccggtggtgtctcgtgtgccgactctcgtcgggngagcgcccccgagcagcagcgcattgaagcgatctgtgagttgcgcgccgatcgagcgccacaggtataggggacctgcccttaagcggttcgagaggcggaaccagtaggagacggcactacgaaggtctacacgcctgtggaggcgaatcacttcgtaactccttgtatacgttacccctgccacttaagtataacaagggtgagactactacgggatcaatcacaatatcgatagtgtgacttgtaacatttggggagggacacgtaattctttgcggcagagggcaaatcgaacgcgttttcttagcaaaaggcagtatgaacttggccgacggttggcggccgcacacggcgaagggaggcacgcccgattcgccacagggtcgccatggccgtcgaaacccaggaggctgtcccaccacgcggcctagtaatatgcgtctcagatggagtcccagagcgagagactgacgaacatgagtgcgacactgcatcgagtgtaacttgtgtggtcggatttgaacccgtttgcaataccaaaacgcgcaggggctcgagtcgataccagttgagctcacttcttcagggggccccagttggcaattagtcctcacgcgtcctaaagcggcctcatttcctcgaagtgcacgggtacaaacccccagcgtttgggcgggccaatttaaggttggcacattagcggtaggcgttccgttggaggaaccacacggaggtgcggttgccagcacggccagcccacagagggatcggtgggtccacctccttttgagccgaagcggtggtcgtaaccaggccgccgccttccccttggcccagagcggtcccttggttcgcgctcttgggggagttacacttggggcagtccatttgggccccgttgtggcacccgcgcgaaagcgcgtgtgaaacccttgaagtgtaaaatccgtttccatttgcagaaggaaacttcctccgtttcgaacactttacagggcagagaaaggccgtctgtcatcccaggtgcgaattggggaccagggcaaacgttgggaccttgaaaccctgggcgtaacaatcccgtctgcacggccgcacagggtggccattggcgaagcaaagatgacaatgcatccctgtagagcggtacagggatccctgtggcaaatttgcgcaacgcccttgtgagagaatgtcggccctatcccggtaacgggaaaattcaactacgattatataccttgttgtggcacagaaagagaagccttatggggagagcatggagcccgtggttggttccaaagcgacgagttaccccctttgtcaaggagaaattccgagtgaacccgaagctccaggaaaggagaggcactagtaacccaaggcacagttcactacccgagaaggaaaagcaacacaggtcgcccggacttctgcgaagaacacagatgacgagtccacacaccgacaggctacgcgcggaaatacgcgagaacaaagtagaacaaaaaaggcagatcgcgcggacaccacagcgaccaacagaaagtagaagagagagagaaggaatagccgagaagccacaaaagaaggta

SEQ ID NO: 690443 - DNA, 213 bp, Homo sapiens
tcccccacaccacctgagtctctggaattgcagatgtgagccactgtgccaggctccttcatttgtgaaggatagctttgctaggtatagtatttttggctaacattgtactttttttttttttttggggttctccctctttgcctcggctggagtgcaagtggtacagtcagagctgactgtaacctcaagatcctggactcaggtggtgtg

SEQ ID NO: 690444 - DNA, 277 bp, Homo sapiens
cgggtattaagatccatctatctcttagcaccgcagcagttatcggtaagcgatgataaggtctgggcgaacgatctcactatctcaacttaatggtagagccggtcgtgcgtgagcggcgtgatgcgagtgctagtgtgcactttgtagcagactgcgctgcggatgaacgaacgcgtgttaggcgccgatgcgacgctcatcagacccagaaaggtgtgttgataagacagcagacggtggcatgaagtcggatctctaggaggatgagctggta

SEQ ID NO: 690445 - DNA, 724 bp, Homo sapiens
gcctcatcgctcgtctggcctgctcctggctcccgcttctcccatgtttccgtccaggatcccatgacagattctgttgtcattgtctccttacagagttagagcggtgcgtgaactgtcagcaccatctgatccggatcccagacatgccttcatgagaacccaccaggcagaacgtggggacccacaggctgacccccaaccgacatcagggccaacactcgtgcgaaggggagccatggagaagagggtccccagagtgataacggaagccaaaggagcaccactgtggatccgagcccagatgctccgagacaggtgcaccatggacagactggagcacaggcctgccatccagagatccccacatcaccacaacatgacaccggtcaaaaatctccaaaagatcttgcccagatattctgaagacaatcgcgggacacccctaatggtcagaatcaaccaagattcgggacgacagtttcggccctgacacgtgtgagctcttggccaacgtgtgcagtatcttcacacgcagcgccggacagacgtgacaaggacccgcactcaagcctgcaggatgatatgaggactgctgagacgcgaacggcgaacagctgaacgccccggtggcacacgacatatccgagacccgacaatcccggggaacacccgggactcggacctcggcacctggcatgccgcaagctgaggcgccatgtcg

SEQ ID NO: 690446 - DNA, 918 bp, Homo sapiens
cctggatgtgctctcttgaataggccttactgttgcaactatgaatgcaaacaaaacaccacaaaacagacttcactaacacagagaatctgaaactgggtgtgagagtggtgatgtacaaggacctgcgtaagccagggaatttacgataccatcaccgtttccatcatagaataagtctgattgcatgtcatcggtgaggttaatggcatctaatgatggattttttggaacatgttattgcagtgattgtcaaagttaaatctgaatttggggtaatgatttgtgtcattggagtgtctagagtgttatactgaatttaactactcttagttatcattaatgtagttctcgtcgattgaactatgtgatagatctaatacgctgtagaaaactggactaatcagttgccaataatatctaatatttccgtcatcatgcatcgaattaaataatcatctatagtctaggaatcttgtctgtcgacttcacgtacatgaatgtcgcccaatatgggtcgttccaagagaatgcacaagaaccgacaattaagatgtgcactacttctttttgaaagtaccagatatgctaggagagctggtgtgtggtaattcccgcgcaagatacctcgcgtaccccttttatgaacctgttgcaactattggtaaaaactcttttgcgcaaattgcagctcctattcggaattcctgtgaatgcacccgtggtgacaggctgacattcgctcaccgataccaccattttagcctacttgttaggttagggcgccgcttttaacatctgcccccggttgatccacggggagcaaagcggggcgctataagtcacccatggcgcttgaaccctggaaactgcgcgctaaacggcttcccggcaaacaacaacgcacgccgggggcaa

SEQ ID NO: 690447 - DNA, 1111 bp, Homo sapiens
agcttgtctctgggatcttcggctcctatacaagtatagcctgggtcttggataaactgaaagctagagcgtgaacgtggtatcaccatatgatatctccttgtggaaatttgagaccagcaagtactatagtgactatacatatagatagccccaggacacagagactattatcaaaaacatagattacagggacatactcaggctagactgtagctgtcctagatatagtatgctagctaggtagtatggtagaatattagaagctaggtatactaccaagaaataggagcagcaccccgagacgcatagcccttactaggctatacacactagggtagtagaaacaacctaaatatagtacggtagtataacaaaataggatatccactagagacacaacctaacaagccagacagagataatagcaggaaattagtataaaggaacagtacagcaaccttcacatttcaagaacacatataggctaacaaaacacccgaacaacagctaagcatataagtagaccaactatctagggttcaggacactggtagaccaacgatgctaggaagcatacagtagctaaacatagcacattaggtatcaacaggggctaggcaaacagtaccaccccgtaaaggattggcacacagcacgagtagggaaaccacgacatggtttgagggctactggacctagtaatacctaaaccaaccaaatacgtaacacaactagaacaaaagcccctttgacgaccttagactactccaagggactgtctaacaaaaaattgggtagggaatatgggacactggatccctaggtaaggaacagaaaatggaaaacttagataggtatctccagaaacccggataattgtatggacaaaccatattgcatacaaagtatcacagggatatacaaaacgggaaagattaaagattctggtcaacaaatgaacccaatgaaagactatgaaagttaaaagatatttcacatgagacaaatgtgtgcgtatacatggttccaacaaagtatgttgtcaacgacatgttctacggatggaacgaatgtaggagtaaaaacaagagtatacacacgaagaatg

SEQ ID NO: 690448 - DNA, 244 bp, Homo sapiens
gctgtaataagacacagaggagtggacacagagacacctcccagctggagacagtcaggactgactgatggagatgtgacagccagtgctccacacccaggcaagaattgtggatggcctgtgtgaacagagaagtcatcaacacacacagttcaaagtctaccctatgctatgggggggagcagtgaagaagtgggcagtggacgcagtgggccctggcctgcgagctccctgttggcctctg

SEQ ID NO: 690449 - DNA, 120 bp, Homo sapiens
cgtgacggagctgggcactggaatggcttgtacctgcttcaagcacctggctacaggcaactacctggctgctgaggagaaccccagttacaaacggtgatgcctcatgctcccaaggca

SEQ ID NO: 690450 - DNA, 97 bp, Homo sapiens
agatagcgtttccgactgtgctcgctgctcagcgccgcacccggaggatgaggctcgccgtgggagccctgctgtgtctgtgccgtcctggggctgt

SEQ ID NO: 690451 - DNA, 203 bp, Homo sapiens
agcgcgttgttagtgaggccgagtgagagataagaaaactggggaaagttaagtttagagaattagtcgaagatttggctgcaaaggaagagaaaagaatggcatggggcaacatgggagaagatgatgtgctttgacatgggcagaatgagaggctttgacatgtggcatgaagagaaaccatgtgtgcttgagactgtcac

SEQ ID NO: 690452 - DNA, 1241 bp, Homo sapiens
ccaaggccaagcgcgagaagatgacccagatcatgttgggagaccttcaacacgcccagaccatgtacgttgctatccaggctgtgctatccctgtacgcctctggcctgtaccactggcatcggtgatgcgactccaggtgacggggtcacccacactgtgcccatctacgaggggtatgccctccgcccatgccatcgctgcgtcttggacgctggcgtgagcctgggacctgactgactacctcatgaagatcctcaccgatgctgcggctacagcttcagcacacacaggaccgatgctgggtaagtcgtgcgatgacattaaggagacacgctgtgctacgtctgccctggactacgagccaggagatggcgcacggactagcgttccagactccgtaccgctggagaagaagctacgagactgactggacggcacaggttcaatcacctactagggccaatgacagacgagaaccagactgtacctgatgagcaacctcataaccagacacttcctatacctgggccatgtgaagtacctggatagagcaatcacacgacaaaaactaaccctatccacaaatacccaatacaataggaacgctgttgacaccgtaggagaagccataccacgacgagaaggactcatggctacggccataactgcaagttgcctaggctctagggacagggccaccccaacccagtagtcaaacacatgagaccatctggacaccgaagcaagagaagtggaacagcacaacaagagacaggaactacgaaccaggaagcccagaggaacaacccacaaaaacaagcaaaggcaaacgaagacaaaagaacttccaaacacgaagaccacgaccatggaataccacaaccaaacagcaacccacaagcaatgtaggagcaaacacagagacgagacatccacacgacacaatgggagcccctacaacacaggaacacgacacaccaataccccaaggcacaagactaactgaggagaacttccaaccaacaacgacaacgacacaaggcaaatagacacaaatacatacaacgagagcccaccaaagccagcagaccgagcacacaacacagcacacagagactgcgcaccacagacgaaagagaaagaaaactagacacaacacaacacggccaagtagaacacagcaccaacgcatagcacgcaaagaccacaagagagcaagagcagcctcaacaacaact

SEQ ID NO: 690453 - DNA, 327 bp, Homo sapiens
  misc_feature (299)..(299): n is a, c, g, or t
ccacctccttgacgatggaatagctatataatttaccctggggccgggcacggtggctcacacctgtcatccccagcacttgaatgggaggccgaggagggtgatcacttgaggtcaggagtttgagaccaacctggtcaacatggtgaaaccccgcctctactaaaaatacaaaaaattagccgagtgtggcagcgcatgcctgtgatcccagctactcgggaggctgaggcacaagaatcgcttgaacctgggaggtggaggttgcagtaagccaagattacatcactgcactccancctgggcaacagagcaagaccctgtgta

SEQ ID NO: 690454 - DNA, 838 bp, Homo sapiens
gacaaggtctcatgatgttgtcccagctggtcttgacctccagggctcaagcaatcctcccaccttggcctcccaaagtgctgggaatacaggcatgagtcaccatgcccagccatattatacatttttaacttacaatagtccacattcaattgatattaaaccagttcacttgtagtataagaatcttccccagcctggccaatatggtgaaaccccgcctctactaaaaatacaaaaaaaaaaaaaattacgccagggtgtgggtgggtgcggtcggcctgaaagtctcagctactggggaggctggaggcagaaagattggtttggaacctgggaaggcagaggtttgcagtggagctggagatcggggccaggcctaggcaacgagcaaaactcccatctcaaaaaaacaaaaaaaaaatctccccgggtgggggcaaggggggcacagcggcggggaatacccaccccaggcttcttggggagccgccacaggggaagggaaagatccacagagagggccaagagaagagactcccggtccccagaaagaactatacactataacactatttttctgtcccaatttcttctccacataataattggagattctgggcatatggggccgaggggtgttcttcacactcctctcgtctttcgtgtctatagaacccccacacgagacacttttgttcagcgcccgagaaaactctccctatttacacccaagtgggcacaagtgtccacaacccgtggtaagtcccccaccctcttggcggatcgccaagagaccaggctcgcagaggcgaggaggcccaaaaagtttcaaaca

SEQ ID NO: 690455 - DNA, 113 bp, Homo sapiens
ttgactgtgtctggctgcttgtaacttctcctcccttttcttccggtagccataggaattcttccttcccctccctaaaccaggagaggattcgagactgcctggctccacac

SEQ ID NO: 690456 - DNA, 442 bp, Homo sapiens
  misc_feature (29)..(29): n is a, c, g, or t
  misc_feature (154)..(154): n is a, c, g, or t
  misc_feature (156)..(156): n is a, c, g, or t
  misc_feature (160)..(160): n is a, c, g, or t
  misc_feature (170)..(170): n is a, c, g, or t
  misc_feature (181)..(181): n is a, c, g, or t
acgttggaaggcccaatgtatgcgcaagntgggttcgcatgaaagggaatgccccacgaaacttgtcagcggtgggtgtccctcttgggcacccctggcagcgataggcttcattctcattcttgtgttcacgcacctggcccttgcaaggaangncctngatcagccancagacagcgtncctctgaaggcagcggtgtgaatgatccaagcagccccagctgggaggttggccccagctccctctgaactcactgagaaaggacccagtacccaagatgcactggggaccaagacagagtaaaagcccttcaccttgttggagtgaagacattatcacaggcatgtccccaaagcctgagcacctactttatgggatgaccatgggaacactccaaatggcagctctttgtccaataaaggctcagagagctagactgga

SEQ ID NO: 690457 - DNA, 109 bp, Homo sapiens
  misc_feature (8)..(8): n is a, c, g, or t
gatgcttnagctctggaaaagagggggcaagagtaaaggaggactttgtcttgcattttgtatattagctcagccacagtagcctagagcactcatcagagtcctaagg

SEQ ID NO: 690458 - DNA, 208 bp, Homo sapiens
gtacggctgttttttttagccagggtcatactctgtcacccaggctgcagtgcagtggtgcaatcatgactcactgcagccttgacctcccaggctctagctattctcactccactgcctctgtaatcttttttcttttcttttctttttttctttctttctctttctttcttctttctttcctttctttctttcttttctttctttt

SEQ ID NO: 690459 - DNA, 236 bp, Homo sapiens
tttacaaagcaaacccctgagggcatcagataaagaattccaggctagcctcctggaggatgagagaacatgtggaacagagatgagtcatcccaggggaggccttcccagaccaaccatcctagaatggggggctacaaccttttttttaaaggaccaaccggaaatactttaggcctgggggccatatgatcatctccattccaaaaactcaattttgatgttgtagggcaaaa

SEQ ID NO: 690460 - DNA, 426 bp, Homo sapiens
atggcaggtgaaaaaattaataaagacttccaggtagaaattcccgagtttttgtcagcgtttgagaattcccttggggctgtggatgagatgctgaagaccataatgtctgtttttaaaaatgagttgttgcagaagttgggtccccttgaccaagcaaaagtggatttggtttttgcatacccattaaattcaatgttttgggtttttttggcaacccaaggggtttatcctaaggaacatcccgtaaaacaggaattggaaagaatcagggtttttatgaccagagtcaaggaaattccagccaaaaaaaaggctggcaagctgggcaaaggggcagcttcaagatttgtaaaaaatgccctttgggaaccaaaatcgaaaaatgcatcaaaagttgcccataaaggaaaaagttaaagttta

SEQ ID NO: 690461 - DNA, 265 bp, Homo sapiens
acaactcgagctcgtacccctaattggttcttcgatgacgaagccaaggcagtaaagagatttcaccttaagtgccaacttccaacaactggtaggaactatttggattactgtgctggaaagattacaggactgtgtcccccttctccccattccaagaaaaagagagctgtagtccattagagccgcttctcagaggagggataggcaggacagaagtggaagtggttaacatttttaaaagcgtcatcgaagaaccaattag

SEQ ID NO: 690462 - DNA, 138 bp, Homo sapiens
tgtcatcatatcaccattaaccttccctcgtacacttatcatcttcacaagttctaattctactgactatcctagtaaatcgctgtctgcattgatccaagcctacgttttcacacttctagtaagcctctaccagaa

SEQ ID NO: 690463 - DNA, 260 bp, Homo sapiens
aatcagctcagccctcattagtgtaagaatatcaggcgatcactcgccatcggacagtggaacaccgatgactttcatgtgcacgggcggtacgcacctctgatccggtgcaccctgcggaatgattaacgatctgatcatcaacatggtcccagcctgacctgctcatcaccaccacaaatttctacgatcagcgcactgatacgttcaatgtgctcaacgatattgtcaaaatcaacaccccgctcaaagcgatgtgc

SEQ ID NO: 690464 - DNA, 846 bp, Homo sapiens
caacctcaaatggatcaagatgaatggaagtaacttagctgtctgccaaatttccaacatttcttaaagaaagacaatgtaattgaaatagtcaacaatgtaacatttaacagtggtcagcatttattaaaaattatagatatgtgagaaggcaggaaatgtgacctgtaattgagaggaaagttatttaatagaaacaggcacagaagtgacagagattatgaaattttagacaaatactttaatatatctattattaatattataaatttgaccaaggatttagaagaaaacattaacataattaggagagacattcaagatgtaaaaagagccaaatgggaccatttgagctgaaaaatacaacatctgaaatgaaaaattaactggatggttttagccatagattacactgcagaagaaaatattaactgacctcggcggcatagcaatggcaactatccaaactgaagtacagaccaccaacttgaacacacaattcaggtatgataatttcaccctgggggtctatagcaagtacatgtgacctgtgagaaacctagagtacagacactgacacgaaggcacatagtaggcagccaacaatatatattgaacgccaataataggcacaacacttttcaacattgcataaaagctcaaaggcccagatcctagaagcacagggactctccagcaggtaaccaagccacactaggaacatcatacttgaatgtatttacactcagcacaagatccaacggctaccgcacgcactcgacatgtccatccccaaacacgcgcaaaccagctcccccacaaaacaaaatgcgccgccaatcaccg

SEQ ID NO: 690465 - DNA, 353 bp, Homo sapiens
tagaggatccccaccccgggtctttctccaacaaaattacttctggtgcacagtagaattattggggtctgtgtgatgggagtcctgacagcacgtatctctgcaggggggagtcgagacaacacgggtggtggtcgggggtgagtgcgattccattgatgattggtatggagcacaagatgggccctggctcctcagtccgggaggtgggtggggctgtgacagctgtcagggtctggccagtgctccacccttctcaacgatacgtggttgcagtaggatgggagtgtggaacgattggcttatataccgggaaaaagatggatcaaggggtacggagctcgaatacgaaa

SEQ ID NO: 690466 - DNA, 399 bp, Homo sapiens
  misc_feature (34)..(34): n is a, c, g, or t
  misc_feature (104)..(104): n is a, c, g, or t
  misc_feature (117)..(118): n is a, c, g, or t
  misc_feature (120)..(120): n is a, c, g, or t
  misc_feature (124)..(129): n is a, c, g, or t
  misc_feature (139)..(139): n is a, c, g, or t
  misc_feature (142)..(142): n is a, c, g, or t
  misc_feature (146)..(147): n is a, c, g, or t
  misc_feature (152)..(152): n is a, c, g, or t
  misc_feature (155)..(155): n is a, c, g, or t
  misc_feature (159)..(160): n is a, c, g, or t
  misc_feature (170)..(170): n is a, c, g, or t
  misc_feature (182)..(182): n is a, c, g, or t
  misc_feature (185)..(185): n is a, c, g, or t
  misc_feature (190)..(190): n is a, c, g, or t
  misc_feature (208)..(208): n is a, c, g, or t
  misc_feature (212)..(213): n is a, c, g, or t
  misc_feature (258)..(258): n is a, c, g, or t
  misc_feature (262)..(262): n is a, c, g, or t
  misc_feature (264)..(264): n is a, c, g, or t
  misc_feature (354)..(354): n is a, c, g, or t
  misc_feature (358)..(358): n is a, c, g, or t
  misc_feature (379)..(379): n is a, c, g, or t
  misc_feature (386)..(386): n is a, c, g, or t
acctcatgagaccctttccatttgggaccaagtntggggatgctcacatttcaaatatttatctactgcctctgtgttacaaccactaatgtgttctaactgangagtttctcattnngnggannnnnnttgggggggnggntggnngcttnttnttgnngtttattgtnaattcatagagngtnttttntagcatacttgggtgggnattnngactactagggtccttttttcttttcatgtaaatgcttccttaanattnanaccggcaagggaatacagccaatttatagtttaccaattttatatacggttattcattctttttttcctgagatattaagcacatttgtnagtngtctgttttcatgcaaaagtntattttnccattcttcacat

SEQ ID NO: 690467 - DNA, 131 bp, Homo sapiens
agcacgcaggatcgcgttctcgttacacgctatcctattattccgtggcctgaatgagaagggggaagcggtcagcacgcgcgtctgattcgctcggttaacgtgaaatcagcgtctacagtgaatacgat

SEQ ID NO: 690468 - DNA, 83 bp, Homo sapiens
  misc_feature (35)..(35): n is a, c, g, or t
caccttttccccccttttttgggccttggattttncgggagggttttttccttttttaaccaaaaaaagggaattggccctta

SEQ ID NO: 690469 - DNA, 1001 bp, Homo sapiens
  misc_feature (254)..(254): n is a, c, g, or t
  misc_feature (267)..(267): n is a, c, g, or t
  misc_feature (536)..(536): n is a, c, g, or t
caaactggagagcatgtgcagcttgaaggtgcaagccactttatgattccaattggttgtagttatgcaggagtgaaggcccagtgtttccagatttttttttccctgaagaaattccagaaatctgaatttttgtgaaattcttgatattaaaatgtttaagtttttttgagtgaatactcatggccagtgtagatgtattagtggccaggagaggacataggctcagttgcagtttcccttattatagtagnttgactcccaagntaacccatgctctgcaaattataagatagctaaattatactactgacctgatttctgagagcagggcatgtgggggcagaagtgttactagctccctttcctgggctcagggaaaatagtaggggatggtggatgctgtaaccaggcaaagttgggtaatgtatactttctattctgccgtcttttgttgtagagtattttgctctgagccatccagggccttcataataccttcagttgttgttctttaacctgctaggctctgagangacctgtattttcaccatctctagaattcttacgtacttcttccatcgatcaggaaacaagtacaacaaatccatgctaagtatcacagatagaaccattggtattatctattgggaagtttgtgcttattaacaagtaaatgctgaattgatagacttctaaacattgcagtaaagtacagtaaaaataattaaaccacgtaggatgacaattcgctgtgatataattagaatttgctacattctaccaaaaacaacgcaatttctggatctgtgttgtttccctcagtggtccaagggagagagggcatagaccttgtatccacattaacagagattcttcactgatcgtcccttacatcacagtgctattatcatctctggcggacctaatactgtgtatgctgaagatgctccctggtctgatccagcaatatacactattggcacgcatgtctcggaatc

SEQ ID NO: 690470 - DNA, 211 bp, Homo sapiens
  misc_feature (1)..(1): n is a, c, g, or t
  misc_feature (188)..(188): n is a, c, g, or t
  misc_feature (200)..(200): n is a, c, g, or t
ntggcatgccgcttttgaggccctggcccccctttacccttcacccccaacagggacaaatgttcctggcaggacctttcctcaaagcccccttcactttcctgccccatccttcccaggctcccgggctccataatgtaatttgttcagcatggagacctttttttaccgcccctgttttaataaanctgggtgtttcncttcggcatca

SEQ ID NO: 690471 - DNA, 124 bp, Homo sapiens
tctcaggagagagaactgccagggttcaattaaagaaagaggctaattaataatgggcaatataggggagatgggtggggaaaagaggaaaaagctccgttaaaccttaagaataccacaaccc

SEQ ID NO: 690472 - DNA, 366 bp, Homo sapiens
  misc_feature (40)..(40): n is a, c, g, or t
  misc_feature (280)..(280): n is a, c, g, or t
  misc_feature (360)..(360): n is a, c, g, or t
aaggcaactccaagaagaaataaggtcctggcatagcatncaaattcctgagagttacctggttgggtaagacacaaaacatacctagaactgtcatcgataagatagcacagcagcctgttccccagacagaaaagcaacttcaggttttcccaggtttactgggttactggaggatattcattcctcatttggcacaaactttccacctattatacaccctaataaaaaatggttaaaaaaaaaaaaaggccagggtacagtggctcacacctgttantcccaggcactttggggaggccaaggcaggtgggttcacctgaggttcagggagtttcaaggaccagcctggggccaacntgggtg

SEQ ID NO: 690473 - DNA, 479 bp, Homo sapiens
aagacaaagcagggctggagtgccaccatctcgacccgctgatgcgaacatttgtcgggatcaagcacattggtaccctaaccactaaacgggttgggcaaagaccgaaggatcacatccacgacggggaccaattggatcgctatcaggaggccgccaacaaccgtaaagggcgatgctgaaataccacttacggcagcctgaatacatgtgatacttactgccaaatctgcggaaataatatgtaagacccagtggccgaaagctattaatgatacccgacccaaaaaaaagatggcctggagttatggtcagtaggaacgtgggaaggacttgtcgcccttgaactgtcccgtgctataacgcaattccccggtggtctagcgggcttgagggaacacacagacacgctggttcctaaattgatgaaagtcttaagaactggaggagcctttccagcttcaagaaagagccccatg

SEQ ID NO: 690474 - DNA, 153 bp, Homo sapiens
cctacgtggtattctacgagtccatgatcaacaccgtgaactatgcccgggacacgtggctggcgcccgatggcctcatcttcccagaccgggccacgctggtatgtgaccggccatctgaggacccggcagtacacaagactacaatgatcc

SEQ ID NO: 690475 - DNA, 929 bp, Homo sapiens
  misc_feature (3)..(3): n is a, c, g, or t
  misc_feature (20)..(20): n is a, c, g, or t
  misc_feature (30)..(30): n is a, c, g, or t
  misc_feature (94)..(94): n is a, c, g, or t
  misc_feature (118)..(118): n is a, c, g, or t
  misc_feature (246)..(246): n is a, c, g, or t
  misc_feature (267)..(267): n is a, c, g, or t
  misc_feature (280)..(280): n is a, c, g, or t
  misc_feature (292)..(292): n is a, c, g, or t
  misc_feature (294)..(294): n is a, c, g, or t
  misc_feature (310)..(310): n is a, c, g, or t
  misc_feature (312)..(312): n is a, c, g, or t
  misc_feature (315)..(315): n is a, c, g, or t
  misc_feature (322)..(322): n is a, c, g, or t
  misc_feature (332)..(332): n is a, c, g, or t
  misc_feature (344)..(345): n is a, c, g, or t
  misc_feature (357)..(357): n is a, c, g, or t
  misc_feature (360)..(360): n is a, c, g, or t
  misc_feature (371)..(371): n is a, c, g, or t
  misc_feature (374)..(375): n is a, c, g, or t
  misc_feature (381)..(382): n is a, c, g, or t
  misc_feature (384)..(384): n is a, c, g, or t
  misc_feature (388)..(389): n is a, c, g, or t
  misc_feature (393)..(393): n is a, c, g, or t
  misc_feature (405)..(405): n is a, c, g, or t
  misc_feature (407)..(407): n is a, c, g, or t
  misc_feature (410)..(410): n is a, c, g, or t
  misc_feature (438)..(438): n is a, c, g, or t
  misc_feature (453)..(454): n is a, c, g, or t
  misc_feature (463)..(463): n is a, c, g, or t
  misc_feature (467)..(468): n is a, c, g, or t
  misc_feature (471)..(473): n is a, c, g, or t
  misc_feature (476)..(476): n is a, c, g, or t
  misc_feature (481)..(481): n is a, c, g, or t
  misc_feature (487)..(487): n is a, c, g, or t
  misc_feature (490)..(494): n is a, c, g, or t
  misc_feature (497)..(498): n is a, c, g, or t
  misc_feature (502)..(502): n is a, c, g, or t
  misc_feature (510)..(510): n is a, c, g, or t
  misc_feature (513)..(514): n is a, c, g, or t
  misc_feature (517)..(517): n is a, c, g, or t
  misc_feature (520)..(521): n is a, c, g, or t
  misc_feature (524)..(524): n is a, c, g, or t
  misc_feature (526)..(526): n is a, c, g, or t
  misc_feature (543)..(543): n is a, c, g, or t
  misc_feature (553)..(553): n is a, c, g, or t
  misc_feature (578)..(578): n is a, c, g, or t
  misc_feature (584)..(584): n is a, c, g, or t
  misc_feature (600)..(600): n is a, c, g, or t
  misc_feature (604)..(604): n is a, c, g, or t
  misc_feature (609)..(609): n is a, c, g, or t
  misc_feature (683)..(683): n is a, c, g, or t
  misc_feature (850)..(850): n is a, c, g, or t
  misc_feature (857)..(857): n is a, c, g, or t
  misc_feature (896)..(896): n is a, c, g, or t
ccntcttacgcttctttttnttttaattantaatattaacaaatcattattgatataggcttttcaatttgctcaagattaggaattgtaagtngaatgaagcagcacttccagttgncaaatggatccaaaggtaatccaatgtcttttaaattaagcttgtgacaattaaaccaatacactgtagcaatgagaaaactattgacaaagtataaccagggaatattcatctcaatatatgctggnatctgaactttaagtaaaacnctgattacctgangtagtacaaatngnaaccaggtactgccanancanacaatgngcttggctangcctttttcccnngttctcacagtntanctggggtgggntgnnaaaggnnantttnngttngtttcattcatntnggnggttatcctgatagcctgtaccaaagtngtaacttcttcccannaggttatgngagnnacnnntanaatgntcaccntgnnnnntgnnagcnagttactntgnntgntgnnatngnaaggtcagttacgaganttagctttcngtgccttcatgttttggtagatggntgggtntcccaaaacataagcnaggnctganatccaaattaaaattactgtaaagaaataaaataatttttgacacttaaatgaaagcttggttgttttagaganattcaggcaataatctatacaagctgtcaggaaaactggataatgcaaaaagccataagtaaaggaaataatttgagtaaataggcagatgtggtatttagtgaacctaatgcttaaaagtacaaaatccctgaaatacaatataatggaaatgtttaccaaaagtnaaagatnaacgaatgctagtgaaatgcaaaaatattccataaaatnttgacaggtgttttttcttctcattcctagtgt

SEQ ID NO: 690476 - DNA, 263 bp, Homo sapiens
attcttatcttaggctatgaggccactggcacaggaacttacgaaacataggccacaacctaatagaaataacgattgtgggacaggaaccagcaaccaacacatagacaaccgctgtctttaggtgctcgctttgcgaaatactactcacgctactaggtgctcaagacgcattatttactaaactccctgagtcaaagcaacgggtggacatgacagttattgctgaagacactgcaggaccaacttctgtaaagagactg

SEQ ID NO: 690477 - DNA, 1222 bp, Homo sapiens
  misc_feature (82)..(82): n is a, c, g, or t
  misc_feature (93)..(93): n is a, c, g, or t
  misc_feature (398)..(398): n is a, c, g, or t
  misc_feature (460)..(460): n is a, c, g, or t
ccacgcgcacgccccgcacacctcacgcacacactgctcactcccctcagcgccacgccccacgccaccttaccctgcctcncctaacctccnacccgcacctctctgcacacgcactctcacacctacctaccctacacgcactcctctcacctacacaccacactgcacacctgcgcactgcacttcacgcctgcacgcctgcgccaacgcacacacttctcccctgcctcctctctacacctcccctgccacaccctgcacgcgcagcgcaccccctccctgccccacgcgcctacgcacaccgcacacgcgcacgcactaacacgcgcacgcgcactgctctgcacccacacggccacgcctgcacacgcgccccgcccacacgcaaccacgcngcctctctctcacgcactctgcgcactcctcccgcctggcccgctaccctactgcgcactgncctctcccgcacgcagcgggcgcgccgcacctactctactaccacacgctctggccctgcactctctacacctccgcacacacgcagcactccgctcctgccctgcctggggcgacaactggccgctcaactgacactggctgggaacaaccctcctacttcccaactgcactactctgcaactgcactttacgccagcgcctgcactcacacaaccacttggccgctacctgctgcagcgcttggcgcctgaaacaagatcccacgggcccgctacaactacccaacttgcactggcacacactctctctctcttacactattaccaagaccatgaaccctacttggctgctaattgtggccaaactcacttcccttgcgacacttttccccggtttggcttatgctcacttctggaacgactaggggcctgccacgtgagcctgtgggaaacacagctgggttgtcaaacccaggcaggagcaaacctccctctcacttgcctcctccaccgctggcccctccctctccctccccccgcagcgccccggcctccccctcccggcgagcctccctgccacccatactgcgccccctgggccctacatggcgccctaacaccgccacggcggccgccccccctccctcccccccccctgccctcttctccccccacgcgtcgcgcccctttcccccgccgtcccccccgcccctgctccccccttgctctccccccccggtccgcgcccacccccgaccctg

SEQ ID NO: 690478 - DNA, 291 bp, Homo sapiens
gggccagagtgtcgctctgttcccagactggaagtcaatggcacgattctcggtcggctaactgccaacctcccgctcccgggttcaagcgattctcctgcctcagcctcctgagtagctgggaatacaggtgtgcaccaccacgcctgggctaatttctttgtgtttttagtggagacagggtttcaccatgttggtcaggctggtctcgtgatacgcccatctcggcttcccaaggtgctttgattacagacgtgaaccatagctcctgcccccttctgtcgtcttctc

SEQ ID NO: 690479 - DNA, 191 bp, Homo sapiens
attcgcggccgcgtcgactaaaaacaaacaaacaacagaaaaaacactcactgagcgctgggtgcagtggcatgcacctgtaatcctagctacttgggaggctgaggcaggagaattgcttggaccgaggagttggagaccagcctggggaacataatgagatcccatctaaaaaacaaaaaaagtcgacg

SEQ ID NO: 690480 - DNA, 309 bp, Homo sapiens
  misc_feature (10)..(10): n is a, c, g, or t
  misc_feature (49)..(49): n is a, c, g, or t
  misc_feature (61)..(62): n is a, c, g, or t
  misc_feature (66)..(66): n is a, c, g, or t
  misc_feature (80)..(80): n is a, c, g, or t
  misc_feature (102)..(105): n is a, c, g, or t
  misc_feature (121)..(121): n is a, c, g, or t
  misc_feature (210)..(210): n is a, c, g, or t
  misc_feature (218)..(218): n is a, c, g, or t
  misc_feature (259)..(259): n is a, c, g, or t
agaatgcagnaattgctgtccgtgtatcaacattccagtttctaaaaanagccagccagcnntttnccttttaagattcnccagaaggctgcaaggccagannnncaaatatcgggtgccntcctttggaaatatttgacctctcttctgtgaagagaatggtacttaacagactactactagtgctttgtcagtaccgaagtctgaatncccagtcnaatggcatacattatccttaaggttttaatcccacctgganaattgtgatagaattctcacaaaataacccaggcattacatgtgacaact

SEQ ID NO: 690481 - DNA, 643 bp, Homo sapiens
  misc_feature (49)..(49): n is a, c, g, or t
  misc_feature (71)..(73): n is a, c, g, or t
  misc_feature (78)..(78): n is a, c, g, or t
  misc_feature (135)..(135): n is a, c, g, or t
  misc_feature (199)..(199): n is a, c, g, or t
  misc_feature (201)..(202): n is a, c, g, or t
  misc_feature (219)..(219): n is a, c, g, or t
  misc_feature (250)..(250): n is a, c, g, or t
  misc_feature (265)..(265): n is a, c, g, or t
  misc_feature (267)..(267): n is a, c, g, or t
  misc_feature (286)..(286): n is a, c, g, or t
  misc_feature (310)..(310): n is a, c, g, or t
  misc_feature (324)..(324): n is a, c, g, or t
  misc_feature (332)..(332): n is a, c, g, or t
  misc_feature (341)..(341): n is a, c, g, or t
  misc_feature (362)..(362): n is a, c, g, or t
  misc_feature (368)..(368): n is a, c, g, or t
  misc_feature (370)..(370): n is a, c, g, or t
  misc_feature (437)..(437): n is a, c, g, or t
  misc_feature (451)..(451): n is a, c, g, or t
  misc_feature (465)..(465): n is a, c, g, or t
  misc_feature (505)..(505): n is a, c, g, or t
  misc_feature (568)..(568): n is a, c, g, or t
  misc_feature (640)..(640): n is a, c, g, or t
gcctgcccccagcagaaacagcaggtctcagcggctacatgtgctttanagcttggctgggggacaaaagnnngaganagagagaaaccggcctcatgactcagctggtcaggagataaggggccagatgctgancccaaatccccggcagcacccctagcaaataggtctgtatcaaagattctgtacagctggtttncnnggtgaagggcacctatnggggcttaaataaatggacacggggcaaggnatgtagcgagaacananggtgactgtccggccaccngcctgcccctctcgcgcccctgcntgctgacccccggncccacctncccactgtngcccgcgggactccccaggtnggatangngggaagctctccagcaagtttcggccccacctctctctgagcagatgagacaggaagacgggcactngggggctgggtggngcttagcgcaggtnctcctcatcgccctggatggtcttcttgatgcgcacagcnatgtgtggtgagccactggtccagccgggagatggagtcgtattccttcaccgactcggtgtngctgtccacattctgctcctcgtgggcctctagcaattttttcatcaacttgcattcccgggaatcagaganagc

SEQ ID NO: 690482 - DNA, 87 bp, Homo sapiens
atgacctcccaccctaggagggagggaaggaccccgtcctagggtataacctggcaataaaccgtgcctctccctgtgaaaaaaaaa

SEQ ID NO: 690483 - DNA, 158 bp, Homo sapiens
tcatcgaacctttaaaaaaaaaaaaaaaagaaagaaaaatgcaattttctttcaaaataaagagactttttccctagtttcaggaattcccccaaatcacttcctcatgggcttagtttaaagccaggagactgataaaagggctcaggttttgatga

SEQ ID NO: 690484 - DNA, 399 bp, Homo sapiens
cttcccacaacctcaaactcctgggctcatgtgatcctcccacctcagcctcccaagtagctgggactacaggggtgcagcaccatacctggcaatttctatccttctttcttctttcttccttttttcttccttcttccattttcttcctcctccttcctcctctttcttcctccttcctccctccttcctcctcctcctttcctcctccctcctccccctttttttaaacagattgaaatcttttattaaattttttttttatttccatgggtttttgggaaaccggtggtatttgattacataagttctttagtggtaatttgtgagatattagtgcacccataacccgagcagtatacactgaacccaatttatagccattttacctcaccccca

SEQ ID NO: 690485 - DNA, 391 bp, Homo sapiens
  misc_feature (34)..(34): n is a, c, g, or t
ttttggttttaaaatttaacccatagggatggtnctagtaaaaaatggttatagattacccgtagagctatttactgttccaaagcccacatgataggcatattttgtatttcgtggtgccctcggtttggttcatattgggccttttacatcccctttttagcaaaaaaaaaagacccctttggattctcttttgcataaaacctgggcattgggaactatgtggctggatccctacgggtagccaaatactttttgccccccaaggttaatgaaactgttaaaaacctctgggtatttggggccatgaactttttttagcctattagggtttaagccaaaataattttttccgtatgttttctttagggccttccataaatgttttaac

SEQ ID NO: 690486 - DNA, 297 bp, Homo sapiens
gtaataaagagtcagggaggctggatgcagtggctcacacctgtaatctcagcactttaggaggctgaggcgggtagatcacctgaggtcaggagttcaagaccagcctggacagcatggtggaaccctctctctacaaaaataaacaaattagctgggcatgatgaccggtgcctgtaatcccggctatcctcgaagctgaagagggagaatcatttgaacctgggaagtttcaattaacccaaattggaacattggaattcaagcttggcaacaacggcaggactccatctcaca

SEQ ID NO: 690487 - DNA, 1496 bp, Homo sapiens
caaggaggagcagaagcatcgtactgggtcacgtacccaagctacgacaagtgacacatggcacaatagctgatcactagcgaagatacatgaacactgcacatagatgaagacatgacaacaacaagtaataaaacagtccgacaggaacaaaggaagcgatccagaacaacatccaccatgaacaatacagagcgacaatacccgtggaatcacgcacacacggcagctacaaagcgaagcacgacacctcacaccatcacagaccaccgaacctggaaagaacacatccacacagaacaccaccaccacacacaaaacacaacaacggaagataagagatgtacagaaggagaggagaacgagcgaggccatcgccacaagacgccgcgagcataccggatgagaatagaagaagagacgaaaatttagaaacgactcagacgacacaacgagagatatacacactagaccgtaagtcaagaatagagaagaagaccaccgaccgacgaagtagagagcgtacagggcacggtaggcgatgatgtcgtgggcgaagcggaaccgacaacgctggcgaaggaagagtgaggagaacagagcagtgtaagtgtgatgaagcgacgagcgaggaggcgagagggagggagggaacaaaacggcacgcggacaaacgagagggcggaggaacgacgcaccaaagagagccgggacagaagataagaatggaaggacacggacgcggcattgaaaggctgtaagcgatagagagcgtaagcagcacgcgacacgataggacaaaggcaagaaagtgcaaggagaaagcaagagataagacgagaggagcagagcagaaggcagcgaggcagcgaagaatgctaggacggagggtgagagaagcagaagcagcgacacacagacacagcaaggagcagcgaggacgtacacagatggcagcggaacaagcgacgcagacaacagacgagagagagacagtagaaagcgaacgcaacgaaagagaaagaagaagcagagacgaacgttcgaacgaactacatcaggactcgccacagaaacatagaaatctgtgcatagacaaagcacacaaaagatgagcacataaaataacgaagagtgacgcagacatgacacaaataaatcgaaccgcagaacaagacagtaaaatagacatccacaataacactacgcagccgaagactagcagaaatcagacgaaagacaatcgagagacgatgacaaaacactgaagagtaagaagagacgacgtgcatgatcactagaagagacacgagaagctccagacgaacaacgacgaaggagcacaagaagaaacgaaacacggattgcaacagacatcaactagtcaaagacagacggagcacagaccacgagcgatgcaagtcaagaaagtgatcaggacgaaggagagcaccagcagccgacgacagaacacagcatcactcagatcgtgagca

SEQ ID NO: 690488 - DNA, 906 bp, Homo sapiens
agcgagttgggtgctgcttgcagtgctgcgccaccgtggatgacaggtgcggttggcgggcagcgtggtgagggggtgcgtggggactcgacgtggcggccgcggggccccgtgtacaagggtctcggagagctgcagtccttcgcagcggccgagccactctccaggaggtccggggcgactggcgtcccacccacgtgtacaaggagccgcggaggactgctaagcaagcgactcacagagaagaaacgagcgcgcatggtgagtcgtgaatgccaggaatacgttaccctagtcctatgacgtgttcggttgaatgatgcacgaagtgccgaggaacgacgcgtagctgtcatgcgcaggtctgagcagtgtgtgtgagagcacgagagagcacaaaacgtgacggaaggggacatgactctttccatcgcaagcgatggtagcaagcggcaggacatgagggaagtctataagcaacggtgtgtcaactcatttttgtgtgacgtgctggctttacgtgcgtagtccatagggtcaaatagtttttactgtgactaagatcctgaggataaaaccggaatcttcctcagtgcacgtattggactgtgcgtcgtaggctcccttaacgagcgtcttaagaacttagacgcgtcacagttttccttcgtgagatgcccttcatcttcaaatcgtataaccaggagaagcccaggaccttatgggcattattcgcttgtttctccgttttgctagcattacataggggagtgccctcattcgttcgacaagtggcgctacccttcattgctgttatcgcccctaggacacaaggtaatggctggaggacctccagtgtgccgcgatgccatgagccccaagaaacgacagataagggaagacgta

SEQ ID NO: 690489 - DNA, 239 bp, Homo sapiens
gttgaccagagaatgagcgctagtgaaaactgtcattcatcttgaaagtaatatcattccctccagacagcttccgttgaccccagttacatctaaggcatagaataacggtggtttcactagttataaactaccagagtagaatgtagtgtctccgatggtggttgacagccacacgcatataaccattgattacaatctaagtggtctattaggcaactggctactgccaacatctg

SEQ ID NO: 690490 - DNA, 869 bp, Homo sapiens
gggatcatggtcctgatgaagcatctgaagcgggtggcagctcccaactattggatgctgaatctgtcgaccgtggtgtcggctcctcgtgcatccaccggtccccgctggtggaggacagtgtctccccctcatcgttgtacctgagtgcccagagcttaggtgctgccctgacgggatatgctgtaggagaatatttcgcagtgctgcggtctcgataaagatcgagtggccaggtcctgacattgctgtacacctaccctgctgggtccatgggatgtcatcaggcatagagcaagacgggggacaaatgtccgtcttgctctatgcatgaccaagggtcgcttgagctgtacagtcgtagttacagcgcttgagggaggccaaacttaccgggttgtgcaagatgtgatgaaaacggactcttatgtgcgggacacaaacacggagatcccctcgatactggtggactgcaatgatgccctgcgacgcgagtccgggtaggcccgaatcccgctcatctacggtgaatgagtagccattcatgagttgcttttggagatcttggcaagaattactgctttcactcaagtacgcacgactggttaacctgtgtgtggtgacctgggggctgctaccctaggaaagaattggtgttgatcaccaagcggagcagaggcccctggatcttagacgtgcacacgtgagaggatgcccaatggcaacagctttggcactcgaggtttccgacatttgtgtctattgggccgcggtaaaccctgggatttctcttccccgaggaaagggggtccggcgtgcccttgtggggggaaacaaacacttggcgggcccccagcacggggtgaacg

SEQ ID NO: 690491 - DNA, 944 bp, Homo sapiens
  misc_feature (705)..(705): n is a, c, g, or t
  misc_feature (709)..(709): n is a, c, g, or t
  misc_feature (717)..(717): n is a, c, g, or t
  misc_feature (723)..(723): n is a, c, g, or t
  misc_feature (742)..(742): n is a, c, g, or t
agtaatgctaaagttctcgaaggcccatagtttctatcagttaactcttaagaagaagtcatcttctgtgtttttaatatatccatccaagttcagttcccatgactaaaagtcccttttgcaataaagttggatgaattttataacagtcagctccatcgtcttcttcaattgaaattaagttatttatcacctgtcggtgtgtggcttgattaggtcaatgaaaataggcaggctttttctgctgcaagcaaaatacatttcccacctgagagttaaatgttatgcaaaattataagaccctggtgtcctatgcgcataatttctattcttgagatttctctcttgtcacctcagtgacaagattgttactaataaaactaaaaggaacagaaaaactcaatgaaaagttgactggaaccttgtggtcatgtgcttggtgctttagattaaaggtggactggatcaaatcagaaaaaccttaagctcaactatgattattgaggaattcagcatttatgtccaagaagagttaagtatgagtcacataacattttccccaccactagcaataggccctgcaatcagtcagaacaatgtaggtgatcgtcttctggcatttgatacttgctggatttttcttctaggtattgctgcaggtttgatacttcttaccttcttgattgtcattaccttatacgtganatcnaaacacanagaacngtaagttcaaaggcgaatncttgattgaccaacatgcacaagtggtttcggcttcttgtctgaaactaaacacagaagcacaagttatgtgaaataaatactgcaatgtgataactaaatgaagtatctcgtgctatacaaaaggaagccctttctgtaggacttaagagatatcaaacacttagcttattttattgaatgatgtttattcagatagtata

SEQ ID NO: 690492 - DNA, 239 bp, Homo sapiens
agcttaaggcaggtgtactcaggtagagactgttgttgtctccccttactttctcctacaagaatggagtctctctctgtgataagctgcctggaatcagggaaggggtgacatgagcacccctgtgggccaccaccactgggcactgcgctgtggtcagacctgcaaggcagcacaacactagggtctttgcccaaggtcctgccactagccagctgccatggctacgtgcttacagt

SEQ ID NO: 690493 - DNA, 85 bp, Homo sapiens
gagcggagcatgactagcatcggagcagctctgcgactggtggcggcggtgcgtcgtgtgcacgcttgcgccatctgtcaggagc

SEQ ID NO: 690494 - DNA, 425 bp, Homo sapiens
ggtttatgaaaaggtgctcaatatcattgattatcagagaaatgcagaatcaaaactacaataagatagcatctcaccccagttaaaatggctgttatccataagacaggcaataacaaatgctggcaaggatttggataaaacactgttggtgagaatgtaaattagtgcagtcactatggaggacagttttggagattcctcaagaaactaaaaatagagctactatatgatccagcagtcccactgttgggtatttacccaaaagaaaggaaatcagtatatcaaagagatctgcactcccatgtttatcgcagcactattctcagtagccaagatttggaagcagcctaagtgtccatcaccagataatgaaaaaaatccgcccatacacgcaatggagtgcttaaaaagccataaaaaaa

SEQ ID NO: 690495 - DNA, 1551 bp, Homo sapiens
ctgatgttgtttctgggtgccgggttccgggcttgtggttccgtgggtattgtctgtccattgttctggtccgtgtgagtcttcttgcctgtgggctgtgtctggggtgttctgccttgtcatggttttggtcaggtcttctagtgcgtggtactactgtattgttgtcgatctagtctatttgttggctctgtggtgtgttgtcctcgcttgtattgtatttctctttgtgttgttcaatgtgtgtgaaagatgttctgttggatcccctctttgactgtgcgcggattgatggtgtctcgtctgtagatggttggctgatgattgcttgttggggatctggtgatgtcccggggtccatttttgggatgttctgggttcctttgcctggtgagttggcgtttgtgttcctttcccatcttgtatttccttgggcttggtcctgtgtggtggtaccgcatgtgtattatgtaattgtctgcctctttggccgtggggtatgtaccaggttcctgaattgtcccggtatgaagagtggtttgctcttttgacgcggggttcgatcgtgtgccctatgggttatattatgcctttgcgttgtggttgtggttgtgtattattctatgatctccctgtgtttttcgcatgtctttgatgctgtgtcgcggtgtgcttgtcgatggtcctgttggttggtatgggttgtgtttgggatgtgttcgatggtcctttctagtctggttggggggtgtatccgttgatcttatatggtgttttggtggtccctggatttcgtatggttatatacgtgacctggaaacgacatgtgtggagctcctgtgtctgtactcactatgatcggaataactgtgataagtatattgatgtgtctgtgcttggcaaactttgagtcgctggatactccacagatgtctaagtgtatattgtaccaatgggattcttattattagagcatatggatggggtcgattaggattgatataatgttatttatggttgccttaatatgactctatttctgcttcgatttgtagagagagacctaatgtgtttatgagaatgtggctgtcgtgtgcttggtttgaatgtgtgcactatgcttgatgctgtatggagttgcctgagtactgttgattatgttttatacctgtggttgactatgaagctgatgtttatagactactgtgtggttgtttaagatgatggatctgtaactactttaaatcctatatgttagtgatggtgctagccttgtgacatgaatcgataaatgtgactgatttgatttgacaatactgattgcttgaaaagcatgtatgaacatgtatgaactggattggttggcttatgtgttgctgagcaatgagaagctcaggtgcaccttgcgaatgtaattaagctgactaaatgaataatgacttaattacctcataggtttggcatgtacagatgcttatagagggtgcagaacgaaccagctcgaaaacgagtagcagtgtaatgaaggcttcttttaacactatgagcaat

SEQ ID NO: 690496 - DNA, 297 bp, Homo sapiens
ttgaggacccccgtaatatgtacaaaaggattatacaattcattataaggtagaatcagtgggagccctgagcttgttttccctgcaactagacagtcccatgtgggggtgatgggagacagtgaccgatcatcaggcattagattctcataaggagtgcgcaacctagatccctcacacatgcagttcacaatagggttcttgctcctatgagaatctaatgccactgctgatctgacaggaggttgagctcaggtggtaatgtatgtgagcgatggggagcagctgtcaatacag

SEQ ID NO: 690497 - DNA, 910 bp, Homo sapiens
ctgcggtgtggttatgctcctgttgaatttttcctcgaagggacgaggagccgagtctgccaagaccctgactcctaagttggtctcctggaatattgtgatggaaccattttttaaaagagaagtcttcgatacctacttgtcccaattagcatcagttatgataaaatatggaagagagtctttatgcatatgagatcctcggagttcctaagccgaaggagtccaccactggattgtgaaagctagacggattctctctgagaacttggaagcatccatgtgtacttcggagaccctgtatcactgcgttctctagctgcagggcggctcaatcggaacacgtataacttggtgccaagatgcatccctcagaagcagcctgaggacgtgcaagcctttgtcactgaggtcgcctataagatgcagcttctgcagattgaaaacctggctctgagcccatggctcctggtggtcaccattctacttcaaaaccagctatccatggactttgacgccctggtggagaagactctgtggctgaagggcgtaacccaggtgttcggcgggttctgctttggctgataacaaacttcctgaggaagtggtccagtccagcatcctcctgcactctaacctggcagctgtgtcaaagaccaggggttctgaaaatgactcctggaagctcacagtggtcacgggcttgtgccgaaatatcgcctcctcatgtgttctgactacggaaccagtgctccacatttgcccgcctcctagcgcctggtttgcgatgaaccggtccggaagaggggttcagggatcttccccgaggttagagggatcacttctccaggaaacaccaggagggggagggccgcgggtagcggcgaaggggagaacccacagagagggg

SEQ ID NO: 690498 - DNA, 1017 bp, Homo sapiens
acccttgcattggcgtcaatatcaggctaggcatggtgcacactatgtctctaggaagatgatcatatggctcggagtcacggatcgaccagacgatcctaaggaggacataagcctatcgttctgcactccttggtattccttcggagtaaatggcttcactacctactgccttgctccagtggtagaagagggcctttattgcagttgggcaaggctgtgttggctgactgcagaaggatgggtgtgggatcattagcctagtagggctcgaaggctccgaatgggttgatgagtcggctgataccagggattgggtgggtcgccaattgcgaaatccaagaacagacttagggcatatgtgcggtcaccggaatcctgtaccaatatagtggggtcccacttggaaggttcgaacgtttagtagaagtgcggcttcaccattgacagtgactggttgtaagggcttaaaaatgcaagaggagctggattgcttggacgagaatcaatcgccggacatctggtgagtttggcgcttgtgtcatcggcaaatctaagatcacagctagtgcgggcgaagtacgtgggatttcggatgcctgagtgtggggctgctgccttgcaattcagaccgtggccgactatgaaggaagtaaggctataggccactcgtggccggggtttgcctgcgtcggactcctgaggggcagtgtcaggctttggtggcagactgtagggatacacgtttgagactgcgttctggttatgaagctgtaaagctggaccattgaggcgttgagggggcggagctggtgcatggctgattcggatcctgggtagtccatgtagtgtgggagcccgagccgggtagtcaacctttgagaaccctgttggcgggagtagagacaaacaagtgcggtggggcccccaaccaaggatcattgttgggtggccgagggcagattagcccactcacgctacgggaaatctaatcggccactaaaagggcaaaaattg

SEQ ID NO: 690499 - DNA, 582 bp, Homo sapiens
tgtgggctgacactaccgactaagggtgctctggatcacatacatgtcaggacgctcacaatgctgctaataaaggactatggccgatgatacgacaagacctccccatgttcccgcaatgtacatatctcattcgtgaatccctatccacctatgtcattttcttactacagtcggaattctaaggtctatttgggtacagccattagctctctttccccgttctccagtaccgtttcctggcctcgggtagccaccattggttcactacttccatgagatcagtttcgtcagatacgagtgagaacataggatatttgctctgtgcctggcttattattgctaaatataatgtcctccggttccatctatgttgccgtctgcaagaggatttcattatgttgtatggctgaataatattccattgtgtatatataccacttttaaaaaatccattcatctgttgctggacacttagctagatttcttgtataggctattgttaatagggctgcagcaaacattggagcacaaatacctcttcggaatacgattttcttcttcgggattatactcggaacc

SEQ ID NO: 690500 - DNA, 334 bp, Homo sapiens
aagttcaaacaaatgcaaaagcccatagcccccaccccccatcaggcccttgctgggctgggcctgaaatgcaggtaaaactgtttccagtcccgggcctgaaatcaaccctcatcaccgatgggtcccctcccatcaaccttttcaacacagcctttgggttgttggggatggggcccaagggtcagcccctgggcaaaagggtggccagtgggcccacccctggggaggggatatccccccagtttgttcaggccccccaagctcctggaaacaaccccgtggggcctgttctgcgctaactcctgattaaaacaatggaagtttttgggca

SEQ ID NO: 690501 - DNA, 564 bp, Homo sapiens
  misc_feature (431)..(431): n is a, c, g, or t
  misc_feature (477)..(477): n is a, c, g, or t
  misc_feature (513)..(513): n is a, c, g, or t
cgactctttaggatcccctgcctgctgtcgctatttgccctcccccagatcctgagcctccatgagccttcattcccgatgacagcttcctggtaccttggaccaggcacgccccttcccctttgagggtcccgggctcttcaaggtcagatggtgagcagggtccagtgggatttaaggtgtatgtcttgaagcaccggacatttctctggctcccaggctctcctgggccctgcggcctgctctaggtgacatgttcccagctcctgggtcttggtgtagacatggtcctgagggaatgagcagtgtatcttgtagactgaatgttcacttcccagctctggcatctcctctccactccttctttccacactccacctccagggccaacaataggccccttcagctctggactcttgcgtagggcttgngggtggggtatggcctgagctggcagcaggcaggatgacgagccgngcagcctctgcccagccctggaagagctctctctgngagtggctagctgctgggagctagaccacatccttccctctggcccccgtg

SEQ ID NO: 690502 - DNA, 299 bp, Homo sapiens
  misc_feature (144)..(144): n is a, c, g, or t
atccgcttatcgacggtttctcccacatcgacctggttgtcacggaaagtgtactgagttttacccgaaagctaatatctgttgcctaccatgacagcatcatgaaccctgactataatgtggaatttttccgacagtttatanctggttatgaactgctttaggataaacagagctgcccgaaacccatgttaatacgaatgtgcctggcagcttgactgttcctcttatttgaaagctggaaccagctggcgtatctttggaccaagtaacataactatcaacacagggctgtgacc

SEQ ID NO: 690503 - DNA, 205 bp, Homo sapiens
gggggggggggaaaaataaaaaaaaaaccccccttccccgcccggggggttttttccccttttttttttggggttttttcccccgggggggggttttttttccccggggggggggggggatttttggggtttttttttttttggggggttttttttggtgggggggggggggtggggggccccttttttttttttttttgggcca

SEQ ID NO: 690504 - DNA, 415 bp, Homo sapiens
cgcaaagccactgtatctgatggcatgatggacaaaatctatttggttcctgcactggtcaaatacattagagaaatgtgcttactggattaatttattgtgtggtttaaactgggcactttaaattaacactaagctatgaaacccaagagaaggggtagattcttctctttcaacaagataacagaaacaacaactggcagttatcacaccgttttaaaccatatgagaagagggccagcgtgcgagtggctcaacgcctgtagatcccagacactttggcgaagctgaacgcgaggtggatcacattgaggtcagggagttcgacgaccaagcctggcccaacatggcaataatcccaccgtctactaaagaatacaaaacattagcgtgcatgtggtggcagagcgcctga

SEQ ID NO: 690505 - DNA, 262 bp, Homo sapiens
  misc_feature (29)..(29): n is a, c, g, or t
  misc_feature (31)..(31): n is a, c, g, or t
  misc_feature (37)..(37): n is a, c, g, or t
  misc_feature (63)..(63): n is a, c, g, or t
  misc_feature (108)..(108): n is a, c, g, or t
  misc_feature (144)..(144): n is a, c, g, or t
  misc_feature (251)..(251): n is a, c, g, or t
tgacattagcatcgggcagacccgccagnanacgggngtcgccaggttcccgtctgctttcgnaggcggatcgagcgggtgacttttgtgcattcgttttaatttttngaaatctctcttttttcctccctcagctcgctgccnggcatgtcctgatctggcggccgctcctaccaccctgggcagccgagcagagtcgtccccagctgtctccctccctgcctccctgactttgcaacaccgcgttccgnggagaccggcc

SEQ ID NO: 690506 - DNA, 351 bp, Homo sapiens
ccaccaagaaaaaaccctgtagatataatgtgttccaatatgtgatatgtgggtaagccatatgcctttgaattcagtcaacccaggctttaatgtctggctttgtgaatatataagctttatattgtgctgcctacttaacttctttaagtccaccatttggtatttacaaactcgtgtgtcacatatttgttctcaatcgctgaacccatatcatatagtgaaaaatgcatataaagaatgaccataaaacacagatgtatatgtcacgagaatacacatgtggtgtaatcttgagatattattatgcgtggtctgagatctgagcaaagagtacacagatatgcagcg

SEQ ID NO: 690507 - DNA, 768 bp, Homo sapiens
tatctattatgatatgtttatttaaagttcaaaaactggccgaactaaaatctacttgtttgggaacacccctgaatgtgatgaaagtatacagaaaagcaaaaaagtttatttaaataaaagtcaagatgggggttacctcttagggtgggggctataagttgagaaaggacggcacaagatagagaaggttcttacgtggtcaggtgtcccatttctggattggggtggatacaaggtgtgtttataactcatctctttaaacaactacaaagtggtttgggcccattttctctataatttatatttaaaataaaagtgttaaaaagaacagaatacacatccagggtatataggtggctaaaggggcatcccatatcgtgcaacttaccactctcaaagtgggtttcaggaaaaaaactactcattatttcatataacaaaattagcaaagaggaacgaaaaacacgaagaggaaacaacagaagaggcatactccaatgtagaatatttcaatctccttttatggccagaataatacgacaattttggtgcgctgcaagaggcagtaagtaacctacaggaagctatgaaaaggtgtcggttgttgggaaaacgccacaggcctgagattcatctagtctccttcgtgtagcccagaggagggcagcaagaagggggtggtgtctccaacccccaagcttctgaggaaaaaacgggggcccttctcatttcacccctccctttttcccttgccccaaggaattg

SEQ ID NO: 690508 - DNA, 469 bp, Homo sapiens
ggacggacatacactacgtagattataggaacccccagacgtagccgagcccgacacccgtaaagggtctgtgctgaggtggattagtcaaagaggaaagcctcttgcagtaagagagagaggaaggcccctgtctcctgcccgcccctaggaaatgaatgtctcggtataaaacccgattgtacatttgttcaattctgagatgggggaaaaaccgccctatggtgggaggcgagacaagtttgcagcaatgctagctatgtaatactataatccactagagatgtcagggtaggagagaaacctaaatctggctaatgtgcatatccaatcatagtaccttcccttgaacttcattatgacatagattctattgctcacatctacgtagctgaccttctaccttattatcaccctggcctcctaactacattcgtttttgctaaaatactacaaatacataatcagt

SEQ ID NO: 690509 - DNA, 545 bp, Homo sapiens
  misc_feature (56)..(56): n is a, c, g, or t
  misc_feature (178)..(178): n is a, c, g, or t
  misc_feature (185)..(185): n is a, c, g, or t
tccgtatctgtcccaacacaatacagttctgtcttcttttaaaacgttgctgctanctctccattttggaagccagggcatgactgctggtgggtggtgacaggcacacaggcggcaagccatctttggccaaaggaggtggaggaccagtccctgcacattctcaatccacagacanccacagncagcctttacttttggctcccactagagggtagtggggcaagaacaggtggtcccacatggctgggcaattcagcacttctggcgttcccacctggactaactctattaccttctccaattaaaaggaaagtctcactttgggcgggaaaccactattacataagggatggacactacacatttagaatgtggacacttggttagggcagtggaactaataaagatagcagccagttttcttccttgccttctcctgaaggtaatcctccctcttactgactgaagctctggttccagctctgctcatgggcaatgcctggctttacagttataaaggctgtctatggacagctgctgac

SEQ ID NO: 690510 - DNA, 116 bp, Homo sapiens
agtagtcaccgaaagttatgtttctttgcttacttcatttttttctctaatctagactggaacaaaagtataaacattatttatttcaggtagcatttttttcgtgtagttttttt

SEQ ID NO: 690511 - DNA, 522 bp, Homo sapiens
ttcaattttacacctgtcttgaagcttttgagggcagactgccaagatcctggagaaatagtagatggcaagtatgtgggtttttgtatttacacacgaattggaggaaaaccaaatgaatttgatagccaagtggagacaagtctcagcaagtctgtaagcagtaggtatgttaagtgggggtcatgaagtatttcagtttggtgaatagatgaccggtttatacttcctcacccggaattcgtttggtaagtgtagaaatggaactcaaggtgaagaacttcaatgaagcgcgggtaacgggcgggagtacctatgactctctgagggtagccaaatgcctcgtcgtctaataagtagcgcgcatgattgggtgaccgagattcccatggtccctacctactatccagtgaaaccacagccaagggaacgggctgggaggaatcagcgcggacagaagacccggtggaagctagaatctagtcgggaacggtgaagagacatgagaggtgtagaaatgga

SEQ ID NO: 690512 - DNA, 952 bp, Homo sapiens
  misc_feature (684)..(684): n is a, c, g, or t
gggaccttccacatagtttatgcagtggtgcgggaccagctggtcccgctactctgggcctgaagcccacttgctctggagctcttccgaaactcaaggcgaatgcgctcacttatcgggagttgctcggtctgacggcagactgcacggacgtgcaccaggagggcacacttggctccccctatattggagctacggggagaagctgaagccagagctcatgggcctgatccgccagcagcggcttgctccgtcctctgtgtaggggatcgactcttctcgcaagatcacgcaggccgacggcgaccaggataagctagtcggttcatgctgcactgtccaccctaaccacaacgctgctgctagtcacggagacaatggtacgagaaggtgctgccaggccacgcccttaccctgggagagtactgcgcctgagcaaactgccctcgtcggccgtacaagtgagcggcacttctctgactaggctaagtgactcgctcctccatagtcacgggtagaagggcatccgggaagcagaacaaggaccttctatgagttggccattcatcaatcagctatgaccgtggggaggaggaagcgtacctctaacttcattgccccactcacaagcgggtagttcatacctgtggacagactgggctctacgtgcacattagtctgggncagtgcccatgagggcagcagagcagacacggttgtgacctggagcagcgtgtctgatcacaatggagatccaagctgcgatctgctggagtctggagaacgtgcccatcctccgagtcggcgcaccccctgtgcccccaccctctccaccaacttcaacttctgctatgactgcagcatcgctggacttgacagtgtggctggccatgggctacagctgcggccactgcagcagtccatgaagttacgtcgcgggggaggagtgaca

SEQ ID NO: 690513 - DNA, 611 bp, Homo sapiens
gggggtaggaagtggtcccgggagatcttggatggaaaagtcaggaggatagacagcgagacttgcagaataacatagagaaattaggaaccaccacaaattgcatgtcaagttgatctattccccctcttgttatctatgtgggcatttttcctttgacttgagatgattggtgctcgttgacgcccgtacgattagcttgaagggagctgcaaaagaacgcaaaattaagcacccccccccagaggggaagaccggagggggcagagcgagggtgcacaatacgagcagaaaatcgtcggaaaaagaacgacgcgcggggagaaccacacagaggtccggagcacgccgcggcacagatttcacgcagccgcgtggagggggcactagagggatcttacaaaaggccgcccagcgggagcggaacctgggggcgagagcagtattaaggcgcggggagggaaaccccacgacagggggcgaggaggaatggagggcacacaaggagaccacccagtggtgagcaaaaggggcacccaaaggtgcgaagagggggaaaacagggcacaaggggggcaggaaaaggggggaaacaagagggaagcaggagt

SEQ ID NO: 690514 - DNA, 117 bp, Homo sapiens
  misc_feature (5)..(5): n is a, c, g, or t
  misc_feature (73)..(73): n is a, c, g, or t
  misc_feature (95)..(95): n is a, c, g, or t
ggggngggggtccccgggccctttttccccccccccttttttttttgttgaatggggcccccacgggggggantgctttttaaaattgcccccangggtttttaaaaaaaattttta

SEQ ID NO: 690515 - DNA, 465 bp, Homo sapiens
  misc_feature (6)..(6): n is a, c, g, or t
  misc_feature (15)..(15): n is a, c, g, or t
  misc_feature (31)..(31): n is a, c, g, or t
  misc_feature (40)..(40): n is a, c, g, or t
  misc_feature (101)..(101): n is a, c, g, or t
  misc_feature (124)..(124): n is a, c, g, or t
  misc_feature (166)..(166): n is a, c, g, or t
  misc_feature (188)..(188): n is a, c, g, or t
  misc_feature (294)..(294): n is a, c, g, or t
  misc_feature (434)..(434): n is a, c, g, or t
aacccncgaggcccngcattttaatgtcctngttttcaantttatggcccccctaaaataccccctaggtgatggatattaaggtataggtatattatccncctgaatatcctcacctggcccngttagccctcagaatcctaagccttcaaaataatttaccatngcaacctaaccctaacccctcngttatcatgataaaaaataatttgtccttaaaaattcaagaacagtacaaagcaaagcagaacaaacccagaaacaaaatttcagcatagaaaacaacaagaaaantccatttggaacccaaagggggcagggaatggtgtctcacgcctgtaatcccagcactttgggaggctgaagtgggaagatcgcttgagcctgggaggtttgagactgtggtgaaccatgatcgtggcactgcactccancctgggccactgagcaagaccctgtctctga

SEQ ID NO: 690516 - DNA, 466 bp, Homo sapiens
gagttgattagaggatccgggtaggactcacaagcgggttaatcacgtcctcgggggctaatacacatccctttctccccacactctgtgggtcagaagtcactgctgggcgccctgctacctttccttctcctacaccacaggaggaggaggcacagcagtcccaaaatgacagtttggagcacagcgacagccaatgcaaccctgagggcagtgtccagacttaggtgccatgattctgagtgcccttggctttctgtgaccctgaggccggctatgggggttgtgcggctggccctccagggggtgggtggttgtgacagccggggtgatggtgagttggcgccccttgatggactgcaattggtgcctccctgatctcggggtgtccagctcgactcggcagaaatacacggaggggtcctccttcggcgggttggagatcctgaggaagccgctctccgga

SEQ ID NO: 690517 - DNA, 368 bp, Homo sapiens
  misc_feature (6)..(6): n is a, c, g, or t
  misc_feature (54)..(54): n is a, c, g, or t
  misc_feature (84)..(84): n is a, c, g, or t
ggaganttgtgggaagtgggttggagggaggttaggttggtagtgggaggtttngggagaaatggagagaggttagtggagggntggttttagttgcggttctttggtgggtgcctggtttggtaattgctagagtagggaggggggagggaaggggattattttaattagagtgggttagtttagattggtagctgctgaaacttttgttgagttaggagtgggtaaaaggtaggtggggtggggagtggggccccggggtggggcctgggcctttgcgtgcaaaccccagcctccctcttcttcctcaggctttggagcccctgagtttgagttcaataaaaactttatgtggtaaaaaaaaaaaa

SEQ ID NO: 690518 - DNA, 190 bp, Homo sapiens
gttgcgaatgagtgtgagggtatataccatagacgctagtttaagagtacagcggcaagtactattgaccctgctatggtggcttcgacatgggctttaggtgagtcataagtggagtccgccaagaggtcgtctcttactatcaaagctatagtgtaagctctgtcatacggggcatctctagagtcga

SEQ ID NO: 690519 - DNA, 160 bp, Homo sapiens
tgagaaatcataagcaccctgaaagcagcatatctaaatcagtaggaaccgcagttagacactttatgcaatagacctcaattctgcggatattggagttaaaaggatcgcactggtataccagaattgataggtcgactttatggggacttataggtaa

SEQ ID NO: 690520 - DNA, 306 bp, Homo sapiens
ttaaagttatcattttacttattgtatcagtaactggcccaacccaagattcagaaacaagacaataactgtaactacacaagggccatcgttgtgagagaaaacaaaacaatccacgaaactgagccgttgggtagaactctaagactgaatgccatacatcaaaccatgaagaacaaaaaccagccaagaaagctgcagaaggacaaaaagagcagacggcaacgctcatgagcacaagtccgggcgcacagttctgcacctggctggggagcacgacaacatctcattggcaggctgcctgct

SEQ ID NO: 690521 - DNA, 141 bp, Homo sapiens
agtcacttgtgagcagcttccactcaatcaatgcccatttctgcaagcacatggccaggttccagcaatccaatcaaactggcaagcaatatgttccagcagccatcttattttcagcacagtgcatgcacattgcattct

SEQ ID NO: 690522 - DNA, 853 bp, Homo sapiens
  misc_feature (136)..(136): n is a, c, g, or t
  misc_feature (269)..(270): n is a, c, g, or t
  misc_feature (327)..(328): n is a, c, g, or t
  misc_feature (337)..(338): n is a, c, g, or t
  misc_feature (481)..(481): n is a, c, g, or t
  misc_feature (491)..(491): n is a, c, g, or t
aggctgcgagcgtcccgccctcagagagcagcctcccgagacagagcctcagcctgcctggaagatgcctgagatctgtgctgcagccgctctgggggccctgtttgcttgtgccttgcttgcttcagtgcctccnatggacagtgctgtgtgctgtgtgcctggatgatgcagccatgtgtcatggaccctcaccacgtgaaatgcaacccctgctggatgtgcatcctgggccctgcaatgccccgaccctctctggcctgatgacnntcccatgttccctgtgtgaactgtgcgggacgagcatgccctcttgaccctgagaanncccccggannagtacgtcatggtgcccacttcctgctggtgacctgattcgtgccgcctgcaacatgcatgcagtagctggcagcaggcggcgcaggtgcagaagcgcgagtgacgtctcagctgggcgaaagacttgcggccctgctgcctngagtggcggnccctgagccccgtcagctgatggtgccaagccgggcccgcgcgagggcaagcgctcctactccatggagcacttccgctggggcaagccggtgggcaagaagcggcgcccagtgaaggtgtatcctaacggcgccgatgacgagtcgggcgagggcttccccctggagttccagagggagctgactggcagcgatccgggagggaaatgccccgagggcctgtgataagggccggggccagccgactgagcaagctgctgtgcggcaaaaagagaggccccagatggcatcgtggggccgccagaaaacagggcggacccacgacccctccgcgcaagcccagcccgggcggcgcgcccccc

SEQ ID NO: 690523 - DNA, 1219 bp, Homo sapiens
taaaatggggtaaaaagggcttaatttggcaggggagcaggaatttaatcaaaaaggccaaatcccaggtcatctcattcttgagctctctttacagactctccctcctttctttcttcattcttttctttctctccctctgtgctgcagcatgggcgcaagaaccagcagcaggggctgaaaaagccgtggggcagcaaaagacggtatacagccccaccagcaggttaccctgggcaaggcttgtgccaatataccctgtgggcaaattgagggtcttctcaagggtttttccccatttcagcttcactgtgaataaccttgtgttggagccgggatcgagtcgaccggcctttcgaatccccaagagcgtgtttcccaagaactcttcttgggagtgctcctgtggggcagtggggagaggagttttgccccctatagggacagcccagacgaggtctagagagggcagacgtataggcgacattcggggaaggacatatctgagggggggggggaaaaaaatgttctcaagcgtgcttttgaccagaacctcttcgagtgggggggggtgtagaacacccctattttggcagaactgttgtccaaaaggcccaaaatattctccaagacacagggggatggtgtattcccccaaacttgtggaacacaaaacgaggctgttcttgggaataaattgtggggccgggggcaaaaaccagatctcttgggaagaaagatggacgcgcgaaaaaattcccttcttaaagagaaatctttaccaaacttatccccaagaaagaaggagttttcaccaaccctgtggacaacctccgtcgtgttgatttgtgcccctctgacgaaagtgttaggaccaataaattgggaggaccatatcttctcgcgcgagatagttttttggcccccaagtaatttaacacactgtgtgggaacagagtgtattactatctggccccgacaatgtgctatatagcgcgccgtttaaaaactcttctggggtctgtccaatttgggcccgaaagacacaaatcggttgtggttcccccccacaaaatactcgttggtccccgagaaagaaggtccaacctaagggggggctcacttcccattgagagaggaagacttcttgttccaggccccgtgtggcccgtgggagccccaaaaaaaagttgtcccccctcaattgacgggcggcccc

SEQ ID NO: 690524 - DNA, 971 bp, Homo sapiens
cgctcgggcagctgccaccgccacgagagcccgggacgcgggaaagaccgaaaggaagaggaagaggcaccggtggccatggggctggatggcggcgctgctgagctggatgtgcgcggcgctgggcacagctgctgcgggatccgcgtggatggcgtgaactgcactgctgctgctggacttgcctgccccttcctgtgccttctgcctgtgcgccactgtgcagctgcctgcgcggccatgtgcctttggaacgcgcttgcttgcgggcgtccggcgcggcggctgggctcctcctgcccggcactgtatctcggacctttgcgcattgcattgcgcactgatcctagcggctgcttgcgtggactgctgctcagggttccggctgtgtggggatgcttgtgttgcttgtgtgccgcggtggggttgctcttggagaccggaagggtggcccagggtgcccgtccagggttgggctggtgaagccttcacgtgtgcgcgctgatctaaggccccggggactttcattgttgcttgcgttgggcgccggcagcttggcttgccagcggaagaatctcctggcgctggtgggggccccctaacttgccctgttggtacctttcgcttgctgaggggttgagggcaaaatgctctgggtggcctgcgctcgtttggtcgcactccgtgtcgcgctcagagacccgtggaagttccgcgataggccgccccctgggggctttatatcccccccgttagccttttggaaattcgtggtttggccctttcagtttatacgctccgcctttttcccccttttttgggccaaagcggtggaaaccgtgggctcttttacccagaatccgagggggacatttttcccccaaaggagggggaccctattcggcattaggtacgccccgtgacgagttcttttggtttggcagttcccttttggcatgtgggctcgcccg

SEQ ID NO: 690525 - DNA, 407 bp, Homo sapiens
ggtgttcccgacgatcactgcatcatagcctgggcatagacgtcgagactatgtctcaaaaaaaaaaactgtgtttggcctacccttaggacagtgtcacaaaccattctgcactagctaattaaagggctatgggggtaggatgaggttaatcaaagggtggacacccatttagccaaggctgagaaatctttggcagttgcttcccttcaaaagggctcaggggccaggcagccacactttggtcacccattgaccaaggaatctccagctgcagaccccagcagcagggccccatttccctcacctgaggttcaaaatgcccccattcacccgctgcctgtgttccctgggctcccgatgcagcccctccacgaggaccacggaggctgctataatggcgtaat

SEQ ID NO: 690526 - DNA, 370 bp, Homo sapiens
cagttcccattaaacagtaactcctcaccctcctctctgtcagtccctggcatctaccattccactttctgtttctaggagtttgactactcttgatgtcatataagtgaaaccacatggtatttgtccctttgtcatggcttatgtcacttaaaataatgtcctcaagattcagccgtgttgtagcaggtatcagaatttccttccttttaaggctgagtattccattgtatgtatacatcacactttgcttatccgttcttctgctgacacttgggctgctctcaccttttggctattgtgactaatgctgctatgaacatgggtatgcaaatattgcttgagagcctggttccatcccccaccctcc

SEQ ID NO: 690527 - DNA, 180 bp, Homo sapiens
  misc_feature (27)..(27): n is a, c, g, or t
agtaggggatcttgcattagggtcagntcctctagtgacgttggcatgatctttgatcatgtacagtatatggagtgagtgttacattaattaataggtttttacaatatatgcctgattttttattttttcttttagagaaacggagatgtcttggctctggtcgacccaatgctggaa

SEQ ID NO: 690528 - DNA, 140 bp, Homo sapiens
gagccttacctggtgacgtgctctatgccagtttgctgatgtctcatcagatactcgataaggctggtgatggtggtgcatgctgtgtcttggtgccagtgactatgaatatggagtagatccagtgctgatcctgagct

SEQ ID NO: 690529 - DNA, 840 bp, Homo sapiens
cctaggtcgggcctgggtgttaatcggccgatggcggcggcgcggtggtcatggctcgggtggcgtgggggctgctgtggttgctgctgggcagcgcctggggctgcagtacgagaagtacagtcttccggggcttcccgcccgaggacctgatgccgctggccgcggtcgtacgggcacgctctggtagcagtacgaggtgagatgatgctgtgcgcgatgatgcgcgctgctacctgtgactgtcggtgctgcggctgcacctggctcctgcgctgacagcgagggtcttctgccatcgctcaatctgcaggctggcccctgctgccctgttgtgccacggcctcgatcccgatggcgtgtctgggcagacgagtgggcctgtgatcttgcgggtcttcggccgcgtcctggaagcgagcgcggcctgcgctgcggctgcgtgcaagcgtgacgcttgcctctgccttccaggtgccctaccctgctcggggccatctgctgagtgacttccatgagccgtcctgccctaccagtagccttgcattactgctgctgttcaccggctaaccgagcttggagaagtgcgtgtgggcgtgggagactacatgttacctcccagaggaacccgaggcactaagcttgacctgccatgttatctcaacctactatcagggggatgctggaacgtcgccgaggattccctcacggacctagatgcccacgcctatgaggcgttgtccccgggctgtgaggctctacaacagcgggattcccggagccggtgcttggcggcttggcgagtccggatttgcggtgctgcgtggagggcctggggct

SEQ ID NO: 690530 - DNA, 275 bp, Homo sapiens
tttttagggaaccaccccccaaatgaatttttttttgggccgtccgggagttaaattaatagggggtttaaaaaaaaccttttgcctggtttagaaggcccactgaaacccgtagcccctgggggggtaaagggagcattttttttttggccaaaccttttatttggttctggatatttttatccgccttaaagaaatggattataactagacatttgctggtttcccccaagttttgttttatttggttcctttttaattaaccccttggggga

SEQ ID NO: 690531 - DNA, 866 bp, Homo sapiens
aacctggttatgatcacgtgttgggcgcgctgggctctgtgagctagagtgcttatgatctcagcccgctccttctcactacctgagtgtgtgccaggtgctctgatgacgatcgtatggacatggcgtgaggccccgtgagtcctgagaaatatcttatgggttgtggactacatggcactggatctgatatcagtgtgacaggtggatactgatgatcatgtgcagcagtgaatctgtaagaacggtcaagtttaggggctggtgcaaaggatgagttgcacattgtgtgaaagcagaggcaatgaattacgaaggcagtccaattaaagtaaccaactggcaatttgaaaatgtcgtgtacagccaaggtttcccttggggggttttgaaataacacaccagtggtcttagggttgaagtgtgtttcaggaccagtgcatattagtgacagcaccttaggtaggctgtggaggaagatgcagagtcagaagatgagaggaggaggatgtgaaactcttaagtatatctggaaagcggtctgccctgaggtgttagcaaggttccacagaaaaaagtaaaacttgctgtgctggaggatgttgacgatgattgatgacgaaggatgatgatgaagattgcttgactttgatgtttggatgatgaggaagtgaagaaaaagcggcagtgaaagatttattaagagatatccagcaaaatgcaaagtctatcagtggaaagagataacatttaacagggacaaggcatacttctagaaggaatttaaacaaagagattgtggaatatagaatgtggattaaaaggtttcaatgagctcaatgtgagtcggcaagcatatttaggag

SEQ ID NO: 690532 - DNA, 1155 bp, Homo sapiens
gtggctgcagagagactaccggccaccgccgccgccgccgacgcgagctgtccctgcggcgcgtctgccttggcggagccgaccgcagtgcgctcaggcgtccgggctggccctgctgcgcttcctggctgctggctgccaactgaccatgccctggcggatcagctggcgcaaggcatggctggctgggaggcacactatttgcgctggcctgccttgcaccccctgcaggctccgtgctctactcacctctttcatgctgccaccaacgcggcggcacgccgctgctcgctacgcccggctcctcgccctggacactgtgatggggtctgccttgctcaacacccttggcggccctgcccatcatccactgcaccctggcctgcaggcccctgcgctgcgccccggctgccctggctgggctacactgcgctgtcgggctgctggccggcctggcgctgctcctcaacgccccctccaacaagctgcactcggcaacacgggacataaggcactgcgccaggccatgatgcccaacactactgactactcgcagcgccccgcgaaacaggaaaaccaaagaacaacagccgacaaaccagcacccccacaccaaaacaaacatacaaactacaaccaccaaccatactacacacaatacaacaattcaaacccacttcacccacacatcgtcacccaccccaaaacaacacataacccacacacacataacaccacaaccaacaacaacatatcccaacccatcaaaaacagtgcgaccctacagagacacacgcacaaagcaacaacccaacagaaaagcagtcagaaacacacacaaccaaggaacaaacagaactacacgcacaagcgcgccacccacccagaacccaagatagcaacccgggcatgacccccacaccaacaccacaaccgaacacataacaccacacaccaacacagccaaagaaccaacaatactaaccaataacacacattttaacccatacttcaaacacaaaacaacaacacaacaaaaaaaaaaagacacactgaccaaccacaaaaaacaaacagcacaacaaaaaaccacaacaacaaacacaaaacaaaaaaacctacaacaactacaaacaaaaacaaacaacaacaaaa

SEQ ID NO: 690533 - DNA, 352 bp, Homo sapiens
ccagattcatttgaattgtaattcccaacgtaggagatggggcctggtgggaaatgattggatcatgggggcagtttttcatgcttttcatgggggcagtttttcatgctttacaaccatcccccttggagctatcgtcctgaaagtgagttttcacatgatcgggttatttaaaaggttggggcaccctttttgcttttttggtccggctcctgccatggaaaacaccggctcccgctttgctgtcccccatgattgtgtgtttcctaaggcctcccccagaagcagaagttgttatgcttcctgtacagcctgcagaaccatgagccaattaaacctgttttaaaatcca

SEQ ID NO: 690534 - DNA, 201 bp, Homo sapiens
gagtagtggtagcccggagcccaccaccccaggagaccaaagccgcatacatctcacgtgggggacaacaaagggggcagggggggcacgaaggctcatcatgcaaaataaaacaaaataacaaaagtattaaggcgaagattaaaacaatttagcattacataatttacacaaaagcaatgctatcacctcccctgtgtg

SEQ ID NO: 690535 - DNA, 150 bp, Homo sapiens
tctcgtacctcggttcatccgctcttgattcgagttccgtttttacagtccttatcatcgattccgcttttccgcgcccctctgccgcattcgccgcgtcgactgcggccggccccgctccccggtttatccccactgcaggcggttgcg

SEQ ID NO: 690536 - DNA, 935 bp, Homo sapiens
attttgaagtaccagactgagatagtgtatgccaagacctcccctcatcagaagctcatcatgtggaaggctgccaaagacagggtgcatatcgtggcgtgtgactggtgacggtgtgaatgactctccagactttgaagaaagcagacatggggtcgctatggggattgctggctcagatgtgtccaagccaatctgcatgacgatgattctgcgtggatgacaacttgcctcaaattgtgactggagctagaggaaggtcgtctgatctttgataacttgaagaaatccactttgatctatacctttaaccagtaacagtcccggatatcactcaccgtgccatgatatttattatgcaaacattccaattaacactggggacctgtcgacaaatcctctgcatgacttgggcacgtgacatgtttcctgccattctccctggcttatgaggcagtgctgatgcatgatgacatcatgacagagacagcccagaaatcccaaatacagactaaaacttgtgaaattgagtcggctgatcagccatggctatggtgcagattggtacctgatccaggccctgggaggcttctttacttacttttgtgattctggtgagaacggtttctccctattaactgtcgggctccgagtggactgggatgacgccgatcaacgatgtggcaaaaggtacgagcagctggggacgtatgacccgcgacagccgtggagttcactgcaacagctctcagaagatcggggggcatggccactggaaccgaaaacgggaatccggccccgcggagcaaaaggatcgaattggctgaaacaccggctctcccagccaaggggcagaccaacccgggggcccccccgctaacgcccgcctgggaaacccccttacaccccatgtccccccccgggtgctgagagcg

SEQ ID NO: 690537 - DNA, 840 bp, Homo sapiens
cgtcccttgtacgtcccctgcggtacccgcggttttatccccaatggcgtccccccctggccggccctagtcttgcgaggcgccgcaacttgtttgcaccccaatcagtacctttgccggccctgcaaattctcctggttctccctcttcgcccggccgggttccccccttttgagcgcccctcctcttgcccccctcccgggtaaagtcgccaacctccacaaaagtgtggtcccagcgctaacgttttctctgccccttgggggcaaaacaatatttcgcgaaatttttcccccccgggaatcccccccccccattcctttcttttaaggacttacccccggtcccctgcctttccccagaacatttgtccgcctccaccgcccacacaccaagtttgctgcgggtaatccccccgacatatttattcccccaatttttttggcgcccaaaacagggtggcatgaacagtcttctctgaaacccctaacagactttggctgggccacaaaaacgtcctccgactattcgggcgccataaataaggcgtcaatctatgtggggataataataaagctccagatagtcgggcaaccaactatgtgatcgcacgctttatctccccatttcttggggtcgccgccgcaaacccgctcggcgccccccgggataacacccgtctgggagggaaaatttctgtttctctgcgcccaaaggataaagtcagcgcgacatgcccccgatggcttagagcaccaacacctattttcccctttttgggggaaatccaaaaaaaattttttaacccccaaccaaaaaaaaaacttttcccggccccca

SEQ ID NO: 690538 - DNA, 595 bp, Homo sapiens
agcggggcgttggccttccgcggtcctgtgcgagtgcgcccttctcgggtcccctaggtcgcggggcgagcgggcctggacaggggcttgtgcattatttggagatgtgtgtgtgtgaacgtcataagcctttgcgtccttagagtattgccgatagttgacctacgcaagagacaaggtcatggtgattcagcctaatatctcagaggatgcagcattcaaggttctatcttggaacgcagagactgtgccctcgaccagagtgctagaacctgctgagcaacctgatcttccacttcaaccttcattccaggaactgttttcgtatcaggatgatagctggcctcatacaatgaagtcagggacagcgcgatgaaaatttggtgccgtgactcggatcggcggacctcccttaaggagatcaagagtccccgtgtacgtcctggacgttaggtccagtgcagaagagatccagctagcagacctaaggtcctcaggagcaacaagcccgaagaaacgatctcaccgagttatcgaaatccgaaatagcttcatctagtctggcaaacacatgtggcaaggattagttctcacc

SEQ ID NO: 690539 - DNA, 766 bp, Homo sapiens
aacgatcaagtgatagaattcaggaacgatccgagatgagctgagaaaatgcttctggtagatgaatgatatatgcagtgctgctactttttgtacaggaaaacaggtgagttctgacaaaatgctatgtgccagtcatgtcgtaatatccggacagataagctagggcttcagtctcttcggtaacagaacatcgcatgtgcaagccacttgtgctacacaaccgaactggtcgagtactgaatggacttgacctgggcgtcctttatgacatacacaacgtgcatgaaataggatatctaaccaaggactgtgtgataaaatagatctaggcttgttactagcaaaattagtatgtatctcggtttattaaacagtatctgggagtggcttgggcgagaatacttaaacttatattgttgccaattattgtttacccgagtataatgtttgctatttagacaatgtgcttggtattaaaggaaattctccttgggaaaaaagtatcctcttttaattttacttcccataagcgtaacatgcctggacatagctcttgtgcaacctttaaataacattcgttttgagtgtattacgagcccagacaaataatgttttaaagttatccccttgctactttactgatacctttatcattcctgagacagtttgctactttacaaaatgtagcattccattgtgtatttatgtctctcccttggccaaaaaagatttctaatactggttgtaccagacagagaaaggt

SEQ ID NO: 690540 - DNA, 275 bp, Homo sapiens
gtcgacattaaaggcgtgcaccaccacgccaggccccatgtttaatgtttagtaaacatttaataaacatttaataaacattgtgaaggtctgaagagatggattagcagttaagagcattgacttttcttgcagaggtcctgagttcaattcccaggaatcacatggtgcctttggaatccgatgcacacttttggtgtgtgttggaagacagctgcagtgtacacatatacatacacacacatacactctgacacacatacacatatacatac

SEQ ID NO: 690541 - DNA, 339 bp, Homo sapiens
  misc_feature (221)..(221): n is a, c, g, or t
  misc_feature (244)..(244): n is a, c, g, or t
tgaccagaacagcaaccttctcatcgagtagttccgcaatgagtttggggagatccagggtgacaagagcgagatgatctggaacttccactgctgggtggagtcgtggatgaccaggccggacctgcagccggggtacgagggctggcagggcctggacccaacgccccaggagaagagcgaagggacgtactgctgtggcccagttccagttcgtgccntcaaggagggcgacctgagcacnaagtacgatgcgccctttgtcttgcggaggtcaatgaccgacgtcgctagtgctggatctctatgcagcacgatggatctgtgcacaatatatat

SEQ ID NO: 690542 - DNA, 385 bp, Homo sapiens
cggttcctagaggatccccttcgacggtgtctgtgagaataaacatttagaaatgtaaaatattaaaatggagtatctgaataataatgaggtactcaggatgaagcatgtatgtcataattttctaagtatacgaatagcatatttttttttcttttggagacagagttgctcggttgcctaggatggagtggagtggcgcgatcatggctcactacaacctctgcctccggggtacaagcgattctccggcctcagcctcccaagtagctgggactgcaggcacgtgctatcacacccggttaatttttggtattttagtagagatggggttttaccatgtgggccaggatggtctcgattccctgacctcgtgattcgtctc

SEQ ID NO: 690543 - DNA, 315 bp, Homo sapiens
ccccgaggaacaaaaactggagctcaatcttggacggtacagacgctcgcagacaacctggccggcggcaccatgaggcaggcggtacgcgcagcgctgctggccgcgctgctgctcctggtacagctgtgccctgggagcagccagaggagccccgaggcggccggggtccaggacccgagtttgtcttgtagccccctggtatgctatcagttgtgttggggtccgtgtgctcctcttttttctgttgtagtgcttctcgtgtcgcgcggggcccgtccgattgggactcggtacggcaggcgagcggccgca

SEQ ID NO: 690544 - DNA, 327 bp, Homo sapiens
ggctcggcccgggtgatagcacaataaggaagggtccccaggtggtagagagcccaagtgagaacaataatgaacaattatgtatgaacaatgttagagacagctaatcccaaacaacctgcgggcacaatgacctcattccacacgtagcacccttcagcaggaccctataaaactttcctccagcccttgcctctttgcaggtagccccttctctgctgagctgcccactgcaacatattttcacaatttctctaatagatctgcccttctttacctacaactatcttggtaaatggctttaccacctgcaaaactgaccctagg

SEQ ID NO: 690545 - DNA, 437 bp, Homo sapiens
catggttttttaaagcttcccaagtgattctactgtatagctatgattgagacccactcttctcattgactgttacccaccatatgtgcttctgtagtactgtaatcctgtcaataataatgtagagaaatactagtgagctaacaagtaaaaagcaaagcataattctgctacctctttaaaaaatatatacatactttgaaaaagatggaacggaagttaccttcacagcagttatctcttgtttttagtagtagtgcaggtgactttgttctttatactttttctgttttaacctttccaaaataaacatacattgcttttataattgaaaatctttagcttaaaaatttgacttttcacctagtcaattatgtaggtatttgtttgcatgtacataatcatatcctaacgtacagtctgtcatagcattttgt

SEQ ID NO: 690546 - DNA, 275 bp, Homo sapiens
gtgcagaatcacactcaacaaaaggataaaaaaaaaaggagaaaaattagattaactgaaacccgggaatacagttttggaattccataaaggttaattttcctacaaactctttttggaaagcttaatatatatacacccccttagagaaacctttaaaattaaggggataagtatctccaacctcatcacatggaatggatcacggctctgaccttaatatttccaccgggtataagccagcagggattcgctttaaacagggctcgagtcct

SEQ ID NO: 690547 - DNA, 327 bp, Homo sapiens
cagctgttgcagcagctcggcctggcttttcagcaggtcggcgtcatccggcgcgcgcggcggttgcccgctgatgcggtgggtatcgtcgaggcccagcggccagggcgacagcaccagcagccggtggctcaggcggcaggcctccatcggatcgtgggtgatcagcagcacggtgttttgcgccagcagttcggcggccaggctctggatctcggcgcgggtaatggcgtccagcgcggaaaagggttcgtccatcagcacgatcggctggtgttcgtagagcgtgcgggcgatggcggcgcgctggcgcatgccgccggacag

SEQ ID NO: 690548 - DNA, 264 bp, Homo sapiens
  misc_feature (177)..(177): n is a, c, g, or t
agcgacattgtgcaggaagagtgagatggtacaggcagctgaggagaagtaagagaaacgatagtaagaaggccactcggcaaggtctgcattctccctcgatgctctcaacccatcttcgtgcttctctgccagcctcctggtccaacctccgcatctttgctgagtcactcatgnctccgtaagtgatctcccaagcccacttgggcccctcctaaccactgtccacttagtagccagagcaatctttagttcggtcaggga

SEQ ID NO: 690549 - DNA, 178 bp, Homo sapiens
tgtatcccggggagagaaacaagtaacaaagtgagacacgagagaaaaagaatccacagtttctacaaaaagccccaccctcgggaagacatggtggacacatgatctctgtgcccctagagtcaagccgtggatcagtaggaggtacctgtggcctggggaagcccctgtgcaggtt

SEQ ID NO: 690550 - DNA, 116 bp, Homo sapiens
cacttcatatgatgagacctggactatcggggatgaccaggcacagacctgctgcaggtggcagcccatgaatttggccacgtgctggggctgcagcacacaacagcagccaaggc

SEQ ID NO: 690551 - DNA, 330 bp, Homo sapiens
ggctggttatggctcccttgacagccacacagactgtggtgatcaccgcattgagcccactgccctgtagaatctggctctgcagcttgctcgagaatgctgggcagcctggtgcagaacaacgaacgggtgtttgaccgacaagcagtggcacctactgggcgctacttccgatgaccagaaggacggctagcgcataaacgagggctacatgcgccgcgttggctaccgccagcagcagtctcagacggcctactgagctctccactccgtttcccgcctgggccattcaacgcctccgcggaggcgttgaatggccgaggtctcttc

SEQ ID NO: 690552 - DNA, 160 bp, Homo sapiens
tgtggcgccggcgcgctgcggcgcatcttcgataggatggtcgagatggtgatggctctcgctcatcggcaagtctccagcgcgcgctttgacgcctcaaggacgtctaatatacgggcgttgcgcggtatggcgacgccgaacggcgctctccgcgtac

SEQ ID NO: 690553 - DNA, 148 bp, Homo sapiens
gggggttttttttttttccccccccctttttcccccgccccccggggggggccccttttgggggggggcggggggccccggttgggcccccctggggggggtaggacccccccccaaatttttttttaatttaattttgggtttccca

SEQ ID NO: 690554 - DNA, 360 bp, Homo sapiens
gtatggtagatccgtgctcctacaatatagtctcaagcgcagtatgtctgtatagggatcaggaccactcatggattacagaactccaattccaactaatggagtaacagttcaaaggtcagtcagatgggctcggctcacaactgatacacagtcttttgaagtggcaaaacccggtctctccagtctataatacgcaatcgcagtactcaggagcgatcatattccaagaatgaccggtgcataggatgattaacccatgtactcttcatcatgcattaactgtgtgaggtcacccagcttgtcacccttgatctcacattgttaacacgactatcagatcgcaacctgtctgtcgcg

SEQ ID NO: 690555 - DNA, 165 bp, Homo sapiens
atattaggaatctccaataggaagtcagcagctaatctaggctacaatatacaccaggaagatgtgcttcggcacgtgacactacgctatatgacaggaacaagtggcaccaatagagtagacaccagcttaacaactgataaacgagataacggtaagtgacta

SEQ ID NO: 690556 - DNA, 1042 bp, Homo sapiens
gcttgatggtcgaggccgatctccggggcgtgctggtcggtcatcgtggctaaacaggtactgcatgggccggaaggtggtggtcgtaggctgtgacggcatcaacatttgtgggaatttctacagaaagcaagtaagaagtacctaggcttgtcgctccgacaagcggatgaacaactaacccttcccgaggtggccctaccctactatccgggcgccccgaggccgtcatcttctggcgtgatcctgttggcgaggtatgctgcgcccattaatagagcaagcgaggacaggacggtctggaacgtgctcaaggtgttggacggatcccaacaccctacgacaatgaaaaagcggaatggtggttcctgtctgccctcgaaggtcgtgcgtctgatagcctagcaagaaagtttgtctatctgggcgcgcctggctcacgaggttggctggaagtaccaggcagggacagaccagcccgggaggagaagaggaacgaggaaagggcacgatccactaccggaagaagaagcagctcatgaggctacggaagaccggccgagaagaacgaggagcaagagaattgacaagaataacacagaggtcctcaagacccagggactcctggtgtgagcccagtaaagacctgtgtaagttcctattgatagctgatgtgatggtggtgaatgactggtgtgccttcttgtgcgccaggaccacaacaagccaaagaagctgtcagtgggtggaagaaggggcttccaacgctgaattgaaggccaagctaacaaccaatggcaacaccagatgaggggatgtccctcaattgaatgcgttcctgagtcgacctcacaagtcggcaatgaggacatggacaggacggtgggacaacttaaaaatagcggccgctcgcacgacgcgcggaggagggcaaaactcatagaaatgagggagaacagcatgcacacgggcacccacgaggaactacgagcaaacactagtgtagagaccacaagcgtggggagggatgaatacacacacc

SEQ ID NO: 690557 - DNA, 172 bp, Homo sapiens
actattggaaatagtggtatctatcaacttttacgagctgaccgtcactgaattcagatgcagcgaggagtcataggaccctcacaacctcctggaactggtagtcactatcatccttatcctgagactagcactggtcacactagctttctcacaatacccttttagcact

SEQ ID NO: 690558 - DNA, 218 bp, Homo sapiens
gcaacacaagaacacctctgattactcctgccatcatgacccttgcccataatatgattttatctccacactagcagagaccaaccgaacccccttcggaccttgccgcagggggtccgcactagtctcaggcttcaacatcgaatacgccgcagcccttcgccctattcttcatagccgaatacacacacattattatataacacctcaccactaca

SEQ ID NO: 690559 - DNA, 480 bp, Homo sapiens
  misc_feature (40)..(40): n is a, c, g, or t
cagaatgggagaaaatatttgtaaactatacatctgatanatagttaatacctcaaaaacatcaggaactccaacaactcaatggcaagaaagcaagtaacttggttgaaaaatgggtgaaagacctgacatttttcaaagaaaacatgcaaatggccaacaggtctatgaaaaaatgctcagcatcactcatcatcagagaaatgcaaattaaaaccacagtaagatagtatcccactcctggtagtatggctgttttcaaaagacagaagatcagtgttggtaaggatgtggagaaaggaaaacccttatacactgttagtggaaatatgaactatttatagccattatggaaaacactatggaggttcctcaaaaaaaattaaaaatagaaccaccatataatccagcaatcccattactgagtaaagaaaatgagatgtttgcaataaacatacatgtgcatgtgtctttatagta

SEQ ID NO: 690560 - DNA, 988 bp, Homo sapiens
ctcgcgttggacgcatagccctggccgacgccggcatgagcgccgcgctcttcagcctggacggcccggcgcgccggcgcgccctggctgtcggacgcctgcgcccttctactaaagccgggccgggcgggcaatgcctggttcctacggggtccgagccagagggcccgtaggcgagcccagggcgtcctgtccgaccccgcccatgtacggacagacgagagctgcctagtcgtatttcaactgcctatagtcgcactccatggtcgtccgtgcccaccctggagctgtgccactgacgatgctcttcgacaacctcgttcatagcgaggcaattcgacaacggcggtgctgtgccgctgggagtccccgtggagacttcgttcccctggctggcccctggggcgcccctttgaggccctggcgctcctgtgctgcttcccccggcctttgctcataggctgtcagagcctcggatcgtgggtgcagacgggcggatcgcgcgccgggctccgctttgtttggcccgcggccgccaggttggggcctggcgttgtcggacgaccatgcaccccggtgggattgacggctcttgggctgtgctccgcccttcgtaaggaagtacacccccttccggaagggggggcccccacagtggcttttaacggggccgttacgtcacatgggttttcctttgttcccaaaatgtttgggtcccccttataaggttgaggtcagccaattaattaaatgccttagcgcaagttagaagcccagtcgcagattattaaacaagcaccggtctagttggacctctggagaaagcatgtgcgctaaggactttggggagaatcctatgggttaaaacggaagacccattaaacattcgctggtgggttggtgaaccattaattttgtgaacaaaagtataaccctaccagaagagctttaaacaagggtcctcaacagagtaaaattataaacaact

SEQ ID NO: 690561 - DNA, 202 bp, Homo sapiens
tgaaagatacgggtcctagaagcggcagagatctaagcaggagcaagttggtgcatgcatttggtggtacagtgtaaatatgtgtaactgatcacactgcgggcacgcctcatttgcgtgaaagtctgcaccagacttactaattgtagtagagttaccccccaacccacgaaaaaaatgctactcgggaagaaaattttca

SEQ ID NO: 690562 - DNA, 1149 bp, Homo sapiens
  misc_feature (59)..(59): n is a, c, g, or t
  misc_feature (128)..(128): n is a, c, g, or t
  misc_feature (262)..(262): n is a, c, g, or t
ctgtaaccatgaacatgttacagttaagaggcctcttaactgtaaccatgaacattgtnacagttaagaggccctcttggttctccacaatgatactgagcatgctcatggtgtgatgtttttttttnttaaataaaattccaaatgttaaaaaaaaaaaaaaaaaaaaaaaaaaaaaaaaaaaaaaaaaggggggggcgcgctccaataataatttaccacccggaaagggggcccagaccttttgacgcgtttcccacanttttttttttgttcacaagggtgccccctaatagggggagctcgatataaataacgacaaaggaaaggggcccgcgcgttaaccaagcctcgtcgtcgcagcgggacaacaactcgccacctgtcggacatctttggggaaggagaaccccctaactctcgggggggcgcgccacatagctgggcaccaaacctcaccacgagaagatttaagcggcccagggcggaacatattacacactttcacgggtgttcatacggggtgttcaccccaaaaaggggcattgtgcccaggcggcgcctggaacaaacttttgcgcaccacagcgggacattatgtcttaatcagcaacaattatttatttcccacgggagcttatctgtgtaaataaccgactgaccaactgtgatcacccacccaccactctgatgacgacgcacacacagcccatgtccgccacgcagtcgcgcacggtgaccgtcacgacattgaagcacacccacacagcattagtgactgcgagcgggagaagcaggaaaagaaataacgcccaaagcaaatcgacgtaaacaggaacgcgagcagagacagaagagcgagacaaaagacagaacgaaaaagaggaggagcgacaaaaaagagaccagaaaaagagagacaaaagagagagtaataacaaaccaaaagagagaagacaggagagagaccaagcacggacgcaacaggacaacggagggaacgagacgacagaagcggtagcacagacgcgagccacgaagcgagacaacacagaatcacagaacacagacaacaaaacatcacacgccagaagagacggaagaagatagagaatagttcgagaatcgaccgacaaacgcagagcgaaa

SEQ ID NO: 690563 - DNA, 556 bp, Homo sapiens
aatgaagaaattgatgaaatgatcaagggagctccggggtcaaattactttacttgtgtccctcacaatgtttggggagaaacttaggggagcggaccctaagaaaaccatctcaaacgcattcaaaagtgtttgaccctgaaggcaaaggggtgctgaaggctgaatacgttcgggaaaatgctgaccacgcaggcggagaggtttttcaaagaggagggttgacaagatgttcgccgccttcccccctgacgtgactgcaactttggactacaagaacctggtgcacatcatcacccacggagaaaaaaaggactaggagggggctcgctgctgcgccctgggctcgttctttgcagagtggtccctgccctcatcttctttcccccgagtaccgcctctgtccctaccttgtttgttagcaatgtgggtgccccctttatccacctccattttctttgcaagctggggtggcttatgggtacttggtgcccgcacatctccaggttgaaatcccatccagaggccattgtttccaattaacaggaggtcgtgt

SEQ ID NO: 690564 - DNA, 284 bp, Homo sapiens
atagctggcgacaggaagtcgaggctatcattgagccacaattgtgccacggcactccagcctgggtgacagagggagacccctgtttccagggatgacaaaaaaaaaaaaaggaaaggaaaacaaagggggaaatttttgggggcgttttgggggaaaaatttggaaccaatggggggggggccccgggaaatttttttgggataaaaaaaaaaaagaattttttacaaattaaagttgtcaaaaaggaggggggaaaaaagcaaattgcgaaacacgtttaa

SEQ ID NO: 690565 - DNA, 237 bp, Homo sapiens
tgctaaaaggtaatcacagatgtacccagtagagagatgtggctaggctaagacgtaatagagactgcattgctgcgtgcttgatgcttgtacccttttgatcgtggtgatttagagggtgaactcactggaacggggatgcttgcatgtgtcatctcactaagagctaatagaacggctacgaccaaaccctatacagccatttaggtaacagccatttaggtcacagccattcag

SEQ ID NO: 690566 - DNA, 117 bp, Homo sapiens
atcaacctattgtaataaaccctcaaagaacctgttgaaattattccagactagtaatactaaaccagtatatactactccttattcaaatagtctagtacataataggattactca

SEQ ID NO: 690567 - DNA, 100 bp, Homo sapiens
agttctgcttggtgactctgaggatccgcgttgttccagtcggcgtggctgtgggcggtgtggagggcgcgccgggtatccacggtgggcgcgtcggcgg

SEQ ID NO: 690568 - DNA, 771 bp, Homo sapiens
  misc_feature (68)..(68): n is a, c, g, or t
  misc_feature (761)..(761): n is a, c, g, or t
gaccctcggtttgcccgaccctctagcacctgattgtgggtaaagctgactgaaagggattccgaggncctcggtgactggcctggttaagatcacgaatctgatgggattaagggcctgtaccaaggctttaacgtgtctgtcagggtattatcatctaccgaccgcctacttcggtatctatgaccccgccaagggaatgcttccggatcccaagcacactcacatcgtcatcagtctggatgatcgccccgactgtcactgctgttgccgggttgacttcctatcccatgtgaccctgttcgcccccgcactgatgatcccgtcacgggcgcccaaggaacctgacatcatgtacacccggcaccgcttgactgctggcggaagattgcctcgtgatgaaggaggccaagcttttttcagggtgcactggtcccatgttctcagaggcactgggtggtgcttttgtgcttgtcttgtatgatgaaatccagaagtacaccactaagttatttcctaggatttttccccccgtgaaccacggcactgttgtattatataacactatcttgagcacttcttgacaagaactcctggctgtcacgtttctcacgtggcaactatttactggttgaaaatgggaagccataatattcatctgacccgttttctcttaaagccctttccctgatgatgatgatgggactccattgtattttttatttcagtcactcctgataaataaccaatttggagaaatnaaaatatcta

SEQ ID NO: 690569 - DNA, 305 bp, Homo sapiens
atgtcgcgtgcatgtcatgaggctactcagaaggacacgcaaattaaaacttaggaataatttctggaattttccatttaatatttttgactatggtggttaactgaaaactttggaaaagcaaaaccaacagataagggggatggggactaactttatttccctaagcttttcagtaaagtataccactgtgaaatgcgagatcagagaatttgtgctgggcaaaatggggtactttaaaattaaggaacaaacttaagttcataatttaaggctcctgttttgaaagggtccccttaaactaa

SEQ ID NO: 690570 - DNA, 660 bp, Homo sapiens
tctcttggtctggcccagcgagtaccattaagagaaaaccgagaaatgtcacataccagggacagccatgactccgcacgcgtgaatgccgctccccgtggccctgtggacccatgaccttggcctggccgatgtggtgccatgatcctagtcacccgtttggatcgaggcggtcagtgtgtacctcttcaccgaggcacctcctaatctcgtgacctcattattcaggtgtttgaccggcgatcgtcaccggttcaagcgtaaaacaccggtgtcacactgcatgccatcaacgccccgagacgctgcagtcaggcctcgagtggctgcggtggatgtcttccctctcagtcgctgctctgaagatcgctgccctgcctctgggagcaggttgtcagatccggtagtcttgacgcgaggagagttgtagtaagggtcgactggagggttctggggaaaacacccgggtggtgcacgtcccttctggagcccatctctaagcatgaatcccctcaggctccaggagggtgaaggactgggaaaccgcagtcggtagtcctgtgagacacgtgtgttcgagacaagcgagagtacgaggggggctggtaagtggtgggtcagtggtgttccttctttactggaggctcctccctcgggggg

SEQ ID NO: 690571 - DNA, 439 bp, Homo sapiens
tacgaatcgagcgcttacctgcagctctctctgatgtgttaaatgtacaaagccaggaaattcagttaccgttcccatagcaactgcagctgcttcctggacctggtagattaagttatgaaaattaatcccacttgcagcctctctcttttcttcattattagtctagctaatggtttatctatgttattaattttttcaaaaaaccatatcatggaatttgtgagtttttgaaggttttttggtttgtatcttcttcagttcctctctgatcttggttatttcttgtcttctactagctttggggtttgcttgttcttggttctctagttcttttagatgttaggttgttaacttgagatctttctagctttttgatgtgggtatttaatgctataaatttccctcttatcactgctttagttgcatacccaagagt

SEQ ID NO: 690572 - DNA, 166 bp, Homo sapiens
gccggaccgggttccttgtctggattttctgatcacacacttacggtctaattcagcatttattgtctctcctctgtgtttcctggaaatgggcagctgtgtccaggactttattctttctttctttctttctttttggttttttgttttctggagacagggtctc

SEQ ID NO: 690573 - DNA, 465 bp, Homo sapiens
  misc_feature (163)..(163): n is a, c, g, or t
  misc_feature (168)..(168): n is a, c, g, or t
  misc_feature (254)..(254): n is a, c, g, or t
  misc_feature (373)..(373): n is a, c, g, or t
  misc_feature (429)..(429): n is a, c, g, or t
  misc_feature (456)..(456): n is a, c, g, or t
  misc_feature (462)..(462): n is a, c, g, or t
tctgccccattcctctgattcccaagtggctgctagctggacccagctggtgtcctgggcatgaaagcagggccaaccgtccccaagcaggtgctgccctcctggcccagctgagcatcctggccaacatcagcgttcaagttgccctatattcgcctttctnttttnttcagaagcctttgcggacctgacctgggccagcttcccgcgattccccttccgcttcctatcaacgtccaggacccaactgcccncccaggccagcccttgccacttggggcccggtcttcacacgtgggagtctgaccggggctcctccctgaacagtcctgggtctgacgctctcaattatcacccacggacccacacgacnccggctctggcggggatgggccggggctgctcggggtcccgccaggcgagccccanctggaggcaggcgccaggcggggaacnctcggncgc

SEQ ID NO: 690574 - DNA, 300 bp, Homo sapiens
taggatggggttccatcatgatctcctgacctcgtgatctgccctcctcagcctcccaaagtgctgggattacaggcgtgacgaccgcgcccagctgagaatgtcttttataattacccatatgtttactattactagttctattaactcttttgtgtagaattgcatttctatctcacatcatgttttcttagctcaaagagcttctctctttttttttttttttttagacagagtcttgctctctttcgccaggctagagtgcagtagcgtgatctcggctcacggcaacctccgcct

SEQ ID NO: 690575 - DNA, 137 bp, Homo sapiens
  misc_feature (137)..(137): n is a, c, g, or t
ggtgaaccttctcgggaggtttttttttagaagtttttacccgctaacacaaagcggccagaaaaaagggccttatacccccctttttattgtgaaagggcaaaaatagggtttataaactgcgagtcttttttggn

SEQ ID NO: 690576 - DNA, 274 bp, Homo sapiens
  misc_feature (259)..(259): n is a, c, g, or t
ccagctccttgggagcctgaggcaggagaatcacttgaatccagaaggcggaggttgtggtgagccgagatcgcaccattgcactccagcctgggcaacaagagcgaaactctgtctcaaaaagaaaaaaaaggaaatagttttataattttacattctcaccagaagtttatggagagttccaattcctccacattaatgctaacagttggtgtgttcggttttgtgaatttttagccattctcaggggacgtgtagnccattcttacaaggt

SEQ ID NO: 690577 - DNA, 340 bp, Homo sapiens
gttttttgagatggagtttggctgttgtctcccaggctggagtgcagtggcgtgatcttggctcactgcaacctctgccttctgggttcaagcgcttctcctgcctcagcctcccaagtagctgggattacaggcgcctgccaccacgcctggctaattttttgtatttttagtagagacggggtttcaccatgttggccaggctggtctcgaactcatgacctcaggtgatccacctgccttggcctataaaagtgctgggattacaggagtgagtcactgcacccagaccacatttctcattttacctgtaaaacatcagctcttaaccttaaaaaaa

SEQ ID NO: 690578 - DNA, 198 bp, Homo sapiens
taaagggccggggaaggttttaaaaaaggggggctttgggttccacccatgggcacccatttccgttttttgttccgggggggggggggacccggggggccccgggggggggcccaggggggaaaccccccggtattgagcccaaaggtccaaagggttgggggggccaagtggggttttaggtttttttttaaacca

SEQ ID NO: 690579 - DNA, 147 bp, Homo sapiens
cggtgactcttgatggatcccagctcagtctgatggtatctaggggtgaacataaattgctaaattatacaaacagcttgatgacaaggatgaagaaattaaccagcaaagtcaactggtagagaaactgaagacgcaaatgttggg

SEQ ID NO: 690580 - DNA, 960 bp, Homo sapiens
  misc_feature (5)..(5): n is a, c, g, or t
  misc_feature (960)..(960): n is a, c, g, or t
cagcnctgggcgcatctctgtttattaaatttatctcatgattaagacatttataaggactattgaagtgttcagtagaatttgaaaattattatttaaaaatatctcaatagtctcaaaggttttgcataccattgaaaaaagcaacatactcttaaagaaatatagacatatgcaaatctgttatctacatatctataacatacatagacagctgttaacctgctttcagactataaaattttgttatctaatttaaatgcatttttttatagtcttaaaatattaaaagagagtagaaacctgttgcgtgatttactgccaagtttgggaaaagttactatttatacacaaaatatatatacaaattcaataacatgcctaggtaggtacaaacctttctaccggataactcgaaaagcttaaagaacaagtggactggccaaaaactcccatacagaaatatacgaattccgttcccgaaaactcaatgcgtgtgtgcattaataacaaacattgcggtggaagatatcataacattcgatgccaggcaaaaaataacaaagacgatctgacaaatagcgacttctctaagcgcggcgcgaatagttggtcagcgctacgcactgtggatttcctcccgtccggggaagcagaccaccttggcggtcgcaatcgtggcacgaaaaatagacgagagagtgacaggcacgagtatctgacacaccgagagcaagacaacacaagtaatggataggcctgtatgctcagtgcacgcaaagtaagagtaacctatataatgctccgcggctcgagcgaaaaagatgaagagtatggtgaccagccggagaggaggcctggaggatgcgcgcacgatcaaggcgcgcaagtttaggcacgaagcgactggttgatgacgttagctgggtatgcggccagcatgagccaacggaggacacn

SEQ ID NO: 690581 - DNA, 905 bp, Homo sapiens
  misc_feature (5)..(5): n is a, c, g, or t
  misc_feature (439)..(439): n is a, c, g, or t
  misc_feature (443)..(443): n is a, c, g, or t
  misc_feature (445)..(445): n is a, c, g, or t
  misc_feature (459)..(460): n is a, c, g, or t
  misc_feature (464)..(464): n is a, c, g, or t
  misc_feature (468)..(468): n is a, c, g, or t
cagcnctgggcgcatctctgtttattaaatttatctcatgattaagacatttataaggactattgaagtgttcagtagaatttgaaaattattatttaaaaatatctcaatagtctcaaaggttttgcataccattgaaaaaagcaacatactcttaaagaaatatagacatatgcaaatctgttatctacatatctataacatacatagacagctgttaacctgctttcagactataaaattttgttatctaatttaaatgcatttttttatagtcttaaaatattaaaagagagtagaaacctgttgcgtgatttactgccaagtttgggaaaagttactatttatacacaaaatatatatacaaatttaataacatgtttaggtagttattaaactctataacgtataagcagaaagtttaagaacaagtgaatgncacnantcactcatgattannaaantcanccttaaaaataattacaatcgtaataatagaacatcgtcgctaaatattttaactttggccccaagaaaactaaatttgtcgaagtatctatcttatttctcccccgggggggaaagtgttggagctttgccttgtggacccccttagtttagaaacgctgacggggtccgggacctattggacaaaacacaacagttgatataaccacgcggtgaatacattcttcagggcactctcaataagaaaacgctgaggggtttgctgcacgaaaggaggtgagtcctttttatagcgtcaataactcacgtacactgtataggcacgggtcacccaaccttacgttgcctgtccgtagcccacgcgtattagcagccaagtaacaaactacgaacggcataatacgttcgcggataccacccgttacgccccgtcccac

SEQ ID NO: 690582 - DNA, 904 bp, Homo sapiens
  misc_feature (5)..(5): n is a, c, g, or t
cagcnctgggcgcatctctgtttattaaatttatctcatgattaagacatttataaggactattgaagtgttcagtagaatttgaaaattattatttaaaaatatctcaatagtctcaaaggttttgcataccattgaaaaaagcaacatactcttaaagaaatatagacatatgcaaatctgttatctacatatctataacatacatagacagctgttaacctgctttcagactataaaattttgttatctaatttaaatgcatttttttatagtcttaaaatattaaaagagagtagaaacctgttgcgtgatttactgccaagtttgggaaaagttactatttatacacaaaatatatatacaaatcctataacctgttgagggagaggtgacactctgtaaccagtaagcaaaaagtcgaaaaacaagggagttgttaataatgcaccgtatatgctaaatcttgcccttaccccgatcgtgaaggggttactcagaagaccagcgtgagccagtactatgatacgtcatgcgagcgaaacaatgttgcgcgagtgttgacatcaactattccatagtggcagcacactgaatagccccgtacccgcgtatacattaggcggggcgggtgaccgcgcccgcgcccaaccgtgacaggctaccttggaccaatcttgaggggattgtgctcgtgagctgctaagacgctgctaagaaaggagcgaacctcatgatcgcgtcatatggggacgcaatttgatgagacagtagtcagcaagctgtgatgaaaggaccgtgcaggcagtcgatggtttacttgtgacggatattcgggcacgcatatcggaacgatctgctggagccttgtatcctctaaaatacgcgatcaatgggttcacag

SEQ ID NO: 690583 - DNA, 214 bp, Homo sapiens
atacatcctttctttttttgtggcaaactttcacaagcaggacttccagggtaccagcattttgttcattttctgagtttggtgatggcttatcatttttgtggaagaaaccaaaaatgtacgctgccaatgagctgacaagctatgagattcttgctctcctttcattttctctacttttgataacatatcatcaactttaaatgttttcatg

SEQ ID NO: 690584 - DNA, 895 bp, Homo sapiens
  misc_feature (5)..(5): n is a, c, g, or t
cagcnctgggcgcatctctgtttattaaatttatctcatgattaagacatttataaggactattgaagtgttcagtagaatttgaaaattattatttaaaaatatctcaatagtctcaaaggttttgcataccattgaaaaaagcaacatactcttaaagaaatatagacatatgcaaatctgttatctacatatctataacatacatagacagctgttaacctgctttcagactataaaattttgttatctaatttaaatgcatttttttatagtcttaaaatattaaaagagagtagaaacctgttgcgtgatttactgccaagtttgggaaaagttactatttatacacaaaatatatatacaaatttaataacatgtttaggtagttattaaactctataacgtataagcagaaagtttaagaacaagtgaatgtgagaaatcacccatgattcataaaatttagcgtccaaaaataatgtgacgttatacttattcacaacgtttttcaaatctttaacccgtgtcaccataaacttaattatcatgaatatctggatcttcatggttatcactgggcgcaatgtgtttggcgttgcacctgtgtcagctatccccgtatatggggacgacgcccgcccttccgtgatcgagaaacaccaagtgtgagcccagagagaatttaatagacacaatcataatataatatcagagaggctaaataattgatggggtgatgctggaccgcctaatcgtttccatgtagatcgtaatgtgtacatattataattactcccaataacatatactaggagaaggattaagaacggcgcgataattgagtcagctctggtactcttacgcggttaagctgcatttgccacagagcgcg

SEQ ID NO: 690585 - DNA, 868 bp, Homo sapiens
  misc_feature (5)..(5): n is a, c, g, or t
  misc_feature (439)..(439): n is a, c, g, or t
  misc_feature (443)..(443): n is a, c, g, or t
  misc_feature (445)..(445): n is a, c, g, or t
  misc_feature (459)..(460): n is a, c, g, or t
  misc_feature (464)..(464): n is a, c, g, or t
  misc_feature (468)..(468): n is a, c, g, or t
cagcnctgggcgcatctctgtttattaaatttatctcatgattaagacatttataaggactattgaagtgttcagtagaatttgaaaattattatttaaaaatatctcaatagtctcaaaggttttgcataccattgaaaaaagcaacatactcttaaagaaatatagacatatgcaaatctgttatctacatatctataacatacatagacagctgttaacctgctttcagactataaaattttgttatctaatttaaatgcatttttttatagtcttaaaatattaaaagagagtagaaacctgttgcgtgatttactgccaagtttgggaaaagttactatttatacacaaaatatatatacaaatttaataacatgtttaggtagttattaaactctataacgtataagcagaaagtttaagaacaagtgaatgncacnantcactcatgattannaaantcanccttaaaaataattcccagggcaatcatacaaaattgcaatgaaatattatagactttgcaacaagaaaatagaactaacgaaaaagaatgactattaatctcttaccaatggtgggaaggtgttgggcttatttccggggatctctttttctggaacactagagaggccgggggccttatgtgccaaataattgcttgatcttcacccgtagatattacccgggggaatagtgaaaacagttttggggttacgagacggtgcgtaaagattctttaccaaacgagattatcacgaagctacgaaattccgcaagttttcatacaaaacacaaagtataagtggaatgtcagcagggggccgagaaggagatgcggatacggagggatagcaggtaggcg

SEQ ID NO: 690586 - DNA, 1206 bp, Homo sapiens
gactgacaggttcccagtgtttgtgctaagcagggactccaggtggcagagcaactacaggtcaccctcagggcaatttctctgcatgaattcaggttccaactcaagccgttgcacacatcgaacacacgcttcgtgcaacatcttggcattggcagcacagccagctcatttctatcgtccaacagcagcacaggtggcaccgtagcagtggcttcaattgtccacctcagtgcacatcgcaccacctgcattttatgcccacaggttccactctgcatttccacacacagcaggccgcatctcttacccacagggtgccactattcacttggtcacgcaacacatttctttggcgcttgctcttcgcccgcacaagccacctagcagtcatggcatcgcgcccttagctagcttacgcaacatgtggcaagcctttaccttccactctggcccgtggccatggcacgattggccaggttataggataggccattcactatagggctcggcattccaacagtctttccctgggcattgggcaaccactaggcaaggcaaaaagatctatttttccccttgggccactctcttgcggctactagaggtttagcgcgattgggacaaagcgttctaccgaacaatggatccgccgatttctacactcaggcgcacccagggtcggccatacgtggcgaaggccaacatcgatggcaacacttgggggccatcacgattcccccacattgccagatccacagaccaacgccgcaaggaagcacccttacgggaggtgactccacactctctccaaagggaacacacggggggttgttcggacccatcatacccacaagccaagccaacaatgtgggggcgatcacacgagagcacaacctagacacccttgtacaaacggcaaccggcggcaggaacaattccacaccgcgtctaccacactttgtttcccccaccataggcaacaacctgagaacagcctttgggcgactacaacgccgcattcaccaccccatttggagactgcatttaccatcactttagcatcacacattctgctatcaacaaccatcgggctataggggggagccctgcaccacacatgaggaccacccccactgttggcggcacctgtgattttttcacgatacctcatacagtttggggggcactgcgctatttcgcatg

SEQ ID NO: 690587 - DNA, 881 bp, Homo sapiens
  misc_feature (5)..(5): n is a, c, g, or t
cagcnctgggcgcatctctgtttattaaatttatctcatgattaagacatttataaggactattgaagtgttcagtagaatttgaaaattattatttaaaaatatctcaatagtctcaaaggttttgcataccattgaaaaaagcaacatactcttaaagaaatatagacatatgcaaatctgttatctacatatctataacatacatagacagctgttaacctgctttcagactataaaattttgttatctaatttaaatgcatttttttatagtcttaaaatattaaaagagagtagaaacctgttgcgtgatttactgccaagtttgggaaaagttactatttatacacaaaatatatatacaaatttaataacatgtttaggtagttattaaactctataacgtataagcagaaagtttaagaacaagtgaatggaaaaaatctcctctaatcataaaatctatccttaaaacgattcttcgtgttaataattgaaaatgggtgtcaattttcaaacgtgggatcagaaaaatcaaattgtgaagaatgttattttcattcttgccaatggcggaaagtgtatgtgttccccacaagatatcattttttgagtgtttgaaggtgccggccctctgtggcgagaaaccttctggattgccactccgctgtatgtgcgtatgggagctgttaaaaggcttctgagcaaaaagcgagagcgggtaagggccattagtgcggaggtaagagctggggcggtagacttaagtgttaatgtggaagatagcgaatctgccagccgtagcatcgcgtatagcgcggggttgtatgtgttgaatgtgtccaaattcgggggacgcgcgatagtccgagatgactg

SEQ ID NO: 690588 - DNA, 642 bp, Homo sapiens
  misc_feature (93)..(93): n is a, c, g, or t
  misc_feature (104)..(105): n is a, c, g, or t
  misc_feature (136)..(136): n is a, c, g, or t
  misc_feature (194)..(194): n is a, c, g, or t
  misc_feature (197)..(198): n is a, c, g, or t
  misc_feature (294)..(294): n is a, c, g, or t
gccgggggagtcttagtctactggggggcgcggcggccggacttttttttgaaaggggctgacagcctgggatggactggcctcccatgtgtnctccgctctgnncgttctggctctctctgcacaggcgccggtncgggctggtgttgcatcctgtctttctgcccgccgccgtttctggttggggtgggcgnccnncccgggcgggctcttttatgacactcctccctttcgtctttttttgggtgctttttttcttttcctcgttggtccgtcccacctcctgccccctgntccgtactgtgggcttcttcgccccgttccctcctccgtctcggtcttctttccgcgctcttgttggctgttttcgcccctgtcgctctttcccctcgttgtggttcctgcttctttcctgtttttttctctctctcgttttttttttctttttccctccctctgcgtttttttttcgttgtttggtttttcgttgtgttcttctctcgtggcgttctttgctctcgttttctcccctcgcctgtccttctccttcctcccctccctcttttttccttctctctcccctcccctctgcccctcccttgctccccttgttctgtctcttgcgtctccacaccaaaaaaa

SEQ ID NO: 690589 - DNA, 1519 bp, Homo sapiens
tggtaaagctcggccataaaccttctagcgtgtgccaagtggttcacctgtggccacacttcgcaccaggtttgtccggtgtatagccagcaaacagagttcgtggccatcagcagaaccaggccagggaagggtgcacgtgggggtggttctgccttgcgtgcgtggatacgtgattaactttcttgggctctcagtgtctacactcataccaagtgactcttgtctcccctcataaattcccagaactcttggagtgcgtgggcgcctgtggtggcagacaacaacagcccagataggcggttatgagggcgtgaaacgcacaggggcgtgtgagtgagtgtctccccaacacaattcataggcggtgtctaagagggtgtttgtgccttctcggtgtgagaactcccattaacgagtggcgcgtgggcacatccttgtggcctccagaaagccacaggaggggattccacttgtggagaagcaccggttacaccgggtgtccagatataacgccgtggtgtgtgggccaaatgtggtgggtaggggatcatatacagcatttgcaggatatagcccaggggttcccaattacctgtgtgaacccaggctgtgggtcccagagcctacaggggaacacgagtgactagagcgggtagcgcgagccttgtagagggggccgaaagacaggcggggagccaccaagggacaacccacaactctagaggaggggctcctaaataccctggagaccaggtggggctctctgggcgaccaacagcccaagggggagaatcccccaataaggctcgagcagggggtatcaactaccccagaagaaatccccagaaggaaccaaacgccgtggcccgagagtttgccacaggaaggagagaaaggggccaaccacctacgagagcaacacaaccccgtggtggtatacagtgggcacccaacagaaagatcggcacagaagagtcacatagaaatcaggcagggggcaggcgccgatccctagaagaggatatcccccttggaagtggggggccccaacagactataaggcggtaccacacaggattccttgggggatcccaccaaggtgggggccccaaatagtaggagccaggagtaatcgaagaagcaccagggcaccgaggagcagtagcactataacaccaaccagcacccgggccaggggaacccacggggcacgcgggggactccggggaagagaaccacaacaccatgtggggcggggccccatattgggccacacacccccacacgacaaataagagccctaggaacaacagtaaattcacggcaatcaacgtataatcaacccagcacataactgcgcaaggcgaacaatgcgtcagcggcgacagctttcacgtaaccgccgtcgcacgtagtcaatgactgatcaggtcgcagcgcagtcgctcgcaggcagatgcggcgcatcgagacgtcgacggagtgaatgcgagtgcaacacagcagatgcgcgagc

SEQ ID NO: 690590 - DNA, 156 bp, Homo sapiens
cggcttcctcttggtgatattcgccattgaaatagctgcggccatctggggatattcccacaaggatgaggtgattaaggaagtccagcatgcactgggactcctgcacagccccgcagcagcccaggaagcccaccagcatcatgagggcgccgg

SEQ ID NO: 690591 - DNA, 252 bp, Homo sapiens
aaacaagtcctttcttttttttttgggggggggggggggcattggtcacatatgcccagtaattgaaagacgtcatcactgaaagacagaatgccctctgggcatacaaataagaagtttgtcacagcacccaggattttgggtatcttttgtagcccacaaaaagaactccagtgcttttcagggctggatatttcttaattactaatgccccacagaaattatacaatcaaactagatctgacccgaata

SEQ ID NO: 690592 - DNA, 486 bp, Homo sapiens
  misc_feature (15)..(15): n is a, c, g, or t
  misc_feature (87)..(87): n is a, c, g, or t
  misc_feature (156)..(156): n is a, c, g, or t
  misc_feature (158)..(158): n is a, c, g, or t
  misc_feature (200)..(200): n is a, c, g, or t
  misc_feature (204)..(204): n is a, c, g, or t
  misc_feature (223)..(223): n is a, c, g, or t
  misc_feature (296)..(296): n is a, c, g, or t
  misc_feature (338)..(338): n is a, c, g, or t
  misc_feature (431)..(431): n is a, c, g, or t
agatcagcccctcgncatctagcgactctggggaaggcacctcgttggatgccggtaccaggagcaccaaggctggagggcccgggntgcagcagggctggggaggcgggccggcgatccgggctaggtaccgttctgcagttcctcacccgcctncnccgccatgccagcctggatggggccagccctatttcaaggtnagangctggaagctggatcccancagcgggcagccaagtctggacacgagaggttcccccaagcggcaccacttccaagcggcacggcgcagccangtgagagcacggagcaaggaaggaagggggaatgccccccantccacgttgaagacgccgaacaaaacccagaccggccaaggtccaaagctttcccaagctttatttatttgccaaattttgggcggcttcgcngcaacgggcaccctccgagtccccgccgcgtctgcaccatcccgcgatggcgttt

SEQ ID NO: 690593 - DNA, 207 bp, Homo sapiens
  misc_feature (162)..(162): n is a, c, g, or t
  misc_feature (183)..(183): n is a, c, g, or t
  misc_feature (190)..(190): n is a, c, g, or t
atactcgctgtatccttgaactcctgagctcaggtgatcctccatgcctcagcctcccaagtagctaggaccataggcatgtgcacaatgcctggctaattttgaatttttttttttcataaacagggtcttgctatgtttggccatgctggtttcaaactnctggcctcaagctatattttnccccttnagcctaccaaaggtgtt

SEQ ID NO: 690594 - DNA, 825 bp, Homo sapiens
gtgagctgtcggcgacctccggttcagactatgggactcagactcgggtcagcctggacgctccctggacagtatgaactagtgcacacgctggttgctcatcagagacaacgtggtgagaccatccctgaggaggatctggaggtccaatgagcacaacagaggatgctgctcatgttttagctggaactggaggtaacagatgcaccatgctctcttacagagaagtggacgtatgtggtagccaccatgccaaggcctccggaccacagtggatgttctagggttgacttggaggagaatggatctctgggcctgttgaataaacctatgcaagctcccacaaagatgaactcatctgagagggactgacgccaagagcttcaggaaatccgacaagtatttctcctttcactgtattcttattcaaagatgccgacaactgggctcggagatccatagactcctcaaaccaggagacatggagagcgaaagatcacgcgcatttaatcgccagcgtaatcgacctgggcatatctgacggcaagccagtcacatggaaatgttgggggatcctggacaggattacttaaaagcttccagaagaatagttgagtggaaccaggaggtgaaaacggctgaagacaacttgacggaaaattattatcaaaagaaggtgttaagagaagttcgactggatgaattgagaaaaggtatggaaaatggtagaatggcaatgacttgaaaatagaataaaaacgggtttaaattaaaggtgaaatgagaatacacacaaaggttagaaaatataaaaaagggagagtg

SEQ ID NO: 690595 - DNA, 652 bp, Homo sapiens
ctcgctgtctgccagtacatggacctcatctcggccagtgctgacctggcggggaagcggctgatgcaggtcagtcatcggcacctggatttcctgccgccggggctgctcctgtccgccatacctggtagcagcacagctgatggcggcccctgcggagaccccgcttgccaacctcgtcccgagccatcaagccctccgtataccttcaggcataaaatatctttcatattatatcagaatttgtacctcggaaacctttatcgcttggggtggtctctctcactctgccccctcctcacgcagctcttgcgcagtcgcatcgagacgctggctggctggggctgcccatgccatcccagctccaagcttcccactccgggactctgtgtctgggtggggacgacctgacctgggcatgttcctgtctcttcatcgtgtgagcttttctggcccggtcgtgaagctcaagtgaggagggggaggctgggttaacatcgaatttgaatgaattcggttgtgatcgtagtaacattcctaaatttcccttttggagagaaaagcaaaaaaatcgccccactggtaaaacatgggtctggtccagcccctgttcagccctccagtcatagctcgaatgagggtgggtcctgga

SEQ ID NO: 690596 - DNA, 575 bp, Homo sapiens
gatttgggtggaagcgatagctgagtggcggcggcttgctgattgtgttcataggggacggagctaggggaagacgttgtgctctcccggaacagactatctcattccttctcttttcgatttacccgttggccgcgaagagttcagggcgggcggcctgcgggcaaggccaatgggcgccgcgcgggcatgcgcagcgcagcgcggtgccagcgctggccagtttgaaccatgtgttctccaacgtcattggaatcttccccgacactactcgagctctactcttactctccaagtgttaacctttcgtggactttgcgccgatctccaggggcgttggcgaacacgttcctgtggcccttccctttccttagaaggcgtccgggcaggaagtggacatcccgatttatttcgcgaggacagcggcttaactatttcaggccaaccaaacttggggcgtcgtgggacattcctcccaactcttcaaaggaacctatttagcaacgttttaagcacggggcgcaaacaaccgcagcctcaaggggcttccacaattactgggaggaccacacgca

SEQ ID NO: 690597 - DNA, 1399 bp, Homo sapiens
  misc_feature (1)..(1): n is a, c, g, or t
  misc_feature (212)..(212): n is a, c, g, or t
ntcgctgatgtggctgagttgcttctgtacacgttccttgtggtgttatcggatgctgctgttggacttgaggtcagcgggtggtgttgcggtttcccccgtgcgttccgctgcgtttttacgcgcggtttgaatccggagattggaggctcctcgcccgtttggacttttccgccgcgctccaagattgtgccgaattccccttccccccnagagaaggtcttccccggagaattcagaagaattaaactcgcagaaggagtacgccagtcccatgaactgagggtcttgaaacagctgggtggagaatcgagagcaccgagaaagaagtggcttcagaaggccatagtagagacaaccacttcagtaaaatggcagaagagtactgaccccccaaatggaagcttattaagagaaccgagaggcaccaaatggctgccaaactggaacgtttgcgagagaaggataagcaccattgaagaagtgcggaaggaccaagaatccaaagagcctgctgacgagactgaagctgactaattcgttctgagaactgactttctccccatccccttcctaaatatccaaagactgtactggccaggtgtccatattaattttttccctcctgacaaatattttagaagctaatgtaggactgtataggtagatccagatccagactgtaagatgttgttttaggggctaaaggggagaaactgaaagtgttttactctttttctaaagtgttggtctttctaatgtagctatttttcttgttgcatcttttctaacttcagtacaccttggtgtactgggttaatggctagtactgtattggctctgtgaaaacatatttgtgaaaagagtatgtagtggcttcttttgaactgttagatgctgaaatatctgttcacttttcaatcccaattctgtcccaatcttaccagatgctactggacttgaatggttaataaaactgcacagtgctgttggtggcagtgacttctttgagttaggttaataaatcaaggcatagagccctcctggttgatacttggttccagatgggggcctttgggggctggtagaaaatacccaagcacaaattgaccgcacgttctctggccccggttcttgccccaagggtggtttgcatggtctcccttccacaaatgactggtttgttggatgcctcaggcaaggtcagtgtacttctttcagatgtgtattggcaaccaccatttttgatcgtggccctttaaaggcgattaaacccaagcgtgttctagagaacccgtggacaaactcagatctacagcgggtgctgccaagacaggtgggaggccatcttctgacaaagttacggaaccgatttaaatttgtgggtgtcaccaagact

SEQ ID NO: 690598 - DNA, 207 bp, Homo sapiens
  misc_feature (42)..(42): n is a, c, g, or t
  misc_feature (58)..(58): n is a, c, g, or t
  misc_feature (114)..(114): n is a, c, g, or t
  misc_feature (122)..(122): n is a, c, g, or t
  misc_feature (160)..(160): n is a, c, g, or t
catgagtcatgtgccagagtacacatcagtgacatcccatcnatggacagaggaccanagaagcaaggagctgctaaattcataagactgcgatagaagtagaaagtaacctcntaatatcntgaagctggggcattgacactaaagattaaatgagtgncaatatgatcggaatacactgtaaataatacaaaattacgtaacaac

SEQ ID NO: 690599 - DNA, 345 bp, Homo sapiens
tgaaaaatttattttatactcttagaagctaagaactttgccacacatgaaccaaatttagaattaaggttcttccctagtgtatcgacggggcgcggggggtttataaacaagattttatacacaagaggtagcagaggaaaattccagtctgcttgttccaagctcagaaggtaactgcacacacctcgatgttagcagggaaggtggggcaggacagggtaagtctgatgatacggcactctagttcctaaaactgactgtagttgtcagtgaccgtgtgaggactccaggagaagtcgtggtgagatgcccgctgggatgcttgttttctttcccaggatg

SEQ ID NO: 690600 - DNA, 896 bp, Homo sapiens
  misc_feature (9)..(9): n is a, c, g, or t
  misc_feature (54)..(54): n is a, c, g, or t
gaggagccntgagagtcggagacaggatccaagccctgtgacgagctgagctgnctaagtctgagactacttctcccatcccctcctaaccaaggctgtatggccgtgtcattttttccctcctgacaaatattttagaagctaatgtaggactgtataggtagatccagatccagactgtaagatgttgttttaggggctaaaggggagaaactgaaagtgttttactctttttctaaagtgttggtctttctaatgtagctatttttcttgttgcatcttttctaacttcagtacaccttggtgtactgggttaatggctagtactgtattggctctgtgaaaacatatttgtgaaaagagtatgtagtggcttcttttgaactgttagatgctgaaatatctgttcacttttcaatcccaattctgtcccaatcttaccagatgctactggacttgaatggttaataaaactgcacagtgctgttggtggcagtgacttctttgagttaggttaataaatcaaggcatagagccctcctggttgatacttggttccagatgggggcctttgggggctggtagaaaatacccaagcacaaattgaccgcacgttctctggccccggttcttgccccaagggtggtttgcatggtctcccttccacaaatgactggtttgttggatgcctcaggcaaggtcagtgtacttctttcagatgtgtattggcaaccaccatttttgatcgtggccctttaaaggcgattaaacccaagcgtgttctagagaacccgtggacaaactcagatctacagcgggtgctgccaagacaggtgggaggccatcttctgacaaagttacggaaccgatttaaatttgtgggtgtcaccaagact

SEQ ID NO: 690601 - DNA, 1025 bp, Homo sapiens
  misc_feature (11)..(11): n is a, c, g, or t
gcacaacacanactcacccacaaaacccaaacaaaaaaacacaacccacacccacaaatcccccccaaactggaacgtttgcgagagaaggataagcaccattgaagaagtgcggaaggaccaagaatccaaagagcctgctgacgagactgaagctgactaattcgttctgagaactgactttctccccatccccttcctaaatatccaaagactgtactggccaggtgtccatattaattttttccctcctgacaaatattttagaagctaatgtaggactgtataggtagatccagatccagactgtaagatgttgttttaggggctaaaggggagaaactgaaagtgttttactctttttctaaagtgttggtctttctaatgtagctatttttcttgttgcatcttttctaacttcagtacaccttggtgtactgggttaatggctagtactgtattggctctgtgaaaacatatttgtgaaaagagtatgtagtggcttcttttgaactgttagatgctgaaatatctgttcacttttcaatcccaattctgtcccaatcttaccagatgctactggacttgaatggttaataaaactgcacagtgctgttggtggcagtgacttctttgagttaggttaataaatcaaggcatagagccctcctggttgatacttggttccagatgggggcctttgggggctggtagaaaatacccaagcacaaattgaccgcacgttctctggccccggttcttgccccaagggtggtttgcatggtctcccttccacaaatgactggtttgttggatgcctcaggcaaggtcagtgtacttctttcagatgtgtattggcaaccaccatttttgatcgtggccctttaaaggcgattaaacccaagcgtgttctagagaacccgtggacaaactcagatctacagcgggtgctgccaagacaggtgggaggccatcttctgacaaagttacggaaccgatttaaatttgtgggtgtcaccaagact

SEQ ID NO: 690602 - DNA, 505 bp, Homo sapiens
gagagtgtggtcaggcggctcggactgagcaggacccatcccaatcttaccagatgctactggacttgaatggttaataaaactgcacagtgctgttggtggcagtgacttctttgagttaggttaataaatcaaggcatagagccctcctggttgatacttggttccagatgggggcctttgggggctggtagaaaatacccaagcacaaattgaccgcacgttctctggccccggttcttgccccaagggtggtttgcatggtctcccttccacaaatgactggtttgttggatgcctcaggcaaggtcagtgtacttctttcagatgtgtattggcaaccaccatttttgatcgtggccctttaaaggcgattaaacccaagcgtgttctagagaacccgtggacaaactcagatctacagcgggtgctgccaagacaggtgggaggccatcttctgacaaagttacggaaccgatttaaatttgtgggtgtcaccaagact

SEQ ID NO: 690603 - DNA, 393 bp, Homo sapiens
  misc_feature (225)..(225): n is a, c, g, or t
  misc_feature (328)..(328): n is a, c, g, or t
  misc_feature (350)..(350): n is a, c, g, or t
  misc_feature (393)..(393): n is a, c, g, or t
gcagagtgagattctgtttcaaaagaaaacaaaacaacaacgaaagttactgggtctgtcgccaccatctgaaacagtggtccatgtgcttgacaattcctgataggatctatggaagcttctttgctcttcagaaaataagaagaaatgaaatgggattctcaaacattaagtcacagcagattttttggttctccagcaggctatattatggcccaacttggnaaactgtacttatttatctttctttttaatttttctcagcttctgttctgctctaactcaggcacattttaaaactgatgggtggccaggcacggtggctcangccctgtaaatcccaacacttnggggaggctaaagttgggaaggattcacgaggtcaggagttcn

SEQ ID NO: 690604 - DNA, 349 bp, Homo sapiens
aagtgctatcgagcttatgaaccacagttgtgccagtggctttcctctacaggcattcccctttttttccttgccctgccgtaaattgtgtctgggcacttattcgtttctcatatctactagtgggcatctgctaggcctttaatccctgtcgacactcacccctgtgtgaatttttctccccgaaacaatgaagaattagccctcccaaaatgtagattattttatttcaagggatagggcagattaccattagaagcaaaattaaaagtacaagctgggcaaactgacagaatactagataggagagactaattccaaccttctaaatttggctagtaaagtgcaa

SEQ ID NO: 690605 - DNA, 292 bp, Homo sapiens
tgatctagcagatcctataggctgttggagttgaatgccatgatcttggtcactgcaacctctgcctcccaggttcaagcgattctcctgactcagcctcccgattagctgggactacaggcacccaccaccacgcccagctaatttttgtatctttagatagagacagggtttcaccatagttggtcaggctggtctcgaactcctgatctcaggtgatccacccacctcggccttccaaagtgctgggattacaggcatgagccactgtgcccggctgttgcaactccaa

SEQ ID NO: 690606 - DNA, 551 bp, Homo sapiens
aatgccatgccagcgtatagaacccttaatgtttccacttctggaagttacgtcaaccttcattactcatggtttgtacttaaggtttagatctaagctacgacaacagcataccatattttcatcatcattactcttttaaaaatttgccttcattccagtttcagggagttggggcaaggcctgtgatattggtgtcttgaaaatatctcagtggtctgtcagatatgaggttgatccaattttaataatagttttttctacttcctgatctttaatgggttgaaattatctgggcttgtactggtagtgtagtcataataatttttgaatggtaggtgctcaagagagaaaacagacacaaagtgttctgtatgggttctatattattccccgggaatgatgtgtttaacaagttttcttttaaactatcaactacataagttttgtgcagggggggtgtcttagcatgtgcgttacaactataagtagtacacatacatgtcttctatattcatttagaaagatcatatcttaaattttttttcatt

SEQ ID NO: 690607 - DNA, 405 bp, Homo sapiens
tatcactgtttaacagatgagcaaagtaaactgaggtgcagagaggggcaatagctggtggcccagctgataggctgagattttcacatgtcagtcagagccagggaccaacatctatccactattctctgctgtcctctctcagagcgccccttctttggaaatgtgcatagcacctttctacaagagactcttagtgtgttctgagaaagccgtagctcctcacctgcctcagaagggcacggtgcttgcttcttcagaaaatttacagacaagtttcacacacttaaaactttcagcttggcttgagagttaaaacataaccactccaaactgtaatacaaagaagtctgctcaaaagagtagcatttgaccagcctggacaacagagcaagactccgtctc

SEQ ID NO: 690608 - DNA, 291 bp, Homo sapiens
tgaaaacagcttttctgagggaatatgcaacttggagaggtaactgataactgatactgggtcccgaggaggtccaagagcaaagtatgcggatgaatggataatcttttcagagaccttgagagtgaagaaaaggctgagaattcaagctgaaaagctggctgcattatagaggtgaaacatgatgagaccatgactcgaatggtcgctcgttacgatgtgaccgacctgaccaagatagagatgaggtcggccctgagcacacaatgcgaacagggatcgtaaagggac

SEQ ID NO: 690609 - DNA, 171 bp, Homo sapiens
agaacccccgagaacgtgaaaaacaactaagagcatcaagaagccctatagatttagctaaacatccatgtaatgcctcaatgggatcagctttttttgaaatcagttggtagttggaaaaactatatactattttatttgacgtaaacctgaataaaattttagtgaaga

SEQ ID NO: 690610 - DNA, 354 bp, Homo sapiens
gctcatcactgtatatgccttagccatggtgtagataaagtattttaggcagatgtacacagatagtctctattatcttatggatatgccatgatcaagctgatgtgaacatttcgagatacagtttgtgaacggaactgctcttgcaatccaagtttccaactaaatttcagagtgtttccaactaaaaatgttgagtgtttacttgtctttttttactttacagcagtagctgtgttttctttggcctctcttttgagtttttccttctcttctctttctcatttcaagttgcttcttaacagacaaaagttcagctttgagattggatagttcaatctccaaagatgctct

SEQ ID NO: 690611 - DNA, 129 bp, Homo sapiens
tctcccacctgtgtgctccaaaggaactacctattcagtgcccagtatgtacagccctcttgtatagcatcccgactcacctcgctcttcgtcagaagatgacaccaacctcgtgttacagcacacagg

SEQ ID NO: 690612 - DNA, 430 bp, Homo sapiens
  misc_feature (21)..(21): n is a, c, g, or t
atgggtgctccatcccccggnaaaagaaagaaatcccattttctgaggagaatttcaagctggctgtagagatttggcataagtaacaaggagctgaatgttaatcaccaagacaatggggaaaatgtctccagggcatgtcagagatctttgggggaggcccttccattaacagattcagagggctattgaagggaaaacgggggtttagtgggcttggggccaaagggtccctggtggcttggggttggtttggtccccccctggcattcccccaaggccaacttccaagccggaactggaaagggggttccaaccattaggaaggcttcggggcccgtaagcctttcaaggaaggggtgccaatgccatcaaaggccctttgggcaaggctttccaacaattgggtggtttggaagccctgcagaag

SEQ ID NO: 690613 - DNA, 161 bp, Homo sapiens
tccttccatctctggtcacagacacccactgaaatggtacagagcctaatcagcacatcatacatggattaacctatctgcccatggacgatacccagatgccccaggggcctacagtactagtataccacaggtaaagtatctttgagagcctagagtgg

SEQ ID NO: 690614 - DNA, 939 bp, Homo sapiens
cttacatcatctggtggacagctgcctgccagctgctctccaggcctcttcggcctctatttccaccagcacctggcagcctcttagcaggaaggcactaggctctagtgtctgattcctgcccaccaggattgggactgttccctgtgtgtgtgccttggtgcccctagatgacataagggttggtgtggggactccctaccatctctctcacttcagtgcctagatcataaaccccttgaagcaatctcccctgggccatgatccccaagtgtgtgtgtgtggagggggcacgttttacagaaatatcccagagactgggggatgagcaggggagacctggatagtgagaggggcctgggagagagtggaaacctcaagatcagaggtggctaggagagctaggggtgggactctggcccagcatccatatagccccggcatctgtcagtatccccaggagggagagacagtagtctccatgcctgtctccccagcacacttggggaagctgaggtaagagggttagcctagactagtaacaagactatgtaaaacaagaagaaaaagggggccgggggaagcttgaaagggaagagagggaagaggttgtcaccatcctccaaagctgtgaggatgactgctgtgttttgaggtcttggtgactaagggtccctccaactccaagtatttttgctatgacttagtgtgttacgtgtgtatttatgagatatgtgtgacttctacatatgttaaatgtgttttggataaaagggggtcttggaaaaaaaaaaaaagatctctaaaaaatgaaaaaaaagaaagggggggcataatcacggggcaacgcttttaaagggtaagagaaaaagggggcaaggggaaaagtttacattgggtgaccaaacggaattgggggtgtgtaaaaagtatgcctat

SEQ ID NO: 690615 - DNA, 124 bp, Homo sapiens
ccggcgataccgcatgtgggtctcagttgagttcaactcatcatgcctgggcatttacttgatgagaaaactaatcagcccaattgggggattcacagaggcttggttagtgagcaggagccag

SEQ ID NO: 690616 - DNA, 411 bp, Homo sapiens
tccgtgagactcatcgtgccatctatgggatatacggaggagctggcaggcagcgtgcatgcgctggctttgcacacgtataccctgaaagaatgggaaggcttacaggatacggtgccagcttcaccgccgatgtcgcggcgcgggcaccatggcctgacagtcgcgatctgattcacaaaaggcataaatatcggcatttgacgcggtaacactggaactttccttgccagatgcggtattagtagatgcgaatttcaagaaacggcctgcgggccgtttttgtttttcttctgacggactgacggcacgaggtttatgcctctgaatgaccgcatttttcgaaggatcgagtcccgtgtgagtttccctcccgcgcaacagagaccgtcctcgactcaatgcgtatgc

SEQ ID NO: 690617 - DNA, 216 bp, Homo sapiens
gttggcagcccaggtgacgcatcaaggattgtaggtattaaaatatgtgttcacgggatgcacctatagtgtgtaccccgtaagcatgaaaccagtgttttatgttttcttttattagttcttattccggagcctcaaacaagcattataccttctggtgattaatgatttcctcctcctataattattcctagtagcactccacactgcatctta

SEQ ID NO: 690618 - DNA, 101 bp, Homo sapiens
aggacacttaatgcgccacgattggagaatacttatgcttcatagtattggagcacatgttactagcttcatttaggagcttgtggagttgatgactttct

SEQ ID NO: 690619 - DNA, 170 bp, Homo sapiens
ttggggctcagtcagtggatgggaaacagacaacttaatagtgggtcgtccaaacaggggggggggggggtaggccctgacgaagaaaaataaagcagagtaaggggacagagagtaagggggtggaagttattcctttctgatgaagcatctttaggacaatgaactga

SEQ ID NO: 690620 - DNA, 642 bp, Homo sapiens
  misc_feature (341)..(341): n is a, c, g, or t
aggaggcttgggtgggaggattgcctgagaccaggaggttgaggctgcagtgagccgtgatttcaccaccactccagcctgggtgagaaagcaagaccctatatcaatgaaaaaaaaaaaaaaaagaccacgctttgtgcagccagaagccagaggtatacccagggaacagttagggcctcccaggtgtggcttggtttctacagcacacctttccagtgaattcgtgctgtgctgcgtgcctctcagtgttgttggtgtgcgccactcgtgtgctgtgtgtgtgtgacacaaacccacaagggcgctgtggtcacacacagcgcttctcctctcaaggnccccccagaacaggggcgagtgtgtctcaggagaagagaacatttatagttccatttgtgcctgtgcagaatttttctttcttcctgtgcaagggattcctgcgggggacttcaggctcacagaaacaaagggcttaaaccagggattctctactaaagacgagggcgcttattaaatctcccttcttgccagacgcaggggacgcagaggactttgccggagcaattgtttctggggggctacacggactcggggggcgcaggggacggcagaagtgctccggcttgaaggcagtcttgt

SEQ ID NO: 690621 - DNA, 268 bp, Homo sapiens
  misc_feature (44)..(44): n is a, c, g, or t
  misc_feature (55)..(55): n is a, c, g, or t
  misc_feature (144)..(144): n is a, c, g, or t
  misc_feature (148)..(148): n is a, c, g, or t
  misc_feature (179)..(179): n is a, c, g, or t
  misc_feature (191)..(191): n is a, c, g, or t
  misc_feature (210)..(210): n is a, c, g, or t
  misc_feature (215)..(215): n is a, c, g, or t
  misc_feature (230)..(230): n is a, c, g, or t
  misc_feature (255)..(255): n is a, c, g, or t
cagcttatttttggggggggggaaattttatttgttttcttccnttgggtccttnggcttaaagggactttttaatgaacccgggtttcccaccccaaaaagaattaaggattttttttccaagtaagagtcaaataatttgcncccngcttatgagggcaatgggggcccctaaactnttgatgaaaganctttaaaaaaaaatgtaanccccnaattccctttggatnttttagccaaaggaataaactggcnatttttcccgata

SEQ ID NO: 690622 - DNA, 1293 bp, Homo sapiens
ttttttttttttataacgaaacaaaatttatatgttatatatttttaaaaatacatcttatagattaaaggacttcaagaaacaatagcaagacgtggtaaaacgttgccacatcagggtgacacttgggccagagttagtggaaaagtgctgacaaaacaagaattgtgccagcagtgggcaaagatatacgtgttaccaacccaactgggttaacaatatctaatcatgtgagctacattcagaaggtagctttttgttttttttgtttattttttgtggagagacacagagagagttcctcctatcctctgtggtgcgcccagaggccggaggagcgtgcagagtggtgtgtgtgacaccctcgaggcgtccacgtgggaacacctctcgtgtgcgtggccgcgggtgtttccagaggcgatatctcgtgtggtgcgccctcagaccctctcgcggggagatatgtcacgaggcggccctgtggcacaaacacaaaaggcgcgcggggtataaaaattattgtggtggacacattatgagggggagacgaaagaaagcggggggtattaccccccgaaggggagcgccacagggggggagccacgagaacacaccccggaaacccttagagtgcgcacacaggcgcggggcccctcgaacacctcccacaagagggccggggggaaattaacacgagcgcgcagtgaaacacccagtgtgtgtgccccaagaaccaacgcagagtatacaaaataaaaaaaaatcgggggagaaagaaaaaatccccttgggaaattctataaaccttcgtgtataaagaggacacaacaacaagggggggggagaaaaaaataagaggggagcaccccacttataaaaaataacgcccggcacgttaaaagagacgaccacgaaaatacaaccagaggggaccacccgtggttaaccacaacgacattaagaaaaaccacccaagaagggttatactcacccagcgcgagagaaacaaactcactctcaggaaacccgcggttgtataacgcacccaaatgaactcccgggagagagcaaaggcgttcacagagggcgccacacacagagagaggcccaacaacaaaacagcccccgccgtattcccccaagagaggggcaccaaacaaataaagatctcacccaaaatgagagggggaccacaggtaataaacacaaaaccttcaacaacagcgagaactacaacaaaaactcgcgggaaaatacaagacagacaaaacaataccgggcaggaccacc

SEQ ID NO: 690623 - DNA, 132 bp, Homo sapiens
ccagtgatctataggatccccccggtaggtagctggaagggccgctctagtgcatcacttgctgctgagcctttcctcgctggccttgagccgtcctccaccagcccctggagctgctccagctctttgttc

SEQ ID NO: 690624 - DNA, 226 bp, Homo sapiens
gggcgactctacaggatcttatgggcactcgtcacagcgctacgctcggtatgatttttacctgagtaggcctagaaataaacatgctagcttttattccagttctaaccaaaaaaataaccctcgttccacagaagctgccatcgagtatttccctcacgccagcaaccgcattcataattcttctaataagctatacctcttcaacaatattacttctccggaa

SEQ ID NO: 690625 - DNA, 541 bp, Homo sapiens
tcctcacatctctatcagtaggtccaattatgattcttctcagttttacgagaaacgtggccgaataacatgtctagtcactaactatttaccttaatagaaaacagtgctattggtctgattgccatgccagcatcatattttatctgtgaagggtggcttggttgtggaaaactataaaaactggatgcaaaagtaaaatgcaaccttgtttggtgacgtccaattcctctggaataaggaaaaaccacttgtgtttaagaacaggagtcaaatcaatttttaaggaaacagattctaatacaaaaacctttactagtaagggtctagtaggtctggacaaaacatctccctctaggtcccactggtagggagagttctataaatcagcttttagactaagtatatggcctatagtcaggatagtaacatgctaggaagtgataaaatttagtcatcactcaaagaatttccattagaaacctgtcttcctgcttttggctccaagagcatcagaatgcacttttatggcctgttggta

SEQ ID NO: 690626 - DNA, 280 bp, Homo sapiens
tgagcagtgatttccttgggaacccatcatagaaaacgggtacttgtgcacatctagaatctggatctgtaacccctgaccatggcccaactggtctaccgtcatgtaccttggtcgagtgtcgtggtcagtctgtgtggtgcacacgaatactaaacactgggtaattagtatataatatggctgggagacagggtccgtccaccaagctcaatgctgtggcagatcatggctgaccacagcctcaagctcacagtctcaggtgatcctgctacctcag

SEQ ID NO: 690627 - DNA, 802 bp, Homo sapiens
gaagtagtgtttctgatcagacttgtaaagagttgctgtagctcagctttgtggagatatctagttgtatgcctgcctgtcccgttatgactagtgaggacttctttggctccaccataggtatgataatccatgggttctgttttaaacttgatggagaagtggcttccctatgaagtgcctctgactccagaattctcctctctattcatgtgtcacgtgtttattttattttataagaggggtcttcgcctaagtcctgggctccaaagttgtattctccatgtttctcacactcccaccaacagtgctgggattaatagtgctgtgagacctaccacgccctggttcatctgttcgtttttcagtggtctccgtgccatcagtcagtcacggtgctatgacatgtttagcgtattgtcatgcaggtttctctttcatggttcgcacgaggaatattgtgtggagcatacctcggatgtgagtaaggagtaccatgtgtattgcacccagctatcccttagaaaagctaatgtgttacgtgctaggttttgaaatactataaagagacagcgtgacgatgggtaaagtatattgacttagcctgtacgtttgtctgtgatctgtgtatgaggacaccagattgtctagaatcaagatggtcaatatggtagggaagagagtaggatttagattgccccaaatttgtaatatactcagtggcttaaaggagtgagggttatttacagacagtagcagtgtgaagagaattgacgtatgtgggggtaatataaggtttata

SEQ ID NO: 690628 - DNA, 194 bp, Homo sapiens
  misc_feature (76)..(76): n is a, c, g, or t
ctactaccctggaccccccaatagtggagggcagtatggtagtgggctacccctggtggtggttatgggggttctnccctggaggtcttatggacaccagctgtgagggcctatggacacccatgctgggatgttccctctggactcaggaggaccatatggcggttcactcccgggttcctatggtcagtcac

SEQ ID NO: 690629 - DNA, 444 bp, Homo sapiens
  misc_feature (30)..(30): n is a, c, g, or t
  misc_feature (157)..(157): n is a, c, g, or t
ctggggagagcttttgtgccaaggttatanagggtttcaggccattccccaacggctccaaacctggtgggccggggttttggcttgggtgaaggaaaagggggtggccctggtccatccagggcaggccctttggaaacagttccaaagtttttgnggctttttgtcagagttttttatgtcctttttccagtcctagggggccccccgggggggcaaggggggggtgaccccccaaaaggggtttgaacccccatcctcaaaatgaagaaattgaaaccccctttgcccttcccgtgacgggggaccccccctgacccctccctaaggtgttttgggccccgccctttcccgcccactcagtccccccgccgggggttcctgccgcagttttgacctgggggggtggcccggggtttttaataaacccgggttttttttcca

SEQ ID NO: 690630 - DNA, 361 bp, Homo sapiens
  misc_feature (43)..(43): n is a, c, g, or t
  misc_feature (49)..(49): n is a, c, g, or t
  misc_feature (52)..(52): n is a, c, g, or t
  misc_feature (54)..(54): n is a, c, g, or t
  misc_feature (68)..(69): n is a, c, g, or t
  misc_feature (77)..(77): n is a, c, g, or t
  misc_feature (79)..(79): n is a, c, g, or t
  misc_feature (98)..(98): n is a, c, g, or t
  misc_feature (102)..(102): n is a, c, g, or t
  misc_feature (212)..(212): n is a, c, g, or t
  misc_feature (307)..(307): n is a, c, g, or t
  misc_feature (311)..(311): n is a, c, g, or t
cagctttccccttggggttcaggggtttttgggttttttttgntgggtntgncnatgctttttggcanncctttccnanaggtgccggtaagggaggnaggncccccccattcagggcaggtcaggttaaggccagttgggtggtcactatgcaatgctgccctggggaggctccctgagggcacagtgggcgctggacccggccccccaanttttttgcctgctgcctgtgaccctgaagaacagaattgatttttgcccctctccctgtgtgagcttggccccgccttttgccccaggcccctgntggngggtctcaccccccacccctcgctttgaataaagcacttgggccccctga

SEQ ID NO: 690631 - DNA, 1506 bp, Homo sapiens
gtgaaggtgttcattgcagaatcacttgttagcccaaatctggaaagctcccattagccaatggcatggttacaagaataatggttcccatgctcaacatcaacatccatttctatttataacactaacaacatcgaaccatgcagcacaaactagtcacatcatgcaatgcacacaacacacacagccagacaagccaacaattgtactcaaatccatctgcatttccctgtgatctctcatatgcactggcaagctaccactaaacagggcacatcccagcaccatgcacacacacccatctctgtcagcaaacaggctggcagctgcgcaatgttttctgcctataaaataaagtattccatttgataatcattgcaagcacccaccaatcaacttcaaccagcaatcgcacgcacataccactggagaacgcatacagcacggcatctactacacgaccctaggcataccaaccatttccatgctcaccgctaggacagctctcctccccaaccactcacctacatgctctgcgggccccccaaatacaaaggcaactacaattacacagaaactacatctgttagcactgctgagcctctagagcactacagaataagacacaacatacacttaacaggtcattgaacagcatccttccacggctagatctctagattgacacctccacaggcgattaaacgccaatcacatttaagttcccatgggaaccaagtggttaattaccacgctgccaccttactggcatccacatccaagcactagtcctatttccataaacttaccacagagacttgcacacaccacaccctgcacttgcgtgacgatacagaacaacctcaacctataacagcgacgaactaggcacagcgcgacacgggaaaaaaagcacccagcgaatactggtcaccactgtcacaaacgcaaacaggacaccactaacgtgacaagcaacgcagctcacacatccgagcaccaaaaacgcaccgtgcacgacgagagaacaccccacatagaaacagtggcaaccaaacatcagaggtataacgtaccagcacacacgcactcacgacagacagaacgcatatcaagcgcacaccccaccaaacacacaacaccaggaaaccacgcaaagcagtcccaccgaactaacctccacaaatcaatctccacgaaggcacacacatcatcacaagagacagcgtaccaaccaccaccatgagtagcaagccacactgtcacatagagacacaccgcgcactcgagtacacacaatcaccagcatgggacggaaacagacgacgagggccaaaactacaaagaccgatcgcacatgtagagaacaataaacaatccatatgacaacgagcagagtacaaatctatcacacgaagcacatgacgaacactacgacgagacaaccgacatcaacactccagaacgttcacgatgactcgatcagacaccctaaatcaactacaa

SEQ ID NO: 690632 - DNA, 798 bp, Homo sapiens
atttgaggcattttaaaaagtcatcagaaggtttaagtttagtgtctcagcagtttcagctacttaaactcaattaaagcatctatcatttaaatttggattggctcacttatttgactgcagatgataaaatcaagctgtcatcttagggaaaaaaaaagaaccaagtttacctacacatccttgccattacccacagagtaagagaagtctggtccagagctaaccttttatgtcattacgttgcttaataaatgtaataaatgtactaaccactcccaaccccaaccgcgagtgtagagtgccctaagagtaaaggaactgtaatgaggacaatctggtatgcaaattcattcaagtgtgttactgagctgtttagcaacaacatatgtcgcaatcaccctcaaaacgcaagctgtacctctggggaggtagccctgctacagcaacatcaagtctgcatggatcaggagctgacctgtggcgacatcattaacccttccctaagctatgccaatgcagaaccctctagctctgtgtaattgctcctgtcagctaaagccacacgttgctagcacccccaaacgcccaggtgctacattattctccattaggtatccttaccacataagaagatgacctgtacatgcaattgtatcttagcagttatccctcgaaaatgaaacactgcagtttctgtacaaactgattctgagccttttggtctcaataatcattagctttcaggggatagaaattgtcagcaatgggaaacgaacatccccagagctcgtttcc

SEQ ID NO: 690633 - DNA, 237 bp, Homo sapiens
  misc_feature (80)..(81): n is a, c, g, or t
  misc_feature (86)..(86): n is a, c, g, or t
  misc_feature (109)..(109): n is a, c, g, or t
  misc_feature (139)..(139): n is a, c, g, or t
  misc_feature (141)..(141): n is a, c, g, or t
  misc_feature (175)..(175): n is a, c, g, or t
gactaacaagcaaagaataaggcacctgctatagaataatagcacaaccatcaaacagaatatagttaaccaagacactnntatanaaagggaaacaagtacagagacngattaactgggtgagaaaggcaagtaacantntagttaaaaacctgctggccaaggtcagttgatncattccttattccagaatagttagttcctgaaagtccttaaccactctgctcccttactgta

SEQ ID NO: 690634 - DNA, 1187 bp, Homo sapiens
agcggactcttgtgtctctatggcgacgtgggcgcggtcggatcttagcttccacggacgtgcgcgtcgcgcactctcagtacctgctgctgtcgggtgcccatgcatggagctgtgtgtgcgcagggtcctgtggcgcgggccgggggtccgttcgtcgttgctgcataacggggcccgtgggtcgagtctttgctgcaggactcctgcttgacccgtgtggattgccagtgccagtaggtgtagcagcgactcgggaggaggcttcttatctcctgtctgctcccttgaagtgccactcggaatcgtgaattgctcgttcaggatagagtcattgccatgaatgagtactttgtctcgtacctgtgggaattgcgttgtgacacccaattcaatcgttgtacctcggagattcgttgttgatccaagcgcgcttgatattccagtcgatagccaaattgagccaatgtttctacgtggagagaatctgagccgtcctaacctacgaatctgggcattaggttaacacacctgcctaatggatccacgaatttgggaactggttcgaaatttccaggattagacgcaaagagtaggactttggcttgttggtggatgcccttttcggtgtacagggattccgggagagatcgacgcaagggcaaagacgcgtatttctgcgacacgaataacgcaagtgagtattcgacgattttggcagaaatttaggtctgattcgtgtttgaccaaagccacagaaaccttagtgcatggagtccttctgtacgaatgacgattgactcgagggccccgtttaaaaaccacgtggccgtttcccaaggtttaagaagccataagggagggccccttccaggacggtccttctggagtccgacgcgggttgcgggcagagtgaactcacttggagacagtaaccaaccggatgggcaaaatgcacatttctactcaactagggacgccagtgtttgactcgttggcgcactatatgattggaccagattctaatgataagttggtcaatattgggggtagatgggcggaatacacaattggggcagctgcgcgtaggcatgtcccattttgtcacaaccgctttgggacaatagagtgatgtgcccatatgaccgccccaaggtttctgatacccgggcctgtgtcctaaaatg

SEQ ID NO: 690635 - DNA, 471 bp, Homo sapiens
tgctgcagacactcgtgttatcagaggagatgacggagagatagctggatcatgtgtcatttcctcatcgtctttggttggaagaggtctcatggcatcattagtcttagcttgatacgtgttcttctttttgtaatcaaggggcacttcgcagacagcttctttcaaactcacagggacctcgctgtggtagggaattccagaagcagcagtctttgcatctttgtagaaacccatttcttggttatttatgacacaataaacattgtgccaggacctgcttgaggctttcttattgtgggcctcccactcgtgtttccgattgaggaagccttccatctgggccgaaggtgtctcctgggttctggctggtaaggtggcggcactctgggctgggagggcagtcttggctttacgatcagaggtcggggaggggatggggctggactctttagagctcgtcctttgttc

SEQ ID NO: 690636 - DNA, 172 bp, Homo sapiens
acacagctggtgtcctgcagacacaccctgagtctgttatccagcctatccattatatgtcctttattattcatgatatcctattcttctacctttttgcctggtcactttttctgaggaccgagtttctgctcctattcgttgcactcttccttttttaatattgttctcc

SEQ ID NO: 690637 - DNA, 1177 bp, Homo sapiens
gggtttggtacgaccggcgcagaataggaatcatggctggctgcgctgttcgtgctgctgggattactgcgctgtctgtggcacccacggagcctccggggctgtcggcacaggtcttcacgtaccgtagaacgaccttggttccaagatactcctcacctgctccttgaatgactagctgctcacagaggtcacagtggtcaccgtcgtggctgaatggggggcgtggtgctgaaggaggactgcgctgcccggtcgagaaaacggagttcagaggtggagctccgaactgactcagatgtggacgatgtactcctgcggtcttctctccccgatgcccagtgggtctacggccatacgatctcagtcgtccacgggtccctcccagagtgaaggctgtgaagtcggtcatagacacatctaagtgagagggcgtgcacgacgggccactgcgtaggtactgaccagttcagaggtcccggtgccacctgtcaccgactgggccctggtacaggatcacctgactctgaggacagaggccctcatgaagcggcttccgcatgagcaaggttctccgtgagtttcctcgcctagggcccgcgttacaggagactacctcattgaggaatccttgaacattgggaggtcgaaccccggccaagtttaccggtgcaacgggtatctcagctccaactgggcttcccgaccagggccatccattcaccgctcccgggattgcgcaagccaacgctgggcggaccccttctgggacccttttgcttgggcattccggtggctggagggttgctgggtaggtcggttcacccatccattcttcactctaccgagacagcgccggaaagccccgacggactgtcctgggattgatcgacgaaggccgggctctgcaacccccctgacatgagtccggctcggggaccagtcctcccagaaactgaagtactagggggaaagacaccgctccggacagcaaggggaacctgcgttccctggaaggcatggtcgggcccctggaggaacggctccccttgcgtccacacggtgttgagtccgggccgccgggagttccacacctccccagtgcttgtaagaatttccagggtcatcaccttcccttcaaagaaaaacgcccaccccacgttaatatcccttagta

SEQ ID NO: 690638 - DNA, 143 bp, Homo sapiens
ttgatggttacactggtgaccgcaccatccatcctgtctgtctcacataagcctggcaactgtgctgccttctccagtttgatcagttactgcccacgctggagaaggcagcacagttaccattctgatgttggagcggccgc

SEQ ID NO: 690639 - DNA, 193 bp, Homo sapiens
ttacggatatcagagtgagagcgagatgacatgtcagaacagtgcgcatctgagaacgcattgtgatcgagcaggtgggagtggcctcaggtgcaggacagctgcgagctgagaggcctcgaagcagcagacatgccgctgtggtagtacaggagtctaagacaagctgtctgacgtgagatcgcctaccgca

SEQ ID NO: 690640 - DNA, 148 bp, Homo sapiens
  misc_feature (5)..(5): n is a, c, g, or t
tcagncaccatggaggatggaaaatcatgattttatcactcgtatcccaaatgcatttttttttttctgagaccgggtatggttctgtcacccaggcggggtggggtgcagttgcaggatcatagctcacggcagcctccaactcctc

SEQ ID NO: 690641 - DNA, 647 bp, Homo sapiens
  misc_feature (418)..(418): n is a, c, g, or t
gctcctctccagcccttctcctgtgtgcctgcctcctgccgccgccagcatgatcagctccatccgccagttcagctcctccatgctcctatgcaatgggctcctccggcctgggggtgcggctcgtcccgtacctcctgccggctgtcttggcgggctgggtgccggctcctgcaggctggcgatcttgctggcggcctggagcatggagcctcgggggtagcagctactccaggctgctacagctttggctctggtggtggctatggcagcagcttctgggggtgtcgatgggctagctggttggagggtgacgaacgtgcattcatgcaggaatcctattaatgaccggtctggtcgtcgcttatcgcgtggacaagggtgcggtgctcgcttggacggaggcgcaagcagcatngagtcgtggaggtgaagtactcctgtgacctggtatccagaggcatgccccgggtggcctctgccctgtgacatactagtcagatagatacgggagcaagttgacgtgagctgcacgaaacaagatcctcataggcagcgtggacaattggccgagatatcctggtaacagattgacgaagtgcccgtctggctgctgagtgagcttccgctagcaagtttgagacaga

SEQ ID NO: 690642 - DNA, 397 bp, Homo sapiens
agctcaaaggagtttgggggtgatgccctcttggtttttgccaacggccagcctttcaacggggatgcctttgaagtgggcaagggtgggcccttcatgccccgttttttcaaaaccccctggggggggttttttcagggaaaacaggccattttttggggcaagggggggggggggtccccttggggcttctcccccccccttccaaacaaaaacctgcctttttcccctggtgatggtgcccggggtccagactcaagtcaaaaccacccctgttttttgcccttgccctggggggggccccccatcctttttttccaacacccctttttcccttccccccttttgcccctcaagtaaagggggcaaaaatggggtccttttgggttaaaagcca

SEQ ID NO: 690643 - DNA, 369 bp, Homo sapiens
tcagagaacactataaacatctctacgcaaataaaccagaaaatctagaagaaatggacaaattcctggacacaaacaccctcccaaaactaaaccaggaagaagtcgaatccctgaacagaccaataacgagttccgaaattgagtcactaattaataacacaccagccaggaaagaaaaaaaaaaaaccggccccgacccggttgcattcccggttgattccaaccaaacaaacaaaagagggtgggacccattcttattgaatccataaaaaaaaaggagggggaggggttccttccttaattcatcgaacgaagcaagattcttcttcaaacaaaattcggggaaacacccagggggaaaaaaaa

SEQ ID NO: 690644 - DNA, 195 bp, Homo sapiens
tccccgggacgctttgcgcaaggaaatcatttgagaaataacaaggggacccccgacccaagatacacactcaggcctaagaggtttgagtttcttgaagagaacctcaggcagcaggccttgaagccactggggctccggaccctgccaacacctaattctgggaggaagactccttatggcgacgagggcatg

SEQ ID NO: 690645 - DNA, 304 bp, Homo sapiens
cgactatagaggaccccacacagcgcgcgaggatcgaggcatcctgtcggacagtcggcaccaggtgaccgccaggcgccaggacccaggcagtctggcgggaggcctgggaagaaggttccctcgggaggagaacagtctttgctgggcccagatccaccagctggaagacttgcggtgacaatcctcagccgagagccaggcgcagcctcggggggcccagcaccgccgctgcatgaaggaggcgttaccgtttatggctgtttagctccttaaactatttcaagacataaataaataacca

SEQ ID NO: 690646 - DNA, 1845 bp, Homo sapiens
  misc_feature (334)..(334): n is a, c, g, or t
  misc_feature (1525)..(1525): n is a, c, g, or t
tacttcccttcttctcgttcccgcacttcttgttcgtttatttattaactgcgcggtgttctcctaaatacaggtgttatactgcacaagttcccactttttggtgtgttgctccgacatatgttttctcgcggaccacccataataagcgggggttcatacactcaccctgtgtgccccaccactttttcatttggactcttataaaagtatttgttctccccttcgtattatttataaaggagggctccctttcttctagctcatgcaccaacaactttttcttttgtgtgtccccacacacctgtaatacgagggttttacatcacccacncttgtatacaaacagtgtttataacaacaacggaaagttttgaataaaactatgttttataatgcgccacacaccgctttcatacttctgggtgaagatgtagtcttccttcatctctgcctaaggaccacattgtctttcctcccatgggggagaaaccttcctcgtcggtggtgtttccttcggtgtatataccgaggtaaagccgccccccgccttcggcgaagcatgttacacaacaggagttgtgtttgttcggccgcgctgtcaccatggtggtaactacaccaccagaggtaaataagtatggggaggaggataactaaatagtttgtggtgggaagaattatcatgggagacttttttttggtgggttgctcttgcctcccctgtagtaataatattagagagattgttgtggtgtttttgtgaaaacaactctggccacatcttcgttggggaggagaccaccccaacttctcagcaggcgttggtgaaaaattagttagttagtttctctccctcccccccttttctcctctccttcgtgtacaccacagcggtgtgtagaaaaaaggggaggacaataattatttgggccaacacgtctgtttcctcggtgtgttctctcatcacggagttcttaaaaagtggggacaaccaccagcggagaagtgttttccccaccagagataggagacacccccctgttccacacagagttttgagttgtcacagcggacacacacccccagcgataacgagcgggcggccctgtgtttcaacacactctcacactctctgtgagaacacacagcacttttgggtagagaacacccttcttcctccctttgtcacacaatattggggggagagacccactactgttgtctctctgtcgctctcacttctctacactaggccccctctgtgtctgctgagagaagtgtgtgagagctttgtctcaccccccctctcttgtggtgtcgtctcaccctctcgcacacacaagtgtctccccggtgagatatagtctcccacacccgcggcacacaagagcacacgcgctttggtgtctccacacgcggtcttgtcgcacacccactctctctgcggtcacacacacgtgtggtcacaaggcgcgccacctctacagggagcgcacacagagagccgcgcacagaggagatntgtgaacacagagagggccgcctttgtgagaagagagcttgtttctacagcccatcatatgcctcataagagacccctcatattctgtgggacgcacactatacacaggcacacccacagagaggagaatataaccggggccacaccctcacagagagctcacacacacacatccccggaccacacaatgagaaggctgtaaggagaggttttttaacacttaagatcccagagatgtgccaccttccaatcccggaatggtcgggacattcccttccagatttctcacaaaaatataattttcccctcccgggtttgta

SEQ ID NO: 690647 - DNA, 272 bp, Homo sapiens
atcagctcggaccgggtcagtacggattgtatgtcatggcagctcctcgacagtgaagattacagtttcatggctgtggaccaggaagaaactgtgctgtcagggacaatgtatcaagattaggagccccacccagtattggaggctgagtgagactagatcttaatagtgtccattgtcggatgctgccagacacaggtttcgccagtatatcctggtcctttctctcaccgttatcaggcaacacaataactgcggcccgcacattccgt

SEQ ID NO: 690648 - DNA, 760 bp, Homo sapiens
cctttaccaaacaggctgagggctgaaagatcccatctttctcattgtaaactacaattataattcctgtaaaacttgatgtgacaatggaaagaaattaggtttataaatctcactactctcggaaccagagaacggcacagaactggtaataacaattacttaaatggggtgggggaggatcttgacatgaggaacctctacttgcctttgtgcccttagacccgaactattacagttcccacctacatgtctgcttttaagatgctgcgttgagactctctacctgattcccactgatatcatgctcgatgttgcctacagctacattatgacagcaacctcccagacaatagctagtatgtataatgctcccatgtccccacagccacaccacagatctcatataccatgggctgactatacattctaaacctattttatgtaattgcgaatctgtaccatctgtctgctgcctattaaataaaactacactccctttaaattttgatttcctctgaaatctggcaaaatcttaccctgtgactttatttcttatgactactcagtacgaatttttggcttcatccagggatcttaaccttagacatataatgaacttcagtcttctcaatgcctttggtcatggggagattccttgctaaaacgctgcatatagcattggttataaagaatggatgcatgggtcctgtattatgagtaataaaagaaccctgagggccaaaaacacatttccttt

SEQ ID NO: 690649 - DNA, 1062 bp, Homo sapiens
  misc_feature (292)..(292): n is a, c, g, or t
gggcaaccgttacagtcacaatcaagagtcccggacgatccgtgatgttacaaggattgagcgattcgtgtgcccactcccaaattcggggactggggctgtgacgatgccttgtgacgcctcggcagtgcttcgcgaggcctggttgggtccgcttggcggcttacggcgggctggcttggcgtgcgtcgctggagacttgatccgtggacagggtgactgatttgccggtcgggccgtccttattgctggccaggtctgggctgcgaggggcaagactggtcatctgccnatggcgtcatggccgcgaggctcctggagcgcgctgtactaagtccagttcatcgagtccaatcgcccgtggcatgtgaaaatcttgtcccgtggcaagatgtagctaacgagcgtaggcgcttgtacgcacaggcccttctcggacggtatccattcgtgagtttcgacatgcagggagtgcaggaccggacgtagtcaatcgtaagtgcgaagggtgggatggagaagacattcccaagaatcgtactcgtactccactccaatgatggcctaacagggatctactcaaaggaattggaggccaatagcctttggagacccacttcaaaatgtgatcgccgcacgcaagatactcgttatagaactccaactcctgaacacggacaactttggcgaggactcggaaacgaactagaggtggaacaatcgcgcattgagaccaggaatggatcataaagggatacccaagacgtcccagaggggggtatcgcttgactttctagacacaaagacaggaaaccgagcagggactgttgcaggggttcccaatcaatttcgtcgatattaccagttgggaaaggcaccaggccatccttatatacaggcgaacaggtcctcgcaccagtacaagaggcactaggtgaaaccaggccattgacttgtggtagtaggttaccccacaagatcgcagaaggcgctttctagatcgcacaggttgtagccctaacggaatctagggaagcaattccctcgtcaagagtaacaacg

SEQ ID NO: 690650 - DNA, 315 bp, Homo sapiens
  misc_feature (315)..(315): n is a, c, g, or t
ctgtaggaatactgcacgcgcggacctgtgacacagaatctacactaccccgtgttgtgtcgcgtggcatatctcctgcgttgcaaggcctgctgtctggtccctgtgttcctgtgtgtggatccccaaggagagactggccaacacccaaactgggtgagttcggctttaagctataccggcagagtgggacacacaagccaacagaaccaatatcttcttcttcccagagaggataggttcaggctttggaatggttttcctggggaccaaaggttacactcaacatgaaatactggaggggctgattcctcn

SEQ ID NO: 690651 - DNA, 486 bp, Homo sapiens
atcataaaatccatacctgacttccccttcccataggggcactctctctcttctgaatgccaaagcatgtgtactgttgcatagacttcagcaaatagttgatccctatgtatcccggattaaaccgcaagcttccccagagaaagacatcccactctctactctactaggcactaagaactgaactcaacaactattaggaattaatacgctgtgataggatatcagccaatcatgccaaccatcactgacaccaagagtagggcacctgcttaataaagtggccaatggattcatatctcggataaacgggatagtatagcatcttatcaggagatgccagctggtctaaaatgcgaaacaaaccctatcgctgcaaaagtacgcccttccaggtcccggggggcccaagtactagtagtgcgcgaaaaaacacaacccaccaccccaccccaacaacaaacacaaccaaaaacccaaacaccc

SEQ ID NO: 690652 - DNA, 341 bp, Homo sapiens
tcggtcatgagtagctgatgtctataatactatatgggataggggtgatgtgtgcttgtagtagaagtggctaggcattttaatcttagagcggaagctatgatcactgcgccgctcataagtggatgccatgggtaggtttatagatagttggggggttggtgtaaatgagtgagggaggagtccgaggaggttagttggtggcataaaaattgattaagggtactagtataagagatcaggttcgtcctttagttgttgggtattgggtatcattttgtttttgagggtaagttttgattaagtcaattgatgggccaacagccagtgtatttgaaccc

SEQ ID NO: 690653 - DNA, 1099 bp, Homo sapiens
gcgcgtcgccccgcgagcacagagcctcgcctttgccgatccgccgccgtccacacccgccgccagctcaccatggatgatgatatcgccgcgctcgtcagtcgacaacggctccgagcatgtgcaaggccaggcttcgctgggcgacagatgccccccgggccgtcttcccactccatcgtggggcgccccagtgcaaccagggcagtgatggtgggcatgggtcagaaggattcctatgtgggcgacgaggcccagagcaagagaggcatcctcaccctgaagtaccccatcgagcacggcatcgtacaaccaactgggacgacatggagaaaatctggcaacaaagcttctacaatgagctgagtgtggctcccgaggagcaccccgatgctgctgcacgaggacccacctgaaaccccaaggccaaacgcgagaagatgcaccagatcatgtatgagaccttcaaaaacccagacatgtacgttgctatccaggactgtgctatacctgtacgcctctggaccgtaccatggaatcgtgatggactccaggtgacggggtcacacaactgtgcccatctacgaggggtatgacctaccacatgccatcctgcgtctggactggctggccggaactgactgatacctcatgaagatcctcacgagcgcgatacagattcacaccaaggccgagcgggaacatagtgcgtgacattaacgagaaagtagtgaaagtacgccctggacattaggcaaaaaatggcacggatggttacagttcttcctggaaagagtaaaagtggattgaaggcacggaatacacatgggcatgacggcccgtgcatgaggacgattaaaggatacctccgggaaaggtagtcactggaaccgaggaaatcattaagaacacaaaggttcgagaaacgaagaccgcagcacagagacgtgagggcaccgagacaggcagagaacagttaaaatgacatgtctaacaaaataaaacgatgatcggaacaagcgcgaacacgacggtcccgggagggagagaaccctgccacgatcattaccctgtcttgctatcgctttggagaaatagt

SEQ ID NO: 690654 - DNA, 651 bp, Homo sapiens
  misc_feature (45)..(45): n is a, c, g, or t
  misc_feature (109)..(109): n is a, c, g, or t
  misc_feature (122)..(122): n is a, c, g, or t
caatcggccaattttctctgggtcctaagataaaaccactcagcntatgaaacaccatgggtgtgtgcacatacactgtccagcatgaacgcatctcagatcgggttcntttgtcccgctcntcgccccaccacagccaccctatattcgtctctttggggtggggccaacctgctcaaggtatggaccctggctaactgcaagctgaagacccaccccattggccacacaggctatatgaacacggtgactgtctctccaaatggatccctctgtgcttttggaggcaaggatggccagcccatgttatgggttttcaacgaaggcaaccccctttacacgctagatggtggggacatcatcaacgccctgtgcttcagccctaaccgatattggttgtgtgctgccccaggccccagcatcaagatttgggttttaaagggaaagatcattgtagatgaattgaagcaaaaagttttcagtaccagcagcaaggcagaccccccccagggcccccccctggcctggtttgttgatggccaaactttgtttgctggctacacggacaacctggggcgagtggggcaggtgcccattggcccccgctaaaagtttatggcagagctttccaaataaaaaaaaaaactggca

SEQ ID NO: 690655 - DNA, 354 bp, Homo sapiens
gccgaatgccatttgattttgaagctcgtgggtccccactcaccctctgccaggagctaagtaaggcaggagagctgacttgggactcctggctcggccgcaagaggagcccccttcgcaccagtcttcggcaggctgaccacctcatccattctccaaggcggctgtgcgttcttttgtgtgttttctgtgttcttagcctccacgctcctcctgccacccttgtggactgggaccaggtcctgaccccagtcaggaagtgatgatatgtacagtgggacaccttgaccagtcagtaattttgactgttgtgaaagggatgtgatttagaattaaacagatggttttacatta

SEQ ID NO: 690656 - DNA, 304 bp, Homo sapiens
gaggctccttgttcactgttgtctggccatcttgcagagctgagtcagctgcatctcctcctctgggaagctgcttggatatcctcaagcccacagagctagcttgtctcaacatcaggcatttgaccaccggcaaaacacccctactagcagtgccaggctcatacaggcctctagatggcgatggtctaggcgagtccttcaaccaacaatgcattcacagacaatgcggtgcccatggactctctatggtctcctcggaaggggctgggatggcctgtccccaaaggaggctcacacagtg

SEQ ID NO: 690657 - DNA, 348 bp, Homo sapiens
gggttgaccataagcctggaactcagagtcaatctgtccagttgatgtgttcagcaacactgctggaaactcatttatctccggcctatggtggtgcttcccatcattccagcatgtcgattcaaactcaatggcaattgagtagtcaaccaactgcttgaattagcttcttccgagatttccatttgctggcgcaattgcctttctcctaattaatccaagtccagctccgaagtcgtcacttcactgcggtccgttcaaaaagcccgcgaggctgaggcgcggatgttgttgacagctgtgtctaaggaggagacaccctgtgctccgcgcccgtcttcttttccg

SEQ ID NO: 690658 - DNA, 278 bp, Homo sapiens
gtacaggagtgtgtatgaccaggtagatgtgaactacgccgtagaagaacaagcctcaggttcgatcaccgccagcgtcggtatagcccagagtgccggtttgatcctgggtggttccatcacgcagaacaacttcctgggataccggtaaccgatgtgtccatcggcctgacccgcagcgaataccagagaccgatacaacttcggctataccgacccctactggactgcagacggtgtgagcctggtgctactacgccttctaccgcaccaccgaa

SEQ ID NO: 690659 - DNA, 554 bp, Homo sapiens
ttttctcattctttcctttgtcttgatctattgtcaattcgaataaaactgccagacttaaaatactcactatcgtgctaaaacaaacagtttagattgtacataactttcatcggtaactcagctgtctccttaaggattgtgttagatataagactgtttgcagtccttttttcagagcaaatcctaacaggtacttgtgaattgttttaaaaatagaaaattacagaaatcttaatttggggtgggagcttaaagggagaaaaacaaaacaggaccaaagtttatgtgccttcttcagtagtcttaattgaccttttcctatttgagactaaggtagcactggtattttggttttcaggaaatatctactatatagattaagagactattgtccctcaaactggtcatacaagtgactagttatgactgagttaaaaagtcagctacacttatgccttcagcattatgtgttaccagttgaagagcagaactgctctcggtctttatggtagtcaccgtagctttcgcagcttgtcaggggccttggtgtt

SEQ ID NO: 690660 - DNA, 794 bp, Homo sapiens
ggcatttaatacaatttttgtgcatgaacagacagactcagaacaaagcctctgagtatattgccatccagcttggatgaggatataagtctcttaatccccaacttatcttgttttctaacacaagcaatatatggggaattatgcttaagaggctgtgccactttgtatttaaaaacccaactctgttttttagactccttgttccttaagttggttatgtgttaggtgaccttgctagttccctaatttttccaagtttccattttctcaccaataaatcgagactaattaataatgacacattaatttgaggtctaaatgagaaaatctacacaaggcttttagcacactgcctgacacatagaaagtgttttctaaatgctagctattatttttatggcataattctgtcatagatccaaaaagacttttttatttttaaaaaatcatagtcgcatttttttaattattacttttcttctctttgaagtcaatcctctcaacacagcttgagaattgcaatgaatttggggatctgagaaacaatcttttctaaatatttgtatgttatttggaaacaattacagtggcaaaagagaacaagaggctaccttttagtatcaatctatctgtacacttaaaaaaaaaaaaaagcagcccatgacaagtacatgctgatttttaagaagaggtgaggtaaaagtggtacagctttattaagtacaagaacttaacaatcccttttattaaacagaacttgaatttgtattacactgaatttatagatcaat

SEQ ID NO: 690661 - DNA, 167 bp, Homo sapiens
cgacaacatcgatgtacatctatttctatgaattcaactttttttttccttagattccacatataagtgatatcatgcagtatttgtcttattccatttggtatatttcacttagcataataccctccaggttcatctatgttgctatcgctggcctacagcacatg

SEQ ID NO: 690662 - DNA, 180 bp, Homo sapiens
  misc_feature (51)..(51): n is a, c, g, or t
gcatcatcattgacatccctatcaatgtctacgctgctggcagaggactgnccatttggagctgagatgtgtaagctggtgcctttaatacagaaagcctccgtgggaatcactgtctgagtcttgtgtctagtattgacagatatagctttgttcttggagtagaattaaggaattgcg

SEQ ID NO: 690663 - DNA, 834 bp, Homo sapiens
  misc_feature (137)..(137): n is a, c, g, or t
  misc_feature (288)..(288): n is a, c, g, or t
  misc_feature (303)..(303): n is a, c, g, or t
  misc_feature (311)..(311): n is a, c, g, or t
  misc_feature (317)..(317): n is a, c, g, or t
  misc_feature (359)..(359): n is a, c, g, or t
  misc_feature (364)..(364): n is a, c, g, or t
  misc_feature (390)..(390): n is a, c, g, or t
  misc_feature (398)..(399): n is a, c, g, or t
  misc_feature (428)..(429): n is a, c, g, or t
  misc_feature (431)..(431): n is a, c, g, or t
  misc_feature (445)..(445): n is a, c, g, or t
  misc_feature (448)..(448): n is a, c, g, or t
  misc_feature (462)..(463): n is a, c, g, or t
  misc_feature (480)..(480): n is a, c, g, or t
  misc_feature (506)..(506): n is a, c, g, or t
agcggggtaggtgctaccagcatctggtgggaaggcaccgggggtgcttttaaacatttcacaatgcataggacagctgaggccaaaaaaaaaaaaaaaattatccagcctaaaatgtcagtggtaacaggggtganaacccctggtattaaatgaaagatagcaaaaaccccataagaaccccataagatatggtaggatctcattggtacgtccggtatttactcgggcaaccctacccccaggggacattgggcaatgtcgggggtggtaactgcggatggggtngtgtgtgtgtgtgtncttttttncttttnacgcacccaattaagccatagaatcgcattagaaaaagggtntgganggtcacatacctaagtcatgtggggntagggagnnggtcatcccttttactctaaataccttcnngnagggtttcataatnggngaagttaattatannctgaagtgaatatatcngtgtatacacacacacacagaaagcntgcctatcaaaacaatagatttttcacaatgtgaacacccccatggatgggctccgtgatgaagatgatgaactggcagtgttccattgaggcccttgggaggcctggcaagctctcccttcagagggcgggaggggagctgctgcctgacttccaacctggtgtgggctcacatgaaccgattttgccgaggcccgtgagaaggggttccctcagcaaggtgtggttcctctggggtcggacgggggggcgtcccggtgggataccccggtttgtcccgggtgaatggggtccctggggaaaaaagggtgactccccttggattgcg

SEQ ID NO: 690664 - DNA, 392 bp, Homo sapiens
  misc_feature (325)..(325): n is a, c, g, or t
  misc_feature (329)..(329): n is a, c, g, or t
tggcacagggtcttgctctattaacccaggctagagtgcagtggcatgatcacagctcactgtagccatgactgcccaggctcaagtgatcctccccaattcagcttcccaagtagctgggactacaggtgtgcaccagaatccctggctaaattttttgttgttgttttttgtagagacaggatctcgctatattgcccaggctgatctcgagctcctggccttaagcaatcctcccaccttggccacccaaagtactgggattacaggcaggagccaatgcactcagctcagtttttttttttttttgggggggggggtccancggnattatttatttttttagaacatcggtttggaaaactgtttaaatcttttaaaaaccttaactt

SEQ ID NO: 690665 - DNA, 324 bp, Homo sapiens
tgactacggattggcacagctcctgttccctattacttaaacttgagattcgatagaaaatataacctataagttgctatcagcttccatttcaaaaggggagtaggagtcaaggtggtagcgtttaattataccaaccaccccccaaaaaaacaaacaaaacaaacaaaaaaacctttactagtcactaagcatccaggaaacaaaggtgaacttttacacctttcagagcaaggcaggcagctccttatggagaattctagaatttgttagatcaaataattgtttagagaaggatgacatcacccatacgaatagtcctgt

SEQ ID NO: 690666 - DNA, 486 bp, Homo sapiens
cgctacataatgttcagcaagaaggtgtgtcaaaggcaaacacagatcaccttctgttcagaaagctcaatcttaaaggagtcctatgtcagaaaaccacttgtagagatatatccttgtattacggacttcaaagaactgatcatacagaaaagatttttgaaaaagtaaattagagtaatgtaaaaacgtcttttccagcaagagctggacatataggctgtcctcactgagcacattattattggctggttttacatgtaactatggatcatattttatcacagccacatctcagtccagcacgctgtgtggaccacataggtcgagtgcttgtggaccccaatgcacaattttgtacgtgtatggggtcaagacttgggatcacaaacagacaggatggtggacgtggactactcctacttcctggctcctaaacgtcttcaaacctgcctggacaaccttgttgaaatggtcgccaatccg

SEQ ID NO: 690667 - DNA, 127 bp, Homo sapiens
ttcccccggcctttgggttttttaaggggcccccccccctttgggtttcccaatttttcggttttccccggggtttttttaaaaatttttttttttaattattaaaattaaaccccccttttggcca

SEQ ID NO: 690668 - DNA, 841 bp, Homo sapiens
gaagttactatagaccttctcggatgataatctgtaagccaaccgatggaatacggtagagcatcgaatgacaaatggctcacgagattggcaaaatctctatctatcttgggagcgattactagtcacgatatgtgcttacatagacagagatgttattaataatatatattctatagcatatcgatcaatctgtggtgggatgatatgagtaagatggtgggaggttagtgatgatagtagtggtagaataaatgtggataggggatatgtgtgcttttctgctcaatcaagcagtaaaaccagaacaagtgttcttaaaaaatgcactattttaaaagagagacgcattgcgacttaaagtagaactgaggagcaattcggttcccttggcttcgtagtaccctagactcaaacatgtcataacattctagtctaaaaatatttcagccgacaaacattgtcaccaacctggcttttattgtatacgcgagctatgtaccaactgatgcataatctgagaccttgggataggcttctccagcagtggcggaaaggcaccctccaccttctactgacagatggcttcttagctctcttgaaacaccgcatgcttacgacatccgatgccttctgcaccctatatcagggactcgaaaacctactgcataagaaacaatcgcctatatacacgatgaaattctcttatctctgtggtcccacctgtgggcattcaagtcactgtctcacactcacatcctcctctgaactctccgcatacactctgaccacaccttctaacgaccagaaaattgaccgtcctggcatcggatacattcac

SEQ ID NO: 690669 - DNA, 125 bp, Homo sapiens
cttgccgggcttacgtctgcggatcttacgggccggctgttgaaccacgtgacacgcgccgtgcagtccttgtggaagtggggcttcaagaccatgccattccggctgtgcgccatggttgccta

SEQ ID NO: 690670 - DNA, 290 bp, Homo sapiens
tagtggcgcacggaataccgtttcgtaaggcatctttgcctgcttcatcgacgcggtaagcaaaccattttcaacgctgccggaaagcgtcccggagaagtgttccgcacccggtaataatttccattgcttccaggccagatcgctccacgatgcctgaaaacgggtcttgtctgccgcctgaagcgggatatccagcgccagagtgttaatcttgccgctcggttgtgtggagcgccaaacatcacccagtgcaggtgaaagtttcgcggccagggggcgtatgcctc

SEQ ID NO: 690671 - DNA, 470 bp, Homo sapiens
cacgagggccggcgccggcaatggtgttgcaacccgtaatcagcgtgacaccggccagtgcgaacagcgcgatcagctttttcatgacgatctcctttgcttagctagggtgcggcgcgttgccgcgacggggaaaacggatgctgcccaaggatcggtcgatggagcccggcacgagtcgtcgccggccgccagcctcaagccgttcggtcgaactcaggacggtgcctgggcgtattcctcgatcacgcggaatacctgttcgagctcgagcgacttgtcaaaaaaatagtcggctcccgcctcggcgcactgacgccggtaggtgggcacctgcgcatgattggtgtagacgatccggatgcccggcgcctgcgccttctggatcgcccgcagtacgttgataccgttcccctgacgcaattgcaggtcgacgatgacgacctcatacctgccgctttccaacaggc

SEQ ID NO: 690672 - DNA, 120 bp, Homo sapiens
cgggcgcctagatactaagctaagattgtgtgtgaggaaggtaggtttccccaaggccacattgtctttttcaccttacacccagatgctgactgcttagatcatctgcccggaccgcta

SEQ ID NO: 690673 - DNA, 654 bp, Homo sapiens
cgtgtcccggcccccttcgcgggtttaggggtttctgggcccttcctggatgccgtgtcattgggcttcttctttcggtggaacctccgttggtcgcggcaagatctccgagccctgcccgtgtgggatgcgcccgtgcggtcgtcctgcacctgccctccctcggcgattctgtgatctctgtccgccccatcccgagtcgactaagggcgctctcggggaggccgcagcaccttctggaagactttggccttccgctctcacgcagggccgagctgggcagtccaggccgtagaggcctggcaggccctgaaggtctgcgctgggagccgggacgaagcacgtggtatacaggcacatcttcctcccgagtgacatgcctcctaggatgacatttaggggagcggacagaggcctgcagtttggcttcacggctgtgctatgtggacagcaacgagtctgagttgtcgtcggtaagccgactggcgagccaggccggtcgggccccccgatcgccgccccatttcccttccagcaaagctcaactcggcaatccaagcacctagataccagcacatagtcggataatccctgtctggactgagcctccgttggcttctgaactgattctgcagctaaaatcccgactgcctt

SEQ ID NO: 690674 - DNA, 843 bp, Homo sapiens
  misc_feature (843)..(843): n is a, c, g, or t
gttgcaaaacattcttatcacccccaaaggaggccctatacctattaagcagttagtccccattcccttctcctccgactgctaacaatagccactaatctgcaccctgtctctgtggatttacctattctggatatttcatataaatggaatcatatgatatgtgacctttttatgtatctggcttctttcacttagcataatattttcttttctttttttttttttttggaggacagagtttactcttatggcccagggggagtgcaaggggcaatttaaacctcggcctcccaggttcaggagattctccggcctcggttccccgagtagcggggaattcacggggggggtaccaccacgcccagctatttttgggtccctttagtatagacgacggggtttcacccatggtggcccagctgggtcctgagctggacctcaggtgatccaattgggctcggctcccaaagggggtgggattatagggtgtgagctaccacacgcgggactcatcatattttcaaggtttaccccaactttttagctgttcaggacttatccttttagtgggtaaataatatccattggtgggttccaattgggcaacggacgggagactggggggcctcctggatgggaaggtcgggcacttggctcacactgctggaacccgtcacttggggaccaggaaggatgcggggggggggagagccagaggagggtacgcaggcgagggggaggcgcgcacaaatcccgcgggggtccccccgcggggcccccaccggtagtcaggcgcccgagtcaaccagtcagcaacacctagccaaagtaacacgaagn

SEQ ID NO: 690675 - DNA, 305 bp, Homo sapiens
ggtctgaatcatgaaaaagcccataagagagatacagtgactccagtttcaatcatattacaggagatgaatctgttgctctcccattttgctcttgtcacaccatatgaagacatcaaaaaacacttaaggattcgagaaagagaacatcttttgttaaagaagagaataagattttggaagaaaaagtaatagcaaatttgaagaagaaacaagttacgtagggacgagaacaagtaaataaggcctatcatgcatatcgagaggtttacattgatagagataatttgaagagcaaatggaca

SEQ ID NO: 690676 - DNA, 114 bp, Homo sapiens
aagctcgctaccttttaaaatcacaggcagacatgcagatacatgtcaatatctacatacagggatatttgtatgtgtggtatgtgaaacccatacacaagtggatttggccat

SEQ ID NO: 690677 - DNA, 367 bp, Homo sapiens
  misc_feature (65)..(65): n is a, c, g, or t
cgacgcacagggtggataaatgtgctcccttgaccaggcgcattctcctctgcctccctcctcangcttgttcactcctaagtgctgaggtctgatgtcaccccagctcttccacggacactgcgctcaccaagtctgctgatggtctgagtatctccatctaagagacgcttggtctttgtgtagggtcccttggtcacatttgctattgtaaccacaccctctccttgacccaactcttctgatggtgtccccaacacaacagcattctggtcttcctcatacgctgtggctgtgccttggtctcccttacccgcggcactgcatctaacccagtgcaagaagtagaagcatcattcatgcaggg

SEQ ID NO: 690678 - DNA, 557 bp, Homo sapiens
  misc_feature (290)..(290): n is a, c, g, or t
  misc_feature (336)..(336): n is a, c, g, or t
tgtaccagatgatgtcgagaacccttcacaatgatccagaagttgagatagaagcaggatggacaaccgtaggggatttggaaggatgtgtacgttataaagttgtaaaatatgaaagaatcaatatttctggctgattgctttcgaagagttcgtgtcggacgtctatgtcgtgggcaccaatagccatatcacaaatttatggccgtttaagatcatttggatgaattggtacataatgccattactggctggatctcactgttgagtgaaggccagaaggttgaaangtgatctatgtgatcctgttgctgggattccattgctgttgatgtnggattcagagactcagtctatgcacatttatctagccagacacatgtacagaaagaacccacactctatgatccagtgtagcatcaaaccccatgcaatcatcatcctccccaatacagattgaatggagcttctggtgcgctatgaagatgagggggtttatgtaaacacatatggaaggatcaccaaggatttagttctacagtggggagagatgccta

SEQ ID NO: 690679 - DNA, 581 bp, Homo sapiens
acgtacccacctgtatccatctcatccacactgttcaggaagtcatctggggtcgagggacagtgtagctgctcactgcttagctccactgctctgtactctcatctcgagagtgataggcgccactacataaacatgacagttaaagaccaacacaaaaaattttaaaaatcaattcaaggtgtaaataaacacctgctgagcggagacataatgctcacagaggattagtgaaaattcctgtcctgcaatgtctgaaacaagcaccctccctcagggccatagacagggcttgtgctatgaagtgagatagacaagttgatcctaattgaagctggcatgatctaaggaagcaagatatctcctagggtactgtgcttggtgacaatccgggacatgaaatgatacccccagttgggttgcctggctgacaggaaaagttctctgcgtgagtattctcctctctgtaatatcatttgcatctgggggtgcggaggtacccatacaacttacttgtcgcaaggcctcaagttctccaggtggtggtgcacagagacgttacagagaaactccagggggcc

SEQ ID NO: 690680 - DNA, 109 bp, Homo sapiens
gatcccccatctggatgcccctggatgcttacgatttcaacatgaagaaactacatagccactctaaaaattggattagcggaataaaagtgattttagaacagtctct

SEQ ID NO: 690681 - DNA, 171 bp, Homo sapiens
tgattggggccttcaggaagataacttaacctctatatggccccacatatatagctcacagtgttaaatcaagtttagcctaaagctgcctccttacatattttaagtttggcctgaaggtttttctgtacgtcgtgaactataacaagtggaggtgtaaacagaaggtgg

SEQ ID NO: 690682 - DNA, 216 bp, Homo sapiens
gggaagttccgagggctacgtggcccagagagaacgtctgcactggctgtataggaaggctcaggatgtatagaaacgacaacgtaaagctctgggtgagtctagcactggggctaaaaccagactccacttatgcagctcctatggtttccgcgggatgcaagaatcaccaaacaaccttatgtggtatggggacaggaactgtggcttgatagg

SEQ ID NO: 690683 - DNA, 183 bp, Homo sapiens
cgagctatcagctactcaggaggctgacgtggttgttactgaggtcagaaattccagcctgaccggccgatccacatggcgaaacccgtctcaactaagaatacaattagccaggcgcggtggcgcgcgccttaatcccagctactcaggaggctgaggcaggagaactgcttgaactgtgga

SEQ ID NO: 690684 - DNA, 478 bp, Homo sapiens
ctgtcaccagatgctctgcccgtgagccctgggacgtcacccaggtggatgttacaagtcgagtggcagcctggtctgcatgggcagccgaccaaggtggactatcgagaaaccaaggcagtatcatgagcaggaagaaacacctgagatgatggcagcccgcattgacagagatgtgcaaatcttaaaccacattttggatgacatagaatttattatcacaaaactccagaaagcagcagaagcattttctgagctttctaacaggaagagaaacacgaaaggtaccaggaacggaccaggagcgggtgtcttcaacgctgcgggcacaacctccacctcctgatgactttcttgactgttaccaaaagtatatacacacggatattcaaccttactaggctaaattgaagtctcctattcagaatcctagtgctgccgatacggtacactttctgtatactccattaaatatggt

SEQ ID NO: 690685 - DNA, 324 bp, Homo sapiens
ctgatgaactcactgctgcccaaggccgtgcgcagggcgctgaccgatagtacaggagcgccagcgccgccgccgcgccgaagaagcattggccgacgttgaggcgcgtgcttggatcgccatcgacgctgccggcatgggcacttggtacctgcgcccgcaggaaggcctgctgtgttgggatgaccgctgcaagacgttgttcggcctgcctaccagcaccgaaatgagccttgaggtgtcctcggtggatctaccccgatgacctggcaatggtgcgtgacgcggtggaatatgccatgcgccccgaaagcgaggggcagt

SEQ ID NO: 690686 - DNA, 132 bp, Homo sapiens
  misc_feature (4)..(4): n is a, c, g, or t
  misc_feature (15)..(15): n is a, c, g, or t
  misc_feature (39)..(39): n is a, c, g, or t
  misc_feature (49)..(49): n is a, c, g, or t
  misc_feature (103)..(103): n is a, c, g, or t
  misc_feature (122)..(122): n is a, c, g, or t
aaanttaaggtacanttttcttctagctacgatgtatgntttacttacntgaagacccctttaaaatagtaggaaaatcagcagtcttgtttaatataattanaatattcttaaaatgtacnaaaaaggatc

SEQ ID NO: 690687 - DNA, 1347 bp, Homo sapiens
  misc_feature (381)..(381): n is a, c, g, or t
tcttctctcgccagtgctgtcctcgtggaatgtgccctgggaccgcggagatgggtgtcggctgtgaccagtgcctgaggctccctgtctctcctctagtgacactcgtctttaaaccctgctgtgggaattcccttgacgcacctgccgttgatgcccccagggaagcacagggctgaccttggaacgtccaagcataccttcccttaacgatcatcccaacttatttggattgacttatccgacacatgtgttccactatcgtggggacgcaagaaccaacttgtggaggcgtccaagggcaggattgccacgcaaggagtcccgcgatgttccccctttcgccggggacacgggcttgtagagttgccttgacttggngccacaggaaacacctcatgttgattgcgctagagggtccattcccgtagtgtgcacgctttgtgacaacagcaaccgccagactcttgtgacgaacgacttgcgtagccatcaataattccggtggggaaaattggtgcggccatcttgcgtgtaacagcccaagggacgggggatgccctttccaactgttgcagtgactacatgtgggaacacattgttatgtgcgttggcgcccaaatttaaatagggttggcccaaggaccttggattggacccccgtgtggcacttgtatttgccccagtttatggccccccctagttggttggaaccagttcaacagtgtgtgccccaacgcctcccgtaataaaagccaccatgggtccatcggtgagccccccggaatggaaaaagaaagtcctgtcgcttttttttttccccgagagccttattgagaggcttatcgagccaaaggttacaaagatgctcccagcgtagagcagtcccattttggagcaacttcacgtgtcagctttgacttggctcgccacggctttggcaattccaagcgggaactgttgggaatgtaagcaaacggtctggtggcatgaccaaagtggggtgaatagggccgcaacgtcgcattgcgttgggacagacaactttttgcgatcccaagcgagattccgttcacgcctcacatttttcctttacccatttattatggggaccgcattgaggtactaatctcccaagagcaaaggaggttggtgttcacacgacgcaaaaaatttgtggatcctggcacattttctttaaagaagagccacccttaggacaacgatgtcgccttatagactgaatccaacacgcagcgagcggagaacactctacgttgagagatttacattacggggtaattaaccattagagaccggttgagaagcccagccgaggaacgaggg

SEQ ID NO: 690688 - DNA, 183 bp, Homo sapiens
tatgaaaaaagttaaaaaaaaaaaaaaaaaaaaaaagctaggcacggtgatacatgcatgtatcccagctacttgggagggtaaagtggaagaattgcttgagccccgggagttcgagcctgcagtaagctgtgatcaggtgactgcactccagcgtgggcgacagagtgaaaccctgtgtta

SEQ ID NO: 690689 - DNA, 398 bp, Homo sapiens
gctgtcgcctactactactaagggccccgccggtcgactttttttttttctttgagacagagtctcactctgtcaccaggctggcgtgcagtggtacaatctcggctcactgcaacctctgcctcccgggttcaagctattctcctgcttcagcctcccgagtagctgagactacaggcgcataccaccacacccagctaatttttgcatttttagtagacagggggtttcaccatgttggccaggatggtctcaatcccctgacctcgtgatctgcccaccttggcctcccaaagtgctgggattacaggcatgagccaccgtgcccagcctgctgaagaatttttcatgtgaaatacgatttctctaacagatattagtccctgttagccttttag

SEQ ID NO: 690690 - DNA, 168 bp, Homo sapiens
ctcctggccgcacactcagtgtgtacaggtgtgtaaactcatcatccttgccacggatgtccttgttgatcgagcacgttcttgcccttgtacgttgaagatgactacgtgccaggtggagtccggctcctatgaagacgattggaacttccttgccacccaataacg

SEQ ID NO: 690691 - DNA, 717 bp, Homo sapiens
  misc_feature (15)..(15): n is a, c, g, or t
  misc_feature (99)..(99): n is a, c, g, or t
  misc_feature (107)..(107): n is a, c, g, or t
  misc_feature (307)..(307): n is a, c, g, or t
  misc_feature (313)..(313): n is a, c, g, or t
agcggggcaacggcngcctgcgcctgaggcccggccacgccccatcccgctcgctccacgctgcggcagccccggcggccccaggtgcgcggccccgtncatcccgncccgccgccctgcgcccatgggaggagggccctctgccggggcgggcttgcccagccccgaggatgcgatggtgacggagctcttacgccccgagggtccgttcgctttcggagcacatcgcgctgaaggcccccgtgaacgtaccgacggagggacgagttccactgtcttcaaacgaaagcgtacgcttgggcccggncgggancccaagggaaccctgttccttgagacgcgtacaacccctgctgctggggcgccggacttgcaaaggggcccaggtcaagggcagaaagacatccgccgcggagtggccgaacagggggaacgacggggcggacgcctaccttcgaggacgagatacccccggggaaattccgcagaaggctcacgccgcggctgggcaccggaccgttccgcaggcctccttggcagggccccccgggaggcccggccaccgccttggcacccgcgtttgcacgctttcgctggggttccttccgggctgtggtttacccccgggcgacacccggggagccccggcgcgggatggttggccccctgtggggctgccttgggggtcccgtggcgaggggagcgcttccccaccgg

SEQ ID NO: 690692 - DNA, 163 bp, Homo sapiens
  misc_feature (145)..(145): n is a, c, g, or t
gaaatgggaacaatgcactgaatgatcttacactggatagacacgcactgaatgatcttacactggaggacagaggaatggaatcacactgtgagaaatggaacaggcaacccagtgctttaacaaacacacaatttctcatccnttgtgagggtgtactgat

SEQ ID NO: 690693 - DNA, 625 bp, Homo sapiens
cttatgtacgctcttttgcctaaggctcaggctgttggctggactacagcacaacatgacccactagtactaacatctgaacactttttggtggtggttaaccgaatgatctctactgcgccgtcatcatactagatcttatggggcttccatccctacgcataccttacataacagacgaggataacaatcacctcccttaccatcaattcaattggccaccaatggtactgaacctaccagtacaccgactacgggggactaatcttcaagtcctacatacttccacgattatgcctagaaccaggggacctgcgactaattgacgttaacaatcgagtagtactaccgattgaagccccctttcgcatagtaattacatgacaagacgtttagcactcatgagcaggccccacattaggcttaaaaactgatgcaattgccggacgtctaaaccaaaccactttgaccgctacacgaacgagggtatactacggacaaggctctgaaaactgtggcgcgaaccacagggttatgcccagcgtcctagtattaatgacccataaaatttttgaaatgtgataagattaatccaatttgcatggggggcgccttgtccatacgt

SEQ ID NO: 690694 - DNA, 1047 bp, Homo sapiens
ggcaggctgagctgaaggcacttagatgcccacaaccgcaccaagaagcacgacctgctgaggctggcaaaggaggaggtgagccggcaggagctgaggcagctgggtgcgcatggctgacaacgaggtcatggacgcctttcgcaagatcatggctgccctggcagcaagcaagctggactcccaccaatgcaaatgcaacaaggcacccagtgcctaggaagactcctgacaggagcgtgagcagcatcctgcaagctgctggcatgggtacgccctcacgccctgcctcagtgcttgattatcttggacctagcggtgagtgggaatgggacggccacacttccttactatctggagcacagggacaacacttgggcacttgttgtcgctagttcccatacaaacttgtgcgtgcacgtcatactacgacgtggccggttgagcccatatcaccacttgatgtgtactatcatcttgggcactaagccataccttgtttaccacaacacaatgtggaccaaacactgggcacaagggcacccattggtcattgaggtgaccttaacgacacattggacgagccgcaataccgctcttccttggcctactggcagttcccaccctggatcgaactagggcggggataagcagcatgggagatgaaccataatccaggatccatcaatttgagaagatcgataatccacatccatatttgcacccccatcaatttaataacccacaattacacaggcccaaaaacgattcgcccgtagcaatgcgccccaccaataagcgcccaccaatgaaaccgacaccgacccctacgaccacaaaaggagaacaacatcaaccaaacaccccccacacgcccagcaccacacagccggggaccacacacgacaggccaacagacccacacaaaagcaaacacgtacgacaaccggcgcacacgtggcgccaaggacgcggaattacccaccaagagacaaaacaacacagacgacaaacaaaacacagacccacacagaacaagacgcacgg

SEQ ID NO: 690695 - DNA, 367 bp, Homo sapiens
tatgattatcgccacacatcggaacacagatagcgtgtgatctctctggagaagtcagatgaactacgcggttacatatatttcacaaggtccttctctgaaaaagcgaggaggagagtgagaggcttctgagggaactctatttggttgatgttctccgggcagatcgaactactggttgccatggtcttgaactgagaggccatttctagatcatcgattttcttcctattacttgtctctggcaccagaaatgagaattcccaagaatgggatagaaaaacatctcctgagagagacgtttgaggattccaatctgatacccaaagagattctctggggagcaaaagaagccttcagtgttggg

SEQ ID NO: 690696 - DNA, 310 bp, Homo sapiens
ctgctggtcgtctctgcaggatcccccatctgccgcctcatttagtgaagaacctatttgtctatactgctggctcatcaggttactgggagaagacatacagcattgtgtctgcagtgcacggctcacgctggcgtatggatgggtgtctctggttcccagtgatgaccaatggccattgccgagaacactcttccatgccaaaatggaagctgctggataggtgtttagggaacactgcctcccccatatatgacctgccgtcccactacacagcacggggaggcagcccgcagattaggtggtggtg

SEQ ID NO: 690697 - DNA, 688 bp, Homo sapiens
  misc_feature (688)..(688): n is a, c, g, or t
tcaggtagggtgtcccatttttagccgccaggggttcccccttaatgtttcgggattgtttttttgtgaaattgtaaaggcataaccttttacgcaggaaacaagtttgtcctttgatacgccaggttataattttcccccaataaaggagccaatacctggagttccccacggtgaagggccgctctaaatatagtgaccccccggggtgcagaatttggggcgagccgtttaattccgtgtgagtccggcagttggcagcctcaataaagaccttcctttgtttatcccagcattagactgttgtaaacaagatatcctttcttatagagacaaatcatattcacgtgctgacctcgtgaagtcaaaatttgtttcagtacctgttcaaccattagatatatttcatgacaggtaggaaaacgctaggagaacatataatcatatatcgccatggatggttatattcaaagggatcgagattagtgtatacttcattgtccctgttcacaggtccatgagaaacattgtaatacgctttaatacatgtcacgctttgtgcatggaaccacaacctttatatcgtcccctgcaaggttccgtcgtgtttcgcaaaaattcagcacactgtggacccatttcatgcaggttggtgttgtgtaaaccgttgtgcgcaactagttacctn

SEQ ID NO: 690698 - DNA, 815 bp, Homo sapiens
gaataggctatgtcgaggctggtgtaatccggacgaggctgtttcctgcgcatgagccgaggccgtagtgcagccatggcgcccagcctggaatggcattgtcttgaagccccacttccacaatggactggcagctggctgctgtgtgccacgtggttcaaccatgcctggccctgtaatgattcctgcatgactgtaatgtgccctggcaatgccaatggctgctgcctgcattctgcccctgctgcccctgctgtcttgtggtcccagtcctggcccattctgttgctgctttgcctccactgtgttcttgtgtaccactactgaagtgttgctgctgcctgtgcctgctggtgcttccagccttggcatgtgagcgctcatcgtcggttgtgcctgtggcattcgacaatgaatgtgttgtgccctgggagccattctgagcattttcttgtgtgaatcctgagtgatgggctgtgagaacacatgtccaactgtgatggtccccctagaccaagagccctagagactgattgccatgacagtgccattgaaaaggaaggttaccctgtcatcacaaagaaagtccagtcacttaccatttcccacccaacgtgcacaaatggctcccattccagagggtggcccctcccattggcacctggtgcggatgaaacactcgatatacctttgacatttgagcacacaaacctttggacaaacatttgtgtcctagcacccaaggagttaggacacctgcggacacccatgtgggttcatattcgctcaccaggtttcacaggcggagagagcgg

SEQ ID NO: 690699 - DNA, 1529 bp, Homo sapiens
gggagctgcggcggtggcggtgcaggaggccgggcaggggtgctggagtgtgaccgactggacgcactgtggctggtgcgtgccgtggagccatggagctgctggaccctgtgggccctggggggcgctgggccggggtgggcttccacacgggcactgacatggagacctgtggtttgcgaggctccctggggctcggcttggaccgcgatggggcttggggcccctggccttcctaaaacgggtgctggcttgtctggaggggcgagtacgcctggggtggggccgactcatcaccacaagatggcaccggcggagagtcgggcaggaaagccgcacaaggagattcaccacattgcccgggtcaaagggacccgagagcacggagatatggaacgggagagggagacacccaggatgagaaggaccacggacacatcgagccggaagagaacgggccaatggagattgggagggtggaaaagatgaaagtgaagacatcatgaggtagggaatcagttggtggataggaaggagcacatagaaagacggagaacaggaattgagatagacaaaaaagagtaggaagtatttaggtggacggaacggggagaggacagaagataaaatacgaaaatgagagaggaacatggaaagcagcagaagggaaggaaggaacctgggaatggagggacgggagtacaagcgaaccacaattttgataggagaccagtgaagagagcacatcgttctagggaaggcaacacacaggggtgctgcaatggaaaaaaattgatcaaaaattgtgaacaggacagagcgaatggcagggaaaatatacaaaggtgaaagaagacaagaggggcggaagagatgtgagaaagaaaaaggacagggaatattacacagcaaacaagaaaagagtcgacggagagagaaagcggaggaaatacagggaaagagaaagagaacagaatgaagggacaacggaggggaacaaggggaaacacagggaaggacaacgaatagaccgagaagcggtcgaaatgggacgagagggaacaacacgaggcaaagagaaaggaagacagaataaggaaagaatatgaggccacggggaagaatccaggaacaacagaacgaggaacacagcggatagacagtaaagaaacaatacgacagaggtaaagagcgagagccaagactaagagaaggctagagcaggcaacggaacgaagagaaaaccgccgacaaatgaaagagaacaggacagcaagaagaaggagaagacaacaaagaagcaacagagagaaaggaaaaaaagagcacagagacaaagaataacacaggaaaatgagacaaaaacaagcaagaggagaaacaccagaggacaaggaaagacgacgaaggaagagagaaaagcaggacatgaaacgagctcacaacggagaagaggagaaaaacgacagagaaacagagagaaggaggaacgagacacaagagagtcgaaagagaacaggaacaaccac

SEQ ID NO: 690700 - DNA, 227 bp, Homo sapiens
cccagtaatcgagctcggtaccagatatgcagagaaccaaaatgcctgcgtttcagcaaggatgccctcgccaaagcagctgtgcacagcagtgccaaaaaccctggggtacccagtgggcggccaacccctgtgaacccaatgaccagtgttacatgacacatatgaacaactgtgacaactgtgactctgtgtatcccacgagtcaacacacacagggtgaacct

SEQ ID NO: 690701 - DNA, 130 bp, Homo sapiens
cgtgatcggtaccttggttcaatgcgttgtgctgtgtacgataatacactcagtattgggatcaggggtgtaggtgtgccttgtggtcagaagtgggctcagtggcatatttaatcttagagcgaaagcc

SEQ ID NO: 690702 - DNA, 287 bp, Homo sapiens
  misc_feature (279)..(279): n is a, c, g, or t
tgtatccccaacaccccgggagggcgaggaggcggatcacctgaggtcaggagttcgagaccagcctgaccaacacgatgaaaccccgtctctaccaaaaatacaaaaattagcagggcatggtgtgggcgataaatacgtgatgttatccccaacaccaaccgaggcagtcagcccaatgacctggggcagtgggcctgaagatcctccaagtttctgatctagataattaaacatgatcatattgtatgggtgttgtttactagtgttgggcgatancatcagtg

SEQ ID NO: 690703 - DNA, 1396 bp, Homo sapiens
cggaagccacgcgcagatggagcagtggcgaacgcggctggaggccctggagcgcctgcggagctggtaaaggcgatggaggttgctggttagtgaagggcggactgcgcgctccccctgcttacccgcgcacctcgtgggccggtccatgctcccgacgtgctgcgggcttcatgctatctggcggccattgttgcgggcggctcgcggtccacgtgactgcagagtggttgcggtcagatgcgctcggtgccggaagcgcttgagtgcctgggctgatgaggccttgggcatcgagccatcttggctattctacctaggatgccagagcgcctggagggcaggcaacgtgagaagtgcgccaggagactagcacgaagacgaaatacactacttcttgcgcatgattctgtgcgccaaaccatcaattcaggatatacttgccctggaaatttagttctttgcgggcccaatccagttttgcgtattcataacatttccagttggcgcccttggctttgaccccacgtctaccggggcccatcccttccctttttcatacacgtttgcaatacaagctggcgcatttgcctttgtgaaacggccttatcacgacgtggaaccatggcattgcgaatctgcggcattcgtataaatcgacagggaacacgccggggattaagacggcggcgcaagtgcttgggagcaattgcttggacgggggaacccgcgttagattcctagtcattgtagcccttgtttcgtgggtctaaacctttgaggcccctttgaattggttaccccctttgagatgccaagcggacttgttttctttcccaaatagttctaacgccatttgatggttctcggcgcattgttaggcgccgagggctccagcatagggctatgaggagccttcccaagagaagttacctatggtgaggtccccagaagtgacaagtttgaaggcaagttccgccagagagcgattagaatccgggagctttttggtcccctgggggacattcccggggatgactttcccgcggaatacttaactttaacggaccctctcgaaaagggccctttggcattccttggttccaccccttttgtttgttccctttgcgagacatttcgaaggcttcctttctttacattggaccctcccttcttaaaccttgttttccccatttatcttcttggaagcggcagacccctttttaaggttttaggggcttcctatggtaagcggaccataggttcccagagaattgggggccctcttagggggagtcacaacgtttggccccccacatttcgggccttttgctttgaaaaggttctgggttcaatttcagagctgttcaataccaaacctttgagatttcaaccg

SEQ ID NO: 690704 - DNA, 287 bp, Homo sapiens
gcctggggcctctgttcccctaaaatctagcctaaactattcccatccctttagcataatttcttccatagcctctttgccttaggattgactttgcaatttttttttgagactgagtctgctcagttgccaggctggagtgcagtagcatgatctcagcttactgcaacctctgcctcccaggttcaagagattcttgcgcctcagcctcccaagtagctgggatttcaagtgcgtaccaccacacctggctaatttttatatttttagtagagatgggggaacag

SEQ ID NO: 690705 - DNA, 766 bp, Homo sapiens
aaactacggctaggtacgaggctggttgtgagatcgcggtgccagttgccatggagccggccgggccctgtggcttctgcccggcgggagagctccgcggttgcagcgctcctcccagccgcctagcaatgcgccctacgccgtgctgcgtcagcaacgcgagaccgagtgacgagcctgggtgaagcagtgcctcatgctcctggccctggctgcccatgctggcctatctgggactcttgtgtgatgctggcttggctgcctgtggctgacaaaatgcttgccttctgatgctggcttgcttgatgccgctggtgatgtgcctgtggctgtgcttgctgcctccatgtgctgtgcctgtggtgtgttggaacctgctggagcctggacctgcatgcttctggatggatgctggataatgccccgggtagtgacgcctgcggatgctggatgctcgcccctgcgatggacccctgccggattcttgtgaaagatgcctcctgccgctggatgccctgctgtgccgcctgatgcgggttctttggatgatgtccctgtggggcctgcactgcccgtcgtacccacccgcatccccgcgatagtcagcctgagccgtggccagtctcgccgctcgtgcgcttccagctgcccaatgtgctgttctgcctacgcgcatactctcgccctgtatcacggcggtgacgacgcgctgtctctgacttctgtgccacactgctcggcgtttccggagcctggggtgccacaa

SEQ ID NO: 690706 - DNA, 170 bp, Homo sapiens
ccgccaagaggtgagagagagaaggtgtgcatgacagcaagcatgaccaactggggccctgctagattctggcggaacaccctgggcacgaggatgtgcacgtgagcaacggtgatactcttgtgctggcagtatggccacactcgcccagtctcatcgtcatcgctaac

SEQ ID NO: 690707 - DNA, 161 bp, Homo sapiens
attctccctcagtctctagaaaccactaagacactttatataacatgtagccttgtgtgactggcttctttcacttttaccataacgttttcaaggctcatccacatgtagaatctatctgtacttcattaccttttgtgaataatattccatagtataga

SEQ ID NO: 690708 - DNA, 359 bp, Homo sapiens
ctttggggtctttgctatctaaaaaaaaaaaaaaaaaaaatcaaatttaaaatctgagtcagtcggcctgcctgggttctcattaggtaaattcttaatgccttgccctttccagcaatcattcaatcaaaggagggaaatgaggcactttaacaaagcagggggcgccagggaccgcttccttaaaaacggctctttccgctttaattccttgcccacaggcttgccctggaagctgaataaaaatccccaaaactcaaacttcctagggatgccacccttttagtggctaacacctcccccttccaagagctaaaaaccaagggagaatgtccttttgtagcttaaataaccaaaga

SEQ ID NO: 690709 - DNA, 631 bp, Homo sapiens
gactctccccggccgccgctctccggccctcgccctgtccgccgcctccgccgccgccgccgtggtgcccttcggggtgccagcctctggccacggtgcggcggcgtcgcgcaaggccggcctctgtgtgtgcgctcagcgagcgagccggtgtgcggctagtgacgctcaatacctgacgcctatcctgtgccagctgcgcgccgccagaccgtcgctccggagaggcgtgcacgcggccgccggtcatcgtcctgcagcgcaggaagcctgcaggccaagggcaggaagatcccaacagtttggcgccataaatattacctttatcgcggacgtggtgaagaagatcgcccctgccggaggtcatatcgacatggtatcgcaaggcttccagtattctaaaccgaagaggtgccggtggctaagtggcgactagagtaatatagtagtcggaaagaatggcactgattcgtgaccacattgcccacgttggttgaccaaacaagacaccggggttcaaaagttgacgctgaaagaacggtgcccactttacccgaaggcccaaaattcaacggaatggttgacatgacaaaacaggcagaacatcgccactccatccaaatttgcacca

SEQ ID NO: 690710 - DNA, 415 bp, Homo sapiens
gtctggtctctgtacactatgggcacacgactcctcccagctctgtttcttgtcctcctgagattggcatttgaggtccaggggacccaacagccgcagcaagatgagatgcctagcccgaccttcctcacccaggtgaaggaatctctctccagctactgggagtcagcttagactgccgtccagaacctgtacgagaagacatacctgcccgctgtacgatgagctcagggacttgaacagcacaagcacaggagccatgagcacttacacaggcatttctactgaccaaggactatctgtgctgaagggagacgagtaacagccagaccccccatcagtggacggggagagtgccctacatacctgagcccccaggttcagactgagctcccccttgccaggagcgtcttgc

SEQ ID NO: 690711 - DNA, 205 bp, Homo sapiens
cgttgtcgccatggtaataccgctcagtacgggaggacccacaggctaagacactcggagcacgagctcgcctgagggaccaacgaggcgaagccacaatccgcgaactcatgactgaccccttctaagtaagaatcccacccaggcaaaccaatccgacaaccgaaatagcgcaggcaccgccaaattcaaggcgccccaaaag

SEQ ID NO: 690712 - DNA, 326 bp, Homo sapiens
taaaagctctcttaccccatgggctgcaacattaagtgtggaacctctgcttaatgagctcctatcggtaaatttagcctgatccaactttatattttttccactattatcctatacctttaatatctattcccatacatatttccttggtttttgtctgtaaattggagaaattatgtagttctttggagtatagcataattcctcatgggtcatacttcacacgtcacctttaggagtctgctgagacttgaactagttataggtgtagaagcaaagaggggtagtgggagtgaatcaggagtgtcttgcatggcggatacctc

SEQ ID NO: 690713 - DNA, 111 bp, Homo sapiens
ctgagcctgccccagattaggaaaatgattatgagggcgtgatcatgaaaggtgatagctcttctatgatagcgcaagtaggtctacaagacgctacttcccctatcatag

SEQ ID NO: 690714 - DNA, 366 bp, Homo sapiens
cggcacgaggaggagctaaggggcagatgctaaccagtcgcaccactgtcttgtggctcccaatcccatcatctttccacatacctcacagccatttccttcttctcatcctgtaaggaagttcctagctgattctataagagccttattacaggaaatgggaagtcaatacccgaataacaaaggtactaggtgtctcctcaaaaacatgtcaagaaaacaaaatgtggtacatccaaaaaactgaagactattcagcattaaaatgcactaaacacctgatgtgtgctacaacatggatgtactctggggatcttactgaggtgatggaatgtcccagcactgggctgtgacaatgactgcaca

SEQ ID NO: 690715 - DNA, 923 bp, Homo sapiens
tgcaatggtcttgttaacagaggtccgaagtgatgatcaaaactggagaaactgatgttatgagagttaagaaaaacattcaggaatctgaggttttagatgaaaattaagctcgatgtatctcatgctagagttcgaatagcagagcacttgtgtgtgtcatcacaagctggagaaaggaagtttccgtggtctggtgatttcagagtggtgttcaatctcggatcttcaaagcgatttagagcttctgcaaagcatgtgaattgggggcattcttttcatggattaaatgctatggtgtttacgagaaatccaatattcagacattgcttcacagaattcatggacgagaaacataaggaaatcgggatatattatagtacaagagagacaaacccctgatcatttcgtttggtatgcaaatgagtttgattttagacataattccgcagcatcaacatgaatttcccatctggtgtaaatcgttggttgtgcgtctaagggtggctggtcgagagcagccgttcgcgatgggtgcaacgggcgcgcgaggcgaaaagaaactctggacgttaggagggcatccgacagtgcagaacccagtgggacagaatctcgccacagccgcgccacagcggcggccccgcacccagcacggcagcaggcccgccacccaacgccgacctccctgcctgcacacacgaagccccaggccccacacgccaccccgccaacggatccgccgcacccgccacacggacgccaccagaaccccgcccacccaacgcggaccccagccccacccaaacaccggagacgcacaccgccaccgtgaccacctcccggcccacccccaccggcaccaccaaccgctcacccgcacgacccacaacacccaccgccagcagccacccccaccccca

SEQ ID NO: 690716 - DNA, 103 bp, Homo sapiens
tagatctaattggtatctttcttcataacacggaaatttaaatatttctcctgatggatctatgaggttatcaccgttatgagtagtgcacagtgtcggcaca

SEQ ID NO: 690717 - DNA, 181 bp, Homo sapiens
ggacagtgttacagttgaacacttagcatcctgttttttggttggtagttaagcaaactgacattacggaagtgccttaggcactacagtactaagcaatgttgatatatcattcgctctatacactttaatgtattcagttttgctgtctcatatcatgtacctctctagtcaaagtggt

SEQ ID NO: 690718 - DNA, 530 bp, Homo sapiens
  misc_feature (88)..(88): n is a, c, g, or t
  misc_feature (92)..(92): n is a, c, g, or t
  misc_feature (102)..(102): n is a, c, g, or t
  misc_feature (162)..(162): n is a, c, g, or t
  misc_feature (164)..(164): n is a, c, g, or t
  misc_feature (233)..(233): n is a, c, g, or t
  misc_feature (255)..(255): n is a, c, g, or t
  misc_feature (257)..(257): n is a, c, g, or t
  misc_feature (328)..(328): n is a, c, g, or t
  misc_feature (369)..(369): n is a, c, g, or t
  misc_feature (386)..(386): n is a, c, g, or t
  misc_feature (426)..(426): n is a, c, g, or t
  misc_feature (438)..(438): n is a, c, g, or t
  misc_feature (521)..(521): n is a, c, g, or t
ggttgactccgggggcgcggcgaggagagacatgaggctgagctggttcgggtcctgacagtactgtccatctgcctgagcgccgtgncacncagggccgangggcaaaaggaagctgcagatcggggtcaagaagcgggtggaccactgtccatcaaatcncncaaaggggatgtctgcacatgcactacacggggaagctggaagatgggacagagtttgacagcagcctncccagaaccagccctttgtctncnccttggcacaggcaggtcatcaagggctgggaccaggggctgctggggatgtgtgagggggaaaagcgcanttggttgatcccatccgagctagggtatggagagcggggantccccaaagattccagncggtcaacctggtgttcgaggtggactgctcaaaatagancgacgaactganctgtaccagctggggaaggcaaggggagaagccccatcaggaccagactgttccaaaaaaaacaaaacaaaacaacaaaaacncttaaagcc

SEQ ID NO: 690719 - DNA, 517 bp, Homo sapiens
gctgattcaaccgatgcgatgcacctgaatgtcgaagtcaccggtattcgcgtgcggtcgagtttctctgccgtcatgttcggcttcatggccggcagcgattacatcgacggcaccgtcacgttcaccgatgccgacaatcatccggttgaccacttcaaggtgtcggcgtcgtatgcgctcggtggtatcgccggtgtcgacagcatccgcatggactggctgtacgagaaattcaccgagaagacgctcgcgacgctcgatccggcgaccgcggcgcagcaggccaacgcagcatcggcagcctcgaagaagctgtaagacccgatgcccgacggaacgcagatgcgcggcccgtcgggccatggcggcagaccctatgtcgccgcccacgagcggcctcgccagtcgcgaacccacatcatgcaatgcgcgagtgaatgccctgtgctcgcagctggcagcagcagcgctcctgttccgttggcccagccgattggcatcggagcgcggccgc

SEQ ID NO: 690720 - DNA, 348 bp, Homo sapiens
gatggacgagagctggtttgttacccctcccgcctgtttacggctagaggtgctggactcggtcccgtccgctccagagcatgtcccctggaggacctcctcatcgagcaccccagcatgtcgtttacgtcaccggcgagcaccatagtgctagagcccgggtcccctctccccgctcccggactgcggccactgcgctgactggagtctgagcctctagacgacagtgcggaacttagacgacccgtcctcgtcctgctgagctctgctggtgctcgctgcgcctcgcctgctcctctcccagcgcgggctggcgctgctggagaaaggcgtgtgccaggtgctggt

SEQ ID NO: 690721 - DNA, 639 bp, Homo sapiens
tgttaaactgtctattacaaaaaaagatggaagataacaagtgttgccaacgaagtggagaaaagaaaatcctgtacactgttggtggaaatataaattagtacagccattttgaaaaacagtatggaggttccacaaaaaactaaaaatagaattactatatgatccagcaacctcatttctaggtatatatccaaaggaacttaaatcagtatgtctaagagatatctgtgctcccttgttcactgcagcattattctcaatagccaatatatgaaaacaactgaagtgccatcaacagatgaatggatttttaaagtgtggtacacacacacacacacacaatagaatactattcagcctttaaaaagcagaaattctgtcatttgcaacaacatgagtgaatatagaatgcattatcctaagtgaaataagccaggcacagagaaacaaatactgcatgatttcacttacatgtgaaatttttaaaagttgaactcatagaatgagaatagtggttaccagaagctggtaaggtaaggtaactggagaaagaataaatgttggtcaaagggtacctttcttgttgtatgttttggtgatcttttgtacagcatggtgactgtacatgatgactgt

SEQ ID NO: 690722 - DNA, 814 bp, Homo sapiens
  misc_feature (115)..(115): n is a, c, g, or t
  misc_feature (745)..(745): n is a, c, g, or t
  misc_feature (775)..(775): n is a, c, g, or t
caccattacccctccataaagctagcggtctcagatctccacccttgagggcatccagcccatttctgttttttcttttatcgagtccaggttttcattcaggtaattgtacatntccatgcagtagtaagaaataacacagcaagatcccttacacactttgcctagttatccccatgttaacattttacaaagctatagtgtaataccataaccatgatatttacgttatcgatccactagttttattcagatttttccagtgttacttatactcatttgtccctgcttgcaagtgtgtgtggactaagttctatacaattttatcacctttgtagattcgtgtatccacctaccacaggcaagttattaaacagtttcaacacctggaggacctcgtgttgcccatttataaacaccccttcttaaaccttggcatccattttgtccatcatttctaaaatgttatcatttcagaactgcaatataggtggatgccaacatgatccccatggagctaccatagctaacggtgcctacgccaccaggagcatctaacatgggcacggctaaggctaaccactgggcgtggctgctggtgctcagattcctgtttgggtgcagtgtccttcagatcctactcccgtccttctcttttatgtccagggtgcagcgaaggatgcagaacaggagtcgcagccaaagcagagatccaggatatgaagcaagagttatccgcggtcantatgatggacaagtttgccagatctgccangctggaaagaaagatcaacaagatgatgaataagctcaa

SEQ ID NO: 690723 - DNA, 241 bp, Homo sapiens
  misc_feature (48)..(48): n is a, c, g, or t
  misc_feature (172)..(172): n is a, c, g, or t
  misc_feature (202)..(202): n is a, c, g, or t
agaacaggaacacatgttttctgtactacatggctaatgcaggatatntggctgcagttgttgggtgaagctttgcccgaaagttgagaaatgggtgcagcgaaggatgcagaacaggagtcgcagccaaagcagagatccaggatatgaagcaagagttatccgcggtcantatgatggacaagtttgccagatctgccangctggaaagaaagatcaacaagatgatgaataagctcaa

SEQ ID NO: 690724 - DNA, 937 bp, Homo sapiens
tagaccctttttccaggggcaagaaaatacacaagcgggggaacccaacaacacacgaggggcacacccaggagtcaaccgccgcggcaaatattgcagtgcgcgcaccgtgccccccgtgtaatatgcctcgcaggggggtgcgcagccccggcacaacgtgttaacggcgcacgcgcccaggtcgtaaagaagcagcaacccgctggtcatagcgaacaacggcggaggacccctccgggcaacaccacatggggacaattgccccgcctcgccaacgagcgcaaccagcccacaaatctgaggggcgcaaagcccccgagttccctgcttatgtgtcgcacataccgagggacccgcactcttgcgcggggtgaaaacctcctggcgacaatattcttggcgaaggacagagtaatccctcgaaaaggagtctttcacaatattgccacgagggtgttcgccaagcactacaccccggttctaagagcggtacagacaaggccatataccttcgtgcataacaacacgcccccacccgacgctagaagacaggcgggccgcctccttaaaccgcggcttggacacagcaacgcccacgggggctactcggcgtggtgtgaaaacatcgagtctcgtggcgcgctgcagttagataaggtaaccttgcgttggttgttttcgcccgtaacagttacattgaatatgtctgtgagacaactagtagcaaaactcttaaaatttttattgtgggcaagaacaaccacttctcgcgctcaaatactcataaaagacaacctataaagaaaggagagacaagagagacaccgttgatcctcctttatggacgacgcctcaatccctccgggttctctactcaaccaagatgtttcaagcctgaagattttcttcagtgttaaaaaaccaaaaaaaaaca

SEQ ID NO: 690725 - DNA, 626 bp, Homo sapiens
  misc_feature (11)..(11): n is a, c, g, or t
  misc_feature (80)..(80): n is a, c, g, or t
  misc_feature (216)..(216): n is a, c, g, or t
  misc_feature (228)..(228): n is a, c, g, or t
  misc_feature (242)..(243): n is a, c, g, or t
  misc_feature (249)..(249): n is a, c, g, or t
  misc_feature (255)..(255): n is a, c, g, or t
  misc_feature (295)..(295): n is a, c, g, or t
  misc_feature (304)..(304): n is a, c, g, or t
  misc_feature (325)..(325): n is a, c, g, or t
  misc_feature (362)..(362): n is a, c, g, or t
  misc_feature (395)..(397): n is a, c, g, or t
  misc_feature (410)..(410): n is a, c, g, or t
  misc_feature (422)..(422): n is a, c, g, or t
  misc_feature (425)..(425): n is a, c, g, or t
  misc_feature (427)..(427): n is a, c, g, or t
  misc_feature (436)..(436): n is a, c, g, or t
  misc_feature (438)..(438): n is a, c, g, or t
  misc_feature (457)..(457): n is a, c, g, or t
  misc_feature (460)..(460): n is a, c, g, or t
  misc_feature (548)..(548): n is a, c, g, or t
  misc_feature (555)..(555): n is a, c, g, or t
  misc_feature (567)..(567): n is a, c, g, or t
  misc_feature (581)..(581): n is a, c, g, or t
  misc_feature (585)..(585): n is a, c, g, or t
  misc_feature (588)..(588): n is a, c, g, or t
  misc_feature (594)..(595): n is a, c, g, or t
  misc_feature (598)..(598): n is a, c, g, or t
  misc_feature (621)..(621): n is a, c, g, or t
ttgccctcgancggaggcaacagcaggaagcaggggagccaggaggggctggagggggcgcctctacaacggaggacctnataggtgtggcggggaaggtggggtgcgaaggagagtgacggtccttaggagcctgctttgcccagcctggagggcgtcagtgaaaagcagtacaccatttacatcgcacctggaggcggggcgttcacgacgttnaatggctcgctnaccctggagctggnnaatganaaattntggaaggtgtcccggcccctggagctgtgctatgctcccnccaaggatncaaagtgacccccccaggggncagccaaaggaaggggaccatggggtatccctgtgtnctggtctatcaccccaggttttttgtcccccannncccccagcccagncagccaataaanggncncaaatgggncncgtgggttttatacaaagnatntatatgagatttttttatattggacagagtggggcaaaacacgcccccctctgctgccttttttattgccctgcaacgtcccatctanacgaggngttggagaaggngaagaaccctcccnttcncgnccgccnnccnacaacaaacgggcttttttcctntttga

SEQ ID NO: 690726 - DNA, 425 bp, Homo sapiens
  misc_feature (77)..(77): n is a, c, g, or t
aaaaaccaccgttgaaactgtgtatccccaaaaaggctgaatttagcttgaagcaatcaaggaggtagttttgtganaagatggcctcaagagaagacaaagccagaaatagcctccccagaacaatcaaacccggccgggagtggtcacttatgcctgtaatcctagcattttgggagaatgaggcgggtggatcacttgaggtcaggagttcaagaccagcctggccaacatggcaaaaccctgcccctactaaaaatacaaatattagcccaggtgtggtggcacacacctgtaatcccagctactcaggaggctgaggcacaagaatcgcttgaacctgggaggcagaggttgcagtgaactgagatcgcaccactgcactccagcctgggtgacagagcaagactccatctcaaaaaaaa

SEQ ID NO: 690727 - DNA, 431 bp, Homo sapiens
actaaccacggttggctggggcatcgatgtttatcgatgccactaatgcctacagtattcagtatagtagcatgatgtactggtttataccctaggagcaataggctatataccatattgtctaagtgaatagcaggccataccacctcagcttgtatgtattaagtatgtatatatgtaagtatgtatgtatgtatgtatgtaggtatgtatgtatgtatgtatgtatatgagacagagactcgctctgctttgcccaggctggctaattttttagtatttttcatagagacaggcgtttcaccatgttggccaggctagtctcaaactcctcacctcaggtgacccacccacctcggactcccatgcctcggcctcccaaagtgctgagattacaggcgtgagcccgaggtgggtggcatcgataaaca

SEQ ID NO: 690728 - DNA, 348 bp, Homo sapiens
atgcaattcaaatcttatgagaaatcagtatttgttaaatcctgtgactgaaataaaaacgtctcctgcggggcgtggtcgtcacgcctgtaatcccagcactttgggaagccgaggcgggcggatcacgaggtcaggagatcaagaccatcctggctagcacggtgaaaccccatctctactagaaatacaaaaaattagctgggcgtggtggtgggcgcctgtagtcccagctaccggggaggctgaggcaggagaatggcgtgaacccgggaggcagagcttgcagtgagccgagatggcaccactgcactccagcctgggcgacagagcgagactcagtctcaa

SEQ ID NO: 690729 - DNA, 117 bp, Homo sapiens
  misc_feature (39)..(39): n is a, c, g, or t
  misc_feature (50)..(50): n is a, c, g, or t
  misc_feature (117)..(117): n is a, c, g, or t
gctgcatgtgacatatttctaccagattttttttcctgnatgattcagtnattggctgattatttaatctatagtgctatcgagcgatccctggtactttggacttcatggcttgtn

SEQ ID NO: 690730 - DNA, 117 bp, Homo sapiens
accctctgtctcctctcttcttctgcttcctgcttctagcctttcctgcttctgcctgcttcctgcttctgcctgcttcctgcttctgccagagttacctaccaggtcttggtgagg

SEQ ID NO: 690731 - DNA, 680 bp, Homo sapiens
taatgaacagaattcccaaataccagctccaactgatggtccatcattcactgttatgagacaaagttgctttaagcattccaaagactctgacccagaacagatgcgacagagtttgctgtatctgcaatccgttcgcggagaggctgctgccagtatggactagagggttaccattccatcaaatacaatatctgtgaatggaaggtcaagactcagtccattccatgtcgcctgatgcccaggacggccagttaaactgttaccctgccacaccactgcagcttcacttccacttcagaccaacttcatactaatggaacattttggcaaatgtatattcagatgtacagcttaataattattatttctaattaaaaattttagcaaattgggtttgggtggctttaaagtgccagagagaaagagttaccagaatataataatcctatagtaattttgatgatctattgtatgggccttaagagttgaatatgctgctttagaactttaaaacaaggtgtaaatgattttcatgttttacaaatgaaaaataattcctttgtattgatttcacttaccagcacattctctacaatggtgacttagacaaaagtatacacgattcatagactttatacttgtatgacatacaacttaggacaaacataggatatgac

SEQ ID NO: 690732 - DNA, 817 bp, Homo sapiens
  misc_feature (13)..(13): n is a, c, g, or t
  misc_feature (80)..(82): n is a, c, g, or t
  misc_feature (87)..(87): n is a, c, g, or t
  misc_feature (93)..(93): n is a, c, g, or t
  misc_feature (108)..(108): n is a, c, g, or t
  misc_feature (111)..(111): n is a, c, g, or t
  misc_feature (115)..(115): n is a, c, g, or t
  misc_feature (124)..(124): n is a, c, g, or t
  misc_feature (133)..(133): n is a, c, g, or t
  misc_feature (138)..(138): n is a, c, g, or t
  misc_feature (141)..(141): n is a, c, g, or t
  misc_feature (153)..(153): n is a, c, g, or t
  misc_feature (165)..(165): n is a, c, g, or t
  misc_feature (175)..(175): n is a, c, g, or t
  misc_feature (177)..(177): n is a, c, g, or t
  misc_feature (179)..(179): n is a, c, g, or t
  misc_feature (182)..(184): n is a, c, g, or t
  misc_feature (212)..(214): n is a, c, g, or t
  misc_feature (216)..(216): n is a, c, g, or t
  misc_feature (218)..(218): n is a, c, g, or t
  misc_feature (237)..(237): n is a, c, g, or t
  misc_feature (242)..(242): n is a, c, g, or t
  misc_feature (244)..(244): n is a, c, g, or t
  misc_feature (246)..(246): n is a, c, g, or t
  misc_feature (255)..(255): n is a, c, g, or t
  misc_feature (260)..(260): n is a, c, g, or t
  misc_feature (271)..(271): n is a, c, g, or t
  misc_feature (273)..(273): n is a, c, g, or t
  misc_feature (276)..(276): n is a, c, g, or t
  misc_feature (283)..(288): n is a, c, g, or t
  misc_feature (304)..(304): n is a, c, g, or t
  misc_feature (307)..(308): n is a, c, g, or t
  misc_feature (347)..(347): n is a, c, g, or t
  misc_feature (360)..(360): n is a, c, g, or t
  misc_feature (371)..(371): n is a, c, g, or t
  misc_feature (378)..(378): n is a, c, g, or t
  misc_feature (381)..(382): n is a, c, g, or t
  misc_feature (386)..(386): n is a, c, g, or t
  misc_feature (398)..(398): n is a, c, g, or t
  misc_feature (412)..(412): n is a, c, g, or t
  misc_feature (429)..(429): n is a, c, g, or t
  misc_feature (431)..(431): n is a, c, g, or t
  misc_feature (435)..(435): n is a, c, g, or t
  misc_feature (442)..(442): n is a, c, g, or t
  misc_feature (444)..(444): n is a, c, g, or t
  misc_feature (561)..(561): n is a, c, g, or t
  misc_feature (614)..(614): n is a, c, g, or t
  misc_feature (616)..(616): n is a, c, g, or t
  misc_feature (816)..(816): n is a, c, g, or t
ttttattttatanttggatattgggagacttggcaaatgctgtgagattacttagtaaagttaagtatgatgtatatacnnnggggnccagcncaccctcataggttngtnctgnagatcaggnacagtctcnaaggnttngaaatgtggttntatagaccaganaattccattntnanttnnnccccagtatacttatcactgttcatttnnngngnggggtcacggtgtactggnctggntngnacccgaggnatatngggggggggtngnggngttgggnnnnnnttggttatacatagcnggnngccttctctgtagtagccttgggacataatagaaatggngtgagggtcctcngtggttgggtnggatctngcnntggntatttgcaaggntgagtccatattanccttcagcacctgggtncnaagntggggtntnttcatgggtgatgtgaaggtcaagagagaatcagtggctgcagtccttctatatatctggtcactagatccgccagcttcttcaacttgttgggcttattatatctctgaaaggggncctgaacctgcatcattctgcaaaggagatgattcctgagagatgggtgaaananaatcactaactaaagagataaattcttcactttacttcctagtattgcatcccagaaagggttaaagtaagggatattggctcctgctgatcaggccacagtgtgacacattctataaaatgcatcacaaaactacattattcaatagacttgagtgttgcacctgctttcttatctccttgtaggtggttaagtttccnc

SEQ ID NO: 690733 - DNA, 154 bp, Homo sapiens
atagcgacgccagaagagccggttgtaggcattcaagcctccaggtatcacattactctgggcacctctcacagcaaccagtcatcactctgcaagtacactcaccaccgagacacgtttccagaagggggaaggtcgaccttctttccatgaa

SEQ ID NO: 690734 - DNA, 862 bp, Homo sapiens
  misc_feature (635)..(635): n is a, c, g, or t
actttttggctccacatttaatgcaaaagaatcttgtgatgtctacaaggagagatgtgggatatatttcctttctgacacataattgggggcaaaaaagaaagtctaagagtaatcttttctctgctgatacggttgcttgataaagacttctcaaaatgtttaccaatgttttaagaaagcttggtgtgatattcttccaaatgtagttaccaaatataatatggtagaaaaggctaaatcatacttaatgagcaaatggaagtaagctttaaagtatattctctttgtggtgaaaggccaatgagacattgtgaatttaagtgaaccattgtgcctcaagatgtaacctataaacacatggcatacaattttcttctgaataacaaatgattgcttatgtgtgcatgatgtaagcaaaagtcattattttttcctattcatttgacaataagttatggcttaaaatgcttggggagtttatttctcaaaattaaaatctgtcacatgagcttagtgggttctggtttacaaaataacaggtttctcttacagtatttccagtgacaatgcaggtaggtatatcaaacggaccatcaacagtgtgctgggggcttgtggtatggaatatgatnactgttttcgaacaattgtctgtgcagttaaataaaaatttcgccttaagatttctttagacaacaacaaaatatttgttctttcaaggaggttttcttcggcgggtacaacaggagcgcactttctgagatttggaaatatagggggcccagtaattaaaattttgggtgaggccaagcattcttttgcgcatgagattcatacgacaaaaaagttggtgtaagaa

SEQ ID NO: 690735 - DNA, 426 bp, Homo sapiens
  misc_feature (43)..(43): n is a, c, g, or t
  misc_feature (223)..(223): n is a, c, g, or t
  misc_feature (229)..(229): n is a, c, g, or t
  misc_feature (270)..(270): n is a, c, g, or t
  misc_feature (331)..(331): n is a, c, g, or t
  misc_feature (336)..(336): n is a, c, g, or t
  misc_feature (348)..(348): n is a, c, g, or t
  misc_feature (362)..(362): n is a, c, g, or t
  misc_feature (376)..(376): n is a, c, g, or t
  misc_feature (393)..(393): n is a, c, g, or t
  misc_feature (395)..(395): n is a, c, g, or t
  misc_feature (397)..(397): n is a, c, g, or t
  misc_feature (415)..(415): n is a, c, g, or t
gcataaaggtcactcgtggtgagggtgacatgctcccaccttnccccagtagagagggaaaatcctaagccagaggaactccaaaaatgagtgtttggagcgcttcagttcacctttaaaggccaggacgggccccacgtggctgggggcctcgttccagtggcggcacgtccttgggggtctttaatgtttgcagcccaagggcgggcccttttttaaaaanaaaaanggggggtatttttatttttttttggaaagggatttttggtnttctgttgcccttcggggggatcctgttttgccctggggacaatgtgagatcggggggttntcctnatgttttcccgnggcttggggattgnacccggggcccgcncccgtaatgccttgccngnancaatgtaataaaaagccncttttttttta

SEQ ID NO: 690736 - DNA, 241 bp, Homo sapiens
tcccctgtcgaaccctatctggggaagggagcctactagggtgtagaataggaagtatgtgccttcgttcaggcgttctggctggtttcctcatcgggtgatgattgccatgtggggataagtgtggttccgaaggagatctcacatatgatttgttctgtggctgtgaatgtcatccttaaggcgatatgtcgggcgattagtaccgataggtcaagctttttatgcgcgatacgggttc

SEQ ID NO: 690737 - DNA, 838 bp, Homo sapiens
aggcctggacttccccaatgcctccacgggggaacccttccaccagccaaggcctggtctggtgcctgctcgccggtgcgcacagtcatgcctggacatcgcctccttctactggaccctcaccaacaatgacacccacacgcaggagccctctgcccagtcagggtgagtgaggtcctccggccagctgcagaccctggcaccacaatgcgtgcgtgaactgtccgctctcgctgtgagcaagcccagctgggccctcagccactaggctggacctgtcgtggctctgctgcagagctgggtgcccaggtcctgcatggtggcacatgctgaacgcttgacccatggcgtcctgcattccaggttctgggtggtggaccagacccacttctacctgggccgtgccccacatggacttggcgttcaacttgacccatgtgtcataggatgctgggctgtgggtcgtcgtcaactgctcgctgcctggctcgccagacctgaccgagaatctttgaggcctactggttcctgggccaaggcggcagctccgtcccatcaatcttggccccggttctattgacacccccgctacaacctatgagacaccaatcgagattttgctcaatggaacccctgtctctgtgccctaccttgcgagtgcgcccccaccccttttgtccctgtggccgcactccagacttgaaggcgtctaactcaacgtgttggacgatgccccggagtttcatctacggtcgctgtcatgaactaaccttgccccctctttgtgtttttccccccccccaggttcttgcctgccctgacgattggcttgcggggg

SEQ ID NO: 690738 - DNA, 163 bp, Homo sapiens
gggaggtggaaatgaaccctgagggcttccccaacttgccatgcctgtccttagtagatgagttgctcctgattggtcaattgggtttgggtaaggcctggaggcttcagaggtgaatttatgctttgggaagccttatccaaacctaagggaagggccttgg

SEQ ID NO: 690739 - DNA, 188 bp, Homo sapiens
tagaggatccctgaggctagtgatcctcctgctcagcctcccagctaggactacaggtgcacaccacatgcctggataattcttgaaaactttctgtagagacaggatcttgctatgttgactaggctggtgtcacactcctgccctcaagcaatcctcccgcctccgcttcccaaagtgctgtgact

SEQ ID NO: 690740 - DNA, 344 bp, Homo sapiens
agaaggctgaagggggacttaatacctgcttataagcccattaagaatgattaaaagggccgggtgaggtggctcatgcctgtaatcccagcactctgggaggctgaggcaggtggatcacctgaggtcaggagtttgagaccagcctggccaacatggtgaaaccctgtctctactaaaaaatagaaaaattagctggacgtgttagcaggcacctgtaatcccagctactcaggaggctgaggcaagagaatcgcttgaacccaggaggcagaagttgcagtgggctgagattgcgccactgcactccagcctgggtgacaagggcaaaactctgtgtcaag

SEQ ID NO: 690741 - DNA, 801 bp, Homo sapiens
agtttgttgtgggagcagcgtgagtggaagcacaatggatctcgtgtcggaagagactggggatgttgtacgaaaatgaaaacaaaacagaatgtgggaaatcgcagctggaggtaggctgagtgaagaaggtgggcaaatgcagagtgagataccattggtgacaataggagcaccattgagcggggagatctgcagtgcacatatgccatatggatcggtggagtatgtactaatcccgagttctttatcagaggacccacaagatggtgggtggtggatcaaagagtcctttggagaaagggacacgtacaaaagttcgtgcatcggtggcaactaggagtgtgctcgagaagattctatagaatgttgagggattaatcctaaagacgtttatacacagcacctcaaaaattggatgtagcaagaaatcacgcaggatttggtccctgagatcctatgatggagaagaagtcattgagggttttgactttatttgaaaagttgagcatcatggtcatcgcgaggaaaaaggtcctattgtaacacattgtgtaggttcattctgtactttgaatatcacggtatttcgcttaaccctttctgtgactgtttcaaaataataaccccccgtgagaccttgcctaattgtaactttagcagtcacatttaagttgcctctaatgacaacgagtcaaaaatcataaggtgggtttacagactagaattgttggatatacatgtgcctgaatattcattctgacaaagttggaggacaaaaaagtcggaggcttggagccg

SEQ ID NO: 690742 - DNA, 119 bp, Homo sapiens
cttaattcactttatttttcttgtataaaaaccctatgttgtatgccacagcatggtagcctgagttccgctgtcacggagactctggtgtgggtcttgacgaggatggtcacgtgaac

SEQ ID NO: 690743 - DNA, 323 bp, Homo sapiens
caaacatcatccaaaaaaacaacaccaaccccctcccctaaattattttaaataaatactgatctccatgataaatcattcattattttcatctcttatttatccctattataaagaaaaaaaaagggtgagtttgttttaatgattaagtgtttaatctcaattctctctggcctgttgctgtccagtttcagaggagggttagtccaggtcctccttatttgtcatctgttttagatgattagaaatcccttaagtttatgtcagatgctcctagaaaaatgttctctcaaggcagaagtcacttagtgttgtgaaggtgt

SEQ ID NO: 690744 - DNA, 721 bp, Homo sapiens
atcttgcttgaatcacgccgattttatctgaggcactgtgatcaggtgctggcaatcataatgaaaaagatggctactgtgcctcgctgttacttaatcatacagtaagctgacctggaaatgaatgaaactattactcctagaataattacattgtatagccccacagattaaattataagttagagttcaattacaaaacatgttaaagcgttacttaaacatgtactatggaaaagtacaaggtaggttgagatgagtgatttccaagaaagtaagtagtattccccttttcctaggtcttctgtgatatgtgagtgttgtgaatttcttttatgtgcagtttataaaataaagatggattatgtatttttaagctaaggtgagacagtgatatatccttttgtctacaatgctatagctaatgtgctgagcttgtgccttgggtgattgattgattgattgactgattgtgtaaactgattactgtagatcgaacctgatgattgttagtgggaaattggcaggaaaaatgcagctgtcaaatcattggggggagaagaaaggatgtctttcaggattattttgatgaattttttgtcgataattggagacagaactgttgtgatgtaccataatgctaaataaaactgtggactattagcaccataatttagttcagtggaaacaagaagacaatgcttccatattgtgataggta

SEQ ID NO: 690745 - DNA, 648 bp, Homo sapiens
  misc_feature (25)..(25): n is a, c, g, or t
  misc_feature (65)..(65): n is a, c, g, or t
  misc_feature (130)..(131): n is a, c, g, or t
  misc_feature (145)..(145): n is a, c, g, or t
  misc_feature (150)..(151): n is a, c, g, or t
  misc_feature (154)..(154): n is a, c, g, or t
  misc_feature (158)..(158): n is a, c, g, or t
  misc_feature (162)..(162): n is a, c, g, or t
  misc_feature (165)..(166): n is a, c, g, or t
  misc_feature (170)..(170): n is a, c, g, or t
  misc_feature (225)..(225): n is a, c, g, or t
  misc_feature (232)..(232): n is a, c, g, or t
  misc_feature (234)..(234): n is a, c, g, or t
  misc_feature (241)..(241): n is a, c, g, or t
  misc_feature (244)..(244): n is a, c, g, or t
  misc_feature (253)..(253): n is a, c, g, or t
  misc_feature (295)..(295): n is a, c, g, or t
  misc_feature (310)..(311): n is a, c, g, or t
  misc_feature (349)..(349): n is a, c, g, or t
  misc_feature (351)..(351): n is a, c, g, or t
  misc_feature (353)..(354): n is a, c, g, or t
  misc_feature (362)..(363): n is a, c, g, or t
  misc_feature (365)..(365): n is a, c, g, or t
  misc_feature (374)..(374): n is a, c, g, or t
  misc_feature (402)..(402): n is a, c, g, or t
  misc_feature (421)..(421): n is a, c, g, or t
  misc_feature (457)..(457): n is a, c, g, or t
  misc_feature (469)..(469): n is a, c, g, or t
  misc_feature (472)..(473): n is a, c, g, or t
  misc_feature (476)..(476): n is a, c, g, or t
  misc_feature (478)..(478): n is a, c, g, or t
  misc_feature (480)..(480): n is a, c, g, or t
  misc_feature (482)..(482): n is a, c, g, or t
  misc_feature (484)..(484): n is a, c, g, or t
  misc_feature (491)..(491): n is a, c, g, or t
  misc_feature (558)..(558): n is a, c, g, or t
cagatgggtgatctaaaataaccanaaagtgtatacatccgagaagccgcccaagaacatgaaanacaaaaaaaaaaaaaaaaaaaaaaaaaaataaaagcctgcctcaccccttaccaatgagggcagnnaaagaccacctagnatgannaanaggngatnagnnatgnacttcagcccctctgctctgtaccctttttccttttgtccccggcagcagggaanaagctgnangccgtgnaanaatggctgngcagagcagaggggcagcgatagactctggggatggagcagnacggggacgggaggnnacggccacctgtctgtaaggagactttgttgcttcccntncnnccggaatnnanagtgctctncttctctgtgtcgccccgcccagccccntggtgtggagggaggggtntcgtttgtgcgcgtgggtgtagctttgtgcatcctntcccagtggagnaannacntntncntnccataanactttgtttgcccctgtgtggttggtcaaggagggatgtgagggaaatagggaccccccgacttccntcctgcctcagtctttcccccaccctgtctcttccttgtccttctctggaaaatgccaaaatacacgatgtgaataaaagtacaacggct

SEQ ID NO: 690746 - DNA, 426 bp, Homo sapiens
  misc_feature (202)..(202): n is a, c, g, or t
atcatatgtgtgccaggtgtgtggagcttaccggtatcccaacagtctgggtgggaggatctcttgaggcaagagttccaaaaaaaaatttgctgggccaggcgcagtggtcatggctgttattcccagcactctggaaggctgaggcaggcagatcacctgagggtcaggagttagatcagcctggccaacatggtgaaancccgtctccactaaaaatacaaaaattagccaggtgtggtggcatgtgcctgtaatcccagccacttggaggctgaggcaggagaatcgcttgaacctgggagacggaggttgcagtgagctgggattgctccattgcactccagcctgggggacaaaaacaagactttgtcttaaaaacaaaacaaaacaaaacaaaacttactgtgggcacacattatggag

SEQ ID NO: 690747 - DNA, 207 bp, Homo sapiens
ccctgtctcaccaccctctgtgtctgctggctgtaggtctgtctggtctgtctggtctgtcaggtctctggtctgactggtctgctggtgtggctggtctgctggtctggctggtctgctggtcttgtctggtctgctgagtgggctgagtactgctgggtctagctagggttctgctgggtctggctggggatcttgctagggtat

SEQ ID NO: 690748 - DNA, 741 bp, Homo sapiens
  misc_feature (35)..(35): n is a, c, g, or t
  misc_feature (412)..(412): n is a, c, g, or t
  misc_feature (436)..(436): n is a, c, g, or t
  misc_feature (446)..(446): n is a, c, g, or t
  misc_feature (502)..(503): n is a, c, g, or t
  misc_feature (516)..(517): n is a, c, g, or t
  misc_feature (541)..(543): n is a, c, g, or t
  misc_feature (554)..(554): n is a, c, g, or t
  misc_feature (581)..(581): n is a, c, g, or t
  misc_feature (614)..(615): n is a, c, g, or t
  misc_feature (636)..(637): n is a, c, g, or t
  misc_feature (670)..(671): n is a, c, g, or t
  misc_feature (739)..(740): n is a, c, g, or t
tccatcatgggctatatgatggccaaaaagcactnggagatcaaccctgaccaccccattgtggagacgctgcggcagaaggctgaggccgacaagaatgataaggcagttaaggacctggtggtgctgctgtttgaaaccgccctgctatcttctggcttttcccttgaggatccccagacccactccaaccgcatctatcgcatgatcaagctaggtctaggtattgatgaagatgaagtggcagcagaggaacccaatgctgcagttcctgatgagatcccccctctcgagggcgatgaggatgcgtctcgcatggaagaagtcgattaggttaggagttcatagttggaaaacttgtgcccttgtatagtgtccccatgggctcccactgcagcctcgatgtgccccntgtcccacctggctccccccctgnggtgtctagntgtttttttcccctctccctgtcccttgttgttgaaggccaagtaaactaagggtnngtcaagccccatnntcccctctctatctcttgacagcnnnggaattggatncgttgtgggtattgtggttatattctntatttttctctcactttgtgttctgcaaattannaagtaaatgcacaaataaagnnaaatatgcccggtcttttaatcacacaaaaaannaaaaacacaaggggcggggcgcgtctctaggatgtactcctctacaagaggcgccccaaggcttacgnnc

SEQ ID NO: 690749 - DNA, 189 bp, Homo sapiens
atttccacaaatttactaattatatttaaacttttactggttgttttgtatttagtcatcacatgttgtcttattagtgggagaggaacacaagagagtccctgggcaatggaagtaaactggtctagaaatgtgataattcaaaaagtggagaattcgggtttcagtaaacaattaaattttgttatt

SEQ ID NO: 690750 - DNA, 308 bp, Homo sapiens
caggaaaaaacaaaaaggaggaaggggaagcaaacaacgaccgtcatcaatggggacagaaggagaaagagatcggaatgaaggagagaagccactataaaaaaccatcagatcggcatgacaacttacatatcacaagactagcatagagagaaactgaccccatgatgcaattacctcccactgggtccctcccactacatgtggggattatgggaactacaattcaagatgagatatgggttgggacacagccaaaacatatcaatagaaaatgaagcaccaagttccttcagtattgtataaag

SEQ ID NO: 690751 - DNA, 804 bp, Homo sapiens
tatatacacatatatatattatggaggagtctcactctgtcgcccaggctggagtgcaagggcgagatctcggctcaccgaacctccgcctccctggttcaagcaattctcctgcctccggctcccgagtggctgggatgacaggcatgtgcgcaccacacccgacgtaatttcatatatttagtagagacggggttctctccgccgttggtcaggccgtgctcgaagacttctgacctcaggtgatctgcccgcgctcgacctcccaaagtgctgggatgacaggcatgagccactgtgcccagctcgccgatatttctttaaattatgtgtagggacagggtctgttctgtcacccaggctggagggcagctggtacagtcatagctcactgcagcctcaacctcctggtgctcaagcgagtcctctcagctcagcctcccgtgtagctggggctccagggacacacccccagtgctggctaataaagtattgttggtagagtcagggtttcaagcacatgaacagtctggtctcaaatgcctgggctccagtagatcctcccaccttaagctgccaagagtggccacggattccacaggcgagggcaccacccagggccgcaaggtaataaacccaaaggagaagaagaaaagggacgcgcaagtgtggcccaaggggggaacatcgaaacgtccggggctacaaatgatcgtcccaacgtaaagactctgccagtgccaaggacctacggggtcagcaacaaaccgaaggacactatttggcaaagacgcgccggcaagg

SEQ ID NO: 690752 - DNA, 280 bp, Homo sapiens
ccctcacgcccatgtcacaagctccctcacacactggctgttgacatactgcacctcccctgccatactgaacctccccgtggaggcttccctgtgctgcctcactcccaccccctgctgtggccagtgcctcacatgcagtgtgcatggtgtgaccatccatgtgccactgctaatgcccctgagcatgtgttccacacaaccatgtgtcacatgagtgtggactgcctgggtcatggagacttgtggtggccttgggtgagcaatggctgtggtacct

SEQ ID NO: 690753 - DNA, 490 bp, Homo sapiens
tcctgttgatctgtgaccttaccccaaaccctgtgctctctgaaacatgtgctgtgtccactcagggttaaatggattaagggcggtgaagatgtgttttgttaaacagatgcttgaaggcagcatgctcgttaagagtcatcaccactccctaatctcaagtacccagggacacaaacactgcagaaggccaaagggtcctctgtctaggaaaaccagagacccttgttcacatgtttatctgctgaccttccctccactattgtcctatgaccctgccaaatccccctctgcgagaaacacccaagaatgatccaaaaaattttttttaaaaaaaggaacaagtaaggacaccaaaaccaaaaatcaaaaattagccaggcatggtggcttgtagtccagctactcgggaggctgaggttgggaaggatcacctgaatcaggggaggttgaggctgtggcgagctatgactgcaccactgcactccag

SEQ ID NO: 690754 - DNA, 555 bp, Homo sapiens
ttcgtaatgatgtatggttgagaagaatgaggagtgactaatgtccacagggtgtatctctggtcgggggtgataaaaccttctaaaatggattgctgaattgaaattgaatgtgcacaaacactaggtatactaaaatccacttaattcagtgacttatagattggggcaattgtatgtggcacactcttatggagaacacggtagacatagtgagagagaaaaaggtgagctagaatctctgaaacggagcgcagaatcagagggaatgagaagcccttctgaatggaagggagagagaaaagggaatatggtccgtattacagatgacagctgtgaaactggggttcatacctcagcaatgtcactgccaggaaggagggtgatgctagccatgtcagcggtagcgtggcccgcagggacgccgacatgctggagcgtcgtgccagcatgggctgtggcagccacgtgggccagcaggagggtcccgctgcacagctgtggggtgaggttagactgggcggtgatatcggccattacaggggcctcttctgc

SEQ ID NO: 690755 - DNA, 585 bp, Homo sapiens
  misc_feature (39)..(39): n is a, c, g, or t
gctgcctccgtcgctgtaccgcagccgcctccccgaagnctcctgcaccccgcctcggctcccagcccgccgccgctgtctgttccattcgctgctattctcatgggtcacacgagacagatgaggagtttgatgctcgctgggtgacatatttcaacaagccagacattgatgcctgggaattgcgtaaagggatgaatacacttgttggctatgatctggttcctgagcccaaaatcattgatgctgcattgcgaagcatgtagacggttaaatgattttgctagtgctgttcgcatcttggaggtttgttaaggacaaagcaggacctcataaggaaatctatccctatgtcatccaggaacttagaccaactttaaatgaattgggaatctccactccagaggagctgggccttgacaaagtgtaaactcccttcgatgggcttcctaaggacttaactgctattgctacttgattgaaacagttgcctggaaatgttttatttgaacaaattttcctttgagtatcaaaccatgtaatagtaacttggactttaataaagggaaatgagtttgaactgaa

SEQ ID NO: 690756 - DNA, 236 bp, Homo sapiens
  misc_feature (224)..(224): n is a, c, g, or t
gaattccatatatggagcagtggggttattctctatgctttattatgtggaacccttccatttgatgatgaccatgtgccaactctttttaagaagatatgtggatgggatcttctatacccctcaatattcaataccttcgtgattacctttttgaaacatctaccgcaggcggataaactaaaaagaaccacactgaaagccacgcgggccgtgcattggcnaggatattatca

SEQ ID NO: 690757 - DNA, 325 bp, Homo sapiens
tcggggtgatgccatagcagcgagcaccgtgttgcctagggctgcggcatggactcgggctctgggaggtttacgtcgcccccacttgtgcgcccagatacagacgccctggacgcagcccgactagcagtctagaggcctgaggcttctgggtcctggtgacggggctggcatgaccccgggggtcgtccatgccagtccgcctcagtcgcagagggtccctcggaaagcgccctgtgagtgggccattcggaacattggacagaagcccaaagagccaaattgtcacaattgttgcacccaggatgggcatctgcatctccat

SEQ ID NO: 690758 - DNA, 190 bp, Homo sapiens
actgagtccagcttctcatgccattacatcttctgcctaagctactcattttaattataattgcagaggaagaagaatatttgagtagacatgtagtttccctttagagtcattttttaatcccgccaattgcaaagccaggccaggcacggtggctgacacctgtaatacccgccgcgtggagaagcaa

SEQ ID NO: 690759 - DNA, 406 bp, Homo sapiens
gcgcaagagcttcgttaatctcagtcacttctcctgataaggcaatatagagtcctatagcagctttcacactttccaaagcaccaacctcttctggtgtgtccaatttgtgtcccaacttcagggagcctccaataccaactatctccaaacgcttctgtgtgcaaaattgctgattcccactgttccaatgccattttctgttgttacccattggtgtttctctgtgaatttacgcaccgagaccagagcgggtccagtgcgcagcgtacggtcggcgcacacccacagctgacagggcctcggcgcacagggcgcggcgggtaacggcaccgcgcacagtgtacagaacagggcgcgcacgctgcgcacctctcgcagccacatgttcacaggtgtgcgggct

SEQ ID NO: 690760 - DNA, 308 bp, Homo sapiens
gaagctccacctcccaggtacacgccattctcctgcctctgctcccgagtagctgggatacaggtgcttgcacccacgccgggctatttagggtatatcaagtatagacgaggttccaccgtgatggccagtgtgctctcgaactcttgacctcaagtgatccgcccgcctttggcctcccaaagtacggggattgtaggcatgagccaccacacccggcctatctaatgtataactaagctaaatacctcatcagtggaatgagaagctcatgagacgctgtacttaatttttctttcaatcctcca

SEQ ID NO: 690761 - DNA, 245 bp, Homo sapiens
acgatggttggcaagacaaagagaagatattaaagtagccagagagaaaaataggtaatacaaagccggctagcaagacttctcaagcaactatcaaagcctagaaaacagtgcaagtaatatcctttttcttgtaaaagaaagaaaaacaataaaaaaaactgttattttcaagtttcaggggttacattgttaaaggtatgggcaagctttgttacattaggttcaactgtatttcactgagg

SEQ ID NO: 690762 - DNA, 373 bp, Homo sapiens
acgacgcgtggctcgacgcgctcacgcgcatcgtcgagaaggggcgcaagctccacaaggaggtcgtgctccacacgcacttcaaccacccgaaggagatcaccgccatcacgcagcgcgcgctcgctcggctgatggagcggggcatcttcacgcgcaatcagagcgtcttgcagcgtcgcgtgaacgacacgccggagatcatggggctgctcgtcaagcgcctgggccacgtcaacgtgcacccgtattacgtctacgtgcacgacctcgtgaagggcgtcgaggacctccgcaccacgctcgacacggcgctctacttggagaagcacgtgcgcggctcgacggcggggttcaacacgcccgtgttcgt

SEQ ID NO: 690763 - DNA, 165 bp, Homo sapiens
ggcacgagacggcgtggagaccatactgcgggatacacacatccactacagagtgccgggtctatagttgtagattttatcaacacatatttcctgaggtggaggatgtagtgatggtgaatgtaagatccattgctgaaatgggggcctatgacagcttgtggg

SEQ ID NO: 690764 - DNA, 809 bp, Homo sapiens
cacgtggggagcggtgcccgccggggcgcgggtcgtgctaccagggttacccgccctcgcgcgattggcccggtgtgccctgtggggggtccccagcggcacaggtgaagaagaatgtgtctcgcggtgaaaggaaaagagtgttctcccctctggtgaaaagccggcggagaagggccccccacttcgcgagagtctgggggacaacgacccccactggtgaataagcgctcgcctcgcgacacccccagatcgtcctggagacagcgtttcccgagacaccaacccgcgggggcgccgtacagctcgcgcaacttagacagccccgtgccgtgggggtctcatcaaaaccccgggccaaagaagggctgcgctgagacgagccacgagccaccccaagttgtgcccccacaggtctcaaagacgggcgtaaatgagacaaattgcgcccgagaacgggcgcccccccgccgtctctagaccaggggtggaaaaccacgctctttccaaagacatcgttggtcgttgcacagacatggcccactcagacatctcatgctctgaaaaagcggtgtatgaagacaaacgaggtactctgcatcctcctcacgatacagaagagagcaataattttgttggagcccacccctgtagtggttatccttgtttcgagtcggtgggccaattgttgatgatggatgtaaggttttcataaaaccacacgtatttgtttgtaatgggaacacacacctgcgccccaaatgtgttcccaaacttttggaccccctaaaaaaattgaaaccaaaaca

SEQ ID NO: 690765 - DNA, 275 bp, Homo sapiens
gcggatctgtcttattgctctggagagggccattcaggcgcatggtacgaaaggagaacacttgcatcgtgtaccacaaccccagcgtatgcttcaggtagtgtcgcgacatatgatttcatttgcgcaccatatgctgacctgactgctgaattcctccccaggctttctgtacacgatgggatgttctcctttctccatgcgctgaatggccctctccagaccactaatagcagatcagcggtccggggtatcctctaaagtcggtctgtacg

SEQ ID NO: 690766 - DNA, 110 bp, Homo sapiens
ggatcccccatgtcattggtgtttggcaatgttctacgagtcgcactggagtgtcgtgcggaaggtggagtagcacctaagacacgcacagtccgggatataaccccctg

SEQ ID NO: 690767 - DNA, 181 bp, Homo sapiens
  misc_feature (76)..(76): n is a, c, g, or t
  misc_feature (156)..(156): n is a, c, g, or t
catgtttgctcctgaagaagatttgaagtaaagaacctctcagcaagcacatacatcctggctgtctgcagttgtntggtttttgccggggaaggagatagaaggcagaagaggggaatggaacagggggaataggacaatctggttgaaactgtntctattcctttcttttttttttttt

SEQ ID NO: 690768 - DNA, 154 bp, Homo sapiens
tttaactgttgaactaacgaaccttttatagcggctgcaccatcgggatgtcctgatccaacatcggggtcgtaaaccctattgttgatatggactctggaataggatagcgctgttatccctatggtaacttgttctgctggacaagttattg

SEQ ID NO: 690769 - DNA, 858 bp, Homo sapiens
  misc_feature (7)..(7): n is a, c, g, or t
  misc_feature (63)..(63): n is a, c, g, or t
  misc_feature (101)..(101): n is a, c, g, or t
  misc_feature (106)..(106): n is a, c, g, or t
  misc_feature (112)..(112): n is a, c, g, or t
  misc_feature (137)..(137): n is a, c, g, or t
  misc_feature (164)..(164): n is a, c, g, or t
  misc_feature (196)..(196): n is a, c, g, or t
  misc_feature (307)..(307): n is a, c, g, or t
  misc_feature (347)..(349): n is a, c, g, or t
  misc_feature (353)..(354): n is a, c, g, or t
  misc_feature (391)..(391): n is a, c, g, or t
  misc_feature (401)..(401): n is a, c, g, or t
  misc_feature (415)..(415): n is a, c, g, or t
  misc_feature (431)..(431): n is a, c, g, or t
  misc_feature (439)..(439): n is a, c, g, or t
  misc_feature (459)..(459): n is a, c, g, or t
  misc_feature (608)..(608): n is a, c, g, or t
  misc_feature (622)..(622): n is a, c, g, or t
  misc_feature (653)..(653): n is a, c, g, or t
  misc_feature (672)..(672): n is a, c, g, or t
  misc_feature (688)..(688): n is a, c, g, or t
  misc_feature (751)..(751): n is a, c, g, or t
  misc_feature (758)..(758): n is a, c, g, or t
  misc_feature (766)..(766): n is a, c, g, or t
  misc_feature (835)..(835): n is a, c, g, or t
aaaatgngagaatttataagtagtggtaccactaggaaaaagaaactgattaccctgaaaaangtaaagaaatagggtggtaatagcgtgggggacagganggggncgttangcgacccagaaaaggagatgcgggnctattggggagaacttcgaaaggagantgccaaatcccctccgggggcagcctgacagngacataaaagaaccagttgagaaacaaaccgagagggatgagacaaatgccgagaatcagacagagggtcaatcacagggaccgccaaacccaacttcccaaatcacgggngcggagaggccaaggggggggggggggggggggcggaaannncganncggaaaccaccacattaaccaaaaccaaacagataanttttgaaagncccacctgtttggncaagagagcgtagagnggcgcgtncagggggagcagactgctgnaacggcgcgaatggcactgggagcgattcaagaatcattgatgattttttcctagagttttaaaaagtaaagtcacttgactcagttgctccaaaaagtccagtcagaggtttaaggctagtattgaaggataagatatcagctgatantaaatcatactatnttgaaaatactatagtttaggattgcatgcngtggaaaagatgattagcngccccccgaaaaccantcctcccttaggcacacagctagactgcatttcccagacagactcgcttacagttaggtgaanatgagcncaagttcnatactgaaatgtgagcagaaggtctgccattactgggctgggggtcttaaaagagtagccatgcctccnccatgttctttttctctttctgc

SEQ ID NO: 690770 - DNA, 662 bp, Homo sapiens
  misc_feature (470)..(470): n is a, c, g, or t
  misc_feature (492)..(492): n is a, c, g, or t
  misc_feature (496)..(496): n is a, c, g, or t
  misc_feature (503)..(503): n is a, c, g, or t
  misc_feature (556)..(556): n is a, c, g, or t
  misc_feature (621)..(621): n is a, c, g, or t
  misc_feature (640)..(640): n is a, c, g, or t
aatatatccggcctatcctctggtggccattcagaccagcccgaatctcaacctacctgcacatgtggagtgcacctggcgtcctgccctccagatgaagaaattctggccaacccgtgttctactttctgcacgtcagaaatcaattcatgtcaagctcgagtcctgctcttgctggtggcccagccatctgattttcttctacatcatctacctggtggagggcagtcagtcataaacaagccagacctttgtggtgctctacctgctggccaggcctgatccaggtgacaatcctgctgtacctggcagaagtgatggttcggctgacttggcaccagccctggatcctgacaaccactgcatccctaccttacagggctgggggacctgctcggtactgcctcctgcactctgtttttactgactgctactgaagagcaaggcaagctgggtggatctaaaactgnatctgacctcctactggccccntggnccatttntcattagaattcctctacatcagtggatacagaattagttctcccttgcaggncttggatggttacccctgctctgagtacctttgtgagctgtaaggagctctcacacacctcggtntggggtgatcctgaacctnaataaaccctgaataaaacatg

SEQ ID NO: 690771 - DNA, 574 bp, Homo sapiens
actagttctagatcgcgagcggccgccctttttttttttctgagacaaattcttgctctgtcgcccagggttggagtgcaagggcacgatcctatcacactccagcctcgtgcctccggggttcaagcgattctcctgcctcggcctcctgactagctgggattacaggcacacgtcaccacaccggggtaattttggtatttttagtagagacagggtttcaccacgttgggcaggctggtcttgaactcctgaccttgtgatctgcctgccacggcctcccaaagtgctgggattgaaggtgtgaaccactgtgcccagccaagggttccatttggatggcattatcaagagattgggggcttttaaaaaatggatagtgaccatttaagtgggtgtgaggggattggtttctcatggtgattttaatgcatttctctacaaattagtaatttggtgtgtcctttcaaaggtttgtaataggggtgttcatgaaaatttatttgaattatttatttctaaataaagttatttacctttatggtcccgttttaaaaacaaacaaaaaaaaacg

SEQ ID NO: 690772 - DNA, 174 bp, Homo sapiens
acgtaagcaaggaaagatacggtagtatctagagcaggccccgattaggtactgcctaggccctagctaggtagcccctaagtagacaaagggtagaaaagtaggtcccaagcggccctagctaggtcccacgtaggagctcgctggtagcccccaggagaccagtaggtagag

SEQ ID NO: 690773 - DNA, 350 bp, Homo sapiens
aaatgggcttttggggcccccccgtttttaaatgggtttttggggtttaaaaaattttttttcccggggccgcccccgtttaactgaaattttttttccccctgggcccttggccccttaaaaaaaaccccctggggggtataatggggccaaattttccaaataaaggcctgttttggggtggggggtgtccttaggctgtgtttaagtgacttttttttgtggggtattggggatccctttaaatgggtttgttcccccctttcccttaatgggccttttaatgcccccgatttcctttccgggggctttccctgaatgaataaaagtccatgcttttgggtttttta

SEQ ID NO: 690774 - DNA, 768 bp, Homo sapiens
ggtgcttgtgtgggtcccaatgctgggccccagcccaccctcctgtcttcccagggtagcccgcctggcagtcctagctgctcagggcacgttgggcccaatccctgtctggtagaagggccctggctgtttcttatgcacttggcctgctgcggctgggccttgcttggggactggggggccgccgagtctagccgtctctccgcagttatacctcagtagagagccccattcgcgccattgtggatacgacggagagctcctcaggtggcccatggtccctccacatgcttggctgctctagattctggtgccttgtccgaggcttgcactcccctcgacgagcgtcgacatcacttgatgacgctcctatggctctcgcaggacgtccagtcgcttccagagccctcatggttgcacccatagatcacagttgcacttgccgattggtcggagccttgcataactcgccaatgtgcgccctgtagggcactcctatgtacgctcgaggttgggtggatggcctggagcgtctccaagcccgagctagtaggctcgggaaaacttgcacgaccgtgtcgctccatgtgtggcgtcctaggtgggcccctcctacgcattgtgtgaagccctcgacactggggtgtgtccgccgtgctcctgtcatctcgtcccatcggagcctccagcctccctttgcggcccagtggacacctagtcaggcacttgtgctgaccctccttgttgcacccagccctggtctcaaga

SEQ ID NO: 690775 - DNA, 657 bp, Homo sapiens
  misc_feature (36)..(36): n is a, c, g, or t
  misc_feature (75)..(75): n is a, c, g, or t
  misc_feature (104)..(104): n is a, c, g, or t
  misc_feature (111)..(111): n is a, c, g, or t
  misc_feature (116)..(116): n is a, c, g, or t
  misc_feature (123)..(123): n is a, c, g, or t
  misc_feature (125)..(125): n is a, c, g, or t
  misc_feature (130)..(130): n is a, c, g, or t
  misc_feature (143)..(143): n is a, c, g, or t
  misc_feature (149)..(150): n is a, c, g, or t
  misc_feature (155)..(155): n is a, c, g, or t
  misc_feature (157)..(157): n is a, c, g, or t
  misc_feature (159)..(159): n is a, c, g, or t
  misc_feature (170)..(170): n is a, c, g, or t
  misc_feature (188)..(188): n is a, c, g, or t
  misc_feature (202)..(202): n is a, c, g, or t
  misc_feature (207)..(207): n is a, c, g, or t
  misc_feature (209)..(209): n is a, c, g, or t
  misc_feature (211)..(211): n is a, c, g, or t
  misc_feature (218)..(219): n is a, c, g, or t
  misc_feature (221)..(221): n is a, c, g, or t
  misc_feature (223)..(223): n is a, c, g, or t
  misc_feature (231)..(231): n is a, c, g, or t
  misc_feature (260)..(261): n is a, c, g, or t
  misc_feature (274)..(274): n is a, c, g, or t
  misc_feature (277)..(277): n is a, c, g, or t
  misc_feature (295)..(295): n is a, c, g, or t
  misc_feature (300)..(300): n is a, c, g, or t
  misc_feature (317)..(317): n is a, c, g, or t
  misc_feature (365)..(365): n is a, c, g, or t
  misc_feature (472)..(472): n is a, c, g, or t
  misc_feature (489)..(489): n is a, c, g, or t
aaattttatttttagttgcacaaatttgggccaaangaaacattgccttgaggaagatatgattggaaaatcaanattgtagaagaataaatacttttttactntccaaanacatntttatantnctctntaaattttccttncctttnnagtcncngncaaaatccttnaagaaaataaaaatttangaaaaccaaccagnaattntnanttaagcnnananttaaagtnaatacccgtttcacatgctttcaagaatnngccaattactaanaancagataatggtgtttttnaaaancctaattgaagtatatncaaccaaatactttaatgtataaaataaatattatacaatatacttgnatagcagtttctgcttcacatttgattttttcaaatttaatatttatattagagatctatatatgtataaatatgtattttgtcaaatttgttacttaaatatatanagaccagttttctctgnaagtttgtttaaatgacagaagcgtatatgaattcaagaaaatttaagctgcaaaaatgtatttgctataaaatgagaagtctcactgatagaggttctttattgctcattttttaaaaaatggactcttgaaatctgttaaaataaaattgtacatttggagagttt

SEQ ID NO: 690776 - DNA, 1143 bp, Homo sapiens
gggaagtgccagtgccacggaggcgcgctacaacaagctgaagtgaaaagcttacagtgagctcgctccatgtgcacgctggagctgctcagaaataactgctggacagcatgccaaggtcagctgacggtgacgcacgtcaaagccatgcgagtgacggctgcgcgcgggctgaagtgagcatgctggccttccttggtgtgcatcaggtgcacatgcggcgcaagtcgtgaggttgacacggctagcatggatgaacgatgtctgacacacgccttggcagcaacgtcttcacaatgagcgtgcaggcttggacgcgtcctaatgtgctccgttgaggaagcctttggtcccctgcggcctccaagggaatgtgcccctttgtatgttccctctctactacgcatgttcagagactcctcgctcctccggcagtaccgtcgtcgcacgtcctcctagcgcgtgttgagcagtcacgcgggcttggagtgcttgccgtcgacgggatagtgtgaccttgcgctccctcgaccgcttgcgagtgccttagctcgcctgcgccaggcgcgccgtgaggcggcgagtgtagcgccttggcgcttggtcctgtcgctcgccagggagggccctttgggctttgcgcgctgactgcacgcccgaccggggcccgtcgcgggccttgcgtggcccatgcgtgtcaatgcccatgagcacgcagcgtgccagttatccgcccatagggtaggtccaagtgcgcccggaacggtttggccacgtggtgccctgtggtccttggctaacgaactcaagtggaagttcttcttccaccggtaggccagtaggtgggccttggcgtggccactgcacgtcgtccttgtactttggcaccgtcatgtcaagtgcttccggcaaagtaagagtttgggcgcatgggtcacgtgcctgtcgttggaccaggaagggtccaccgtaggggtgctatttgcattgccaggggaattgcccagtttgtagtatccaaaacgactgtgaacagaaaccatccccttgccacaccatggcgagcaatgtaactcaagatgttcccccccagaaatctaaccctttgggtattgacccaagctgggtcacccagagcgaagg

SEQ ID NO: 690777 - DNA, 1317 bp, Homo sapiens
  misc_feature (294)..(294): n is a, c, g, or t
  misc_feature (558)..(558): n is a, c, g, or t
agcggaggtgcgtgcccctgtccggcagcgcgaggagaccccgtcgcagtgctcgcagacgccctcggtggaggaagcatggaggtcatcgatccaggattgtgacagatattctaacaatcggctgcgagtacgaagactatcttcagctaatgccagactgatcttaagtgtgttggttggtgggcggatggtgcgtgattggtaaaatcaatgttcatccgtagatatccgtacgacagacaatactagaattattccatacagagcaattcactggtatccagacatgtntgtcttgaacaactaaatggcgagtcgaacagattcatcgactctgtgtcgcgacgatacccaatagtacctacatctgggcacgtttctttctcgactaccgttgccacgtgggcaaacgagcgcgagtgtagtagaccgacggagtttaacgggacacgggcatgggaagttttaactgcgcaagctagagatcacgagattgttactgtgtaccttaagggttcgttgttatgatgtctagcagagattgtgggtcctacntgcgtcaattacgtctccaattttttggaaaacaatccgctttgaagagcgcggaaaacaacacggtccgcggggattggcgcattggaacggtatttagagcggtccaagccaccaaacttgtagtgtttcaccgcaaatgagaaggaactcttctcagcttttgtccgtttggtctattatagtgatctgggggcggaactcttcaaatacaatgttctgggaatctctgttcaattggaaaggaaagttggaacccctcgcctgttctcgatcaccttctaatgttgtcggaatgggaaaaaacctgttcttggctccattaggtggaaaagtcaaaagtaagcctaatgggaaaatgcccgccgttaatttcaaaccgatacccgaagggaaacggaaccggttgggcgtttggaaccaacagaaagggcctatggggggggcccacatggagtatggatagggccgtttagtataaagcggggcctctgtagtcccaacaggttaacttgggttgcgcaaaggcgtgggatattccagttgagctaatccgcttttaagccaagcaaatggaacacgacggtggtccccttctaaaaactatggacaagacgttggtgtgaacgttttttggcaaaacagcgaaataatgcgcccacaacttacggtgtagagggggctcttgggcgcccccatatgtggggaaagagcccccttccccttagtgaaaaagcgtccggcaaccaaggggagaat

SEQ ID NO: 690778 - DNA, 594 bp, Homo sapiens
  misc_feature (80)..(80): n is a, c, g, or t
  misc_feature (86)..(87): n is a, c, g, or t
  misc_feature (92)..(92): n is a, c, g, or t
  misc_feature (94)..(94): n is a, c, g, or t
  misc_feature (96)..(96): n is a, c, g, or t
  misc_feature (107)..(107): n is a, c, g, or t
  misc_feature (125)..(125): n is a, c, g, or t
  misc_feature (139)..(139): n is a, c, g, or t
  misc_feature (144)..(144): n is a, c, g, or t
  misc_feature (146)..(146): n is a, c, g, or t
  misc_feature (148)..(148): n is a, c, g, or t
  misc_feature (155)..(156): n is a, c, g, or t
  misc_feature (158)..(158): n is a, c, g, or t
  misc_feature (160)..(160): n is a, c, g, or t
  misc_feature (168)..(168): n is a, c, g, or t
  misc_feature (197)..(198): n is a, c, g, or t
  misc_feature (211)..(211): n is a, c, g, or t
  misc_feature (214)..(214): n is a, c, g, or t
  misc_feature (232)..(232): n is a, c, g, or t
  misc_feature (237)..(237): n is a, c, g, or t
  misc_feature (254)..(254): n is a, c, g, or t
  misc_feature (302)..(302): n is a, c, g, or t
  misc_feature (409)..(409): n is a, c, g, or t
  misc_feature (426)..(426): n is a, c, g, or t
tggaaaaacaagagtggtaaaaaataaatctggtttaccggtcaaaaaaaagttaaaagggccccggaaaaggtcccttncctttnnagtcncngncaaaatccttnaagaaaataaaaatttangaaaaccaaccagnaattntnanttaagcnnananttaaagtnaatacccgtttcacatgctttcaagaatnngccaattactaanaancagataatggtgtttttnaaaancctaattgaagtatatncaaccaaatactttaatgtataaaataaatattatacaatatacttgnatagcagtttctgcttcacatttgattttttcaaatttaatatttatattagagatctatatatgtataaatatgtattttgtcaaatttgttacttaaatatatanagaccagttttctctgnaagtttgtttaaatgacagaagcgtatatgaattcaagaaaatttaagctgcaaaaatgtatttgctataaaatgagaagtctcactgatagaggttctttattgctcattttttaaaaaatggactcttgaaatctgttaaaataaaattgtacatttggagagttt

SEQ ID NO: 690779 - DNA, 255 bp, Homo sapiens
  misc_feature (2)..(2): n is a, c, g, or t
  misc_feature (17)..(17): n is a, c, g, or t
  misc_feature (34)..(34): n is a, c, g, or t
  misc_feature (36)..(36): n is a, c, g, or t
  misc_feature (48)..(48): n is a, c, g, or t
  misc_feature (56)..(56): n is a, c, g, or t
  misc_feature (60)..(63): n is a, c, g, or t
  misc_feature (94)..(94): n is a, c, g, or t
  misc_feature (96)..(96): n is a, c, g, or t
  misc_feature (127)..(127): n is a, c, g, or t
  misc_feature (129)..(129): n is a, c, g, or t
  misc_feature (133)..(133): n is a, c, g, or t
  misc_feature (176)..(176): n is a, c, g, or t
  misc_feature (178)..(178): n is a, c, g, or t
  misc_feature (221)..(221): n is a, c, g, or t
  misc_feature (226)..(226): n is a, c, g, or t
  misc_feature (243)..(243): n is a, c, g, or t
  misc_feature (246)..(246): n is a, c, g, or t
tnttgatataataaganctagtatcatataacananaactagaaaganggtttaantctnnnnctaatattctacaagcctcatggggaaaatntnttatgaaggattcaaatacattagataaaantnagtntcaataatttaactttgtacaaattatagtctgagatcttctnanttttcctaagacaaaggagtgtattatccagcaatttattgtnttgtnttgttataaaataaatnttntattaatgt

SEQ ID NO: 690780 - DNA, 414 bp, Homo sapiens
  misc_feature (9)..(9): n is a, c, g, or t
  misc_feature (14)..(14): n is a, c, g, or t
  misc_feature (16)..(16): n is a, c, g, or t
  misc_feature (23)..(23): n is a, c, g, or t
  misc_feature (53)..(53): n is a, c, g, or t
  misc_feature (59)..(59): n is a, c, g, or t
  misc_feature (61)..(61): n is a, c, g, or t
  misc_feature (69)..(72): n is a, c, g, or t
  misc_feature (74)..(74): n is a, c, g, or t
  misc_feature (81)..(81): n is a, c, g, or t
  misc_feature (84)..(84): n is a, c, g, or t
  misc_feature (86)..(86): n is a, c, g, or t
  misc_feature (95)..(95): n is a, c, g, or t
  misc_feature (98)..(98): n is a, c, g, or t
  misc_feature (100)..(100): n is a, c, g, or t
  misc_feature (121)..(121): n is a, c, g, or t
  misc_feature (232)..(232): n is a, c, g, or t
  misc_feature (238)..(238): n is a, c, g, or t
  misc_feature (241)..(242): n is a, c, g, or t
gatttgaanaattngngcaatanaccgaatgcactacatatatatatgctacncacacngnactaacgnnnngncaaatcnagnanactcctaanctncnataaaaatacaatatacttgnatagcagtttctgcttcacatttgattttttcaaatttaatatttatattagagatctatatatgtataaatatgtattttgtcaaatttgttacttaaatatttagagancagttntcnnctgggggtttgtttaaatgacagaagcgtatatgaattcaagaaaatttaagctgcaaaaatgtatttgctataaaatgagaagtctcactgatagaggttctttattgctcattttttaaaaaatggactcttgaaatctgttaaaataaaattgtacatttggagagttt

SEQ ID NO: 690781 - DNA, 205 bp, Homo sapiens
attgagtacttaaataatcatctcttccataagcattatcgggtctcagtctgcaccagacacagtggaggcgcaggtggaggaaccacgaaggctctacaggttagaagatgcagttcctgcctcaggaagccaaatcgctcgtgcttcagccgcagatgtctgtcagcccctactgtgtgacggtaacaccacagctacggga

SEQ ID NO: 690782 - DNA, 332 bp, Homo sapiens
gaaagtttccaagctaggtctggccgttgggatctcagcagtgggcaggaggtgcctgatttcgggagtcctacccgagcctgttccagagttggagggctctagcactgttgtcagcctggtctcccatcccgagcccaccgttcctgtccaacccacaatcgactggtctttaaatgacagaagcgtatatgaattcaagaaaatttaagctgcaaaaatgtatttgctataaaatgagaagtctcactgatagaggttctttattgctcattttttaaaaaatggactcttgaaatctgttaaaataaaattgtacatttggagagttt

SEQ ID NO: 690783 - DNA, 682 bp, Homo sapiens
  misc_feature (36)..(36): n is a, c, g, or t
  misc_feature (75)..(75): n is a, c, g, or t
  misc_feature (104)..(104): n is a, c, g, or t
  misc_feature (111)..(111): n is a, c, g, or t
  misc_feature (116)..(116): n is a, c, g, or t
  misc_feature (123)..(123): n is a, c, g, or t
  misc_feature (125)..(125): n is a, c, g, or t
  misc_feature (130)..(130): n is a, c, g, or t
  misc_feature (143)..(143): n is a, c, g, or t
  misc_feature (149)..(150): n is a, c, g, or t
  misc_feature (155)..(155): n is a, c, g, or t
  misc_feature (157)..(157): n is a, c, g, or t
  misc_feature (159)..(159): n is a, c, g, or t
  misc_feature (170)..(170): n is a, c, g, or t
  misc_feature (188)..(188): n is a, c, g, or t
  misc_feature (202)..(202): n is a, c, g, or t
  misc_feature (207)..(207): n is a, c, g, or t
  misc_feature (209)..(209): n is a, c, g, or t
  misc_feature (211)..(211): n is a, c, g, or t
  misc_feature (218)..(219): n is a, c, g, or t
  misc_feature (221)..(221): n is a, c, g, or t
  misc_feature (223)..(223): n is a, c, g, or t
  misc_feature (231)..(231): n is a, c, g, or t
  misc_feature (260)..(261): n is a, c, g, or t
  misc_feature (274)..(274): n is a, c, g, or t
  misc_feature (277)..(277): n is a, c, g, or t
  misc_feature (295)..(295): n is a, c, g, or t
  misc_feature (300)..(300): n is a, c, g, or t
  misc_feature (317)..(317): n is a, c, g, or t
  misc_feature (365)..(365): n is a, c, g, or t
aaattttatttttagttgcacaaatttgggccaaangaaacattgccttgaggaagatatgattggaaaatcaanattgtagaagaataaatacttttttactntccaaanacatntttatantnctctntaaattttccttncctttnnagtcncngncaaaatccttnaagaaaataaaaatttangaaaaccaaccagnaattntnanttaagcnnananttaaagtnaatacccgtttcacatgctttcaagaatnngccaattactaanaancagataatggtgtttttnaaaancctaattgaagtatatncaaccaaatactttaatgtataaaataaatattatacaatatacttgnatagcagtttctgcttcacatttgattttttcaaatttaatatttatattagagatctatatatgtataaatatgtattttgtcaaatttgttacttaaattcatatacgcttctgtcatttaaacaaacttccagagaaaactggtctctatatatttaaatgacagaagcgtatatgaattcaagaaaatttaagctgcaaaaatgtatttgctataaaatgagaagtctcactgatagaggttctttattgctcattttttaaaaaatggactcttgaaatctgttaaaataaaattgtacatttggagagttt

SEQ ID NO: 690784 - DNA, 124 bp, Homo sapiens
gaagtgaggagaagcaggaagcatgggaaaataggaaatgaggagaagcaggatgcatggggaaacaggaagtgaggagaagcaggacagcactgatggcttctcatacattctctgtcgacgc

SEQ ID NO: 690785 - DNA, 211 bp, Homo sapiens
gagacgcagcgaggttctgttcgacccagcggccgatgtgaaatctcctgcagcggatcctcaatagccactgcttcgcagagagaggaaggggataacccagcgccaccatccacggccagccgaaccatgccgttctaagcttgcacagccgcgcggcacagcagttagagttccagggtctcctccacttcttagtaacccggtccgg

SEQ ID NO: 690786 - DNA, 433 bp, Homo sapiens
taaacccaacaaaattcactgttctcttttggatttatttagcctgatgtatttttaattcaatttttatggtgatgggcaaatcattcttggtaaatgtaaatcaaacatgattgatttaaaacttcatggaatttgtagaaaattatggacatttttggtgagaaagaacaatagtcaaaactcacatggatagagtgtgtttgttttttgccaaaaatgccccagactttttcccaaacctcaaaaacgtcttgggaaaattgtaaaaggttggtaaccggaacctccttagggtaattttggccgaccgattttgcctccaggaagggcccaccggggattttttcctgggggaaatggccaaaattgttaacaaaatggttatatggaacatgcctattaaacgaattttactatcttccctaaaaaa

SEQ ID NO: 690787 - DNA, 316 bp, Homo sapiens
ctatgttcccccctatacagaagtgtttccatgtccacctatgggagactcacgacagccattatttctcaccccttacattgaagctggtgaagatccaaaaaggatgagaattgagtttggtcggtcctttcccaggactgaacatgaagagttatgccggcttcctcactgtgaataagacttacaacagcaatctcttcttctggttcttcccagctcagatacagcacgaagatgccccagtagttctctggctacaggatgggccgggatgttcatccatgtatggactctttgtggaacatgggcctta

SEQ ID NO: 690788 - DNA, 787 bp, Homo sapiens
  misc_feature (13)..(13): n is a, c, g, or t
  misc_feature (54)..(54): n is a, c, g, or t
  misc_feature (127)..(127): n is a, c, g, or t
  misc_feature (137)..(137): n is a, c, g, or t
  misc_feature (225)..(225): n is a, c, g, or t
  misc_feature (477)..(477): n is a, c, g, or t
gtgcgcccccccnacctgcccctcttccgcttccccgcgcccttttttttttcncatggttccgaagaggcattccatggtcagcaccgagcccggcgacatcacgacacgagtccgaggacggggngtgccagacncccacagacagggtagtaaacgtaccgccaggaggaaccgcgagaggagaggttgcgcgtggcgtgccgtgcgccccccgcccggcgnaaccgaccacacgacgacgagcgcacctcagtgtgagagaaggcaaggtgtacgagtaagacggaaccacgcgtttgcctgattctcaccaccccccaccgtcccttctatctgcttcctctcgtgcccgccgccagcgcccccggccgcccgcgcgccctccccccactccctcccacccacaccaccctcacacacggcgacacgtccggctcccgcgcattgatatagttctgagaggtgcgacgactnctcccattctttcatacttgtcccggctagtggacagtcgaactacctacgcctagcgcgccgcattgtctttcccgtctagcgagggagtggcctcgccctgtcccctccacggagactccgctgcttccctccccggccgcccccgtcctcctgcgtacccgtcgctcactgctccacacatcctcatcacagtcgcgtctcatactacctcaagccagaatctaccattcatcacaacaccctcgcgtcaccaccacactcgaccaatacgcgtacagcccagatccgtcaagtcaactactacacg

SEQ ID NO: 690789 - DNA, 86 bp, Homo sapiens
tttggggggttttttttttcttccctttgggtcccccctggggcccgtttttttccaagggggaccccttaaggggtttcccctta

SEQ ID NO: 690790 - DNA, 311 bp, Homo sapiens
ttatttcccccggggggaatttgggggtaaaaaccccccccccccggggggggccccccccttgggggggggccccggggggggggccctttttttttttctttccggggcggaccccccccggggggtacccccccccggggggggggggctttttttttttttccgggtcccccttccccccaggggggcccaggattttttggggcgccccttttttttttttttttttttttgggggcccggggcccccccccccccccctttgggggttttttttttggggggtttagcccccctttttcccccca

SEQ ID NO: 690791 - DNA, 106 bp, Homo sapiens
tgcaccttagatcgctctgacctgtagatcgctccaccaactaagaatcaggattttatttcttcttggctaatgaagcttagttgggctggatatgaaattctgg

SEQ ID NO: 690792 - DNA, 109 bp, Homo sapiens
ggctcagattggaaaagtggacccagtggagcatgtgcttgagcttcatctgaactggtatgccagtaaaactgtgagcatgtcccacccatctccccgaatggtgtgt

SEQ ID NO: 690793 - DNA, 411 bp, Homo sapiens
  misc_feature (43)..(43): n is a, c, g, or t
  misc_feature (97)..(97): n is a, c, g, or t
  misc_feature (135)..(135): n is a, c, g, or t
  misc_feature (148)..(148): n is a, c, g, or t
  misc_feature (162)..(162): n is a, c, g, or t
  misc_feature (185)..(185): n is a, c, g, or t
  misc_feature (198)..(198): n is a, c, g, or t
  misc_feature (230)..(230): n is a, c, g, or t
  misc_feature (263)..(263): n is a, c, g, or t
  misc_feature (294)..(294): n is a, c, g, or t
  misc_feature (299)..(299): n is a, c, g, or t
  misc_feature (304)..(304): n is a, c, g, or t
  misc_feature (306)..(306): n is a, c, g, or t
  misc_feature (357)..(357): n is a, c, g, or t
  misc_feature (385)..(385): n is a, c, g, or t
gacttgcttcaagagcatgggaagattggcaatttatccaagnaccatttttgatccaaccaccaatatttcttaggacttgtaaatattattgagnaaaggaaacagaggatgttccagatgaccttgatggtncccccatcgaggnagagcttgatggtncacctctgggagatgtagatggnattcctattgatnctactcccatcgatgatcttgatggagtcccnaaaaaaagtcttgatgatgatcttgatggagtncctttggattcaactggagactcccaaaagnatgancctananttaaagtttccccatccaaatgggaaactgtggatgaatctgaattggaancacaggctgttacaacttctaaatgggnattatttgaccagcatggagaatccc

SEQ ID NO: 690794 - DNA, 530 bp, Homo sapiens
ggagtcaaagagagagacaaagtcaaagagagaaagaaagagagaaagagagagagatacaaagttaagaaaaaaaagccatctataccaattctaatttagacaaaacaaggtcttattaatagcaaaggataattaaaatcccaaacttacaaggttttctttttattattattattattatactttaagttttagggtacatgtgcacaacatgcattttttttaaattttttttaaaggttttcaactaaagtttgctaaaagttaacagtgtaacatgtatatagtaacttatattcttgtggcctagtccacaagacacaaaaaaggttcgctttgggaaagaatggttatcatcttcgaaaaaaaaaagggaaaaaagggggggcggaatttatataaaaagagtattatatggtaaattcttgtcctgaaaccaaattaactggttgtttaaagaaataaatatttgtaataagtcagaaagttgaggcatatcgaagaattttctgcgaagtcacgaaaga

SEQ ID NO: 690795 - DNA, 124 bp, Homo sapiens
tctggatgcaagtgtcctatctgcgaatgagaaattcacaagacgcacaggaattttcttgaagatagagaaagtgatggctttataagatgcctctctcttaactctgggtaggattttaact

SEQ ID NO: 690796 - DNA, 345 bp, Homo sapiens
gggctgcgctggtgtgagagggaggtagtagcctgatcatataatgtcttggtggttatagcaggggattgctttggaggagagatgatggaatatttttctttttaaattattgtagtttagctctttgaaggctcacaccccacaggaactataataggctgcatctgaccttcagtagattaatagaaacatcccctgttaagcccaggaggagcgtgccctcagaggcattatttttctgctattgaaatactctggtcattactgggaaagcccacagcactagctgaggttgtgtggtctaatttatatgttgtgcaagattttgcaattggagatacg

SEQ ID NO: 690797 - DNA, 394 bp, Homo sapiens
  misc_feature (15)..(15): n is a, c, g, or t
  misc_feature (43)..(43): n is a, c, g, or t
  misc_feature (53)..(53): n is a, c, g, or t
  misc_feature (191)..(191): n is a, c, g, or t
  misc_feature (211)..(211): n is a, c, g, or t
  misc_feature (252)..(252): n is a, c, g, or t
  misc_feature (316)..(316): n is a, c, g, or t
ttaaaaaactaacanccattaacaatagtttaaaacacccagngtggaagatncttacccgccacatcccagattgggaaaagccggtatgttggggtgccacaaacatggggtaattgttaatgaaggaccatgtggcccacccggaattaaaatagttaaggagggccttttgaaaatgatggtgaagnccctcagtgtgcctgaagtnataagacactcgccccaagaaagaggagttttttcttaggnctgtgacctgatttgacagaaaacatattcctgggttttggaagaaagaaagaatttgttctcnggttattattattatttagatatgagatgctttgatgttatgcaatttttctctgtactacttttttgcaagaagtgg

SEQ ID NO: 690798 - DNA, 216 bp, Homo sapiens
cctatgaaaacttcccatcatcgtgttcttctcctcttcatcttatacgtattctagtcctctcttatagtggttccaagggcttcctttatgttcctcagtgggttccagacccattcgtggctatgtcttggatggggaagatgctccttccaaatatgtgcgtgggcaagtcgttcacttccttcaagtctgtgcttaagtgtcactatgagc

SEQ ID NO: 690799 - DNA, 352 bp, Homo sapiens
atagtgacacacatgtctgaaaaagccacaatgaaacccagtctttgtatgctaacctgaagttaatttagagcaagcataaaaaaatattgtgtttttttatacttttttgggtgtgtatgtgtataagtgagatgtgtgtgtttatgttcatatcggtgtgtgtaggcatatgtgcacatgtgtgtgtgcgtgtgcgtgtgcgtgtgtgtgtgtgtgtatataacagcaacatcttaaaatgaaacaaaaatattgcatagtgagagaatgactaagcagccactaaagtactgcttttagagaatatcaaatgacatggaaaactcaaaaatgtacaaaatgtcgacgc

SEQ ID NO: 690800 - DNA, 405 bp, Homo sapiens
  misc_feature (87)..(87): n is a, c, g, or t
  misc_feature (147)..(147): n is a, c, g, or t
  misc_feature (185)..(185): n is a, c, g, or t
  misc_feature (187)..(187): n is a, c, g, or t
  misc_feature (201)..(201): n is a, c, g, or t
  misc_feature (230)..(230): n is a, c, g, or t
  misc_feature (259)..(259): n is a, c, g, or t
  misc_feature (280)..(280): n is a, c, g, or t
  misc_feature (283)..(283): n is a, c, g, or t
  misc_feature (291)..(291): n is a, c, g, or t
  misc_feature (322)..(322): n is a, c, g, or t
ggtaaccaccaatctactgtctatctttaagcatctgctttttgttgttgttgttttgttttttcttgagacggagtctcactgtgncacccaggctgaagtgcaatggtgcaacctcacctgactgcaacctctgcctcccaggtncaaacgattctcctgggctcaagtgatccaccttcttngncctttcaaagtgtngggattacaggtttgagccaccatgcctngctgggagatttttaattaaggctttgantccattatttgttactggttngtngaggtttncttttctttcctggttcaattttggtaggtngtgtgtccatgaatttatccatttttctgggtttttcaaattggttagctggtatagtagtggatagtagtctctaatgagtc

SEQ ID NO: 690801 - DNA, 511 bp, Homo sapiens
  misc_feature (57)..(57): n is a, c, g, or t
  misc_feature (71)..(71): n is a, c, g, or t
  misc_feature (96)..(96): n is a, c, g, or t
  misc_feature (187)..(187): n is a, c, g, or t
  misc_feature (219)..(219): n is a, c, g, or t
  misc_feature (252)..(252): n is a, c, g, or t
ctacagaacaacaaaggcaatttctcataaatttcctcctttatgcctggcttaaantcataagttaaaanggcaaagactgacaaacttagtttnccagaatcttcctcacatacaccctgttccttattggtcccatcatatggcaatataaaacggagctgtctgtagcagtggttgtgacagnccatggcccaaacaaaacccataaggcacttnatcttaaagtccatatcacacagagaaatggcntcaaggatgtcagaaagtcatctgatcacttctttgtccctgattagctaattggcactacacataagccaaaaacaaaaacaagaaaaaacaaaaaaaacaaaaaacaaaacccaccagaagtctaacccagtgacagtgggcactgtgcatccttggttatgaagcaggagggtggaagctcacaatcctagggctttcctctccctagaaggcacctggttctggaaccatgggagttcttcaggtaaggtgatgc

SEQ ID NO: 690802 - DNA, 284 bp, Homo sapiens
tgtttaagctgtagtctagcattatcacctggaggtcaggatatccagaacatcctggtcatacatggtgaaacccggtcactactaaaaacacataaaattagctcgaggtgtgtggctcgtgcctgtaatcccagctactcgggaggctgaggcaggacaattgcttgaatccaggaggcagaggttgcagtgagccaagattgcgccactgcactccagcctgggtaacagagtgatgactccatctcaaaaaacaacaacaattaacgaccgtatccgca

SEQ ID NO: 690803 - DNA, 395 bp, Homo sapiens
ctccagagtctggagaagggggtgcagcagctgatccattcactcttttctctcatcctcttcttcagacgtgcttctatgggcgcgttaagcactctttggatatcatcgaccctcgcacactctttgtcactgagggaaggcatgggtgtgacctcagtggcccttgggcctttgtaccttgtgatttcagaatatgtgggtcattaagggagggtgaggatgggggagtgaagagaatatgggaggtgagaggtgagaggaaagtaacttctctctacctggagctggctggttatggatctgtgtggctgtctgtatctgagttgatacattgtgctgtatgctctttacattatatcatttggatctcacaacaaccctctgatagattt

SEQ ID NO: 690804 - DNA, 157 bp, Homo sapiens
  misc_feature (136)..(136): n is a, c, g, or t
tcctgagctcatggcgatctacactacggaaaacggcattgcgaaaagagctctctcgctgagacctgatagcactgcagtctggacccccagcgatcagacatgatttataccctagaagatgtcctccctgtanctgtgtatatatctggggcta

SEQ ID NO: 690805 - DNA, 317 bp, Homo sapiens
ttttgatgagcctagggggttttttttttgaaagtccgctgaaggatggttagaccgcccaacgaagactgcttaatgccctggcccccccccttagaatgtggtttttgttcccttttatttttctgggggcttttggttttgtttttgttttgggagattttccatttgggtatttgggggagtgaacctcgttgttttgctggagggaagattttgatggggtttttttcccccaaaattggctttgatttttaaatttgggggttataaaaaagagtttaaaaaaaatagggttgcttccatttaaatttcca

SEQ ID NO: 690806 - DNA, 741 bp, Homo sapiens
ctcccgtgaccccttccctcacccctccctaagctcggtgcaccggatagcccttctgtgtcctgttgcccagcccagccctagtgtcagggccgggggcctggagcagcccgaggcacgcagcagaagagagaaaagacaacggaccgaccctcagctcgccagtccgggtcgcgtggcttcgccgccggcatggcaatggagacagacgccggctcacctgcttctggccacgacgcgacccgtggttgattgggccttcagtgggcatcacgccttatgggtatttcttaatcagcgcttgcaagagatggtaaacctatgctacgccagggagatacaggagactggatgggaacattttgggtcataagaggtgcgtgtgggggtgcaacactgaagtaacggatgccaccaaagcagctacagcagctgcggatttcacagccaaagtgtgggatgctgtctcaggagatgaattgatgaccctggctcataaacaccattgtcgagaggtgtggattcagcgcaggatagtaattaatttgttaaccgggggacaggataaacgtgttacgcatatatgacttgaacaagacctgaagcagaaactaaggaatttaggggcatacttctggtatagaaaagctctggggggattgagggttagcagattttttggggatgacaaagtgtcgatggggtatgggctatgagaggatcttaatttatatttggacg

SEQ ID NO: 690807 - DNA, 273 bp, Homo sapiens
gctgcagtatactctgctcatggcaggtcttgtatggatcttgtgctggcggctgagcaatatagtgtgagccagtgacccatgaacttgctgctctgtgacggccaagagtcagggccagtcatggtaatgggcctgaaggcacttatccagaacctatttatgtctctcgtgagcccatctgttaagaactgttcttcttggatgtggttggtaggcctacgctgtcgcatattctgggaaaccttccttgagtgctattcgcacatgtgt

SEQ ID NO: 690808 - DNA, 189 bp, Homo sapiens
tcaagttagcaacgacagatacattttagttaactgtttcatattccttatattatttcagtatgaattaagataaggaatatgaaacagttaactaaaatgtatctgtcgtcgctcttttaaaatgtgatgtagacacagtgtggaaaagtgtcggaattagaagttatccagggtgcacactctttg

SEQ ID NO: 690809 - DNA, 426 bp, Homo sapiens
  misc_feature (8)..(8): n is a, c, g, or t
  misc_feature (68)..(68): n is a, c, g, or t
  misc_feature (212)..(212): n is a, c, g, or t
agaaggcnagctcttgactctgaagttcaggtgggaaaaaaatgctggttggataaaacctccctgtnaaggcctctgagccccaagctaagccatcatatcccttgtgacctgcacatatatatcccagatggcctgaagtaactgaagaatcacaaaagaagtgaaaatggcctgttcctgccttaactgatgacattaccttgtgaaantccttctcctggctcatcctggctcaaaagctcccccagtgagcaccttgtgacccccatccctgccagccagagaacaaccccctttgactgtaattttccactacttacccaaatcctataaaacggccccacccctatctcccttcactgactttcttttcggctcagcccacctgcacccaggtgattaaaaagctttattgctcacaca

SEQ ID NO: 690810 - DNA, 517 bp, Homo sapiens
cttggatcatctgtaaggagagcatcagtgtcagctcagagcagctggcacaattccgcagaccttctatcaaatgttgaaggtgataacgctgtccccatgcagcacaacaaccgcccaacccaacctctgaagggcagaacagtgagagcttcattttgatgattctgagaagaaacttgtccttcctcaagaacacagccctgcttctgacataatccagtaaaataataatttttaagaaataaatttatttcaatattagttttacagattgatttgaaggcatgctgtcttgctaatattgaaataaatttgtaaaactaagaaacttaaattttagttcttactgcttaattcaaataataattagtaagctagcaaatagtaatctgtaagcataagcttatgcttaaattcaagtttagtttgaggaattctttaaaattacaactaagtgatttgtatgtctatttttttcagtttatttgaaccaataaaataattttatctcttt

SEQ ID NO: 690811 - DNA, 1008 bp, Homo sapiens
gcgtcgttctggattcccgtcgtaacttagagggaaattttcaccaatgtccggagcccttgatgtcctgcaaatgaatggaggaggatgtccttgaagttccttgcagcaggaagcccacttaggtggcaccaagtcttgcacttccaggatggaaccagtacatctgaattacaacaggaaaaagtgatggcatctatatcataagatctcaagaggacctgggagaagcttctgctggcagttcgtgcaattgttggcatagaaaaccctgctgatgtcagtgttatatcctccaggaatactggtcagagggctgtgctgagagtttgctgctgacactggtagccactccaattggctggccgacttcagctcttggaaacttcagctaagccagatcgcaggcagccttccgggagcgacggttcttgtggttactgaccccagggctgaacaccagtctctcacggaggcatcttatgttaacctacctaccattgcgctggggtaacacagattctcctcgtggggctatgtggacttgcatcccagtgcaataactagggagctcactcagtgggtttgatgtggtggatgctggtcgggaagttctgcggcatgcgtgggccatttcccgtgaagcaccatgggaggtcatgcctgatttgtacttctaaagagatctgaatgagattggaacagaagagcaggctgtgctcgacaagggaggtgaccaggggaatctccggtgatggactgctcccgaccctgaggtcactgctatcagctgagtgccgactggtgagtggaaggtgcctctgtgcaatagaaaaccactgaaatgggggcagctgcaagaaaagggtgggggcccggccgccgatgtgggaccctggggttccggcggttgtaaccagaatggggactttaaaaaaaacgctctttgggggggggttccctcttgatgcttactttttaattaaatattaaaaaaaaaaaacgaaa

SEQ ID NO: 690812 - DNA, 358 bp, Homo sapiens
atggaatggttcagttggtttaggccggcagtctgtctacctgctgagacctagacttatagagccagactcaagctatgggattcccctgcccgagcttagacaacactgacccacggtgacacactgcatggcgaacactggaggtcccttatctcaggccgcagaggcctgatcttgggttcggaagcatgagccgaggacgttgcctgtggcccactctggctgctagtgggtctaagtggaccagtacctcactggacccaccattatctgacgcactcaatgtgtgaccaccattcctaccacatatgcctcctgcgcggtcttagtgagcggagagctgaccagcaggctc

SEQ ID NO: 690813 - DNA, 295 bp, Homo sapiens
aaatttccccgggggttttgggggttttttaaaggggaaaaaaaaaccccctttaaaaccccccccgggggggaaaaaaaaaacccgggggccccccggggccttttttttttttggaacccaaggcccccccccccccggggggtaaaaatgggggaaaattggggaatttaggggggccccccttttagggggggggggggttaaccccaaaaaagggggttttggaaccctttggggtttttcccccgttttggatcccccaccccgggggaaaaattttttttttttttta

SEQ ID NO: 690814 - DNA, 149 bp, Homo sapiens
cgggggatctctggcttcacagagatcgcgagctgagcagccaagagagagggtcatatggttcccaatcatgaacaggcacattctacaggcacggtcccaggggcatatagccttctacttgtccaaccacctgtcttcgcctgcat

SEQ ID NO: 690815 - DNA, 300 bp, Homo sapiens
gcaggtctttggaacctggtggagtggctgtcacatgggtccgtcccctgacatctgggaccaggccgctcctaggaacagccagcagcagtggactgggagggtgttgtctctagggcctccagcagagtcttggccccagctggcttgccaggttctggtctcccaggacacccccactttcgctcctcccaccaggcaaggagatctcttaaggggtagcgctgttcttcaccttggcgagaaccttctctctttgaccggcggtctgaaccatatggtatctggcgctccgagagg

SEQ ID NO: 690816 - DNA, 462 bp, Homo sapiens
  misc_feature (301)..(301): n is a, c, g, or t
  misc_feature (404)..(404): n is a, c, g, or t
ctgactctgcatttgtgtgagggtgggagatccaccttggatctcagctttggcttttggatgtgaggataaattcagggtctttttgtctttaaaggaaaaaaggcctgcattcttcctaccaatccgtcagagctttacttaggaacaaagtgtcctaagcttccgagaaattccctatccctgggaagcaaccccagggttcacgcaaccccagggttctcctgtaagtgacaggaatggttgctctggaggaattctgagttgctgctaactccccgacaagcctgcccgaccaagngcccctcggcctcctgtcatccctgaaacttgattcagggtttttgtccttgctaagggaagccaaaaagaaaagagtcttactccaatctttctggcccttngctttcctcattttccttctcctgtgaagatctcgaacaagcgtctttgaaattgggc

SEQ ID NO: 690817 - DNA, 310 bp, Homo sapiens
cttgaagcaaatggtggacaccaggtctacgaagaaactgttgcacatctgccggaagcgggcatgcttttcaatggtttcccttagaacacgagaaacagaagacaggtggatggtgtttcccaaatgcctccttacagaatgacttgagatttgcacagcatttcacttttttttttttgggaaagggagtccactcgtgtggccagggcgggagtacgggggcgcgatctcggctcaggggaacctcaacctccagggtccaggtgatcctcggtgctaagcctccaaggtagcggggatcccgggc

SEQ ID NO: 690818 - DNA, 154 bp, Homo sapiens
aaaaaaagggttttccccgggggggtttttgccttccccccggaagggggttaaaggcaaatgtttttgggcctttttttccccccattggaggggggcccggttttttactggggcccctgccccctttccataaagccaataaatgttttta

SEQ ID NO: 690819 - DNA, 417 bp, Homo sapiens
ctccaccatactgccctacaaccttaacgtgcccgtagcaccccctgaatgctaggcgatctagatggaaccctgacacaatgaatatgtgaccggaggggatggatacccccttatggccctgcatactatagcacggactatgagctatacctactgcataatgaatcacctgttggcttgccatggagagacaagcctaacactttcagaactggactatctacctaagaccagctctcagaacacacgcgtctatgcacatccatacttggaacacctataggtagaggcgacccacctaccgactctcaagatacctagttatgcaagatagcatctgtagcactgctttcatgagctcactgaagccctgtactaccactgactggccaactgttagttgcgaggatctgt

SEQ ID NO: 690820 - DNA, 484 bp, Homo sapiens
atgagctccctccatcataactacatgacgtcataactactactcatccccatcctgctcgattccataccagacacattcctccttgccggtgctcacaaccatcaatctctcaccttaatgcctttctttatactgtctgaaactctgaatggaaccctcttcccccagatatccaaattgctaaccctcttactctttagaatctttgctcaaatgtcatcttctcaatgaggcctacctctgaccatctatttaaattttcaatctgcctttcttcctttatattcctacagcaatttcatcttctggtatagtatctaatcattatgcttattgtctatcatctctctctttcctgcttgcatgaaagtgttatgaaggcagaatctctgtgtctttttgtacaccaatgtatcccatgcgtctaaaacaggacttgtcacataattgatgcttaccaaatattaattgaatggaacga

SEQ ID NO: 690821 - DNA, 274 bp, Homo sapiens
  misc_feature (239)..(239): n is a, c, g, or t
gtcagacgctgaactatttgacacagacttgccaggcagcctggggcagagtgaagagaagccctgtgcctgcttgcgcgctgtgtcccatgcccggttggcccctggccccatgtgccatccaagaaggaaatccccctgtgcggcaagtccagcctcgctcttgcggttagctctgtactgtccttgaaccgctgttgttcctgtctttttccgtccatgcttgttgaacgtgcacnatagttacagcgtcgtgagcgggtacccgagctcg

SEQ ID NO: 690822 - DNA, 260 bp, Homo sapiens
agcgggccacctctccctcagacttcacgcccaccacccttgccgttctccatgatgatgtcgtccacaggtttggtcagcatatatgtccccccatagatggaactcaatcttgcaaaaccctggggcgctcccccaagccgtagaggcggtataaaatatggggcttttgccatacctgggccagggactcactgtacaaccttgaagcggttgacggtcttcaaggcaggcctgtccaggtagtcctcaatgcgggc

SEQ ID NO: 690823 - DNA, 222 bp, Homo sapiens
gggtgacagaatgagaccctgtctcaaaaaaaaaaaaaaaaagtataaattatttacccaatatttggcgaatcagtgagtgacagcagttgtagtgctagtgggttaaatcaaggaataactgttgggaagtgaaaattttaaggagcgcctcctaccaccatgcagttcaaaaaccaaaaataagaaataaagtgggcttgctgagtgctttcattctgc

SEQ ID NO: 690824 - DNA, 707 bp, Homo sapiens
  misc_feature (672)..(672): n is a, c, g, or t
  misc_feature (681)..(681): n is a, c, g, or t
  misc_feature (683)..(683): n is a, c, g, or t
tatgatagcactgaacccagccacataaacacaggtcggaatgcctccaggtgtgggccaacgggcagaaggaaccgagaatgtttgcttttaagcaaaaatggatgttgttttcataaattactaactctgaaacatttccaaaggtactgtacatagtgctgcttcccagtgaggaaaatttccttttcaacattggcacttgctgtctgatatttcattaataatttgaaaggttttcttagtcacttaagaagattttattctctcgattatccctctcccttgcctgtcttccatccattgtacccatctcactggctcttttcctgcttccttcactcaagtactatcaactcaaacaatttcacttgactgagttgcctcaacctgttagtcactctgcattcccctctccccacagcccctgacaacaactaatctttttctatctctagatttgcccattctggacatttcacacagtgcaatattataatacagggccttctgtgtctgacttctttcacatagcataatgtattcaagggtcatccacgtcatagaatgttactagcacttcatttcttttttatggctgaataatattccattgtatggatatacaacattttgtttatctgttcatcagttgatggacatttgggttgnttctgcttngntggctattataagtaatgctactt

SEQ ID NO: 690825 - DNA, 892 bp, Homo sapiens
ctgagctgactccgtgtgttattgcatcgtcaaaagaccggatatggactgtctctatggaatagacgctgcttcattgcactatctcaatgcgctcacactaaagctcaagtacccacggtagtatatgtctgtaactaattgagtgggactgtaacatgatgcatctggggacctgttttgcagaatctcttggaccatatcctgcttacagactaccaaacgtgactgtaataactgtatatgtatatctcgaaatgtcataatggtgcaatcagacttgcctcagagactactgtgcgaaatgactgttcaaagaacaaagagactcaaagcgacaactagtggaaacaaagactacaaatcagccagaaagaccatagcacagtggtcgttttcgtactagggactgtggagggagagtatagtataaagatcccgtagcgtagacttagcccttgctgtcatgcagcacagtcctcgggacgcagatgacataactgctggactgagccactttcctacccagcagtagctccacgcatcacacggtgttacaggatagcctacgaaacagaaccattctggccatcattagtaagtccgcatctgataaccacctgcataggacccgaaaaatttttgtagaaaaccctgagaatgctgggaatgaacgtcaaccattctccctttgtgctgaacaactacgtggcaatttcaccatgtcacttctcgatcatcgtagccttctgtctcgctcagattcggtacatccccctaagtagttcattgtccgtaggcggctacctgaccctaacgccaaatacccgaattacttcccctccaaacacctcacaatcggaccgcccagtccttcccacactccttattc

SEQ ID NO: 690826 - DNA, 518 bp, Homo sapiens
actattttagggttggaggtgcagatttcattgacaatcagaaagggcaagtttgatttgtcttttcatcctaaaagtagcaacaagtgtttgcaaaaggctggctctttgttcagtgcagatttgtatatgtccctcttgtgttttacaaaataaatgggcacctttaatgtcatcacaatgggaaatgatttaactacaatcacattgtgtctgttgaattttccactaaatgatctatatgccattgtgaagccccatgcaaacctttattccactgtagattttgtgttgcgtagtgttgagaaatatttttaatggtcttttaccccctttactttaaagcttgctatagaagcttgaatgtaggaaaattcctcttcagccagaactgtagagttgctagggccccaccattgtaactgacagcagaggttcagcaaagttagttctgaggtttgcattatcaaatctacccagattttccaatctacaaaacatctattcacgtacattta

SEQ ID NO: 690827 - DNA, 171 bp, Homo sapiens
ttcgttagatatcctatagtctccaaaaattgatggaaccagaacaccccgagatgagatggagaatgagcccagcacaacgaattgaagcggcggaggatgaacaagatcaacaactgtatcgtcagctttcgaaaatcattccagagtgtaacgcagaacgcgcctaat

SEQ ID NO: 690828 - DNA, 196 bp, Homo sapiens
caattaagaaagcgtcacgctcaacaccactcactcaaaaaagtcccaaacatataacatagaactcctcacacccacattggaccaatctctcaccctatagaagcactcatgatcgaataagtacacctgaaaacattctcctccgcctaagcctgcgtcctattaaaacactgaactgacaattaacagccca

SEQ ID NO: 690829 - DNA, 165 bp, Homo sapiens
  misc_feature (93)..(93): n is a, c, g, or t
  misc_feature (131)..(131): n is a, c, g, or t
gaggtatacgaccaagaggagaggagcggagtcatgctgcagaggggaatagtgggctaaagaagctgtcctcactccgggcagaagacaggngctggattggagtgactccaaccctgagggcttgtgcnctgaagccaggatgcagctacggtaacaccacag

SEQ ID NO: 690830 - DNA, 433 bp, Homo sapiens
  misc_feature (49)..(49): n is a, c, g, or t
  misc_feature (81)..(82): n is a, c, g, or t
  misc_feature (84)..(85): n is a, c, g, or t
  misc_feature (365)..(365): n is a, c, g, or t
  misc_feature (379)..(379): n is a, c, g, or t
atctatttttgattaccatttttggcaggtatatactaatttatagtgnggaaacataatttgaaatgactgattctgttnnanncatgttaaatttaagatttacatttttgctctttcactggaagctgagtttgtcataagcatgattattaaaaagtacaattttgaggtctagctaaaattaattatttctatgtttcagaatagtaaacatatttatggcattttttaaaagtatttatttatgaatgagagatggggtcttactctgttgcctaggctggaatagagcagtgtgataatagctcattgcagcctccaactcctgggctcaagcaatcctcccacctcagcctcttgantggctggtgccacnagttgcgccactgcctgggcaatatagcgagaccccgttctccagaaaaaggaa

SEQ ID NO: 690831 - DNA, 366 bp, Homo sapiens
aaaaatccgccctcatgattcaattacctcccacctggtccctctcatgacacatggggattattccaattcaaggtgagatttgggtggggacacagagccaaaccatattggctactatcatctgtgtttgttaaggcattataagaaagagatgagttccagagagaatgccaacttgtaagaggaaaacaaaagaaacagatactgtctagaaattcagagtcatgcaggactgataaagccatttgcttctagactccaaagagtatgatatgagactttgaaggctttgaaaaatgaaacgtgaatcttcccagtcctactagcctcagtgtagttgcctttaaattaaaaggcaataat

SEQ ID NO: 690832 - DNA, 292 bp, Homo sapiens; identical to SEQ ID NO: 662244

SEQ ID NO: 690833 - DNA, 259 bp, Homo sapiens
gggcttggctgggcgtggtgacttatgcctgtagttccggcagtttgggaggccgaggcggttggatcatgaggtcaggagatggagaccatcctggctaatacggtgaaaccccgtctttactaaaaatccaaaaaattagctggccgtggtggcggcctgaggcaggaaaatggcgtaaacccagaaggcgaaggttgcagtgagccgaaatttggcaatggaattcaacctgggcgaacagacaaggattttgttt

SEQ ID NO: 690834 - DNA, 107 bp, Homo sapiens
  misc_feature (54)..(54): n is a, c, g, or t
  misc_feature (84)..(84): n is a, c, g, or t
ccacttcatctaggccagaatacaaggtgctgttctgcagaccccagtcctccnggctaagcaggttgtcggtgaagaaacgcntcggtcagcaatctcgtctgaca

SEQ ID NO: 690835 - DNA, 469 bp, Homo sapiens
  misc_feature (289)..(289): n is a, c, g, or t
  misc_feature (306)..(306): n is a, c, g, or t
  misc_feature (374)..(374): n is a, c, g, or t
tcagctacaaagggcggggatgtagggtgagctacggcgccgggcctagtatccatggatattttcaatatcagcctttcttctgacttaatgagaatgaagtataataggatttttaaaataaggaatcaaaaggtatttaatagttattcctagattggtccccataattttcttggcggcttaagctaaatccaaatgtagtagtggaagtatccacaccaatatgaggttggtacaataaattagatttagtacttaaagccggtgtgtccttagcaaaagtatnagatctataattaggtntctcattcggtggcccaggctgaggtgcagggatgtcatcacagcccacggaaaccttgagctccggnactcaagttatcctccggcctcacatcccggagtagctataggtgcatgccaccatgccaaacttttttttttttgtggggcaaagaggaggacc

SEQ ID NO: 690836 - DNA, 701 bp, Homo sapiens
  misc_feature (2)..(2): n is a, c, g, or t
  misc_feature (66)..(66): n is a, c, g, or t
  misc_feature (76)..(76): n is a, c, g, or t
  misc_feature (84)..(85): n is a, c, g, or t
  misc_feature (121)..(121): n is a, c, g, or t
  misc_feature (128)..(128): n is a, c, g, or t
  misc_feature (132)..(132): n is a, c, g, or t
  misc_feature (135)..(135): n is a, c, g, or t
  misc_feature (144)..(145): n is a, c, g, or t
  misc_feature (147)..(147): n is a, c, g, or t
  misc_feature (176)..(176): n is a, c, g, or t
  misc_feature (302)..(303): n is a, c, g, or t
  misc_feature (307)..(307): n is a, c, g, or t
  misc_feature (317)..(318): n is a, c, g, or t
  misc_feature (321)..(321): n is a, c, g, or t
  misc_feature (325)..(325): n is a, c, g, or t
  misc_feature (336)..(336): n is a, c, g, or t
  misc_feature (344)..(344): n is a, c, g, or t
  misc_feature (346)..(347): n is a, c, g, or t
  misc_feature (352)..(352): n is a, c, g, or t
  misc_feature (357)..(359): n is a, c, g, or t
  misc_feature (366)..(366): n is a, c, g, or t
  misc_feature (370)..(370): n is a, c, g, or t
  misc_feature (373)..(373): n is a, c, g, or t
  misc_feature (388)..(388): n is a, c, g, or t
  misc_feature (399)..(399): n is a, c, g, or t
  misc_feature (403)..(403): n is a, c, g, or t
  misc_feature (407)..(407): n is a, c, g, or t
  misc_feature (414)..(416): n is a, c, g, or t
  misc_feature (419)..(419): n is a, c, g, or t
  misc_feature (572)..(572): n is a, c, g, or t
  misc_feature (601)..(601): n is a, c, g, or t
  misc_feature (651)..(651): n is a, c, g, or t
tntcattctttattaaccctccttggaattttgaaaacctcgattaaagtagccaaattgattacnggatccagancacaattnncccctcagaccagatagacagactgacgccactganctctgcnaggngtnaacatgggnntncttttgctggatttggagaaatgataggnaaaaaaccaatggtgaaatttcaagtttcaaaaaccaacctttcattaccaatcccaggcaacaaacatgtccctgagtgttctttaagaacatttgggatttatgtacaatttaatactggggtnngggntttttccttnngantgcnaaccttatgangggtgtgngnntctangggcnnntgctttngggngcncctttctatattgcncagtgggcaantggnttangtgaggnnnganactagaggggtaaatttccagatcaacatggctatggtatttagtaatggcccagcttagagacttcagctactgatctcatcacttattagacaaattgctgctgaccttacgcctgtatattaagcctccgcaggtgccgggcaatggtgnagaaactccagatatcaaggaattggganatcctggccaaaccaccccaagatgattacactgaaatgtagtattagtnctgctgccagatctctttttaacatcatgtgcgtctcttgggatccagca

SEQ ID NO: 690837 - DNA, 303 bp, Homo sapiens
ggcggggattacagggctggggccacggcgcccagccttaaccacttaaaacagtacaatccagtaaggtgtagtggtgtccacaatggtggtgaaaccatataccactaaattccagaaacatttccatttacctttccccaagaacagcccaagtacctccaaactctcccctggacaaccactaaatcttctaatctgctatgggatttggcctttatgggatttcaatatgcagtgggaatcgatatagaggtggtgggccagttcgtggtctgggctttctttcaggttagcggtaat

SEQ ID NO: 690838 - DNA, 594 bp, Homo sapiens
taatctagaggatcccatatggcgaatcatggtatattccatggtgttttctttagggacaggagctaagggaagtgacagtcatgtcaaaggaagcatttctagaaaaaaaggagataaggtttttaaatttcattatcaaactggggcaattcggttggtgtaactccccgactaggggatgggagagtcccatggctaaaattcagctactcagataaattcagaaggggtcagggcaccggccggttttggtgggtgcacagagatggactggattcagagagacaattcactccatccctatggcagaggaaggggttagccctaaggtagaaggtcatggtttttaaaacggttttatatcttaagagtgcctcatcaaagtatagatgtatgtcttaaaatgtggggtgatgggaattttaaagatttatatagtgcatcaaaggccttagaataggaaaggcttttttaaaatggcttaatctgtatatctgacctcttgaaacttatagctaaaacactaggatttatctgcagtgtggcggggagataattctggcttaaattgtctaaaacaaaaacaaacca

SEQ ID NO: 690839 - DNA, 436 bp, Homo sapiens
agagtctctgggctaccacatcttcactcttcctccactcccttcgacacattggattagagaaaagaaaacaaaggtgaaagatgagaccagaggcataatgaactgtttaaggggaatacaaggtaaagtgttcatagaagatgtcagcaactaattatgaaaactcgtcttaagagaggaacttgacaggctgtttttctttcatttcaagtctcttggcccgttgtcgagaataagcaaatacacagagtacctagcgtttatgtattttacacagagccatctaatgaaataacataagttacttgtaaaggtcactgtatacaaaatacagagatgttttataagttttaaacagtttttttttgaactagaacgtggatggtacgttgccctgtagtcacatgctacgtgaatctggcgaggcagcaga

SEQ ID NO: 690840 - DNA, 327 bp, Homo sapiens
ggcacgagcgccccaagtcttagtgtgttctaaacttttttttttacccagaccttttccgagcaataaactattaaaaaaaaaaaaaaaaaaccctgctacaaagaaggtctcccctcccagggggaccaaaagaaacctcccggccggttccagaggggccctttctcccccccaaccccccccattgtttcagaaaaacaactgaaaagaggctgggcgggggctcaccccagtaatctgctgacgcgggcttggggtcgggagttcaagactagcctggccatcatggggaaagcctgtctttactaaaaatacaaaaattag

SEQ ID NO: 690841 - DNA, 1035 bp, Homo sapiens
  misc_feature (170)..(170): n is a, c, g, or t
atctgtttggtaatctaatttatgtggtcattggtctgaccaaagatatccttactgcatcactgaggccagatataggacaactgttcaccatttgtgtttggcttgcaaattatgcacgagtgctaggtaattatttggtatcactattgcctattctaccgcagagncaagagatactatcatatggaaaatggactgactagttgaaggacctgaagatctactggagcatacacaagaagttgtacctcatgagcgccaattgtcattgtagtgttggcttatccatcatgctacatggttcccaaaatggtaccatttgaacatttctcacgcacaaggaatttcactataaataaaggggactagaagcgctttgttgtcaaacctggttcgcaggtgtatttacaatatagtgtgtgtttcactcttaaaaaatgtgcacaattaaagaaccgtggcttcaccttagaaggggggtggctccattaccacaaggaaaaacacacaacaacacacaacacaacacaaagacaaggagagaaaacaaaacaaaaaaaaagaacaaagagaagacaagagacagaagacaagaagacaacacagaacacagacaaaaacaaagaaaaaacaaaagacaacaacacagaacaagacaagaaaacgagaggggagggcgaggacataacaaaaacaacactccccccggaggagacgagcaaaagcaaaagagagcgacacgcaaaaccacgagagctcaacagaaacaaagagggagagcggcgaacgctaataacaaggaggcagccacagatacataaacaaaaagaagcgaaagaagacgaggcaggaagcgccaacaacaaaacacacgaaggcaagcggagtgagtgagagaaaaacaaacatacgaagcaaaacgagcgaaaacaacctaaataaaaaaagaagaggaccaccactaactaagacctcgaggggggggaggaacgaccatagcaatggtggacaagacacaacacacagcgaaca

SEQ ID NO: 690842 - DNA, 680 bp, Homo sapiens
taggctgggtgataatcagggctggtcctgagtagtgtggtcgtttagaagaagaaataatgaagctgtatagtatggcagtagtgatgaatgaatgaatgagtgtagagtggcagttagtggagccagaataagtattgcagtggtatataaagtaggtgtcgaggaatgtagtgtactgaagttaggtgctcgtgagttggcaccccgaagtgtctggaatcacgactatgattgaccttaaagacgtaagcacattcaaggatatagtaatatggagtctagcgtatttgcttggaagagaatactctatgaaatggaagactcgaggttatctccccattccattgaaacgtgcatacggttttatgatggtgggcagcataaagagtatggaaagataattctttgaaggtatctggaagcacagaatcgctatgtcaaacacggatgtgggtaattaatgcactgaccggaatgagtatactgtatgaagcggtctgagggtgcgttaaagaaaggttataccaattgtgaacaaggcggatctcgtgtataagttgtatggcggaattggaggctttatggctctgtgccacatggcgttcggtaaggttaacaatcctatgtacggacacggcaatatgcatttggtggaatgtcaaagagtagatggtggg

SEQ ID NO: 690843 - DNA, 435 bp, Homo sapiens
  misc_feature (241)..(241): n is a, c, g, or t
  misc_feature (254)..(254): n is a, c, g, or t
  misc_feature (309)..(309): n is a, c, g, or t
  misc_feature (318)..(318): n is a, c, g, or t
  misc_feature (339)..(339): n is a, c, g, or t
  misc_feature (370)..(370): n is a, c, g, or t
  misc_feature (415)..(415): n is a, c, g, or t
atctctcccctcaagtttagtcttgcggtagaactttgaagagaacacctgggtttatttcctggtgttggagaggtgaataaacatcaacagttgaaccttgatttcagtggatttcaacatgagggggtaggactttgaagtattattctttttcagaattcgtaagtgccaggcactgtgcttaggtcattagatggagatgaaaagatattttctataggaagagaccgttgattgnacccatgctgtanaaagatagctcaagattttttttgggttaatttggtttttgtaagcttggccggntggggaaangaatgaagtccttttgatggngtgagtttgagatgtcagtagcagtagaaanttggaaggccgtgactcatagctagtttggcgttttggtaaggangggttaggtacccggggccc

SEQ ID NO: 690844 - DNA, 170 bp, Homo sapiens
aattgctaaattctcacgataaaacttgaatgatgagttgcttctcattcaactttatcatgctcacacctttggctcatgaatgaggcaagaaactggggttcttcaggactggaatttactccctttttgaaggattgctgcaggccttcaggtgccttgaggggtac

SEQ ID NO: 690845 - DNA, 142 bp, Homo sapiens
gtagatcttgaagcacacagtgtgggatgggcacacaggttgggatgagcacacaggtagagatgatacacacagtatcgagactcaacacccatagatcgtgatcggacccaggtgcgtggatagacacacaggtggggat

SEQ ID NO: 690846 - DNA, 163 bp, Homo sapiens
  misc_feature (65)..(65): n is a, c, g, or t
  misc_feature (79)..(79): n is a, c, g, or t
  misc_feature (132)..(132): n is a, c, g, or t
ggaaaagccatctttgcattgttcctacatccgcgctccttggcccgcgcgcaaagtcgcctcancgccgcgcgcgctnctctccgcctgccgctggacttccggcagcgtttatttcgccacgatgtcccntagaacgtctcgcttctgcttgtttaatttc

SEQ ID NO: 690847 - DNA, 152 bp, Homo sapiens
tagaggatccgtgaacacccgctacggggctggccgcattggggtgctggatgagggcaatgatgaagctggattacatcctgggcctgaatgatagaggatttcttagagatgactgcctgcatgacccagtgtcttcaatgctgggcttt

SEQ ID NO: 690848 - DNA, 356 bp, Homo sapiens
tgccgaagcaggcatcaagtgcgcacaggctgtgggggggatacatcagttacctgccacactggtctctccatagggcagctggcttccgctggaccaagtgatccaagagagagcaggagagagcaagagagacccacaagatggaagccatacataggtcgtagtttgtgttatttttctcgggggaggggatctcactcggtcgctcaggtgggggggtatgggcgtaactcctcggctcacgtgaaacctcggtctcgcggggattcaagaagagtctccgtgcctcagttttctgagttagctgggaattacgaggcgcccaccaccaggccggggataattagggatat

SEQ ID NO: 690849 - DNA, 87 bp, Homo sapiens
tttttggtgtatggatggtctggtgggggaaagcgggctggtgcagacattcaattggtgtattattatggtcttacaagcattaac

SEQ ID NO: 690850 - DNA, 431 bp, Homo sapiens
ggtttggatcaggtgtgttagcgagtggaatgggccaaagttccaggaacgtgagaggaagaaggaagaagaggagaaggagaaggagcgggtgggctatgcgtcagatcgacgtggcatgatttggtggtaggtggaaacagtggacttccaactccaatgagcaagggaacttccctccactcccaacacgaccagaggagctggtggtgcccgagatcctcagttcagggatgcgcatgatgaaacacgttacgggggacgacgtgagggaaggttggagatgtgatggttcgacgttctgactgagggacggatgaccaagacagggagaaggcggagtgagccatcgattccacagactggaccaggacacctcaagtacaatgatatggatgatgggttcagactgatgaagaagaagggcagaa

SEQ ID NO: 690851 - DNA, 108 bp, Homo sapiens
gcggggtgatctagaggatctattatatgctgtctcattgaaaactcagtgtatggtgcttggtatataggcagacagtcaacagtttagaatagataaattaataag

SEQ ID NO: 690852 - DNA, 331 bp, Homo sapiens
gcttgtttgttcctttggggggcccgggcgggttgtgggaatcagttttcccagacaaacgtgagccaggcggaggactcgttccttgcagaggtcagtcctcccctgcaggtgtcggggtgggggggggcaaggaggggcaggccccccccatgtttgccctgaacccgattttggggggcattttcccgctccggccccccgccccccccagggttccattgtaatatatatgccccagctaacctgtttgatgggggcattttcctgcagccatttcaaacatgtaacttttatatgaaaaaaaataaacccaaatgaaagctgccca

SEQ ID NO: 690853 - DNA, 605 bp, Homo sapiens
  misc_feature (185)..(185): n is a, c, g, or t
  misc_feature (192)..(192): n is a, c, g, or t
ggatggccacaagttctttcccagccctcttccattcacctttcttttcatgcccatcccgatgaacctgcatcattccccgacactgcccaagccaacctggaaaaggagttcgcggccattggctagaataaggggggggggggggtttttgggggggaaaaaaggaaaaaaaagggtttttnccccccnccttttgggaaaaaaaaaacccccccttcctgtctcccagggacatgtatgcttccagggacaagcttaggtcatgaacatggtcagaacctttggacaagaggaaaaatactaagagatttgctttttctgggtgcggtggctcatgcctgtaatcccagcactttgggaggccgaggcaggtggatcatgaggtcaggagttcgaggcgagcctggccaacatggtgaaaccctgtctctactaaaagtacaaaaaattagccagtcatggtggcacacgcctgtaatctcagctactcaggaggctgaggcaggagaattgcttgaacctgtgaggaagaggttgcagtgagctgagatcgtgccattacactccagcctgggcgaaagggtgagactccatctcaaaaa

SEQ ID NO: 690854 - DNA, 391 bp, Homo sapiens
  misc_feature (39)..(39): n is a, c, g, or t
  misc_feature (158)..(158): n is a, c, g, or t
  misc_feature (235)..(235): n is a, c, g, or t
  misc_feature (314)..(314): n is a, c, g, or t
ccgatcatcctacaactcatcccagggcctcgaggcccncttgccgtattaccctgctgggtagtgtgccgaaacgccagaggcggcttaggtaaagcattttggtagggcattgtaatgatagcccgggatagcgattaaggagcatggttatttangcccaaacggttaccctattcggtaacctgcacaatcccaactggcagtaggtagtgccaaagtttaggtattactnggttaccactcaccagtttgttaaaagtaacaccgctcaggctgcctctgcactgatccgtcgccactgttatgccacngtggtagtattagccacaacctgccccctgtaggggctacccccccactttaaaaccccgtagtagtgtgctttttg

SEQ ID NO: 690855 - DNA, 226 bp, Homo sapiens
cttcatgaccacaaataaatagagtgaactacgctgcattgtgtgttttgaaccggctattatacttcttaacaattctttttttaaggtacttttctagctgtatgactgttacttgaccttctttgaaaagcattcctaaactgctctattttagatagattaacattatctaacatagtttgatttacatcgagtacagaataaatttctaagtcagcctcta

SEQ ID NO: 690856 - DNA, 277 bp, Homo sapiens
cgatactagaggatcccggctcattacagttcacctgccgtgagagaagctgtctgacatggtcttaatgaacctggatgagtgggcaggtaaagggatgtaagccaggatcttgaacgacgtgggaagaagtagcccgaggcaaggaaaccaaactttgcacagggaacacttagtgtgtgacagctcttctcagtcatccttgctgactcattgagcaggtagtaacttatctagtgactaaatcagcaccagcttagagacacagggaaatgag

SEQ ID NO: 690857 - DNA, 882 bp, Homo sapiens
  misc_feature (104)..(104): n is a, c, g, or t
  misc_feature (112)..(113): n is a, c, g, or t
  misc_feature (140)..(140): n is a, c, g, or t
  misc_feature (144)..(145): n is a, c, g, or t
  misc_feature (147)..(147): n is a, c, g, or t
  misc_feature (288)..(288): n is a, c, g, or t
  misc_feature (315)..(315): n is a, c, g, or t
gaacgtgaaggggtgggtgcggaagaaggaggaagggggtcagactacttacctgggcgagctgcgccgcgagctgccacccgaccaggctgagtactgcatcncccggatnncccggtacaggggggcccaactccatnccanntnctctagactacatgtgcttctccacggggctgtacggggagagtacctctaatccaccccggccgggcggcctcgtcttgtgcgccgtgccctgccctgcacctccggcgtcgcccatctcctggcggggggggggttcanctcccagcctccacccagagggagccngggggccacggtgggatcgatcctccctgccccggaagggacaggttacaaaatgattttctggaaaaaagagaaaaaaggtacggtaaaaaccaaaaaactacatattttattataggaaaaggattgtttctccaccagaccaagggaagaaaagagggaagaataactgtttgccccgaaatggctggttttggtgggacaagggaaaagacccaggcccaagggtatattccatcctttttgacggatgtgtggtttttgtttgatcgggggcacggtggcgggatggagttgctccagacccagggccatttttggggtgggaggcggggtgggggggactctccggaaaaaggcccattggggacagggggggtgagtcggctaacctgggccaggagaatattgtactggatttagagagaacgggtgcgaaaaagaaaaaagaaaaggggctccgttgggctaagaggtggagggtctgggggccgctcccttttaagagaggggagatggtggtgctctggtactgactgggtgggggtggtagggcaggagcggggg

SEQ ID NO: 690858 - DNA, 220 bp, Homo sapiens
ggttttcccgggttttttttccccccccgggcggggggggccccccccccttttctctttttggtttggggggggttcccaaacctttggccccttttgggggaaaaaggggggggggggcccccccccccctttttttaagggggggggggggccggggcccccccccccccggggaaattttttggggggggggggggatttttttttttttttttta

SEQ ID NO: 690859 - DNA, 398 bp, Homo sapiens
cgggggacaccaggcagacatgcatggtttgaatgtagtcccctccaaaactcatgtagaaacttaacctatcaatgtggacagtattgacagagtggggcctttaagagatgttcatggattaatgggttatcatagggcgttagactagtggctttataagaggaaaagaggcttcagctagcatgctctgctcctttgccatgtgatgccccataccacctcaggattctgcagagttcccatgagaggtccaatctccggaagattggacctcttaccttgtgactagaagtcctagttatggtatattgaaatatatgatccataatccttgccagaaatcctgcagcgaatcatggcatggcatcatcctagtcattgatttcaatcttttg

SEQ ID NO: 690860 - DNA, 344 bp, Homo sapiens
  misc_feature (50)..(50): n is a, c, g, or t
  misc_feature (304)..(304): n is a, c, g, or t
aaagtccaaggtcaaggggctagccaggttgatttctcctgaggcctctntcctggacttgtagatggctgcctcctccctgtgtcttcacatggtctttcccctatactagtctgtgttctaatctcctcttataaggatactagtcatattggattaagacctacccaaatggcctcattttaacttagttacctctataaaggccttatctctaaatatggtgctgtcaattctgaggtgtacgcggggttaggacttcaacctaggaattttgggaggatgctgttcaacccctaacagnctcagtaaagcttgtttcaatcatgttacaggatgtgagg

SEQ ID NO: 690861 - DNA, 198 bp, Homo sapiens
aagcttttaccgcccagcctgagtaacagagtaataccctgtttcaaaaaagggaaaaaagaaagaaagaaagaacaatcaaagaaaaaatacaaaacggaaaaggaaaaagaaagagagagagagagagagagataatccatgacttttttttgaagggacagggaaacaggactgtctgacacgcggtaaaagctt

SEQ ID NO: 690862 - DNA, 570 bp, Homo sapiens
tggactggtttctccaaggagcttatgggctgtcctcaaggtgggcacaccgccacctcattgcccagtccctggtaaaggggaccccgtgttaacagctggtcctgcctatttcctcgtcgagactgggaccaacctggtgaagatcaagggctgccccagtgagccctactttggcagcctgtccgccttggtctcccagcactccatctcccccatctccctgccctgctgcctgcgcattcccagcaaagatcctctggaagagaccccagaggctccagtgcccaccaacatgagcacagcggcagacctcctgcgtcagggtgctgcctgcagcgtgctctacttgacctcagtggagacagagtcactgacgggcccccaagctgtggcccgggccagctctgcagctctgagctgtagcccccgcccgacaccagctgttgtccacttcaagatgtcagcccaggtcattacactgacggacaaccaaaggaagctcttctttcgccgccattatccagtgaacagcatcaccttctccaggaatgaacctcaagaccggac

SEQ ID NO: 690863 - DNA, 423 bp, Homo sapiens
tttttttttagagacaaggtctcactgtgttgcatcacccaggctgaagtgcagtggtgtgaccacagttctctgcagcctctaactcttgggttcaagtagtcctccagccctccagactttgtgtgtgtatgaaacagagtctcgctctgtcaccaggctggactacagtggtgtgatttcggctcactgcaacctccgcctccctggttcaagagattctcctgcctcagcctcccgagtagctgggactacaggcacatgcaccacactcagctaatttttatgtttttagtagagacagggttttcacatgttggccaggatggtatcgatctcttgaccttgtgatttgcctgacttggcctcccaaagggctgggattataggcgtgcagaccacgccccgaccctaactttttac

SEQ ID NO: 690864 - DNA, 153 bp, Homo sapiens
atcttatcaggaagcgtgttgtcagcagtggcttatggtcaggcagaacctggctgcactgcccaagctggtggaggggctgaagctggctggccaagtcctgaccccatggtgcagtgcatcatcgaggagtcgggagagcatatcatcgcg

SEQ ID NO: 690865 - DNA, 97 bp, Homo sapiens
tagcattcagcgcgcacgatcgactgtacatttagcaatcaacagcatggggtgcaaaaaaaaaaaatctaacattaaaaacccctttggtggaaat

SEQ ID NO: 690866 - DNA, 118 bp, Homo sapiens
ttgggcattggcccttgccttcggggaccttcttgggtgttaaggcaaaaggaaggtttccattaaggaactttggattttcaatggaataaattaaacataaagtctatacttggga

SEQ ID NO: 690867 - DNA, 1655 bp, Homo sapiens
ggacataatcttagctgggcggtcgctacccgtgctctggatcgagaatagttattgtgggctggctgctcgcattcctattcacatcctaacaggggatggggaagtcaactactttcgagcgcataatgacagccctccgcccgcccggctcgtcttatttattaattgacgggaagaagctagaataccttcgtttggttagatatatgattttctggagtgcgcgtctgtttccgtaaggaagactaacggagtagatatatttgtttgtgggagaataatattcacatcaacgtggcgggcggccgtggctattattgtctctctgttgattctcctctgtgtttcgttcgacccaaccagcctgtttgtttagatcccccccccctcctgtcggatataataaatcatttgtggttgccacccaccacccgctgctgttgaataaaaaacttttttttgcggggggagaaactatatacacatacattgtggaacaaccacggggggtgttcaatctatgggtaaattatattggtgagtgggtgccccccccctccagagatgaggttcttcttttctcgggggatatatctgctgcagcttttattatattggaaattgtaaacataaattgttttctcatcatcggtgaggaggagaaagataaaagggcccccctttcttgaagactatctactccgggtagagggcgggtgttgtcaccacacgacggggtattttctccccccctctctggtgttggtacacgacaccaccacagcgatgttctggggtagaattatgttttaagatgggggcgccgccagctattattctctcgcgggggtgttctactctgggccacaatcatctctctcaccacacaaatacttgggggggtctcacacaacagagagagttctctccttctctctcaccccttctcacgggctcttctctcctctggagagacacagcatcttgggggaggagaacaacaacaacagcgcgtgtgagtatgacaccacactattctctctgctgcggagaggggtgttgtggagagagaagattaatatacacactctctctctctactctacactagttttctactcgccacacaccacagcagagagaaatattaaaagtatatagtgtgggcacagagagatatagagaggggtgacactcttgagagagatttctctcctgtgtgagaagcgcgagagggagatcttccctcgttataaatactcctctctgtgagaaatatacacacctcgcgcacggtgatatataagagacacacacaagacataatactctctcaacacctctataacacagagctcgagaagagaagagatatgtctcaacagtggggggagaagtgggctctctgtgtgtgttctcacagtgtttgtggggtgttttgagaatccacacaccacaaagacacacggagttgctttcttgtaaaacctgagaattaaattatttggtccttataccccacaataaagagacacacaaaaatataagagaatcacaaaatcgttatggatttaccacgtcacccagatatcccccagaattagttttgtttgttaaagaccaaatccgtgggactttttttgtggagctta

SEQ ID NO: 690868 - DNA, 703 bp, Homo sapiens
  misc_feature (18)..(18): n is a, c, g, or t
cacaagcaggctgtactncccgggaattatgggatcccgcgggaccgcgctcggggctctaagtacaaaaaggagttggattacatgaatgcccatccttgccaggatgaaagaccactgcaggtcagaagagcacggtctcaggacagcagggcagctgcctctctctctgaagcatggctcaggtgtggagaaggtgtttctgaacacttctgggaatccgtcattacacagctgaagagaagacgattcacagagacaatgctaccttgaattatgccctaggaccgcaagcaagaaaccaccagatctaaaagcaccagtgggcttacagacataacatgtgagctcctgtggaagtgactttgtcgtgatgaagataatacacctttctcagtttacagagagccaagttctactagaacacttttagagtattcagtcagcatagtgaaacagaagatgatacggaaaatgtcctactcattgattcagaagtcccctcacaatataccacgtgcagttttgcactcggatgcaagacagattatggacgagacctgatagatccaacggacagaaatcatacagagaccagttttgtcatacatcctcagaaacccagcagactagaggtttcccaggactcccagaatattcagcaaagaagaagcttttaagaggtggactagcagaaagacta

SEQ ID NO: 690869 - DNA, 273 bp, Homo sapiens
  misc_feature (137)..(137): n is a, c, g, or t
agaggatcgtcgtacgttatgtaccactaaacaaagaaaaacaaaacaaacagtacatactgctggccaggcatggtggttcatgcctgtaatcccagcatttggggaggctgaggcaggcacatgcttgagtccangggtttgagaccagcccaggcaacatagtgaaaccccgactccacaaaaaatacaaaaatgagctgggcatgctggtgcacacctgtagtccctacttgggaggctgaggtgggaggatcccttgaaccggggagg

SEQ ID NO: 690870 - DNA, 674 bp, Homo sapiens
  misc_feature (478)..(478): n is a, c, g, or t
  misc_feature (487)..(487): n is a, c, g, or t
  misc_feature (524)..(524): n is a, c, g, or t
tggcacctatgtcgcactctctcttgctactgtttttgccacgtgatgcacctacttcctttttgccttctgccataattggaagcctcctgaggcttctccagaagctgaacaggtgctggtgccatgcttgtacagcctgtagaaccatgagccagttaaacctcttttcttattaataaccccatctcagcaagaatagccaaacacacaggtttgctgagcagagccatacgggcagaagataagcgggggtcccaagcccaaatgggggatagtccatcctcagagctgggcttgctgcacccgttctgctaccgggccgggatgcatcgctggccctggcccctctgcagctcatgagggagccccatgcccttccacgtgtggagagcagcctgcgtgtcactcgatgccgtcagatgttacagaagactccagaggacaactaacgtcgcctgcgctgactattggcttnctgcatgcngagagtagggaggggggagctttgggtgaaatccaanagggcttcactcccatcctgaaccccataggaccaacaccctccttgtcctgggtatggaaggattaccctgtttggggttcgggattacaatctcttgcccccaaggatctgaatccaagggtgggttagcaccccaaggttgtggggc

SEQ ID NO: 690871 - DNA, 221 bp, Homo sapiens
aggtagaatgggtgcgggtgggtaaaaaagtatgagggggtgggggtggtggtaaacttaattagtgtaggaagctgattaataataaaggagaggggtcaggttggatccggaaggatccaatgggtgcgggggcttggtatgataatgggcgtggataagtaagtaagttcacgggtggacacatggttggtgggcctaaatggtgcggaagggtcccg

SEQ ID NO: 690872 - DNA, 309 bp, Homo sapiens
cagacggatcctgatgtgaataggacagtttctattgcttatccttacttccatcccttccctaccatcaaaagcatacctgctctaattcaaaaaaaaaaaacatcaaggtacagctaatttgtgggacagccgcactagaagggtatacttcgtaatgtatatatttttacatactgaagtcctaaatttattttacgacaacacatgtacactactcgggggtacacaccattttctgacgacttactcctatttggatatcggctggacgcgtgccagggggactcctctagacgtcgaccctgc

SEQ ID NO: 690873 - DNA, 1517 bp, Homo sapiens
gcgatgggtcggccccgcatgtatgcccccggccggggatgaatgtagtttagtcggcctgctccaccagagatggttgtaggcaacaccacgccgggtgtgtagtcctcgcccctcactcacgggtggttgtgcaccgctcccccatgtggttctccccctctgttgatgatcgcgtcggcgcccccggtgtgtgtgtgggggccccgcaccgcgcggaagtttttgttttgtggtccccgcgggggtgtcgtttccgcgctacctgacagtgagctggcgttatgctattagtaatacagccgtgtttgttgttggtggcgtccctggctcggcgagccacttttcttgttgtgtgtgtgttatggggggatgcgtgccgccgccactgtggtggtgtgttggttagtatgtgtggccgcgccctcccccgcgcggtgttgttgtgctgagagcgcccccttttgtggtgccaacgcgtgtcgccgcagtgctgcgtgtgtgtgtagttaagaaggtgttgttggtttgcgcgccgcccccggtgtgttttatggaggccccaacgttctgatttgggagggcgcaccgtctcttgtgtttggggagccccgcccccggggggtttgttgtttcctcgggtggttgcgccgccccgcggtgtggttattggtgtggagggcgtccttctctgtgggggtgtatgtttttggggggccctttcccccccacaaataggttgggggtgtgtgcgcccacacgtttttgtgctccacgcgccgcgggggctctctctcgccagagatgtatatagtgggggagatcccgcgcggagcacactggtgttataaacaccctgggtgacccccgcggggtgttattgttgtgtggtgttgggagagaccccctgtgtctcccacgcgtgtgcgcctgttatatgagagaaatggtgtcgcacccacgctccccccgcgggacccaacacacgggtgggaacacaccccactctcttgtgtctcgaacacacaagaagaaagaaatataccctccgccacacgcggggggggaaaccccccgcggagattccccccgcgagacatctgggagagaggctcgaaggcccgcgagagagaattccctctgagaacccgcgcgagaggcgcgcgagagggtgccacaacgcgagaggcaaagagagtcgcgccccctcggagacacccacccccggggccacacacaccgcgagagaacccacactctccccacaaaaaaagagagaaaatggggtcacacagaacccgggtattcccccggggattttttttatattccggaactcctccccccggtgtaataataaagaagaaggtggggcttttaaaaagtttcgccacaaaatgttttttttttttataaaactggagaaaaaaaaaatttcttttttgttttcacacacacaccggcttatggagagttttttccccgcaggcttttttaaaaaaatgagaacaccctta

SEQ ID NO: 690874 - DNA, 347 bp, Homo sapiens
ggcgagtcttttactatacgtcgacgcccgcctgggtcaggcgaggtccagcacggtagtttgtcatcctcacgggtgcctactgctgccccacagagcagctgcttctgggattccttggaggccagagggtagtctcggttcttcttcaggctcggtgcgggcgatgatggccaccagctcatcgcaatcatatgacgataggcagcttccctattcttggctacgcgtgcagggatctacatttgcctctttcaacggtcacacctagctaggagccatccaccagtatcaataccttaggcgtcatcacctagtaggggccaggaacatttggcctcactgag

SEQ ID NO: 690875 - DNA, 1058 bp, Homo sapiens
  misc_feature (496)..(496): n is a, c, g, or t
gcagcatgcgcctaggtggtatgcccgatcctatagtcgcatacgaatctacgtactcgtattgagctgcgtctggtcatattgtacccacatactcattcatcaagcattcttcatccacaacgttcgccctatgtcctcttcagatggaatacatgctttaggactaatggcgcctggagtgtcccatatacgcgcagggccattgctccacttggaccgaacgtcacgggacttaactcattgatctactctcgctactacatgaatggtggcagcgctctgaggcgcataggcgtatacattagctcctataaaacatgctcactcacttgtgcagactcactgaatcagccccaagcatatcctgaccacagcactctctagtttcgataggagtgcatcctggacatatatggcttggactctccccgagtcaccgtccacatagcatctttggtctcagtacagggccttcgatgatagtattgtagtnatagcaaacccgatggagtagttctactatgagtggcctacgactcacaagctactaatagagggacctctccccataaacgcggcaattattgaggactccaactacgattggtgcctgaggtcatctgtgcccttgttccatccctaaggcactatgcactccgtggaacttatccactagagcactggtctccaggtaccaagtacaattccgccggtttggaggacgcagtgtagtgcacaaaaggtcagtcaacctagtattttgactttcaatcagttaacgcttgagatatcaaggatacacttatagtgacccagagaaccacatagcatttggggaaccggagtgcccgcacaaggaaggagatggccgtagatacttaatcgccagaaggatattagcccaacctatttaagcaagtcttaatagacccagcccatcccaattgtgaatcctgatagtcccggggcaaacggtccattggtgcaacctcagcaccgtatacggaacacacacccgcacagaagtgaatctccctttgggggtcccccttctg

SEQ ID NO: 690876 - DNA, 164 bp, Homo sapiens
  misc_feature (102)..(103): n is a, c, g, or t
  misc_feature (151)..(151): n is a, c, g, or t
gccacatcgctcagaacaccatggggaaggtgaaggtcggagtcaacggatttggtcgtattgggcgcctggtcaccagggctgcttttaacctcctggtannaagtggataattgttgggccccccaatccaccactggagaaccccccnttcttccaaattt

SEQ ID NO: 690877 - DNA, 414 bp, Homo sapiens
  misc_feature (4)..(4): n is a, c, g, or t
aaanacaaaggcttttataaaaaaaaaatggatcacccacccccctcctggagaatttaatgaggtttttaatgatgttcggttactgcttaaaaatgacaatcttctcagggaaggagcagcccatgcatttgcacagtataacttggaccaatttactccagtaaaaattgaagggtatgaagatcaggcattgataacaaaacatggcgacttgggaaacggaaagtttttggatccaaaaaacaaaatctgttttaaatttgatcacttaaggaaagaagcaactgatccaagaccctgtgaaagaaaaaatgcagctgaaacaaggaaaacttcaatagaaactgctctgagagcctacctaaaagaacattacccgaaaggaatctgcactgggaatggcaaaaaaat

SEQ ID NO: 690878 - DNA, 165 bp, Homo sapiens
ctgtcagcacagaggaggggaagggagaaggaaatcccagcaattcaatagaagagggtaaaacgactccaaacatcactaaggatgcggcatgacacttagcaggcactgagcaagcaggcccccgccccctctgatctgtccacctcctctgtttctgtccag

SEQ ID NO: 690879 - DNA, 361 bp, Homo sapiens
ctggggtgtatgcatgcgcgagaacggcgggtaccactgcgagtgttgggggaagccttgacagggccttctaagaggctcctccgccgcaaaggctgtccctagcttcttgggtgtgttgagaatgctgaatgccatcgactggcgccggtcagcctgtatagtagaagctggagctgctttcttctgggcctcagtactgctctgtttgcgcccttcatgtcggtctcgggtagtcatggggcgtgtgaaacagcttgtggccttcttagactcaggagttccaggcccccggtggggctctagggagacccgtttgcgctgctgccgggtggtgatgcccgtgccctcggctatctag

SEQ ID NO: 690880 - DNA, 109 bp, Homo sapiens
atcttacctctctcacggcttcttggtttcttgcaatttaagatctttccaccttgatggtcttcataaaacatgttctttctactctgtttcccgccttgtgaagttc

SEQ ID NO: 690881 - DNA, 277 bp, Homo sapiens
  misc_feature (36)..(36): n is a, c, g, or t
ccccaagaactgagtttctttttatagctccctttnagatattaaatgtaacatccccaatttgaggtatgtgtctgaatataataattcccttttgtatgaaattttcattttggaaatgtatgactaatccattgctccaggtatagcttttatattgtactctattcctgattctattttatttgtattacacatccctttatgagcttatttattcatgtttttacttgtttgctgtctccaacactataaattaagtttatgaggccaagca

SEQ ID NO: 690882 - DNA, 570 bp, Homo sapiens
agtgaaagggaataatccagcaagtacaaatgcaggtgtatgtgctgatacacagcacagcccaaaatgtggtagaatcaagaagaaatttgcataggcatttctttctttttttttaagagtctgggtctcactctgctgcccaggctggagtgcagacggggtttcaccgtgtaagccaggatggtctcgatctcctgacctcatgatccacctgcctcggactccccaaagtgctgggattacaggtgtgagccaccgcacccagcccagtttttactcttaagtctaggttattgatccatttgggattaatatttgcatatagtgtaaggaatgggtccagcttctttcttttgaatatagatattgagattttccaccaccatttgtcgaaaagactatcttgaagatggtttgatcttatatgtatgggcttatttcctggtcccgtatctgtatcatcagtgtacatgtctgtccttggcccaggaatcatatagtattaattactatagcttttcggtaagttctgaagtcaggacaagtgccttaccattttcagtaggg

SEQ ID NO: 690883 - DNA, 214 bp, Homo sapiens
cccccgactagccgacgtggtgtggcagttgggggtcagtggaacgacctttggggaaaaacgggatcatgagtcctgagccgtggtggtgagggagagctctgtctggggacccggctggccgaagagcgcgggatgatttggggcactctaggtgaccatggatgggagctgagcttggaggaggacgcacagttgtcgggctagtcggggg

SEQ ID NO: 690884 - DNA, 536 bp, Homo sapiens
gacgtcgaccaggttgcaaaaatccacaaggctgtggttgagatggcaaacagctttaacctgggtgtgaatgaggatgacattgaggagctcctagcggtggttcccgaggaattgactaatgagttgttggaaatagaacaggcacacagctgaagaagaggcaagagaaaacaaaactgcagaaaaccaccatcaagaaaatttgcagtagggagtttagcagaagcttttgcagacctcaagaaactccttaaaaagtttgggccgggcgcggtggctcactcctgtaatcccagcactttgggaggctatggtgggaagatcacgagatcaggagttcaagaccagccagaccgacatggtgaaactccatctctactaaaaatacaaaaaaaaaaaaaaaaaggcctggttttggtggcacgcacctttaatcccggctactagggaggctgaggcaggaaaatcacttgaacctgggaggccaaagtttgcagtgagccgagatcgtcgcattgaattccaacctggtc

SEQ ID NO: 690885 - DNA, 261 bp, Homo sapiens
  misc_feature (214)..(214): n is a, c, g, or t
cagaggaccccttggatagcggatgagggttgatggttgcacaacctgaatatataaacagcattgaattgcacgctttaaataggtaatggtatggcatgtgaacgagagtctcaatgaatctgttatttgaaaaattgtagaggagtatgtcttcagtttcgctgtggctacagtgacaagatacccacacacttcctggcttacaacaagnaagagaaacttattctttccccattcttgcgggatcctagaaataag

SEQ ID NO: 690886 - DNA, 489 bp, Homo sapiens
  misc_feature (20)..(20): n is a, c, g, or t
  misc_feature (94)..(94): n is a, c, g, or t
  misc_feature (102)..(102): n is a, c, g, or t
  misc_feature (110)..(110): n is a, c, g, or t
  misc_feature (115)..(116): n is a, c, g, or t
  misc_feature (123)..(123): n is a, c, g, or t
  misc_feature (133)..(133): n is a, c, g, or t
  misc_feature (176)..(176): n is a, c, g, or t
  misc_feature (194)..(194): n is a, c, g, or t
  misc_feature (241)..(241): n is a, c, g, or t
  misc_feature (243)..(243): n is a, c, g, or t
  misc_feature (265)..(265): n is a, c, g, or t
  misc_feature (338)..(339): n is a, c, g, or t
  misc_feature (341)..(342): n is a, c, g, or t
  misc_feature (392)..(392): n is a, c, g, or t
  misc_feature (396)..(396): n is a, c, g, or t
  misc_feature (398)..(398): n is a, c, g, or t
  misc_feature (408)..(408): n is a, c, g, or t
  misc_feature (412)..(412): n is a, c, g, or t
  misc_feature (416)..(416): n is a, c, g, or t
  misc_feature (432)..(432): n is a, c, g, or t
  misc_feature (441)..(441): n is a, c, g, or t
  misc_feature (458)..(458): n is a, c, g, or t
  misc_feature (473)..(473): n is a, c, g, or t
  misc_feature (479)..(479): n is a, c, g, or t
  misc_feature (481)..(481): n is a, c, g, or t
  misc_feature (484)..(484): n is a, c, g, or t
actttcattaaacataaganatatagatggctgtcaaataatttaaagctagcccacattttatactcaaaaatcacatttacccatgattagncataagtntatatctntcccnngcctaangacaaaaganaaatctatactggccaatcatggtacatcatgggacaattaantcgttgttaataacaganaatcagtatagtaaaaaatagtttgatcactgaggtctttgcaaaangnttatcatttaagtctgccagcnggcttttattatccagctggtcactaagtttatagccttaaaaaataagacaactcaagtagagataaaaaanntnnatcatgccacaaaggacaggagctctcctgagtagatctcacctctttantttnanagcctttgtntgcntccnaccaccacttctcaangcaaatgtnttctttgggtacatggntgtattcccgttgcntggagnanaantctgt

SEQ ID NO: 690887 - DNA, 425 bp, Homo sapiens
  misc_feature (4)..(4): n is a, c, g, or t
  misc_feature (51)..(51): n is a, c, g, or t
  misc_feature (103)..(103): n is a, c, g, or t
  misc_feature (109)..(109): n is a, c, g, or t
  misc_feature (113)..(113): n is a, c, g, or t
  misc_feature (165)..(165): n is a, c, g, or t
aagngaaatcgagggttggtgctagaagacagactctgtggatgattcacnccccccaagttaggaggatggagcctgcttcattaagaagctgggggtaggntggggntggncgaacactaacaactggggaccagtcgggggatcccttatttctggcattgnggaacctagagcagccggtgaggctctctagtttataaaatcatggaagactcttatgcagactcttcttaagtgttaatagggattttttcagcttattttggttgcagtttccaatttttaaaaatgttgaggtaatctttcccaccttcccaaacctaattcttgtagatgcattagtgttgaaccaatgccttctcatgtctcaattctttgtatatgcattcttttcagatgtattaaacaaacaaaaaccctcc

SEQ ID NO: 690888 - DNA, 244 bp, Homo sapiens
aattttcccccggggggttaaaattttttcccctttttttggggggggggggggccaaaactaaacccctgggccgcccggggaaaaattgtaaaagggaaattttttttaaaaataaaaaagcgggtttttcccggttccggggggtttaaccccccgggcccttttggggtttttttttttaaaaaggggacaaaaccgggcccaatttttttttaaaaaaaaaaaaccctttgccttttta

SEQ ID NO: 690889 - DNA, 1206 bp, Homo sapiens
  misc_feature (143)..(143): n is a, c, g, or t
  misc_feature (1206)..(1206): n is a, c, g, or t
gatatacccaccagcatttccgtgggatggtcttgattcatgggaagctctacaccttggtcctgactagacccgcgtatgctgcccatgacaaggaaggaattcccgaaatacgatggatgaatggcgaatcagtatatccntcggtggttcaaacaatgaaagggtctatgactcatctagcgagatggcgactagctcctctcttccagcattcattggtgcggctcccggggcctgtcctctacacgggcgactaggcgctccaacgcgcgtcatggtcctggcttggattctatcggagggtcaggacgagcgctctgcgtcaatatagtgctagacagaagctcccaattcccttcgagcgataccagagctcgtggggagtaccaacgcgtctgcgctgataatctctatatgggctggcttgtcccttctccgttaatcataacgtatgtcagctcgaaggggtccgcctgggctggtcctggccacgttgatttcaccaagagcccggtaggcttgggggacttgtagctaaatgattgtcctctaaataacctcgttaaccgaccgcaggacttgctcctcgtgggcatagcgtagagtgcgagttctacgcctcctgggagcgaacccttgtataccatggatcgccttgggccgggggctcgcccctatacaggcgctaatattgtgttcccccccgctagtggtgttccattcgatggttctagccgaggtgggctacttcggatctaatgaacctttctccgttcgcggttcctataatcgcggttggcgcgcccccccttttggggtgcccgtgtggtggctttgaaggacccctttgtagtccctttgtgtccaggcgacacttggtggtgacagtgtgcttccgatgcgggagaggtttggccgccttctcctctgcgccccatttcgcccttttcggcccccttgagagcaccccgtatttgttgttagaactccctccttgtaacccgtaccaacggtttccagggcatttcctttcgcgcactttttgtaatccttccggttctcttcgctggcattttcctaagggactttttttggacctctcggttttgccagagtgtttgctcaggggcgcgggcgggggtcatgttgtgtctcgggggcgttctagcctttgggttcgacactcgggggggggggggtccn

SEQ ID NO: 690890 - DNA, 179 bp, Homo sapiens
tatcgaggctactaccgatctttcaagcttacatacgttgccacatagtgcatctcttctgagtttaccagtggagggaacaaacaaaggtctcatattttctgtgcatctggtgattgcttgtcatggcgagcattctttcttttcaaataatcttgctggggggaccttgtgaatag

SEQ ID NO: 690891 - DNA, 221 bp, Homo sapiens
  misc_feature (135)..(135): n is a, c, g, or t
  misc_feature (165)..(165): n is a, c, g, or t
  misc_feature (200)..(200): n is a, c, g, or t
tggagacagggtctccctctgtcacccaggctggagtacagtggtatgatcatagctcactgcaacctcgaactcctgggctcaagctataccttccaccttagccttctgagccagcagggactacaggcacantgccaccatgtcccggctgatttatttatntttatttgggaagatgggggtctcacatatgtcgnccaggctggtcatgtcgagcg

SEQ ID NO: 690892 - DNA, 136 bp, Homo sapiens
gcgcactgcctccacacccacccctccccagacgggaggcggtctggagcctcaagctaatggggagacgccccaggttgctgtcattgtccggccagatgaccggtcacagggagcaatcattgctgaccggcca

SEQ ID NO: 690893 - DNA, 811 bp, Homo sapiens
caggagagcaatgcaaaaggctggaagacttggaagcacagtatttgtagcaaatctggattataaagttggctggaagaaactgaaggaagtatttagtatggctggtgtggtggtccgagcagacattcttgaagataaagatggaaaaagtcgtggaataggcactgttacttttgaacagtccattgaagctgtgcaagctatatctatgttcaatggccagctgctatttgatagaccaatgcacgtcaagatggatgagagggccttaccaaaaggagatttcttccctcctgagcgtccacaacaacttccccatggccttggtggtattggcatggggttaggaccaggagggcaacccattgatgccaatcacctgaactaaacggcatcggaatgggaaacataggtcccgcaggaatgcggaatggacacggcctaggactttggaataaactaaaatgggacggaatggaggggccctttggtggtggatatggaaaacatgggatcgatatggatctggggatgaacatgggcaggatcaaatgaaatcctcaagtaatgcactgcaagagaggagagatcattgaaaagcagggaggcaggtggaggtgagaaggaaagcgaccccgggaatcgagaaggactggggccctgggcacttgaccgacctcaagggcgtggacaggcaactggacgcgccataggagcgcgggccaaggggccacgggcatgggatcgacgtgaagcatcaggaagactcgagcgccatgcggaccagggccaccaggaaccggcaaag

SEQ ID NO: 690894 - DNA, 198 bp, Homo sapiens
atacagtatggggataggggtagtggtgtcgtggtaagaagtgggctagggcattttaatcttagagcgacagcctatatcactgcgcccgctcataaggggatggccatggctcagggtctatagattgttgggtggttgcgtgtacatgagtgaggcaggagtccgaggaggttagttgtggcaatcaaaatgatt

SEQ ID NO: 690895 - DNA, 392 bp, Homo sapiens
tccttctgtgctcaggtagctctggggtgggtactgtgatgtacctagattcccgcttcaggactgaaggttgcatttccttggcagggctggtgagcccacctcggggactgtctgcattgaagaggggcctagagcccaaggccgagctccctccccaggggtctgcattcagtgtgtgtgtgtgggaggtatagacccagactcactgggcagctgtgatgggccttccagccccagagctctcatggtggtatccctgaggccactcaaactgggcgtctttgcccaccccacccccccccctccttgctcctggtgttgtcttcaggacgcccattcataaacctcctgcatgctgctgcctgctatagaggcggcttccccgccca

SEQ ID NO: 690896 - DNA, 1628 bp, Homo sapiens
agtagaagtggcgcgccgctatattgtgttctgcgcaggtcgctgagttatatgggggggcatttctctcgtgtgggagtaagtcgcgccaaaaggtcttctagatgaggggctttaggggtgtattattctcgtcgggactactctggtaatatcgtatggggcgccgataaggcgcgccgttggtaaacaagcaggtttgcgcgtgcttcgccttaatgtgtcttcctcggtcttgtgttgggttataccttcctcaaattgtagccgttctcggtgcgacgaaagccaccgctctggggttctgcggggtcgtgccgctatgtttgccgctagtgctgactcaggggaaacgctataacgggggttggaacgactgcaatgtatgaagctgtggaggctctctcggatgcagaatagttttcagggggaatagtgtggccactcacggtaacataatacgtcgtttcggatgtgctcgccgggctatttcgacccgaccgcctgtgtgtcagcgctgggatatgatgattgttccctgtcctaaatgggcccgtacactcggtgtacggggcatcctctatcagtgttttatcgctgtagtgtgttgcgcaggctagatgagcggtccctataaggactagggtagcccgtagcaggggggttattaccaaatcgtgccgggttgtattaaggcctttcagggtaggataagctgcgcggctttagtcccgcccaatgtctcaccaggctgtgtgcgactgtcctccgggaagcgcgtccgggtagagacaccgtacattaatgatgggggacccaccaagcggggtgcgcctcgttacatgatgaactgcgggtaactaacgccctccgggggaaatttggggaaaccaggtggcaattcaaatcccgccttgggggacgcctgcggcgccatctgggaaaggtgcgtttgccgctgcagcgtctggagctccacggcgcagacaggtgccgcccctgtcgaggctgtggtctcttgtaacccgcactaagggcctcttttggtgtgttctgtacaggggttttgcttggggaaatggccaagattctgtgcgtacgtttggggcgttaacttctttgagggggtcttgtaggtgtgtctctagatacagatgtatgtagactatttggggagtatattcatttatgtattggctggtcgagtatgtaagaggagcagcttgtgtgtggcgagctggcagaacagtgtgaacagtctgtttggatatggtaggtgaacgtagagatgtaagggcagacagagagagtctaccaagcttacttagatttgtgtaacgtagacaggctgctgcactgtgttagtctaggactcttatactgttcgttaaagatcttgttgtaatatgttgccgctcggctcggggctagtgccgcgtcctgacccgaccaggggttcgaagggtgactcaagtgtgggcaacaggtggtatctgaggggtgcggccagggacagcccgacacacatccagagcgtgggagacggtgggaccttgtactcctgaccatgtgcctgacctgggagttttgtattcatcttttgtatagttgtaatcacttaagacagt

SEQ ID NO: 690897 - DNA, 1009 bp, Homo sapiens
  misc_feature (482)..(482): n is a, c, g, or t
tccaacatgttcaaacttttaaactgcaaggaaaaagtcttacaattcttttcccaacgagttgtgaccaacccatgtgcaacttctcaacagtgtgacttctcccggcaaggaacagccgcccgcaattccactcctctcaccataaatacgtggtatgtggagtgtgacgggcatagagtaaaacaaggccagtttcctgtgcaaacctccgagccagcgcgtggggaaaagcctccctgtgagagaacccccggggaaaaagccgtgggggaaagcccagactgtgtgtggtggacaccggggtgcctccacctgtgcctggggtgccactcacagcccggaacgaggtggccacgggcactggaaaaacccgccgcccgtggtgccctggtgacgcgttgggcgcttcaattggcgcccacatgggcacagaagagatcgggtgagatagtgaggcgccttagaacactggcgccagnggagcacacttgggtgcgccgcgaaaaggggtctcctggagtctaacataaatagtgcgcgcacaaacccccgtggggggcgcccaccggggcccagtatgagaaaagagagaccaattccacaaaagtgtagaccgacagtgcccctcatcacataagtgactaaacacacaacacaacgccgaggagacaggagaaaggagaaacagaggacaaatagatacaggggggagaaattacaccaaaaagaaggggggaagaccgctggcgagactatcaacacccagcggtgatgactccccccacaggagaggtgtgacatgtgaaggacccacgacggaaagaaacgccacacatatcccacgaaaaaaaaacacgacgcggggggaaaatcacccaaactactatatacccaacaacaggaccaccaacaaagaaacgtgcctcactacagtcagacgagcgtccccccacgaacaacacacacgcagagacaaccaccgccaacacaaaacacccaaaccacc

SEQ ID NO: 690898 - DNA, 800 bp, Homo sapiens
atgtactctaattgattatgtatattttatggtctatcgttatggtttcctatcttgtataattatcgttatggttactatcgttatggtgatcgttatggttattgattgttatggtcatcgttatggtgattcttatttgttatggttcacattgatgttatctataaatcttttatggttatctttattggttatctatcattttatggtcatcgtctatgccatcctagatggtcgttatatctatcgttgcatatgtatgtattattcatccttcaggctgggcattatatcctgcatgtgttggttggcatgcatcgcaggcttatcttgcattttgattttatgattctgatattcatgttgatgtcatgctgtatgattctattgctttgctattagctgtctcctctctcagtatccgggtggattggtattatcttaacatttttggtgtatttcctttaatctctatttggcagccgtatccctaatctggggtttgctttcgatcgcatttttgatccgagaatgaggtgctaaggtgttacgctctgggcggtgattcttggattcatatcaggtaggtgattatccggttttgaatttgaatttttgtttatcaatttttggttccattttgttgtgattgccggattccatatgtcatgtttgggcaaccttgaggttggtttaacttatctttgggggatcctggtgcagcggttattcgatataccaaggatccttctgtatgattccagagttgttcatagtgtttcctgttttgatgatgt

SEQ ID NO: 690899 - DNA, 206 bp, Homo sapiens
caagactatcaagaacgcaatgctctattgaagcctaaaatttagaaatggttaaatgataagggggcctgggcattaggtgttcaatatctacttcaatctggcagaagcaggaagcaaatggaaaatacaatgatactaagggtatttggttttattaaatatagaccctggggcagaagcaggaagcaggcagaagcaggaag

SEQ ID NO: 690900 - DNA, 545 bp, Homo sapiens
cgtcgatggagtgaagcaagctttgtcacccatcaatgaaatataacttcatggcgtcacgagccctgatgagatccaacaagatttgagtgttaaatacagaagatatttcaaacagagacccgtcagagtgcggatatctgcaatggaattgattgctgaaggcagagagtataaagaatctcaagaaactaattagtgccatttgcatttaataagccattggtatagcaaggctaaaaaccttggctgtgatgacaccaggatgtgtttatggaattgctgcaggaaaacacacattggcagcgtgacatacctctgggctcacaggaccaaattctccaagagacttaaggctggggtgtgtagcggaggtatttcttgccagatgggagctctttggtgaagactcctttcgggaaaagtttttttggcttcttcttcagggatggttggaaggaccatcacactatccccatccttccaatcaactggggtggcaacccttttttctgctgtcgcagcttcaaggggggacctctaga

SEQ ID NO: 690901 - DNA, 832 bp, Homo sapiens
ggggacatgctctctgggcttgggttgggggcgcctctctgctccttaccactgtccctctggcttcccatagtggggcctgggagggttccctggcttaaaaggggccaagccactatctcatcctggcacgccctactccactgccctggcagacaagcaggtgtggccaatggaggggggtggtgcccccaggattcccccagccaaactgtctttgtcaccacgtggggctcactttcatccttcaccaaattctctagtcacgtactaggtggacagccccttcggctacaggacggccggagggggtgacgtcccctatccctcttcattgtggggcagagccccccttgtgccctctgcgtgggaatcttgagtacaatattgtggtggataggcagatgacaggccactttatgtgtccaggttgagggcccaaaggagccctgtgggcgccacctgaggtggcactggggttgtccccataagccatactttgttccgacatacagccatttccccctcctcagatggggcaaccaataacaaggaagctcaacccgtggccagggtcccgacaacaaccctcaatgcgcttccaggacgcccaagggtagcggaccactatagccctccgtagccacacaactcggaaagggggggacacggctagtccagctcgacacgggaatagcagtgaacagagcaatggtagtaaggcactggttggcaagaccctccaagaactagtggacaggctgaaggacggagacgcaccacagagggacccaagcgaacagggaagcatacaagaggcgccgccggagac

SEQ ID NO: 690902 - DNA, 868 bp, Homo sapiens
acaccttcgtgtcggtgggtgcggacgcggctgcgcgtacccggtgggggcggctgccccctctcgtggtaccccccccgaggtttttaccgccccttatgccggtatttctcccccccggcgtcctggcccccggttcctttgtgccgggggagccgccccccgatatttttgtttgcacgccctctataccgggctctccccttgcccggctcccggcaaaaattccccgcggttctctcccctttctcgctccgcggcccggggttctacccccgcggacacccccccaaagtggggcacacccatggggaggcccccagcaacctgggtgggctcttaggccacgccaaatagcgccgtaaactgtggaaccgcagacctcctcccactgccgccgggtcttcgccgcccattccacatccccccctggccgcaccaccaagggggggcgaccccccctctcctcgacatcagaagaggacaaagggaacatattcagcctctcttctaggatcctgtagtgaagtcgatcccgcccgccccccgcagtatagcagctctactcggcacgggcgccccgtggctgagtgtgggtgaaccacgcccacttgagaggctgtaagccggcgcggatctcacacttgggccccacaaatttgagaccccgcctgggcgccaccacatgtggaccccgccccaaatgtggaaaccccagaacatagcccacgctgcgtgccgcacagcaaaccctagatctccaccaccacgtcatcgggggacattcaagtgcgggggctcacaccggaacccccattccccgggatagagatgggcccccagagggggtcccctttcccaccaaaac

SEQ ID NO: 690903 - DNA, 236 bp, Homo sapiens
ggacgcgtgcgcttatgtcacagactgggcacgatgcagaagtaaaggtcaatgacttggaagtccctgatgctaggccttgattcttggatagcatttctggacctgccctgagccagataggagcccacagacataaagggtaggttctagtgcctggcagcattcgtgactagctgaccacacaggccctgtgccttaaacaaaaatcagtggtagtcgggcagtgagttcca

SEQ ID NO: 690904 - DNA, 103 bp, Homo sapiens
tacaagcagtcacagcacattgacggaggtagtgaggcgctgcccccaccaatgagcgcttgtcaaatagcgatggtcttggcccctcctcagcatcttattc

SEQ ID NO: 690905 - DNA, 284 bp, Homo sapiens
gcgtcgacttctaccttcctccctctggaatccagacacaactgaccagcattaacattaaaacagagatcttaagctgggcacggtggctcgtgcctgtgatcccagcactttgggaggccaaggtgggatcgcctgaggtcggaggttcgagaccagcctggccagtatggtgaggccatgtctctgctagaaatgcaaaattggccggacattgtggtgcacgtctgtcatcccagcaaggcaggcgaatcgcttgaacccgggaagcggaggttgcggtg

SEQ ID NO: 690906 - DNA, 405 bp, Homo sapiens
agatgaaattgccatttcaaattttcctcatttcattcactccagtcctttcctgttgctggagctgccaaaatcaaatatgtttatgcaaatgttccaaatgcatctgaagtgagttcactcaggtttcctcagcagtaaccccaaaattatataaatgacttcctcttttcccacattcctgcctcacaatccgtcttcattcagaaaataattgctacatcaggggtctcctcagttctccttctacagtgtctatgggttattatgaacagttttctgtctgtttttagcactacgatgtgacgtcgtgtaaaatctgtacttcctctctttctccgtacacccttaatgacaagatgctaccgaattatagcagaattatgctggagaaatgggctttcg

SEQ ID NO: 690907 - DNA, 294 bp, Homo sapiens
gtgagccgggccccagtttattagaaaaaaataaggacagactaatttggtctaattcagaagttatctaaaagttagttcaagttacagttttgaaaaggttatttatgaaacaatgtagtaaggaaccattaagtaggggagaaagatgaggtacagtttaaataataaaatattctttaaaacctgataaagaattggaaacatttggctaattaacatttttatagttaaagctcttagtcttgattaaagtaagaagtattgtaaaaatgcattggcagtttggcaact

SEQ ID NO: 690908 - DNA, 392 bp, Homo sapiens
  misc_feature (303)..(303): n is a, c, g, or t
  misc_feature (365)..(366): n is a, c, g, or t
ggggctttctaagtccaccccacaccttaacaaacattcattacaggaggaaaataaaggacttttgtctccaatctttgtgacatggtttggctctgtgttcctacccaaatctcatcttgaattgtactccgataattcccgtgtatggtgggagggacctggtgggaaatgggtgaatggtgggggagcagggggttggtttccccaaggtgttcttgggtaaggaatatagtttccccaggtttgaagggttgaataggggaaacctggttcacctgggtttcaatttctcttggccanggctatgagaggtgcccttttcccttcccccaatgtgtgtgggccctccccacccaaatgannggggcccaataccccttttttttgtg

SEQ ID NO: 690909 - DNA, 213 bp, Homo sapiens
gatctcatacacggatcccgtccaacgcaccgtctagctactatagtctcaggttattgacaggcagccattgttcaccatcacctgagatttacggtaacacgcgctcagtgttctcatcattggggtaggtttccaggaagattgctaagccgttgtaagttatctttgcttccaaacacaggccctggcacggtgcgttggctccaaccg

SEQ ID NO: 690910 - DNA, 308 bp, Homo sapiens
  misc_feature (25)..(25): n is a, c, g, or t
  misc_feature (78)..(78): n is a, c, g, or t
  misc_feature (178)..(178): n is a, c, g, or t
  misc_feature (200)..(200): n is a, c, g, or t
  misc_feature (219)..(219): n is a, c, g, or t
  misc_feature (291)..(291): n is a, c, g, or t
tagagacggggtttcgccatgttgncatactggtgttgaattcctgatgtcaggtgatccacccgcctcagccgcccnaagtgctgggattacaggcatgagcagcacacctggcctcaagccatcattttgaagtgtacaattcagtggcatttacgtacattcacagtgttatacngaccaccacagacctgtttatnctattaattaattaattanttttgagggtgagtctgggtgacagagcgagactccgtctcaatatagatagatagatagatagatagatangatagatagatacgaga

SEQ ID NO: 690911 - DNA, 170 bp, Homo sapiens
  misc_feature (8)..(8): n is a, c, g, or t
atggaccncccccaccctaccacacattcgaggaacaccataatagctattggaacaccgtaatagctagaggaacaccgtaatagctagaggaacaccgtaatagctagaggaacaccgtaatagctagaggaacaccgtaatagctagaggaacaccgtaatagctag

SEQ ID NO: 690912 - DNA, 806 bp, Homo sapiens
ttttgtttcttctcgtgttttggttttgtttttatttcttctcttttgtcttttcttcttttctgtgtttggttcttttttctttttgcatttgtgtgtttctctctcttttttctggtgttttttcattgtgccaatgtttagttattttgctcttgtttttttgatttgcgtcttgttttcatgtgttttggtttccctttcttcttttgtttctgttttcatgtctgttttagtttttttctttgctttctttttttttcattgtctcttgttgtagtgtttttttttttgtttgtgttttcttttccttttttctttgtatttgttttgttttgttcttttttgtggtttttgttttttcttgtgtttttttttttttgtttgttttttgcatcttttgtctattgttctcttttttttctctttttcttccttctttctattggggggccgctctttcctcccgcgcgcgagaatattgttgttttctccagggctcctcccatatataagttcctttggaccacatacccacacagagcgcccaccccgggagacacaaagacctctcagagagaggtggcgtgtgttcccagagagagatatatttttatccctccccccgtcccttattggggtcctcccccccgagacagttttttttcacagagagtttgtcactctgggttctctccccccccctcctcccccccgggggcgcccctttttgcgcccccccccacccctctgccccccccccccaatttgtgggaacacggggtttgggaaaaaaaattttttga

SEQ ID NO: 690913 - DNA, 760 bp, Homo sapiens
gccccgtggtggtaggaggacacgagagacagggagagtcagcctccacattcagaggcatcacaagtaatggcacaattcttcggatgactgcagaaaatagtctgttcgtagtgtccacaacctcaagacgacacgcgttactttgcctgaggattaagctctcctaaaggctaagcttgtatgatcatctctcactctctcttgtcctccttcagcagcacatgtaaaagaagaagtacgtcaatagtcagaacaggcacaggaggaagtggcttcgctgccggagccccatccacggatcacctgggagcacatacgaagattcacccatcgttatgttgaactttacgagtcacttctcatgcttttcatctataattcacacatatatgcagacgaagatatgtttcttttctcaacacttgtatacaagcactatgccccaaatactatgtaatgatctatactacgataactcctagatgataatcttagagatcgctatatgatacaagctgtggccatgcactgaggacaaggagctcacgcccagagactgggctgctctcccggaggccaaacgccaagaaggtactggcaaagtcaggactccagggagaatctgcccggctgcagacctcggtgtggacacacgctgcatagagctctccttgaacacagaggggtctctagacattccgcctacctattagcttttctttattttactaacttttttacgggcaaggtattttga

SEQ ID NO: 690914 - DNA, 271 bp, Homo sapiens
ttcagggagtcatctgctgtgtgggggatgataagagagatgggtggctggcgcggtggctcacgcctgtaatcccagacttaggaggctgaagtgggaggagaacctgtggggtcaggagttcaagatcagcctggtgaacattttagtagagacaagtagaaaccttgtctctactaaaaatacaaaaatttaccaggcgtggtggcacgtgcctgtaatcccagctacttgagaggctgaggtaggagaatcgcttgaacccaggagg

SEQ ID NO: 690915 - DNA, 237 bp, Homo sapiens
tcgatcgtgatgacacaggcaggttactgactgagagtcaggccaaagccaggcaagtggccatgaaagaagcagtgacccaaactgatgcggagcgtggcaaaatagttaagaaagaagcagtgacacagaccaaggctaaagcttgggagctggttgccaagacagaggccaagagagaagcactgacccagaacaaagcggaaactcatatattggctgaaaaagagacagaga

SEQ ID NO: 690916 - DNA, 660 bp, Homo sapiens
  misc_feature (1)..(1): n is a, c, g, or t
  misc_feature (98)..(98): n is a, c, g, or t
  misc_feature (114)..(114): n is a, c, g, or t
  misc_feature (116)..(116): n is a, c, g, or t
  misc_feature (119)..(119): n is a, c, g, or t
  misc_feature (122)..(122): n is a, c, g, or t
  misc_feature (208)..(208): n is a, c, g, or t
  misc_feature (212)..(212): n is a, c, g, or t
  misc_feature (226)..(226): n is a, c, g, or t
  misc_feature (232)..(232): n is a, c, g, or t
  misc_feature (241)..(241): n is a, c, g, or t
  misc_feature (262)..(262): n is a, c, g, or t
  misc_feature (269)..(269): n is a, c, g, or t
  misc_feature (294)..(294): n is a, c, g, or t
  misc_feature (321)..(321): n is a, c, g, or t
  misc_feature (327)..(327): n is a, c, g, or t
  misc_feature (329)..(329): n is a, c, g, or t
  misc_feature (392)..(392): n is a, c, g, or t
  misc_feature (397)..(397): n is a, c, g, or t
  misc_feature (399)..(399): n is a, c, g, or t
  misc_feature (436)..(436): n is a, c, g, or t
  misc_feature (471)..(471): n is a, c, g, or t
  misc_feature (476)..(476): n is a, c, g, or t
  misc_feature (485)..(485): n is a, c, g, or t
  misc_feature (529)..(529): n is a, c, g, or t
  misc_feature (547)..(547): n is a, c, g, or t
  misc_feature (560)..(560): n is a, c, g, or t
  misc_feature (565)..(565): n is a, c, g, or t
  misc_feature (579)..(579): n is a, c, g, or t
  misc_feature (658)..(658): n is a, c, g, or t
naaattatgctaactctgagcattgatgtttactctgggttttagatttagtctttgaaaataatgtgttctaaacctttgccatcaccatctatgtntccaacatcaacactntnatnaanttgttcctgtttaggcttttattccgatttctctcgaacagccattaacacgcatgtgtatctttttgtttactcccactcaactntatnttctatgtagggcntgatanagatgttanttgatgttatttaatagctantgaggtnagacaatccaagaccatcattatantaaaattaaagttatttatggaagttnatagananttccagaattggttttacctcctacatgggaacatgttcaaggaacccaggacgggcttactngtctnantcaactcttcccattcatcaatccctattcaccagtngcacggaaagggggttctttaacaaagcattatanataanacctctacnaaactaaacataaactttttttgtagttaaatgcataaattctntttttttccacccctttnctccttttacacntcaantaaatctcactttncttttattttcctctatcttccaacctttttccatttaatattatacatataaaataatacaaccatcaatcataaaantt

SEQ ID NO: 690917 - DNA, 106 bp, Homo sapiens
cgctcttagagttcccggcagtcagtcgctcagtacataacatatatttatacacaacatgggttatatccgcagtcattcagttctccttttctacaccaaacag

SEQ ID NO: 690918 - DNA, 1725 bp, Homo sapiens
  misc_feature (125)..(125): n is a, c, g, or t
  misc_feature (473)..(473): n is a, c, g, or t
  misc_feature (1457)..(1457): n is a, c, g, or t
cgatgagcaagatattcagaaagaataggagtgattatcgtcataaacccatgactctctacactttcgaagcctccacttacagcccacttgtgacgagctcgtagttcgcgtatacgtacagngaaagtaactttatgtacctcagccaggtgtatcggtacttgcgcaagagtatcacattctagtcgatacacgtcgtcagatcggtaatctaatgacacaacatcgaccgtgaggcctctactcgtgattgacgcgtgctcgatcgtcgtgaaccgtcagctcatgcgacaaggacgtcgcataatagcagcttcggaaacttaactgtgcagtatactctagcccttaaagcagggtatacacagcgtcgtctatccacttagcccccttacgtgagaacgacttgaaacggaagagattatactgcacactcgctaatcgtagagaacgcgcacagtgaagaaaancgtcacgtgggatgagatgccgcgaaaagtcccgtgaattttccgcatggggatacttgcgtgcaatttaatattaaagcacaaccaaattgtttccgcgccggggaattctcctcacgttttccgctctaactaatgaacttccactctcatacccgagcgtaaaggtccctttcgaccaggtccacgtactgtattacttctatcatttttcccgtaaagggtactttttcttcaaatcgagtcacccgttagcgagccttctacacataagcccttataactcgaaacgaataagcttcacttctacttatgaagataacgctcgagacttcattcgccgaaccaatcttttataaggttatggtgcatcgcgaagagcgattaagctccggggggatttctctatagccccacctgtaagggctgcattcaagagaacaaagtccaggcgacagtagaaattcccccccgcggtaattcttataatgagcgcccttcagtttaagcggggagggcccaaaataaaatcgcgtgagggcgccctttatagtacccccatccccgttatggaataccctagaagcccttggaagcttaagtaaacataacggccgtagttataagcgcctaaaagagagacagagatataatccaactaggataacgcaaaaaggtggtacccaataacgtgccaagatccagttgtaagccgtttaaattcccccacaaagaaggggcaataactaggtgtaagagctcttgttatagcatatcccaccctccagtttgttataccaatttcccaaagacactcccataagaccgctaatgtcgcgaaaaattcgaccccttagttcgttattatttgcgcccggggagataacccaagtaaggctagtatatatattctctccgacgacacagctgtgttgtagtccagggggaaggaaaacacccaatagaaacagagcgcctaacagntcagagaagatcgacgagcagacagcgaagagagacgctacccaccaaaaacgagacgaggcaccacctcagtaagagaaaaagaggccacaccaaaaatgtgggtacaggcacctatctattgaccggagcaagagagaaacgctagcacgacagcaagaatagaacactacacctcgcgcaggataacgatgcgagtaagtgagagacaaaaagtatagttgcattcaccggcgtccgcgcaaaaacaacgacacagacaaggcgg

SEQ ID NO: 690919 - DNA, 413 bp, Homo sapiens
ttgatgctgctggtcagatctagagtatccccgacgatcaacgggcgactccttgcaaactgctcccagtccctaattatttccataaagagctttatcaattgcgcaggtgtatgtgtacatgtcatctcagctctatcaatcccagttcttctttcaattctcctttctcccttcatacgattaagatgtttgtcctttgcactttccccatgatagcaaaggttataccatattttgtcaagaggggggagtcgcccttcttgtcttacgactaggtctaccccttggctattttaacaaaaaatgatatcctccggcatatggcccatatggcgaaccaagaccccgtttcaataatattcaacttaatctcacatataatgacagagaacatacgcatgaggaagtta

SEQ ID NO: 690920 - DNA, 1147 bp, Homo sapiens
atcaccaccttctctaacgcatcctccccatcattctcgtataggatgccgcagaaatgtaaccagctgtccggcaaaagcatagtagtaccggaacatgttaccaggatacacacaattgatccaccagctgctattaatcatagtcagagttgctgatattcccgtgatccctgttcgttgcacatactcattgacttgtagatcttcacgcaatcatttcatttgctgactccagcgcacgcattgctcaacaatgcattaatgaggcctccctggacaaggctatccaccttcacgttgaacatcatagaacccaaagtctccaaaatgcagctcgcatgctcttgtcgtgattgtcatgcgaacacatccgcagagtgcaacgcatgtatatcagcgtatgacattggaccgcacatacactcataacctgcaatccgtggctcgttataatccttgcgtctgatcccatgaggatatcagcatatacttatacatttccgagaccgtcttacacattgtcgtccccaagtatcatcgccttcgcttacgatcaccgcttgttggcttacacatatattgtacgttgtatagggtgccgtgcaaggcaagtgtctaccgaagaggtcttactcggaaccatccatcttacaatggtatagaccacgctcctttgtctctcgatgacagataggtattcacacgtaagttgatacctttaccccgctcgataatagagatgcggagcttagtcatacgggcactcgcgagaccatcatctataaggtaagaccgcaggtatgcacggtctagaaactacttcgcagctaagcgcctatggaaatactttccccattgatcacaaattagacgtgtaagcatcgcgtcgaccatccacgagaggatggaaagcccacgttcgcatttacccacgtcattcatacacgaaagcctaacctggatccacggtgttggttcctcacccagtgaacaggagcattatacctctcgcgtgattaaaccgtgtccctacagacatataccaccaggtgtgtttacccccatcagttcctagagtctcctgtagcgccacacagctcatagttaggcgctcatgttggactcccggagattgccacacacg

SEQ ID NO: 690921 - DNA, 938 bp, Homo sapiens
gagagagcccagagacaggagagtgagctcaccaggcgcagcgccatgaccagtaagggtcccgaggaggagcacgcatcggtgacgctcttcctgccagtacctgcgtattcggcacgtgtccaggatccaagcctgacgtatggagctgctgtggcttgcgtttgaggagacagacacgcctagcgtgggcactgggctgtcagaaagtagatggtggctagccatggcatatgtggtgaccgtagttgaccgtggcctaggcaccaaaccatacactcgtccgtccatctggtctcaatcgtcccacacggagtgtggtgcctgtcttcaaggaacatcggagtcacgaccctttgaggccttcaaggattctgagggctacatctatgccaggggtgcccaggacatgaagtgcgtcagcatccaggtacctggaacgctgtgaggaggctgaaggtggcgggtcaccggttccccagtaagcatccactatgacgcattagtcgcctgcatgaggaggttcggggggtcaacaacggtcgatggagtctcgtgcgtgtcacgcgggctcgaggttccatgctcctgagggcagggctcttgtccctgcgatgagaggcatgagcctagatgccccactcgtatgtcctatcattcgctcattgtacatgagtagagaccggtagtcaccgtgtgttggggtgtcgaggttacccagacattaggggaaggcctaaggtctatgactacaacgcttacatggagggaccacagacagcagagaaggctgcacaagggttgtaaaatacattcctggcattccgggagaaaggaatggcagagggctgaagtcaaaagcgcacacctggaaaggaggggttcgtgacctccgtggaactgaataggctagagggtgcgtggctaataaggtgata

SEQ ID NO: 690922 - DNA, 326 bp, Homo sapiens
aggaggttggaaaaaaaaagggttaaaccaaagcccagtccagggctgtttacagggttgcaggcgaaaaactggggggttgggctcccctaaactaggactccagggcccccctctcccaaaagacaaaggcccttgcattgaaggaggtgggaaatgattagattttgaacaaacggaattatttttcagtctttttcaaaaaaccaaaaatttccatagttttaatcatgtaatataacccatttaatgtcccagggttttacttaaaaggggatcatgttttccccgttggtatgtagcctggataaatgctttttttttta

SEQ ID NO: 690923 - DNA, 248 bp, Homo sapiens
cggcccggctttccccccccccccggggggggccaggggggggtacccccaaattttttgggggggggccgggaaaaaaggggggcccgggggggagggggggggcaaaaccccccctttcccccccccccccccccccccccttttcccctttttgggcccccttccttcaagggggggccccttgggggccgggcgggttttttgtttttggggctaaaaaagaaaataaattttttttttagcca

SEQ ID NO: 690924 - DNA, 836 bp, Homo sapiens
  misc_feature (150)..(150): n is a, c, g, or t
  misc_feature (210)..(210): n is a, c, g, or t
  misc_feature (238)..(238): n is a, c, g, or t
  misc_feature (256)..(256): n is a, c, g, or t
  misc_feature (262)..(262): n is a, c, g, or t
  misc_feature (305)..(306): n is a, c, g, or t
  misc_feature (322)..(322): n is a, c, g, or t
  misc_feature (333)..(333): n is a, c, g, or t
  misc_feature (405)..(405): n is a, c, g, or t
  misc_feature (432)..(432): n is a, c, g, or t
ggacgaacacgtgacgcggtcgggcggaccactgcagactgagcggtggaccgaatggggaccgctgcttataagcgatcatgtttctccagtattacctcaacgagcagggagatcgagtctatacgctgaagaaatttgacccgatgngacaacagacctgctcagcccatcctgctcggttctccccagatgacagatactctcganaccgaatcaccatcaaggaaacgcttcnaggtgctcatgacccagnaaccgngccctgtcctctgagggtcccttaaatgatgtcttttctgccnnctgttacccctcgagnatcgtaaccanaatcttcggactgtgagccctgatgcctttggccagcatactcttgtgcatcagtctctcgtgggattgatnatgctgtgtgtgaggcaatcatgggtnggcatcacccataaagggaacacatttgactttttttctcatattttaaattactacaagattattaaggatagactgattccaaggaaaaaaagtgaaaaacacaaaggtgggggggggcttcgcgcccatgagaaaatgtttaataggcccattgcgtgggggcagcagccacaggggttaaaggaagctggccataggtgggtcgaagggaccccgggcaggacctagggctggttctcgcaatgaaaagcgcgggggcgagcggttgtttgcccaatccacgtgggtttggcggcactcgcgtatcaccaagagtcagagggcatatcgcgcgcgcgtcgtgctggggtgctagcttaacacagttcaaccacgcacatcaacgtcacaggccatctcag

SEQ ID NO: 690925 - DNA, 1032 bp, Homo sapiens
ccatcacttcttaaagatgtttttccagtttgttctcactgtggtgaaggagctgggagtctctgttcgcacgcgagtgctatctctcgtcatgggcattggaatactgtcagagtacagtccctggcgaaacccctctggctgtaagccgggctgcttgctagcatagctcattggcaggtctgccttcgcccaagggagggtgcgctattacgggaaagtctaaatgaggtgccactggtacgtctcgatgctgggccatactgcgtgggcccaggatactctctcctgtatcatgtcgtaggctgattaaggccattgtcaccgatacgtgtatctatgtagcgtcaattattcagactctgtgcacacgtggcggtcacttacaacaaatgtgcggtatgttgaagtagtttcgattcaactagaggacatgcaccatgaaaagcgtggactaatgtgagactgttttaaggattagtttaatgggtcacacaagcaacactgttgagcacatcagttatcggtaacaaggttgagccactatgagcagcgggttcttatctatctatgtacagtagcggtataaccgaaagtagctgtcgatcgctatgctgactctttaacaagtgtagaggagtcgtccaacttctccgtgcctagtctgaaacaggaacagaagagccggtttgcaagaaaaaacaagagaaaacaaaagaaggctgaggcacagatgaagctcacggcctgtaatcccagcactttgggacggccgaggcacggcagatcacctgaaagtcagacatctgggatccggcctggaccaggatggtgaaactctgtctctagctaaagatacagaaattggctgggcgtagtggtgcgtgccttgtggtcccagctatttgggtggcctgaggcaggagaatcgcttgaacccaggtggatggaggtggtcagtgagtctgagcatcaacaccatacactcagcctggcgaaattaagccggtcgcatctcaactgaagaacccg

SEQ ID NO: 690926 - DNA, 148 bp, Homo sapiens
gtgtgtctagaggatcccgtcactttctacaccaggaacgtccccaagtgcatcttccagtagtgacatgtctctctcagaacctccacagcctcttgcaagaaaagacttgatggaatctacatggatgcagcctgtaaggattgaa

SEQ ID NO: 690927 - DNA, 900 bp, Homo sapiens
  misc_feature (150)..(150): n is a, c, g, or t
  misc_feature (210)..(210): n is a, c, g, or t
  misc_feature (238)..(238): n is a, c, g, or t
  misc_feature (256)..(256): n is a, c, g, or t
  misc_feature (262)..(262): n is a, c, g, or t
  misc_feature (377)..(377): n is a, c, g, or t
  misc_feature (496)..(496): n is a, c, g, or t
ggacgaacacgtgacgcggtcgggcggaccactgcagactgagcggtggaccgaatggggaccgctgcttataagcgatcatgtttctccagtattacctcaacgagcagggagatcgagtctatacgctgaagaaatttgacccgatgngacaacagacctgctcagcccatcctgctcggttctccccagatgacagatactctcganaccgaatcaccatcaaggaaacgcttcnaggtgctcatgacccagnaaccgngccctgtcctctgagggcgcggcggtgaacttgtatgtcgtatttcttggtcatgcgtggttactcccgtcgtgatgacgtcccgttagaccgaagacgtcgtgtcggagacgtngtttatgcgccatggagttgtcgtgttgttggccgagcgcagtacttcggtgtgggcagtccaggtcgtcttcgtgggcggattgagttattgcgttgtggtagaggcaatcatgggtnggcatcacccataaagggaacacatttgactttttttctcatattttaaattactacaagattattaaggatagactgattccaaggaaaaaaagtgaaaaacacaaaggtgggggggggcttcgcgcccatgagaaaatgtttaataggcccattgcgtgggggcagcagccacaggggttaaaggaagctggccataggtgggtcgaagggaccccgggcaggacctagggctggttctcgcaatgaaaagcgcgggggcgagcggttgtttgcccaatccacgtgggtttggcggcactcgcgtatcaccaagagtcagagggcatatcgcgcgcgcgtcgtgctggggtgctagcttaacacagttcaaccacgcacatcaacgtcacaggccatctcag

SEQ ID NO: 690928 - DNA, 620 bp, Homo sapiens
cagggcagccatctcttcgtgagacagcaagtgtcgcatccgcaggcgcaaccgtgccatgctgtgctctacagccatgtcttccgctgatggcagagacttgcggatggaaccgcacagagccgcgggccctttgcagctgcgattttagccctacgttttcaacggaggtactatactgtcaattgctggagaagaatttgctattgcagcttctgatactcaattgagtgaagggctttgaattcatacaccacatatccccaaatgttacgaattaacagacaaatcagtcattggatgcaggggctttaatggagactgttttacgctgacaaacattattgaggcaagactaaagatgtttaagcgttccaattgtaaggacatgactacggtggcaattgctgcaatgctgtctacaatcctgcattaaaggagctgattccatactatgtttacaacatcagttggtggacttgatgaagaaggaaagggggctgtctccagctttgatcccgagagggcttaccagaaaagacttcttaaaagtttggaggctacaacagtgccatgcttcaggcccctgcttgacaaccagattgtttttaagaacatcc

SEQ ID NO: 690929 - DNA, 112 bp, Homo sapiens
  misc_feature (5)..(5): n is a, c, g, or t
cccanaaaacttacttagtggacactgcaatttgaatactaatttctgtctttggaattttttttcaactatttaaaaaataatgatatggctgcactttgctgacccctgg

SEQ ID NO: 690930 - DNA, 173 bp, Homo sapiens
tttttttttttcccccgggggatttttttaacccatgcccccttttcttggggcctttgtaaaaaaaaaaccccggcccttgtattctttttttcccctcccctccctcccagggggaatttaaaaaaaatgttgttttgttttttattttttaaaaaaaatgccaaaagaca

SEQ ID NO: 690931 - DNA, 1100 bp, Homo sapiens
  misc_feature (1100)..(1100): n is a, c, g, or t
cttactcggccacccaggtcaagtaaggtgcttgcggggagaagtatgaagtttgctgtgttgtgttggcccctgtggcaggccctggtggctgtccttccttgtagtaacgggtactaaccctttcccatagctggtttcctcaaggcaccactgtcgcaggagcggtgggcggggggcagcgtggtcctgcactgtgaggctgtgggcagccccatccccgagatccagtggtggtttgaagggaatgctccaaacgacagctgctcccagctctgggatggtgcccggctggaccgtgttcacatccatgccgcctaccgtcagcatgcagccagttcgctctctgttgatgggctcaccgcagaggacacaggcacttacgagtgccgggccagcagtgacccagaccgcaaccaccttactcggccacccagggtcaagtgggtccgtgcccaggcgagcgtggtggtccttgaacgtgagtggccagggcacctgtttctgtttacctctcgtgccaccagacctggctcccactttgtagaaccagatgctgctctgccctaccactcatttgagactcccctgggcacacgggtgagctgaacactcatcagtgtccttgctgggtgcaggttggccttgcctcttccagtggctcctcggttcgcaccccaggccttggtctgctgtgcaccagcctgacttccgtcctggtctgtccatgacactggtctacttggctccatgtctccctgtgattgctggcagggttgggactgtgccaagggttcgcagagtgtatgaacggaaaatccacacgactggcgaaccctgggggtagggacaacccaagaagacaggaaagaaaagagagcggaccaagggccggccaccacacgagacggaaaccgaggcaaacagagagagaggcaggaagaaaggaaacaaagagggcaaaacaagcaagggaggacaagaaaacaacgagagacaaaatcagaaaaccagcagagacagacaagaagaagacaagcaagcaagcgacgacacagggaagcaaaccaacacccaacgggccaccacatcacccgacn

SEQ ID NO: 690932 - DNA, 177 bp, Homo sapiens
gcctgggtaaggccaagatggctgtcttcgccttagtactcgtgtgaagttggcagggacggttcctggtcatcttcttggggcttatttggtgtgctgttgaaggggggagactagagaaatgcagggaacctctatccggggcaggtaggcgcctgtgggactgggtgcctctgg

SEQ ID NO: 690933 - DNA, 209 bp, Homo sapiens
aggagttaactcgaggtagatccatgcctggggcataaccgaactctcgccgctcggcacgctgtccaaactgaaggccaagcaccgcgacctgccggttgagcagcagcgccacatcctggagaagcagggcaaggtgatctacggcatcgacatgaagatcgtcgacgacgccggccgcgagctgccgtggggggtacccgaagcta

SEQ ID NO: 690934 - DNA, 225 bp, Homo sapiens
ttttttaggggggggccccctttgggggccccccttttgccctcccctggggccccccccccccaacctttttttttccctgggccccccccccggggcccccctgggggcggggtttttttcaacccgggcccttttagggtatttttttcgggcaattccccgggtgggggttttttttttcccctggggggggtgccttcccccttaggccttttagggtca

SEQ ID NO: 690935 - DNA, 1204 bp, Homo sapiens
acgtttgttttaatggtctttctgattaaagaaagcccctgtggccttggaggccaaaaaacaaacaaaaaaacaacacaacacaacaaaaaaaaaaacaaaaaaaaaaaaaaacaaaacaacaacaacaaaacaaaaaaaaaaaacaaaaaaaaaaagggcggcggcgcgcggcagacaaaaaacacccccagacgagggcgccaaccaaaaatacgagagacacacaagaaggagaaaagaaagagagagaaagagaggaggcaacacaaaaagagaagcacatgataaataagagaaaacacaggggagaagcgcaccgagaagaaaagaagaacaccagcacgaggagggaaacaaacggaggagagaccagagaaaaaaacaagagagagaagagcaaagcgaacaaaaaataaagaaagaggagggagaaaagaaccaagagagagagagaagaagaaaaaaacaacgaagaacaaagaaacgaaaaagcaacaaagaagacggaggacgagagagacaaacaacaccaaaacagaaaggagaggaaaagaagagaggggagcacaaccaaaaagacggagcaaaagagaagaaagaggaaaagcggggacaaagcaaaagagaacagaaaacaaaagaagagcataacagaaaaaacagaacaaaaacacaacacaacaggcaagagaagaaaaaagaagagagacaacaaaagaaaaagaaaggaagcaaaacaagagaagaaagagaacaacaaaacagaggagaaagaagaggaaaaaagggagaagatagggaaaagaagaaaaagggaaagaggaaagggaaagggggaagaaagaaagaaaaggaaagaaaaaaaaagagaacagggagagaaaaaaaggaaagagagaggggcgagagggaggggaagagagaggaagaaaaagagaagaggagggggggaggaggaaggaagagcggggagaggcagaagaaaaaaaggagagaggcaaaaagagaaaagaaaagaaaacaggagaaagagaaagaaagagggagagaagaggaggaaggagaaggaaaggagcaggggagagaagaagaggaggaagggggaaggacggagaagaacgagagctgaaagaggaaaggaagcagaaggacaagagaagagggagaagaagagaggaaagaggggggagagagagggagg

SEQ ID NO: 690936 - DNA, 117 bp, Homo sapiens
ggatccaccatgtcacagaatactcttaattttttcaccattaaaaatgtaaaaacgatctttatatagttcatgatcatgattaggtgtcatgcacgtatgtgaaaagattggcca

SEQ ID NO: 690937 - DNA, 144 bp, Homo sapiens
cgggagtagtacaacatgagtgttggatgtggaacattcaaaccacagcagtatgaaaacaatattctgactccaaggttatataggtcaacgattacatggtggtaacggaatatggctagcagaatatggaattaggctaaa

SEQ ID NO: 690938 - DNA, 298 bp, Homo sapiens
tagaggatcccagttaagcgtcaggggaggagtgatgcaggtgaatgtgtttctaacaagcaggattaagggctcatgggtgcaaggtggggatgggcctgaagaaggtggcaggtctcattctctgagggagggagggaaggagttgaagaagaaacttcaggtggatggattcgattgtctaagccaaggaggaggtctcgtccttggtggtcattgccaggtaaagccttgacttcacattcacaggtgagaagggacctggtccaggaggcttcaacctgggggtcctccttaa

SEQ ID NO: 690939 - DNA, 492 bp, Homo sapiens
  misc_feature (298)..(298): n is a, c, g, or t
  misc_feature (369)..(369): n is a, c, g, or t
  misc_feature (394)..(394): n is a, c, g, or t
  misc_feature (439)..(439): n is a, c, g, or t
  misc_feature (454)..(454): n is a, c, g, or t
aaacaaccccatcaaaaagtgggcaaaggacatgaacagacacttctcaaaagaagacatttatgcagccaaaaaacacatgaaaaaatgctcaccatcactggccatcagagaaatgcaaatcaaaaccacaatgagataccatctcacaccagttagaatggcaatcattaaaaagtcaggaaataacagatactggagaggatgtggagaaataggaatgcttttacactgttggtgggagggtaaattagttcaaccattgtggaagacagtggtatgtacccaaaggattatnaaatcattctacttttaaagatacatacacacgtatgtttatttacagcactgtttcacaatagcaaaganttgggaacccaaccccaatggttcntcattgatagactgtttaggcaagacttattaaaggagggaaggngagaagggattcaantcggtgggtattaaaaagtggttaaagggggtgtcacc

SEQ ID NO: 690940 - DNA, 546 bp, Homo sapiens
tagatgtgagagaagatacatgccggtgtatacacacatcccaatgcctatagtaattagcatggtgatcccagtgggagcaatacatattattacaaaatgattggtagagggatggccatgcatcacaaaaacaagtgcataggtgtatgccataattaggcataacactgggggcaccttctgaaatctgaagtcatgagagtgtggaaagtccgggatatctgaaaccatgttccctaggctcactcaggactgaaaataagttaatccggcaatcaaacacacatagaaaaacaaagtataattaatttgattcttagagaaaaagtcacccagacataaagttctagacattcacaacgttgtgagagacactatgtctcagtcatgccgacgactagctctcggcttgtacaggatacacatgataataaatctccctttgggttaaggttgtctgaggactttccctaagttacacataacaatttcttgactaagcagtagaaagtgatgacaataataagtagcatgggcgggggg

SEQ ID NO: 690941 - DNA, 110 bp, Homo sapiens
agcagtcactcactcttctgcctcttcagctgtctcttcacctgtccccctccccaaaaattaaggctccctgtatagattcaaaagagtctgtaaaaacccagacaacc

SEQ ID NO: 690942 - DNA, 237 bp, Homo sapiens
agaattagggggaaataaccttttcccaataattataaaaaattgtcctgggtctaaggatccaaaactggtttggatttttttttgggtccaaaccagatttcctgggattctaaactaaaaatttttgaaaaaaccctttgctttttataatgagggcgaaatatggtgtcgaggctgtttttcaaaaattaaaattgaagtgaaaattttaacaaaaataaaagaattttgcca

SEQ ID NO: 690943 - DNA, 188 bp, Homo sapiens
ataagcttgatgcaccccagtgtgaggctccacaagctaggaggggcccctggacccaccaggaggacaggtctgcagttcccagccatgccggctggaacgtccgcctacccactgcgtcggggtcctcggcctccctaggggggccctagagtctagtacgtaggcctagaggctgcctagcgccc

SEQ ID NO: 690944 - DNA, 183 bp, Homo sapiens
ttgttcaaccctctccctcccccgaatgtcaaataaacttgggtgctggcttccaccgctgtcgcaaacagggcacctaaagggcagtccagagctgagttggcagcctgggggacaagcgaaggaaggaagaaaaagagagcaacactctactcccttagcccttagggtaaacatttacag

SEQ ID NO: 690945 - DNA, 153 bp, Homo sapiens
ggcttgtcctctcttaggtccagagctcaggtgaatgcagattttcccagtctgtcatgtgctgtaagtccctggtggggaggctccttggctggtttccgtgtaggtagacatgctacacgtcgctgcccttacattggcttcattttcatg

SEQ ID NO: 690946 - DNA, 1115 bp, Homo sapiens
  misc_feature (750)..(750): n is a, c, g, or t
  misc_feature (1115)..(1115): n is a, c, g, or t
ctcagacgctgcaggaaatacgagaagcgtgctgacactagtcctggccgccatcatcctagtccgtcatcggcctcgccatccctagcgcgatcctctatacataacagacgaggtgcaacgatccctccgcgttgagccagtcagaatcaatggggccgaccaatgggtactgaatccgtacgagtttagcagccgacatacggcgggactaatgcttcaaactcctacgatgaactgtcccgcatttatggtcctaggagaccagagcgaaactgcgtactccttgatcgtctgatcgatcgagtgggtgacgtcccgaatctggaacgtcccccaatatcgatgaataagtgaatgtatcattcaacaatggaccgtctctgacaacttcattgaagcatgtggccgctagcagtgtagagtcgtgtaaacaagagcagaagtgcaaagtatccgcggatcgggtcttagagaaccatagaggcacattttgcaccgcatacatcgagcgcggggggctgtactaagcgggtgcgaatggctcctgtacatatctcgtgtgaggcataacgcatcaggtgtgtcatgtcccatgcgttcctaagcaattgaattcggcctagaagagatcttgtcgagaattagggccccgctatatagccctatagtcagcccccctctaagcgccctctagagcccaaaagcatatatgagtaaccccaaaacagcccccattaaacaccagancggggctgcggcggctggctcagaaggtacacccacccaggagggcacaccccaggtgaacgggaccaccacacccctcgctgtgcgcccaggggcccaccaaacgcgcaaggcggaacaaagcgcggcgccggccccaggtattcaaacccacggggccggaaaaaggcacgtgtggtactcgggacggtgcccccgtgcggcgcgccggggcaacccacggaataggggcagcaacacaggggcgccaggggcaccaccacctcggccgacgacggcataaacacaccagagaaccaaaggcacaaaaacgaacaacaccaacagcaaagcacacaccacacacgcgccacccatatgtgggn

SEQ ID NO: 690947 - DNA, 682 bp, Homo sapiens
ctattgggttcttcggatttccgaatatagatgccaatatgctgcctttaccccggaggatgctgatgtaccttctctcaggccgatgatctcaggcctccatggtccctggagctctgggaaaggcgagcgcgatctcgcgcccgactacccagtgctctggtgtcgataagcctgtgatctggtaaagaacaaacgcccttgtgagaagacggggactcgccaggataccccttctctcgcctcatgcagcctctcaggcacaacgcatatgcgctcactctgatcctcctgccatcctttgcgctagagtgccatcttcaagctgctcggagctcctgtgggcgaaccccttggggtgcaacttgtgactgcgaagataggcgtcaaccgaagcagcttgtgctgagaatgtctgctggcgagagccttgatgtgctgtgccaggcctttgtgactgacgtgctgtgcatgctattagttccttatactgtgtgtaccactcgattagtagcccactttcctcgagagcatacggagcacgagaaatctgaagtggcttgctccaggtccctgcaggtatactaaggtggtagaaccagggactctgaaccatgccctctgcttctgaagaccggttctgaattctcttgactaggagcttctcatcaggtaacccaga

SEQ ID NO: 690948 - DNA, 371 bp, Homo sapiens
  misc_feature (336)..(336): n is a, c, g, or t
  misc_feature (369)..(369): n is a, c, g, or t
cctcacacttcaccactgccttatacaaagcacatctatgacagttaattttatgtgttaacttgattaggccacaggtgcccagatatttgtttaaacattatttctaaatgtgtttgtgagggtgttgctgggatgagattaacatttgaatgagtagactgagtcaagcagattgccctccccactgaggatggacatcatttaacccactgaaggtctgattaggaacaaaaatgtgggagtacaggagaatttgctctttctccctgtcttcaaggcaaggacatagcttttctcctgcctttgggacttcagattggaaacttattaccnttgggctctcccagtttctcaggaccttcagantt

SEQ ID NO: 690949 - DNA, 481 bp, Homo sapiens
ggctcggtaccctctggatgcaagtgtccaaggctccagtgcctatgagaactgccctgggttagctggccaggaggcggtccataagaatggggacagtgtggctctgccagggcgtgtcgcacctgtcctggacacacattgttctgttcctcctcatgtcatttccagcctttctaccctccctgactctgcggctcccctcagcccccttgtcagttcatggcctgtccctcccatactcctgctccactgaaccttcgtaccagtcctcccttctgtgctctcgtttccccgtccttcctctctctctctctctctctctttctctctctctttctgtttgtgtgtgtgtgtgtgtgtgtgtgtgtgtctgtgtgtataagatacaacctgaaatggcgtgggaccacacagaactatgatgccgaccataactttgtcttctgccccatgggtgcccactaggtgatcttgcaaa

SEQ ID NO: 690950 - DNA, 145 bp, Homo sapiens
tgagctttaagtatataattatccacgctgtgaactctgcaactttgtttagcttgtgatccctcaaatatggagcgtacgttagtgtttgttactagaaatgtcctaaaaaacatttgttggtgagtctgacagtcaaagctga

SEQ ID NO: 690951 - DNA, 303 bp, Homo sapiens
  misc_feature (249)..(250): n is a, c, g, or t
  misc_feature (282)..(282): n is a, c, g, or t
ccaccacccctggctaatgattcactaagaaaactcaaaggactcagcatattgtcatattcacagctatgtatttattatagctaaaggatataagagaaatcagcaaaaggaaaagatacattagctgaacgtccaggtggaaaccgaggcacaacgctttcaaggggtctccccatgcgaatgaagttcgtgacaagcacatgtgacaatggtgccataccaggcgaagcttattagaagactctnngccctgggtttttattagggggctggtcacantaggcatcttccacttgtgca

SEQ ID NO: 690952 - DNA, 548 bp, Homo sapiens
aatttaacatatttctgttattaaaacctccctgtctgatgtttaaaatctcaataagctatcataaagagattcttccttaccttcagcggatcacctgaggtcaggagtttgagactagcctggccaacatgctgagacccccgtctctactaaaaatacaaaaaattagctgggcgtggtggcgcttacctgtggtcccagctactcaggaggtgacgcaggagaattgcttgagcccaggaggtggaggttgcagtgagctgagatcgtgccactgcgctccagcctgggagacagagcaagattccatctcaaaacagcaacaacaaaatcctaggtagcactcaagtcttttgtataaaagtcagcaggtttctcgccagtatactgttttgtaacattgtctcaaactttaaagaatgattctatatggattatgaaaaagaaatagacatagggctattggcaagcagaagataaaagtattaacatttgtagatgatacagttgtctactaagaaccttgctgtctaccccatatcaaa

SEQ ID NO: 690953 - DNA, 184 bp, Homo sapiens
ggatatgaaagttatgaggaaagagtactgtataatccagccattctcctaggaatatacatccaagagaaatgaaaacaagtccacataagatttgtacacaaaagttcatagtagcattattcatggtagccaaaaagtacaaacaacccaaatgtccatcagctgactgaatggactacat

SEQ ID NO: 690954 - DNA, 518 bp, Homo sapiens
  misc_feature (432)..(432): n is a, c, g, or t
tcatctgtattattatatatctttattcagacagagttcattttttgtgctaggctggagtgcatggaatgttaagatggcagtgtttgtcagagaagggcttactgagaaggtaaaggtccccaaaatatgagagaggtaaagaactgagccatgtggacatatgagggaaaggaatagcaagtgcaaatatcctgaggctaggatgcgcttgaggagaccatacagtagagcaaacaggagatgagaacgacatgagatcagcagtgaagcagggctaggtcacataggaccttcgatgaataatccactctgaagacttcggcttttttttttttttttttttttttggggaacaggggggtttcttttggggcccgggttaagggtccattttttttttttgggcccccggaacccccggcttctggnttaaggaattttgcccccccccccccccaggaggggggaaaaagggggggcccccatccgttaacagggggcccggcccaaatgat

SEQ ID NO: 690955 - DNA, 266 bp, Homo sapiens
gggcccgaggtgagttgaatggaaaaacctttgaagcggtctttccccagggttttggcaagcttgccagtgtccctgtgggggggggtgtacccgtttttgttgccccgggttttcccccccctgttgttggttttgcccctgctccaccagaggaaaaaaaaaatgaaaaaaaggggggttttaaaaagtcaaataatgccatgggattggccctttttgattaaattccggctcccccccaaaaaaagcctttttccccctca

SEQ ID NO: 690956 - DNA, 253 bp, Homo sapiens
agccccagttccccccaggtgaaataaggaattgctgctcacctggggcaggtgaaggtggtgtggacaggagttgaacgtggcctttcatgctgagagtgtgagattttaagactccaggatccttctctactttctttctgctgtcacaccatgttctcagcatgccatcccattcgaatggctcttatagattatttactggtgtgggggtttgctgttgttttttaggacctcaccacagcatatggag

SEQ ID NO: 690957 - DNA, 714 bp, Homo sapiens
ttttccccacaagggccccctcggcccacgcacgccctggggtcacggccgtcttgcgcgtactccgctctctcatactctctcttctcatgtgctccctctggaaagcgccccccttcccaattgtcctttgaaggcgcacacctttgccaccggggcgctcttttggagggacccactcggccccccgaagagaggggaggccccccccacgggcccccccgagagtgccccccccagcgggagaggagaggaaccccggttcacacgggagcgctttctttgtggcgcacgtagagcccccggtgtggcccctctttctcccacccctcgaggttcttgggggcgcgccccgcctccccctcggggcgttcgcccaattcccctcttgccacttcttctgcttcttccactggggaggccctccctccccctcttccccacctggcttttcactaactcgctcccgtggaccacttggccccgcgcttttcctcttcccgggccactaggcttggcccaaggttggctcgagggcacccctccctttttctgcacccctctggcccgacgggccgggctggcttttccccatgcctccacttcccactgccccctcggtggctttggcctcctccaagcactcccccctggtggatggactgtaagtgtgtaaatttttttgatttatttttttattaaaagggaaaggga

SEQ ID NO: 690958 - DNA, 428 bp, Homo sapiens
  misc_feature (42)..(42): n is a, c, g, or t
  misc_feature (47)..(47): n is a, c, g, or t
  misc_feature (68)..(68): n is a, c, g, or t
  misc_feature (78)..(78): n is a, c, g, or t
  misc_feature (100)..(100): n is a, c, g, or t
  misc_feature (119)..(119): n is a, c, g, or t
  misc_feature (123)..(123): n is a, c, g, or t
  misc_feature (125)..(125): n is a, c, g, or t
  misc_feature (147)..(147): n is a, c, g, or t
  misc_feature (156)..(156): n is a, c, g, or t
  misc_feature (196)..(196): n is a, c, g, or t
  misc_feature (210)..(210): n is a, c, g, or t
  misc_feature (219)..(219): n is a, c, g, or t
  misc_feature (223)..(223): n is a, c, g, or t
  misc_feature (233)..(233): n is a, c, g, or t
  misc_feature (248)..(249): n is a, c, g, or t
  misc_feature (255)..(255): n is a, c, g, or t
  misc_feature (272)..(272): n is a, c, g, or t
  misc_feature (275)..(275): n is a, c, g, or t
  misc_feature (281)..(281): n is a, c, g, or t
  misc_feature (300)..(301): n is a, c, g, or t
  misc_feature (322)..(322): n is a, c, g, or t
  misc_feature (413)..(413): n is a, c, g, or t
  misc_feature (427)..(427): n is a, c, g, or t
agcagcggccccgggggcggactgagcggacaaacggaagtntaggntacggtctgagacatcaccgncaagctgggnatcggggagatggccgagactnaccccaagaccgtgcaggncctnanctcggtggtgcagacactcctncagcagatncaagataaatttcagaccatgtctgaccagatcatttggngaatttatgatatnagtagtcgnattnatgatctggnaaagaatatcgcggnnctcatnacacaggctggggtggnagnacttgnaagtgaaacaagatacctnnccacgcaaaagagttgaaggntgctaataatttatactggaatctggcatttttccaagccaagagaagatcgaatggcttttttcagctaactactatgtgtagacagggnttatattataacgna

SEQ ID NO: 690959 - DNA, 399 bp, Homo sapiens
  misc_feature (340)..(340): n is a, c, g, or t
ctgccatgattcagcatttgtgggactggggtaggaagattgttgagcttaggagtttgagacagcctggacacatggtgaaactccatctctattaaaaataaaaaattaagctgggcgtggtgttacacgcctgtaatcccagctactagggaggctgaagcacgagaatcgcttgcagctggctgagatcagtgagctgagatcaagtggagtgcaatggctcaatctcagctcactgcaacttccgcctcctgggttcaagagattctcctgcctcagtcttcctagtagttgagattactggtgccggccaccgtggctggctactttttgcgtntttagtagagacaggtttcaccatgttcgccaggctggtctcgaactcctgacctcagg

SEQ ID NO: 690960 - DNA, 138 bp, Homo sapiens
cttagaaaaacaacgtacaatgtgtcaagagcatatctccaaccctatgggacgcatcatctaaaattgcatatcagctcatgcggtatcgtgcaatattgtaaagcccgtattagaaagccgccaagcgtcactcag

SEQ ID NO: 690961 - DNA, 107 bp, Homo sapiens
tgtacctgtatgagcagtattgtgctattgcatactagtctttgctgcctgtgaacattggtgggcctagccctactagtctcaatctccaacacatattgcctagt

SEQ ID NO: 690962 - DNA, 123 bp, Homo sapiens
ttacgcgtataattacgtctctagttttctaatcaaaatatcttcatttgaagaaaaatactaattgataattataaaatgatatgtctctatacgaattcatggaacagagctcctaaaatc

SEQ ID NO: 690963 - DNA, 148 bp, Homo sapiens
cgcggggttgatccgctttccatgtctctcgtggcgaagcaggggctatggaggatccgctgcagggaggatttcaccatccgggccgcgtggggtccgaaaccagcgaaaacctccgtctgcgatctctccgctgccgtcagccacg

SEQ ID NO: 690964 - DNA, 199 bp, Homo sapiens
gctccgcacagggcatgcgcaggcactgcctccagtgcggcgcacaggccctgcctttcaagtgcatgcagctcactgatttcatcctcaagttaccgcacagtgcccacccaaagtatgtccgacaagcctggccgcaggcagacatccatactcatgtccagcccggggctacccgagctcgaacttcgtacatcct

SEQ ID NO: 690965 - DNA, 323 bp, Homo sapiens
atgctgcactatgggtcaaatgattctcctgcgtcagcttcctgagtagctgggattacaggtgcatgccaccatgccggataatttttatattttatattagagacgggatttcgccatgttaaccaggctgttctcgaactcctgacctcaggtgatctgcccgccttggcctcccaaagtgctgggattacaggcatgagccaccgtgcctggccttattggcttagtatctaactttatcctccaaaaattttgggccctttttctgtggggaaaaccaagttaaggcttgctcttcaggcatagacactaacctttat

SEQ ID NO: 690966 - DNA, 794 bp, Homo sapiens
  misc_feature (23)..(24): n is a, c, g, or t
  misc_feature (140)..(140): n is a, c, g, or t
  misc_feature (142)..(142): n is a, c, g, or t
  misc_feature (147)..(147): n is a, c, g, or t
ggaggtgtggggcaaggcagggnnccagtgaagacaaggagcgaggctctatactgaggcctggtagaagtggagcagatgggccacctgaagagctactaggaagttgacaccaataagatgtcgttagtctgtgtatngngagtnagggaaaggaagaacttgccagtttccaggttttaatccttccaaaggatttctgcagaaagacactggaagagctgtattcctacttatccttaaaggaaagaaactgcccttgaattccaaggacatgattactgagctggaattccaaataatgtgtcccagtgagactcctgggggtagttttgtccggtaactgtgtgtgttagatgaaactgcagacttccagccactctatcttacatgtctgttaacagttaatttgctctgatgaatttgccccatcttggagaagggggctctgctgactgttttttatcttggagtaacatgtcctttgatcaggaaggttctaggacttattatttgttaaaaacaaaccattggaaggctgggcattggtggctcattgcctgtaatcccccaacacttttggggcacgcccaaggcagggcgtatccggtttgaagcccccaggcagttccgggagccagcctggggccgacattgtcgcagaagctctcttcttactggggaattgccagggtttaggccacagacgttggtggagttgcgccttgggtttccccggccgctttaggagggctgggtgggagaaacccctgggggccccggaggttggggca

SEQ ID NO: 690967 - DNA, 359 bp, Homo sapiens
  misc_feature (16)..(16): n is a, c, g, or t
  misc_feature (52)..(52): n is a, c, g, or t
  misc_feature (86)..(86): n is a, c, g, or t
  misc_feature (91)..(91): n is a, c, g, or t
  misc_feature (96)..(96): n is a, c, g, or t
  misc_feature (119)..(119): n is a, c, g, or t
  misc_feature (141)..(141): n is a, c, g, or t
  misc_feature (160)..(160): n is a, c, g, or t
  misc_feature (164)..(164): n is a, c, g, or t
  misc_feature (178)..(178): n is a, c, g, or t
cctggaaccttaatgncccaagatgccagtaccccgtaccagcctataatanccccccataccaaagtccatggggaaacaaacantattntgttncttggtttatttaatacctatantccgccatacagtactttaaangcccaattacagtgccaancttnatttattgtaaaantttttaagtgtacttatgtactaattttcccttgtagcatgttatatttttgtgttttatacttttgtaattttaggtcagtcttgttccttggcaacatctgtagtattattaatcttctgacattttcttatgtttttaaaaagataagagcatctagtgcattaaatgccaaaaaaaa

SEQ ID NO: 690968 - DNA, 731 bp, Homo sapiens
  misc_feature (718)..(718): n is a, c, g, or t
gcgatattggctcaccgcgacctctacctctgggttcgagcgattctcctgcctcagcctcccgagtagctgggattacaggcatgtgccaccacgccggctaattttttagagacagggtttcaccgtgttggtcaggctggtctcgaactcccaacctcaggtgatccgcccaccttggcctcccaaagtgttgggattacaggtgtgagccactgcgcctggccatgagtcttgttgaaagttaacatttttgggccatagtacaggtcatctaaaacaaagtaacctggtaaggtactaagaaatagtggcatataaagaaactttatagacgttgaatcattgagactttataatacctgtagagatcttgttctctctggcaaaccgtagttctttcctgaaaccccaatgttgttttttcccttgatagtgtttaggacaattaaaaacaaaaacatgaattgcaggaaagttcaggttgtgtggatgcagtactttaagactgcacactgttcctgacacagtggaatagttaggctgtcagaactttggaagctcaggcaaaaatgggattgatctgtttatgctgaattagagagtttcacatctttccccctaaaagtttgggaaaacaatttaactagaggtgtacataatttgttaggattaattttaacgcatgggtaatatttggatgcagttgttccctccnttaggttttgttt

SEQ ID NO: 690969 - DNA, 802 bp, Homo sapiens
cgccgcgcactccgccgccatgtgagcagctgccgcgtcaccgacttcttcgctgcgccgccgtcccgtggcctactcacgcattaggcctattcacggctgcactgtagaacacgtgtccatagaggttgaagatcgaattgctagatataaatatcgaaatcaactactacagtgaacaacatattcctacaatacacaagacctgtcactaacagcgataacaccaattaattctcccacaatcaagatcactacatcataaaacacaaacacaacaccaataaataaataacatataatatatcaactcactaaatacaaacaaaatacacaaaaaaataaaaaaacaaaaccacacacaaaacacaagaaagcataacaccgacaaggcagacgactacccgccagcaaacagagaagacacaagaacccacacaacaaacagaacaccaaagagcgcggcacacacacccacaagccatcacaaacaaaacagcaagagagcgagagcagaaccaagagacagacaagaaggggaaagaaaagaaaaaactgaagacggcgcaaaaacgcgggggagaaacaagaggacggaaaccgagggggagatcatggataggaaaagaagcagggcaaacgaggagaaccagccgaaaatgagataagaagaacagaagacaacaagcaagagaaggcgcgaaacgccagcgacgagcgagacagaggagcaaggagagcaacgcagacgcaacaaacagaaagaaggagaaggaaaaggaagaggatggagagagaaaca

SEQ ID NO: 690970 - DNA, 173 bp, Homo sapiens
tcattcattctttcttgtctgtcgcacctctcattcactcaatacgaaaatatttggacaggcacggtggctcatgcctgtaatccagcacctttgtaggccgaggcaggagaattacttaaggccaggagaccaagaccagccagggaaagatagcaagaccctgtctctac

SEQ ID NO: 690971 - DNA, 984 bp, Homo sapiens
  misc_feature (152)..(152): n is a, c, g, or t
  misc_feature (157)..(157): n is a, c, g, or t
tacggtcaagtgtgagacacacagataataggagcaaatgtagttcccatgtgccaaacaaaataatgaaatctctgcatgtctgcagcatatctgccttttgggaatgtaatcaaggtataatcttggctagtgttatgtgcctgtatttntttanaatggtacaccagaaaaggactggcagtctacttctaccatagttgaaacttcaccctctttaatttcacaatgatattctttggaagcaggaagaaatggtcatagaagaggatcagaccttctttcccgtgtaagaccagtatttggcgcgcatatataagcctggttaaattggtcagtctaaagtctgtcataataagacattctgtgaagaggtaaacgatcgaaactggtgtataagtaaaagcatcaagccaacaacagggtcttgagataacctttgaagcttattgtactggcctgggaccagaaagatgtctgcattactcattggctagaacaatgtgtatgcacagaactggcaactaggattaatttgtcttacaaggaaggaaatgtaaactctaggtctggttttcacatacagcagctctatgaataacatgcatctgaattttaagttggaaaggtgatctgaataaatttttcatgtgcatcttttgtcgaatgtgttgggttcccagaaagactgtttagaggtttttaaaagacttcagttcttaatgtgaatgtgaaccttctgcatggggaaatcataaccatatggttgagtagactctttgtggtatcagcacacttgggagggggttatcaaattgacttggggtgagaccagaggcgggggaagaggggggtattaaggtggacaaaactaaagagtattccggggggtggcaacacctggttaagaaggggggaaacagggtcataacaaaaaggggggggcaaaatattagagcctttggtggcttaaaaggtttcaag

SEQ ID NO: 690972 - DNA, 361 bp, Homo sapiens
  misc_feature (185)..(185): n is a, c, g, or t
tacggatgtgaaaagtggggctaaacacagacacggcagtcacagcaacgccggctgtgggtgtggggagtgggttcgtgccttccagcgtcaggaaccagtggccaggcacattttggccagtgatgcgcacgttacattagtgacggggagacggctcgcgtgagcgtgctcgttgaacctcnacatcccatgtgacaacattctgggaggtggggtacccgcagtgtctgagaagcagcccacatgcctcgcaggagtcccccagaagctcacgagaacggcagcatgtcaaggtcccagaatagggacctctggccctgtactgtccgtagacccggtccacatccgtactggcccg

SEQ ID NO: 690973 - DNA, 195 bp, Homo sapiens
ggacccggtgatatacgccctcaagggcatacccgagcgatacaagagcataactaacgggtactacaacaagtacatcaatgcgaagcaggggagcatcacggggattaccatggtgcaggcatgctacatgctctttacctactcctttacctacaagcatctcaagcacgagcggctccgcaaataccactg

SEQ ID NO: 690974 - DNA, 381 bp, Homo sapiens
ccaccctgagaagctgactgtaatggcattatgtgagatgtggttttctgcaccgcacaggaaacacaatctggataatactgcgacagtgtttataccaggagttcaccatgtgtgtgttccacggaagaggcagaaacatgtagcaccattaggcattagcactgccttgtatataagtaatacaatgttcttgtcatggtaattagcacttttcccctcctgctcattcagaatctgaagctctggattttcaggcccactgcagttatgtgttgaaaaactggtgaaatctttaactgcattttcttgggctacagaactcacagattctttcttatcactcaaatcggagacatttggttgactgctttcacctgg

SEQ ID NO: 690975 - DNA, 950 bp, Homo sapiens
  misc_feature (419)..(419): n is a, c, g, or t
ggacagtgctgacactacaaggctcggatctccggggcactcagacatcgatgagttaggtcacttgcgagcccctcgtgaatttagattctcgtactgtctatgcgtacttttattttctctctgtcaacattgtgtaagcatactgttgctgaccatgagactagactgcttggcgatccttgagatgaacacgattcggtaggcttattcgtcctatactacctagtggcacttgtcagactttccctgagtctactttagtcataactcaacagtaagacataggagtctagcacgtctttcggaacgacgatcttacagtcacccgtttgagagaaccgaaataacatcatgaacgtctacaacaggcgtgataaatagccagaatccaaagctcgactttattaactctctgnatgaaatctatcaacaatccacatatactgcataagtagcggctggctaagcttatgacagctcacaggcaaacatggttgatgaagcagagattacttggaccactcatgcacagcgattcgcatgtcttgaaccacgatgatctccaagctaattccgagtaattttccgccacggacaacagtactactacagtttcgaatatttaatccacaagaagatctgtttgacaccttgaggacacgaggaaggctatgccccaaggcttgcaagccacacagtgcccatggaagccttgtctacatgaccactgggtgcaacagtccatgcatagtcactcggcgaacagatttgtccaatgactagtttggccacactacatggcgatgctaataaccagaaagcgggactttaactttagtatagaacctcctgaacagcttagaccaggcacattcttaagctctaactggtgacacatcgatggggtctggaaactgggcattggacctgtggttccaggaacgatc

SEQ ID NO: 690976 - DNA, 160 bp, Homo sapiens
  misc_feature (17)..(17): n is a, c, g, or t
taatatagtcgtccccnttaatcggcacgagctgacacccagaacatctcgctgaccctggatggccagcaaggcggcacgttgttcagcctgcccacgaccaccaccggctatagcaacattgccgggtacagcaatactggccctggtgcagccacta

SEQ ID NO: 690977 - DNA, 290 bp, Homo sapiens
  misc_feature (196)..(197): n is a, c, g, or t
  misc_feature (272)..(273): n is a, c, g, or t
aggatcgcagtagtaggactgctacacataggtcaagtgtgatgtattctgtatactccaagaactataatagtgaaccatgcagtactgggaacactatcttttatcacaggttgaacctgaagaggtttaactcttgacattagtatctgtaaagagcgtacggctcctttttggctatagtttttcttccacnnaactgacatgcacttggtgtgggagaattctgatggctgtctgacctaagagtgataactactattcaaaatgtnngggtaccttttcagtaa

SEQ ID NO: 690978 - DNA, 240 bp, Homo sapiens
gaaatacttactaaactgccctttatatatatctatcctattagttctgtccctctagagaaccctgactaataaatgcatgcataattaatttttctacactcctgggttgaaatttttgtgaacattcttatcttggtttcattttggtttggttacatgaatctgtaaatgatttggctcctttcccttgcttgtttctaaatatcttctgagagcaaaaataaatattctaaatgg

SEQ ID NO: 690979 - DNA, 152 bp, Homo sapiens
ccgatcacaggagccaagcctttaccactgtgtggactcaatgatggccaagggctaggtcctggtcacccaggaccctcaccacataccccagccaatcgggacagttcaaggaggaggagagccctattacacaggttggaataaaatat

SEQ ID NO: 690980 - DNA, 893 bp, Homo sapiens
actagttctagatcgcgagcgcccgctatcatgcccagctactgaggaggctgaggcaggagaattgcttgaacccaggaggcggaggttgcagtgagccgagatcacaccactgtactccagcctgggcaacagagtgggactccatcttaaaaaaaaaaaaaagtattgtaggctgggcgtggtagtcacgcctgtaatcccacatgttggcagggcggcaggcaggcagatcacctgaggtcaggaggcaagaccagcctggccaacatggcgaaaccccgtctctacaaaaatacacaacagattagccgagtgtggtgtctcgtgcctgtgtgtgtgtgtgtatgtgcatgtgtatactctgtgtacacacgcacacacacggttgtaacatgacttgcagcagacccagtgaacaacctgggggacccaaaccctgtgttccctctgcattccattacaaactggcaggaaatcagaggatgtagcttcaagggaagagctgctggagggtaccaagcgtttacatcccaatgaatgacaaggtatgtgacacgcccaattggacacgtgatgacgaactggcgaaactaacacacaccttgtaaggggcacccatgattcaaaagctggagtgatcaccatccccacgaaaaaatctttaacctggggtttcattcacgtgggcgccacacatgttggtatcaagaacagactgggtgccgtcgaccacagttggttacagcacctgaacattggacaccccaagggcgatacttacgtgaataaatcacaaggagccatgaaaccacattcttgtgtcagacaacgattccacaatgggatacctcaaagaattataaagtaacagatacccgtgcacacaatcg

SEQ ID NO: 690981 - DNA, 338 bp, Homo sapiens
  misc_feature (55)..(55): n is a, c, g, or t
  misc_feature (110)..(110): n is a, c, g, or t
gagtatcagtcagctggttgctgccgctgctacaaccgacccagccacagctganataccctcaacctgggcagtgactactgtgctctacacagtcagcggctgaaggncagtctcgtgccagccattgaaaatgctcaaggcacacatccctgctgaccttccccaagaccatggagaggcagctgagtccttagtttgaggaagacaggataacagcctgttcccgctgctagaggccagtgagatggagaggcttgcagaggtcactgatcaatgggaagaaagaaacagaagcttgctaaaggagagagctgggctttccaagttacctgatt

SEQ ID NO: 690982 - DNA, 926 bp, Homo sapiens
agcggagttgctgtggtacttggcatttaacaactagaattcagaatccagatttttaaaggtgaattattttaaataactgagttgtaatagagaagtaatttatttgaaattattttaggaaatggaagataaagtgactagtccagagaaagcagaagaagcgaaattaaaagcgcagatatcctcatctgggacacaagcccggggggtctccgatttcttaaggagaacggttgcgcgaaaggggccaaatatattgagtctggggatttacaacatgggtaaagcgaaaatgaggaacaagcgactttcctatcatgtgagcgtccgggataagacgggggtgactgggtgaagcacatttcccactctcgcgaagagcttcctctaaacggagagccgtgcctctgtgtgcgtagcaagctgggtgggtgagttaagagggggagactgcgtgtggatctgcgtaaatctcacttatttctccttaatatgttacttatctactttttatttcctttcacttcactagtcctttgagactggcaggtttgcgaaggtagcagtaggggggtgcgtgctattgtggaatataacgtgtgtagagggtttgattagtttaacagtgcactggtgaagaggacctgtgttgagcaacataagtaaactacttgaaaatagttgtatatatttacctaacttctagtgtgagtacctgggtgctaacaagtaacaagcaagtttttacaattttaaggggttggggtttcattactttcatcttaattatagcttgcgaggttactcttatttaatataatctccaatgggagggagagccttccggggatttacccttggggtttgtgaaaccagaagttttagaccccaaggtgaagagagggcgcctatttctaacacaa

SEQ ID NO: 690983 - DNA, 859 bp, Homo sapiens
  misc_feature (131)..(131): n is a, c, g, or t
atattactaccactgacatgacgtttccaaaaatacacataatttgaatcaagcacaatccacccagcagtcgtaagttattatgcgatcatccctctactattgttatgtaaccacaatcaacatcaacnctattgtagcgtgttccccaacgcttttccttccgaatcccctaaaacaaacccctccatccgtaatactataacatactctgtactccataccaccgtcagctacatcgattggcaccagccaagcgaccccatcttaatctcgactgaaacccactaactcacgagagaaacacacctcgtactcgtcttctactactatatcttccctaacaaagtactctccttacacttcatctaacatctcaccgacgcgcatcagatacttaacgtcacataagttattgactatgtccgttaccttcctgacaataccaacggactattcgtctacccaatcctgtatgcgacatacgtccaatcatcactcagactagatgagcaataaccaatgcactgatagccgcccctggaaacagcatcggcacctattaccatctccatactatccctagcaccacccatagacctagagcgatccacgtttacacgcctactgactctgcacgtaaatttgtacagcgtcgaccagaaccactagcgctcacctaaaccatttctaactaactcactcgtctactgtaccaaagaagctattcaagatagtcctgcagccaacccaaccttaacatatgcactagcttgaccacaagtagctttacatacgtacacgctaccttcattacaacggaactccgacttatgaccatcccctcaacagcccactt

SEQ ID NO: 690984 - DNA, 241 bp, Homo sapiens
cctcgaccagataccatcatacgacacccacaagatcgccgtcctgtatgttggagaaggccagagcaacagcgagctcgccatcctgtccaatgagcatggctcctacaggtacacggagttcctgacgggcaatggaccggctcatcgtgtagaaggacggccagtcggacaaggtggccattgagtagcctggtcgcgcttgtgatgacggcccactacatactgcgtagcacgacga

SEQ ID NO: 690985 - DNA, 113 bp, Homo sapiens
  misc_feature (11)..(11): n is a, c, g, or t
atagatccccnggcagaatcacactcaatatcgtgtactttgaacaggtcttctgagaggtcactggctgacttagaattcaaatctttatctttgtctaccttttatttcca

SEQ ID NO: 690986 - DNA, 228 bp, Homo sapiens
caggatctccgcccacacaacatcatgtagcacttataggaataaaagcacaactttccctcatatcatacctcttacagatgaaaccagtacctttatgaatataaagtcaataccacatttgacagctctatgattctgaaacctttatgtactacaattcactgttgattttccaccttcaaattcagaattcttcccccatcttttaggtaattctaataccat

SEQ ID NO: 690987 - DNA, 58 bp, Homo sapiens
  misc_feature (54)..(54): n is a, c, g, or t
caacttagtcaattggttttccttacaacaaaataaagtaaaatgtagcagtcnaaaa

SEQ ID NO: 690988 - DNA, 681 bp, Homo sapiens
  misc_feature (4)..(4): n is a, c, g, or t
  misc_feature (37)..(37): n is a, c, g, or t
  misc_feature (52)..(52): n is a, c, g, or t
  misc_feature (91)..(91): n is a, c, g, or t
  misc_feature (98)..(98): n is a, c, g, or t
  misc_feature (108)..(108): n is a, c, g, or t
  misc_feature (119)..(120): n is a, c, g, or t
  misc_feature (123)..(123): n is a, c, g, or t
  misc_feature (127)..(127): n is a, c, g, or t
  misc_feature (154)..(154): n is a, c, g, or t
  misc_feature (168)..(168): n is a, c, g, or t
  misc_feature (174)..(174): n is a, c, g, or t
  misc_feature (190)..(190): n is a, c, g, or t
  misc_feature (194)..(194): n is a, c, g, or t
  misc_feature (196)..(196): n is a, c, g, or t
  misc_feature (216)..(216): n is a, c, g, or t
  misc_feature (226)..(226): n is a, c, g, or t
  misc_feature (233)..(233): n is a, c, g, or t
  misc_feature (238)..(238): n is a, c, g, or t
  misc_feature (242)..(242): n is a, c, g, or t
  misc_feature (248)..(249): n is a, c, g, or t
  misc_feature (253)..(253): n is a, c, g, or t
  misc_feature (260)..(260): n is a, c, g, or t
  misc_feature (278)..(278): n is a, c, g, or t
  misc_feature (286)..(286): n is a, c, g, or t
  misc_feature (292)..(292): n is a, c, g, or t
  misc_feature (301)..(301): n is a, c, g, or t
  misc_feature (308)..(308): n is a, c, g, or t
  misc_feature (318)..(318): n is a, c, g, or t
  misc_feature (332)..(332): n is a, c, g, or t
  misc_feature (349)..(349): n is a, c, g, or t
  misc_feature (357)..(357): n is a, c, g, or t
  misc_feature (371)..(371): n is a, c, g, or t
  misc_feature (381)..(381): n is a, c, g, or t
  misc_feature (384)..(384): n is a, c, g, or t
  misc_feature (425)..(425): n is a, c, g, or t
  misc_feature (431)..(431): n is a, c, g, or t
  misc_feature (456)..(456): n is a, c, g, or t
  misc_feature (469)..(469): n is a, c, g, or t
  misc_feature (529)..(529): n is a, c, g, or t
  misc_feature (568)..(568): n is a, c, g, or t
  misc_feature (572)..(572): n is a, c, g, or t
  misc_feature (574)..(574): n is a, c, g, or t
  misc_feature (672)..(672): n is a, c, g, or t
tagnccacaaagaaacaattttattagcccaagaagngaagacccagtcccnctgcttgccccagccccaccccaaagccccccaaaaggntaggggnggggaagggngaagcttgggnnggnatgncccctatccctcagaagactggggggnagacgacgggctgngcaaanagggcaccagaggggnatgngngggggggtattagaccaggntaacaggggnagagggnggggncagngggggnnctgnggaaggnccaggaaaaacaaggggngcgggggntaaggnaccaaaggnggggggnagagtggggntagaacccaaaagngggggcctttctgaggnaggggggncccttggctccccntcatcacccnccncttgcccttgagtttcttcctcttggtcttcgtccccaggnccccgntgaacaggctgcttgcaaatggggnagggcttccgggnctgagtgagccaggggtccacgcagcggctgtggtaggcatgagcccaggggagttcccncagcttgtccccatcctcatattcatccaggcaaatggnacananatcatactggtctcccttctgaaagtcatgtgtaggaatctgtttcagttgctctttggtaagtcgattccgctggagccgtttccggtgctggatanaacgagcta

SEQ ID NO: 690989 - DNA, 261 bp, Homo sapiens
gagctgatcctcctgggcgaattctcctccgccgtaatagcggactacgaggcgccacaccacacccggctaatttttttgtgtatttttagtagacatggggtttcaccatgttaatcaggatggtcttgatctcctgaccttgtgatccgcccgacttggctcccaaagtgctgggattacaggtgtgagccaccacgcctggccctgatttagtttttcatagcatttataagacataggaggaggaggaatgcgccc

SEQ ID NO: 690990 - DNA, 412 bp, Homo sapiens
acacgtgtggatcaccttcaacagtgacgtctacccgtcccctcgcaggaccgcttttgcttccgagcttcttcccccgcggagctgaggttcctaaaggtggtggagactggaggagctgctgagatgaaccactgccactctgtcagccacgtgggacgttaaccttaaggatctgagagagcgagccactggtggcagccccttagaggtcggaggaggcactgtgggtcttgcgtggtaacatccttaagctcactatgatggcccgctcccatttatccacacgtggaagggaacctgcagatttggactgtatctctctcatgacgtgttactttctaattccctcatataattctttaggggcctattctcctgaggttcttcatatgtaaaagggggaaaatac

SEQ ID NO: 690991 - DNA, 432 bp, Homo sapiens
  misc_feature (289)..(289): n is a, c, g, or t
  misc_feature (374)..(374): n is a, c, g, or t
  misc_feature (378)..(379): n is a, c, g, or t
aaaggcctggccccctaaggttaaaaagggtgtggcaaaagagccttctcccaaaatggagggtgttggaatataacctccccccccgcaaagggaattttttgcctggtccctttcatagggtaagtcagctgaattccgatagtaataggtccccttccctccggattccgtcagctggaaaaggcctgtgggccaaaggcttttccaaaaggagggtgacattctggcttttgtggccaaggttaccagccctgggccccctccctgcagtagtgccccatttcantgcagtaggacgccctcctgggccgtttggcctgtgggtaatggaggggacggccctcccatgtggtgactccccccattcctgncacnntgtggccccgcctgggtagtccccgcctgaataaagtaatgcccccgcttcca

SEQ ID NO: 690992 - DNA, 526 bp, Homo sapiens
cttggccatgttcgacattttaccatagtgcagatggggctttgtgtgtggttcacctttctttgtttggaagtcttagaataactttttaaaaacttttctctcacgtctattgcattgtgtgtgtgtgtatgtgtgtgtgtaccgtgtgtgtgtgtctgtgtgtgtgtgggggacgtcagactatggattactgtttactgcaagggatcaagacaagggtattcaaggaaaccctctctctcaggttgcacattttgacacttgtactcacatgacatctcttccttttcttttggttgactcctaggtatttagactggtttggtcctatttgttattctatcattacggttggagaaaaggaaagtctcagatgtttttattctaccattttaacttggaagtctgtacaagtactttaaattttaatcaaagtaatacaagcaaatggttacaaattaaatcttgcaaaaatattgtgatacgaagcaactgagctcagctccagtgtggcttcagctaa

SEQ ID NO: 690993 - DNA, 123 bp, Homo sapiens
cttagatgagctcttaccggttagaaagaagacacacgaaagtgggctggagtagttggggtctgtggtgacgaatcgtcattgctgctggtcctgcccaccctcccgcggagttgtgggtca

SEQ ID NO: 690994 - DNA, 661 bp, Homo sapiens
gctgccggatttgatgtgccattgcctggcaggcatggccatgcaactggcggtgctgggtgatgggatgcttggtgacctcatggagctgtacagggtgatggacgatcagccacagacaagcaacgagaacttctggtgagttggctacgtgtgattttggtgcgagtcagaaggcatgtctgtggaaaggtaaggcagctaattaagcagcagcttgaaagtgtctccaatgggatggactgtatccgtatgcagacaggcttcagaaggtatcatgacatggcaagagcttatcagagttctgactcaggtgctcagaacatttctacttctggctaaatagttgaaggagtttcacatgcagaacagtgtctcactgggttgcaagaggacaattatcgttcagcactttcttgcattgtgaatctttagaattctatcacaaagggatgcttccttaacagcagtagtacaccactgaatcctttaagctttcagtgtgaattgtaaaactcaggatgaccttttacaagccttctctcacttatctgtacttgtatagcctggagacaagccacacctggcatgcacacaatgcatgacttggaatgactcagagtgtggcgctctcatcagataacgtcctgagattgagctg

SEQ ID NO: 690995 - DNA, 517 bp, Homo sapiens
ccgagtgctgggattaaaagcgtgcaccaccactgcccagctctgcctctgtaattatatcaaattttattaataagaggggcattttctcatacagctaagtgtagataaaagcagtctctcaatcaataacttatgttaactttcaaaatacttaagctcttttaaaatgtttaaattacattcagtgtgtgtgtgtgtgtgtgtgtgtgtgtgtgtgtaaaagtcagagcataacttgcctgttcagttctctccttctaccgtgtgggttccaaggactgaactccaggcaccaagcttggcagcaaacacctttatcctctaagtgatctcatccacccagaagctctcaggctctttgagccagtagttctacttcatgaatttgtcttacaaaatgctcagctaattgaacaaaaacaattagattacactcagtactgcattacttaagatcatgaaaccctggaacagttctcatgttcatctgatgaatgaacagggagtttaagtg

SEQ ID NO: 690996 - DNA, 940 bp, Homo sapiens
  misc_feature (450)..(450): n is a, c, g, or t
cccccggcctccgtctgcatctctgcgcccgtggcttacttttcccgcgtgcttcccgctttcccaagatggtgtcccggatctttccgtgtgtacggatttttgcccgaagctgaagctcgtgcaacagggtttccttcagaacccttcctgtccagggcgttttcgcccccatggttgcggccctttgactgggggctccccgccctgttgcccggccccccctgggtgccttccccccgggagtccctcgccgacagctctccagtgctctaagaggcctgccggttctccccccctgtccagcagccgcttcgtcatttctgcgggtctcccgaatcgggtccttttccgaccaggccacacattcccgagtgtggggctccatccacccaacgcgcccgcaccaaggatggtggtgtgggcgaaatacgtacatcccccacggcngtgttcaaggagccccggacgttcccggtgatatccgccgcgaccctttaattccttctctcgaacgcccgttccccgcgctgggtgatactcaccccgggccggtgatctcttccctgtgcaagaaccccccgttttcgtggcctcttctgtcaactatcttctctgccccccacttgcatttcttaataatcccttcgccctcccaacccccaatttgtactcactgcgcagctcttttaccacaaacatataactgtctactctgcgtttctcaaaaacacgccttttagtccttggaacactatttccggatgtccctattgacagcctcacgctcttctttcaaaactctgttttgagcgctttgaaatgcttcaaagccaggcagtacaagagaacaccacaccattcggtttgcaccaaacgacattaactccacctactcgggaaaagccccaaaaggccaaattccccccggaacataaca

SEQ ID NO: 690997 - DNA, 111 bp, Homo sapiens
agagggggctgatagtactttgagctctgtaatgtcgggcggagtagcgtatcgatggcagtggagggggcgaatatgatcctaggctataaatattcggagtatatgtag

SEQ ID NO: 690998 - DNA, 205 bp, Homo sapiens
atcaacggtcctcactttagtccacatcatctctacgacttacttgtcatgtgaccatagagaaagttatcttaacttctctgcactatggaggatgatatgttatcgggtagctgtaacaattaaatgagaaaatacctctgacgctcttaaaacagattctggcatttagtacgggccatataagtactaaaccattaatatc

SEQ ID NO: 690999 - DNA, 172 bp, Homo sapiens
tggagatcacaccactgcactccagcctgggtgacagatcgagactccatctcaaaaaaaagaataaataaataaataataataaataatttaaaataaaataaaagcctcttgcttgctgtcctgaggctagaaaaccaagccaagaacccgccagatttcacctgcctat

SEQ ID NO: 691000 - DNA, 349 bp, Homo sapiens
gccctttttagatcccctttggggtccccttaccccaaaccgggaaagggcccaattaaagggggggtggagcccacccacccggcccgggggttttttttaccccccccccgggccccaaaggggcacccattttttttttcagggtttttgggaaattttttgggggcaaacccccttaaaaacttttttttttaccccaggggggtcccccggccttcaaaaaaatttgggcccctttttgggataggggtttaaaggtttttttttttgggaaccccgattgaaggggtttttggggaggaaggtttttaagggttatacccccaaaaaaacccttttgggggga

SEQ ID NO: 691001 - DNA, 167 bp, Homo sapiens
  misc_feature (158)..(158): n is a, c, g, or t
gcttctcctccagagtctcatgagccatgcaaactgaacatcaagtcgtgcgagtttcaggagcatggtacatgaatgacgtttcctcgggccctctttgcccaggcactgggcatgtcgattatagggcagatgataaatgtagtccctgggatgancattctcca

SEQ ID NO: 691002 - DNA, 348 bp, Homo sapiens
  misc_feature (23)..(23): n is a, c, g, or t
  misc_feature (162)..(162): n is a, c, g, or t
  misc_feature (174)..(174): n is a, c, g, or t
  misc_feature (184)..(184): n is a, c, g, or t
  misc_feature (224)..(224): n is a, c, g, or t
  misc_feature (269)..(270): n is a, c, g, or t
tgagccaccgtgcctggcctgcnaactttattaacagaattctggctaaagcctccagtataaatgggcaaaggagatggcttaatttattttatgctgctataacagaatatctgagactcggttatttatgaagaaaataaacgtattttttatagggcnggctggagaagncaagaccatnagggtttgtatttggtaggggaccttcattttgcgtgtgncctcttctatagcaataagatgttcagagcgtttcccacttcctnnttatttatcaccctctccgataatgttagatttcttttacatgagtaagactccttcctgaccttatataccttaatg

SEQ ID NO: 691003 - DNA, 129 bp, Homo sapiens
gggttaatgtgatacttaaacaccttcatcatggaactctcagagtggggctccgttttggtattcctggtgatgggttttgaaagataagggaaagcacattttagagcatgtctagggtaccatggt

SEQ ID NO: 691004 - DNA, 934 bp, Homo sapiens
  misc_feature (97)..(97): n is a, c, g, or t
  misc_feature (220)..(220): n is a, c, g, or t
  misc_feature (308)..(308): n is a, c, g, or t
  misc_feature (634)..(634): n is a, c, g, or t
  misc_feature (636)..(636): n is a, c, g, or t
  misc_feature (638)..(638): n is a, c, g, or t
  misc_feature (640)..(641): n is a, c, g, or t
  misc_feature (644)..(646): n is a, c, g, or t
  misc_feature (683)..(683): n is a, c, g, or t
  misc_feature (685)..(686): n is a, c, g, or t
  misc_feature (697)..(697): n is a, c, g, or t
  misc_feature (705)..(705): n is a, c, g, or t
  misc_feature (707)..(707): n is a, c, g, or t
  misc_feature (720)..(720): n is a, c, g, or t
  misc_feature (917)..(917): n is a, c, g, or t
aatattaatgaatagtttaagaattgtgggggattaagatagagagaaaaagaaaatatttaaatttttgtttagaaaagtataatttaagaattgntgaagaaaaaaagttaataaatatggagaataaaaaattaaaagaataagaacattttcaaataaaaaattatgaaaaaattataattttgattatttagttgaataaaattgagtttttttnttatttgtgttgaatttgatgaaggtataagggtgttatttttgtgagtgtgtgagttgttgaagtgatgagtgagagtgtgtgaggngtggatgggagggaggagagagtttgagtgtgatggatttggagatttagttgagagtggatgagttatgaaaagaggaaggatagagaggggtatgatttatagtaatttgggggataaagagattttgttatgattgatgaaaattggaattaattgtaaaaaaataatatgaaggtgggttagattaagtgaagaaggataagtagaggttttatattgaaaggtaataggtgaatgaagggtaaattatggggagagtatggagtatagaggacatttaggatgactgggttactgcggaggccaccatatcggtcccgtanancncnntgnnngggtcctgtttcatttctcgtgacactgggtagaatnannatcctgttttnaatgggtngntttaccccgggantgacggggaggctctgaccgtttagccaccaaatgtaggtgtagttctcactcttaggttcacaggtgaaggctaagacatccttattctccctggggtttaagttgttgatggtgatgtaggggataggcagcttcgggaaaaaattcagggtgactgggtcactgcgactggcaaaaactgggttccgtatttcncattcatagggtcctgc

SEQ ID NO: 691005 - DNA, 329 bp, Homo sapiens
ttctttgtggtaaggatttaactctgtgtttaccactattgtcagtcacagctgcaaactttcaagtgaggaataaagtgcctcaagtggtaccttgctcaaggagccaatagaatcacaggtgccactgggaacttggcgcaactcatctgatctatcgggggggttctttagatttttttaaacatataattggaacacacctagtattttaaagaatatgctcttgaaaagatgaaaagagtttctcccgggaggcggaggctgcagtgagcgcgcgatcgcatcactgcactccagactgggtgacagaaagagactctgtctca

SEQ ID NO: 691006 - DNA, 115 bp, Homo sapiens
cgactgccagtggagatgggcgtctgtaccgctaccctcatttcacctgcgctgtgtactctgagatcatccgtgcgctgtgttcaatgactgtcgtgactgcattcctcgcatg

SEQ ID NO: 691007 - DNA, 183 bp, Homo sapiens
cacggctggcatgctagctgggtctcgtctatagcacaaggacattgtgcctgaatctactaaaataaaacaaaccaaaaaagagaaaagtagcaattgagggaaaaaaaaacagacactgatccttactctggtccgcattggtgacttacccggtataatccgggatcccttgaaagtcac

SEQ ID NO: 691008 - DNA, 103 bp, Homo sapiens
gcggccgcctactactactactgctcgaattcaagcttctaacgatgtacggggacatgcctcaggatactcctaatatagccatcgttgtatttcaactaca

SEQ ID NO: 691009 - DNA, 200 bp, Homo sapiens
tagggcgaaaatgtgcctcctcaagcacaaaagttaccaagctacatacttttcagttgcgataacaagatacagtgctacaggtagtttcagtattccatgtgttgttatatcctctgtagaataaaccagaccaagctaagctgtgtcagccaactacatcctgaccaaggcctctgagacagcagacacaagcaccc

SEQ ID NO: 691010 - DNA, 196 bp, Homo sapiens
  misc_feature (32)..(32): n is a, c, g, or t
tgatgctgaggtactctagaccgatcccatgnctctggaaaaggggagtagttggtaatgggtaaaagagttggagctccagctgggcacggtggctcatgcctgtaatcccagcactttgggaggccgaggtgggtggatcatgaggtcaggagtttgagaccagcctggccaacatggtgaaacgccgtctcta

SEQ ID NO: 691011 - DNA, 313 bp, Homo sapiens
cgcccggttcatcgaaagcctaactggaatggcatgcaatgaactggaatggaatggaatggaatgacttcggaatagaatggaactggacacgacaatggaatggaactggaactggaatggaatggaatggaactggaatggaatggaatggaactcgttccgagtggaataggagggtttgatgacagggtttgatggtcatcaaccctgtcatcaaaccctgtcatcaaacccttcatcaaaccctgtcatcaaaccctcttgaactctctcttcaaagttcttttcaactttcccttagggtttcgat

SEQ ID NO: 691012 - DNA, 697 bp, Homo sapiens
ctgggtcttgtctcccctggctttgtgaagtgcggaaaaccagaggcgcagtcatgtcgggattcgacgatcctggcattttctacagcgtacagcttcgggggcgacgcccaggccgacgaggggcaggcccgcaaaatcgcatgctgcagaggcgcttcaaggagttcctgcgcgccagctaccgcactgcgcgcaccagaacgcacgggcttcacccttcaaattacagaggatgaacatcaagcggcattacaacctggcgggagctactggacttgagcgtggcacgcactggaggactctggccagactatcgcatgagcgaccctggccgactactagctaccaaagcagccagcccgagcacctgcagctgcctggcagcgaagctgcccaggcacgctagcctgcactgaggctgcacccggcccccggccctccctgccggcacggcaggtgcctccaagaaccatccagagtcattgctcaagatcggaacgcccagcacctatccaagcactcccgacagccatagaaacaccaaaacaatgaatgtcacaaccaagaaaagacagaatcccatggcaatcaatcaatcgcgggccattcttgcgagtaccgtagccaagggatcaaccgccattctcatattccagtgaccgccaccatgcccgcaaacacaccaacacccaac

SEQ ID NO: 691013 - DNA, 740 bp, Homo sapiens
cctgtaaaaagtactcaagggctttattacagacataccctccctttgaaaagggacatgctaaaagactcattactactcagccttcaatgtacctgtgtgtccatcttatatttctttcttttttcttacaatggtgaattagacttgtttttcccactgggagcactttgtaggcattgcttgacccatgggatgatgattctgcggaggtattgccttggtgaattggctgctatttaagtttggtcttgctgtaaacttgtagcattaaacaatcatggtcgtaataggtctccttttggaaacaattcatgtgcaactgtatagctgcttttggatgaaacagcacgctattttgcctttttatattcccttggactttggacgctcgtgcttgggaaacattgccccctttcccctccttgggaatgctgttataaagtgtacgatataaataactaccggactgggaaaccaggctaccggataaatggcttacccggaactctttttaagatgttttccccttaagttaaatcaccggaattgtatatattaaggccgtgttctaaacttgtctgggcccgggcttgtctctctcacaatctgggtgttttataaacccgatctccagaaaaggtacgatcgcctttggacgcccgaatgactttgaacttcacggtttacaaaaataattttctgggattgccctgactaatatagggcacagatttgaa

SEQ ID NO: 691014 - DNA, 123 bp, Homo sapiens
atccgtgagttggcccgcctgttttacggaagatgaaatcccgcgtttgtcggcggaattggcgtattactttcttctgtcgctctttccgtttttgttgtttttactgacgctgttggcgta

SEQ ID NO: 691015 - DNA, 251 bp, Homo sapiens
acctggatgccactgaagcacggtacatagaccctgtgatcatccgtgtagacatggaagatattagaaaccaaagatgtctcagaaacctgggcattaaagcgctaaacctgtagaagaagcctggactttagggtaccatacatgacggtgcatgcaccactcagcagtgtggcagcacggagcgccataggtggtgcaagacctacctcggctcgcagcagtcccgtccacacacaggtatgagcagg

SEQ ID NO: 691016 - DNA, 146 bp, Homo sapiens
aaacacaattagctaggcccggtggggtgtgcttgtagtcccagttagttgggaggctgaggcaggaggattacttcagcccattaggtcaaggttgcagtgaggtgtgattgtgctactggatgccagcttgggcaatggatcca

SEQ ID NO: 691017 - DNA, 195 bp, Homo sapiens
atcgggcaacctccgcgctggaatcctcaacaggttcaggagccggatctggggcgtgatcgaggacgccgccggtgggatcgtcggcataccccaccctgacgacgtcgttccaaggtcgtcggatgtcatccaggacaccccacgcgaaccatatctcgcaggccagacgtagcactatcgacgcccagtaca

SEQ ID NO: 691018 - DNA, 229 bp, Homo sapiens
ttttttttcccctcccaaatttttgtactgaaattatttttcatgaaagtttttctaatatttctaatgaaagtttttttaatttgggggcataatttactaagaatcagtttgcttttttttggaataaatagtaaccgtaagtccgccgggttttccaaacaaaagactaggttttttgaggtaagcttggttttagaaaaaaacaattaaagtttggatttccgga

SEQ ID NO: 691019 - DNA, 132 bp, Homo sapiens
cgattctcagacgggtgcgcgaattcacacactggtgtgctaattactcaagccacccccgatcggtctgcgtcaaccaatttcatagacgagatgagttgcattcagccaacctagatcgatcaatagtct

SEQ ID NO: 691020 - DNA, 237 bp, Homo sapiens
ctcgggagcgtgactaactggggctggactacagcaagtgcattagatccagaaaaacatcaagtttcttgcacatgaagctcagagaaacatcagcgaaatgatgccaatttttaaaaacgaaaagctaacaagtacctcgtgttcatacaggtcgaagaatgaataactctcagtgacgactaacattgggtacagaacaagttcgtggctaaaacaccactagctctcccgagt

SEQ ID NO: 691021 - DNA, 338 bp, Homo sapiens
ccacctcagcctccagagtagctggggctacaggtgcacaccatcacgccaggctactttagaaaaaattttttttttagagacagggcctcactgtgttgctgaggctggtctccaactcctgggcttaagcagtcctcccgcctcggcttcccaaagtgctgggattacagggatgagcccactgccaggctgcccctgcttctcttaacacacttgggaagctcctgctgtagcaaaatcctcaataactaggtgttgatcagatgaactgatacgaataaaacctatgtgggggtgggagagattttaaattactcagatttttaaggaggatt

SEQ ID NO: 691022 - DNA, 977 bp, Homo sapiens
  misc_feature (602)..(602): n is a, c, g, or t
gacccacgcgtccggcatttacgcatctcacttctagggaatactagtatatcgctcacacctcatatcctccctactatgcctagaaggaataatactatcgtctgttcataatagctactcttcataaccctcaacacccacatccctcgtgtagcacaatattgtagccgtattgccactacataggtcatttgcacgcctgcggaagccagcgagtggagcctagacccatactgagatctcgaatcatccaatcacatactggccatagactacgtagcataaccttaaacgctagctccaaatggcgtacaacatagaatcgtaccacaaccaagtatagtattgactagcgcatctgacgatgaactttcctaaatacaagagcacagtatatttgaaagtccaacacagagcctaccgcacaggcccttatattattgagcgatcaatcgcgctcgttacgttattgtgtttaacatccaaaatcgaacgaaccaatcctgactttagcatgtgtcgcccgacatcgtttatccgtcctgagcctcctcagaagaatcgcccgcgtccataagttactaaatcggaccatgaantccattacccactctaacaatgctattggctataagccacatcgccacatatataccagtgaacacactgatgcagcggacaaacaaactacttaacatcttctatgagtgaatactacccttacaaaatctcccttgagattataagcattacacagggcacaggaactaagtcatcattttatatcgttcgttcgaagagccacgacttatccccaaccttgggctatcgagtcaccccggatgaggcaaggcagccagaagcgcctgaaacgcaggcaccattacttgcctaattctacagcctaagtaggctcccttcccctactcatcgcacgtaatttacagctcaacaaaaccctaggctcacttaaa

SEQ ID NO: 691023 - DNA, 167 bp, Homo sapiens
ttagaattgccacagtgctcatgatttctgatagactcactcagtactgactgagcatcacctgtgctgcagcgagactgtacagatattcccacggagccctcatggatctgtgtttcagagacactctgtggaccagcaacattctcagcattcaaatgatgacc

SEQ ID NO: 691024 - DNA, 300 bp, Homo sapiens
  misc_feature (59)..(59): n is a, c, g, or t
aatttaagcctgtggcatggaacctaaagactagaggcggttgtgtgagtcaggaagangggccagatatctgagtgttcctctttagtttcttcaattgcaggaaagacagtggttcctgactcaggaagacagtctcagaaacatgtggaatgatattgagctgctaacaaatgatgataccggaagtgggtacctgagtgtcggttcaagaaaagaacatggaactgccttatatcaagtagatttgctagtgaagatctcttctgaaaaggcctcattaaatccaaagatacaggc

SEQ ID NO: 691025 - DNA, 120 bp, Homo sapiens
atgtacttgtcaagaaaaccgagcactccatgtttgatgaaaatggtctgcccacacattgacatggagtgcaaagagctcagcaaagggcagccaagaagctgaagaagctcttcgagg

SEQ ID NO: 691026 - DNA, 310 bp, Homo sapiens
aaaaaaaaaaccccccccttttttggtgataaagaaaagggggggggtgcccccctccggggtcccccccctcccaaaaggtatatcccaaaagggttttccccccccccccccctgggccccccttttaaaaaaaaaccgggggttgttttatggcccccccccggaacccagggaaatttgggccaaaaattttttttttgaaaaggtttgggatttgggggccttttccccgggggggggtttttgggtaaacccccccccttgggggggggggtttttgttttttcccaaaaaatttggtttttta

SEQ ID NO: 691027 - DNA, 155 bp, Homo sapiens
gatacgactttttggcagtccacatttttatttccccggcaggtgataaagagccaggatcactttccatgacagagccagatgctatctggccagacgcgtatgaaacaggtgcggtaaaggatgcagctcttagtcccttctgtcgtcttctc

SEQ ID NO: 691028 - DNA, 835 bp, Homo sapiens
ctgattcgccctcgatttaagagggccgcgtagcgagtaccagccgtccgctacctctaggcataggtgtcgattactgctatgcaatccttagccggatgctagtgataaataactccagctaaaagtgtaatggtgtcttatctccaccctcatttcctactttgcttaccctcatcctcagacagatgcctcttgctttaaaagttggatttaacagacgtgtgtagggttctatggtctgtgtgaaggcagagaccagagagaaggaagtgagcccactgctctcctgggagcaatgtgggtgagtaccaccagaggccctgcatgtgtgtggacaaataaattatatagatacttacccacagaacctcgaggcagagatgtgtggatgtatgcgatgatggatatttatatatgtacaccatggactcactgaatgtattgaaactggaggaagtatactaacagatggacaggggttctatataacaaaggatctactagacatgaaagtatataagacataactcccagtcccttagagacaatatacattgtgatacaatgaacaagcataaatacaagtgtctgtgaaatattaagaaaagataagtaacctacgagaggaacattcactggagacaggcaaataagacgtgtatacaaaaagacacaaaagaagacaaggcaaaaggaacacataacgcaaagaacagatcacgaccaacgggagcaccgacagcaagtcaaggagaatgaaaagggcaaacagacaacaccagaaaacaggaccgaagaagaagaaacaacaaagggaagggagaaagaacgg

SEQ ID NO: 691029 - DNA, 346 bp, Homo sapiens
ggaattcggctctctgggcataaactgttctttgagcaggaagacattctgagctttggtttctaagagcctgctcttacagtggtcccaaatcatgccccccttgcccaggtaggtgacatttctcatagcaccattgtctgttatgttactgagtacctcatgccccaccagttcagggacttcctggatcccataaacctctgcctgctgcacagccttagaagttacggaggaattctttagtactttggatagtaatctagaattcctccgtaacttctaaggctgggctgatatcatccacttccaaagcttccatgtcacaggctccaggaggccttag

SEQ ID NO: 691030 - DNA, 381 bp, Homo sapiens
ttcatattcgtgtgtaagaacatagttagactcactagtaaaggaagctgaatgcacttctctaaaaagctgcactttccgtgagcactttacgtggtacaatccacatgacccacattctcccctggagaacgttggtacaaaatttagcaccacttgggaagagtatattatcacagtaacttgacagcagctctggaactaattatttctgccccgagtaatgccacactgagactttgagtaacctcctggaggactcaaccctgttcaactcagaaacgagcctcctctcactaatgcaatgctttaatgctatctctgactgtactgaaactcttcgtattcttgtcaactctaaagagactgaagaaaagattt

SEQ ID NO: 691031 - DNA, 429 bp, Homo sapiens
  misc_feature (25)..(25): n is a, c, g, or t
  misc_feature (40)..(40): n is a, c, g, or t
  misc_feature (282)..(282): n is a, c, g, or t
  misc_feature (425)..(427): n is a, c, g, or t
actggtaaactgattgacatatgtngatcacaataacctngattaatattataaaatcctaagacataatcagagacacacgcttccccaattacctaaaactatttctgttatattaaaatactaaataatggcccaggcgcagcggctcacaccctgtaatcccagcactttaggaggccaaggcaggtggatcacctgaggtcaggagctctgagaccagccttaccaacacagtaaatctccatctctattaaaaatacaaaattagctgggtatggntgcatgcgcctaaaacgcgagctactcagaggctgaggcacgaaaatcacttgaacccaggaggcagaggttgcagtgagccaagatcgcgccactgcactccagcctgggcgacagagtgagagtccatctcaaaaaaacgnnnta

SEQ ID NO: 691032 - DNA, 156 bp, Homo sapiens
tcagtaagcggagcatcagtagcggagcgtcagtaagcggacgcatagtagcggagcggtcacgcctgctgggggtatgttgtgttgaccgctccgcttactgatgctccgcttactgaaacacaacatagcgctccgttactgatgctccgctta

SEQ ID NO: 691033 - DNA, 514 bp, Homo sapiens
agtaagaaaccaatgcccacactggccaggaattagtgttgggcccttcatggccttaatccatttttccaaaggttttaaaattagggaggtttaaaatctaaaaattttgcctttcctgctatcaaaaaccggatttttttccccaatccaaaaaaaaaaaaaatggtcagagcctggaccccgggtttttttttaaaaaaaaaaatttttaaccaggggttccctatttaaaaaacaggggtttagtccttaaaccccctcctttagaaaaattggaccataaaggttgccttccaaagccggtttccaaataaaatttcctttccatttaaaacggttcccggcccttggtaaaaatttcccttttcaaggaaggttaaataaccgcctttatcttttttcccaggttttttaaaaccaaaggtatttttttaaattcagcgagaaataggataaaaaaaagcttttggaaaaaagttttaaaaaaaatttaaaaaaccttttttggcca

SEQ ID NO: 691034 - DNA, 395 bp, Homo sapiens
accagtcagaggtcttgagtcggtccgcatgacaagttcaccgctcgcataaccagcattcaagaaagccagcacactaagcctatctacagccagggagtctcagagtctacgtcactcccctgccacctcaatcagagctggtgctggtatccactgctgggagacttgtgctgaggtgaagcctgggctggatggctggaggatgaagaactgcacggaggagatggaggcacccagacagatgccccatggacatcctgaagcagagctgcctcactgccctgcacacacatgagagcgcagccaggaacagaaggactgggcaacattcatgcggagcccaggccaattttctaaacatggaatatgagttaaataaatggcttcgtatt

SEQ ID NO: 691035 - DNA, 152 bp, Homo sapiens
tacagttagctgtatgtatctatgatatttatttttaagagacacggtcttgctctgtcactcaggctaaacgtgcagtgctcatgactcatatgctcactgacagcctatgaactccgtagtctcaagacgatcctcccacctatggctta

SEQ ID NO: 691036 - DNA, 320 bp, Homo sapiens
agtttcgacggttactctccttatggtagtgtctcctacatgccaaaatcagagagtaagtcagaataaaacctcccaaggttgaaaactagagctggcacgtattacatggtctgtagatgtttatccgtggctggatgagtgaaggaatgagtgagtgagtgaatccaggatcgatctggaaacacaccagggctcagacctcttgggctaagtgccagtctcagtcctcttgggctgtgtaacaccaaagagaacaccccaggctctggcttaccccaagggcacacccatgctcacaaacacacacacacgcacgc

SEQ ID NO: 691037 - DNA, 251 bp, Homo sapiens
aatatggccagatcttctgatattcaaggagaagctgaaaaattgggacttcaaaaaatatgaaacctttcaatttttaagagtggctggcaattaaaatttaaaaagaacagctctgtgtgccagatccagcccatcagttggagaccttggctctaaggtgatggtttccaaatcctctaagtcggtgtaacccatctggggctgattctccttctaattggctagtgcaccaaggaaggagaggttac

SEQ ID NO: 691038 - DNA, 207 bp, Homo sapiens
atcctgatgcatgctggtggatgcatgctgatgctggtggagcagctggagctggagctggtggtggccgagctggtggagctggcactggtcgtgaccatggtggagcagctggagcagaatcctggagcagctggtggagctgcagctgtgctggtggtgatgatggtgatggtgatgatggtggcagtgctggtggtgatggca

SEQ ID NO: 691039 - DNA, 387 bp, Homo sapiens
  misc_feature (16)..(16): n is a, c, g, or t
gaggagcccccgaggngcgcttagacctttaccgttacgtttttggtcagaaaggaagtgggatccgcaagaggagggtttagtttgaggtgaacatacatgtcccggcacctgagctgcagtctgacatcatcgccatcacgggcctcgctgcaaatttggaccgggccaaggctggactgctggagcgtgtgaaggagctacaggccgagcaggaggaccgggctttaaggagttttaagctgagtgtcactgtagaccccaaataccatcccaagattatcgggagaaagggggcagtaattacccaaatccggttggagcatgacgtgaacatccagtttcctgataaggacgatgggaaccagccccaggaccaaattacca

SEQ ID NO: 691040 - DNA, 160 bp, Homo sapiens
tactacgcaatacgtaacccggttgatcaatccccacaacagttacattttctttacaaatctctgccctcccattagatatgaacaaactccggtttctcatgacacgtttgtatcggtaagctgcttacaggaacacattggccatggaaggactaaa

SEQ ID NO: 691041 - DNA, 215 bp, Homo sapiens
tgcgggtctcttcgacgagcatcagccggggaaaggagggccctgggcagccttccatcggtatgactgactgtcaggtagcttgtcaggacttcggcatgaggcgaggcgacgggtggatggaagtcaaggtggaggactacagaggagacgctcgagactactctatcgatgtgtcgactctgtttcgtccataggtcggacaacctgtgcga

SEQ ID NO: 691042 - DNA, 676 bp, Homo sapiens
  misc_feature (526)..(526): n is a, c, g, or t
gttagtaagtctgctaaggtcctatatcaataggtcacttagtgaaactagcgtaagatctaaagttacagtagtacacctgagttgaagaagttactagatctgctgacagctagctaagcatagcgacatcagagtcagtgaacccagtgtgtagggaaatagactgtgtacaactgtacatcttctattctggacgctatataactcaaattagagcagagaactacttgtagtcactgtggttacagaaggtttcatggacagcgaccataaagctctactagctaacaaataggtcttaatgataaaaacgtgggccttcagagaactaaaggtaccaatgtgtggcagtccaaaattacgaggaacaatgagttcccttcatgggtcacagtcagcaatttattgtttttcccctttggagacagagtcttgctctgttgcccaggttggagtgcagtggcatgatccaggctcactgcaacctccgcctcccgggttcaagcaattctcatgcctcagngctcccgagtagctgggattacaggtgcctgtcatcaggttggctactttgggatttaagtagagacagtgttcaccatgttggccaggcttggtctcaactcctgacctcaagtgatctgctggttcaggcctcccgaagtgctgagac

SEQ ID NO: 691043 - DNA, 102 bp, Homo sapiens
cctgaggatacccggaaatacacatgcgggtacagtgacactgcgaaaggctcattaaatcagttatccaagtaggagaggagcgagcgaccaaaggaacca

SEQ ID NO: 691044 - DNA, 486 bp, Homo sapiens
ctatattctcctctacccctcatatattctttttttgatttttagtaacagccatcctaacaggtgtgaaggggcatcgcatcatggttttgatttgaatttccctaataattggtgaaactgaacatctttttatgtgcttattggccatttgtgtatctttttggaaaaatgtatattcaagttatttgctaattttttaagtcatttgtttttcttattttgttgtaagacttggttacataatctggaaattagctccttgtcagatatataatttgcaaatattttctcttattctatggatggtctttttattttattcataatgtcctttgatacacaagatttttaattttggtatagctaaatttatctatttttttgttaccctggctttgctggcatatttaaatggttttaagcttttaccttgggcttttgatttatttttaacttttaaggcgttccttgtggattcacctt

SEQ ID NO: 691045 - DNA, 130 bp, Homo sapiens
gagtgtacaggttagatgatgtgtgtgaggagtaaaatcagtgtgtgtatgaggtctgtgtgtggtgtagctgagatctgtatgtgtaaagccagtgtgcttcggttggaggccaggatgctatcggttg

SEQ ID NO: 691046 - DNA, 327 bp, Homo sapiens
ccgagatcttttatcccggaaccacctgctactagtgtctatgtgtgataggcccccctcggtctttgttctacagacgcaataatagtctgtgtctcccacgggctgacccgggccgggttgaagctgaggcacttgtcagtagcacatagggcacctgctaggcttctagcctactagcaggcggggctagaggtcattaaaaagcgaggaaaaacactagctgaaaaaaccctttcctaaaaagtagccctagaagagagtagagcaggctagactagtaagcctctactaggggcaacaaggcaactatagggggtagtaggc

SEQ ID NO: 691047 - DNA, 653 bp, Homo sapiens
agcggggctgccatcttgcgtccccgcgtgtgtgcgcctaatctcaggtggtccagccgagaccccttgagcaccagccctagtcccccgcgcggcccttatttcgctccgacaaggatgaagagaatcaatcatgaagccaggaaaaactcgccaatgactgcatgcacaatgtgcgcattggttgggaataggaactgctcgcagaaagaagaaggtggttcatatgaacagctcatcacgtcagatgacataagaataccttctgattctccgtttaaatgaagttaaggggtaaacaactatcttctgatattagaaggaggtgaactatgtttgacaataccacatggaacatgtgtatccacatttaatcggagcctcttaagagttcagtgcatcttctgtgcagacgagacactttcaccattacagctccatgctgtagacaaagcagcttgacagaaagagtgctatcccatgcaatcttaacatcctaggcttggatagccgcgataggtctagactagatttaatggatgcactggtccgaacgctactgtccaaatcaactctagtaggatggacacacatgcacctactttgctactgtgagcggatgactgatgatcgaacgttccatgatcgttgtg

SEQ ID NO: 691048 - DNA, 176 bp, Homo sapiens
  misc_feature (54)..(54): n is a, c, g, or t
ttcatgataaattcgagcttgtacctgaacattcgtgtcaccagtcaaagcganactatactcaattgatccaataacttgaccaacggaacaagttaccctagggacacggacacgattggacacgaatgggacacgaatgttcaggacacgtatgttcaggacacgaatgttca

SEQ ID NO: 691049 - DNA, 304 bp, Homo sapiens
  misc_feature (116)..(116): n is a, c, g, or t
cccccccctttttaggggcccggttaggccccagggggggagggggttttttggccctccccccagggttttatatcccgggcccttggggttttgggtgggtttatcccttttanccgggccaggatttttttggcctttgggggcccccccggggggggggggggaaggggggggtgttggttccttaaacctttttggggccccggtttccgggttcggggcccgggtttttttttcccccccccttgggttttttttgcccctggttaaggggccccttttttttttcccccttttttta

SEQ ID NO: 691050 - DNA, 101 bp, Homo sapiens
acctgagtcaggagcggattcggcctctcaaagtgctggggttacaggcgtgagccacggcgccaggctgtgtctaggtttcttactcaacatcatgtttg

SEQ ID NO: 691051 - DNA, 386 bp, Homo sapiens
  misc_feature (55)..(55): n is a, c, g, or t
tgtgacctctggtctagttggacacgttgcctactcatagaagcttcccggtggncactggcattcctgggagctaggtgagggagtcgggagttttgcatgacatctactcactggcagcttctcctgcagagttaagcacttttccctgatagaggacaggatcatgccacatgtcctctgccatctctgttccagctcctgttgatgtagaaggctacattggccaggttcctggcatgaagcaggcacagtccttgtctcctcagatgctcactgtttagcagaggaggcagggaaacaggcagcccacagcacaaaggggagcttgctagcagtttaaaaggggctctgggggaggcagcagaggactgtgggaaagggca

SEQ ID NO: 691052 - DNA, 144 bp, Homo sapiens
aagccttccgtgtcttgactgtactcgtggtgcggcgctcctgttccggaagctctgctccgtagcactgctgcgcgtgtctgtcctgcctcgcgatcagaggctaggttgtggtgacgaagcgctccaatattgtcgcgcctc

SEQ ID NO: 691053 - DNA, 260 bp, Homo sapiens
cggaacacaaagagcgtatgagtgggggaggggtgacatgcgagagaaacctcccggcggcagcctcagcctagacttcggccgctccagctcaaggccttttcttcccaggtgccggcagacggggcaggaagtaagagtgtgacaactctaccaggaaaagaggtactttacctgcgggacagtccactcagaccaaggctggaaacggttgtataacccccccgcgtctactggtgtttcggctccgcttttgtgtt

SEQ ID NO: 691054 - DNA, 490 bp, Homo sapiens
  misc_feature (101)..(101): n is a, c, g, or t
  misc_feature (105)..(106): n is a, c, g, or t
  misc_feature (144)..(144): n is a, c, g, or t
  misc_feature (159)..(159): n is a, c, g, or t
  misc_feature (176)..(176): n is a, c, g, or t
  misc_feature (198)..(198): n is a, c, g, or t
  misc_feature (201)..(201): n is a, c, g, or t
  misc_feature (206)..(206): n is a, c, g, or t
  misc_feature (212)..(212): n is a, c, g, or t
  misc_feature (216)..(216): n is a, c, g, or t
  misc_feature (219)..(219): n is a, c, g, or t
  misc_feature (222)..(222): n is a, c, g, or t
  misc_feature (228)..(228): n is a, c, g, or t
  misc_feature (237)..(237): n is a, c, g, or t
  misc_feature (241)..(241): n is a, c, g, or t
  misc_feature (251)..(251): n is a, c, g, or t
  misc_feature (265)..(265): n is a, c, g, or t
  misc_feature (290)..(290): n is a, c, g, or t
  misc_feature (308)..(308): n is a, c, g, or t
  misc_feature (314)..(314): n is a, c, g, or t
  misc_feature (322)..(324): n is a, c, g, or t
  misc_feature (327)..(327): n is a, c, g, or t
  misc_feature (343)..(343): n is a, c, g, or t
  misc_feature (359)..(360): n is a, c, g, or t
  misc_feature (366)..(366): n is a, c, g, or t
  misc_feature (372)..(372): n is a, c, g, or t
  misc_feature (379)..(379): n is a, c, g, or t
  misc_feature (382)..(382): n is a, c, g, or t
  misc_feature (385)..(385): n is a, c, g, or t
  misc_feature (387)..(387): n is a, c, g, or t
  misc_feature (390)..(390): n is a, c, g, or t
  misc_feature (409)..(410): n is a, c, g, or t
  misc_feature (421)..(422): n is a, c, g, or t
  misc_feature (424)..(424): n is a, c, g, or t
  misc_feature (434)..(434): n is a, c, g, or t
  misc_feature (455)..(455): n is a, c, g, or t
  misc_feature (457)..(457): n is a, c, g, or t
  misc_feature (460)..(460): n is a, c, g, or t
  misc_feature (476)..(476): n is a, c, g, or t
aaatgtctgttttgaggaaagggctttgaattccccagatactgagcaatttgtgtttgtgactgatggagaatttcaggaatgaatgagaaagcctttgngaanntatgcaacagtttacatcagtcatgtgaagtatttgtntaaaacagagcaaantgaagaccaaattattntcctgttgaggtccgtggatgncanatttnaagggnaganccncanaggctngcaaaaatngganaggctccatntttaatgcatgtanaagctccttacgggtgcccatcaanagcatagcttggaagccnccatgntgtggggnnntgngtcagggcaaatgtcncagcaggatttccccnncccagntccatnatcacanacncananagntgcaggggaggcctgcccnntgttttgttgnntntgccctcctntggcagcatagatccttaggngntcnataaaggtgtgctgtnttgaaaaaaaaaaa

SEQ ID NO: 691055 - DNA, 300 bp, Homo sapiens
aacaaaaactccaccaggggtgtcaaactttgggaaaaacccactcggcttttacagggagaccccccggcgagggggccccaagattgggggaggatgggccccagccaacccagggtttagggttgggctccggccgggttaaaggggacgtgccccgtcccagtttggacttctggggctggatttatgtgtttcccaaactcggaagggttttgctcctcctcctccccctgaacaaaggtggcagttgttacaaataaatttattggagggttatgggtccggtttcccccccca

SEQ ID NO: 691056 - DNA, 219 bp, Homo sapiens
cctcacgaggcctggtgttgtggtactgccaggtaacgttgttatttcagttgagcctggtgtgatgcatgatgttgtagattctccacgacgctgtggttgtgtagtgtgcggatatagggtgttgcgcccctttgcttttgggctgctgtggactattgttgattcctcactgtggcccgaagttgtggagctggcagggaagtgtgttgtaggggg

SEQ ID NO: 691057 - DNA, 286 bp, Homo sapiens
gagctgagagaggagccaggaggccagaagcgcatgaatttcttctcaactcctgccctggaaattatgtcaccactactcacgagggagacaaaagaaacttgtgttcggagcccagaatcccagtgaggttgccaaacaactgcagaaacaagaagagaatgacaaggtattgctctgagagaacatgggagagaaaagaggctttagtggtgctttccttcccacagacttcagctcataaatcaaaatgccaaagcttataaacgtttaaccctcaccagtc

SEQ ID NO: 691058 - DNA, 221 bp, Homo sapiens
tgatgaatcctgaggacatcagaaaacacctgttggtccacgcacctgaagacaagaaagaaattctggccagttttatctccgtgcctcttcaatttctacgaggacttgtacttcaccctacctcgatgatcaatcccacttggtaacatgggtgtgcttgtgtgggatgggggcaagggtcccagtgcctaacaagcgcctgggggtacctgaagctc

SEQ ID NO: 691059 - DNA, 338 bp, Homo sapiens
  misc_feature (135)..(135): n is a, c, g, or t
  misc_feature (242)..(242): n is a, c, g, or t
  misc_feature (282)..(282): n is a, c, g, or t
  misc_feature (333)..(333): n is a, c, g, or t
tctttagacggagctctcctctgtcgcccaggccggagtgcagtggcgtgatctcagctcactgcaacctccacctcccgggttcaaacgattctcttgcctcagcctcctgagtagctggggctacaggcacgnaccaccatgccgggctatttttatgtttttagtagagatggggtttcaccatgtcggccaggctggtcttgaactcctgacctcaagtgatctgccggtctcggctncccaaagtgctgggattacaggtgtgagccactgtgcccngccagagacttacaattcttaatggcaggtgcaccccattattctctttanaccac

SEQ ID NO: 691060 - DNA, 155 bp, Homo sapiens
gggcggagtagcatggctggggaggctaggaaactgacaatcacggcagaaggcgaaggggaagcaggcacgtatggccatgtaggcgcaggagagacggagagagtagaagtgggagggctgcacgcttttaaacaaccagaatcccacaagcg

SEQ ID NO: 691061 - DNA, 142 bp, Homo sapiens
  misc_feature (56)..(56): n is a, c, g, or t
  misc_feature (58)..(59): n is a, c, g, or t
  misc_feature (85)..(85): n is a, c, g, or t
  misc_feature (120)..(120): n is a, c, g, or t
  misc_feature (122)..(122): n is a, c, g, or t
  misc_feature (138)..(138): n is a, c, g, or t
taagaaaaacaacaacaacaaaaaaagacaatgaaaaaaaaaacgtcatgtgagtnanngagatgtcactgtctgtggtcttggngaactagtctcgtagctgaggggtggggctccttntnttctgggggaactggnaacc

SEQ ID NO: 691062 - DNA, 118 bp, Homo sapiens
gcattacaggaatagctcaaccagcgcctcgattgcccttgcccgggactgtgtgcagcacgcgagctgctcgcttcttcaggtgacagctccagtgttggagcctgcccctgtgcac

SEQ ID NO: 691063 - DNA, 178 bp, Homo sapiens
agagtgttgacattgaagatgtcccttgcaggtgatctcggggtgctgttcgtctggctaccttgcttcactgcggcctcctggtcattcctgtggcctgtgtcagcttgttatccgtaagtccacacatcacactggcatgcagcatgttgtggcgtgtgcgcttgggggcctggag

SEQ ID NO: 691064 - DNA, 203 bp, Homo sapiens
gtactacaccaccaccagaggctgcagcgactgcagctgctgctgctgagcacgccgctttctcgtgcccagccacaccctctgccagaagcatggtgaccaagcgcatcagctgtgggtccaccgggtcctcctcctgggagctccgaatgctgagccctagcatgcagtcaagtggtctgagggacccagagaccccaata

SEQ ID NO: 691065 - DNA, 303 bp, Homo sapiens
gtactgtatacctctacaattgtatcgttgccactcggtatagcttagtcactagggcggttatgtttccgacagaatgcgcattttgtgtagacaaggaggtaacatttacctataaggtggtcctgtcagagatgcatgtgtgcctaataagaatgagagcggtcagtaagaaacttggtattggcactgggctccgcttgatgctccctgataactgtttctaagcaacttgagactatcgtgttggagttgcttgttttgctgccagcctaatgtccttgcgtgggtcccttgcaaatg

SEQ ID NO: 691066 - DNA, 349 bp, Homo sapiens
gggtttgaaacctgctctatgaaagggaacgttcaactctgtgacttaaacgcaaacatcataaagaagcttctgagaatgctgctgtctactttgtatatgtaatcccgtttccaacgtaaccctcaaagctatccaaatatcctcctgcagattccacgaaaagacgctttcaagcctgcccttagaaagggaatattcaactctctgatatcaatgcagatatcacaaagtagtttctgagagtgcttctgcctaagttttatatgaagatattcccgtttccaacgaagcagttagggctatccatgtatcaacttgcaaattctataaaaagagtgtttccaaa

SEQ ID NO: 691067 - DNA, 533 bp, Homo sapiens
ggaaagctgatacaggataagtccttatgagaccgtacgtctatagtgaggaccactctactatcatgataacagctatgagggtaacccccctgccatgattaagttacctcccagcaggtccctctcagggcacatagggattatgggaactgcaattcaagatgagatttgggtgtggacacagccaaaccatatcattccacctctggcccctcccagatctcatgttttcacattttgaaacacagtcatgcctttccaacagtccctcagagtcttaactcattccagcattaactcaaaagttcaagtccaaagtctcatctgaggcaaggcaagtcccttccacctatgagcctgtaaaatcagaagcaagttagttacttcctggggtcattgggtagataacacccattccaaatgggagaacttggtcaaaacaaggggagtatagaccccgtgcaaatccgaaatccaacgaggcagtaattaaatcttaaagttgcaaaaggatctcctttgactccatg

SEQ ID NO: 691068 - DNA, 673 bp, Homo sapiens
tttcatttgtcgcatttccagtttccaataccaactcacctacaacgatattaccacaaaccttaggaccaataaatgtgaatgttggaccccaaatgattataagcacaccacagagactaaccagttcaggaagtgtatctgattgggagtccatatacccctgctaccagcaatggttactcagacacacatagcaggaagctactggctgggtccctggtgatagaaaactgggctagaaaatttatagactctgatttttcagaaagtaaacgaagcaaaaaaggagataacaaatgggaaaggcttgagacacttcttcaactgaaagtgtgtgagaaagttcacacgaccaaggtacaccatcgtacaactgaagtcgctgaatgagctggtgtcagagcttcaccaattcaaatacaccatttggctagctagataacgcaggcttatgatcacgatagaacactcacagcagaagagctccctgatgcttaaaactgtgctcaatgcgcaatgacacatacatttcaccgcgcacaccacacaaatccacgtggcttcgcacaagcctacccaattcttgctcagtgattgtcgactctggacaccagagaaccacagcggatccaacgcatacacccaccggccccctgcacactctctacgc

SEQ ID NO: 691069 - DNA, 385 bp, Homo sapiens
ccctatgggctgaactatatcccccatcctataattcacacgcgtcgcagctcctaagcccccaaggcatcagactgtgactgtatttgaacacaacgtccttagagaggtgatcaaaataaaacgagatcactatggtgcgccctaatccaataggactaccgaccttataagaagaggacatgaggacacagacacacacagagggacgaccctttgaggacacagggagacgatggtgtctacaagcccaggagagaggcctcaggaggaatcagcccagcccacacctggatctcagacttccagcctccatggactgtgggacaatcaatgtctgttgtttattagccacccagtctttggtattctgtcctagctgttt

SEQ ID NO: 691070 - DNA, 460 bp, Homo sapiens
  misc_feature (383)..(383): n is a, c, g, or t
ccggttccatgcacagttgggttggtttacacaattctgaccaaaaaataaagtgagcaaactttctacttaatgggtgccaaaatcgtgtgcctagatcagttgcagacaagaacaggactttcagtggaaatctcaaacaagtgagatcaagatgctgaggcacttctttgaagaattagaataggagacgagccatggctttaccagtaccatcctgaagacaaagcacaatcagagcaatggccaccaagaggaggaagcagtccagtcaaaagaggaccagtcaaaagagcacaggccatggcaacagttttttggaatgcttgaggcattctgctttctgactttctggagggccaaagaatggacatctgtttatngtgagagtttcgagaaagttagctaaagctttagcaggaaaacgcctgtgacaatttcaccagacggtctttcttca

SEQ ID NO: 691071 - DNA, 673 bp, Homo sapiens
ggagagagagagagagagagagagagagagagagagcctatgtcgcggacgacatggccaaacgtcaccaagacacgtcgcgatcgtcggtaaatacgggacccgatatggggcctccctccggaaaatggtgaagaaaatagagactcagccagcacgccaatgtacacttgctctctctgtggcatttttccgagatgaacgagacgcatctgtggcgtcatctggcactgtggtctcctgcatgaagacagtggtctggcggtgcctggacgtacatataagcacattccgtgtgatcacggtaaacgctccgcacatcagaagagcagaaggaggtagacgagaccagtagcacgctcctctactctgtagagatactctgtggccctaattatactatggtgttaatcatatgtacacacaaacacacaaacacaacaaacaccaacacaacaaccaccccaccgcacacccaccacacccttctacccagcacactaggcgaagagagcggagaagaggaagaaccagcgagggacatccggaaagacaagccacccccccgggacccgctagagcgtgggggacaagcccgaggcggaggaggccgcaccgatccatcgacatatgcacgaaggagagaggacgaccccacgacaaggcgagcgac

SEQ ID NO: 691072 - DNA, 520 bp, Homo sapiens
attcgcggccgcgtcgaccaatgataaaaaaagacaagggcattatataatgataaagggtttaattccacaggaagacttaattatcctaaatatatatgcagccaatactgaagcactcagatttataagacaagttcttaaagaccttgattccacaaagagacttagattcccacaaaataatagtgggacactaaaacaccccactgacagtgttagacagatcattgaggcagagaattaacaaagatattcaggacctaaacttgacacttgaacaaatggacctgacagacatctgcagcacactccacccaacaacaacagaatatacattcttctcatctgcacatggcatatagactaaaatgaaccacatcttgaccataaagcaattctcaacaaattcaaaaataaaatcataccaacctacactctcggaccactatcgatttctattttcattgcactgtggtccgtcgacgcggccgcgaatttagtagtagtagtcgacccg

SEQ ID NO: 691073 - DNA, 588 bp, Homo sapiens
  misc_feature (321)..(321): n is a, c, g, or t
  misc_feature (326)..(326): n is a, c, g, or t
  misc_feature (329)..(329): n is a, c, g, or t
  misc_feature (332)..(332): n is a, c, g, or t
  misc_feature (339)..(339): n is a, c, g, or t
  misc_feature (351)..(351): n is a, c, g, or t
  misc_feature (357)..(357): n is a, c, g, or t
  misc_feature (367)..(367): n is a, c, g, or t
  misc_feature (369)..(369): n is a, c, g, or t
  misc_feature (374)..(374): n is a, c, g, or t
  misc_feature (422)..(422): n is a, c, g, or t
  misc_feature (433)..(433): n is a, c, g, or t
  misc_feature (437)..(437): n is a, c, g, or t
  misc_feature (442)..(442): n is a, c, g, or t
  misc_feature (450)..(451): n is a, c, g, or t
  misc_feature (463)..(463): n is a, c, g, or t
  misc_feature (471)..(471): n is a, c, g, or t
  misc_feature (477)..(477): n is a, c, g, or t
  misc_feature (480)..(480): n is a, c, g, or t
  misc_feature (486)..(486): n is a, c, g, or t
  misc_feature (488)..(488): n is a, c, g, or t
tccatggtagccaatcaagcttccaaataaattaaattccatttcattaaagggaaaatccccgagccactgagtcttggcttgtcactgaagttaaatctgaacccaggtgtcaacagctgctctaactccccactctggcactgaggagtattcccctcatctacctctctaagctatgcacccctccccacgtcttccagctggggatgggggagtcatagaaaagcccccatctccatctgggatagggaccttccatcagccttaaccctgggaaatgcctgctgcccccagtgactcttggtttcgtctcccacntacanaancanggtggangggaagggtggntctcanttagcagggntncccanggcaagtcagcctcctccctccatgcctctctggtcagtgtgccttanggtggcctctnactnccacnactctggnncccttgggggangactgggnaggggnccntgggananccctgacgctggaaccttgtatacacaaataaaggaccagtcctcaacagacttctggagccgcctgcctggagttctaaaacttagggcagggctggaa

SEQ ID NO: 691074 - DNA, 170 bp, Homo sapiens
tgaggatccctgctgtacatagtattgatgtctgctactgcaggttgtcgacatactttggtgggactgtgcggaaacttgaggatgaaatcagtgagctgcatgcacttataaggcatgcgctgtctcctcacttgagtgcaaggtccatcgaccaaagccctgttctg

SEQ ID NO: 691075 - DNA, 981 bp, Homo sapiens
  misc_feature (776)..(776): n is a, c, g, or t
gagttttagcccccttcgtatgtggttcgcgtggttgtgcacgaacccctgttgtgttgcatcccgaggtgttcgcgcgacaatatggcgtcgctattaccgctcgccccgtgttgccaaggcgcaccgtgtgaccgtggtgaccgccgtgggacacaccgcgtatacccttggggaaaccccctggggttcacctgacccccgtgggggaagacacctggcctcacgtcttccggggcccctctgcatattccggggtgtgggcgccccccccgtgggtatttattccccccacgtgtcgccatggtgtgcgcccgctatcctagtaggggcattcgctccctaagcctgacccgtgcttctgcgccagccccagtagccaaacatggcgcccccgggaggggtgtagtcaaaccccccctgcccgaaaaaaggggggatggcgccgcgcccctacgagggaggtagttcgaagcacccggacatccacgcgggtttaccgcacccccacaacagagccgggagccacgcgtcgctccctgaagacccgagtggggagagaaagatacagcccacacccgttgggtggtgtgagagaaaacattataggaccccgacgtctaaataggcatacataggcaaccaccacggcgtcttttatcccacatgtggggcaccccgctctccgctgcaagtaccccgttcgtcttgtctttgcccacacctgcgagagagggttataatgttttctatcctgggagccacagtgagggaanaaatcggccccatatccacaattcggtgtggggcagctcgctgtttctgtgtcgtgtcccctaggtaacacagtttgtgttgagccgccggatggtgggtgcaccccgctcccggcggcggttttttgtcttcccccgcccacgcacaccccccgcttttcgtgggaaaaaaattgggcaaaggagaaaacgaacaaacaaaaca

SEQ ID NO: 691076 - DNA, 709 bp, Homo sapiens
catggtggctcatgcctgttttcccagcacttcattaggccaaggcggacgagtcacctgaggtcaagagttcgagaagccagctgtgtccctggggccggcgtaccattcggaggtgccgtccctggctcactgcgtgaccacgtggagccgcatctccagccctcttggactagcagccatctctgcgatgttacggcacagaggaatacgcttctcacttgttagacgcactgtctgtcgaggcctctaaccagctccacgtatactctaacacacgtgtctctcacgcctgtatacaacttcgcttcttccattctctagacacagagacttgctctgtccctccaattggaccgacgcgccttgacactagctttctgcattcttcccctgtcacgccccgaccatccttatcctttgcactcttacttgctcgcgtcttaccccctttttccgatacgtcgtgctgttctcctatatacctcatctccccctcccgccctcttccgcatctcgttgcgcactcttgtccttgatcgttcgtccattgtccctctctcattactctttctatccccgtgcttacccccccgtccctccccgtccctttcactatgcggccgttcctctcccggtcccgcctctcgcctcctcgacctttcattgtactcgcgcttcgtcctgtcttcccaccttgctccccccg

SEQ ID NO: 691077 - DNA, 344 bp, Homo sapiens
tatacccaatccaaaacagaactatttaaaaatattggccaggcacggtggctcacacctgtaatcccagcactttgggaggccgaggcgggtggatcacttgagatcaggtgttcaagatcagtctggacaacatggcaaaaccctgtctctacaaaaaattagctgggtgtggtggcacgcacctgtaatcccagctgctctggaggctgaggcatgcgacgcttgaacccaggaggcggaggttgcagtgatccaagatcgcaccactgcactccagcctggaagaccaaacgagactctgtatcaaaaaataataataattaataaagttttactggaaa

SEQ ID NO: 691078 - DNA, 1002 bp, Homo sapiens
gacgctcgcaggccccgccgcgggtttttaatcggccgaggctgcttctgccactggttcctccatggtaccacacaagggaagatggaagtgggtctgggcaccgggagtgtgcccaccggagactccaagagaaacgtacgagtcgtcccaggaccggggtggtgagcgaggccccattttgtcctcccagggcctagtctcagacagactggggtgagggaggtggggacaggcggcgagccagcgggcagactcaggcctggagctcgtcctgttcccctggccacacaccaaggtgttgctgcctcctgctccctggtggccatgcctgctgtccctcctcactggccttccaggcatgggcgctggctggggagggatggaagcgtgccctgccgggggtgcccctcggactcggtcttgccattcgtgtccgggcctgtgtggtggtctctggcctcgcacggcccgtgtgtgtctggggaggggtgaagcacgccgcggccccctctccccgtggggccgagacctcctggtggtcgcctgcctgatggtgtcccgcccgcgttccagctgcaagctcgggtgccaggcaacgggcccgcctggcgactactgcgccggggcatgttcgtgcagcagctgctgagtcgcggctacggcttcgacgagcgcgccttcggcggcgtgatcttccagaagacggcgcggaccctgcagtgggctgggcgctcggcttcatgctgaacgtgaccaactgatccccgccgaccgcggggcttggcaaggcacaacttcagctcctggtcgtctctgctgtcttcgctcgcgcctgctggctgtcctgctgtggtagttcctcgccagtgcagaccacttggccaggcagacgccaatacaaagggagaacgaaaagcaccacgcaacaaaattcgctgcccggcagacccaaaaaacgcaggcgaaacaccatagacgcatgagcgcgactcgagcgca

SEQ ID NO: 691079 - DNA, 1074 bp, Homo sapiens
  misc_feature (492)..(492): n is a, c, g, or t
  misc_feature (551)..(551): n is a, c, g, or t
  misc_feature (560)..(560): n is a, c, g, or t
gaagaaacagatcagaaatgagaaagagacctgctgatttgctgtgtctctattatatgatacttatcatgattttgcaggagtagacattttaactatgagagtcgtgggtttatttgtgagtacgcttcattcatattctctttatcccgaacagtcaccaatactggttatgttgctgtccagtgaataagataaaatatggaatgatctctttctctgaatgggaacacatgttcctccaatctgctgtgtgacttaatcagtgtcattatgattgaggcagaagataccatgaatcagtcagaaagaagagtcttataatacacgtctcacttcccaattgagcattcagctgtagataatgttcctgctggagcatttagtgtcttatgagattccttattgagaggacattctcagactcaaacacgggcttgtaaattctgacctatgcaccacgtaaacaatgcaaatagatttcctatcttncctgggccactgttgtactagattacagtttaggtttcataggtccaggctgtgggttntgcgatgtntgcttctttcctgcttcgcagtagtcaactccctggtggttcagcctcttgaaagaagcttgagagtaagcttccttctgcctcaacaggactgaaaaaccactcaaaatccttccaaaggtgaagcattagcatcccataaaaggctgggtcccaaacattgttactatagtatcttctgtcaggattcagaggcatttaatgagttagagaaatagatgaaataaatcaaaggactaccttcccaactacaataattagtggaaattctaatattaggaacttttaccattgaggaatttaagaatttaaggcaattataggttgaatagccaaagtcaggtatgagcctatgagagctcttatagaaatgtcttcattcagtagaataaagacaacattagagaatacaatagcacttttcacttctaaaattgctatccatgtgcctggtatgctgctttcatttgcaattcaagctcttgtaggaagccagggatcctctagaacacta

SEQ ID NO: 691080 - DNA, 1041 bp, Homo sapiens
  misc_feature (452)..(452): n is a, c, g, or t
tgcctatggagtgagctgagcgcggcatgccgtcgcgttcggaaagtgccgtcacagttgtccccctgagcgacttccaggctacagaagctaggactttgtgtgtcaatagaagaaaatgtcatatagttatatactagaagagaatagagtcatcggtggtaaatcaacgaccggatatccttcaaccaagtattggaggactcagaagccacttggagaacgcacattgacgatggtagataattcaggtggcatgatgcgaacggatcacatgattggtgatgcatgcttgccactgccaagcttgtgagcccttgggtgcccccacacggtgcgacacctgtcaagggaacttttccgcacgttgtgggagacacaccagggtggccacaggaggtggggttaacacttacagggggggccggcaccacacagaactgatttggggnagcacttcctataccactgtggtgtagcagaacccagcaccggatataaagacgaatgttcgaggaacgagattggattcgataataccaatagtaatgggttaccgataatccgatgattgtcagttcaacatttcacgtatccaaagacacgacaaaaagagcttcacacgcgatgatgtatggcgcgttacattcaccacccgatagaatagcgccaggggtgagaccaccggcaaccaatggtgaaaattacccacgacgttaccccacccacgggacggtggtgcaggtaggccagaacaacatcgtagcgccacccacgggcaaggtggacaccaaagtttgcgacaaggtgaacggaattggcaacgggcgagcacgcaatttgtatgcacgccgagtgatgagaccacccccacagtttatgggggcgatgaggaaaaccaccccgttgttgtaccctacagggcgtggcgcacgtgaaaacagcagtgacacgcccattccagataggaggcaaacatgacgggctccagccgccaccatgtgtgtggacatgaggggacacacgacaagagggaaaagt

SEQ ID NO: 691081 - DNA, 400 bp, Homo sapiens
tctttctccctgccgcaacagagtgagcagacatctcaaatgatattacagatttgtgtttatgacctagaaaaatgttcagagcacagtactttcaaaacgccagactgggccggttgcagtgactcacgcctgtaatcccagcactttgggaggctgaggtgggtggatcacctgaggtcaggagtttgagaccagcctggccaacatcatgaagccccatctctactaaaaatacaaaaattagctgggcgtggtggcgggcacctgtagtcccagctgctcagtaggctgaggcaggagaatcacttgaacccgggaggcggaggttgcagtgagccgagatcgtgccactgcatgccagcctgggcaacagagcgagtcccactcaaaaaaaaaa

SEQ ID NO: 691082 - DNA, 537 bp, Homo sapiens
ttagtctcccccgatgtaagaggtgggtgaagggggcctggttttttcaggaagacagagttggagagcactgtagtcactacaaagcagtaaaagtgaatggtgtctccagcggctgggtccatgaacaccacggtagagccccacgccataaatggtgtgttcctgcctctggccctgcagcgaatctcttttgaatctactttgatatggtggctccacagagcaagtgggaagtcaactagccaggaggctggactagggttccctgtggaccccgcaggtccctagaggctgcttgggcaggtggttggtcggcaaagacagaaaggtccaagacgggttcaggcctggccacattagcggatcgacgaagggaaactgcgatgtagcgggtgcccctggtaggtggggagcacctcatggtaatgcgtgagtcgtacagggtgcatgagggtccaggccttccttggggctcggatggaacagtagtagcggaggaaccgacagccccggcctcgtaatcaacccgaactc

SEQ ID NO: 691083 - DNA, 183 bp, Homo sapiens
tacgtacagctgctctgcggatgttgtgaccgccaagaatgagggtggtaactgtgtcatgtagagacaggtctaggaactggccccacagctcgtatactaggcgccgctgcagccgtaaggagccgcatttgatcctctgtagccttggctgcaaactcatacttggccttgtagaaggca

SEQ ID NO: 691084 - DNA, 544 bp, Homo sapiens
  misc_feature (326)..(326): n is a, c, g, or t
  misc_feature (349)..(349): n is a, c, g, or t
agccagggggactccaggggagcacaggggggttatcggatggccctactccaacccttatgagaacagcttattccacccggttgggctttcgccccccagttatgtggtttgctcttaggacaccaggctgcagatgatcagggatccaatatgactcagagaaccagtgcagactcaagatttatggaacagggatggcgaggcctctctcaggagcaggggcattgttgattttgtctgcccaatccatcctgctcaggaaaccacacccttgcagaatttttaaaaaggaaaagttttttttgggatcaaaatataaaaanacccaaagggaggtaagtttttntcccatgatttctacaaaccccctttaagtcccatcttccccggggcaaaggccaaagggataaaagttaaagtttttgggcttattcagaagcgggatttgcaatttgaaggctactcataacaaaacaaaaaagtatgttaaacggtttttaaattttaggggcttcccccattaaatgatttttttctccta

SEQ ID NO: 691085 - DNA, 166 bp, Homo sapiens
tgacacgttgacgccactaactgaccgtgacacgtcctgtggacacgccctgtggctaccaactaacactgtttgacgccgtacgactgccgtcggacaactggtgacacgggacgacctcgaacgtacctctgacgtgcttgtacggacgggtaccaactagacg

SEQ ID NO: 691086 - DNA, 1434 bp, Homo sapiens
tgcatcacctcgttcgttataaggttgtttatgatgaaagattctttgattaatcccactagtaatatatttagtaatgttgaaccgccacactataagccctgtgtgaaaaataaaacaactgggggtggtttttagaatcaaatttgtatactgtcgatagatatatctgcccgtgtttacacaagggtatcccccttacaccagtttctaatggaggtataataatggtatattttggtgcgttttttccccaaggataatccctgcttcgttgttacaaaccccggaagtgttgtgggaaaaaagaaaaccccaccgaggggggcggtacacacgccaaaaaaataagtggaaaattccaaagttgttctcaaacttttccaggattatgttccctcctgttatatggtgatcggctgcccgatgtaaacacactcaacgggggaattgtatctttgttttttgaggtaatgaaaaaagtctccccagcagtaaattgtggactccaaatggaactcgtgtgataaaaattgaggtgctttcccaaacgccccttgtaaagaattgtagggagccccacgcgcccttggagccccccgtgaaaaaaagtgtttgtaccccaagtgaaaaggtgaaatatagaagattgtgccttttcccccccacaagtgaaactgtgcccacagaaaatttgggagaaaccacacttggtgtgtgacccacacatctcccacctctgagattttctgaaccacagtgtctcccgagatgttttcccccacgagaggtccaaaaggagaaaaagagaacctaagttgtgtggaaaagaaacctgtctgtggcgctgagatttcttgaaaattcacagataagaatactcccaccccgaaagggaaaggatcctcacgaagagtctacattggcgtgtaaaaaagcaccgcacaaatgtcacccacaggagaataaaaggttttccgagaaagagaagataaagaatatttctcgcacacattataagaagtttatccacacgcccacactggcacacacacatgtgtgtaacacattggctctcctgctttagattgtatactctatattaaaagaacgcgttttgtgagaaaactataacacccacgttcaattttataaattataatgttacccacatagagactgggccctcggttacacaacaaggagaatttgtatatttggagaaaaagttgaggtttgagaatctgattacaatgccccttatgagaaaataaggggtgtctttaaagagcccccccctggtgtagacctcttttatatggggaaaaaagggaaaaaaatcttcccacccttttaagataaactgatggtttgtaaagattttccaagcttagattatttaaagaaaaatttaattataaaggaataggaagt

SEQ ID NO: 691087 - DNA, 1419 bp, Homo sapiens
gctgttttcctgctgcaggagcctgcggggccgtaggcatgccatgtgcgcccagccggaatggcatggtcttgaagccccacttccacaatggactggcagctggcgctgtggccacgtggttcaaccagcctggcccgtaagatcctgcagactgtaaggccctggcaatgccaatggcgcgccgcatctgccccgcgccccatgcgtacggtgtcccaatcacggtgcccatcgttgctgcttgccccactggttctgtgtaccaacactgaatgtgttgctgctgcctggcgctgcatggcattcaagccctgtgatggatgctcaagggttgtgcctggcatatcacaatgaatgtgttggcacctgtgacccatcggcgcatattactatgtgcgatcctgatgtgatgtgctgtgaaaccaatgtaccaactgtgaagttcaccttgccatgtgccaaactagtgccaagcggtgctcagaacagggcatgtacccggctacccaatacttacaataccatcatatacacaccaatgtgaaatggccactccggtcaccgccaaagcaacggcgagcacatgtttctatgctttgaatgcaacctggaaaacattgtgcccacaccaagcttgacccgggcacccgtgttccatgacactggtcctgtgaacactgctctactacacgaccggacgaaacgcatcgacgtcattcaccttgatggaaagagaacgcaactttcaaacgccttcagctagatctcacgtatggacccgtggccaaacgcccgggctctatcgggcataacgggccacaaatgacgcaatggacagccgccggacccaaggactgtctgcacccggactcaaactaaaaggccctccttgttggacctggcgaattcacgtccggcaactcaatgcctagggatcactccacgtaggtgtagttaccgcaggacacaactgggccctggagatagcgcgcctacaatgatgttgacttactcctagcaggagcataaggcgacaatcctggacacgaacagcccaggccccggaacaacggctaaccacccgtgtgtgcaccacgatagcatggcgccaaagcaaagatctacacgcgcaacacaggagacagcacacccacaaggcggccctcacacggacacgacgctactaactaccaagcgaacaggtgcgcagatggtccaacacgctaacacacccacgacagtggtcgcaccaaacagcgcgaacccgtcaaaccacacaatgaccagaccgtgcaacccaacgcagctgtgcacagccacaacacgctcacaagagccctcgactaccaccaagtaccacatcagtattattacgcgacacaacccatcccacaagcaacccacacaacaccacca

SEQ ID NO: 691088 - DNA, 668 bp, Homo sapiens
catagtggcacacatctgcaatctcagccacttgggaggctgaggcgcgagaatagcttgaacccaggaggccgaggttgccgtgagccgagatcgtaccactgcactccagcctaggcaacagagccagactctgtctcaaaaaaaaaaaattattaattacttattgaacttaaatggattaaaggctaggaagaattagaaaattattttttaaattttaaggtctttaacaacggttaacaaaccgggcccggaaggcttctggcttataatcccaggtggcttgggggagggctaaccggtaggagggatggcttggagggccagggagcttaaggaccaggtctggggcaacaggagtggagggatctggtctctacaaaatattttttaaaatttacgccagggccgtgtgtgccacattggttggtagtcctgggtgctcagagaaagctgaagggggagaatcacttaagcccaggaattcagggtctattagtgagctatgatgtgcccattgacctccagatgtgctctaccagagaaaggacctctatctctgaaaaacgaattgacggccaggcatgggtggctccgtgtggtaatcccagcacttgtgggaggctgaggggaagtagatcacttggagaccgggagttcgaagc

SEQ ID NO: 691089 - DNA, 755 bp, Homo sapiens
  misc_feature (238)..(238): n is a, c, g, or t
  misc_feature (549)..(549): n is a, c, g, or t
gtattatcctgataccaaaaccagaaaaagacacataagaaaaaaaaaaaaagggaaaactaagggctaattatcacgtgattgaattacgtgattgcaaaaattcctcaacaaaattacttatttaacccaaatttcaacaacacatttaagaagactcatttcattcagtgaccaatgtgggattttactcccagaagattgcacagaattagtttcacccattttgcaaattcantctattattgatacattcattcccaaaaggaacaaacgaattaaacccattattgattcattttcaatttattgctggaacaaacactttgggataagatttcagcattcgtcttttatggtaataaaaaaaacttcctcaaaaaaccggggttttacaaagggacccatgtgcgccttcaccttaattaaagggccattattttggagagacccttattagttaggttattcacatccgtgaggtggggcaacaaccgtgaaaagaccctttattctcgtgatagctcggggaccattaccagggtatangccccaatttttccacccattggtgtttttcccaggacataatcgggtctaagaaagatttctgaagccttaggagccatatccgagacaccagagaacatttttttgaccaagagagagcctttccccaacatttttgcacatttttcgacacacaaggtgtccaactttacttccccatgggggtccccatcaaggattgcatt

SEQ ID NO: 691090 - DNA, 388 bp, Homo sapiens
tcatacctggactgtggttcatactgcactgtggttcatacctgcacgtgtgttcataccgtgcactgttgttcatatctgcacgtgttgtacatacctgcagtgttgtcatacctgcacgtatgtcatacctgcactgttgttcatacctgcactgttgttcatacctgcactgttgtacatacctgtattcccagcactttgggcggcagaggtgggaggctcacctgagtgtctggagttccagactagcctggccagcatggtgacatcccatctctactaaaaatacgcaaattagccgggtatggctgtgcataagtctgtaatgccagctactcgggtggctgaggcaggcgaattgcttgaacccgggtatgaacaacag

SEQ ID NO: 691091 - DNA, 220 bp, Homo sapiens
ctctcgagctattgagacgtacgtttatcaaggccgggagcggtggctatgctgtgtaatcccagtgctttgggatgctgagatgggaggatcacttgacgccagcagtgtgagaccagcctgggcaacatggcaagaccccatctctacaaagaaaaaaaaattagtgggacatggtcgcacatacctgtggactcagctgctctggaggctgaggtgg

SEQ ID NO: 691092 - DNA, 740 bp, Homo sapiens
  misc_feature (4)..(4): n is a, c, g, or t
  misc_feature (9)..(9): n is a, c, g, or t
  misc_feature (13)..(13): n is a, c, g, or t
  misc_feature (34)..(34): n is a, c, g, or t
  misc_feature (38)..(38): n is a, c, g, or t
  misc_feature (40)..(40): n is a, c, g, or t
  misc_feature (46)..(46): n is a, c, g, or t
  misc_feature (54)..(54): n is a, c, g, or t
  misc_feature (63)..(63): n is a, c, g, or t
  misc_feature (66)..(66): n is a, c, g, or t
  misc_feature (73)..(73): n is a, c, g, or t
  misc_feature (77)..(77): n is a, c, g, or t
  misc_feature (90)..(90): n is a, c, g, or t
  misc_feature (95)..(95): n is a, c, g, or t
  misc_feature (97)..(97): n is a, c, g, or t
  misc_feature (102)..(102): n is a, c, g, or t
  misc_feature (132)..(132): n is a, c, g, or t
  misc_feature (137)..(137): n is a, c, g, or t
  misc_feature (140)..(140): n is a, c, g, or t
  misc_feature (143)..(143): n is a, c, g, or t
  misc_feature (150)..(150): n is a, c, g, or t
  misc_feature (167)..(167): n is a, c, g, or t
  misc_feature (169)..(169): n is a, c, g, or t
  misc_feature (183)..(183): n is a, c, g, or t
  misc_feature (188)..(188): n is a, c, g, or t
  misc_feature (197)..(197): n is a, c, g, or t
  misc_feature (205)..(205): n is a, c, g, or t
  misc_feature (209)..(209): n is a, c, g, or t
  misc_feature (226)..(226): n is a, c, g, or t
  misc_feature (229)..(229): n is a, c, g, or t
  misc_feature (231)..(231): n is a, c, g, or t
  misc_feature (242)..(242): n is a, c, g, or t
  misc_feature (245)..(245): n is a, c, g, or t
  misc_feature (252)..(252): n is a, c, g, or t
  misc_feature (256)..(256): n is a, c, g, or t
  misc_feature (261)..(261): n is a, c, g, or t
  misc_feature (265)..(266): n is a, c, g, or t
  misc_feature (268)..(268): n is a, c, g, or t
  misc_feature (270)..(270): n is a, c, g, or t
  misc_feature (308)..(308): n is a, c, g, or t
  misc_feature (321)..(321): n is a, c, g, or t
  misc_feature (327)..(327): n is a, c, g, or t
  misc_feature (330)..(330): n is a, c, g, or t
  misc_feature (340)..(340): n is a, c, g, or t
  misc_feature (353)..(353): n is a, c, g, or t
  misc_feature (357)..(357): n is a, c, g, or t
  misc_feature (367)..(367): n is a, c, g, or t
  misc_feature (389)..(389): n is a, c, g, or t
  misc_feature (393)..(393): n is a, c, g, or t
  misc_feature (397)..(397): n is a, c, g, or t
  misc_feature (419)..(419): n is a, c, g, or t
  misc_feature (432)..(432): n is a, c, g, or t
  misc_feature (447)..(447): n is a, c, g, or t
  misc_feature (454)..(454): n is a, c, g, or t
  misc_feature (480)..(480): n is a, c, g, or t
  misc_feature (484)..(484): n is a, c, g, or t
  misc_feature (490)..(490): n is a, c, g, or t
  misc_feature (497)..(497): n is a, c, g, or t
  misc_feature (503)..(503): n is a, c, g, or t
  misc_feature (665)..(665): n is a, c, g, or t
  misc_feature (726)..(726): n is a, c, g, or t
tganaaccncaanagccaaagttgtttatttgcngctnantcttgnggccaaanaggaattcnacnaaatgtnaaangaaggatgtctcnaaacnanaaganaagtaaaagggccttgttgtcatttctgtnattgnggnggnggttgtnggctttcttggagaaananatctgtgactttcncaacnaatgggccnctggcctnaatnaacaaagtatccctttnccnanaggaaaaaacnagnaaaaaanacanacggnaaannancnaaaaccccctactgttatcccaaaaaatcttattaaanattaaagtgaacnactgantanaaaagtgccngtaaatggggacncaanaatgatttcntgaatgaaaaaaacctttaacntcancccnacttgttgcccccccaccccanaaacttatgaccntcattaagccccacnagtaacnagtttggggaccgactagggggccancaanaaagcnaacccanaaggcnatgacaaaagcactgaggcatcctaaagccttatctgggccacaataagttacctagttacctatacaaactctactccacagcctagctctggaaaatcggggaaaaagagagagagttcagcacccataacacactcctatgccacttcttttgcatttnttcttagccaacagttgagaaagactattttttagcttgtttcacttttccttgatcttcnactttcttaatggc

SEQ ID NO: 691093 - DNA, 1244 bp, Homo sapiens
gcatccatgacagcaaatctccgggggacatcaaacctgaagatttctcgaatggaccacgaccacgcaggctctgtgcggggtggacgactgaccgtttactctgctttgtgaccacggtgccgacacagactgaccattgacggttcggttctatgacggactgactgacgaactggactggcacggcctttggaggaccttctctcccacagactgtgcactacacaccacgtatgccaattgtgttccggaccaccccccatatcacaacgactgaacgacttgaagcggcctgataacagatgattctctgcaactgcaaacgacaacgcgaggacggggacgatgatctgacttccaaacagattcacctacttaccactctggctggaagacaaggacagacggtgcaagcggcacgacggagcgacaggccatatgccacaaccatacatccacagaacccatatcggaagcgactgcgctccaacacactgagcgatgagaccggcatcctgcggcggctgctagacacgagaggagacataacagacgaaaacgcagaactagaaaagcgccccgcacagacgccagacacatccgacaaccaacatcccacacacatacacaacccaccgagccacatcaacagaacaccacctaacacacaaacacaacgacgaaccgaaaaacaacacccgacggcccctggcctaacaccacaggaaccacacagccggcacagcgacagcgcacgcccaccaaccacccggcgcacccgacccacaccagcgacacgcacaacaagccacagggcaaaaccatacagaaacacacacgccgccacccccaccaccgaaaaacaccaccaaaacacacaacccacaacccaccacaaccgcaacccacaaaccccaaaggacgcccaccacagcacagagcagaccccgacgacaacaccccgccccaccaagacgccaagaccacctaaccaacacctaaccaccacagaagcgaccaactgagcaccgcggaaccaacagaaccgacccacaccgccgccactcgaagcacagagaacaccacaccaacagacccgcagacacccccagcagacagtaccacaacacgaaaccgacacacgacaacacagcacaacacgacacaaaaaagacacgaccaaccaaccgccaacaccgcaccagcaacccacaccacccgaccaccacaacaaaccccgc

SEQ ID NO: 691094 - DNA, 1116 bp, Homo sapiens
cgccggcgagtacggtcccgtccaccgtccgcagctggtagccaggctgcccctcgcctcgagctccctttcaccaagcacctgaccacccacattgacaccgtccgagtccggccagccgtctccgactcggtttgccgtttgcatctccacacagtggcgtcctcctgcgcagagcgtgctggctcctccgggggacccgcggtccccacccgtgcatacggggcatcatcaacgatggtcctctcagggtgcgccatcacttgtccgaggctcagcctcgatggtgggccgtcctcctgagcggcacgatcaaaccatcagcgaacacttcgtgcctggcaaatctggctcgccgggacagccgccacacaaacctgatgcaaaggcatacccctgatgagcccctgggacatatccaggcatcgagcagtaccgcttcgaaagcacacgcctgacttgagcgaacgcgacatgtcatggtttcaccgaatagaaacacaaacgacgtcccacaggggccgaagaagctaatgggacactggattctaaccccttgggcacaccagcaatacccaaatgggggcgcaaaccaaccagtgcccaggacacttcaacgggcatagacacaagagagccctaagttccaccccgcgagcaagacagcccacttcacacacgcctaaacataaattcccctgaagacagaaaccccgcggccaaacccaagcaacctgttcaacccgacacaaacgcaaaaccgacaagaccaagggcaacacgcgactgctagcaaccagaacggcgcacaacgaagctccacaaaacctaaatcccggcaaaatacacacagcgttaattacccactgtgaaaacactcgaagggacaacaacaagcaaagaaacaaaaacaccccaacccacaagaaaagcccctgaggaaaaacgggccaaaacacattcgtaacacaacataaattccgccagacaaagaacacaaagtaaagcaccacacacaacaccccgagaacaactaatcacccaaaaaaatatcacacacccaggcgtactaaaaccaaaccagaacacgatcaaacaccaaaccaacatgaccac

SEQ ID NO: 691095 - DNA, 285 bp, Homo sapiens
  misc_feature (132)..(132): n is a, c, g, or t
tttgggggcttttccccccgtttggggggggggttttccgtttacccccagtgccctcacaaaagggccctcctgccccccatggttatggggggtcccccccccccccttgtttgaggtcccgcccggttnacagggatttaaatttttgatattttcccccccccctagaagggaaaccccccgagggccccgactttttttgtttttttttctatccccaggggaagccccccttggcccgggcctataggggcggctttataaaaactcgtctgtccatga

SEQ ID NO: 691096 - DNA, 977 bp, Homo sapiens
tgtttttccaccttggttgggtcttggcttaaaatatcctcatgtgggctaggtgtggttgctcacacctgtggtcctagcactttgggaggttgaggcaggagaatcccttgagccaggagttcgagaccagcctgggcaacatagcaagagatcccatatctgccaaaacatacaagaattggccagatgtggtggtgcatgcctgtggtcccagatactcgggaggctgaggcaggaggatcacctatgcctgggaggttgaagccccagtgagccgtgatcacaccactgtagtccagcccgggtgacacagcaagactctgtctcaaaaaagaacaaaaaaaaaaagtcctcttgcaagaagggacaggaccattgccaattccctctttgccctcaattttcatgagccgggggtaggggctacacggtggcctcggcggggtctgcagggtgggtgggcctgtggcgggtgtgggcaagaggaatacggggccggcagtgtcactggtgcacaatgacaggctgaggggtgtggtgcccagcctggggtcagcaccggtgcgaccgtgcttgggggggctccctgttgagtccccatggggggtgccgggccgggaccaggggtgcgcgcccgtggtcgggcgcctgggttccctgcccaatttgataggggctcccttgaagatgggccagctttggcacatattatgcctaattacgggcgcaagggacccctcgcccgcccaaaagaggtggggccgccgtgtgggcggggtgcgcccacagatatacatcgcgtgggcggcaaaaggagaaccggctcacgggtgggcgagcggacacacaaaccgcgcgaaggggcaaccccacaggagagcgggcaggcggggggggagaccccaccaagataggacaggatccagggagattattactgcgaggggagggcacagccagcaagagtcatcatg

SEQ ID NO: 691097 - DNA, 900 bp, Homo sapiens
  misc_feature (900)..(900): n is a, c, g, or t
atatacactcatagaaggtgacaattatatgaatcctcttttcaagaagaccagttccaaaggagtgaaagggattatttaaaacatcgttagttgcgagttgtagagaagcataagtatatcaatatttatactagttatattatgagggacataaatataaaaatggagagtattctaattgatttccgtgtaatgtgtgtcagtaaacattaaacatgtttttgctattagaatttgttcacatagaaaattgaatctgtatgactagtggaaagaacattggatgtataatttcccatccaattatcaactgagaatactccaatattttccccaaatatcagaacaagaggtgtgactttacaacttagttatttaacagtgcttaattgagcttttgtctaattactgtcccatgtgtagggacttacttcatttgataatattaaagtactttttcaaattctcaggtgataggcaaagcaagagcagatcacacgagaaatgagagagtatacccaatatatacttcctgtgccttctatctgctaatgcaagcaagggaacatagaaactattgaatttacacgagtgctgtctcaattcttccaatccaatgggggcggacaaatacttggaggctcgcacttggctttaagaggatagcgggaagcactgactgatgaaggtcgcaacaaagggaacggatattccggcggaaaggagacggccccggattgtgtaaccagggagtcctaggcttgccaaggtaagcacagaggccgaaattacaggcaggaggacagtggcaacgcgcacgctagggagcgagcgcaaaaaatactggggaaacgtatgggtaacggagcaggtgaactagcccgccagttgttcctn

SEQ ID NO: 691098 - DNA, 123 bp, Homo sapiens
ccgagatcacaccattgcactccagcctgggcgacagggcgacgctccgtctcaaaaaaaaaaatctctagggtatcttttgggttatgtgttggaatttcggtctcttggctggtcccgcgg

SEQ ID NO: 691099 - DNA, 668 bp, Homo sapiens
cgaatgcttgtgatctttgcacattgattttgtatcctgagactttgctgaagttgcttatcagcttaaggagattttgggctgagacaatggggttttctaagtatacaatcatgtcatctgcaaacagggacaatttgacttcctcttttcctaattgaatacactttatttctttgtcctgcctgattgccctggccagaacttccaacactgggttgaatagcagtggtgagagagggcatccctgtcttgtgccagtttttaaagggaatgcttccagtttttgcccattcagtatgatattggctgtgggttagtcataaatagctcttattattttgagatacgtcccatcaatacctaattgattgagagtttttaacatgaagggctgttgaattttgttgaaggccttttctgcatctattgagataatcatgtggttttggtctttgtttctgtttatatgctggattacatttattgatttgtgtatgttgaaccagccttgcatcccagggatgaagcccacttgatcatggtagaaccgactagtcggttctaccatagaacagagctgtgaccacatgccactatatgtgtacaaagtctacatatgttacattcttggaagtcccttaaatgttcccaaatgtcacaagctg

SEQ ID NO: 691100 - DNA, 399 bp, Homo sapiens
  misc_feature (298)..(298): n is a, c, g, or t
  misc_feature (371)..(371): n is a, c, g, or t
aatatatgatgtttacagaatgaaatcacctaatgatgcatttctcagaacatatcatcatcgttaagtgacacatgaatgtacatgttattaatacctcatacaatgtaaatgctatgtaaatagttgttatactgtattgttgagggaccaatgtcaagaaaaacagttgacacattcagtacagtcacaagcatccattttttgaaaatattttcgatttgcagtcggttcaatccatggatacagagctcacagatacggagggccaactgtattgctcttttctctgtttggncttcattttctttttctttttctttttgcttcaaggactaaaactttgggcaatttctatataaaataaaggnttttcagggccttaggttccctccattt

SEQ ID NO: 691101 - DNA, 698 bp, Homo sapiens
  misc_feature (62)..(62): n is a, c, g, or t
  misc_feature (88)..(88): n is a, c, g, or t
  misc_feature (291)..(291): n is a, c, g, or t
tacctcctcacggctcttcccggcgctctcctggctcccttctgccccagctccgtctcggnggcggcgggcagttgcagtggtgcanaatggctgacctcagtcttgcagatgcattaacagaaccatctccagactattgagggtagagataaagcctatggacttcattgtcacatccactagcaggcaagaggcctttgatgcatgttcgtgggacgacaatctgttggtaaacaacgaggatctactatctcactctcctgggatgttcgatgagaatacaccggngaactcacgagtctaaaagaacgaacacgcgtggttcacgcaaattacgccagacttgaatgatagctccagtctttctaacaaccataacaacgtcctatgccaactgtgtggtcattgtgagtacagaatgggtagcgagtatcgtacatgggtctccatactgaagttccttggaagagtacaaatggcctatccatggaatacccaaagtaagcgcagaacatggccagaacgataccaacttttgttttccgaacctgagcaaagtggtcgatgcctatctcagacctgattccctcttagagatagtaaccattgaattgattgatacctggggcaagaattaccggtccttttcgcacttccagtgcggacaagctggattacttcaagtattgtgcagg

SEQ ID NO: 691102 - DNA, 361 bp, Homo sapiens
gctgttctatgaggatcacccgaagcgccagtttctactgaaaactacgaaaaaagttagccatgagtgtgctggcacatgtctgtagtcccagctactagggagtgctgaggcaagagaattgcttgagtctgggatgtggaggttgcagcgagccgagatcacaccactgtactccagcctgggtgacagagcgagaccctgtctcaaaaaaaaaaaaaaaaaaaaaaaaaaagtgatgctctgtgaatggattcaagaggggggtttgtatttttttccctttgtgtggggtgatttgtgtgtgtgaccattgtgtattgtgtttttgtgcgaagtgggtattatagtgtgttgaaac

SEQ ID NO: 691103 - DNA, 234 bp, Homo sapiens
acatcacagctctggtgtatcacgtgtgtgacctctgcacgaggtccttacccactcagtggctttagctcccttatctattaaatggaaatacatcatggacactcattcacaaggttcttgtaatgacttagttcaataaccagaatcgtaaagtatccagagtagtgcctatcactcaggaaatcctagctaccatatcagtaggtttagtgtattctttctttactcttt

SEQ ID NO: 691104 - DNA, 260 bp, Homo sapiens
agcctctgcaggcctctgccacctcttctccaagaggtgcctcctcctatacagttcctaccagttctgcacatgtcttttctgttacctggcatgtttatatctctctctatctataggcaggccttctcgcggtctttaacatgtgttgtttaatttggcgtattatgtttcctaaatggcagactgggtaatgtttgcatagactcgtgacgcactgaactattgaataacagcacagagcagaagctaaagaagtt

SEQ ID NO: 691105 - DNA, 222 bp, Homo sapiens
  misc_feature (78)..(78): n is a, c, g, or t
agttctcctgggacccttctagctgtgggcaatgttataatagggatgaagcgtctgtggttatagagggaataacangtatttaaggttaaatggcctctccggcagtcagcactaaggttctggaccatcagagtccggttaaagtggttattttttttttttggacagggtcgtgctcggtcagggagggcgggaaggcgggggggtgatcggggctca

SEQ ID NO: 691106 - DNA, 513 bp, Homo sapiens
  misc_feature (107)..(107): n is a, c, g, or t
tgttgcgcctcgcgatcgtctgcgccggagcagccgaacaggggtccgacgccgaagatgacttccatctcccccgacggcagcgtgcgcagctggggctggggtgnccgtgggccggaacctgggcctcgcgggaaacccgagccgggcccgtgccgctggcggctattctgggcgctgacggacaggcgaggctgcgcgcccgccccccgcccaggagccacccagggccaattcgctgggcctttcgcgtccggcccaacgtccgggggctccggagaacctggagccgtgtagtaggagcctgacgaaccggaggagtcctggcgccgcgcgggggccgtgggcagctgcctcgggatcccaggcagggctggcggggcgagcgcggtcagcatggtggggccggacgccgtgcactatctccctcgcattcgcctccgctggtggcgccggcactgtccccgccccgcccgaggatgccgtgggggtcaccgcgccttaaagcggccg

SEQ ID NO: 691107 - DNA, 908 bp, Homo sapiens
gagtatgtgtacaattgatctttgataatacagtacaaacccataatcatgtacatgctcattgtcgtttagtgacataacgagagccctagtggttgctctgaatctgtacatgttcgttgtcataaaatgcatacgtgtggatcacaagccactgtgcaacattattttatatccggagaattctgtctctcagagggattgctcttgttcctctcactgtctagtatatcgtactaaactcaagttttcatagctatcaactattaggagtaactttgcaaccttgctagcatcacatggtatgatgtctgtttaatgggatgcacgcttttccccgaccgtatacttagaatgacaaagccatccttgttacagtattgtgactctttccctaaagaccaaacagtgtttctgtggaatttacttgttttgagcgacaacctcctaagtatcaaggtggtatggttgtatagcacatgctgccttctggggattcggaagagcaggttgttggatatccggaatagcaagttacgtgatatagtgctgtcgaacggtactaacgatgcacggtataaccatttcatacaaggccactatagtctattcataaagtagtcttttgaccgttgctctaggcctgaacccgtacgtcaggaatgcttcaatttatagaaacgatactggctattagaggaacgaattaagcttcctaggctgcatcttgtaacgggggccaggagggtgtagtaaaaccgcccccttctggcccgtgttcggactcaggaccagacttggaggcaacctggaaaaacggtccgggcgcggacacgggggaggccaccatattgggcgtgtggaaaaaagaggcaaaaaagtacccaaaaaaggcgcaacggcgcgga

SEQ ID NO: 691108 - DNA, 327 bp, Homo sapiens
gcgagctcaatcaagattttgctctgggggcaagaataaaaaaaagagaggctaggtgtggtggctcatgcctgtaatcccagcactttgggaggacgaggagagtggatcacgaggtcaggagattgagaccatcctgacccatatggtgaaaccccgtctctactaaaaatacaaaaattagctgggcgtggtggtgcatgcctgtaatcccagctactcgggaggctgaggcaggagaatcgcttgaacgcaggaggcggaggttgcagtgagctgagattgcaccacttcactccagcctgggcaaaagaacgaaactctgtc

SEQ ID NO: 691109 - DNA, 442 bp, Homo sapiens
  misc_feature (219)..(219): n is a, c, g, or t
aaaaagtcctatttttttgggtccccaggtgcagcccctcccggagattgtttttcccatggcctcctgagtgatgggccctgcctccctgtgcctcatcctcaggttggttggaacaaagggtgggcaggagccccagcacagattggggggtgctcacagcagggcccccttaatgcaggttggaatgttatccctggggtggggttggaccccacntgatttttttttttcctgcccctccccaactttcattgtaatttatggaccctgcccgcctgggtgttgtgtgtatgtcctgtcccttttttcactattgtttgggtgtgggagggggtggtttttcactgaaaaggggggtacccctaaagcttttttaatgttcaatcaatcagtcattgtgtcccagacatattcaataaacccagattggtccccccca

SEQ ID NO: 691110 - DNA, 121 bp, Homo sapiens
ggtaatacacatgaattagtacacatgacctaactacacgtgactaataataccgctgatctaataatacgccatgatctaatacctgtcaaggcttcgtctccaaacaccatcacactgg

SEQ ID NO: 691111 - DNA, 280 bp, Homo sapiens
gcacgaggatcttgacctggaactcgttctcttcaacattgttcttaagctcgaactgggcaaattttcgtttttacgtacgttctcgaacatataaaaaatttcgtcaaatctttgaataataccgttttcaatgacttgtagttgattacttaaccgttccctgtagatagcttcgcttatagaggttttagatcgtagagtcacgttttcttgtaccagctggcttatttttttttccaagctattaactttaatttttaatatggagttatccttg

SEQ ID NO: 691112 - DNA, 283 bp, Homo sapiens
taattcatcctgatctatcctttcagtgatattatttcagttcacatatagtaaaggaactttgcaatggtatccttccatttctctccttccagactttgtactgtcatcatcatcatcatcatcatcatatatatatgttgtaaacgaatgttatttttatgatacattttgcttatatattacagagatttatgtaataagaaaaagtcttacttacccatgctcataaaaagagcactaaaatcacctagagcttaaggatgaactggctgtcaaaaaa

SEQ ID NO: 691113 - DNA, 249 bp, Homo sapiens
acgctcaggctatgttctcaggatgaccagagtggcgagacagcagcaccacaggtgtcatatacccgagacatcatgctctttaggcagttggagcacctatgatatgcagatcaatgacattgccctacaagcttccattacactgacgctgaagtataccaagtacctgcctcacagttcaggccggtatgcgccaaacgcttctcagagctcagtgtccattgtggcagctcctcactgacttca

SEQ ID NO: 691114 - DNA, 426 bp, Homo sapiens
gattgctcccaacaaacaggtgcttcatataatgagcactttaccttattctcaatgacttctttgcaagcatatggcaaaatacagtcctttggttttagaccccaactgtaaaatggcacaaaaataaagattccaacaaccatcttagtctaaattttcaggtaatcatatagtacatgtatccaaacgaaactgtcttaaatatattccccccaaccctaaagaattaggagggtcatcaaatacttccactggtcatgttgatgacctcaaaagaatggtcgagcacagaaccctaagtccctgcagtatgtaaaaactgcttagatgaaacatttgctatctatccactgaagccagaatggaagattatagcagtcttcctcaaaggaaatcccaccaccaccaattccccagggggca

SEQ ID NO: 691115 - DNA, 347 bp, Homo sapiens
tagattctttgcagtggtaggtgatgtactagggaggcctcgagtgagacatcaggcgcaggaaggtcaagcaggatagccacatcggcagggtcggagccctggccgccatactcgaactggaatccatcggtcatgctctcgccgaaccagacatgcctcttgtccttggggttcttgctgatgtaccagttcttctgggccacactgggctgagtggggtacacgcaggtctcaccagtctccatgttgcagaagactttgatggcatccaggttgcagccttggttggggtcaatccagtactctccactcttccagtcagagtggcacatcttgaggtcacg

SEQ ID NO: 691116 - DNA, 1017 bp, Homo sapiens
cgactcttatcttgtcggggacggtaagcgggacccggtgtctgctcctgtcgccttctgcctcctaactccctacaccactatgtcgctgagtgcatctcgcatcacacgtagggcagcgctggtgtccagattgaccttgcctgctgggagctctactgctctgtgcaacacggtcatcccgagcccgatggccacgtatgccgaatgtgaacaacgacgcatttgtgggagagcgagaatgacctgccctttcatagcacccttcttacagtgtgacgacggggcgactgggcggatacacggtgcccccggagctgtgctttgtaaacttggagcccagagtcagttgatgaagttcgcacgtggcagcctaccggtcagtatcattcgcacccgtgaggcagcatcaatcacagggcgaggaagaatgcctgtcagataactatgcccgagggtactacaccgatttgagcaaggaagatcattgacctgtgtgtatggaccggaaatctcgcaatggctggctgaaccacgtagcaaccagggtacttcagtggcatatcctatgagttctgcagagcttagagtgggcgtgaacctcggtgtcgtaggcgtttcaccgtccctgactcgtggtaagcggtcgtctcatgtgtgagttcattgggaaagaaagtacccagacgcctggaagtgctccattgtacccgagcaaccgccagtgtttacccacagctggtaggttggagaccacttataacctcacaatgctgtcaccaaactgcaactggccctgggagcagctctgatcgtgccttcatggtagagcactgaggccatctgctgtacctcctgtccggagaacctcgatatcgaaacgccaaactgaaagttaagcttgaccggcttataaagccgattgtgactccaacgggggttcccagagatttgagggagcctatgttgcttaaaagtcgacaacggggtcccacccataaacctttgggaaaagcg

SEQ ID NO: 691117 - DNA, 508 bp, Homo sapiens
agccaggggttgacaggttgttgatttgattaggttgaatgggttgtcttgctgccaaataatgctctgctatatgcttctatgcaaaggaacatctctttgtttgctctttttgttgtcttatttcagatggtcggatatgcattaaggtacacgtcatttcataatgttctgacttgacagaaatgaatatgatgatatgcagtatataaccacatagtcaatgtacagtgcagactgacgcatgcaaacttacagtaggtacgcaaaaaatgaggttggagctgatttacaactgtttctgtcgtttaacccgcataagctgaattcacacactaatgacaattctcagtttaaaaaacgcatttatttattgtctgaagtgtctttttttaagctaacttgatttgttcaggatattctgtaatattctgaccatttgtttgacattttgttgttatacttcatcatgtaacactttattgctaataaactacttttcatttga

SEQ ID NO: 691118 - DNA, 1137 bp, Homo sapiens
gtcgcgtatgcacctcgctgctccagcctctggggcgcattccaaccttccagcctgcgagctgcggagcaaacaaaaattcacttcattattcattgcaccccatcaccatcaccttgcaggcgcagccaaagaacaattcacacattttcaaccatgcagggcaacatcgtgcacatcccaggctggtcagtgtggcaaccagcatcggtgccaagttctgggaggtgatcagtgatgaacatggcatcgaccaccaccggacacctaccacggggacagcgaactgcagcgtggacacgaatctcatgtgtacatacaactgaagccacaggtggcaaatatgtaccatcgatgaccatccatggatggatcatagaacactggagaccactggaactcatgatacgactcagagatccatattagagcacagacatctaaagaacccaggacaaccattagatactgaggatcagaacatggaagacaaggataacaaactggagccaaaaggccaaatacacaagaggagcagacacagaagactgaggacgacaacaggaccctgagacatgatgcgctaccgcgcaaaggaaggaccgcagacagctgaagaaatgcacattgaccagagacaaaccagacatgaacacacatcaacaatgagacagagaagacacacaggaggactactgagaactaggggcaaatactccccttagtaccagcaaagaatccacagaaagcaataacaccatggaatcgacatcaagagaaatacacattaccaaaggaaggaagacccatctcaaaacacaaaaaggaggtcatgaaacacaccggtagcataccaaagccccagtacaaatagtcagatcccgttcaataaccgggcatccactagtacccaaggattgagagaaatcacgaaaacatctcttgaagaagtaagaaacactacaattggaccaatttagtgacaaaacaaaaaggagacccactctgaagccagtacactaggaataccctccaaaaacactggagtaagctttaagacaaatacaggaataacgataaagggaggagaaattcttaaacacgaacattttgatattatagcagatgacccgagta

SEQ ID NO: 691119 - DNA, 590 bp, Homo sapiens
cggcacgaggaatccccaggaaagaagaggcatttcataacggaaacactaacagatacgatcactccgagccgctctccaaggcgtcctcatcgttaaatcaacaccaggggttgtgagcgggcaattgtgcccctctgacacccccgctcttccgcagactcgggctccaatccccgcgcgaggagtccctcgagactagccagctcttcctcgagacttcggaagctgggaaatccctgggccagggaaccagggagctcaagccccctcccctttcctgaaaattaatgaattggccgtctgattgtttatttaatgaggtgtgtagtggcctctactggtgctagtgtgagcacaagaatgtcccactcttacaagtgggatgagcctgggggaggggagagaggcgaggggtgaacctgcctccaggtacaaagctgggaactagacccctgcgcccccgacctgccccccgcagccgccccttccccggtggcgccccctctcgcccttctcctccccaccacgcgcgatcccctttctcttcggcaaccggagccgaggcagagaagttcctgcacgtttcc

SEQ ID NO: 691120 - DNA, 324 bp, Homo sapiens
aatccccctcctatctgaatcagatataagtgacaaggcccaagacacattccccaggaggtctgagaacacgtacccaaggtggttggttacagcttgattttatacattttagggggacagaagcttcaatcagacatcaatcaatacatgtaagatgcgcattgcttcggtctgaagagttggaacaactcaaagtgcaggcttcaaggtcataagtggattcagagattttctgattggcaattggttgaaagagttaagtaattatctaaagacctagaatcaataaatagaaaggagtatctggattcagataggagg

SEQ ID NO: 691121 - DNA, 614 bp, Homo sapiens
  misc_feature (141)..(141): n is a, c, g, or t
  misc_feature (522)..(522): n is a, c, g, or t
tagaaacaggtcgggaggaagtatgaggcatggcatgactactaaggaagagcagctattctgtctggggcttctctgcttctaggaggaaagtttggaatttttggctggggagaagggagtggagaattttatccagcnaatcccaacctttacacttatcactagcctcacaggcacaagggcaggacagggcaggacaagtagcacctgtttttgccatccctgcctcctttccctacctttctggccagtctggtgtattccaagggccttcaagtaccggatactcgtgcttttatccttgggattagaggggttcttctttgtctgtcgcaagaccttggagaaggccagcttcatgtgctggtccactgtcttcaataggaagtacctggatcacaagtaaaatgcaaggcagagggaggggtgccgggaggataccatgactcatcctctgcccactggtgcttcagaggagccctgcccacattcccaagatctgggcaggcccgtacccangcgtgtccgtgcaggaaccacatcagatggatggtaggggtctggcaagggtgtttgcctcactggttacctaataacatcagacatagtgt

SEQ ID NO: 691122 - DNA, 108 bp, Homo sapiens
aatagagccagcccgacttaatcagtagggagcagaatgacaagacctattgtcaaccttgctatcaataagctcttcccacatgtaatgccaacatgatcgggaact

SEQ ID NO: 691123 - DNA, 236 bp, Homo sapiens
tataggcgctaggtccaattcggaagaaatgttacaactaaacaacaaaaagattaaaatatgggtaaaggacttagacatttctctaaagatatacaaatagtcaacaagcacatgaaaagatatttagcatccttacttattagagaaatgcaaatcaagaccacagtgaggtaccacatcatacctacaaggataactataatttttttttggagatggagtctcactctgtc

SEQ ID NO: 691124 - DNA, 611 bp, Homo sapiens
  misc_feature (467)..(467): n is a, c, g, or t
actttatagtcttctttctaacaacatctcagctctggcaatgtcagcagcactcatgctggaaggaataacctctactctgagaaaggctttcaactcgtacacgtatatcttctgtcacggttctgtaactgctgtggggtgctaggcatctccattttcaatacttcattagcaactgtttcaatgctgtccaaatcagcactatcgctgtgtcaaaatagtcctgaatagcttgattagatttctcagctccctcattgctcttgtccatttttttctttggtagcatttgtcttcaacagaatgtcttcagcactttgtttagcctcatctgccctcagttttgcttcagagaccatcttggagagctgttccacttcagccagggcactcaggacatcttggtccaagtccatggctttctgccaggcgttgtgtgcaacagctaaccagaacaccacagncaggccccccacacttcctctctccttcgtcagttctgcagtttggcccgccacattcagtctcggaacaggaggccctgggggtgtccacaggtcatttcggcagcggtgaaaggctaggtttgtagttgctgcagtcatcag

SEQ ID NO: 691125 - DNA, 612 bp, Homo sapiens
  misc_feature (449)..(449): n is a, c, g, or t
  misc_feature (469)..(469): n is a, c, g, or t
  misc_feature (509)..(509): n is a, c, g, or t
attagctcttcctgctctccctcatggcgcatgatcagtgaaaaggagaaccccatgcgggaacttcgcatccgcaaactctgtctcaacatctgtgttggggagagtggagacagactgacgcgagcagccaaggtgttggagcagctcacagggcagacccctgtgttttccaaagctagatacactgtcagatcctttggcatccggagaaatgaaaagattgctgtcccctgcacagttcgaggggccaaggcagaagaaatcttggagaagggtctaaaggtgcgggagtatgagttaagaaaaaacaacttttcagatactggaaactttggttttgggatccaggaacacatcgatttgggtatcaaatatgaccccagcattggtatttacggcctggacttttatgtggtgctgggtaggccaggtttcagcattcgcanacaaaaagcgcaggacaggntgcattggggcccaacccagaatcagcaaaaaggaggccntgcgctggttccagcaaaagtatgatggggtcatccttcctggcaaataaattcccgtttttatcccaaaaagcaataaaaagttttcagtggaaaaaaaaaa

SEQ ID NO: 691126 - DNA, 1159 bp, Homo sapiens
  misc_feature (4)..(4): n is a, c, g, or t
  misc_feature (101)..(101): n is a, c, g, or t
  misc_feature (151)..(151): n is a, c, g, or t
  misc_feature (155)..(155): n is a, c, g, or t
  misc_feature (218)..(218): n is a, c, g, or t
  misc_feature (310)..(310): n is a, c, g, or t
  misc_feature (368)..(368): n is a, c, g, or t
  misc_feature (378)..(378): n is a, c, g, or t
  misc_feature (500)..(500): n is a, c, g, or t
  misc_feature (540)..(540): n is a, c, g, or t
  misc_feature (544)..(548): n is a, c, g, or t
  misc_feature (551)..(551): n is a, c, g, or t
  misc_feature (559)..(559): n is a, c, g, or t
  misc_feature (562)..(562): n is a, c, g, or t
  misc_feature (564)..(564): n is a, c, g, or t
  misc_feature (566)..(566): n is a, c, g, or t
  misc_feature (594)..(594): n is a, c, g, or t
  misc_feature (671)..(671): n is a, c, g, or t
  misc_feature (707)..(707): n is a, c, g, or t
  misc_feature (720)..(720): n is a, c, g, or t
  misc_feature (725)..(725): n is a, c, g, or t
  misc_feature (746)..(746): n is a, c, g, or t
  misc_feature (751)..(752): n is a, c, g, or t
  misc_feature (765)..(765): n is a, c, g, or t
  misc_feature (774)..(774): n is a, c, g, or t
  misc_feature (788)..(788): n is a, c, g, or t
  misc_feature (793)..(793): n is a, c, g, or t
  misc_feature (798)..(798): n is a, c, g, or t
  misc_feature (822)..(822): n is a, c, g, or t
  misc_feature (841)..(841): n is a, c, g, or t
  misc_feature (847)..(847): n is a, c, g, or t
  misc_feature (888)..(888): n is a, c, g, or t
  misc_feature (910)..(910): n is a, c, g, or t
  misc_feature (926)..(926): n is a, c, g, or t
  misc_feature (935)..(935): n is a, c, g, or t
  misc_feature (944)..(944): n is a, c, g, or t
  misc_feature (952)..(952): n is a, c, g, or t
  misc_feature (969)..(969): n is a, c, g, or t
  misc_feature (982)..(982): n is a, c, g, or t
  misc_feature (990)..(990): n is a, c, g, or t
  misc_feature (993)..(993): n is a, c, g, or t
  misc_feature (996)..(996): n is a, c, g, or t
  misc_feature (1020)..(1020): n is a, c, g, or t
  misc_feature (1032)..(1032): n is a, c, g, or t
  misc_feature (1039)..(1039): n is a, c, g, or t
  misc_feature (1051)..(1051): n is a, c, g, or t
  misc_feature (1058)..(1058): n is a, c, g, or t
  misc_feature (1065)..(1066): n is a, c, g, or t
  misc_feature (1069)..(1069): n is a, c, g, or t
  misc_feature (1071)..(1071): n is a, c, g, or t
  misc_feature (1076)..(1076): n is a, c, g, or t
  misc_feature (1084)..(1084): n is a, c, g, or t
  misc_feature (1156)..(1156): n is a, c, g, or t
aggntagggtggccttctgccgcaactggtgactgaggaagagtgctctagggacactggccacccccctgctcctgttttcagatctctgctctgggatngggtgcaaccctgtgcttggccgcgatgtggcgagcctcagcatggagcncctngccactgttccccaaagggctcagtggctccatcttcacgaagactttgggccgagaaaaganctggaaggcctcctctacctgcaccagcgtccggtccagcgcagcacggtggctctgggctctcagtgagtttgccccagcaggcagcggtnccagcccacgcagcagcgggctctggctctgtgagctgcttggtcagtgtttccagcngcgggttctnaggcatgcgcgtttgggctgggggcatggcagggtccggctgtgctctgcttgcgggccttgtgcctcccgccgccacagtgcccctgcgctccaacaagttatgtgtgcacatgtgccctnctgctgtgtgcattgtatgtgctcctgtgtgcctgctgcnggcnnnnnctntgcacttngtncnanggccctgccagttaagccgggaatgccnttcgggggggctcttttggtgcagcccgttgcattggtgacgaattgatgtccaccccccagtgcctgtgttccttnagctttcggggaccgtgtgtgggtgttgtgctgggngactatgaaacantgggngtgtgtggggagggccagtgnccgcnngcggggaggttcncccgctggnaagtgtggcatganttctnttccnagagtgcaggggccagggttcctngatgctggggccttgaccngggganttcacctttgttgtactttgggtgagccccaaaaagctttnaggggcctgggctggccctgcncccggctgcgctcctnttctttgangcgcttttnatttttcntgaaccgcctgaggttntccttttcaaggncttaaggnttnttncttttgagaaaggccccaggaccnagggagaccccntcgattngcaacagcccgntcccgangccgcgnnggncngcgcnccagggtntttccggcaccgggaccgaagcaggggcaaaggggagcgggggtttccagggcccgggcggaattaagccantca

SEQ ID NO: 691127 - DNA, 153 bp, Homo sapiens
agcgggtcgcctgcgtcgctccgggagctgccgacggaccggagcgccccgccccgccggcgccgccgcgcgcagcccccaacacaacagaacgctccggcgagaacccacgagcaaacaggcgggacgagacacgccaaagcagcacgaacg

SEQ ID NO: 691128 - DNA, 300 bp, Homo sapiens
ttagtacacttactctgtgccagatactatgagccaaagccacctaagacaaacaaaaaaacaacatacgtgttcctatcacttcaagatcacaatccaggacaggtgcagtggctcacgcctgtaatcccagaactttgggaggccaaggcaggtggatcacttgaggccaggagtttgagaccagcctggccaacatgttgaaacctcgtctctcctaaaaatacaaaagattagccaggtgtggtggcacgtgcctgtaataccagctactcagaggctgaggcaggaaaattgctt

SEQ ID NO: 691129 - DNA, 119 bp, Homo sapiens
gtgacccgcctcacttttcgctggtctcttctgactcgccggacggctggccgacttcccacggtggactccgtgtgggtgactcttggacgcgtgcgtctgctgacgcgacgggggac

SEQ ID NO: 691130 - DNA, 340 bp, Homo sapiens
  misc_feature (119)..(119): n is a, c, g, or t
  misc_feature (199)..(199): n is a, c, g, or t
  misc_feature (230)..(230): n is a, c, g, or t
  misc_feature (234)..(235): n is a, c, g, or t
  misc_feature (237)..(237): n is a, c, g, or t
  misc_feature (239)..(239): n is a, c, g, or t
  misc_feature (244)..(245): n is a, c, g, or t
  misc_feature (249)..(249): n is a, c, g, or t
  misc_feature (265)..(265): n is a, c, g, or t
  misc_feature (278)..(278): n is a, c, g, or t
  misc_feature (284)..(286): n is a, c, g, or t
  misc_feature (301)..(301): n is a, c, g, or t
ctttctgaggaccctgaccactctgttctgttcactgcctgacaaactataggcacttggatattttgtaaataaatagtgagtaaataaattcctcaagacagagttgttttgtcctnccttaaaaattatacctttagaaagctaaaccagttattatactttaaactggcattaagttaaggccttctgctcaggnagttcaaggccattatatgttattctatatncctnngntnccccnncctngggtgaaaaaaatgancccatatggttanctaacnnnttcttaaaacttggnatgtctcaaccatattcaaagttatgtcagtttgaggca

SEQ ID NO: 691131 - DNA, 307 bp, Homo sapiens
  misc_feature (116)..(116): n is a, c, g, or t
  misc_feature (136)..(136): n is a, c, g, or t
  misc_feature (139)..(139): n is a, c, g, or t
  misc_feature (296)..(296): n is a, c, g, or t
  misc_feature (301)..(301): n is a, c, g, or t
ctagaagtgagcactctgagattctcccaagagtctaataaaacccccctccccatcttgggtggatatatgcaagccttgccagatagcagtgagctagtttcatatgactaccntgcctgccgtaggcagctcntcntcgtatacccgtgcaaattgacctgtggatgcccaaggttctgcttatggcagaaaggtccagcaaagcccagctttgtggtacccagacagtgagaagccccaagaaagaagaaactgagagccaaacttagtatttgaggggggaagaatgttanatttnaaaaag

SEQ ID NO: 691132 - DNA, 456 bp, Homo sapiens
ctgtagacaacacgcacaaatgtcacctctaaaggggagggagaagatagaggaacacgtcattaacctctgacctcaagtggctgaaagagagaatgtgatttgggtgtgccatatctttgcattcttcaatgacacttttgtgcatgtgactgatctttctggcaaggaaaccatctggcgtgtgactgtggggatgaaagtgaaggcgcgaccgagaagaatcctcaccatatgctgttatgttggctgtccaagaagtgggccacaagtgcaaggagctgggtattaccgccctatacattaaacttcgggccacaggaggtatgacccagacccctggaactggggcccaatcgggccttagagaccttgtccgctcgggtatgaagatagcgcggattgaggatgtgacccccatatcctctgtaagaactctcagggggggtgcgccgc

SEQ ID NO: 691133 - DNA, 184 bp, Homo sapiens
cgatcagaggatcccgtggtcgagtcactgtactatcttcttttctaatctgccaaatttagcttctctcttcccaaacttacccaaggtgatcaatattcaccatttttttatttcacaagcctaggtatcacacatttcctttgcccacaatcactagaattcaccggaatttccacaggat

SEQ ID NO: 691134 - DNA, 322 bp, Homo sapiens
  misc_feature (98)..(98): n is a, c, g, or t
ccctgtaaaaactgggtaaggagatgtagagacatgggccaagtgctaaatggaggaagagggtgggtggcagggcctaggaagggcagtagccaggntgcccaggagttacgaaatcacctgggccgggaatccgaaaggcgctgcctgatttcagcagcttttttttttttttttggagagggagtctggctctgtcgcccaggctggagtgcaggggcttcatctctgctcagggaaggctcggcctccggggttcacccaacacgcaattctcgggcctcagcctcttgagtagcggggagtacacccgggcgggggg

SEQ ID NO: 691135 - DNA, 641 bp, Homo sapiens
tctcttacgcccaaactccaacatcagaagcttcaactcaacacaaattgcgggcggatccggatggtaaggatgggggctgtggtgaaccaatgttcagttccacaaaggctctgtcgaacgtggagaccatgtgaacggttacttggggagagatgggtggcggagggggagggcgtcagggtgatgtaacccccaaatgaaaggggggtagaagttagcaaaacccaggaaacgtttcaaactggacgtaggttgaggccaatccaccgctgctttcaccaggatccatctggacatttccctcagcgatgatatatcccagaaaggagattgtagagcggtggaacttacacttctcggctttcacgaaagttggttctcgaggaggtgctgaaggacctgtctgacatgaagaacgtgttcttgggcagaccgggaaaaaatcaggatgtcgtcaaggtagatgaacacaaaacggttgagcatgtcccggagcacatcgtttacctggaagacggtatccgaaccaggtggtaggtctagcttggaacaaatggtgaccctctggagaggtcaaaagctgggagagagtgtatggggtaacgattcttaacataatgtattagacccggtggcat

SEQ ID NO: 691136 - DNA, 353 bp, Homo sapiens
gctgagatgctcaagagttagccaccagccacaagtgactattgaatacttgggatggggctagtgtaacaaaggtaataaatttttaattctaatttattttaattaaaaaactgaagtgttatatacttttctgttaaatataagtctattattttggtgggattacagttcacttccactgttgacaatgttctatcttacttgagatgtattataatgtacacagctgattttgaagacttaagaaaaatggatttaatatatctcactaataatttttatgttgattacaagtggaaataaaaatattttggatatgttgcagtaaataaaatgttattaaaattaaa

SEQ ID NO: 691137 - DNA, 105 bp, Homo sapiens
tagtgaaacaggcactggagataaaggtcaggacaggccacgcagaaataagaagagtgaaagttcaccaaaggatagataaacccagtgcgtcacgagaaaacc

SEQ ID NO: 691138 - DNA, 365 bp, Homo sapiens
ccctgcccatcccaggaatctggacactggcgtacttccgtgttaacataacggctttaaaatttttcccgttatgagctttaaagaagtaatttccaaatattggtctttgtggaaaaaatgagaaaagaatcaaggtttccctggtctaagactaaatgtgaaaagtaaagaaaatatagtgagtttttttttttttataaagccaagcttatttaatttggagtatcctttacacagagatgatgctgttcctatatttttgtgttcagctggctttctttaatggaatcatggcctgtgaattaaaattaaaagtattggtttctgaaaccctaaaggctgggaactactgttttaatggc

SEQ ID NO: 691139 - DNA, 445 bp, Homo sapiens
  misc_feature (147)..(147): n is a, c, g, or t
gcgtgatctagaggatcccgggatgaggaagtcactaaaatactcttagaaggatgcaagaaaaaaaatgaataagtatttttgggttcatctatttcatcatttcatttaatttcctcatttcatttcatcctttcatcatttcgntgcatcatttcatttcatcatttcatctcatcatttcatttcattctttcatttcatcatttcatctcaacatttcatttcatcatttcacttcatctcatcatttcatcatttcatctcatgatttcatttcatctcatttcatcttttcatctcatttcatcttttcatctcatttcatcttttcatctcatttcattatttcatcctttcatcatttcattgcatcatttcatctcatcatttcatttcattctttcatttcatttcatcatttcatctcaacatttcatcattt

SEQ ID NO: 691140 - DNA, 1006 bp, Homo sapiens
agcgggcgtactctcctggcccgggttccggaggcttcagtcaagaccctccctcattggccgtagaccccttgtcgcctacccactgtgctctaggatcatgtcatgagcatccctttgcgaagttcgtggcgagatagtccgaagtcgccacttgcgcaggatagctagacatttcagagcaaggcgatttcaatcagcgtctagctactcgtgcaagcttaggaggcacattcacgatcaatcaaagagcctttcgcgtccgcatgaacgtagttcaacgaagcgtactcctcgcttgagcgatcgcgtcagacgttcatgggttgctgtgagccctaggggatcgttgttgagacgaagccataggccaacagcacccatgaggcagtggcataggcagcaagttggagggtccagtaagaaagatgctctctatactgagccaggtggactggcagcagcaatgccaccctcctcgttccaaatagcgacctgcatctggcattggaggcgacgtttaacccagcgaagaaccggttagtgctccttgaaaaggcattccattgaggaggccctattgctaaccttggtggtaggaacccccggaagttaggagccccacgattagcctccttgtagatccgtcgctttgggggtggacatttgcgccatttcgacaagaattcgctctttacgaggtgtcccactgacctcgtttgaataggcgcaatccatggagggaacctgtcgcatgtccttcgttgcaccgaagtctcgtgctccagaaggacgcgcaccatacccttaattggacaggcattacgagttgtgggagtaagcgttcccgagtcgtgccaagttgggtggcaccagtgactgagaaccacccattgacgcttcttttcccttgccccccaagagggccaccggaagagaccgtgaatggtccgggggtcttggttcctcttctttcgttgaattatcgtcctggaaaagggataag

SEQ ID NO: 691141 - DNA, 528 bp, Homo sapiens
  misc_feature (25)..(25): n is a, c, g, or t
  misc_feature (53)..(53): n is a, c, g, or t
  misc_feature (94)..(94): n is a, c, g, or t
  misc_feature (278)..(278): n is a, c, g, or t
  misc_feature (288)..(288): n is a, c, g, or t
cgggggaaaactgatttatggtctnctactaatgctattggttccaattgtgnggacctccgttacgtgcgaaatctcaaattattatagtatnctacctcagagtgcgcagggattaaccgtgtcagtagatgttgttactgttgccatgtgacctgccgttggcgagtgagcccttatacagtacgagccgactccacgggatcactgtccagtcccacattagcagacgtgtgattatcagcaagctcggatgtgtgaccccgagctgatgttcnttcctcccantgaaactgcttacacgcttcctgagagatttccccgagagtccatctagatttttaactgtaatgttcaattatgaatatcaaggttttatccaaaaacaaagcatgagacaggctttggagaggagagttacgatacatttgcaccagcagagagcctcctgatgcaaaaaggtttttcccaacagttggaaaatagctgggccttagaatgaagatcacaaagaaaagcaaatgtgtt

SEQ ID NO: 691142 - DNA, 812 bp, Homo sapiens
acatcacccgggatcaaaagccgggtaaccgaaacttgttgtggaagagccctaggtggatatcaaagctgggcgcgcaccgcagaaattctccgacacgggagagaaccccgtaaaattgtccctatctgtgagaaaagttgccatgcgggagaccaacctgttaatagaatccaagagggtccacgttgaagcaaacccctcatgaatgtccgccacggtggtaaaagttccacctgggcctcgacccttgcaaacttccgaggatcccacttagaaagtaagcccttccaatagcaagtaaccaacctctctttccccattgccatctcccagcccagtcgcaaaaatagtcagctccatcaagagcaatagtgcttaagagtagacccctgtaaatctccttttttctgcattgcaagaggacagaatctggacatggctttgcacatggagaatatcttggattggactgcgcaatggctcagattcttgattctgcctcaggagaaagaatagtcgtcatgtttccactcatccttccgttggacccatcgggcacaaagtctaaattggagatccagttttagaagtgctctctggcaagcatttaatggaattagctgtagtctctgcatatgggaaggtcctcagatcagcccctcaaaatgagttctagagcaggtcttctgttccagaaggggacaagcatatagggcctgtgagctcacgtgtgttctttgtcataggggtggaatactatcttccagtgtcccttgtgtgaaatagacttagcagagtccctttctatc

SEQ ID NO: 691143 - DNA, 584 bp, Homo sapiens
  misc_feature (414)..(414): n is a, c, g, or t
attcgcggccgcgtcgaccccagccacttgcgcacgggtatggtttcagaaactgaacgaggatcgcgcccagcaccagaaggacgacagtttgcatgatgtagggcatgtgcagttcctcagaccttgatgaccagcgtcacgacagagcgctgtgggccaatcccgccatggacctctccctcgatgctgaccagcacgtcacctgcatgcaggttcggcagggcccctttgaggtaccagttgacacctgtcgtcacgactgcacctgaagcccagccaatgagcggcccgcccaacgtacctaccctcccggcaacgccacctgaggccgcagcaattcccttggcgacgttgccgcgcatagtgctgatagcatcggcctgctgccgggtcaggggattggaaatgcanactgtcagcaggcatggcaggtttcgagcctgcattcggtcgtacatatcgacgaccatgctgttgacttggtaatgggcgcgtttcgctttgccaaagtgcagcttgggcaggcgacctcggtcgctttccatgagggggaattgagacagattgaagacaaccctttc

SEQ ID NO: 691144 - DNA, 671 bp, Homo sapiens
tgaaataagcagcctgttgctcacacaaaacctgttggtggtctcttcacagcaacgcgaatgaaattggtgccatcactcggatcaggggacctcccttgggagatcaatcccctgtcctcctgctcttgctccatgagaaagatccacctacgatctctgctcctcagaccaaccagcccaaggaacatctcaccaattttaaatcggatcttctcaggcttagcggctgaagactgatgctgccagatgactttggaagccccctggaccatcacagatgcccagcttgggataactcttacagtggaggaagacaggaatatcaggtctctgagcccaagctaagccatcatatccccgtgtgacctgcatgtatgcatccagatggcctgaagtaactgaagaatcacaaaagaagtgaaaatggcgcgtgcctgccttaactgatgacattaccttgtgaaattccttctcctggctcatcctggctcaaaagctcccccactgagcacctggtgaccgccacgtcctgcctaacagagaacaatccccttgtgactgtaatttcccactagctacccaaatcctataaaacggcccacccctatctccatttcactgactctttttgggactcaggccaactgaaccaggtgaaataaacagct

SEQ ID NO: 691145 - DNA, 800 bp, Homo sapiens
ccactggtgacgtaaaacacgctatataaaaaccagacagttataggatttaagcttggtttgagtagataaaccatgtatcaaagaccaagagagttatagcgatatagtctattagtaaaacctatatcagacagatataggaaggattcttctatagtataaactatatgaaaccaaattataggatttatctttgtttagtaaaaacctgtataaacaaccgaaaaattataggatattgtcttctttttagagagagagattagaaaacgacattaggaatttcactttaaaatgcgcattacaaacttcttaggtgttccaggaattatcaagtgactttaaaatgacttttccaacctgcttagtttaacaaattatattccagttttaatcattgtaaaaaaagcacctggagttcaaaacatgtgaatactaccaagtttctgtccccaaagtcaggcatcactgctagtcttttgggacagatgggacagatgttcactttaatgttttacttgaagttttactgctctttgccatgtggtacaaagaggctgagacatatttaagaattccaagaggatattatgtgtcagaattcagacactgatgagaagtttaaatgtcttgttattggatttggaattcaggtgcactctattcaagtgcaaggatatcagaagtttttgcatcaacaaattttcgagatggagttcactctgtgcccggctggagtgcatgggagttactggaactccacctcctggtcaagcagatctctggctcaggctcca

SEQ ID NO: 691146 - DNA, 214 bp, Homo sapiens
ggtctcagctgctccacatcgctgcaatggatatgatttctttcttttttatggccgcaggtttttcgtttttgtttttgttttttgagacagagttttgccctttcggacaggctggagtgcaatggcatgatcttggctcactgaaacctccaccttctgagttcaagccattctcctgcctcagccttccaaatagctgaggaccatcgtt

SEQ ID NO: 691147 - DNA, 180 bp, Homo sapiens
  misc_feature (161)..(161): n is a, c, g, or t
tttacacagttttgggcccacacccacaacactactgcgtgcttagccattgttcgatccagccgataaaaagaaaaaggcacgcccggcgcccaatcgtccagcttcctcatcattgcccccagcacgccttgtgcgtcatatcaggcgcggcgcccggnattgcttcgcgcaccggca

SEQ ID NO: 691148 - DNA, 1034 bp, Homo sapiens
gcacaaatcgattgagaatagtggccgattcataggagaaaagacatacacatttatttgatcatagttgtacataacagaggagccttcagatgagaatccaaagatacgaagagaaacttcccatttagatgcttaggttcaaagccatggacagccatgtagaaatatgattgaacatgaagggcatgatctaatactgatggactgagtgaagaagcccaggaagacccatcgtgagatacttttggactctctgagcagtgttccttttgatctatggtgatggaataagagctctctggaatggaggtcttatgatctacaatccatgtaaggtggccttttgccccagccacagcatacaatgatggaaatagccaatgtgagttctccagaagtcttagtcctcctgggcttctccgcacgaagcctcactagaaactgtcctcttcagtagtgtcttgagtatttacatggtatcgatcttgggcaatggcatcatcattctggtctcccatacagatgtgcacctccaaaactatgtacttctttcttgccaacctctccttccgtggacatgaagcttcaccacgagcaatgtccacagctccgtgggtaaacctctgggggaaccacagaaaaaccataagctattggagggtgtgtggtccagtactataatctgcccattggctgggggcaaaccgaggtgtgtcctggcctggacaccatggtcctatgacccgcatacgctgaccatcttggacgggcactccatttacactggtcattatgcatccacaggtttgccttgggataagactcggctcctggtggggggctgacaccaagaaggtggggattccaggtacaccatggatcctaacggtgtgtgtggacaatggatcggaccaatctttgggagatgcgcctataatagaacgtgctggtggataccactcatgtgaggagatgtcctgacactggcctggggcggctcggggccaccaggatctaaagaattgccgcag

SEQ ID NO: 691149 - DNA, 144 bp, Homo sapiens
cattcgttgaaggacaccagctgcggaatttgcggctttggcagattgaaatcatggcaggcacaaaagtgatgcgcgataccagttcactggtattaaaaaatatttcagctcttatactctcacaggtagaatgaactgtgt

SEQ ID NO: 691150 - DNA, 260 bp, Homo sapiens
cgggtcctaatcacagggtcgtggggtgatttgggctggcacacgctttgtaaccaccacgggcaaagtctttctgggatcgactggcgcatctccagcaacacgccgggaagattaactttatggccggcctcaatcggcgttccggtcaactccatcaccatcaacgtggcgccattttcatcattctggatcgctcgctgccgggacactgctgggggttgggcagggagctcgccgtcaggcaccacttcctcgac

SEQ ID NO: 691151 - DNA, 912 bp, Homo sapiens
  misc_feature (8)..(8): n is a, c, g, or t
  misc_feature (52)..(52): n is a, c, g, or t
  misc_feature (119)..(119): n is a, c, g, or t
  misc_feature (189)..(189): n is a, c, g, or t
  misc_feature (195)..(195): n is a, c, g, or t
  misc_feature (217)..(217): n is a, c, g, or t
  misc_feature (224)..(224): n is a, c, g, or t
  misc_feature (232)..(232): n is a, c, g, or t
  misc_feature (239)..(239): n is a, c, g, or t
  misc_feature (243)..(243): n is a, c, g, or t
  misc_feature (246)..(246): n is a, c, g, or t
  misc_feature (251)..(251): n is a, c, g, or t
  misc_feature (253)..(253): n is a, c, g, or t
  misc_feature (258)..(258): n is a, c, g, or t
  misc_feature (271)..(271): n is a, c, g, or t
  misc_feature (284)..(284): n is a, c, g, or t
  misc_feature (299)..(299): n is a, c, g, or t
  misc_feature (301)..(302): n is a, c, g, or t
  misc_feature (307)..(307): n is a, c, g, or t
  misc_feature (322)..(322): n is a, c, g, or t
  misc_feature (338)..(338): n is a, c, g, or t
  misc_feature (340)..(340): n is a, c, g, or t
  misc_feature (343)..(343): n is a, c, g, or t
  misc_feature (348)..(349): n is a, c, g, or t
  misc_feature (351)..(351): n is a, c, g, or t
  misc_feature (372)..(372): n is a, c, g, or t
  misc_feature (385)..(385): n is a, c, g, or t
  misc_feature (388)..(388): n is a, c, g, or t
  misc_feature (397)..(397): n is a, c, g, or t
  misc_feature (406)..(406): n is a, c, g, or t
  misc_feature (408)..(409): n is a, c, g, or t
  misc_feature (443)..(443): n is a, c, g, or t
  misc_feature (446)..(446): n is a, c, g, or t
  misc_feature (466)..(466): n is a, c, g, or t
  misc_feature (475)..(475): n is a, c, g, or t
  misc_feature (490)..(491): n is a, c, g, or t
  misc_feature (497)..(497): n is a, c, g, or t
  misc_feature (511)..(511): n is a, c, g, or t
  misc_feature (515)..(515): n is a, c, g, or t
  misc_feature (538)..(539): n is a, c, g, or t
  misc_feature (546)..(546): n is a, c, g, or t
  misc_feature (738)..(738): n is a, c, g, or t
  misc_feature (803)..(803): n is a, c, g, or t
  misc_feature (909)..(909): n is a, c, g, or t
tagggagnttaattctctacttttattatgttctaatacaagtaactttagnatttactgaagttttaacaaataacctaaataaaccaaaacaatgttgagagaaaagtatacatgcnaatgagccaaaagcttaatatttttaaaaccaaatttttaaatacctcagaaactagttatatcaaaagngggagngatcttcaccttcttgccaccnacatccnagataagntatgggnctgnggnggggngnattgngtcccccaaaagntatgtgaaatccnaacacatgggacccngnnaatgngaccttatttggggngaggggctttgcgggngnggngaagnngngggcatattgggtcatggggnactctaatccagngcngggctcccnagaaaaagngnntgggcacgggtacaaacatagaagagaggggagnagnccacttgacaacaaaactgngattggggngaagccactataggnnaagggncagcgggggttgcngggnaccaccaaaagccagggagaggnnagggagnattctttcctagggcctaaggaggaagcatggcactgggacattgtgagtgtggacatttagtctctggaactgttaagagaataaatttctgttgtttaaagccacccagtttgtggtaatttgttctagcacatctaggaaactaatacagagttttttataattaataaaaattaaactcttatttggnatgattttccccccttcataattaaacagtgccctattttacataaaataatttaagtgaaaggnataatatttcatgctaataaaccacatttactcagaaaaacatgaacctttgaaaaaatacaacttaagaaataagctttgttattttaaaattgtagggcttgtnttt

SEQ ID NO: 691152 - DNA, 98 bp, Homo sapiens
ggtggatataccatagtttacagggctgcgcatgttatcagtttgtttcccatactttttttactgttataaaataaccccgtaataaaaaaaaaaaa

SEQ ID NO: 691153 - DNA, 176 bp, Homo sapiens
tagagtatccactctaccacgcatttgttgtttcggactgaggcatgattaagaggacggctgggcatacgtatgcgcgctagagtgacatcttgaccggcgcaagaggacagagcgaaagatttgcaagatgtttcattaatcacgacgaaagtcggaggtccgaagacgatcag

SEQ ID NO: 691154 - DNA, 217 bp, Homo sapiens
atatggactggctgggctacccactacggctctgagttcttcctggggcttgtgtctttccttggccagatacgcgtggcacagccgaggcaacggcggggctgaaggctgcggggccatcccggcctgccagagccatgcccctaactcctcagcttcaaaatcaggggtctcaggacagaggatgctgctactcctgatttccaccttgcaaggt

SEQ ID NO: 691155 - DNA, 141 bp, Homo sapiens
gcccccctttttccccccccctgggccccccaaacaaataccccccccctaaaaggttggtcccccccttttttttttttccccccccccctaagtttggcctttggggggctcccaaaagggtttggtttgccccaatta

SEQ ID NO: 691156 - DNA, 351 bp, Homo sapiens
tcgtgacaggggaggaattgaagtagatagaaaccgacctggattactccggtctgaactcagatcacgtaggacctttaatcgttgaacaaaccgaaccctttaatacgcgtgctgcaccacttgggactgtcctgactccaaccatcgacggtcgtaaacccctacttgattgactactggactctacgacactacggattgcgctgttactccctacgggtacacttgtttccgattggtcaacgttacttggactcaacttgacgtactagtacgttcgcttttgacctggtgacagtcttacgcgtgtacctgctcggacgcgttgggttcctgctcccgaggtcg

SEQ ID NO: 691157 - DNA, 161 bp, Homo sapiens
atttccccaggcaatttgtagaggacctttttagggtcctatatgagccatgtactcaaagcttttaaacctccttgctctcctacaatattcagtacatgacccctgtcattcctggaggcttcttgaaaggggggccagggcccttttcggccacaagg

SEQ ID NO: 691158 - DNA, 607 bp, Homo sapiens
agcggaggaccgcgaggcaagcaccgcggcgacggttccagccaggaaaatgagagcccgctcagagccggcccggagcgctctgacttgcaagcgggctgcgctgcggagcccagtgcccgagtgacacccgctggagagtgcagggccggggaacgcgagccctcggggtgcagctgcaaggcgttgggcagcgcttgcctgcgccgagcgagtctccccttcccggcgctccgccgccccgcgaccccactctaccaccctctcgcaacttgggtcgagtgacaactcccgaggcagaccgcgtggacccgatgccgacctccgcgtgcgcaccccgtcccccggggtgacgagggagccggacggcgcccggtatcccggggacagctcgggcagggcagcagactatggccaatgaagggcagtacagagtagtcgtaactcgcaggctgtcaccgagcacatgcaggcggaagcctggccggccgggcgctgagggacagggccgggcggctgccaggcaggaggcgccgaagccgggtgactgccgaggcgggcaacagcccggggccaccagagcccgagacccgggcagggagtgggc

SEQ ID NO: 691159 - DNA, 271 bp, Homo sapiens
atcgactcggatgctgggggatcctctaaatctagcacgtgctccattgcaacgattgtagggggcgagcgatgtagaacatctgtcaagggaacttgtacagggaggcatgcaccgcagtggtgaatacacgtcgaccaggctccatgtatgcgatatttggacgtcagcacggtgctcatgtatccaaggaacttgtacaggaaggtatgcacggcagtggtgaatacacgtcgagctggaggcatgcatgcatgctcgggtcctggac

SEQ ID NO: 691160 - DNA, 322 bp, Homo sapiens
cagatcggcacgagcacagggctggggattacaggcatgagccacctcgccgggccttacccttatttaaagctgtgaaggctgggaagctggtttcccagacttctggccaagttgggcctgaagcctcagaatacattttctcctggtttttcaaaggggctgggggtttaaatgatcattggtgggtttgtacccatgctactaatgtctggtttctaacaaggacatataaaatttctgggccttacactcacgttgggctttctggtgatctggcatatcagagatggtagctgtcggtagcacggcgctcgtgccg

SEQ ID NO: 691161 - DNA, 485 bp, Homo sapiens
  misc_feature (37)..(37): n is a, c, g, or t
  misc_feature (64)..(64): n is a, c, g, or t
  misc_feature (91)..(91): n is a, c, g, or t
  misc_feature (99)..(99): n is a, c, g, or t
  misc_feature (131)..(131): n is a, c, g, or t
  misc_feature (165)..(165): n is a, c, g, or t
accggcccggtggcttttccctacccaaatccttttnttccccccttcttatcctaatacattnccggcatgttaattctttgccagcatngcccaggngaccccatacacgctgcaaaactgcaaagggncttaggtggccaaactccccagtttcttgttganattttcgagtgcaatttaaagatgttaatttaaaaaactacctgtgctgtagagatcagtaaccctcagggggcagaaaaaaagactgttactgcatcaggttagaaatgtagtacttacctgggcaacatagtgaggcccatctccacaaataactaaaaagttaactggttgtggctgcacatcctgtggccccaagctatttaggaggctgaggcaggaggtttgcctgagccgaggaggttgaggttgaggttgcagtaagctgtaatcacgccactgcactccagcccaagcaacaaaacaagaccttgtcttca

SEQ ID NO: 691162 - DNA, 1519 bp, Homo sapiens
  misc_feature (1039)..(1039): n is a, c, g, or t
cgtgactggcgggtggggttgtcgagcacgttcaagccgttgctgctggctgcgagaaggagagtaggcctgtctcgctctgggtctccaggaccggcgaccgttcctggtcagtcgtcccgaggccgaacgtcattcatccctcgcaccaatgagccatggagcaatccagagaccgtggacaatccatgtgtgaggacgctgagcgacgactagactgggccgacgcctcctcccatcgtgtctccagacaggggccaaggggatcaggcatgggacgagctgtgagcgcatcccgggatagcaccggctgccaacggcacgatcaagctctcatgcctaccttcggaagatcaaacctcatgctacttgtgactgagagtcgtctaaccgtgcggccaggcaaagctgtaccttagtgagctgcatggctcggagccgttgcaactttgcctgctgctctcccgagcaggtcccctggcgacgtaccccctcgtcccctgccatacagcactccccacgcacagcctggacccgcatcgcccacggcaccctgcctgacgcttcgcgaccggcgcgctgccccggcagtgcctccgggcggtcgccctgctcccaagcccacgcacgtagccgcaaccccctggcctcattcgccctgacgagggcagacattggccacccgtccgaagaccggcacgccaacccccttcttatcgcgcggcgccgaagtatgccagtggggcccctcgccacgccactggccttccctctggccctgaaaccgcgtcgactcgttccacttcgctgaccctccacccccacgccgttgacgcccgtcctcttggggcacgcagtcctcgcctttgccctccgcgctggagaatcgcgtccgtcctggcctccgtcccctgtcccttctcgacgctatcgtgcccactgcctttcgcccgtaaccgcccgcctctctggaggtctccatgcgcggactaggctctccaccgtcggcgcctcaacaccggccccggcgccacctctncttccacgacggcgcactcgcccgctgccgacccgcgggctaccaacggcgacgacccacaccacgcaccccactctcacacgtggacgagccccttggcgcgggcttcccccgccggactcgcccctcggccgcgccccccagcgcggcgcccgcgccgcaacacggcgcaacactaccccgcccaccgtgccaccccacgcccttcgacaacgtgccctgcatccaacctccgctctgccgacgaacgtccttcggcccggcgccctggttcggaccaccttccgactgtaccctacaccttgtgcccccgagcgcaaccccttggtctcgcccgggcccctctcgctcccggccccctttcccaaatgcggctcccttctggccttggcacgcgccaacgccgtcggcccgcccttggggcgcctcgcctcactcccaccgcctctgcgcgctagaccttcgcttcgccggcgcctc

SEQ ID NO: 691163 - DNA, 352 bp, Homo sapiens
cagacatcactgtctgggtgatgctgcactgagctgtacagggggagtccgcgcaggggactcttggggctcgggaccatgctgagctttttggcaccacccacagagaacgtggggtccagggtctttctggacctttccagcacatgcagaatgacttcagtggttccattgtgcccttctggcctgtgtacctggttggctttctcagctggcccacacttccctgggctgtgccacttacccacagtggaagtgcccgggatctggactctcttccctttcacctacctgtacacctaacctggccttagactgagctttatttaagaataaaatcgtggtggtggtc

SEQ ID NO: 691164 - DNA, 346 bp, Homo sapiens
ccaagagttcccgaatttacaagtcatatactatacattacactgcagctaagagaagctatgtgctagctagccatcatagaattatttctatgcagcatttaacatagcattaacaacgcatttgaaagcgagttgaatttcttctagaaaagttgagttggctatcttgagatcctatccaaaaaactttgtatattcctaatcccagttatagataaagccttctcaaaggcttttttcaggagcaagtttaacccagttgttgaggcctatatatatagatcacagaaatagaaggattagagcacaaagaagagcagggtagttatatccttcactcgaa

SEQ ID NO: 691165 - DNA, 869 bp, Homo sapiens
gctttcctttaaccaggaggtgcacactacctgcatcctggatgtatcatccaagtgcttttctctgttgccacattttcctcaggttactcaggaaaatgctccagcatgtgcgagacacatgacctgaggttgcatcatagcaccaaaggaatcctcctgtcccctctgggaacattttctgcttcagagggagaggtcactatcgcagctgtctcacaatatccccttgaagggacagcatcagctgccaatacattcacacctttctcttccttcaggaaaatacctatacccacaatgttacctacccccgacatatatcatggccatgatttacggcttctttatcaccatgagagcttcaggttcttctgcagaatggctgcaacttacaattgcattacggcccgacggcacgctctaccatgtgtagctttgtctcctaacgataacatttcgcttagaaaaccacgagtccaaagatctgaccatcggtgaggcagggtttcctccttagacactgacagcattctctgtaccccttacaaatccttatctcctaaaggcagctgaactccgcgacagaacttgcctactgtgagtaaccatacttgggcgagacagcacacaggggcaaggaacccgggagaaacacaacataagcccaacgtgacagccgcacgagataactcggacccccccggaagtgggactggaccgcgaaccgcaggaacagacaaagaaccccaagaggtacatcgatgcacggatagccataacagcacggccaggaacgtgccgacaaggaacactcatctaccacgaccaaggcaacacaactcgcagcaccaaaacacaccaagcac

SEQ ID NO: 691166 - DNA, 944 bp, Homo sapiens
actatactttacaaaccagaaagacattggaacactatacctattattcggtgcatgacacgtggagtcctaggcacagctctaagcctcacttattcagagccgagctgtggccaggcaggcaaccttctagagtaacgagccacatctacaagcgatatcgttacagcccatagcttattgtagataatctgctatcataggtaataccgcagtacaataatctgggaggcattagagcaacgtgagctagtatccgcctaataatcggtgcccccggatatgtgtgattccccggagtaaacaagagtatagcttaccggactacttaccctcgggcctctctctcgtagtcctgctacgtcatctgcgtatagtggaggccggatctggaacaggttgaacagtctagtcctcccttcagcaggtaactactcgcgatcctggagcctctgtacagcgtaaccagcttgctccttagtgctagcaggtgtgtcttctatctgagggggcatcaatttcatcacgaaggaattatcaatgtaaagggccgctgtcgatatcccaatagccagaatgcccgatgttcgtctgatccgtctaatcacagcggtcctacatctggctatgtctcccaggactagtgctgggaacagtatactactgacagacctgcaaggcgttaaaaggtacccattcttcgagcccgacggagggggagacccccaattttataacaacaccgtgagttcatgacaatcgggcaccccggaagttaatatttctgatcctaccaggcgcgggaaaaactcccctattgtattctaatccgggaaaacaaaaaccctgggcacaaagacatggcggggccagcaaacagggggacggggagtgtgggcccatttataaggatactttgcccaatttccccccaatagttcccg

SEQ ID NO: 691167 - DNA, 191 bp, Homo sapiens; identical to SEQ ID NO: 534955

SEQ ID NO: 691168 - DNA, 228 bp, Homo sapiens
cggcatcttcagctttggtcggtcctggcaagcaattgcactggcttgttctctccactgccctttccctctctccttctcctccccctctcttctcttccctccccagcactatcccacctctgtccctccgctttgcagcagcagtgggggctgttgcagggcgcgtcccgtcaccgtacagcctggctggtggtgttgggggtttcctcctaattcttcattttt

SEQ ID NO: 691169 - DNA, 149 bp, Homo sapiens
  misc_feature (17)..(17): n is a, c, g, or t
tctagagcatcccgtangacacaggtgaggacacgtggctttatactaaagtatctatatagattcttctatatagtacagagtggggcaaaacacgcccccatctgctgccttttctattgccctgcaacgtcccatctattacgagg

SEQ ID NO: 691170 - DNA, 160 bp, Homo sapiens
tagaccttgggtttgtcccacctttggactatagtgaataatgtcatatgaacgccagcgcccaaatatctgtttaaatccctgttcaattctttaggtgttatacctagtagtagatcatatggtaatcctatgtttaactttttgagaagacaccaca

SEQ ID NO: 691171 - DNA, 134 bp, Homo sapiens
tactaatctacatgactaacatcttagttcatccaccctcctctccctatgaggctgccctcgctaacggcttattgcccaaatgggccattatcgaaaattcacaaaagacaatagcctcacacacaagctta

SEQ ID NO: 691172 - DNA, 940 bp, Homo sapiens
ctcttgtgcgtacgagggagttcttccgtgattataccgtgaggtgcctctcaatgggcccgtgtgaatcgaactgctatgggcgggtgttcccccccccagcggccgaggggcggagcgcgttttatctttggccccccccccgcccccccccccattgtacagcggcgcgccattcgtcggcgccgcagagttgtgccgccgccccccccatagccagattctctggatggatctgatgcttggggaaaatatgttaaattcaaggaacaggaagggctatcatactggctattatatgggtttcaacacagacatccaaaagaaggaagggctcacattccttaaattaaggagaaatactgcatagaccggccctaatgaccccctaagaccgatcagaccgatctggaatgtgaagcgttatagaagataactgccctcatttcttccgaaatatccagtgttgggaaagaaaaaaggaagtggaatgggtaactcttcttgattaaaagttatgtaatacccaaggccaatgtgaaatattttactggacctcgtattttgaaaaccccatctgtaaaagactggggtgggggtgggagccccacccccggtggtgagcccagttgagaaaatttgaatgtggattagattttgaatgatattggataattattggtaattttatgagctgtgagaagggtgttgtagtttataaaagacttgtctttaatttgccataccttaaggcctttaggaatgaagtgttagagtgtcttaaaatgtttccaatggtttaaccaaatgtatgtgaggcgtatgtggccaaatgttacagaatctaactggtggacctggctgttccttgtactgtttttttctatcttctatatgtttaaaagtatataataaaaatatttaatttttttttaaatta

SEQ ID NO: 691173 - DNA, 278 bp, Homo sapiens
  misc_feature (22)..(22): n is a, c, g, or t
  misc_feature (71)..(71): n is a, c, g, or t
agaggatccccaagcagttaancatgactcagcgatgttggggttgggactgaggagacagtgcgggaggnaaagaaggaagatttgggatgagtcggagtgggaacaggagactagggagggactcactgtgtaaaacaaacgcctggacgtcagggaactacaaaccatttgccccttttacgacaaggattatttagatcttgcaggatggaaaaattgaaagtgctgttttccggctatttggaactactgttgagtctttttaaactgcttag

SEQ ID NO: 691174 - DNA, 292 bp, Homo sapiens
taccccacggactatggggaaattatcccgacgcttaacgtttcattagttactggtttcccagagctgtgatcggtcaataaagatattccgccaaagaccagattcgggtcgctcccatcattgcgcaacgattgagtgcacatggatcacccaagtatctttgatgtgctattcagctgactcattcaggtgagtgtgtctcaatgaaatcactactacaatgggggtcattgttgtcagtggccaatcggtgcaattcagtggtgatgtgattcacatttgtttccaa

SEQ ID NO: 691175 - DNA, 334 bp, Homo sapiens
ccaaaacgtttccctgcgccgcgggctcttactatcccggaatgagtgcgttcaagtaaaaggtctcgttcaaattcagcgactgctgaaattacttgcatcatcatttttcctgttggactggtcaggtcaatgcccccccaatgctaatcaatgcactctgatacctgtttcggtcagttgttccactgttttcctgatatccattgcattacaaccaaggcgatccagttttgtcacaatcaattgatcaccacatttcaggcgagcaagcaaccggttaaaaccaggacgctcactggttgctgctgagccgctaatgtgttcttcgatt

SEQ ID NO: 691176 - DNA, 762 bp, Homo sapiens
gttatgagtaagttgttgatttctaccaaaaagaagcttattggatcttgtttaggattacattagattcatcaattgctttggggaaaatttacattttatgaaattatcccttccaattcatgaaaattgtacaaatccctctttatttaggtatactttaatttctctggaatattttgttttgtctgcaaagctcttgaacatttttgttcaatctaaccctgtaggtttagtatttttgatcatattcaaaataaaactttataaaatttatttttccaattgtttggtgcaggaatatagaaatgaaatagatttttatatattaacccttatcctgagacctgactaaatgcacttcctggttttagtagttttatttcctttgagtttacttgaaaatttttatgtgaataatcatgtcatatgtaaataaagataattttgtttctttgtgttcaagctctgtactttttacatatttttcttcttcttttatgcaatgactaactaggaacttcaaccatgttttctggaaggagtgagtaccgacaatgcttgccctgctcatagatggatagcgtttgatccttcaccattaagagtgatataagtgtaatgtttcttgtaggtttttcatagttgtcctttatgatattgaggaactttccttatatttcaggttttctgatagtttttgatagaattggtactgaatttctaaaatgctttttgtgtgtggtgatcctgttgtcttga

SEQ ID NO: 691177 - DNA, 300 bp, Homo sapiens
gaagggtctcaggttgtggaagcccaagttgagaacaataatgaacaattactgtatgaacaattgttagagacagctaatcacaaacaacctgcgggcacaatgacctcattccacacgtagcacccttcagcaggaccctataaaactttcctccagcccctgcctctttgcaggtagccccttctctgctgagctgcccactgcaacatattttcacaatttctctaataaatctgcccttctttacctacaactatcttggtaaatggctttaccacctgcaaaactgaccctagg

SEQ ID NO: 691178 - DNA, 280 bp, Homo sapiens
ctgcttcggacacaccgtcctcctatgcacccatccacgacgtgcagacagatgcaaagggtactagctgccgttagtcgaatataggattataggtaaagcatagagttgccagagtaccccgcattcccctgcatagcgcctccaaggacagggcggctggggtgtcctttgttgtggttggaggttggtgatcattgctctggataagaggctcccggctgacaccacatgcagctttgcctcacctttctccagcagccgggaccctctggagagc

SEQ ID NO: 691179 - DNA, 908 bp, Homo sapiens
cccgcgcttggcgcataggccggttctaatttacaagaacaccgtggctgaggccggagagtcccttcaacccgggaggcggcggctgcagtgtagccgagacggcgccattgccctccagcctgggcaaaaagagcgaaactcctgtctcaaaaaaaaaaaaactatggccgaaaccaggaagctgcgcgatggctgccacgggcccctctttctcccggccttgtgtccgggaaggtttcccttcctgaagggcagccccggctcacgcaagcggaggagatggcgcgtggacgtgcctggggccggagctcagaggccctgtgggccgcatcatgcatctcccgccaatcgcaagggctggcgcttgacctgaggcctccccgcaaaggtcccccgaggcggcggaggcggcgggctgtgagaaaccgcagaaaaacgctgggcgcgcagggaaccgtccacccccgcgaggagagactttccacagaggcagcgtattccacagcccaagagccacgttcctagggtgatgcaagccccagaaagttcctggcggggcaagctcacggcttgtaagagtgaactctacggtccagaccgggctgcacgaagggcagcgagggcactgcagagcctgcctgccccggacgcggtcaaatctgatacaaggttcgcccagacccaagtctagccctctgggggaaatctccaacattatgtccaagccccgaaaccagacggtgcgtcataccactccccattgagacaatcacatgtgcctagcgcctttacagagaacacatgcttaacagactagggcaaaactggttaggatactgctcctgacggacaaggtggaaaatttggaattcagggatagactgcggcacaacgctcttacgcct

SEQ ID NO: 691180 - DNA, 279 bp, Homo sapiens
  misc_feature (95)..(95): n is a, c, g, or t
  misc_feature (239)..(239): n is a, c, g, or t
ctagaggatagctaaaggcgagtcgggtaggaggaggcaagtacgaaaaggcagagccaacaggtacaaatcagttgggcctctccccaggcggnaccggaggtgggcacggctgcccatcaaaacaacagaacagaaaaaagcccccaggaccctgaggaccccgttccagtacaaccaggacccacagatggagggagctgtcagaagctgggaggacagagttggcagtgacgggncctcagaagttccaggcaggcagagaagcgaaggtttcaa

SEQ ID NO: 691181 - DNA, 581 bp, Homo sapiens
  misc_feature (88)..(89): n is a, c, g, or t
  misc_feature (93)..(93): n is a, c, g, or t
  misc_feature (368)..(368): n is a, c, g, or t
  misc_feature (567)..(567): n is a, c, g, or t
  misc_feature (574)..(574): n is a, c, g, or t
cctctcctccttggccagaaaccttcagaaggaaacagaaggatgagaaagcctcccttgccaggcccatctcacctcccacaccacnnagtnacacattcataaacagccaagcctgctcacaggcctgggcatatgtggctggggagagactgttgccctatgagatggtggaagacagaaaactcttgaatgaaacatctgtaacaagactcccactccctaatcctggagaccccttcaaaaggagaggactctgctcagcgctgggtcagaaaggaagtgcttgccaaccccagtaatgcgctgtcctggagtaagaggactgagatgccagcgtggggcccgtcaggagtcacgtctcaagngaggggtgacccagatttttgcaaagctgtggaagagacctctaattccatgacctaaagtttcacacaacctttatgcaaatccttcgccatttgtctatcctggccccagcaggatgaccctcacatttaaaaggatcaaaatctcaaacattgtgggaggaaaacgccaggcctgctggggagagggagaaggcangactcangtggtgt

SEQ ID NO: 691182 - DNA, 124 bp, Homo sapiens
acatttttgcagccatgtcgaatctagaccatgccaccagccagatgaaagccttccatggttcggctgggcaaggtggctcatgcctataatcccagtcactttagtgtaggctgagggcggg

SEQ ID NO: 691183 - DNA, 423 bp, Homo sapiens
cagctcggtaccgtgccccctgtggaatgcagtgtgtgatggtgaacaccagatgaaatggtggttattttctttcgacaaggacgagtagtgcttgaatgctttcatatatttcggttgtcattatgtgtcactaagttactggtgcgcatattttaaaatgaagttgttacacttattaagcactacagtgtgccttatacatgtatatgtactgaaatatgacttcagtgactttttggacagaacacaaacttctttcattagaaatttttaaaaaatgacttgggcatttgttgcaggagaaggacttgataatctgtggaatttaaatgttattcatgcttcttattttaaaagtgcttcaaatccttcaataaggttctgaaagcttgtccgattggatggttggtattcccagca

SEQ ID NO: 691184 - DNA, 594 bp, Homo sapiens
cctgaggtcatgcattgtaatcatcatagaaggagagccagcctgcctcaaggtcttcaacataaggtgaaaacaagaagaacccgtcttggaacaatctcaaacaagttggggtgtagcaaaccttttcaacccctttgctggttgctggggctcattctaagaacttgttcttagagcagaatctagcacatcatgggagtgggaccaagcgtgggtcgaaggaagggccagagctggtagagactagggaagggaggtctcctctagactgactcacattgccttgagcttttcagttaagttgctgtaagcacctgggctgaggaggcagtttttgttccttcctgcgttatagcggggccttgtctcttcctctgcaggacacagatctggaggacgtggactggggtaggaaacaccctgaggtgttagtacctagtggtgaaatggatgaggtcatttctaaggtgtgttgcccgtggatctgggcacaatcattggaattccttggagccactgggattcatggctttgtatccaactgcatccaggcctgaggctgctgacgtttgacaccagggccagtagaga

SEQ ID NO: 691185 - DNA, 958 bp, Homo sapiens
caggcgtccggtctgccacctggttctggctgtgatccatgatgtgcacgattgctctggattgaggcgctggctgtgttggtcactaacttctgcaccagtactcctgccagttagggcgagaagttcgaggctgaggtaagggggaaatgaaggaagttctgcccaaggaggtggccgagactattgtgggggagaaaggtggatgaggaggggctgagagaagctgatgggcgaaccatgtgatgagaacaggggacctagcaggtgtattttcgatggagtatgctgttatccatggtacatccattcacatagtcattgtgcaaatgacattcttccaggggatgcctcgagaccagaaacttgagacagaattcttgaggactccttgtcgatggatcgtcattggggcacagggattgaagggtattggcttttgagtagtagtaattcaagtacatgtttgaatttgttcatgtagcataaataaaaaaaaaacaaaaaaacaaaacacacaaaaacacaaaaaaaaacagaaaaaaacgagacatgggaagacgaacaaagacagaagaaaaaaaagacagcacacacagaagagcagaagaagaacgacaggaggacgcgagcatgagcgagggggacacacggaatcaggcatcgacaataagcacaggcagaggggcgcgcccacacaaaaaagacgacgaaaataacgacacacgacagaaacgcaacaagacagaacaaaatcaaagcacaaggacccgacaagcgacaagacgaggacacaagcgaggagaaacacacgaagcagcgacgcacaaccaatccgcgcgcaacaaccaaaggagcaacacagaaaggacaacaaaacggagacgacagaaagcaaaaaagaaagaggagaagaaggaaacacacgcaaaacaggggaaaggaaggaataaacaaa

SEQ ID NO: 691186 - DNA, 882 bp, Homo sapiens
  misc_feature (162)..(163): n is a, c, g, or t
  misc_feature (173)..(173): n is a, c, g, or t
  misc_feature (186)..(187): n is a, c, g, or t
  misc_feature (199)..(199): n is a, c, g, or t
  misc_feature (204)..(204): n is a, c, g, or t
  misc_feature (210)..(210): n is a, c, g, or t
  misc_feature (214)..(214): n is a, c, g, or t
  misc_feature (221)..(221): n is a, c, g, or t
  misc_feature (224)..(224): n is a, c, g, or t
  misc_feature (230)..(230): n is a, c, g, or t
  misc_feature (232)..(232): n is a, c, g, or t
  misc_feature (238)..(238): n is a, c, g, or t
  misc_feature (244)..(244): n is a, c, g, or t
  misc_feature (251)..(251): n is a, c, g, or t
  misc_feature (255)..(255): n is a, c, g, or t
  misc_feature (269)..(269): n is a, c, g, or t
  misc_feature (276)..(276): n is a, c, g, or t
  misc_feature (279)..(279): n is a, c, g, or t
agagatgcgagaaggaggtcccccacggcccttcaggatgaaagctgcggtgctgaccttggccgtgctcttcctgacggggagccaggctcggcatttctggcagcaagatgaacccccccagagcccctgggatcgagtgaaggacctggcttttttttnntttttttttntcaaagcacggcnnagactatgtgtnccagnttgaangtcngccttgnganaacagntnacctanagctcnttgacanctgngacagcgtgacctncaccttnagnaactgcgcgaacagctcggccctgtgaccccagaagttctgggataaccctgaaaaaggagacagagggcctgaggcaggagatgagcaaggatctggaggaagttgaaggccaagttgcagccctaccctggacgacttccagaagaagtggcaggaggagatggagctctaccgccagaaggtggaagcctgcgcgcagagctccaagaggcgcgcgccagaagctgcacgagctgcaagagaagctgacccactgggcgaggaggatcgcgacccgcgcgcccatgtggaccgtcgcacgcatctggccccctacagcgacgagctggcccagcttggccgcgcccttgaggctctcaaggagaacgcggcgccagactggccgagtaccacccaaggccaccgagcattctgagcacgctcagcgagaagccaagcccgcgctcgaggacctccccaaagcctgctgcccgtgctggagagcttcaaggtcagcttcctgagcgctctcgaggagtacactaagaagctcaacacccagtgagggcccgccgccgccccccttcccggtgctcagaataaacgtttccaaagtggaaaa

SEQ ID NO: 691187 - DNA, 1487 bp, Homo sapiens
  misc_feature (135)..(135): n is a, c, g, or t
  misc_feature (161)..(161): n is a, c, g, or t
  misc_feature (168)..(168): n is a, c, g, or t
  misc_feature (172)..(172): n is a, c, g, or t
  misc_feature (181)..(181): n is a, c, g, or t
  misc_feature (198)..(198): n is a, c, g, or t
  misc_feature (207)..(207): n is a, c, g, or t
  misc_feature (215)..(215): n is a, c, g, or t
  misc_feature (226)..(226): n is a, c, g, or t
  misc_feature (239)..(239): n is a, c, g, or t
  misc_feature (248)..(248): n is a, c, g, or t
  misc_feature (275)..(275): n is a, c, g, or t
  misc_feature (326)..(326): n is a, c, g, or t
  misc_feature (368)..(368): n is a, c, g, or t
  misc_feature (1327)..(1327): n is a, c, g, or t
ttgaggccttaatgatttaggaccccgggggccccccttgtaatgggtacaaaacgaaagttgtttccggacctcagtttacttggccaaggaccctcagttttaaacctccaacgagtattacgtccttccacnctgcttccaattccgacaccaagacnactctgnattntgagtatangagtcaagtatggcaanaagtacagnaccttaanaacttttattntagtccttcctgncccatgctnaaagcttatatctagacatacggcaanacaaaatgaaacagatctctccttgtacatatataacagctacaaatttgncctctttattgatcttatgtcatgtatttggcttgaaaaaanaacaatcaacaaaacaaacagttacaagggttaaacaaactaaatttttcttctaaatctctaaatgctcatagacagccaacttgcagggcatacacagtgccttgagagtcggtcccacagaaaatacttatgtaaaatgaaacaagaaggatgctatttgtttttcattacataaacattacctgaacttaactaatcaatccacttatttgataaaaatcatctaggaccaaaagcactatcaagtttgctggctgccattttcactctaatcatacccaaaaggcttagaaataattcaaaactagaaagaggcccaagtagtaaggctacctatggctcttgctacaaaacagttgccagtctgaatgtgtgtgtgtctagaaagaatgatagaaaataaagagttcttgagttcaagagaacttcccagaaggaggtggtggccaagaaatccacctgcctgcttggtggcggctcgtgaaggggcaaggccgagaatcttctgaatgttctgtcgaatcgacatagtacagagaatatacaggaaaatgaaggaacagtctgtggtgtcatctcccagcagatttcgatgagacagtccttggatgtaagaaagaaggggtaaaaggaagctttgccaccactctaccatcaaatatggaattgaacattcccattagggcagtaaaacaaaagccaatagcaaacatggattttcattcgaaccattgatagatctctgttgttattcttcagtttctcttcttggtctctctaatttctctgtttctgttgtcgaaccagctgactctgttattgtttccttcttcgttgttccagagtgttgttactctggtttttccacttctgccttcagtctcttgtacttgtctgtcctgtaaaccaggacccaggttatgccctctgcgagcagagccgtgcacacagagatnaaaacgatgaggagagtgtccgcgaacatagtgctcatctcgcaccttcgtctctgcactctcacccgccagggggaaagcgctctacagccaggaaaagtgaagcgaaaacggcttccgtagactccgccaccaccgagtaacagaccaactccccgct

SEQ ID NO: 691188 - DNA, 529 bp, Homo sapiens
  misc_feature (201)..(201): n is a, c, g, or t
  misc_feature (222)..(222): n is a, c, g, or t
agagatgcgagaaggaggtcccccacggcccttcaggatgaaagctgcggtgctgaccttggccgtgctcttcctgacggggagccaggctcggcatttctggcagcaagatgaacccccccagagcccctgggatcgagtgaaggaagctgcacgagctgcaagagaagctgacccactgggcgaggagatgcgcgaccngcgcgccccaatgtggacgcntcgcacgcatctggccccctacagcgacgagctggcccagcttggccgcgcccttgaggctctcaaggagaacgcggcgccagactggccgagtaccacccaaggccaccgagcattctgagcacgctcagcgagaagccaagcccgcgctcgaggacctccccaaagcctgctgcccgtgctggagagcttcaaggtcagcttcctgagcgctctcgaggagtacactaagaagctcaacacccagtgagggcccgccgccgccccccttcccggtgctcagaataaacgtttccaaagtggaaaa

SEQ ID NO: 691189 - DNA, 377 bp, Homo sapiens
  misc_feature (182)..(182): n is a, c, g, or t
  misc_feature (233)..(233): n is a, c, g, or t
  misc_feature (253)..(253): n is a, c, g, or t
  misc_feature (315)..(315): n is a, c, g, or t
  misc_feature (360)..(360): n is a, c, g, or t
gacagagtctcactctgtctcccaggctggagttgcagtggtgcaatgactgcagcacctcctgggcttacagcatcctgcctcagcctcctatatagcagagaacagaggtgcacaccaccagatctggcttattttttgattttttgcagagatgaggtctcactttgttgcccaggctngtctcaaactcctgggctcaagcaatcctcccaccttggcttcccaaagtnctgggattacaggcatgagncactgtgctcagccttcatgttcacttttttaaaatgtatgtatttttttataggagatgtngggtcttcactgtgttcgccagggttgtcttcggaacttctgggnctcaaaggcgataattc

SEQ ID NO: 691190 - DNA, 455 bp, Homo sapiens
gcacgagatgaagcagagagtgagccttctgaatttgctggtgtcttgatcctggacttcccagccaccagaactataagaaatacatttctatcatttataaattacctatgctaaggtattttgttatagcagactaagacaaaaattagtgccaagaactggggtgtggccataacaaacacctaaaactgtagaagtggctttggaactggataatgggcagaggctggaagagttcagaggaacaggctggaaaaagcctcttgagatgaatggaccattaagggtgattctggtgaggaatcagaaaaggagagctatagagaaagcctcacttttcttagagattacctccgtggtcatgaacagaatgttggcacaaatatggatggtaaaggccattataatgaggtatcagataggagtgagggacatgttattggaaactggag

SEQ ID NO: 691191 - DNA, 1034 bp, Homo sapiens
  misc_feature (170)..(170): n is a, c, g, or t
ttgcagacaccataaaaactattgttagggtccttcctggcacacatgctataatcttattgctggacttacggccagacaaacacactcagccgtttcctagtccatataccagcttgaaatgggaggctggttgttgatcttatgtcatgtatttggcttgaaaaaanaacaatcaacaaaacaaacagttacaagggttaaacaaactaaatttttcttctaaatctctaaatgctcatagacagccaacttgcagggcatacacagtgccttgagagtcggtcccacagaaaatacttatgtaaaatgaaacaagaaggatgctatttgtttttcattacataaacattacctgaacttaactaatcaatccacttatttgataaaaatcatctaggaccaaaagcactatcaagtttgctggctgccattttcactctaatcatacccaaaaggcttagaaataattcaaaactagaaagaggcccaagagagggcctgaggcaggagatgagcaaggatctggaggaagttgaaggccaagttgcagccctaccctggacgacttccagaagaagtggcaggaggagatggagctctaccgccagaaggtggaagcctgcgcgcagagctccaagaggcgcgcgccagaagctgcacgagctgcaagagaagctgacccactgggcgaggaggatcgcgacccgcgcgcccatgtggaccgtcgcacgcatctggccccctacagcgacgagctggcccagcttggccgcgcccttgaggctctcaaggagaacgcggcgccagactggccgagtaccacccaaggccaccgagcattctgagcacgctcagcgagaagccaagcccgcgctcgaggacctccccaaagcctgctgcccgtgctggagagcttcaaggtcagcttcctgagcgctctcgaggagtacactaagaagctcaacacccagtgagggcccgccgccgccccccttcccggtgctcagaataaacgtttccaaagtggaaaa

SEQ ID NO: 691192 - DNA, 740 bp, Homo sapiens
agcggagctgccacatttgcaaggagtagagatggtctccagctcagctgagatcccccagtcttaggttaaggctgcagcccagcctcatggagtagaagagagagcagaggaagccagagagcccctcaggccagtgggaggaggaggagaaagatgggcaaggggctgggcctgccccaggagggcctcagtggggagaaggtggaagaggagagaaccttgagttctccagtactagagcttttattctgcagtgagagagttgatagtatagcagttacagccagtcttctcctttgacaggcagggaaactgaggccaggagaggtagggcccagcaagttggcacctgggcctgatctgcctttcagctccatctagccagaaaccagcactctccttctcccactggcccgggtcgaccccagggctcatcccggagccttctcccactctgtcgccggtcgtctcgatgattttcatctcatcgccacggaggcgttcccaggttggcggaggggtccagtctgccgactgccggttgaccgtccgtttgctgtggtggcttgcccggaccctcggagtgcgtgcgtgtgtgcattggtactgtttgcacatgtgtgcgtgtgcgtgtatgcgtgcgtgtgccaggcacaggactgcggtgcacgactggcttttcttcctcccgcaggagctgaccgagaagcccggccactgtgtgcccggcccggggg

SEQ ID NO: 691193 - DNA, 990 bp, Homo sapiens
ggttgcagagaagttcgccattgccaccaaggaaggtgatttgccccaggtggagcgcttcttcaagatcttcccactgctgggttgcatgaggagggattaagaaagttctcggagtacctttgcaagcaggtggccagctaaagctgaggagaatctgctcatggctgctggggacatgacatgagtgatcggatggagcgtgccagtcatcgtttgcagatacgacttacgtcttcgtgtttgaatgggattgcccgcattgtggagacccaccagccaatagtggagacctattatgggccaggagactctataacctgatcaaatatctgcaggtggaatgtgacagacaggtggagaaggtggtagacaagttcattcattgcaaagggagtacaactagtaggttgcggcatgtgcatgaacaaactgatgagaaattctacatagcagtaaacaaaatcggaaaccaagagaatctggatgcgccatcctgaacgtgaggtcatcctgatgaatgcgccgccatggtgagctatacttacgcttcctcgaagaagaggatgagctctgatttgaggtgggagactccatggcctcagaggaagtagaggaagagcgccagaagtgtctggacatactcctcaataaatgcctgtgagctgtaccatgcaagaactaatcgggtatatgtttaccaaggaggagtcacttcatgaggtagactgtccaataagctgtgtttctggagcactgtgggtacggccggttgactcccagctggggatgcggcgtccgtgctcgaagtgctggggggaccgccgagcacagatgaagctcttgcgcctaacacccgccccacggcgggtgctccggatccgcaaggccggggcacacgacacctccgacacagccgggaaaccgacactaccgccagaattcacgtgatatcagagagactcactcacgaggaaacacaagaggccg

SEQ ID NO: 691194 - DNA, 853 bp, Homo sapiens
  misc_feature (162)..(163): n is a, c, g, or t
  misc_feature (173)..(173): n is a, c, g, or t
  misc_feature (186)..(187): n is a, c, g, or t
  misc_feature (199)..(199): n is a, c, g, or t
  misc_feature (204)..(204): n is a, c, g, or t
  misc_feature (210)..(210): n is a, c, g, or t
  misc_feature (214)..(214): n is a, c, g, or t
  misc_feature (221)..(221): n is a, c, g, or t
  misc_feature (224)..(224): n is a, c, g, or t
  misc_feature (230)..(230): n is a, c, g, or t
  misc_feature (232)..(232): n is a, c, g, or t
  misc_feature (238)..(238): n is a, c, g, or t
  misc_feature (244)..(244): n is a, c, g, or t
  misc_feature (251)..(251): n is a, c, g, or t
  misc_feature (255)..(255): n is a, c, g, or t
  misc_feature (269)..(269): n is a, c, g, or t
  misc_feature (276)..(276): n is a, c, g, or t
  misc_feature (279)..(279): n is a, c, g, or t
agagatgcgagaaggaggtcccccacggcccttcaggatgaaagctgcggtgctgaccttggccgtgctcttcctgacggggagccaggctcggcatttctggcagcaagatgaacccccccagagcccctgggatcgagtgaaggacctggcttttttttnntttttttttntcaaagcacggcnnagactatgtgtnccagnttgaangtcngccttgnganaacagntnacctanagctcnttgacanctgngacagcgtgacctncaccttnagnaactgcgcgaacagctcggccctgtgaccccagaagttctgggataaccctgaaaaaggagacagagggcctgaggcaggagatgagcaaggatctggaggaagttgaaggccaagttgcagccctaccctggacgacttccagaagaagtggcaggaggagatggagctctaccgccagaaggtggaagcctgcgcgcagagctccaagaggcgcgcgccagaagctgcacgagctgcaagagaagctgacccactgggcgaggagtcgcacgcatctggccccctacagcgacgagctggcccagcttggccgcgcccttgaggctctcaaggagaacgcggcgccagactggccgagtaccacccaaggccaccgagcattctgagcacgctcagcgagaagccaagcccgcgctcgaggacctccccaaagcctgctgcccgtgctggagagcttcaaggtcagcttcctgagcgctctcgaggagtacactaagaagctcaacacccagtgagggcccgccgccgccccccttcccggtgctcagaataaacgtttccaaagtggaaaa

SEQ ID NO: 691195 - DNA, 130 bp, Homo sapiens
aattatgggaagagggatactggccttcggcctcctatgatgcagacattgtgaatttaattcaaggaggaggagaatgtttataggcaggtggttatatgtgggaagataatttatattcatgagatcc

SEQ ID NO: 691196 - DNA, 1043 bp, Homo sapiens
  misc_feature (170)..(170): n is a, c, g, or t
ttgcagacaccataaaaactattgttagggtccttcctggcacacatgctataatcttattgctggacttacggccagacaaacacactcagccgtttcctagtccatataccagcttgaaatgggaggctggttgttgatcttatgtcatgtatttggcttgaaaaaanaacaatcaacaaaacaaacagttacaagggttaaacaaactaaatttttcttctaaatctctaaatgctcatagacagccaacttgcagggcatacacagtgccttgagagtcggtcccacagaaaatacttatgtaaaatgaaacaagaaggatgctatttgtttttcattacataaacattacctgaacttaactaatcaatccacttatttgataaaaatcatctaggaccaaaagcactatcaagtttgctggctgccattttcactctaatcatacccaaaaggcttagaaataattcaaaactagaaagaggcccaagagagggcctgaggcaggagatgagcaaggatctggaggaagttgaaggccaagttgcagccctaccctggacgacttccagaagaagtggcaggaggagatggagctctaccgccagaaggtggaagcctgcgcgcagagctccaagaggcgcgcgccagaagctgcacgagctgcaagagaagctgacccactgggcgaggagatgcgcgaccgcgcagcagcagcccaatgtggacgcgctcgcacgcatctggccccctacagcgacgagctggcccagcttggccgcgcccttgaggctctcaaggagaacgcggcgccagactggccgagtaccacccaaggccaccgagcattctgagcacgctcagcgagaagccaagcccgcgctcgaggacctccccaaagcctgctgcccgtgctggagagcttcaaggtcagcttcctgagcgctctcgaggagtacactaagaagctcaacacccagtgagggcccgccgccgccccccttcccggtgctcagaataaacgtttccaaagtggaaaa

SEQ ID NO: 691197 - DNA, 846 bp, Homo sapiens
  misc_feature (162)..(163): n is a, c, g, or t
  misc_feature (173)..(173): n is a, c, g, or t
  misc_feature (186)..(187): n is a, c, g, or t
  misc_feature (199)..(199): n is a, c, g, or t
  misc_feature (204)..(204): n is a, c, g, or t
  misc_feature (210)..(210): n is a, c, g, or t
  misc_feature (214)..(214): n is a, c, g, or t
  misc_feature (221)..(221): n is a, c, g, or t
  misc_feature (224)..(224): n is a, c, g, or t
  misc_feature (230)..(230): n is a, c, g, or t
  misc_feature (232)..(232): n is a, c, g, or t
  misc_feature (238)..(238): n is a, c, g, or t
  misc_feature (244)..(244): n is a, c, g, or t
  misc_feature (251)..(251): n is a, c, g, or t
  misc_feature (255)..(255): n is a, c, g, or t
  misc_feature (269)..(269): n is a, c, g, or t
  misc_feature (276)..(276): n is a, c, g, or t
  misc_feature (279)..(279): n is a, c, g, or t
agagatgcgagaaggaggtcccccacggcccttcaggatgaaagctgcggtgctgaccttggccgtgctcttcctgacggggagccaggctcggcatttctggcagcaagatgaacccccccagagcccctgggatcgagtgaaggacctggcttttttttnntttttttttntcaaagcacggcnnagactatgtgtnccagnttgaangtcngccttgnganaacagntnacctanagctcnttgacanctgngacagcgtgacctncaccttnagnaactgcgcgaacagctcggccctgtgaccccagaagttctgggataaccctgaaaaaggagacgaaggccaagttgcagccctaccctggacgacttccagaagaagtggcaggaggagatggagctctaccgccagaaggtggaagcctgcgcgcagagctccaagaggcgcgcgccagaagctgcacgagctgcaagagaagctgacccactgggcgaggagatacgcgagcgcgcgcgcgcccatgtggacacgctgtcgcacgcatctggccccctacagcgacgagctggcccagcttggccgcgcccttgaggctctcaaggagaacgcggcgccagactggccgagtaccacccaaggccaccgagcattctgagcacgctcagcgagaagccaagcccgcgctcgaggacctccccaaagcctgctgcccgtgctggagagcttcaaggtcagcttcctgagcgctctcgaggagtacactaagaagctcaacacccagtgagggcccgccgccgccccccttcccggtgctcagaataaacgtttccaaagtggaaaa

SEQ ID NO: 691198 - DNA, 862 bp, Homo sapiens
tggctgtaacagtgtttatggatgataattccaggctcttgttgaaccctgtgggggggaggggcacaaagcgaaatggggcgtataagggaagtgctggaaaggcgtgcctccgatgaaagtgctcggctcgaagcttccagaacataggcaagggcagggttgaggccttcgggcacacgagccggcgcccagttccaccgcggcccaaagtggagggcggccggcgccctgtgctacgaggcctttttgtccaaagtggtggctctccaacactctccacgcccacaatctcgttcacgtggagaactctcagaggggccgtctctcccaaaaactctcccaaaccagagtgtgtcacatgtgcactttgagtgtgccacaattataaattctcagaagaggcgacagcgggggacacacacagagacagtctcgtgtggcgaggcccttctgggcacactctctctctcgaaaaaaaacaaagagggacaacagacacgagcgaaaagacgtctctcaagacaacaacactaagagacacacacctagaagagtggacatgtgaacaccaaacaaacaagacaaaaccgaggggcggaccgcggtgtgggagagggagagcagacaaccgggggaggctactacaatcttcccacccggacagtgggagcacggaggacagcactcacaaaccgcacctacctggagcagagacaataaccagaacgtgggagtagaggcagagaggcacagatggagaggtaggagcaacacaaaaacaccgggcaccaccacgccaccagcacgaggaagaggggagagacggcccaccacagagcaaagaaaaagagtagggaaa

SEQ ID NO: 691199 - DNA, 218 bp, Homo sapiens
cgcgtacagttgcgggacgtggagggaagcaaagaattctacacttgggaggcttggatgatcttgttggaggatagaaaaggttcccaaagttagccgggtgcgagtggagtgtggacgaccagtgtgaggggtccacacaaaagtatttctttaatctaagttccagtgccattgtgatgaattcttttccggcggggggaattggatatggcggg

SEQ ID NO: 691200 - DNA, 715 bp, Homo sapiens
  misc_feature (101)..(101): n is a, c, g, or t
  misc_feature (112)..(112): n is a, c, g, or t
  misc_feature (136)..(136): n is a, c, g, or t
  misc_feature (222)..(223): n is a, c, g, or t
  misc_feature (226)..(227): n is a, c, g, or t
  misc_feature (481)..(481): n is a, c, g, or t
  misc_feature (630)..(630): n is a, c, g, or t
  misc_feature (645)..(645): n is a, c, g, or t
atcagagatcctcaactacagcaggtatccaagtattcatccttctggccaaagaaactggctacaattctgattctaagagaaaaccttcatgcagccgngaaactcaggnctctggaggggagagccttactcngatactttccacatgcactgcccactgggctgtagtttaaaaccatccaaaaccatcacatggatggctagggacaggactgggcnnccnnataacacaatgaactcagctcaccatgctaagaagactgcctctttccaggcaagattttactggagcaacataaccggagggtgtgattccaaaataccttcctttccaagccccgggttgtggataaggtctggattttggttatatgactaagggcgacagaggctgctggcatctctgggcaccgtcccagtggcttagggttggaggcttcactggcaaaacaatggcactgtttaactagctcgtgtnaaccattcatctacagcaagtagaatcatcagttttgcactgagcaaggaagcacatgggtctcctatgagagctaatgccagaattcacatgctttgtaaaatataggatgaggtttctttctttcttctgccccctccagaggccanatgggtagggtggtncctttgccttctgagtgctggatgtcccagcctcacaagacctgctaagaactggcgtgtgcaagcttgg

SEQ ID NO: 691201 - DNA, 191 bp, Homo sapiens
  misc_feature (38)..(38): n is a, c, g, or t
  misc_feature (40)..(40): n is a, c, g, or t
ttgcctaacctgactgacatatatttgaatactgcggntntctttctttttttttctatttgctgcccttcctggaggcagcgagggccagaattcaactgattgttcccctgccaagccaccaagggaagctgataagctgcttagacccctcggtcctgcttgtagggtcttcctgatttgcaacagat

SEQ ID NO: 691202 - DNA, 822 bp, Homo sapiens
gactagtactagatcgcgagggccgcccttattctattttttctgttgtcacagaacaccaatttgattcatacaatatcaagaacctaccgggctgtttatgggccatgcatatgcctacaggtctagtgtggaaatagtatgctgatcatcatttccgtactttcgtgaccattctctacaatattcagcagtgctggccgacatcgcaaagcatgagtcccttggctctaaactccgttaccgataaggagattacagaatcctgtgtttggtactccaggaagtctggcattatcacaaggatgcttgcgaaacggaggtaacacatctcacaggcaaatttcaggtaatctcatcctggaggcagctgcctactctgcagctgtggttcttccgaccagagaagaagagagaacaatgggaggagaagattggatgttgctgcatggttctgagaaagaggctttcagttcctaggaagcatctgtcggagcctgctccatgggccaatagcagccctttttctccatgagctggctggtgggttcccccctcccggatagcgcctccttccagaaagcaggtgtggtcagcctgttccaccaggctgaggtgctgggtgatgagaagcactgagcgggagtaccggtcagggctttcgtacaggagctgctccacctgtacactggctgtgggcatccagggcactggtggcatcgaccccggataagtacacacggtatccggactcaatgctcgggccaacgccattgcctgtcgctgaccccctgacagctggctcccagccttcgtctaacc

SEQ ID NO: 691203 - DNA, 184 bp, Homo sapiens
  misc_feature (83)..(83): n is a, c, g, or t
  misc_feature (131)..(131): n is a, c, g, or t
  misc_feature (159)..(159): n is a, c, g, or t
tggatgccagtaatctaaagggtgatagtctgtattgtgccatttagttctggattatgttttgtcttaatactatgtctgantaccctttggactacattacctgtttgaaaatagctgttatgtgtttnctttttcatatagcattggtcgattttngtgtaaaacatggagtttctccaac

SEQ ID NO: 691204 - DNA, 394 bp, Homo sapiens
caggtgagccgagatcgcgccactgcacttccagcctgggcgccagagggagactttgtctcaaaaaaaaaaaaaaaaaaaagaaaaaaacagtttaccattctatcagaaaatgttgaccaccctcatatttttggtaaactgcagtaatttttccttaatactttttgcaagcttttgcatgcataagctccagtatcacacttaattttgcttgcttgctctctgaaggggagttcgggatgaccgttacaggcaaagtgggatttttgcgtcccaaaggtggattaagcccaaatttccaggggtttttccccagtttttcttccgtaggggcttggatgttttaggaggggaaagcctttccctggacttcaaaatatgttttcttccc

SEQ ID NO: 691205 - DNA, 308 bp, Homo sapiens
tggtctcaaaggcgaccctgcctccaagggttaaaacggacatcctggataaattgtcctaattggtcctacagcagaacaaggggaaaaaggtgaccgagggctccctgaaacttaaagatctcccaaagcaaaatgggatggcggaattactgctgctgcagatcctttatgaccacctcaccctccaagcttaccacgagggttatgcccaaaaggtgaccaaggatctactggacccgatggtcagacaggtgacgatagtcttgcaccgtgtctttggaatcaaggtgtaactgtcgaaatca

SEQ ID NO: 691206 - DNA, 165 bp, Homo sapiens
ccgttttacggaagccacaatggcactcccctatactactacccacgctcagcctgacgttttggccttgtgtctgctcaatgggaactactcacctcctctgtcggcggcatgtctgtcatggcagagtcttccccctccgtgcccgactcattctccatcttc

SEQ ID NO: 691207 - DNA, 1802 bp, Homo sapiens
  misc_feature (532)..(532): n is a, c, g, or t
  misc_feature (831)..(831): n is a, c, g, or t
  misc_feature (833)..(833): n is a, c, g, or t
  misc_feature (835)..(835): n is a, c, g, or t
  misc_feature (859)..(859): n is a, c, g, or t
  misc_feature (918)..(918): n is a, c, g, or t
  misc_feature (1411)..(1411): n is a, c, g, or t
gatggtggtattaatagtctatcgactcttgatactccatcaacatgtttactgacttataccgcacacatactccatgtctcccctctgatgaaagactctaggtaggtgagatcatgtaacatgacggcctgtcgttggcctgttgtaagacttataaacttacaatgatagtcgctactagctattcgcatatgcacacatacttttaatgtctccatatgagtacgatagtcacgtggatacgacgcactaactgaattccttgttagacactgccctgggcctacattcaagccaggttgagggtgcgtcacacacggtaaccttaggatctacgacactccattctctacatctagcgattcactcgtgcacgttagcatcttacagataatctattaaagctcatgacaaacctcgtcaatttctctaagattagacttgtatagaacattaacttgcagcttccctcagatcgaactttaggttatggcatggcacatttgtagcaatggcacgtatgccaagnccattcacgactgttaaaaatggaatagtctacactgcgacacctcgaacgctccaacgatgtgcatgaatatttttacttttaatgccaaatgcgaaataccccattcttaccatgaatgtttgtatataaatactccacaaagtggaaattcacacccacagcccctcattgtgtaaggcacttggatctccgacgcccaataggccctctatgtgccctatccagaaaccaccccctcataggtaaaacgctcccccatccctctgattgttcggtaggatgcagaacacttgcancntnccctggacgctcgtactgacaacntcaatttgggcacaagttccttaatgggcctcgatcctttcaattctcccgatcgaagnacctaaccctaattccaccttgcatatccttcataccttctcatacgtgcgtccttacgagctcaaatatccttccccctataaaaaaattttcccctttttaatttgatttaaaccaattttcaacccaggcccaacgaggaaagctaatagtcaagtaatttgtcactaactgcttcctttccgggaaaaacccacagaagttataactccgcccaaacccttgggggttatatcactatccacccccggagttgaaggggcgaccccaagcgccaggaaaaaggccgtgtgtatcagcacaagggccagcataaacttatccataatatatctataagaaccccctacagtatagaggtctccccttttccccctatactcacatccgggcagctgaggttatttaccgtctcaaacaccccacagaggtgacaatgacaaaatatagataaatgacaccgctcgagatgatccgcgaagaagaaaaaancaggctaacctaacgaaatgagaacacaatctacaaaacggttagaaagagaacaccatgggaaccaaacataataccagacgagatggagcccaccgaggagaacagcagacgacacacagaaaggagatgcacaccaccgtaaaagaagaggccgcggaatagagagacaggccaccttctcccttcaaccactctcgcgttagatattttattgcatctagtaatacaagaaaaacaaaaaaaaaaagaaaaacaaaaaacaagaaacaaaacaaaaacacaaaacacagaatcaaccaaacaaaaaaatacaaaaaaaacacaaaaaagaaagacaaacagacaaaaaaaaacacaaaagaaaactcaaactaacaaaagaaacaat

SEQ ID NO: 691208 - DNA, 150 bp, Homo sapiens
actgcaccctcggtgtgctccgctacacagttctcacacatggtctcctgtcactccacacattgtctgtggtcaataaaaagtaataaggtatactgattatagtggtatctcaccgtgtccaaccggcaaaacaagtaagcccgtgta

SEQ ID NO: 691209 - DNA, 537 bp, Homo sapiens
cacgaggggtccgctccgagcttgccgagcacctgtgccgccacgccttcaccctcgcggatgaggcccagcaaaatgtgctcggtgccaatgtagttgtggcccagctgcagcgcctcgcgcagtgacagctcaagcaccttcttggcgcggggcgtgaacgggatgtgaccggagggggcgtgcgagccctcgccgatgatctcctgcacctgctcgcgcacgccgttcagcgaaatgtccatggcctcgagggccttggcggcgactccctcgccctcgcggacaaggccgagcaggatgtgctccgtcccgatgtagttgtggttgagcatgcgcgcctcttcttgggcgagcaccaccacacgtcgggctcgatcggtgaaccgttcgaacatgtcatcctcctcgtttcttatccggctgggccgggatccgccgcagtcacctgtggcgctgcgtccaggctaaccagggtgcgcgcgtgcgcatgcccatgttcgccaccggcgtgatggctgtgaccttctcgtaaca

SEQ ID NO: 691210 - DNA, 87 bp, Homo sapiens
acatctgtgtacttctgcgccacgagcctccggacaggggaggtttacgagcagtacttcgggccgggcaccaggctcacggtcaca

SEQ ID NO: 691211 - DNA, 796 bp, Homo sapiens
ggatcccggaagtgcgggcgctcagaggagctgtctaccgggtgattggaggcgggggaggtgggggcggtacagagactctggtgtgttggtagcctgctgaggtgcactctcgtgttatgtcagagaaccgatgtggtgtcgtgatcgtgctgttgattccttagaagtcttggaatcgagggtcatgttgagtattgtgatgaagaatcactggacgatgtagagacagggaaggactcttgtgaattctggtcatctctactgatctgtgacggagggtcacagcagcacaatgccagttcgtgcccctggatcaactccagatcacccagtaagggacccgaagacaggagatgctgagtgacttcaccagcgcatgatattgtacctgtaactccatgatacaaatttgatttatattgggagggggtcctgcaagaccctacatgagaggtggccttgtaagaatccttgttggtacccactagagctctacagtttggcaaactcgtccattcccgagacagaaggcagaccggtattctgtgttataggcaaaccgtgcccctaaaagactaactattctcctgctcctaagtggaggagtacctggaacgcgccagcttcgtagagcaatgacctcgacgtggctccttggcctttgcctcacgataaaattctgggtgccgaggtgatcttttgaccgaagactctacaggaagttgcctggactcctaactgagctatgtcccccgcaaattccgaacgagggggtggccttcaggccctgaag

SEQ ID NO: 691212 - DNA, 192 bp, Homo sapiens
ttctttcacaatgtggggagatactagttgactataccgttgacccttgcactttttctctctacctctctctgggcatttctctgttttcctccctctcctcttcctcattctccctgatgttccggctgcacatcgtgctgggccagatcgaagccaaggtcgaatccacaaggccacggttcaacccac

SEQ ID NO: 691213 - DNA, 204 bp, Homo sapiens
agcggaccacacaatgactgaacggactgacagagtaccttcactgagactgatgggctcataatttggcaaggcgcgctacgaagcatggtgcgcgcccctttgaagaagtgcgagaagcgtacttcatcgatgagagcaaaaactgcgattccagggatcagtatcttgatcgagcaaaccgaggttgcatttcaactacct

SEQ ID NO: 691214 - DNA, 880 bp, Homo sapiens
cccggaggctctgcgtgccgggcccccgcgccttgctgccccatgcagccctgagccccacagcaagtctgccatggtgccgcggggccctgtgtcccctcgtgaggccccggtgggcaggcgtcgagcgccgctggcttggagcctgcgctggtcgccctgtgcctcctccccgcgctggtgctgctggccctggctgggggcccctggcggtgcctggcctggagcgcagctgcagggagacgtcggctgcgctgggcctctcggcggtccccccacatcccgggatcccgggacccacttggccccccgacatgacgccagctacacgcatgactccatgccatggctgcgcgtgggaccagcttcaagccgtcaccgtacagggatcctcgtccttccgcgcggaacgctgctgaggcccagcggcgagacggcggacggtgccgctagactagccagccgttccggcaatgtgagagccgacgtagtccccgctatcaggctatccagcgagcgtggacacccagaggcagcccaggcgacgctccggagtaggcttctagccgcgatcaagccacgacgagactgcctagggactccggcgctgcgagcacgtgcttacgacagggcccaacgggaggcacgctggcccagcgccgtagctgaccgcccagcgaacgcgcggcagtaccacgattcgaacgaacaagccgagatactcgggatccatggtgaccccaagcgcgactagcagcgcagccaacgaaaggggtgaacccggtaccagagcctggacctcactggaagggcaatactacctacatgcacagcacaagaaggcgctgagccggacggaacgaggcacataaggggagca

SEQ ID NO: 691215 - DNA, 148 bp, Homo sapiens
aataccttgttaatgaattgactttcataaattggttatgttggtgggcaagtctttaagctggaaattgtaaattcctccagaaatgtattgcatgcagttaccatgaactaatactacaataaaggatggtcttgtcagggagctt

SEQ ID NO: 691216 - DNA, 100 bp, Homo sapiens
cgtcttaataataccaatgcgctgaagtaatcaggcacagactcaatgtaacattctcacccaggcctgcaccaaagatggtgttgttgtctgaattatc

SEQ ID NO: 691217 - DNA, 638 bp, Homo sapiens
tccatttggcacatggatagaaggaatataatgatatattggatcatgatattccttctatccatgtgccaagatgggtgtaatgtttatttactgatgcttatgttgaccaaagagcatgcagaagacaagtaaaattatgacactactttcgagtacacaaagtgatctgatgcgtctagccaaacaggatatgctttcacaactatgctgatatcagatctcttaatgtcgtgtgtcacacagttggaatttattctgttgccagcatttaagtagtcatggcaagtcctgtttttaagacctttggagactggagctttctgttccattaagtctttgtttatactacaaatgtcacctcacttagttcagatgaaatctgttactctacaaggaaggtgttcatcattaggaggcagctttactaagctggtgctttgcatggtagcaagtgctgccctttatcagcacccatgggtcatagtgtaggctagagttaaggcactggcagacttagggatgctggacagacctgtagttcgttttaagtcatgttcacaggaatttctacaataataaacccatcatctccataggtcagatcgaagtgcattcaatgctaaatagaagtatga

SEQ ID NO: 691218 - DNA, 163 bp, Homo sapiens
  misc_feature (128)..(128): n is a, c, g, or t
  misc_feature (148)..(148): n is a, c, g, or t
cctgcagccttgacctcctgggctcaagcagtcctcccaccccagcctctgagtagctgggactacaagtgcatgctgccacaccagaggctgaggggatctggcggtggagcgctaggatcagacgnccccgcgatgaccagctccnccgtctccagagtcg

SEQ ID NO: 691219 - DNA, 211 bp, Homo sapiens
  misc_feature (1)..(2): n is a, c, g, or t
  misc_feature (5)..(5): n is a, c, g, or t
  misc_feature (34)..(34): n is a, c, g, or t
  misc_feature (189)..(189): n is a, c, g, or t
nnatngaccattgaactttatttttttataatgngatttttgggaaggcacattgtttttttaacagggttagttttcagagcctggccagccaaccgtgtgctagtagccaaccgtggactagtagccaaccgtggactagtagccaaccgtggactagtagccaaccgtggactagtagccaaccgnggactagtggttaccgagctcg

SEQ ID NO: 691220 - DNA, 332 bp, Homo sapiens
tagatgttgccctatttttatttaaaaaggggggactcgagacttaaaataaaaaaagctccttggtcttggctaaggaagggtttttattttggggaaattttgaaaattatagccccttaaggtctcaaaaaaatccctttcgttgttttggaaaaaaaaacaaaaaatttttccccacctttttttttaaaaagggccaaaaatggggggggggggggttttttttttaattttttcccccccccccgttgttttttggggggacatattctcttcccgcaaattttgtgtttgcccccccccggggttttttttccacacctttttat

SEQ ID NO: 691221 - DNA, 504 bp, Homo sapiens
tgagacacagacagtggacaatgccaatgagaaatcagaaaaacccccagaaaaccaaaagaagctctctgacaaagatacggtagccaccaagatccaggcctggtggcggggcaccctggtgcgtcgggcactgttgcacgcagccctcagtgcctgcatcattcagtgctggtggcggctgatactgtccaagattctgaagaagaggcggcaggcagcgctagaggccttctcccggaaggagtgggcagcagtcacactgcagtcccaggcccgcatgtggcgcatccgcagacgctattgccaggtgctcaatgctgttcgcatcatccaggcttactggaggtgccgctcctgtgcttcccgggggttcatcaagggccagtacagagtcacagccaaccagctgcatctccagctggagatcttgctggactcagggccttgcattgtgacagagtgtattcccttctcaataaaggaatgaagtggtcttttcca

SEQ ID NO: 691222 - DNA, 120 bp, Homo sapiens
gatcaatcctccatgagtagtggtggtggcagtggtggcggttatcggcaatcaagaccagagtggtggaggtcggcagccggtcggctattggaccagccaaggaccgttggagccccc

SEQ ID NO: 691223 - DNA, 213 bp, Homo sapiens
tctggcggtccatcagtgctcacagagacgccggtgtggccgaggcctggctgcttggagaggagccgtacctctccgccgagagataggccagagcgtgaactaggtgcgagaagctcatcaagcgccacgaggcattagacaagtctgcagcaacctgggatgagaggtctctgccctggaaaggctgcactaccttggagttactggaag

SEQ ID NO: 691224 - DNA, 521 bp, Homo sapiens
tattaccctagaatgtaaccacacgattaaatcttttagaagtagacacgctcatccaaccacccccattaaaaatataagaggtgttggtctggctacctgatttcacctcgtatagcccccggaaagagttaaccccaatggttttgtagttttaatgtaatggtaaaaataattgagaccccacaagagagtaattttgatatgattatcacttgaaaggagtcttaaatgttcacgccacgtcacacccagattgaatatatttaattagattcgccatatctggtcacactgtattaaagtttaaataaaaatgttctgtggagtgataaaggtctttaatatccaaactatcacccagtcaccatgtttaagaaataactatctaaattatttttcactggctttcctgaaaaagtttacatttcatagaactatggcccaatgtaaaaagacccaccaatacagtaaatggtaaaaaccaacattaaagattcaagttttataaaaaatttata

SEQ ID NO: 691225 - DNA, 183 bp, Homo sapiens
  misc_feature (79)..(79): n is a, c, g, or t
aatgatacccagagctaccgccgccacactgtggagatgtgtgtttgactgtgagagagtgtgtgttgtgtgtgtgttntgccatgacacgtggccccagtgtatagtgtttcagtgggggagaagctgaaagaccaagactcttcccaagttagcttgtctcctctcctgtcaccctaagag

SEQ ID NO: 691226 - DNA, 389 bp, Homo sapiens
  misc_feature (109)..(109): n is a, c, g, or t
  misc_feature (166)..(166): n is a, c, g, or t
  misc_feature (238)..(238): n is a, c, g, or t
  misc_feature (286)..(286): n is a, c, g, or t
  misc_feature (341)..(341): n is a, c, g, or t
  misc_feature (346)..(346): n is a, c, g, or t
cttaacccaaccttaaattcccaacccaaaggcctttttgggggttaatttttttgggggccccaaggttggaacccaagaaaaagaatggaacccccttaatggtttngaatttctggaagggctcttgctttttgtgtaaagccttctttgtgatatctccatngtgtccctttgggcctcctgttctgattgaattccatcaaaagtgaggcattagattctaatcctatatttncctatgagtccattctaatactcttaggttttgttggttccagttganttacaaggagggaggtcagatactgttatctgtgatactaaaccagaatttgacntcctnacaactgaaatttgcattgcttcttaatcaaatccccccggcc

SEQ ID NO: 691227 - DNA, 372 bp, Homo sapiens
atagcgacaccgtacatggcagccggaatttgttggcgcccgacgaaagctacaaagactttatgcaggcagttgtgcgaccggcacgggacatcctgcatgagcatggattgaaaggttttcatgaactgcgggcggcttacgcctgtgagcgctatgagcaactaatcggctttctcgcacccgttaatggtggtcgtgttcatcaagaggatcgagcactcgatcagcgagcccgtaagcagatcagccacgagttgggacataaccgcattgatgtggtgagtgcctacatcggaggtcggcgatgacggccgatttcgacatagcgttgttcctgcgccccgtactcaaagggtacggtgtcgctat

SEQ ID NO: 691228 - DNA, 787 bp, Homo sapiens
aaggtgcctatttaggtccaagggaacatggacacatgatcatgtccactgacatgataagccccggcgcccggcagtacgggaccataaaggtctccactggcacgggtcgctcagtcaacgtaggctgctggatgttgacgaaaggaaggcggcggcggcaggctcacgggatctccgaggtcacggacggatcggccaggattctcacggggtaaaagggtctacactccggggtagggacataaaggcttgtagttccaagttgctaaacgagggagaactctagggagggacaataacagcgggagacacaatattcgagagcgggggaggcctccaagaggcgaggagcaagagcactctctccaaaagaaacgccagcccaggggaggggggcgacgcgggggcgcccaagagaagggcaagaacgggcacccctggggcggcaaatacaaccggtgggacacacccaacaggaagagaacccctcgggcgggcaacagcgaggacacaaacgagcccgccacgggaaatttacgacacaccacaaactatcaaaaaaaccacgcgccccggggaggggaacgacccacgggaaggccaggcgtggcagtagcgaacacacaaaatacctcacaaagactgggggcgagtaatgaaagaggcgctgcaaacaagggggggaaccttactatcagaacaacggggggagcccccacagcgaagcggagcgcgccagactataccaaaataacttcaccggccccgcagtcgcgggggaaag

SEQ ID NO: 691229 - DNA, 162 bp, Homo sapiens
cgacggcatgaatcgaactcggtactgtgtgagtcatcgcttttgacccaaatgcacattttattagcggggataaagagggtgaggtaaagtttatggaactgagtgttagtggactttggcatttccatagctgagcacagcaggtgaggggttaatgca

SEQ ID NO: 691230 - DNA, 175 bp, Homo sapiens
cctaaagtggaactgctccgatcattatttttcagtcttttatctctctgtgacacattctgcgattgtttctattgctatgtctataagttcactcatcttttcttcttagaatagctaatctgacactgtaactatgcagtgtatctatgatcccggagcagtaccacttagg

SEQ ID NO: 691231 - DNA, 453 bp, Homo sapiens
ggactttggcatttccatagctgagcacagcaggggaggggttaatgcagatggcagtgcagcaaggagaaggcaggaacattggagcctgcaataagggaaaaatgggaactggagagtgtggggaatgggaagaagcagtttactttagactaaagaatatattggggggccgggtgtagtggctcatgcctgtggtccgagcactttgggaggccagggcgggcggatcacggggtcgggggatcgagaccgtcctggctagcacggtggagccccgtctctactgggaatgcaggaaattggccgggcatggtggcgggcgcctgtggttccagctgactgggcggctgaggcgggagggtggcgtgggcctgggaggtggagcttgcggtgagccgggatatcgccgctgcactccggcctgggtgacagggcgagactccatctcaa

SEQ ID NO: 691232 - DNA, 132 bp, Homo sapiens
ctagcttagaagttcaatagcaattttatacaattaccccagcccaggagtcagcctataacttcaggagtcatgaagcccttgaaggcctcagaaaagctgatctagccaacctccctcttgcctttagct

SEQ ID NO: 691233 - DNA, 775 bp, Homo sapiens
  misc_feature (483)..(483): n is a, c, g, or t
  misc_feature (522)..(522): n is a, c, g, or t
  misc_feature (618)..(618): n is a, c, g, or t
  misc_feature (623)..(623): n is a, c, g, or t
  misc_feature (664)..(664): n is a, c, g, or t
  misc_feature (685)..(685): n is a, c, g, or t
  misc_feature (723)..(724): n is a, c, g, or t
  misc_feature (766)..(767): n is a, c, g, or t
ggggggggttgtactgactgtgcgtggggggggaggctgttcacatacctgcggaagatgaatgccatatgacttggatctgagctaaaggacagtattccagttcctgaactttcaccaagtggaccttttaaaactcaggagcctcttcgaaaaggttttttttgtatgaaaaatgaagttagggggagtaatacccttgaagtatcagattacatttccaggtatccaaataaaatattctcaacactgcgaaacgttcacgatctatttgctactctaaaattacatatggaatacaaggcaatgcagcaatttaagaaacttgcattgctttttagctcaaaatttaactggatgatttgtggggatttgaaaagaccactggaattgagggatatcttagtgatccatcaacaaaccgaagttaatgtggagagccacactttttagaaccgaacataaacgcctctgataactganataggagttgggtcccaatgtaacccccaaatctccatntttgaatataaggcgtgtatttccccttcaaagggcgtgtacacccccctttataggcgcgcgccccctctaacaaaaccacccacccccgatatnttctnccctttggcaaaggagaagaaacgccttaaattcttccccntaaaaagagccccaatattanaaagtgcggcgcgaaaatggccctttttatttttttanngcaatatattttatgggggggggttaagtttctttccccaanncccccttt

SEQ ID NO: 691234 - DNA, 1315 bp, Homo sapiens
agcgtgtggagagcatcgtacccggaacgatgcggggaggcattagggaaggattggtaccgcttatgcgtgtaactcgtcgcctcactgtgagcggctggcctggggtcctcccgtgtccggctcgtaggccggcatgggccggcccgcgccatgtcagttaggtccatgtcatttcctgcgtcgtacgttcatggccggggcttggcacgagctagcatgcatcgcaacagttcgtcagcggcctggatgtctggatgtccggctcgttgtgatcggccatggtgctgcgtagccctgttgtgccgtggtaatcatacacccatcaccaatcgatagggggttttctttggttcaccgaatgggtccctctaccaggcggagagaagaatggttaggtagccatatgggctcgagtagttcgatgcatctcagtatctcttgtagatagaggaaaacatgttgttccgacaagatctctattgtctcacatgactagagatatgagttcactcaggtgatcttgtaaaagacctttcaattgttctcgcggaaacttgaggacaagagtggttacacaatgatagtccctttccttgcaaagcaactgggaaacgcaattggaaccgtactacgccactacgcagtgctgaggcgtgaattccaccaggtgtgtttcccgtttcgagtgacaggtgtaggactcgtgtaaatgttggcccgtaagtaatacggcgcggggtgcctagtcgcattgacccgtatgtaaatcgagtgccctaacgggtaatggggctaccacaaatggccccactgtgaggttcagcgaatgtgaaccttatcaaggttataacgaaaaggatcattgttcaccttttgatcactttcaatatattaaagtccctatgttcatgaaaccgtgaggaaacctcttaggttacttgcagtacatcgagatgggcgtaactcgcgtagttattgagtaagagaacgtgtgatagaatactgttagttaatccacccggtacatttcgagtatcatggcgtacggttaccactaaatttgggagagttttggtacccgtagggagttctatgaggttttttgcctagccctgaggagcagagaacccaggggtaaaagacgttcttaatagatatagtttacgcccggaataagttagcttagcgagtttagtaccctgaggtgtcttcccgatacctttttgttacgttgctacaggtgtatatccgagttcgccgcggatcaacggtagttggtcgcggatatcgttcgactatagtcgctagcgcg

SEQ ID NO: 691235 - DNA, 399 bp, Homo sapiens
cgctgctctcactgtatcagctgactttggtagtccctggcactggtgtttttgtaacggctccatatacacccattgcctgaaccaccaagctggtcacatctccaagcttggaaggtatctaggatactgtatgaatccttggccagttaggagaacgcgctgacatactgctcggccaccgtcagttaacctgctgcatctccattatgttgtgtcatatctgttcccctttgttaaaatagcttcagctttagccttggccttcgccagaactgcactggcctctcctgctgcctgatttatctgttcagccttttctgcttcggaggccaggatctgggcctgtttcttcccttctgccacattgatggccgactctcgggtcccctcagactc

SEQ ID NO: 691236 - DNA, 432 bp, Homo sapiens
actgtcatgtttacagacagtgcagcaaaggcagtggcttggagtgtgaccagagagtttgcagaacaaacgcaccagggaggggcttggatggaaataaccaagcgctctcccccagggcgtcaggaagacagaagaagctggacagaaagagatcaagatttaactggttatgctgtagaccatggcagatcgtaacagaagacaaagcccttaaaagaaatgaaactatcctcattaaaggcctgatggctcacaccatccaggagatctcctctgctaccaactcccagcagctgattcagcggtccttcatgaacaataggcaactgaacaagaaaatgagtttatattgttcaaaagaaagaagaatgcctcttttttcccttgaacaagggaggtggggactaacaaaagattctttgcttgacc

SEQ ID NO: 691237 - DNA, 385 bp, Homo sapiens
  misc_feature (104)..(104): n is a, c, g, or t
  misc_feature (110)..(110): n is a, c, g, or t
cccccaaacccctaaaaagagaataattgaaaaaaagattaatggttcctttcaagttccatgtccctacctcgagggcaagaaaagaaagtttatgagcctanggaatnggtggctcatgccccatatggcctccccagcactttgagagcccaaggcaggaggatcacttcagccccaggagtttgagacagcctaggaaacataacgagatcccatctctacaaaagataaaaaaaaaaaattagctgggattggtggcatccacctgtaggccaagctactcaggaggctgaggtaggaggatcccttaagcccaggagatcaaggctgcagtgcactatgatatgccactgcactccagcctgggcaacggagctagaca

SEQ ID NO: 691238 - DNA, 331 bp, Homo sapiens
tttaaactggctagctccatttttaccacaaaaggggtacttgagatggaatgatggtgagcagctgtattgtcggctatccttcccctttgatcaaatagaccaattagttacatgacccaaaaccatcagaggagcaaagccagaggccttcattttgaaaaagtttcctaactattaaatagtctttattcatctgggtatacagagcattcggaaagtattcagacccatgactatttccacatttggttacgtaacagccttattctgaaattggatacaattcatgtattccctcatacaatctacacacaattgattgacacag

SEQ ID NO: 691239 - DNA, 197 bp, Homo sapiens
acatctgaatttccacgtggcaagttaaaagcttccattagaactgcttgtctgtcagccttatgaacaattctgtgcaggcagggcgcggtgactcacatctgtaatcccagcactttgaaaggtcaaggtggcagatcaccggagcccaggagttcaagactagcctgggcaacattgcaaaaccctgtctctac

SEQ ID NO: 691240 - DNA, 405 bp, Homo sapiens
  misc_feature (282)..(283): n is a, c, g, or t
  misc_feature (304)..(304): n is a, c, g, or t
  misc_feature (331)..(332): n is a, c, g, or t
aaggctgcccccggagaagcctggcctcttcttcgcccaaaaagcaattttccccttaaaaatgttttttaaagaccagggggaaatttaaacaaaacccccccagggttttttccccgccacaaccccgcctgggaattgtcagccttccaaatccccctttccctcctcttttggggttttcttctttcttccttaagcaacttacaatggtgggggtaagactaaggctggggcattttgggggcccggaggtctccgttgcttcttggttggggtttnntgtgatagtgccccccccccntcccctcccattcggcactagaatttnncccactttttttccccccccacccggacctctcctccaggtctcatcttcccaccccaaaaatgtctgtctct

SEQ ID NO: 691241 - DNA, 81 bp, Homo sapiens
gttgaggacacggctgtatattactgtgtgcaagagggaagcccctatagtagtaacttttacggagcctggggccaggga

SEQ ID NO: 691242 - DNA, 185 bp, Homo sapiens
tttttttttttgggggggggggggtttccccccccccccccctttttttttagaggccccccaggggggccaagggttttttaggtttcccccccccccgggggtttggggggcccccttttgggttaaaatttttttcccaaacctccccttttttggggttttccccccccggggggggttta

SEQ ID NO: 691243 - DNA, 130 bp, Homo sapiens
tcctggagtcgggtcatgcagtggggactgcttgtgcacacagattgcttgggatgacgggtgctccaagagttacctgttcctaaagagccaagcgtcccgtccgtggagtcgcttagacagcctccct

SEQ ID NO: 691244 - DNA, 1485 bp, Homo sapiens
ggcgtgatgaaatgctgggacttgtgcccatgaggcaaagcataacttgatatagaaggagaaggaaataccagaattacgaaacaaactgcagaatgtcaatagagaccatacagcgcctcaaagcacacgcacatagcacgcacacaagaaacactcttgggtacacataatgcctgaagaagacaagtgcccaaagtcatgcctgactagatgttacaattatggcagcaggttcccagatggaacttaacagatgttgcaaaagcacacacacattgccacacaccaagccagctacagctacaaaggcaatagcacttagcatcgcaactgtccaaaccaagctcaacccaggcagcaaaccacaggcagcaacacaagcccaccacagctctcagcagcaccagaactatcagtcacagcattgcacatccgcccatcagctcaccgcgttcatcacaagggaccaaagccaggcacaacagcatctccacacaaatcatacaagagaagtcaaacaccagcaatggcagccctcaacacatcattgcagccaagacatatcacagcattcattccccaactcacatctacgcgaaagctgcttccgcatacaagacacacaacctgggcacgcgcagcacagcaccctggtggggaacaagtgtaaataacccacaatggcaaacgacattctagcgatgcaatctcaaggcatccacacggacggcacggaactacaacacgcgacgtgacatcaaaaccaggaagacacccgggtatcacacgccgcacaatacaggggcagcaacacaaaacacatgcgggacacaaaagcatatcaccagaggaccacaggaacaaacaacgaacacagaacacatcacacactcccaaaccgacagacacaacaacaaacacccaacagcgccaaagcacagcgaagctacgcgcacacacggcgacgcacccgcacccggcaccagtgcgacccacgccaccaccacgcgcagggacaagggcacgcccccaacaacgatcaacacagagagagaccacacaaccggcacgcacggacgcaccgatcggcccgcaccacacaccctcaacaacaccgagaactggacgacaaccagcaacacaggcaccgcacacataccgacacgtcgcgcgaccaacacggcacacgcccgaggcaagcccgctcgtacaaatacaaacggacacccacagcgccacacacgccaaacggcacggacgccggccggacagacacacccacacgaagaggcacccagcgagcaagagaaccgtgccaacgacacatcacgagacgcagcgcgccacgaccacagcacgacgagcgacacgggacctcaagcacacaaccgcgcacgaacagacacaaccgggctgacacatgcagacacaacacccgccaactaatagagccgcacagaacatcacaccaacaacccagac

SEQ ID NO: 691245 - DNA, 178 bp, Homo sapiens
cggtgatgtaagctggttggctacacatgcccgggttgcacgaaatgtcccgaggtatttgaagatgttcagcgctgtcacttcacgaggcccaggaagctagaggacgctcaggcggggtctgggaccataggccggtctggtgtccagtgtggagggcccccttgaagatccggag

SEQ ID NO: 691246 - DNA, 230 bp, Homo sapiens
tttggtttgagtgtgacacaggagcctcgaacttcaccaggagacgtatcacccctggatgggtcaggaaactggccagattgcggactgtgagggcactttttatagaacacacggactgaaccagggcgagcaggcccccacatcctgaaaagccaggaaaaccctttttgcttaagccctaatcccgatctcgggttcagcttatgattctgcaccaatgccacttg

SEQ ID NO: 691247 - DNA, 951 bp, Homo sapiens
  misc_feature (144)..(144): n is a, c, g, or t
  misc_feature (148)..(148): n is a, c, g, or t
  misc_feature (230)..(233): n is a, c, g, or t
  misc_feature (247)..(249): n is a, c, g, or t
  misc_feature (264)..(264): n is a, c, g, or t
  misc_feature (275)..(275): n is a, c, g, or t
  misc_feature (285)..(285): n is a, c, g, or t
  misc_feature (303)..(303): n is a, c, g, or t
  misc_feature (308)..(308): n is a, c, g, or t
  misc_feature (311)..(312): n is a, c, g, or t
  misc_feature (315)..(315): n is a, c, g, or t
  misc_feature (342)..(342): n is a, c, g, or t
  misc_feature (363)..(363): n is a, c, g, or t
  misc_feature (367)..(367): n is a, c, g, or t
  misc_feature (369)..(369): n is a, c, g, or t
  misc_feature (372)..(372): n is a, c, g, or t
  misc_feature (376)..(377): n is a, c, g, or t
  misc_feature (383)..(383): n is a, c, g, or t
  misc_feature (416)..(416): n is a, c, g, or t
  misc_feature (440)..(440): n is a, c, g, or t
  misc_feature (445)..(445): n is a, c, g, or t
  misc_feature (449)..(449): n is a, c, g, or t
  misc_feature (455)..(455): n is a, c, g, or t
  misc_feature (458)..(458): n is a, c, g, or t
  misc_feature (463)..(463): n is a, c, g, or t
  misc_feature (476)..(476): n is a, c, g, or t
  misc_feature (483)..(483): n is a, c, g, or t
  misc_feature (493)..(494): n is a, c, g, or t
  misc_feature (497)..(497): n is a, c, g, or t
  misc_feature (502)..(503): n is a, c, g, or t
  misc_feature (519)..(519): n is a, c, g, or t
  misc_feature (529)..(532): n is a, c, g, or t
  misc_feature (534)..(534): n is a, c, g, or t
  misc_feature (543)..(545): n is a, c, g, or t
  misc_feature (549)..(549): n is a, c, g, or t
  misc_feature (562)..(563): n is a, c, g, or t
  misc_feature (572)..(572): n is a, c, g, or t
  misc_feature (725)..(725): n is a, c, g, or t
  misc_feature (730)..(730): n is a, c, g, or t
  misc_feature (771)..(771): n is a, c, g, or t
  misc_feature (951)..(951): n is a, c, g, or t
tattgtaaactttagacacaaaaataggttctctaggccattcacatgcacattaaaaccaacaggtgcaaactacaacaatgcatataattatacaaatgatgccactctgtgatgtttacaggattgctgtccatgcaaggngatnataggcattatttatgaagccttaagatccagaagtgttgttactaccaaacctctgattaacactgtgaagtaagtgtttnnnnaggcagttccatgnnncggctaacatttctntaaagcaaatngctgcctctnagcctagccgtacaagcnatttnggnnganctgaaaatattagtatttcattactgngtgcggctctgtgatgggcangcgngnggngggnncatccnccaaaaacaattacttctccttcatcgctggcncatgctgtgtgccatagccttggnttttnggtntatggntgnttaanttgtttccattcnttttttntgatgcagtnngtncaggnntcacttagtggctgtntatcagtggnnnntnctccaaagnnnaaangatgatctgaagnnactggtgtnagtgagtgccaagatcgaccaactgggcatatgccttgtggaattaattcattccactcccatgtatccagattaagatagtgaagatcattcattctagcatcctaaaaaaggataattaagttatcattttgaagaattcaaaagcaagtnattgnagtcgtttgaatacttactcgatatctgcctccaaacacgnagcctctatttccgacagttgcacaggcatgggcagcacgaggtgaaggtgctttaccagtagttataggctggctccaggtaaatgtttcagtatctaaaatatgtacatgatcattccatcctcttggatgacttgaattccaaaaagatgtttcatcgaattcaaaagttcccaatn

SEQ ID NO: 691248 - DNA, 2483 bp, Homo sapiens
tagaattcagcggccgctgaattctagccgagcatggacgaccccgactgcgactccacctgggaggaggacgaggaggatgcggaggacgcggaggacgaggactgcgaggacggcgaggccgccggcgcgagggacgcggacgcaggggacgaggacgaggagtcggaggagccgcgggcggcgcggcccagctcgttccagtccagaatgacagggtccagaaactggcgagccacgagggacatgtgtaggtatcggcacaactatccggatctggtggaacgagactgcaatggggacacgccaaacctgagtttctacagaaatgagatccgcttcctgcccaacggctgtttcattgaggacattcttcagaactggacggacaactatgacctccttgaggacaatcactcctacatccagtggctgtttcctctgcgagaaccaggagtgaactggcatgccaagcccctcacgctcagggaggtcgaggtgtttaaaagctcccaggagatccaggagcggcttgtccgggcctacgagctcatgctgggcttctacgggatccggctggaggaccgaggcacgggcacggtgggccgagcacagaactaccagaagcgcttccagaacctgaactggcgcagccacaacaacctccgcatcacacgcatcctcaagtcgccgtgtgagctgagcctcgagcacttccaggcgccactggtccgcttcttcctggaggagacgctggtgcggcgggagctgccgggggtgcggcagagtgccctggactacttcatgttcgccgtgcgctgccgacaccagcgccgccagctggtgcacttcgcctgggagcacttccggccccgctgcaagttcgtctgggggccccaagacaagctgcggaggttcaagcccagctctctgccgcatccgctcgagggctccaggaaggtggaggaggaaggaagccccggggaccccgaccacgaggccagcacccagggtcggacctgtgagccagagcatagcaagggtgggggcagggtggacgaggggccccagccacggagcgtggagccccaggatgcgggacccctggagaggagccagggggatgaggcagggggccacggggaagataggccggagcccttaagccccaaagagagcaagaagaggaagctggagctgagccggcgggagcagccgcccacagggccaggccctcagagtgcctcagaggtggagaagatcgctctgaatttggaggggtgtgccctcagccagggcagcctcaggacggggacccaggaagtgggcggtcaggaccctggggaggcagtgcagccctgccgccaacccctgggagccagggtggccgacaaggtgaggaagcggaggaaggtggatgagggtactggggacagtgctgcggtggccagtggtggtgcccagaccttggcccttgccgggtcccctgccccatcggggcaccccaaggctggacacagtgagaacggggttgaggaggacacagaaggtcgaacggggcccaaagaaggtacccctgggagcccatcggagaccccaggccccagcccagcaggacctgcaggggacgagccagccaagaccccatcggagaccccaggccccagcccggcaggacctacaagggatgagccagccgagagcccatcggagaccccaggcccccgcccggcaggacctgcaggggacgagccagccgagagcccatcggagaccccaggcccccgcccggcaggacctgcaggggacgagccagccaagatcccatcggagaccccaggccccagcccggcaggacctacaagggatgagccagccgagagcccatcggagaccccaggcccccgcccggcaggacctgcaggggacgagccagccgagagcccatcggagaccccaggcccccgcccggcaggacctgcaggggacgagccagccgagagcccatcggagaccccaggccccagcccggcaggacctacaagggatgagccagccaaggcgggggaggcagcagagttgcaggacgcagaggtggagtcttctgccaagtctgggaagccttaaggaaaggagtgcccgtcggcgtcttggtcctcctgtccctgctgcaggggctggggcctccggagctgctgcgggctcccctcaggctctgcttcgtgacccgtgacccatgacccacagtgctggcctcctgtggggccactatagcagccaccagaagccgcgaggccctcagggaagcccaaggcctgcagaagcctcctggcctggctgtgtcttccccacccagctctcccctgcgcccctgtctttgtaaattgacccttctggagtggggggcggcgggcagggcttgcctttcttagtctgatgccaagcaaggccttttctgaataaattcatttgactttcgaaaa

SEQ ID NO: 691249 - DNA, 879 bp, Homo sapiens
  misc_feature (144)..(144): n is a, c, g, or t
  misc_feature (148)..(148): n is a, c, g, or t
  misc_feature (230)..(233): n is a, c, g, or t
  misc_feature (247)..(249): n is a, c, g, or t
  misc_feature (264)..(264): n is a, c, g, or t
  misc_feature (275)..(275): n is a, c, g, or t
  misc_feature (285)..(285): n is a, c, g, or t
  misc_feature (303)..(303): n is a, c, g, or t
  misc_feature (308)..(308): n is a, c, g, or t
  misc_feature (311)..(312): n is a, c, g, or t
  misc_feature (315)..(315): n is a, c, g, or t
  misc_feature (342)..(342): n is a, c, g, or t
  misc_feature (363)..(363): n is a, c, g, or t
  misc_feature (367)..(367): n is a, c, g, or t
  misc_feature (369)..(369): n is a, c, g, or t
  misc_feature (372)..(372): n is a, c, g, or t
  misc_feature (376)..(377): n is a, c, g, or t
  misc_feature (383)..(383): n is a, c, g, or t
  misc_feature (416)..(416): n is a, c, g, or t
  misc_feature (440)..(440): n is a, c, g, or t
  misc_feature (445)..(445): n is a, c, g, or t
  misc_feature (449)..(449): n is a, c, g, or t
  misc_feature (455)..(455): n is a, c, g, or t
  misc_feature (458)..(458): n is a, c, g, or t
  misc_feature (463)..(463): n is a, c, g, or t
  misc_feature (476)..(476): n is a, c, g, or t
  misc_feature (483)..(483): n is a, c, g, or t
  misc_feature (493)..(494): n is a, c, g, or t
  misc_feature (497)..(497): n is a, c, g, or t
  misc_feature (502)..(503): n is a, c, g, or t
  misc_feature (519)..(519): n is a, c, g, or t
  misc_feature (529)..(532): n is a, c, g, or t
  misc_feature (534)..(534): n is a, c, g, or t
  misc_feature (543)..(545): n is a, c, g, or t
  misc_feature (549)..(549): n is a, c, g, or t
  misc_feature (562)..(563): n is a, c, g, or t
  misc_feature (572)..(572): n is a, c, g, or t
  misc_feature (699)..(699): n is a, c, g, or t
  misc_feature (879)..(879): n is a, c, g, or t
tattgtaaactttagacacaaaaataggttctctaggccattcacatgcacattaaaaccaacaggtgcaaactacaacaatgcatataattatacaaatgatgccactctgtgatgtttacaggattgctgtccatgcaaggngatnataggcattatttatgaagccttaagatccagaagtgttgttactaccaaacctctgattaacactgtgaagtaagtgtttnnnnaggcagttccatgnnncggctaacatttctntaaagcaaatngctgcctctnagcctagccgtacaagcnatttnggnnganctgaaaatattagtatttcattactgngtgcggctctgtgatgggcangcgngnggngggnncatccnccaaaaacaattacttctccttcatcgctggcncatgctgtgtgccatagccttggnttttnggtntatggntgnttaanttgtttccattcnttttttntgatgcagtnngtncaggnntcacttagtggctgtntatcagtggnnnntnctccaaagnnnaaangatgatctgaagnnactggtgtnagtgagtgccaagatcgaccaactgggcatatgccttgtggaattaattcattccactcccatgtatccagattaagatagtgaagatcattcattctagcatctcgatatctgcctccaaacacgnagcctctatttccgacagttgcacaggcatgggcagcacgaggtgaaggtgctttaccagtagttataggctggctccaggtaaatgtttcagtatctaaaatatgtacatgatcattccatcctcttggatgacttgaattccaaaaagatgtttcatcgaattcaaaagttcccaatn

SEQ ID NO: 691250 - DNA, 2423 bp, Homo sapiens
tagaattcagcggccgctgaattctagccgagcatggacgaccccgactgcgactccacctgggaggaggacgaggaggatgcggaggacgcggaggacgaggactgcgaggacggcgaggccgccggcgcgagggacgcggacgcaggggacgaggacgaggagtcggaggagccgcgggcggcgcggcccagctcgttccagtccagaatgacagggtccagaaactggcgagccacgagggacatgtgtaggtatcggcacaactatccggatctggtggaacgagactgcaatggggacacgccaaacctgagtttctacagaaatgagatccgcttcctgcccaacggctgtttcattgaggacattcttcagaactggacggacaactatgacctccttgaggacaatcactcctacatccagtggctgtttcctctgcgagaaccaggagtgaactggcatgccaagcccctcacgctcagggaggtcgaggtgtttaaaagctcccaggagatccaggagcggcttgtccgggcctacgagctcatgctgggcttctacgggatccggctggaggaccgaggcacgggcacggtgggccgagcacagaactaccagaagcgcttccagaacctgaactggcgcagccacaacaacctccgcatcacacgcatcctcaagtcgccgtgtgagctgagcctcgagcacttccaggcgccactggtccgcttcttcctggaggagacgctggtgcggcgggagctgccgggggtgcggcagagtgccctggactacttcatgttcgccgtgcgctgccgacaccagcgccgccagctggtgcacttcgcctgggagcacttccggccccgctgcaagttcgtctgggggccccaagacaagctgcggaggttcaagcccagctctctgccgcatccgctcgagggctccaggaaggtggaggaggaaggaagccccggggaccccgaccacgaggccagcacccagggtcggacctgtgagccagagcatagcaagggtgggggcagggtggacgaggggccccagccacggagcgtggagccccaggatgcgggacccctggagaggagccagggggatgaggcagggggccacggggaagataggccggagcccttaagccccaaagagagcaagaagaggaagctggagctgagccggcgggagcagccgcccacagggccaggccctcagagtgcctcagaggtggagaagatcgctctgaatttggaggggtgtgccctcagccagggcagcctcaggacggggacccaggaagtgggcggtcaggaccctggggaggcagtgcagccctgccgccaacccctgggagccagggtggccgacaaggtgaggaagcggaggaaggtggatgagggtactggggacagtgctgcggtggccagtggtggtgcccagaccttggcccttgccgggtcccctgccccatcggggcaccccaaggctggacacagtgagaacggggttgaggaggacacagaaggtcgaacggggcccaaagaaggtacccctgggagcccatcggagaccccaggccccagcccagcaggacctgcaggggacgagccagccgagagcccatcggagaccccaggcccccgcccggcaggacctgcaggggacgagccagccgagagcccatcggagaccccaggcccccgcccggcaggacctgcaggggacgagccagccaagatcccatcggagaccccaggccccagcccggcaggacctacaagggatgagccagccgagagcccatcggagaccccaggcccccgcccggcaggacctgcaggggacgagccagccgagagcccatcggagaccccaggcccccgcccggcaggacctgcaggggacgagccagccgagagcccatcggagaccccaggccccagcccggcaggacctacaagggatgagccagccaaggcgggggaggcagcagagttgcaggacgcagaggtggagtcttctgccaagtctgggaagccttaaggaaaggagtgcccgtcggcgtcttggtcctcctgtccctgctgcaggggctggggcctccggagctgctgcgggctcccctcaggctctgcttcgtgacccgtgacccatgacccacagtgctggcctcctgtggggccactatagcagccaccagaagccgcgaggccctcagggaagcccaaggcctgcagaagcctcctggcctggctgtgtcttccccacccagctctcccctgcgcccctgtctttgtaaattgacccttctggagtggggggcggcgggcagggcttgcctttcttagtctgatgccaagcaaggccttttctgaataaattcatttgactttcgaaaa

SEQ ID NO: 691251 - DNA, 137 bp, Homo sapiens
tgtcacttgtgtggcaggtgcacatgttccaggtgtcaggaaatgctagctgagtgctgaggccgggcggtagagagcggggctctcactggttttttggtgtctgctgtgttgatgcttggacgacgggtaccgag

SEQ ID NO: 691252 - DNA, 549 bp, Homo sapiens
agcaggaggcccgcagacaggagcagggcccggacgtatgatctggctgtgcccctcctggcggggtctgcagggccgagggggccacccagagctcatgtccacctcccacctgatgccccagcacccgggaccccagaattccctgagcgcacaccctgaaacccccttcgagtcctcctgaggccttcccagccctggcgtggaggctcccaggcccgaggtgggaggctcctccctcccaaagctaaacagggcttccggggaggagaagtggggggagcttcgggctcaactctctcccgggccccacaaaggtgagggtgggcctggcagggaatggccgctggggagcaagcctgcatggcagccgtcagcctcctgcgtctcaggctccagaggagaccccttcagcccccctgcgtcttgggctccagaggaggccccttctccatgattcacccgagagaagcaaggcatggctgtccctggggtccccgtgaggccttggaaggacgtggaggggcaggaagaagccagaagacacag

SEQ ID NO: 691253 - DNA, 244 bp, Homo sapiens
gaccttctctggctaaacatgctgatatcagcaccctaccctatggcgcatggcagagaccagaagacaggctctgaagctggaggtctccatcctggctgtcagagtccctctggccctccccgtcaaggctgcctcgggctcaactgtgagcttacccttatctagcaaattgcactcaggattgaacttggggcatggacaagtctgagcactgagcatggggtttctcccagcacaagtg

SEQ ID NO: 691254 - DNA, 104 bp, Homo sapiens
gagggctcacgggggacgttggccatcgatcacaggacccagtagtgcaagggccatcacgggccaggagcttggtctgggctccttgggacattggaaggctt

SEQ ID NO: 691255 - DNA, 327 bp, Homo sapiens
ctacagcagctatccaagcgcgtgtattcatattaattaaaatttgaaatctgaacacgtcagaccctctcgtatatatcatgggtcatctgacccctgtccgtctcctgtccctgcgttcatgtacggggccttacttaaactgccttcctggcttagctcagatggcagatgagagtgtagtcaagggcctgggcacaggagggagagctgcagagtgtcctgcctgtctagggtggagggacacctcttttgggtgtgtagacagcttggttccctttccctagctccctggtgggtgaatgccacctcctgagatcctcacct

SEQ ID NO: 691256 - DNA, 182 bp, Homo sapiens
catgttggcgcacgtgtcggggtcgggggggacagaaatggattttcttggcaataagcggaccctgggactccggggggcctaccccaaactgaagggcttccgtgaacacccccgtcctccgtaggggggcagggcagcatggcgggatccgtgggtcccgtcatcaagcacttgtggtt

SEQ ID NO: 691257 - DNA, 307 bp, Homo sapiens
  misc_feature (48)..(48): n is a, c, g, or t
  misc_feature (67)..(67): n is a, c, g, or t
  misc_feature (92)..(93): n is a, c, g, or t
  misc_feature (128)..(128): n is a, c, g, or t
  misc_feature (242)..(242): n is a, c, g, or t
  misc_feature (258)..(258): n is a, c, g, or t
  misc_feature (301)..(301): n is a, c, g, or t
cctctgaaaccttggacataagtaaagtgaacaaactgtaatttaaancaggatggtaatcaaaagnaacttgagatctctttataacatgnncattaacttcaaaagaccactggtaaaaaaaaccnatctccaagaccaagtaagttagagaagtcttgattttttagacttcactacggagttctgtacaccctttgccctgatgaatttgaatgggtttgatttgcaaatttggattnacacccattgttttgnaagcacatcagctgaataaagttaaggtttattttatttaganaagcaa

SEQ ID NO: 691258 - DNA, 294 bp, Homo sapiens
cgagaaatagaacctagtaagcccccagtaaagcaggggttgctggttgtcacgcaggtcctcatgtgaggccagcaggctggtctggcagtgtgggcaagccaagtggtgttgtgcagaagaatgcggggagcaggggcaaggaccccaacagcgttcttctggggatcttggccatcgtgccggcacgaggacaaagatcctgatcgtggcgggcgtggtgtacctgtagagccggccttatggtgatcgtgccggtgtactggacggcccacaacatcatccaagagttct

SEQ ID NO: 691259 - DNA, 612 bp, Homo sapiens
ctatattaattcaacatattatttattatttcttaatataataaaatttgaataattctatatttaaaaaaataatcccaccaaaattttattctaaacttacaccaaccaaaaaaaaaagagggcgaaaaaaaaaaaataaaaaaaaactcactacacaaccccaacacaaaaccctcaaaacaaaaaacaataccatataccacaaaaaaccccacaatctaatcaacccctgcgacaaaaaaacaaaaaaaaaaaaccctctttttaaaacaaaaaacacccccaaacccccccttaaaaacaaaaatctttcacaaaaaaacacaaacactctcgcaacaaaaaaaaaaacaaaaattctatcacactaaacaaatccccacaccacaaaaaaaaaaatcctctccattataaaccccaacaaaaacaaaaaaaacacccacactccctccagccaaacaactactccggtaaatatcacacgaccccctccaaaaataaagaaaaaacaaactccctaaactatcaacccatcaagacaaaccccaaccccgtcggtctcttcacaaaataagaaccctctaaacaccatacaatgacacacaaacg

SEQ ID NO: 691260 - DNA, 423 bp, Homo sapiens
ctccctcaccatttgtccacaggaaattccttgtggacaaaggacagacagaactcaaagtcgtcccccgagactcacctgagacaaatgcatatccaattgcttcctctgccctactgtttatgtaaaaatgcagactcactgagccacactaaactgtgtattcggtggaaggctggtcaaggactcaaaagaatccaaccttttgtctcttatctacttctaatctggaagcccccacttggagttgtacaatatgtgtattatataccttacacatattgactgatgtctcatgtctccctaaaatgtataaaagcaagctgtataccaaccaccttgggcacatgtcatcaggacctcctgacgctgtgtcacagacgcttccttaacttagcaaaataaacttcctaaattgactga

SEQ ID NO: 691261 - DNA, 397 bp, Homo sapiens
tgagatagagtctgcagtctgtcgcccaggatggaatgcagtggctggagtgcagtggtgcgatctcggctcactgcaacctccccctcctgggttcaagcgattctcctgcctcagcctcctgagtagctgggattacaggcaccctgcaccacgtccggctaatttttgtatttttagtagagacagggtttcatcatgttggtcaggctggtcttgaactcctgacctcaggcgatccacccgcctcagcctctcaaagtactgggattacaggcgtgacgaccacgcccggccctgaagtttaattcttttaattccacttatacacgagttacagaagcttttgctttgtcggctcctgggttgacaatggcttatacgtttttggtcgacg

SEQ ID NO: 691262 - DNA, 451 bp, Homo sapiens
gccccggcccagcacatcagtgaggtcatcacacaggactacacccggcaccaaccacagcagctcagcgcacccctgcccgaccccatataatccttccctggggcacagactgaccacgatcacatggagacatccgaacgacacaccacagatgaaacacatacaatacaacgaacggacgagaagacacagagaagaaaaagaaaaacagagaaaaataacaacaacaaaaaaaagaagaggacaaagaaggataaacaaataaaaaaaaaaaagaaagacatacaagaacaagagagacagcacagagaagacaagaaaaagaaagaagaaagaaaaaaagaaaacataacaataaaagaatagaaaaaaaacaagaagaaacaagagcaagataaacagaaaaacaagaaagaagacagaacaaaagaagacataagaaacacac

SEQ ID NO: 691263 - DNA, 314 bp, Homo sapiens
  misc_feature (13)..(13): n is a, c, g, or t
  misc_feature (63)..(63): n is a, c, g, or t
  misc_feature (71)..(71): n is a, c, g, or t
  misc_feature (77)..(77): n is a, c, g, or t
  misc_feature (121)..(121): n is a, c, g, or t
  misc_feature (132)..(133): n is a, c, g, or t
  misc_feature (166)..(166): n is a, c, g, or t
  misc_feature (209)..(209): n is a, c, g, or t
  misc_feature (218)..(218): n is a, c, g, or t
  misc_feature (224)..(224): n is a, c, g, or t
  misc_feature (227)..(227): n is a, c, g, or t
  misc_feature (309)..(309): n is a, c, g, or t
tacagggataaangttgtaaagcctgaagctcaatcaactggtgttggaaagtctcaaagggngtgaaggnttgatntcaatggtctagaacatgtactgtaatttaatagaagagatggncgtcttaatanntaatgatttaaaagaacttcccagtccttgcgnagggttcagtccaagaataaatcaaatttctgaacgcattttntgctacatntgtgtntantttgcgatcctcaggtgttcgtgccaaatattctctctcaataagtccttcaatacgtttcttaataacaactggacttggnaagaa

SEQ ID NO: 691264 - DNA, 134 bp, Homo sapiens
tataggtcctcagtgtagtaagaagagtatgcacaaagatacacgctgcactctggtcatcggcgctgaggtagacagagaagaggtcctgagaaaccaggccctggttccagatgttgtcaaagatgggtgtg

SEQ ID NO: 691265 - DNA, 278 bp, Homo sapiens
cgatttccaagtggacttcgatgaccagtacatttgtttctgcatctggggatagaactatgaaggtatggaacacaaagtacttgtgaatttgtaaggaccttaaatggacacaaacgaggcattgcctgttttgcagtacagggacaggctggtagtgagtgggctcatctgacaacactatcagattatggggacattggaatgtggtgcatgtttacgagtgttagaaggccatgaggaattggtgcgttgtctcgaaggccgcttactatttt

SEQ ID NO: 691266 - DNA, 224 bp, Homo sapiens
tagtcgcaacgcaggaatagtacccgcattcccaggctcctgaatcgctggatagtacagcgataaggttcaggctggagggcgttgttcaccccgataagacagagaacgaagtatccagccatgaacgaaatagcagataatacctatgcggggttacggtaatccagccatatgccgccagagacttcatcgcgtcgacgagacgcgataagagacagcgg

SEQ ID NO: 691267 - DNA, 260 bp, Homo sapiens
  misc_feature (3)..(3): n is a, c, g, or t
ggnctctcagctcatgctggagcgtgcggaatctagctagatggtgtggactgttcctcagcctcctcagcttgtgtcttataagatttcagtttggcctgaagtgtatctagcaaatcttgaagcccgagaatattcttgtctatcttctgtccgtctggatgaggctgagcagctgggcctggagggtgggaagaagcagatccagaaacgggaggtcgagggtacgggagctggaaggagaggatcacttgatgcca

SEQ ID NO: 691268 - DNA, 165 bp, Homo sapiens
agacccacacctgcctatcatagatgaaacagaaaatgccctttccctccgtgggctgatgggtgtgaggggacggatagccgatgatccatgctatctctcacacttgctctcactccaaattggtgtcactcagggaggaagggagaaccatgcacagaaact

SEQ ID NO: 691269 - DNA, 159 bp, Homo sapiens
agggagatggcgaggggttggtcaggttccctttctcaatcggggggtggtttacagattggttcagttggtgaaaattcacggagctctatgaacaattataatatgtacatttttttcggtaaggtgtattaaatttcaataaaaagaattcacact

SEQ ID NO: 691270 - DNA, 796 bp, Homo sapiens
taaaaacaaaaactacatgattatctcaatagatgcaaaaaaggctttgataaaatccagcatccccttatattaaaaacccctaataaactagactttgaaggaatgtgcttcaaaataataagtgccatctgtgacaaacccacagccaacatcatcctgaatggggaaaatctggaagcattccttttgaaaaccagttgaagaaaagaatgccctctctcaccactcttattcaacatagtattgagagcaatcaggcaagagaaagaaataaaaggcactgaatagaggaagtgaaactatccctgtttgcagaaaacatgattctatattttaaaaaccccatagtcttggcccaaaagccccttgagttggtaaacaacttcagctaagtttcaggatacaaaatcaatgtacaaaatcagtagcattcctatacacccagcaacttccaaggcaagagccaaatcagaaacacaatcccattcacaatttcccccaaaatagtaaaatattctaggaatacagataacaaggagataaagatctctatgagaactacaaaaactatatcaaagaaatgagagagaacacaaacaattggaagaagcattccatgcttctagataggaggaagaatccatatccattaaaaatggtccgtaacggttaaagaaatttatagattcaatggtattcctatacataacaattaaattcttcaaagaatagaaagacgattttaaaatttcacatgaacaaaaaagagccaattagcaaggaatcctaagca

SEQ ID NO: 691271 - DNA, 967 bp, Homo sapiens
gggtgtgagaggtgcctcgctctcaacggcgagattcttcaagtcaatcactactgtcatcagaccatcccggtgtcctccctctccttcatcacttgaggaatgatcacgtgcaatcatcaatccatttgcgaggaatggctattgagagggcccattcgtcacccggtaggaatagtgggctttggcagaatctaagtagaagtatggattagtattaacttgtaaagagcgaggggaatatactagaagaatgttcattcatctgagtcctcatgcgtgtggtagacgcaagggttgtgttgctaggagccaatgattggtgtctatgggactatttcaatgtgatggggaattttggggatcaatcctatgtacttaggaagaacgagatgctgtcttggtctctgtcgggaggaggctatgtcttttagttaggatgttctataatgtgattatgagtctaacctgatttatggtaggtaatataaactgaatgtgggtcatgggtttatgatggtaatcaatggtcatttggaatataggttgcataagatgcaggtagagaagctggggggggcgaattatagatgatagatttcttaactaagtctttcacggaagtcaaggttatagttaaaatgttgctaaatgtgcttgatggtgttgaatgttcggctgattaaggttcaagatgaacttaggataagagattcggtaaatcgatgaaccttgattgctgaaaagtccacagttggtgtgaataagtctaatgggcagaaaataaacaggggcgggggcgagggtcctttgaaccttttaacatgcgggtatactgggagttttacgggaaaatttggtgtgtccaaaagggggcaaggttcttttaaaaacgccttaaaagaatttcaaagttggtcacatagagaaaataagggtttttattaactgaggtgatgaatatatg

SEQ ID NO: 691272 - DNA, 186 bp, Homo sapiens
cggacacccacagcaaattgtagccatagccgttcgtgtgagttcatttggtgctccgcttgtcggactggcattaggaactgcaccttctctgggacgaccctaaggtacttacctgggggcagactgatgctaacttgtcatgcgtcctcctcaccactggcgacttgaagtgtattgcctttt

SEQ ID NO: 691273 - DNA, 410 bp, Homo sapiens
gacacttgtgttacaagggacctgagtggacctgtctttctactgaatagaacaacgaccgctgacaacagcagactatgaacgacctacatctgtaagatgactgaccatatgccgacgaccagaatatattggacctagatgatcatctccagcctcgtaggtgctgctacactacatataggtgctgtccggtgacttgctgccagattctactattccatcagcacctgttgactagtacgctatcgctgactcaattcgcctgagtattgatgtatcagatatacgacacgagacatgtatcgaccgcataattcggatgaccggctgacttatagctatgtgatcaagacttagagctggactaccgctgagaccgactttcagtaggacatgatgctatagcg

SEQ ID NO: 691274 - DNA, 142 bp, Homo sapiens
  misc_feature (21)..(21): n is a, c, g, or t
  misc_feature (45)..(45): n is a, c, g, or t
  misc_feature (89)..(89): n is a, c, g, or t
  misc_feature (97)..(97): n is a, c, g, or t
aattttaaatacatttatgcnagttaatattgctttgctgatgcnatttgcttatttgatgttaaataatgctattgtaaataaagaantctgttgntattgcatcatttaataaattttaatgcttcgggttttacatggc

SEQ ID NO: 691275 - DNA, 149 bp, Homo sapiens
  misc_feature (1)..(1): n is a, c, g, or t
ntaggtgatatctactctggtcatctgcacatgtgcatgtgtgaatgtgcagaatcccaatcaggatgcagctccctgcaaggaggcaatagttgtccccttaatgaaggatacaatctttttaagactttacacatgcattgcaccca

SEQ ID NO: 691276 - DNA, 128 bp, Homo sapiens
tcgttgggtgaaggtgagtatgttctgaactgggacaggtcttgtctgggttggaaacggattctcaagaagaagaaaagacagaagcttgacttctgctaagcggtacatcgagacggacccagcaa

SEQ ID NO: 691277 - DNA, 475 bp, Homo sapiens
tctcaaaaaaaaaaaaaatcatgatttttcaggtttacaaaagtatattttagacttttttttttttcagatggagtttcactctgtcacctggctggagtgcagtggcgcaatcttggctcactgcaacctctgcctcccaggttcaagtgattctcctgcctcagcctccccagtagctgggattacaggggcccaccaccacacccagctaatttttgtatttttagtagaaatggaattttgccatgttggccagtttggtctggtactcctgacttcaggtgatcagcccaccttggcctcccaaagtgctgggattacaggcataagccaccgagccccggtaatttttttaaaatactggtatttaacgtatggagagtttgaaaattttgatcaaatttgatagtgagtttctgagttaaagaaatggcacagtacatgggcatattgcatgacagtgaggttaaaa

SEQ ID NO: 691278 - DNA, 361 bp, Homo sapiens
accaccgccctatatacctacctttcctctgcctctttcactcttactcatttgcacacattttgtacctcttgaatttttctagagacactgagctattaattttttcatatttttttctcctgatctctagattttgtaatttctatggatataacatcaagattctgtgtccttcttctgacataagctgttggcttctttcaggtgcctttattagactgaagaagtccttttttccagcaccatttattgaagatactattctttcctcattcttgttcttgacacctttgtcgaagattagttaaccttatatgagtggccttatttctgtgattggtaggtatgatgaaggacg

SEQ ID NO: 691279 - DNA, 1020 bp, Homo sapiens
ctatattaaacaactacgacctgatgcaacatatcatctaattacatcaacatctcccgactgtttggtagcatctcaaatatcccacacacatgcgcgtctttatgatgatggtctaccaatctgtctgataacccctgcaatccttgttgcccctatgtctctgtgtggatattaaacccttctattctgttgtacaaacagactcttttttacaccctcggtccctgtaattccccttcatccacgtccctctatcgccgggttcttggcgcattccctcgggacatcccttctctccgccctccctgtggctgcgtggtttcccccgtcaactggatctcgatcagactcccgtctccttgggaaactgtccagcgaatcgcgtctatttccctcttctaaggggagcccccccgcagctgttccacaacaaaagaaggtcgtctccccctgcgcgctgaggtgaaaaaaagcagcccaccaccagcgatttctggcttctgtacacacgatacgcgccagtgtctccttaggtggatcaactgatacatactcctagctgattcactacaacaagtagatgattgcctactctatcttacagaaccacatcatcctatgttacagtgcgaagcaagcgggacaacaaacatacattccaccaaacaaagcaactgttgggtcagattgtatttcgcacaatgtcgatttatcccccgcgctgaagcatgtctctgccgcctgcgctgggtatacaaccggtcatacaagacgttgtgaggtccaacgaatcatgacgagtggactcttcgtatattcaaatcacaattttgtggctcaccgcacgacacttggcgtcccctgagtacgcggggaaaaccacgcgtcgtgtccacccaacaggctggtgtttgtaacaaccccacattctttcttgggtatgatccctgttgaaccaaccaaacattcccacaaaggccccggttttaaaaaaaattaaacgcgccccacataaca

SEQ ID NO: 691280 - DNA, 947 bp, Homo sapiens
  misc_feature (739)..(739): n is a, c, g, or t
ctcagcgattgcatgatagtagtaaactagtctcctggaaataatggatgtgaggtgcttctagaatatgttacagaatttcagacttaacctattaatagataaatggatcttgacttaaggtgacaaaaatgaaaactttgattattgcttaaaaatgctgtgccagatattgtataactagctcctcgtaatacattttggtattgttgcgatttaataatcaaatggaaccttaagcattttaagtgtgcaacatgttcagggagaagtatgctttgagtagtatacatgtctcagatctaagttgtaacaccaagtttgaatacttgtggcttattcttggtttaacttaggaaaactggttaaacaatcccccattggggcctgtcatcattttaagtaggtgacgatgtgctttctgagaaatgcttgccagggtcgggagtcaggctgtacatttcttagtaaagaattgaaatattatgttcaaattcttgagcctttttgccagttgtgtaaaaagcaataatttgacgatgatttctcctgtgtagaattttttgaaaaatacccacaggttggagcatctttcttatgggttgcacgaatgaatttatattttaaaattagattaagtagaatgtgaagtaccatttgcagatgtacctagttttcgttccccataggtcatcttggggtggcctccgattgagtgtatatcttgaaaaccattggnttgctaaataggcacgcaagggcacgggtccacagggacaattctaagttaggaccctgttttgaaaagttacctcattatccccatttgagggccctcgttttccacaggttctgttgaaaagcccggatttctttaacccggggctgtacaacgctgaaacacatggcggggaaaaccaccgggacgtccattctacttcaacacg

SEQ ID NO: 691281 - DNA, 631 bp, Homo sapiens
tagcgcgagggtacgtggatatagggaggatgtgtgcgattggaaattgtgtgtcattgcttctaggccctcttagatgggcagaactaggaaatatattgtacgtatactaacacacatgccacatgcctaatttgtatatttatttagccttactggaagcattcctttttttttgagacagggtctcactctgtcacctaggctggagagcagtggcataatctcagctcaatgcaacctccacctcctcggttcaaacaattctcctgcctcagactcctgagtagctgggattacagctgcccgacaccatgcctgactaatggttgtatttttagtagagatggggtttaccatgttggccaggctggtctcgaactcctgacctcaaatgatatacccgcctgggactcccaaagtgttgggattacaggtgtgagccaccctgcccagccttacatcatcattcttgagatcgcaatttagatagctctaatttcaagagacctttcctgatacttcaaagtgttctgtaccttttccatcttgacacttcgaaccctagtattgaaattgccttgtagtgcattggcattgcccaaaagctgtttatttcctcactaggcgt

SEQ ID NO: 691282 - DNA, 290 bp, Homo sapiens
gtcgcaggtcaactggatcttaaaaaagtagcaaaagcgctgggtgccaagaaagttgagatggccgatccgatggtcgcgcagttcgacgggatacctggttggggggattagcccactggggcagaaaaaacgtctgccaacgattatcgacgcccccgacacaagaatttgccactatttatgtttccggcggcaagcgcggactggatatcgaactggcggcaggcgatctggcaaagatcctcgatgccaaattttctgatatcgcccgccgcgattaagcattg

SEQ ID NO: 691283 - DNA, 285 bp, Homo sapiens
aaggcaagcgtactgacttcacttcttactgaactcatgtcaagctcgtgtagatattttcaactaagttgcttgttactaaaatgagacttaaattaataaacttgcattgtactctcttctttccctggacttccctttaacaaagatactaagaatatgaagtgaagcagctaagagagagacaggaaacttattcacaaactgggtattcaggtctctagcgttcagaatccctgctccaagtgactcaagtagagagctacagaaactgcccttcacttt

SEQ ID NO: 691284 - DNA, 509 bp, Homo sapiens
tataatacagcaaggagacatcaatgtggttcatgctagaaggcgtcacccagtgtggacatgttgagcacattgatggcggttgcacagcctcatataccatatagctttggttattcggttcagtgagtgccggtggctaccagacattgattcatggggcctcggcagtcgaatgaggaaagtctcttcagaggagcatccatgggtgctgttccccttgcagctgtaacactggcggccattctgcggcagattttcaagctccaggattgggccctcgtagcatttggtggtgttgcagcatttcaggaagtggaaggtgtcgttgttgtggaaaacattggagcccgggcagccgggaaggtagccacagccacggaggtggaggtcatcctttggtcgcccttcttcaccttcctggatccagtgagtcccacatccaggcaactgtacttcaggactgacggcactgtaggctctgggtgccggcccctctcacagctcat

SEQ ID NO: 691285 - DNA, 735 bp, Homo sapiens
  misc_feature (24)..(24): n is a, c, g, or t
  misc_feature (141)..(141): n is a, c, g, or t
  misc_feature (143)..(143): n is a, c, g, or t
  misc_feature (185)..(185): n is a, c, g, or t
  misc_feature (222)..(222): n is a, c, g, or t
  misc_feature (252)..(252): n is a, c, g, or t
  misc_feature (284)..(284): n is a, c, g, or t
  misc_feature (288)..(289): n is a, c, g, or t
  misc_feature (347)..(347): n is a, c, g, or t
  misc_feature (353)..(353): n is a, c, g, or t
  misc_feature (358)..(362): n is a, c, g, or t
  misc_feature (422)..(422): n is a, c, g, or t
  misc_feature (431)..(431): n is a, c, g, or t
  misc_feature (470)..(470): n is a, c, g, or t
  misc_feature (508)..(508): n is a, c, g, or t
  misc_feature (517)..(517): n is a, c, g, or t
  misc_feature (552)..(552): n is a, c, g, or t
  misc_feature (583)..(583): n is a, c, g, or t
  misc_feature (585)..(585): n is a, c, g, or t
  misc_feature (700)..(700): n is a, c, g, or t
ggaatagggactttaataggtacngagtttgtttgggataataaaaaaaaagtgagatggggctgggcacagtggctcgtgcctgtaatcccagcactttgggaggcggaagtgggaagatcacttgaagtcaggagtttnanaccagcctggccaacatggtgaaaccccgcctgtcctaaaantacaaaaattagccgggcatggtagtgggtgcctgtnatcccagctactcaggagactgaggcaggngaatcgcttgaccccaggaggcagaggttgcngtgnnccaagatctcaccagtgcactccaacctggggaacagtgggagtcctcaaaaaaaaanaaaaanaaaannnnnggccgggcgcggtagctcacgcctgtaatcccagcactttgggaggcccaggtgggaggntcgcttgancccatgttggacaacgctgtctctaccaaaaaattttanccgggtgtggtggcacacgcctgtggtctccgctaggntgctgaggngggaggatcacctgagcccaggaagttgaggctanagcgagctgtgatcgagccactgcacaccangntgggcgacagaatggggcccagtctcaaaaattacaaaataagaaaagtcccattgttcccaagatggtttcccgcctttaccccagatgtgtgacctgagcaaaaaaacctttntgtacccaactgcctcatctataaaagggggggaa

SEQ ID NO: 691286 - DNA, 1089 bp, Homo sapiens
cgcctgcgcgcctccgccttgtgagctcggggtgtttcggggactgcgtgcacaggcaggaatggcgctcctctcctgccccgcctgacgcccggccagccctgcttcgccctgacctgtttcctcatgactgccccctggccctgcttgccgactggacgtctgccccctgtgtcgtccgtgatttaacactggagaaccctggatcggagtgcctgcgcggggcagtgaggaggtgctgaccctgtgtcgtgtccttgctgacgcctctctgtgccctggcttctggctgccatcgagcaggagaggccaattgaccatctgctagaccccaagctgcaggcatcctgtgccttggttgcaagcctgtgcagcaaccagaaggacctccctgacaaactgcctggcctgaccacaggggacggctggagggctgggcggggggcagtgctgagctgcccggggcaagcacatgccggaagggaactgaacagcccgcaagaaggcgcggccctgccgaactcgaagacacgggaactggaaccagaacagaacaaaaatgggagccagaactttcccaaaaggtggcacaacaagcctgtccggtgacctatggagactcgcccgttggaaaacttgcacgaaagtatgtgaaccaaggcctggacacctaccacatttgaccgtatggacaagtgaccccctttacagagaaggtgaacatcaccagaaccgtaaaagggtgagaattataaacccaaagcgctaactttcacaaggatatgatagatggggaggcacaaaggtttgtgaaacccgtttggggtataaaataaaagtttacgaaggtttccgatttgggcgagcaagtttttaaaagcagggatttaggagcgtcgccattttgggctaacatttggtcgtataagagagattatagtggggagcgaatattataaaagaccaaaaattatgagagaagagaaaacggtagaaaaaacggtgaggattaaaaaagcgcaagagcactgataaaaagaacaggagagccacattatatgatatgggtagaaaaatttggaaacagag

SEQ ID NO: 691287 - DNA, 1141 bp, Homo sapiens
ggcctggccggtgagcaactggctctgctggccatgtgctgagctgtgcgagcattcccccgtgcagctggctgcggcccgtgctgtgcctgctgcactccgacgcagtgctgtggacgtggcctcggccatccaacttcctggtgcctttgacgctgctgcacttgcacctgtgacctgcggtgctgagttctgggcctccagtggcccggcgcagggacgccgtgggtgctgagcggcacctgctggtcctggacctgcgctgcctggagcccgagggcgccgccgagctgcgggctgtgactcgcaaccctgtgcctggcaggtgacgtgctggctgtgctgctgctggctggggagctggccctggctcggacggagcccggcctgcgggacgccctgttgacgcttcctacactgcagccgcttctctgcccctaatggccatggcccttgatgcgatgtcctatcccgataggaccgtgccgccgtccgaccgagcggccatccagggatgcttgggtcaccttaaccggcgatcgggggaggggaccccagggggattttgcatggtatggcttcccgaggcagacccagcacgggaaacgacagaagcccataccgatgtacaccccaaggggggccaagggctagatccgtaaaacctgggccgttacattcccccgttgacgtatcggagcagccgccactgcattgttcagagtaccaacagtaattacaggctcggttattaggagggttcccaagactggcgcctatcaccagggccgtgggtacatgaaagggtggctaaggccaacccatgggggaaggcacacgacgacgggtgtcccacaaataagaggttaccctatacatatcccacagcactgggtgatcaaggaccccgaattccccccgatacgcgataaattcgttggaaattaggccaatttggggggaccaaattcggaggaagaaaatcagtggggagattaacagaggaggttgaaaacgattagggagacccccaaggggaagagcccataaggagttgattaggagcatagtagaggacccattgggacatttgacttttggattgcgtgtgccaaaggggagtggaagtaacaaacagtgg

SEQ ID NO: 691288 - DNA, 489 bp, Homo sapiens
aactcacacatataaacagacatctaacacttctcaacatgaatataaatggttggaaaaaatgtcattatccagtattgtatcatttatattataagaaaccgagtctacactctattgcacaggctggagtgccctggtgcgatctcagctcactgcaacctccgtctcctgggttcaagcaattctcatgtcccagcctctccagtagctgggatcacaggcacctgccaccatgtccaattaatttttgtatttttagtagagatggggtttcaccatgttggctaggctagtctcgaactcctggcctcaagtaattcacccgcctcagtctcccaaagtgctgggattacaggtgtgagccactgcgcccggcctattacggtacttttttagcagaaacctgtgaaagcctgtgagcaaactctatacctcacagggtttttttccatatatatgaaatgagggtctcttggccaggggttc

SEQ ID NO: 691289 - DNA, 248 bp, Homo sapiens
cctaaccaagcctatgaccaaccgctttgtgaaattgtcagtgatggggcttacagtggcacttggagcgtctgctctggctgtgaggaaaagtgccctggaatgggcccctaactgtcagttgaagctttttccttcaaagccagaaaagaccttcctgttacatcacattaaggtctcacccttccatggaaggattggtaggcgtggcatataatctgtcaagggttggggcttccactctgaat

SEQ ID NO: 691290 - DNA, 711 bp, Homo sapiens
tcagaggactcctgcatgcccagaggtacgtgaacacactcctgacactcatcccgcgtggtgctgggtctgcaggaagcaagctgcggcaggaagtgcacaatggggacatggagaccgtcccatggcatctgtcgcatcgctgtggacctgggcgaggaccactccgcgggccttgctggaccaagtagagcactggcagagtttcctgacactcgtcaacatgattatgttctgcacaggcatcccttggccactatcctgtcaatgagaccgaccagctccctaagcctcaccttctggtacacactgcaggatgatattctagtcctttgaggcagagaagcaggctgtataccagcaggtgtacgggccagtctacttccagctggtggatgtgcttctgcacaaggcccagtacccttctgatgaggaatatggattctggtcctcagacgagaaggagcagttccgaatttacagggtggacatctcagacacgctcatgtatgtctatgagatgttgggggccgagctgctcagcaacctctatgacaagctgggtcgtttgctcaccagctcagaggagccctactcctggcagcacacagagggcctcctctacggattcaatccatcgcagagaccattgacgtcacctattctgatgtggtgcctggctcattggctcatccagggatagatcagctg

SEQ ID NO: 691291 - DNA, 1257 bp, Homo sapiens
gctgcgatcaagagagcaccatggctcctacattggaccttgtgagcaccccacaccctccccccacctgtgcccttgtgcctgccacccagagccaatgagggtgctgctcagttgcatgggcctccgcagctggacagagagtgggtggagtggagggacagacagaatggccaagggccgatgtggtgtgcagaggtggggagtgtggcgaggatggggacagaaagcgcacagaatcttggacacaggtcatctattcacttgtacaaagatgaatgtgaagaccatcaaagcaatgacaagaaaaaatgatggaagaaagaaaagtaacaaatacaaaagaaagagatgaagataataacagtaaagataacatgcatggaatgaaaaagagatagacaaatacgtgatgaacagaaaaagaacaataaaaggaaaaaaggggagcagcagaggacggcgcaagatgcacacgagaagaggcaccagaaagcaacgcaagcgccgagaagaagacaaggaaagaaagaagcgcactcgcagacagaagtccagaaccgaggaacagaggaaaccaagacgacgcgagagagcacgaacagcaagcgcagccaagagagagaaaaaagcgacgcagaagagacagagacgaagaagacaaacagacaaagaggagaaaagaaggaggaggacgaacgggcgagaagagagaacgagagaaagagaaagagaagagacggaaaagagaaacgaagcaacagacagaggcacgagaagagaaaaacacaggcgcacgagccaagacaaaaccgacaacaagcaagaagagaggaccagcagccaagagacaagaagaaacaaaagagcacagaagcacacacaaaaacgatagaaaaagccagaagcggagaagcaagaaacgaaagggggagagaggacagtatgagtcagcaaaacagaggagaggacaaagatgagaaaacagtgatagaactaagtaagagtagaggacatgcacgataagtagaaacagaagaaaagaaagaaagaaagagagagagaaaaagaagagagtcagagaaaggagggcacgcacgaagcacagaagctagaacggctatgagaacagagaagcataagagaagcaaaaagcggaggagcaagggtaggtgagacaagaagtagcgagaagaaacagaaaaggagagaaagtaatagcaggagcaagtgcagacatctataatagctggacaa

SEQ ID NO: 691292 - DNA, 194 bp, Homo sapiens
atacgtataaatatcatgcgatgactgggcacagtggctcacgcatgtcatcccagcactttggtaggccgaggcaggcagatcacccgagcccaggagttcaagaccagcctgcgctacatggcagaaccccgtctctaccaaaaattagccaggtgtagtggcccatgccctgtggttccaggctactccag

SEQ ID NO: 691293 - DNA, 115 bp, Homo sapiens
tgtttttgtagatgtgatccatgcacactgctgttttccttcacacttcatttccatgtagataattcccccttgtctgtgaagcgtgagattaaataggtctttatctctttta

SEQ ID NO: 691294 - DNA, 956 bp, Homo sapiens
  misc_feature (764)..(764): n is a, c, g, or t
acaaccaacaaacagtacaaaaacaggaaaagcatggcattaaatagaccacaaaaaggatacctgactattgtatgagagctgaaaaagaaggcagaatatcatcctgttcaaactcaaattctttgacactctgcgcaaacacatgactatgaaagtgctgtgagtactgatttgggggttacaaaaaatagtaggtgagttcacaaatacaaaagctgaaaacaaggaggatcgactgtattttcgtagacaatctaatctcagaagatttcagttcagacaaaaatcatgataattactgtattacaaaagggcactagataggggggaaagagtaaaaatcacaattaaaacaaaggttcaaaattctgcagcaaccatatccagttacactttaatatgtttgcggcagactacattattgttcccaactcatcacccctccctatatctaaaacctttccccaagacaatgcagttcctcctgctagagatcaggtatatttatctatactatcaatgttagccatggacaaggtatgtgctttggctgactgaatgttagtggacatgatagaagcaatggcttaaaatgtacttccagaactggagtttccttgtgattctatcactgtgacaaaaacacattctcaggtagtccactgatccaagggggaacaaacacacagaaaacatacctagactctatctgcagctcgcagcctcaccaagccaggaacagtcaactcacagatatgttngcaaaaataaatgtttttcgtaccttaagttttatataattattgacctatagttaactgatatacaatatacattaatcttaaaatatcattatcccattaaaaatatttacattaaaaactgagaccactttctttcctccttttttttttttttttttttttttaaattaaagagccggggggccccag

SEQ ID NO: 691295 - DNA, 654 bp, Homo sapiens
  misc_feature (64)..(64): n is a, c, g, or t
gggaaatggcgcggggtccgctatggcggcggcagccgagggcgtactggcgcaccggagtganagcccgcccgaggacgatgccgccgtgcgagacagctgaggaatctaaggagcctgctgaagctgacatcactgagctctgccgggacatgttctccaaaatggacacttacctgacttggggaactgtaacgggcaccagtgagagactattaagctcctggaaaatatgaataaagtcaccagcttgaagtatcttgaagtgaaagatattgctataaacattagtaggaagcttagaggatcttattgaccagaaatatgctggactgcaggcttatctggatcagatcatgtgtcattgaagagcaggtagcagctctgtgagcaggcaggttacaagtgggatgcgtattcaaaaaaagctggaagccaagtacaagaagctggagaagcgatgagaaacttattctctatgggacagagtcttttttttttaatgtggaagaatgtcttgtaaaacctgaatcctgaggttgatgaattgtgaaaatcctcaaaaggaaattatgctggtcatcacaggaaacctctcaaggttcgagtaacactggaggactggggtattcctgaaccttcttggagacagaa

SEQ ID NO: 691296 - DNA, 495 bp, Homo sapiens
aaggcacagttcagccctagatctgcagatgctgtcctcggggtccccctgtttgacccggaggcaaagtggcctgttgcctagtcctgcctcagcgtgtctcgcctgcaaatccgggacctaagtggtggaggagaaagcctggatagtcccagagcttcagccccctttgtcaccttggcgtgtcccgtgctgcccaccgtttacttcctgtctgtgtgcctccgtagccccatgggtcctgtgttcctgtgtccctgatagctctccaaggtgactgtcctatgatatatccctttgcccacacctgcccaccagtattatttatgctctgcttgccggtgatggccgtgagctcacagcattcccagggtgatggctggtgcccttgcgaggagccctctgctggttccacactactccctacctaccctcacatggttcatggctatggagacttttgctgtcaataaatagtttggtttgaggattgca

SEQ ID NO: 691297 - DNA, 753 bp, Homo sapiens
  misc_feature (340)..(340): n is a, c, g, or t
gaccttacacggttaccagagaccatagataataattctgtgacttctccacttcagtctcttcagtcatgagaacatggttcatatcactggtctctgttatgtgttcttcaatcaccccaaaggttcgcgcagtaagtattacttgagcttcttcctttagtcagtccacaattatcttagatgcatattcagacaatgtgtccatacgttcttcgtgtactgtgactacagcgagtcatagagcagaacaaggtatgttcgagaaagcgtgcgggcagcgttactaaaggagatcctagttagaagtatattcaagcatggaaggtcgttacagcantagttaaagaactccaattactagacatttgattgagatgtattatgatgcttaactttagacgttttgatggggctcagaacaaagctgatgcggaatcgtgaactcagttgcttgtgatatgacttcttccttggtggcttgtcttggaggatttcattgaaacatgcccgtctcttcatatttcgggactttctgtcgcatccagccagtgtttcagcattgatagcatgtttggatgataaattgaacatgacgtccagaagaagcgtgaaaggtggattgtgcaagtttgattagaaatgcatgactgtgtgccaagattgattctaaatgaggtcatgtggttatgggtgcaatgcagtctcacccatatcgagcaagtgattgctgagaccatggagccttgctta

SEQ ID NO: 691298 - DNA, 222 bp, Homo sapiens
cctagggatgcacttcttgggatcttccaaatactccatcagtgtatcctctccccagatgatgcatttgctcttattggcggctgagtcagagtatccaggggcctgacctgtcttccacctgaaaagaccatggagatttggcccaatcttgtgctttcctcccttttcaacagtgtagcactgggaacacttcataataaaaatcttcttgcctttctc

SEQ ID NO: 691299 - DNA, 1043 bp, Homo sapiens
gttgcacaggagtgagacactctccctctatcaatcacggtgtgcatgggtcgacatagatgctagtcgtattaaggagtctccaggcatacaggagctgtacgtgctatgctcacgtagcactgataggacacagataagatttaacggattctgctatgtagaagttcgatgaagtggcttcccttaaggaaggcttggcacaatacgatggatgcaacgtagtatggtgcgcatcgtgtcaagtatcgtcgctgggactattgcataggaaggacatgcacaaaccacagtcattagataggtggcttaggtcattcatgcatggcagggtgggaacctagcatggaccaggaagggcgtctcaagggtagtgagcgtccgtcaacgggggccaagtggaggagcgtaaggtccgccccgagagccaggacccgggccgtaaacgagagcaccgcacccactgacgcggaggccaagagcggtgaatatcacaaaagcaactgagggccactgacgccacgatacactgagtggtgacggtccccgagagagcacgtggggaattataacaaaagaaagaaaaagaacccaaaaaaggaataggaaggggaccaaacgcaaagccaccgcacgaacggaacacaaggagaaccataccgacaacctcgtagaatacgccaatccggacaaacatggtccggccagaagcggaccccccctatccagaggccaacaaggaataacgccaccagaaaaacccaccaccaacgatacctgcacacgaaaaatccctataccgacggaaaggggataggacacccaagaggacccatataatgcgacgcaacgcgcaaacacgcatcccggaaaaccacaacaacaccaaagtgggaacagcagcacacacgagaccaaactaggaacagacaccatggacagaggcagttgagcggcaagggcgacaatcgacgcggccacgcacgacaggggaggaacccagaagcccagaggcacaccccagcacagaccgtgagagcgga

SEQ ID NO: 691300 - DNA, 159 bp, Homo sapiens
tgtctgtctatgattactctagggaacttggcagctgagtgataaaaagactgcagagtgttgaaaggtctaactcaacctactaggtggacaaagcccacatctgcttaatacacttgattgggagagctgtggaactgcccgtggctaaatccgccc

SEQ ID NO: 691301 - DNA, 555 bp, Homo sapiens
tgcctggagggatcattagcagagaatacttagagaaaccacgtgagagatgccactacagtccagtgcaatgtacaagaagataacttaaggcagacaggaagtaagaatctaaaggacttagttcctaactataagctatgatcttagaagaggggattttccgctggctggacttacagtataatacaagataaagtaacacagaatagatcagtccgggttagagggagaggggaaaaatcagtttgagacagttggatacaaggtatctgtgaaaatccaaagaaccaagtaggtaaatgaaaaattcaggtctcgggttcaggagtgatctgaagatacagtcagaaagattggaaagaccgggcgccatggctcacgcctgtaataccaacactttgagaggtcaaggtgggcggatcatctaaggtcaagagttcgagactagcctggacaacacagagagatgctgtctgtacaaaaaaatttaaaatttagctgaacatggtggcacacacctgtagtcccaactactccagcgtgctgatacaa

SEQ ID NO: 691302 - DNA, 891 bp, Homo sapiens
caccatcctctgcattgacttgggcactgacatggttcctgccatctccctggcttatgagcaggctgagagtgacatcatgaagagacagcccagaaaacccaaaacagacaaacttgtagaatgagcggctgatcacgcatggcctatggggcagattgcgaatagatccaggcccctggcgatggcttcttttacttactcatagtagatcaactggctagacaacgcgattcctcctccaccttcacctgtcgggcctccgcagctggaccacgggatgacctgctggatacaactgatagtggaaacacagctcacgagatccgtcaacagagacctaatgcagacagcaaggacacctccgtggagtatccacctgccaacacaaaccactatctatcgcaccacgctatcgtaggatgagtgcacgctgcggccgacttggtcactcttgctcacacctaggaggccccttcgcgtctaaccgaccaccggagatcgaccgacagcacgagatctatgcatcatttcttggcccctacttacagacagaacgacagattcctaggcacaggtcatcctctttgcataactaagccccagcaaacatgcgctcgtcccgatcttctcacccatagtatttccaccatctaacatacttcacactaggacacggttccctcgttgcctttcccccattactcctacatattccatcattccacaaatcatacaacacaactccacgaacaatccatacatcaaccgctgaccgccctagaccagctatgccttgcacaaaagcaacctcatcaaataaccccccacgccatcacacccggagtagcacaaacgccaaacatttcacatctgaaaccaactccaaaa

SEQ ID NO: 691303 - DNA, 880 bp, Homo sapiens
tgggcaccccattaaagtgcagtcccctccggaaaaaaaaaaaaaaaaaaaaaaaaaaaaaaaaaaaaaaaaaaaaaaaaaaaaaaaaaaaaaaaaaaaaaaaaaaaaaaaaaaaaaaaaaaaaaacaaaaaaaaaaaaaaaaaaaaaaaaaaaaaaaagaaagagagagagagagggggcggcgcgcgcgcggcgactctctctctctctctcgggtgggagggacaccggggaccccacacacacttatttatattgtagaagaagaggaggagccagtcactcatcaagatgttgtgggtatatttaataatacaaagaggcgagcgcgcgtggtggattaatatacaaagccaaacaatagaagagcgagaagtcgaacaatatacgttggagaagagatgatgttcatcattgatgagaataaagaatagacagactccctgttatcaccgtgagtgggagaggaccagagagagatatagagagagtgaggtccgatattatgactctagatataagagaatgatagtatctgaccgcacacgctagtcaggagagctatgatatatgtaataaatacaaatataataaaatatagagataaagaaggagatgaagagggggaggttgcactaaacaacaccccctgcatctcggttcttattattgtacttgttaggcagagatcgggtcgtagacacatgagtctaaacctgacagggaggtgttgtaaggtactgagcgaagaaaagaagcatgagatagattttctacactatttacgatcatcagtacgctaacctaattgatgaaaggtatgcaacgcgagcagtgacgagtaagtaaaacataatgactcgaaacccggtgagggga

SEQ ID NO: 691304 - DNA, 1467 bp, Homo sapiens
  misc_feature (177)..(177): n is a, c, g, or t
cggacgcgtgggtcggacccacgcgtaccggccatatttcacctccgactaccataatcatcgcatatccccaccggcgtctaaagtattgtacgctgacttcgccacagctccacgtggaagcagaatatcgagaatagatcatgcatgcaggtgacgtctatgagccctaagganttcatcattttctatgtacaccgctaggctggaccatgacgtggcagtctgtattagtcaaagctcgatcatctatgacactcagtgaacgtacacgtacagcgtacgtgacgttaagataagtcgtcacctgctcagctatgtgcgcgtaatcaagatggaggacgctggtatttgcctatccataggaggcttcatgcgacttgatttccccgtattctcaggctgacatcctaggaccaaagcatagggccaagaaatccatgatcactatccatattcgatcgggcgttacatcgtaagactgttctatccacacagacactgttctcaggtcgtactccgggacattgcccctgacgttactctggcacgaccccggatgcgaatacaccgaggatgaaaactagtccttatcatctgtaggactcgattcatatgctctgaacgagcagtgaatgatgtaataatttccatgaattggggaagcccttcgcttcggagagaggaaaagacctagaatagtagatagtgagcccttccattaatacctgggagtgagctatactgggcttggccctcccaccctagcaacaccattgccgaagaaaccggggtatacattaaaagtcctagagccacatactgggaccggaggtgggaaccccccaaaaggggggttcagggggcctaaaaccacaggtgggcctccccaagaaccttttgtgccacaaaacaacaccaccgacgacggagcaaccacaaaacaggggcaacaacgcagcttcagaaacgagcacacaaaaaggcggggggcgcgcgcgcgagcagcaaccacccggccgcaagaggggggagcacacacagcgtgcacaacaaagaccgcatcaaaagcgagaccccccacaccagagccggcaaaaatcaataacggcggcgagggcccccccgaaaacacacaacagcacgtggagacacgcaaacacgcaggcggtagcacatgagtacagaaacaacacgggggcggcaggaagcacagaagcacacacagcaccaaataaactccgcggaccaacacacacaaacgggcgtcaacgacacaagcggccgtcacgaaggcgactataaccaggcaatagtaaacgaaagactcagaagaccaggcgatcgacaggccatgcgagcagcaacaaatgccagcagcagcaactcacactctcccctattcccatccgagccacggagagagacgaaagaagagcgacggcaatcacgccacaacaactacta

SEQ ID NO: 691305 - DNA, 246 bp, Homo sapiens
ccccccttttttttttaatgattttttaattaaaaaaaaaaccccccggaaaaagctgttgggggggcccagtggcccaaaaaacagcttcaaaaaaaattccttggttttatgatccccgtttaacccccaattccagtggggcttggaaacatcctttgtacccttgtaggaaaaaaaaaagttttggttgtgaaaaaccatttgcctttgggtaaaaaaaagggcccccgctttttttttgta

SEQ ID NO: 691306 - DNA, 469 bp, Homo sapiens
tcatgaggagcttcgatgaaaggtgatgcttagctgagattgaaggaagaggtatataggccataagaatatccacttctgctccacgaaggcaggaaccatatctggggattctgaccaatcacctttaagctttttttgcttttacgttttcttttttctttttcttttatggaaatggagtctcactctgtcacccaggctggatggagtgcagtggcgcaatcttggctcactgcaagctctgccttgtgggctcacgccattctcccacctcagcctcccgagtagctgggactacaggtgctcgccaccacacccagttaatttttggtgtttttagtagagacgggttttcaccgtgtaagccaagatggtcttgatctcctgaccttgtgatccgcccacctcggcctcccaaagtgctgggattacaggcgtgagccaccgcacccggtctctctattga

SEQ ID NO: 691307 - DNA, 444 bp, Homo sapiens
  misc_feature (111)..(111): n is a, c, g, or t
  misc_feature (151)..(151): n is a, c, g, or t
tcccactgtatgtagagcccaaggactttttgtcactgctatatcccaagaacctaaaataaatctggcatgtgttaagcgtacaataaatatttgttgaactaatgaatnggagaaattacagtcgcaaaaaacttgggcccccaaattngggggcatgaatggcttctctgggagaaataccttgaaggggggcaagagcagaaagaggaatatcagacgggacattcttcaagtcgagtgttgatagagtcttggactaggctagagcaacagaaatgaaaattagtcatttggtttgagatacatttttggaaggaggatgaacagaatatgcaggtggactggaatattgaagagaggggctgtggtaaatagcctccaaaatggccccaatggtccttgccttttggcattttgtgccttttttgtggtcccctccca

SEQ ID NO: 691308 - DNA, 192 bp, Homo sapiens
gacaagcagcaatgatgcagattcgtgcgccgcttgcccttgccctcacaatataccccatgcgtatcgatgagagcattcacctccagctgcggcataaatatggggaccagatttcgcgcttgccgacagtgtgacccaccaatctctatcaccgacactttgcagttactcctgctcctcgattccgtc

SEQ ID NO: 691309 - DNA, 738 bp, Homo sapiens
ggtagagggacggagtcttgctccgtcgcccaggctggagtgcagtggtgcgatctcagctcactgcaagctttcttataattagtatatgttttttccattattttattttacctatcagcatctttatgcttttatacttatactttatacttaatgtatgtatcttatttacagcatattattgggtattggatccaatctgatcatttctggcttttaacttgaatgtttaatccatttttctttaattattaatatgactgcctttaagtttaccatcttgctatttgttgtccacctgtctttatttttatctcctctagactaattggtattttcattgtattcttattttatcacttttttcgagcttttggctcttcctttttgtttggggcttgttttgttttgtttcctctagagtttataatatttttcctaaacttatcagttgatcttgaattaatcactttacatattttatgagaaacttactatggcgtatttccatttcttccctcccatcctttgtgttgtgctacaatacattttggttttgcatgaattacagtgtaccaacatgtattgtgaaagtttggctttcaaataactgtcttctattaagttaagaactgatctttttttaaatttatttgcttattctttatttctgacactatccattcttggtaacattttaatctgaagaactatttactgttcctggtacatctg

SEQ ID NO: 691310 - DNA, 289 bp, Homo sapiens
ggacctcgaggaatcaaggggcaaatatctataaaggagggaattgcaggccaggcatggtggctcatgcctgtaatcccaacactttgggaggcaaaagtgggaggattgtttgaggccaggagtttgagacagcctgggcaacatatcaagacccttgtctcaacaaaaaataaaaaattagctggacgtggtggcacatgcctgtggtcccagctactccagaggctgtggtgggagaattgcttgagcccaggaggttgcagagctgtgataatgccactgcatt

SEQ ID NO: 691311 - DNA, 106 bp, Homo sapiens
  misc_feature (42)..(42): n is a, c, g, or t
atacgaattgaggctcgtacccttctcaccagcaaaggacantagtccatcactagtatgccaaagacggttgcagcccccacaaaggctcccaagaactgggctt

SEQ ID NO: 691312 - DNA, 292 bp, Homo sapiens
  misc_feature (63)..(63): n is a, c, g, or t
gttttcaacttaaaacagaaaactatgtcgtgtgtggctgggcgcggtggctcacgcctgcgntcccagcactttgggaggctgaggcagcggatcacaaggtcaggagatcgagaccatcctggctaacacggtgaaactcaggtctctactaaaatagaaaaaataaaccaggcgtggtggcacggcctgtgaatcctagccacttgggaggctgaggcaggagaatcgcctaacccaggaggcggaggttcagttagccaagagttcaccactcactcagcctgggtga

SEQ ID NO: 691313 - DNA, 325 bp, Homo sapiens
gcaatattgtctggcagtgccccgattggcccttggtccccacatagattatcctatttggtttttcctccaatagtcttggttaataggcagcaggtcagatgtctccacagttattaactccatctgatcttactaaggttaatggtatggaacacctgggacaaatacaatctttctgccatcatccacctgcacaaatcctctatcttcaaattcctttaaccatatcattcatcctcatcttgatagaaggatatcccctctctctattaaagagacgtccaatgcatcatagattttctttaactcttgttgggagctt

SEQ ID NO: 691314 - DNA, 1650 bp, Homo sapiens
cggcacgagggttgccgctgcgcacctggctcaggtgagctgccccgcccccgcccggcgcgagccccaggtcctggcagcagcctctgacctgtccaggtgccctgtccagctgactgcaaggacagagaggagtcctgcccagctcttggatcagtctgctggccgaggagcccggtggagccaggggtgaccctggagcccagcctgccccgaggaggccccggctcagagccatgccaggtgtctgtgatagggcccctgacttcctctccccgtctgaagaccaggtgctgaggcctgccttgggcagctcagtggctctgaactgcacggcttgggtagtctctgggccccactgctccctgccttcagtccagtggctgaaagacgggcttccattgggaattgggggccactacagcctccacgagtactcctgggtcaaggccaacctgtcagaggtgcttgtgtccagtgtcctgggggtcaacgtgaccagcactgaagtctatggggccttcacctgctccatccagaacatcagcttctcctccttcactcttcagagagctggccctacaagccacgtggctgcggtgctggcctccctcctggtcctgctggccctgctgctggccgccctgctctatgtcaagtgccgtctcaacgtgctgctctggtaccaggacgcgtatggggaggtggagataaacgacgggaagctctacgacgcctacgtctcctacagcgactgccccgaggaccgcaagttcgtgaacttcatcctaaagccgcagctggagcggcgtcggggctacaagctcttcctggacgaccgcgacctcctgccgcgcgctgagccctccgccgacctcttggtgaacctgagccgctgccgacgcctcatcgtggtgctttcggacgccttcctgagccgggcctggtgcagccacagcttccgggagggcctgtgccggctgctggagctcacccgcagacccatcttcatcaccttcgagggccagaggcgcgaccccgcgcacccggcgctccgcctgctgcgccagcaccgccacctggtgaccttgctgctctggaggcccggctccgtgactccttcctccgatttttggaaagaagtgcagctggcgctgccgcggaaggtgcggtacaggccggtggaaggagacccccagacgcagctgcaggacgacaaggaccccatgctgattcttcgaggccgagtccctgagggccgggccctggactcagaggtggacccggaccctgagggcgacctgggtgtccgggggcctgtttttggagagccatcagctccaccgcacaccagtggggtctcgctgggagagagccggagcagcgaagtggacgtctcggatctcggctcgcgaaactacagtgcccgcacagacttctactgcctggtgtccaaggatgatatgtagctcccaccccagagtgcaggatcatagggacagcgggggccagggcagcggcgtcgctcctctgctcaacaggaccacaacccctgccagcagccctgggaccctgccagcagccctgggaaaaggctgtggcctcagggcgcctcccagtgccagaaaataaagtccttttggattctga

SEQ ID NO: 691315 - DNA, 909 bp, Homo sapiens
  misc_feature (550)..(550): n is a, c, g, or t
  misc_feature (552)..(552): n is a, c, g, or t
cggcacgagggttgccgctgcgcacctggctcaggtgagctgccccgcccccgcccggcgcgagccccaggtcctggcagcaggtgagtggcggtcgccatcagacccgcgactgggtcaaggccaacctgtcagaggtgcttgtgtccagtgtcctgggggtcaacgtgaccagcactgaagtctatggggccttcacctgctccatccagaacatcagcttctcctccttcactcttcagagagctggccctacaagccacgtggctgcggtgctggcctccctcctggtcctgctggccctgctgctggccgccctgctctatgtcaagtgccgtctcaacgtgctgctccagggcacgtctttccagaattcaaagagagcgatgccatgtttgctgccgagagagtgagtgtgggcggccgccaggggttctggagtcgggctgctcaggaagcgtgaaggggagtgctgggagcccggcttgtttgagggttggtggctgagctctcgtctgtctgggacctgaggatgcctgtgtgtcctggncngagcgtacagctgtctctgcagggcgaggtggagacgtggcttgagggcctttagagtggctagggggctcgggaaaggaaaacaagcacctttgatgaggaaggaagtcccttcctcaggcctcggcagcttcaccccaggccacgccgctgggaagggccgcccggggcattgctctcgctcgtgctggggtcctctctgggtccgttgccttctgtggggcaggggaggctctgtgcctctggggctggtggggcgggaagcgtgtggtcctgactgctgcccctcctcaggccccagactgggtggacgctgaggaatgccaccgctgcagggtgcagttcggggtgatgacc

SEQ ID NO: 691316 - DNA, 1585 bp, Homo sapiens
  misc_feature (1171)..(1171): n is a, c, g, or t
  misc_feature (1274)..(1274): n is a, c, g, or t
  misc_feature (1365)..(1365): n is a, c, g, or t
  misc_feature (1394)..(1394): n is a, c, g, or t
cgtgccccccagaatggggccctgccagatgatccccgtgtctcttttgtggggcgccaccccagttgggccacccttttcgtgggggtgtcccacatgctattttgtgtcgctgagaaacctgttgtttcccccacccgcgtgtggtgtgggagaaatataaagtggggcttttgggagcacttttttgcccaccggggggaatatctctccaggtgtgtcgcgcaacagggctcccccatatgtggggctgctcacgcggtggtcctccttgcccaattgggccccccgcgtgttggtcccccccgttgtattgtgtcgccccccgagggtaccacattctttgggacgccgcccaaaattgtgtgggtggttacacaatggggaatgccgcacaacgtggctccccaatgagaccccctcctcgttgttggagatcccccagggtgttctggaatattgccctccctcccctcggggttgtggcccacatttgggagaaaaaaatgggcgtctcacccaatttgtcgcacagtttatcccccccactagggagaacagttgttccttgtcgcccccctttttggggtcggggccccccccacacggcgcactacacgcccacagtgggtgacaccccagggtggctctccacggagagtatatttgtcacccccggcggccctcattttgggtgtgttttctcccggggtgacacatttttgcctggcagatgtgagagagagaatttccccgcacacaattgttgggggtgtcacacaatgtggggcgcagaaaggccccctcttgaggccccctcctttggggcgcgctctccaccacacgctgcccactctgaatttgggcgtcttttctctctcctgctggtctgtgcccacaccacactgctgagagggcccccccctcggggtggagatagtactctgtctgtgtgtgtccagcactatggggggagtatccccgcgcgcctaaaaaaaaatatatattgcgcccgccgtgtattatggggtgtgtctctctctcgcatatgcgccactatggaacacacacgcaacactcttctcacgctcacgcgcccggcgtacccgacataaattttctcacgtgtgagaagtcttcgtgacgacacacaagtctcacacaaagtggnggacaccacagcgagagagttgtgtgtctctgcgtgtggcttctgttgcacaggagacacacaagggcgtgtcacacttccacacacacaattgttgtgcccntcttacacctctgagtgttgcctctggcgactactccacacacacactccacatgccacaggcgagacacatttggtggccccacagaggnctttgagacccaccaagtgccgcagagcncactcgagagtgaactctctcggggagagctctaaagttttgagagaaagaagaaacgtcctccacagcccacaggtggagaaggtgggcgtccactagacccccctttgtatgagaacaccgcttttttgtaaaagggatcccgccccccctccctccgtttttttttccattaaagatttagaaagata

SEQ ID NO: 691317 - DNA, 670 bp, Homo sapiens
  misc_feature (311)..(311): n is a, c, g, or t
  misc_feature (313)..(313): n is a, c, g, or t
ccttcacttgggtgcacggtcactgctgcgttgcagctgcccagagtgaggaaggggctcccggaagtcttgcaggccaggtgggagcaggcagtgactatggcttcatctctccagggcacgtctttccagaattcaaagagagcgatgccatgtttgctgccgagagagtgagtgtgggcggccgccaggggttctggagtcgggctgctcaggaagcgtgaaggggagtgctgggagcccggcttgtttgagggttggtggctgagctctcgtctgtctgggacctgaggatgcctgtgtgtcctggncngagcgtacagctgtctctgcagggcgaggtggagacgtggcttgagggcctttagagtggctagggggctcgggaaaggaaaacaagcacctttgatgaggaaggaagtcccttcctcaggcctcggcagcttcaccccaggccacgccgctgggaagggccgcccggggcattgctctcgctcgtgctggggtcctctctgggtccgttgccttctgtggggcaggggaggctctgtgcctctggggctggtggggcgggaagcgtgtggtcctgactgctgcccctcctcaggccccagactgggtggacgctgaggaatgccaccgctgcagggtgcagttcggggtgatgacc

SEQ ID NO: 691318 - DNA, 1681 bp, Homo sapiens
cggcacgagggttgccgctgcgcacctggctcaggtgagctgccccgcccccgcccggcgcgagccccaggtcctggcagcaggtgagtggcggtcgccatcagacccgcgaagcctctgacctgtccaggtgccctgtccagctgactgcaaggacagagaggagtcctgcccagctcttggatcagtctgctggccgaggagcccggtggagccaggggtgaccctggagcccagcctgccccgaggaggccccggctcagagccatgccaggtgtctgtgatagggcccctgacttcctctccccgtctgaagaccaggtgctgaggcctgccttgggcagctcagtggctctgaactgcacggcttgggtagtctctgggccccactgctccctgccttcagtccagtggctgaaagacgggcttccattgggaattgggggccactacagcctccacgagtactcctgggtcaaggccaacctgtcagaggtgcttgtgtccagtgtcctgggggtcaacgtgaccagcactgaagtctatggggccttcacctgctccatccagaacatcagcttctcctccttcactcttcagagagctggccctacaagccacgtggctgcggtgctggcctccctcctggtcctgctggccctgctgctggccgccctgctctatgtcaagtgccgtctcaacgtgctgctctggtaccaggacgcgtatggggaggtggagataaacgacgggaagctctacgacgcctacgtctcctacagcgactgccccgaggaccgcaagttcgtgaacttcatcctaaagccgcagctggagcggcgtcggggctacaagctcttcctggacgaccgcgacctcctgccgcgcgctgagccctccgccgacctcttggtgaacctgagccgctgccgacgcctcatcgtggtgctttcggacgccttcctgagccgggcctggtgcagccacagcttccgggagggcctgtgccggctgctggagctcacccgcagacccatcttcatcaccttcgagggccagaggcgcgaccccgcgcacccggcgctccgcctgctgcgccagcaccgccacctggtgaccttgctgctctggaggcccggctccgtgactccttcctccgatttttggaaagaagtgcagctggcgctgccgcggaaggtgcggtacaggccggtggaaggagacccccagacgcagctgcaggacgacaaggaccccatgctgattcttcgaggccgagtccctgagggccgggccctggactcagaggtggacccggaccctgagggcgacctgggtgtccgggggcctgtttttggagagccatcagctccaccgcacaccagtggggtctcgctgggagagagccggagcagcgaagtggacgtctcggatctcggctcgcgaaactacagtgcccgcacagacttctactgcctggtgtccaaggatgatatgtagctcccaccccagagtgcaggatcatagggacagcgggggccagggcagcggcgtcgctcctctgctcaacaggaccacaacccctgccagcagccctgggaccctgccagcagccctgggaaaaggctgtggcctcagggcgcctcccagtgccagaaaataaagtccttttggattctga

SEQ ID NO: 691319 - DNA, 601 bp, Homo sapiens
  misc_feature (599)..(599): n is a, c, g, or t
aaacagatattactaggagacgttataaatgggttaccgctgatatatcggactcagccagtaaatgtgcagataacttcagataatacatccaatgactgtggaataggtaggggcataagccagtgaaacagttagtaggttgcactaatgaaccaagcacaggtgtatttacctcaggtagggtctggaagtaccaaggcttgaggagcagctaattcttaatgttccccaaaacagccttccagttggaactggtggaagtagtcagcagcccctccttctaactcattttgttgtgtcaagagatgttttactataaaagagttaaaggagggagctgaaagaggggaaataaggtgagaatattcctgggacacaagaggcggatcagcgagccctgccaacagagacgtaatatgttaggcagtgcacagagggattaagaccatgggctgtggcaccaaacagacctgatttatatcctggctctgccacttaggtcctgggccaattttaaatggaattaaaacaatactgatttcatgcagtctttgtgaggagaaaaatgagaatgcatacttaaagtgggtagtcanca

SEQ ID NO: 691320 - DNA, 1746 bp, Homo sapiens
ggaaagttctgatcaagaatacacaaagacacaagccaggtccccaccgcgcttggcgatgcatccatagcagccttggtgctgtggacactccctggggcccagcgaaggggagagtttgctcccaaaggcgcaccaatgaccaacatttgccccccggaggaaagaactggaaccagcctctgacctgtccaggtgccctgtccagctgactgcaaggacagagaggagtcctgcccagctcttggatcagtctgctggccgaggagcccggtggagccaggggtgaccctggagcccagcctgccccgaggaggccccggctcagagccatgccaggtgtctgtgatagggcccctgacttcctctccccgtctgaagaccaggtgctgaggcctgccttgggcagctcagtggctctgaactgcacggcttgggtagtctctgggccccactgctccctgccttcagtccagtggctgaaagacgggcttccattgggaattgggggccactacagcctccacgagtactcctgggtcaaggccaacctgtcagaggtgcttgtgtccagtgtcctgggggtcaacgtgaccagcactgaagtctatggggccttcacctgctccatccagaacatcagcttctcctccttcactcttcagagagctggccctacaagccacgtggctgcggtgctggcctccctcctggtcctgctggccctgctgctggccgccctgctctatgtcaagtgccgtctcaacgtgctgctctggtaccaggacgcgtatggggaggtggagataaacgacgggaagctctacgacgcctacgtctcctacagcgactgccccgaggaccgcaagttcgtgaacttcatcctaaagccgcagctggagcggcgtcggggctacaagctcttcctggacgaccgcgacctcctgccgcgcgctgagccctccgccgacctcttggtgaacctgagccgctgccgacgcctcatcgtggtgctttcggacgccttcctgagccgggcctggtgcagccacagcttccgggagggcctgtgccggctgctggagctcacccgcagacccatcttcatcaccttcgagggccagaggcgcgaccccgcgcacccggcgctccgcctgctgcgccagcaccgccacctggtgaccttgctgctctggaggcccggctccgtgactccttcctccgatttttggaaagaagtgcagctggcgctgccgcggaaggtgcggtacaggccggtggaaggagacccccagacgcagctgcaggacgacaaggaccccatgctgattcttcgaggccgagtccctgagggccgggccctggactcagaggtggacccggaccctgagggcgacctgggtgtccgggggcctgtttttggagagccatcagctccaccgcacaccagtggggtctcgctgggagagagccggagcagcgaagtggacgtctcggatctcggctcgcgaaactacagtgcccgcacagacttctactgcctggtgtccaaggatgatatgtagctcccaccccagagtgcaggatcatagggacagcgggggccagggcagcggcgtcgctcctctgctcaacaggaccacaacccctgccagcagccctgggaccctgccagcagccctgggaaaaggctgtggcctcagggcgcctcccagtgccagaaaataaagtccttttggattctga

SEQ ID NO: 691321 - DNA, 1926 bp, Homo sapiens
ggaaagttctgatcaagaatacacaaagacacaagccaggtccccaccgcgcttggcgatgcatccatagcagccttggtgctgtggacactccctggggcccagcgaaggggagagtttgctcccaaaggcgcaccaatgaccaacatttgccccccggaggaaagaactggaaccagcctctgacctgtccaggtgccctgtccagctgactgcaaggacagagaggagtcctgcccagctcttggatcagtctgctggccgaggagcccggtggagccaggggtgaccctggagcccagcctgccccgaggaggccccggctcagagccatgccaggtgtctgtgatagggcccctgacttcctctccccgtctgaagaccaggtgctgaggcctgccttgggcagctcagtggctctgaactgcacggcttgggtagtctctgggccccactgctccctgccttcagtccagtggctgaaagacgggcttccattgggaattgggggccactacagcctccacgagtactcctgggtcaaggccaacctgtcagaggtgcttgtgtccagtgtcctgggggtcaacgtgaccagcactgaagtctatggggccttcacctgctccatccagaacatcagcttctcctccttcactcttcagagagctggccctacaagccacgtggctgcggtgctggcctccctcctggtcctgctggccctgctgctggccgccctgctctatgtcaagtgccgtctcaacgtgctgctctggtaccaggacgcgtatggggaggtggagataaacgacgggaagctctacgacgcctacgtctcctacagcgactgccccgaggaccgcaagttcgtgaacttcatcctaaagccgcagctggagcggcgtcggggctacaagctcttcctggacgaccgcgacctcctgccgcgcgctgagccctccgccgacctcttggtgaacctgagccgctgccgacgcctcatcgtggtgctttcggacgccttcctgagccgggcctggtgcagccacagcttccgggagggcctgtgccggctgctggagctcacccgcagacccatcttcatcaccttcgagggccagaggcgcgaccccgcgcacccggcgctccgcctgctgcgccagcaccgccacctggtgaccttgctgctctggaggcccggctccgtgactccttcctccgatttttggaaagaagtgcagctggcgctgccgcggaaggtgcggtacaggccggtggaaggagacccccagacgcagctgcaggacgacaaggaccccatgctgattcttcgaggccgagtccctgagggccgggccctggactcagaggtggacccggaccctgagggcgacctgggtgtccgggggcctgtttttggagagccatcagctccaccgcacaccagtggggtctcgctgggagagagccggagcagcgaagtggacgtctcggatctcggctcgcgaaactacagtgcccgcacagacttctactgcctggtgtccaaggatgatatgtagctcccaccccagagtgcaggatcatagggacagcgggggccagggcagcggcgtcgctcctctgctcaacaggaccacaacccctgccagcagccctgggaccctgccagcagccctgggaaaaggctgtggcctcagggcgcctcccagtgccagaaaataaagtccttttggattctgaaaaaaaaaaaaaactaaaaaaaaaaactccggggcctttttcgggggcggacaaacgggggtttggaaggggccatgggcaaagttttcctggacccgttttttttgccaaggggaaatcgggggcgcccctaatgggggcgatattcgaaaagccggttaacccgtttcgggaaaaggt

SEQ ID NO: 691322 - DNA, 2050 bp, Homo sapiens
ggaaagttctgatcaagaatacacaaagacacaagccaggtccccaccgcgcttggcgatgcatccatagcagccttggtgctgtggacactccctggggcccagcgaaggggagagtttgctcccaaaggcgcaccaatgaccaacatttgccccccggaggaaagaactggaaccagcctctgacctgtccaggtgccctgtccagctgactgcaaggacagagaggagtcctgcccagctcttggatcagtctgctggccgaggagcccggtggagccaggggtgaccctggagcccagcctgccccgaggaggccccggctcagagccatgccaggtgtctgtgatagggcccctgacttcctctccccgtctgaagaccaggtgctgaggcctgccttgggcagctcagtggctctgaactgcacggcttgggtagtctctgggccccactgctccctgccttcagtccagtggctgaaagacgggcttccattgggaattgggggccactacagcctccacgagtactcctgggtcaaggccaacctgtcagaggtgcttgtgtccagtgtcctgggggtcaacgtgaccagcactgaagtctatggggccttcacctgctccatccagaacatcagcttctcctccttcactcttcagagagctggccctacaagccacgtggctgcggtgctggcctccctcctggtcctgctggccctgctgctggccgccctgctctatgtcaagtgccgtctcaacgtgctgctctggtaccaggacgcgtatggggaggtggagataaacgacgggaagctctacgacgcctacgtctcctacagcgactgccccgaggaccgcaagttcgtgaacttcatcctaaagccgcagctggagcggcgtcggggctacaagctcttcctggacgaccgcgacctcctgccgcgcgctgagccctccgccgacctcttggtgaacctgagccgctgccgacgcctcatcgtggtgctttcggacgccttcctgagccgggcctggtgcagccacagcttccgggagggcctgtgccggctgctggagctcacccgcagacccatcttcatcaccttcgagggccagaggcgcgaccccgcgcacccggcgctccgcctgctgcgccagcaccgccacctggtgaccttgctgctctggaggcccggctccgtggtgcggagcaggcgcgggagggtccggggctagcggcgggttagagatgggcggtgcccgggctccaggctgggacccctccgtggggagctctgcggcaccacgctttgtgaatgggccctggggggaggttccgctgcctggggccccgatgcggggagccgcccttgaggcccccggagccacggaatagctgtcgcagggcgtggaacccgtgggcagccgcaggtgtgctcttgggggccaggacgccaggggcttccgaggtgttcacacctgcaaaccgccccgacctggcccccagactccttcctccgatttttggaaagaagtgcagctggcgctgccgcggaaggtgcggtacaggccggtggaaggagacccccagacgcagctgcaggacgacaaggaccccatgctgattcttcgaggccgagtccctgagggccgggccctggactcagaggtggacccggaccctgagggcgacctgggtgtccgggggcctgtttttggagagccatcagctccaccgcacaccagtggggtctcgctgggagagagccggagcagcgaagtggacgtctcggatctcggctcgcgaaactacagtgcccgcacagacttctactgcctggtgtccaaggatgatatgtagctcccaccccagagtgcaggatcatagggacagcgggggccagggcagcggcgtcgctcctctgctcaacaggaccacaacccctgccagcagccctgggaccctgccagcagccctgggaaaaggctgtggcctcagggcgcctcccagtgccagaaaataaagtccttttggattctga

SEQ ID NO: 691323 - DNA, 467 bp, Homo sapiens
acacatgaggatatatattgttaccaattcaatgtaacagtatcacaaatacacacctacatatgactggctttcaaaatataaaaaaaaaaaatcaccttagtactagacattatactaaagttagtggctagcttcacaaggtcataatgacaaaataatttaccaaataattaaaaataataataataataattccttttacaaaatggtacagtaatacctctaaggaaccggaaaatactaaaatgtactttggctaatacaactaaaaggccattctttcaaaagaatagggcataattcatttcagaatcaactaaaaaaaacagaaagcataacagaaatatgcatagaatttaagtatactttgtctagccttcttttcccattctacccacataagcaaggagaatgcaatttatataatcttcccagatgagactcaatagcactacaaagaagat

SEQ ID NO: 691324 - DNA, 1595 bp, Homo sapiens
ggaaagttctgatcaagaatacacaaagacacaagccaggtccccaccgcgcttggcgatgcatccatagcagccttggtgctgtggacactccctggggcccagcgaaggggagagtttgctcccaaaggcgcaccaatgaccaacatttgccccccggaggaaagaactggaaccagcctctgacctgtccaggtgccctgtccagctgactgcaaggacagagaggagtcctgcccagctcttggatcagtctgctggccgaggagcccggtggagccaggggtgaccctggagcccagcctgccccgaggaggccccggctcagagccatgccaggtgtctgtgatagggcccctgacttcctctccccgtctgaagaccaggtgctgaggcctgccttgggcagctcagtggctctgaactgcacggcttgggtagtctctgggccccactgctccctgccttcagtccagtggctgaaagacgggcttccattgggaattgggggccactacagcctccacgagtactcctgggtcaaggccaacctgtcagaggtgcttgtgtccagtgtcctgggggtcaacgtgaccagcactgaagtctatggggccttcacctgctccatccagaacatcagcttctcctccttcactcttcagagagctggccctacaagccacgtggctgcggtgctggcctccctcctggtcctgctggccctgctgctggccgccctgctctatgtcaagtgccgtctcaacgtgctgctctggtaccaggacgcgtatggggaggtggagataaacgacgggaagctctacgacgcctacgtctcctacagcgactgccccgaggaccgcaagttcgtgaacttcatcctaaagccgcagctggagcggcgtcggggctacaagctcttcctggacgaccgcgacctcctgccgcgcgctgagccctccgccgacctcttggtgaacctgagccgctgccgacgcctcatcgtggtgctttcggacgccttcctgagccgggcctggtgcagccacagcttccgactccttcctccgatttttggaaagaagtgcagctggcgctgccgcggaaggtgcggtacaggccggtggaaggagacccccagacgcagctgcaggacgacaaggaccccatgctgattcttcgaggccgagtccctgagggccgggccctggactcagaggtggacccggaccctgagggcgacctgggtgtccgggggcctgtttttggagagccatcagctccaccgcacaccagtggggtctcgctgggagagagccggagcagcgaagtggacgtctcggatctcggctcgcgaaactacagtgcccgcacagacttctactgcctggtgtccaaggatgatatgtagctcccaccccagagtgcaggatcatagggacagcgggggccagggcagcggcgtcgctcctctgctcaacaggaccacaacccctgccagcagccctgggaccctgccagcagccctgggaaaaggctgtggcctcagggcgcctcccagtgccagaaaataaagtccttttggattctga

SEQ ID NO: 691325 - DNA, 742 bp, Homo sapiens
ccacgcgtcgggctgctgcggtttcaggcggctgcttcggtgactaatgacctatgtgacagagttgttaagaaaaaagagaaacccgcgctctccgggggtgagaagggactgactctgggcgtctctgaagatggctcgggcttctcttgggcgcgccggggggaccctgacagtgaccgtctgtgacgcgagtagtctccccatgcaccgtgcccgaagcggacgtgccgggggatatttcattctcgatctgttgacgtggttcccccggtgcatgagcagagtcggagttgagactggcttgttgctggcccagcgccgtggtgcaggaaggcgatcacgctgtgtctgggtggccggagccggagcagagcctgggttggagtgagtgcctggaacgtgaactggacctcaactcgagtagcagcaaaagaccagcgggctggcaggcgggggaggctgcaggctcatttcccacacctcttcccaggccccacgtggcccgtctgcggagcggttctggccccttccgaacagagcggggacctagagccgggggacgctccgcccgctgcaggggatgactctggggtggggggagcgccgaaccggggcgcgcagggtcccgtgaactgtgagtactgggagtgaacggggcaggcgagcgggcgatagcacccattgcatgcatcctgacacataactgtcgaagagcagaggaaaaaagagatcacagtgc

SEQ ID NO: 691326 - DNA, 2035 bp, Homo sapiens
  misc_feature (1469)..(1469): n is a, c, g, or t
ggaaagttctgatcaagaatacacaaagacacaagccaggtccccaccgcgcttggcgatgcatccatagcagccttggtgctgtggacactccctggggcccagcgaaggggagagtttgctcccaaaggcgcaccaatgaccaacatttgccccccggaggaaagaactggaaccagcctctgacctgtccaggtgccctgtccagctgactgcaaggacagagaggagtcctgcccagctcttggatcagtctgctggccgaggagcccggtggagccaggggtgaccctggagcccagcctgccccgaggaggccccggctcagagccatgccaggtgtctgtgatagggcccctgacttcctctccccgtctgaagaccaggtgctgaggcctgccttgggcagctcagtggctctgaactgcacggcttgggtagtctctgggccccactgctccctgccttcagtccagtggctgaaagacgggcttccattgggaattgggggccactacagcctccacgagtactcctgggtcaaggccaacctgtcagaggtgcttgtgtccagtgtcctgggggtcaacgtgaccagcactgaagtctatggggccttcacctgctccatccagaacatcagcttctcctccttcactcttcagagagctggccctacaagccacgtggctgcggtgctggcctccctcctggtcctgctggccctgctgctggccgccctgctctatgtcaagtgccgtctcaacgtgctgctctggtaccaggacgcgtatggggaggtggagataaacgacgggaagctctacgacgcctacgtctcctacagcgactgccccgaggaccgcaagttcgtgaacttcatcctaaagccgcagctggagcggcgtcggggctacaagctcttcctggacgaccgcgacctcctgccgcgcgctgagccctccgccgacctcttggtgaacctgagccgctgccgacgcctcatcgtggtgctttcggacgccttcctgagccgggcctggtgcagccacagcttccgggagggcctgtgccggctgctggagctcacccgcagacccatcttcatcaccttcgagggccagaggcgcgaccccgcgcacccggcgctccgcctgctgcgccagcaccgccacctggtgaccttgctgctctggaggcccggctccgtgactccttcctccgatttttggaaagaagtgcagctggcgctgccgcggaaggtgcggtacaggccggtggaaggagacccccagacgcagctgcaggacgacaaggaccccatgctgattcttcgaggccgagtccctgagggccgggccctggactcagaggtggacccggaccctgagggcgacctgggtatgcccgcccagccccactccccaactggagaagctcagcacagggcggagtgggggcaggcacanggcacagggcctggaggggctccaggtgttgaggactcttcccggcaccgggagcccctgcacggcctctgccctggaggtgctcggccctcggtctgcctgggaacttcctgggcctcacaggccatcacagcagggggtgagcaggggcagcccctggcagtgggtctgggccaaggctgtgggtggccacctcaggcgtctcggtctccccaccccaggtgtccgggggcctgtttttggagagccatcagctccaccgcacaccagtggggtctcgctgggagagagccggagcagcgaagtggacgtctcggatctcggctcgcgaaactacagtgcccgcacagacttctactgcctggtgtccaaggatgatatgtagctcccaccccagagtgcaggatcatagggacagcgggggccagggcagcggcgtcgctcctctgctcaacaggaccacaacccctgccagcagccctgggaccctgccagcagccctgggaaaaggctgtggcctcagggcgcctcccagtgccagaaaataaagtccttttggattctga

SEQ ID NO: 691327 - DNA, 535 bp, Homo sapiens
  misc_feature (310)..(310): n is a, c, g, or t
taaggacgtgggttggggaagaggggcattgtggagggggcgcttgtggagtgaggctgtggaaacgaaggcaggacaccaggtgggggagcttccggctggggagtgtgggtcttctgctcgggctgctcttgctgctgcagctctggcttgggttgtccttgctttgctggggttgggttgggctgtgcacggggagcttccgccagcttgggtttctcatcgcctgcctctgtttttgaatggagggtggccagttcctcagcctccgctgtacgctgcaagaaagcggaggaagctgtataatggnctgatggtgctggggcgctgtaagcctgtgagggcctcggggtactgcaggatgagctggtaggcgtcaggatttccatggcatccagtggaatcctcattgtggctgtcgtcctgcccctcctcatcctcatccttgtaacccagcttcttctggtgcttgatgagatccaagaatggcttgacacagcagggtacatttggtgcgctgtcagtccacgtgctt

SEQ ID NO: 691328 - DNA, 169 bp, Homo sapiens
actcgttgtgccccacggtgcactgacccaccctgccataggcttcctaagggagcccccaacccctcccctcccctcccctccctggtgcttgctattgaaccgcgctgtccagctccatttctgccctggcatccctgggcccagcaggtgggtcgtcgttgtctgg

SEQ ID NO: 691329 - DNA, 1586 bp, Homo sapiens
ggaaagttctgatcaagaatacacaaagacacaagccaggtccccaccgcgcttggcgatgcatccatagcagccttggtgctgtggacactccctggggcccagcgaaggggagagtttgctcccaaaggcgcaccaatgaccaacatttgccccccggaggaaagaactggaaccaggtgtctgtgatagggcccctgacttcctctccccgtctgaagaccaggtgctgaggcctgccttgggcagctcagtggctctgaactgcacggcttgggtagtctctgggccccactgctccctgccttcagtccagtggctgaaagacgggcttccattgggaattgggggccactacagcctccacgagtactcctgggtcaaggccaacctgtcagaggtgcttgtgtccagtgtcctgggggtcaacgtgaccagcactgaagtctatggggccttcacctgctccatccagaacatcagcttctcctccttcactcttcagagagctggccctacaagccacgtggctgcggtgctggcctccctcctggtcctgctggccctgctgctggccgccctgctctatgtcaagtgccgtctcaacgtgctgctctggtaccaggacgcgtatggggaggtggagataaacgacgggaagctctacgacgcctacgtctcctacagcgactgccccgaggaccgcaagttcgtgaacttcatcctaaagccgcagctggagcggcgtcggggctacaagctcttcctggacgaccgcgacctcctgccgcgcgctgagccctccgccgacctcttggtgaacctgagccgctgccgacgcctcatcgtggtgctttcggacgccttcctgagccgggcctggtgcagccacagcttccgggagggcctgtgccggctgctggagctcacccgcagacccatcttcatcaccttcgagggccagaggcgcgaccccgcgcacccggcgctccgcctgctgcgccagcaccgccacctggtgaccttgctgctctggaggcccggctccgtgactccttcctccgatttttggaaagaagtgcagctggcgctgccgcggaaggtgcggtacaggccggtggaaggagacccccagacgcagctgcaggacgacaaggaccccatgctgattcttcgaggccgagtccctgagggccgggccctggactcagaggtggacccggaccctgagggcgacctgggtgtccgggggcctgtttttggagagccatcagctccaccgcacaccagtggggtctcgctgggagagagccggagcagcgaagtggacgtctcggatctcggctcgcgaaactacagtgcccgcacagacttctactgcctggtgtccaaggatgatatgtagctcccaccccagagtgcaggatcatagggacagcgggggccagggcagcggcgtcgctcctctgctcaacaggaccacaacccctgccagcagccctgggaccctgccagcagccctgggaaaaggctgtggcctcagggcgcctcccagtgccagaaaataaagtccttttggattctga

SEQ ID NO: 691330 - DNA, 137 bp, Homo sapiens
aatgccctgtttatagttctttctcatcacgacctgcacgtataccttttccaccaccaccagctgcggctttagttatgacaggataaccaattttctttgcaccttttttcgcatcgtcaatattatgaactaaa

SEQ ID NO: 691331 - DNA, 115 bp, Homo sapiens
taagggtccaagctggtccagagaagatcccggctgtcctagattctgagcagtggaagctcagctgcttgccggacctggaggggcacggaggggcccgcaacctgggccaagg

SEQ ID NO: 691332 - DNA, 289 bp, Homo sapiens
aagcgaggcgtgacggcgagagtgcccccctcccagcgcctggagatggggaggagcggcataggcttagggtagcagctgctgcgagtctccaccgcgaccaaagcagctgctgctcctgtgcccaggcccagcctatgctctgtggccatgcacctagcatgcacctagcgatacagtggcgactgcttcagggacatgagcaccgagcgcaggcggtacacatctttgcactgatagctgagcttgagggtgaagtcacatagatggaccaccttctccgactctg

SEQ ID NO: 691333 - DNA, 111 bp, Homo sapiens
aatattctgggctgctgctaaagcataatctggaggtaaatttataggataaattgacaatgttttttttctgttatttagcaagtctgaaaaagatttagaagtgataga

SEQ ID NO: 691334 - DNA, 417 bp, Homo sapiens
  misc_feature (411)..(411): n is a, c, g, or t
tgagacggggtctcatgctgatgcccaggctggagtgcaatggtgtgattatggctcactgcagcctcaacttcccaggctcaggtgattctattacctcagcctcccaagtagctgggactactggtgtgcactactaggactggctaattttttgtatcttttgtacagatagggtttcaccgtgttgctcaggctggttttgaacttctaggttcaagcaatcctcccaccacagcctccaaaagtcctgggattacaggtgtgagccaccataactgggctggaattatttgtacctggaccttgtgttttgtttttttgccctactatcttttctaaataaacatatccatgttcctggagatagcagtaatatacaattatggtaaaatagagcctttaatatgnactccg

SEQ ID NO: 691335 - DNA, 167 bp, Homo sapiens
  misc_feature (164)..(164): n is a, c, g, or t
atgtgggggcgaggcaggaggactgcttgagcccagaagttcaagaccagcctgcgcaacatggtaaaaccctgtctctacaaaaaaattaaaaagccaggtgtggtgttgtgtgcctgcagtccccgcgtacttgggagacgtgaggtgggagactcacccanaag

SEQ ID NO: 691336 - DNA, 383 bp, Homo sapiens
cggtatgacgagcttcggtatgacgagcttctgggtgtaatcaattggacgaattcctgggaactgcggatatagcttgccacagtatcttattcaggtaattggcttcctgggatgtgctgggagtcagcttgcacaagttaagtccttgaggaagcggctgccagtgaaagagccaagatggagtccatctggcgctcttagctaagggagagtcaattcaggtggaaacaaggctgagtgattaaaggaaagggagagtctaaaaacagggttagtaaaaaccaggttggacactacattccccacttgtgttttgggggaatcaaatcattgattcctcagttataacaagggggttatattgagtcaagctcgtcata

SEQ ID NO: 691337 - DNA, 814 bp, Homo sapiens
  misc_feature (2)..(2): n is a, c, g, or t
  misc_feature (352)..(352): n is a, c, g, or t
  misc_feature (356)..(356): n is a, c, g, or t
  misc_feature (399)..(399): n is a, c, g, or t
  misc_feature (412)..(412): n is a, c, g, or t
  misc_feature (414)..(414): n is a, c, g, or t
  misc_feature (439)..(439): n is a, c, g, or t
  misc_feature (449)..(450): n is a, c, g, or t
  misc_feature (467)..(467): n is a, c, g, or t
  misc_feature (490)..(490): n is a, c, g, or t
  misc_feature (505)..(505): n is a, c, g, or t
  misc_feature (538)..(538): n is a, c, g, or t
  misc_feature (547)..(547): n is a, c, g, or t
  misc_feature (587)..(587): n is a, c, g, or t
  misc_feature (637)..(637): n is a, c, g, or t
  misc_feature (639)..(639): n is a, c, g, or t
  misc_feature (671)..(671): n is a, c, g, or t
  misc_feature (697)..(697): n is a, c, g, or t
  misc_feature (812)..(812): n is a, c, g, or t
tntaagattggtttataaggcttaaatatttctgtcatagttaacagttaacagcaaataaaggcaactttacaaaatcagtgtttccatacagtacaggactaaatgtggcaactctgcattggaaaattaatatttcctcaatgcaaatatcaaatctgcagcaccatttagcagcttccactaaaaactcaagctgcagtatttattacaagctctactcagaacacaaggctacctaaatcaagcattagagaaaaacagtggagtcattcaggcataatatgtcagatttggtacaggattaaaatactaacatttttaatgtcctggtttcaaattaataaattcnacancaatataaaaatatacaaccagttgaaaagactgtactgcagntgctcagaaagtnanatctcgctctcatatgtatgcaggnatgtattganngtcaggatttctgggtngctgcggctggtctttcggtagncgtccaggctggtgngatgttcaatgtcacgcaccctagctgtgtgcntcttcatgngttcttctacccattttgattcgtcctctgagctattgcngctctcctcgttgtcaggccggtgaggcaggatgaaggaggacacagagngngggccgtcacacttgtcggcaggctgagtganatccagacagctggtgatgatgctgnagtagtgagttggaacaggaatggaactgccttccacgtactgttttattttgtcttctgtgtcatgtaagccatcatagtcatagtcgaagattggtccacttatcacgttaantc

SEQ ID NO: 691338 - DNA, 1680 bp, Homo sapiens
tctgagccacgcgcccatcgggtacctgatgtgcacgctgcctgggctgtcactgtgctgtttctgctgtgctgagctggaacatgactgcgatgtatgtgtgatgcctgcactgtatggcctgggctatgtgctggctgatgcactgtgctaactggtgctgacttgtgtgtgtgagctgtgctgctgtgttgcttggtgttgcttgctgtgctgtgcctgattgcttggcctgcctgcctgtgtggtgtgctggtgttcaccacttgcatgcatgtgatgctgttgtgtttgcgtcctgagtgccatgctgtgaccttgcgcactgccttctacctccgttgtgtgccacttgttgtgtgtgcctgatgtgccctgtgcaatttgtggtgtgccagattgtgctgtggtgtgttttttgtggacagctgatggcgatgcctgctgtgcctgtggagtgcgtgcaatatctctgtgtgtgtgtgctgatgtgacctgccttcctgatgttgtggctgtggctgcctgtggatgtgcaatgtggatgctctgtgctgtgctgctgggtgtgtgtgcatggctttgcctgtgggcctgctctggggtgtggcacaatggtggccccctgtggttacaagttaaaatctggtggactggccataccagctgggctcccaagttagaacctagaataccacacccagagagtttggattggtatattaccctgggcaagccgttgggcgctgggcttaccaattcctggccaccaataccaaaccacctggacgaaaagcccccctgggggtatggtttcaccccaccagtgctgcccttttctcatttccagaaatggacattttaagtttctggatgggggtattaaacgaagaaagatttagcactggacaactaggtacatgtgggtttatggaaaggccattagggctttaggacggacagtgtggacacgcacggtttcgtaggttctcttactggaccccacaaggccccagttatacacagttggtatccctgtgggccaagttgaccgttattcccttaatacaacacgtaacaggaactgtggaattttgagaccacagtgggcgaacactgtaggaaggggttccacgggagaagttatgctatggaggtcccatggacgggaaagagcccccttttgtggaacgtttagaacaaaatatacattaccaccgaacaagccttgtggtggaacgcggttatgttggccgccaatggaatttcccaattggagtgaacttggctcatgtggaagccctttttttgggcggacatcaaacagggctttcgctgaggcacattggattcccgggaccagtttgcggggaaacacccagtgcaacggaaagggctcccaaataaattccaggcccaatgcaaccaagaggattggtgcaggtggtgtgggaagcgcccccggggaagtagtagagcccccgagtgaagggagcaggtggaaagaagaaacctacaagtgcaacagcaagagatccccccccggccgaacaggtgcaaacgagtctcagcaaacaggccccggcggtgggcgccaaacagaaaccggtagcgacgtagcagagcacgaggggcacgacgacagcatagaaagtcgcactcacaagtgcagacccccgg

SEQ ID NO: 691339 - DNA, 522 bp, Homo sapiens
cggcgagtccgggtcacataaagcaaagatagtgcaacatatacagtacgggaagtctagacgttacagagcttttatagtggaagaagcgatttactatccgagacagatcaagacaatttttatagctgaagggctggttcagctgggttgggagggatgaataggaatggatctattccataagtaaagtcagatactgatagcatatcataattggttctcattcaccactgtattgccatatagtctaagcaatagataattgaatgaattccctgattcgaatgctaagatatggtgacggtgatgggggtcgaagtccttagccatgagagagtatagctatgggatggcttctcttcaggagcaggatgccatgctaggatagccattcctgtcttgcataccaaataagaatgggtctcgtctccaggagagagaagcattacatgcaagacattctgaaggttgagtctgactttagtcaccatttttgaaaaggtggtgtggctttacaaa

SEQ ID NO: 691340 - DNA, 207 bp, Homo sapiens
  misc_feature (145)..(146): n is a, c, g, or t
ccctcttggttgatggctgtctgagccctgacatgtgcttgggcactggtgggcctgggcttctgaggtggcctgcgtgcctgatcaggaccctccccgctttgctgggcctctcagttgaacaaagcagcaaaacaaaggcagnnttttatattgaaacgacttagaacgcctggaataatcaggctttttaaatgatgtaattcc

SEQ ID NO: 691341 - DNA, 565 bp, Homo sapiens
gcacagatagaaaaacctctggcccatttggataaaaacttgtagaaacctccagctcactcagataaaggaacaagaacgacctagcatagaaatgcctttgtttggccaggcacggtggatcatgcctgtaattccaacaatgtcggaggcagctgtgggcggatcatctgaggtcgggagtttgagaccagcatgaccaagatggacaaactctgtctttactaaaaatacaaaactagccaggcatggtgctgcatgcctataatcccagctacttgggaggctgaggcaggagaatcgctagaacccaggaggcggaggtttctgtgagccgagatcgcaccattgcactccaggctgggcaacaagagcaaaactgcaaaaaaaaataaaaataaataaaaaaagaaagtacatctcaaaaaaaagaaagacaagaaaaagaaaaaaaagaagcacttttgtctttgtacagtcagtgggctcccaggaaaatgttccttctctttttgttggcatgggcactaggggatctggtgcattccagtcgacactctcgttt

SEQ ID NO: 691342 - DNA, 681 bp, Homo sapiens
gggagtaaggatccacctgctctgcgcaggcccggagaccccggggcggcttcccacgaacctgcggagggcaactggccgaccgacccattcattgggaaccccgtcttttgccagagcccacgtcccctgccacctctagctcggagcggcgtgtagcgccatggagaagagcaacgatgaccacacggcatacgcttgacatgctgctcatggcgtgggcctgctggcctggggctccggagctcctggtgtgacctgctgtgctgggacgctgcacggcgttgcgcgggcttcctgcggcggccaagcgctggtgctgctcaccgtttgtccggggtgctggctgggcgcgggcctgggcgcggcgttgcgcgggctcagcctgagccgcacgcaggtcacctacctggccttcccccggcgagatgctgctcccgatgctgcgcatgatcaatcctgccgctggtggtcctgcagccttggtgtcagggcgcccgccctcgctcgatgcccagcctgcctcgggcgtctgggcggcatcgactgtctgacctactatggcctcaaccacaactgagtgccatcggctgctcgccgtggaccttggcgttcatcattcaagccaggatccggtgcgcagaccctttaagtcccagcgacctgggtgctggaggacag

SEQ ID NO: 691343 - DNA, 163 bp, Homo sapiens
acgtgtgcattggtggtacatactggcctcgctgtccaccttccagcagatgtgatcagcaagcaggagtatgacgagtacggcccctccatcgtccaccgcaaatacttctaggcggactataacttagtatgcgtaacaccctttcttgacaaaacctaac

SEQ ID NO: 691344 - DNA, 190 bp, Homo sapiens
gacgtgaacaactcaaacgtcttatccttcacggagaaggctgatgtggctgaaaaagcctgtgtgcagtgaccctagcaacccacacctagccagcttgggaggaccccacctatgtcctagctccgaaacggcacaaaaaatgcttctagtagctgcattctgcaaagggaaactgggctcggggaac

SEQ ID NO: 691345 - DNA, 163 bp, Homo sapiens
tggtttagcggtctgatcccatgttgctgtggctgtggtgatgcagctccgattcaacccctagcctagaaacctccatatgcctggggtgcggcctaaaaagacaaaaagaccaaaaataaataaataaaatcaatagtggtttaatggatgatacactcac

SEQ ID NO: 691346 - DNA, 428 bp, Homo sapiens
  misc_feature (158)..(158): n is a, c, g, or t
  misc_feature (306)..(306): n is a, c, g, or t
taaacaaaacacccaagggtttttttggatggacctcaaggggaaacgggatggggaaaaatactgtttctgggaaaatcaccccctttcctcctataaggggcagtgctctcgaatctcgagcactcctaattctttaattattctcctagtagagntaatatggctcctcacgtggtttttaacagaaaaaaaaaaaccaccaacattaaaaactccttgtgacaatccctgtgtgtccaagtgcgaaaatataaaggtgtctccattcctctctttgggttacaacccccaggggacaatttntaactataactttctggtggcacgcgagtacccgtgttaccacctttgttgggagcacaactcgtgctcttaaagatggggggaataaatctctcctcttaaacaaacaacaaacaagaggg

SEQ ID NO: 691347 - DNA, 337 bp, Homo sapiens; identical to SEQ ID NO: 502349
  misc_feature (36)..(36): n is a, c, g, or t
  misc_feature (320)..(320): n is a, c, g, or t
  misc_feature (327)..(327): n is a, c, g, or t

SEQ ID NO: 691348 - DNA, 556 bp, Homo sapiens
cggaacgcgtgggtcgagaacacaggtgtcgtgaaaactacccctaaatagccaaagatggggcaaagacgcgacaatagactcatatcaacattgtccgcttccatttttgggggaccaacgtagattcgggcaagttccatcctactacctgggccagtctgactctactaaattgcgcgtggccatcagatcagagaaggaaccagttgacccgacaagtgttgcacgaacaggaaggctatgctgacgaacttgggacacatgggggtctcccttttcaaaatggctattttggcccctgggtggctccatattgcggactttaataagcttgaataggcgtgagccgttgaaccgtgggtaaatcaccaattggatgatctcgctatggtggacaaacttgtgacgacgcagcgaaaggtacataattgattgaccttacttcacttggaatggccccccaaggaaccaccatggaagcacgttttaattccaaagaaaacacaattggaattttaacccccgtgggcaatccaatttcgttccaaggggc

SEQ ID NO: 691349 - DNA, 320 bp, Homo sapiens
ttttctgtttttatttttagataaacagagcaaagtttattgaaatttcaagctacatttggaaaatcaagatccaaatcctggaaccgtacatcaggataaggtttcaaaaagtggaaagtgttcactcttacaaaacccgctacagacaagctttccgggcaaagcttccaggctccattggattcaaggcaaccccctttttatgcgttatccacagttggacaccaatcttccggtcactttgaaggtttccaccattaattcaaaaccgaaccaaaaaagttttccaatgacactgtggaagccggggggggggg

SEQ ID NO: 691350 - DNA, 634 bp, Homo sapiens
  misc_feature (455)..(455): n is a, c, g, or t
tacctgacctgacaaaactctttacactctgtgtcagaaagagaaaaaatggcagttggagttttaacccagaatgtagggccctgaccaaggccagtggcctatctctcaaaacaactagacggggtttccaaaggctggcccccatgtccaagggtcctggcagcaagggccctgttagcacaagaagcaaataagctaactcttagacaaaacctaaacataaagtccccccatgctatggtgattttaataaataacaaaggaaaccattagctaatgaatgctagactaactagataccaaagcttgctctgtgaaaatccccgcataaccactgaagtttgcaacaccctaaaccctgccaccttgctccccgtatcagagagcccagttaaacataactgtgtagaagtactggactcagtttattctagtaggcccaaccactgagnaccacgctaaacatcagtagactaggagctgacgtggataggagatgctcggcaacccctgcaagtgactctgagaagagacaagccctgctccatcacaacccgaagctgactggttcaaactggccgaacatgagaaactaatggcggactcatttccccaaaaattgggatggaca

SEQ ID NO: 691351 - DNA, 941 bp, Homo sapiens
tgctgttactggcctggaattttgggatgcccagccaggctttctgtcgcgcggggtctcccgagatggcggctatggggcgctgggagggtgcaagctcctgcgccgtgctccctgtgtgatgcccggttgtcgtgagatggggctgccctgggaggggcgggtctactggcacgtggagggtgccggcccgttgttcgcggttccccgtgtcccagtgcaggatgtggtgctgcagacgccgtgatctccgtaggggttggggctgggggctgcggagctgtctacatcggactcctccgtggtcagcccgttaggagccgcctcccctctgcccctccgaagagacgagcgtgccatgacaggcctggggaaggcccctctgccccgtcaggggttgaaaagcaaagctggaaggattcggagagggttggggccgtcttcctcatccttccttttctcggggctcccgtggcgacgtcatggcaaattcccaaactggacggatccggctcgggttaccggtccagcagggccgagcctgttgccccaggcctggcccctggggtcctcggtgccggctggagggggctgtgcacctctgggggcggggttcttgctccacgtgccctcggcgcgggacttgtgccctcgtgtgggcacgcggacccggcggggtaagggctaggggcccggattactcttgggccaaggattcaaggtccctgccatgggtaaggcccccacgcattccagtcttcggaaacccgggctcttgaagagggcgcaagtaggggccccagtggagctgcgagaaacccgcttctacaagcctattggttccccggccttggggaagagcccaccttggacattggagagcccgccctcaatgccgaagctttcggaaacaatcttcgggacggaagttaattaaccga

SEQ ID NO: 691352 - DNA, 224 bp, Homo sapiens
tgctgaccactgatggcagccacacacactctaaccccaacacacgtggaacaaggcttcccccaccaatcacagctcccagtggaaaaatctcaaccaccaactgagggacgttctacccccgactcattcccaggtaggcctattccacagaatgcattcagcattaaaaactgggcaactccatctgtatgacagctgatacctaatcaccacgcactctc

SEQ ID NO: 691353 - DNA, 793 bp, Homo sapiens
  misc_feature (329)..(329): n is a, c, g, or t
cttttagaagagtgtcttctatttcagacattgttgacctgaaaatctcttaaaatctgtctgccatcctgtggtagtgatggcctcacacaggggtggcagtgctctagcagaaatcccctgagagactcagtcgagacctgtgtttgtatatcatttattggggaagaaagggagagctacacctcactagacatttccacggccatactcattatcctgaaatcccagcagctttatgtacaatttaccaagtaattttaattactgctatttcttctatgtacttgatgggtggttttttttttctcatgagaatgtcatgtgcntgatgccaccttggtgcattcctcttctctttcagcacccacatgcaggatctccaggaggtgacccaggaccttcattatgaaaacttccgttctgagagactcaagagaggcggcaggtcatcacactgtgcccctttctctgtattgtgtcaccctgagccacaatgttcctcctcctctatgtgttcagctcagccttcttgaccattaagcaacatggtttggtttcctactcaaaagttattataaaagagttgttaatttaatcaaattatgctcttttagcctttttaagaaaaagtacatttaatgatatgcacgtaaaaactttaggccaggcacggtggctcatgcctgtaatcccagcaccttgggagaccaaggcaaggtagattgcctgagcgcaggagttttgagaccatgagattacatggtgaagtcccatctctacaaaaatttaa

SEQ ID NO: 691354 - DNA, 766 bp, Homo sapiens
  misc_feature (761)..(761): n is a, c, g, or t
  misc_feature (766)..(766): n is a, c, g, or t
aacaagagcgttttaattagatcagatttacattctgactggctcttaaactagcaaggtgacctagggaaaggggccagggtttccctctatcattcataaatgtaattcagggcccctttttatccccaataccagcatacagaaactgctgtaaaagaagaagttgtgggtatttttttttttttttggtctggaggaatggggacaccaaaactcatttggcagcagaggtgaggtaaggccatttgtattgtctgttctgttagtagtcatacatgccacttatccctgccccagtccctgttaggagtgttatgtgggtatactgaacgtggaccttccccgaatccaaagaatccagatgctttgaataagatcatggaccttccgggttctacatcgccagatgttgttcatcttctatcttttgttttgcgaaaattggttttttatgtgtattggggttattctgtggaagaaataagctgtgggtcaagattaaagaactttaaacaacttctggcatgtggaataaacacgatctgaaggaacaaaattttcatttgactacatttttgatccaatttgcacccagtgtttaagttaatcacagtgcttggcagtttgtgttgctggatcaaggctttctcactgaaaaccatgtgcttcagaggttcataattcctctttcaccttccatttcacattagttaataaattatgagagaaaacattgtggatccaagttatgtttgacnttttn

SEQ ID NO: 691355 - DNA, 6216 bp, Homo sapiens
ggaggcggaggggagcggagcccggagcgtcgtggaaagcattggacacatttccaccatgctaatggcattttaaatatatttggcaattttcccaattttttactgaagaaaactgtaagtttatacttgaggactgaagtgtgactctgccgattatcaggctttcaagatgaatctggaaaaactcagcaagcctgaactcctgacactatttagtattcttgaaggagagcttgaagcaagggaccttgttatagaagccttaaaggcccaacacagagatactttcattgaagaacgctatggaaaatataacatcagtgatcctttaatggctctacagagagattttgaaacactgaaggagaaaaatgatggcgaaaagcagccagtctgcacaaacccactctctattcttaaggttgtgatgaagcagtgcaagaacatgcaggagcgcatgctgtcccagctggctgctgctgagagcaggcaccgaaaggtgatcctagaccttgaggaagaaaggcagcggcatgcacaggatacggctgaaggagatgatgtcacctacatgctagagaaggaaagagagaggctgactcaacagttggaatttgaaaaatcccaagtgaaaaagtttgaaaaagaacagaagaagctctctagtcagctggaagaggagcgctcccgccacaagcagctctcatccatgctagtgcttgagtgcaagaaagccaccaacaaggcagccgaggaaggacagaaggcaggagagctgagcctgaaattggagaaggagaagagccgggtgagtaaactggaagaagagttggcagctgagagaaagagaggcttgcagactgaggcccaggtagagaagcagttatcagagtttgacatcgaaagggaacaactgagagcaaaactgaaccgagaagagaaccggaccaaaaccctgaaagaagaaatggaaagtttaaagaagatagtgaaggacctagaggcttcccaccagcacagtagccctaatgagcaattgaagaaaccagtaaccgtgtccaaaggcacagcaactgagcctctcatgctaatgtctgtgttttgccaaacagagagttttccagcagaaagaacccatgggagcaacatagccaagatgacaaacactgggctgcctggtcctgccactcctgcttactcatatgcaaaaaccaatggccattgtgacccagagatacaaactaccagggagctgactgcaggcaacaatgtagaaaaccaagtgcctccacgggaaaaatctgtggcattggcccaagagaaaccagtggagaatggtgggtgtcctgtggggattgagactccagtcccaatgcccagtcccctctcttccagtgggagctcactgtctcccagcagcactgcctcctcctctctaacatcctctccttgctcttcgccggtactcactaagcgtttattggggtcatcagctagcagccctggctaccagtcatcgtaccaagtagggatcaaccaacggttccatgcagctcgccacaaatttcagtcccaagcagatcaggaccaacaagccagtggcctacagagccctccatccagggatttatcccccaccctcatagacaactctgccgccaagcagctggcccgaaacacagtcactcaggtgctctccagattcactagccaacaagggccaatcaagccagtctctcccaacagctctccctttggcacagactatcgaaatctagccaacactgccaatccaagaggtgacacaagccattcacctactccagggaaagtgtccagtcccctgagccccctgtctccaggaatcaagtccccaaccatccccagagctgagagaggaaaccctccacccatcccacccaagaaacctggcctcaccccttctccatctgctaccactccattgaccaaaactcattcccaggcagcctctttgaccactgcagaagaccttgccagcagctgctcttccaatactgttgtagcaaatggtaaggatgttgagttacttttgcctaccagcagctagtccctaggagggagtctccacgtttgacattccatcagatttcgtccaaaagctcagtcagacttctgagtcagattatgttatttattttgatagtagctgaaaccatctgtataatacatttagtatatttcaccatgttggccaggctggtcttgaactcctgacctcaagtggtctgcctacctcggcctcccaaagtgctggaattacaggcgtgagcatcacgtctggcctaatttttttaatcgaatttatttttgtaatgatagatgcttgtcttattcctagggaaatatttgaagtaattgagatgctgtcacctaaaataatcaaaaggctcctgattcagttaaaagaattcatttaagtacagagtgtaagcgagctacaccaaagaatggtgattagcgctcccagggtggggaaaaatgaggattgtttatataggcaaaatggaggtgccaaacagaattataacattttcggaactaaggctcatttaaagatacaaatttgattggctactattgattacacttgaagggatttgtttaacttccttttgtaaagaagtaacagtcataaggatctctcatctcccagtcatttagtctagttttgaataaagaatagggggtctggttaatatatacatctaaacacaaaagtcagaaagaataaaagtagtgatgttacacgagccagctgtcagtgcttaacttttccctttggcctaatgcatttggaaggtcctgaaattgtattttctttttacattgcctatgtatgtgtaagtcttcttcaggtcagttcacgctgttaaatatacgtgcgtatacatacatactatgtatgtgcgtttatgtgtgtctgtgtgttttttttttaacagacgaagcttcacaaaagatgtctaaggtaagatcatacttcatgtatctacagcataaggagaaattgctttatgttttcagactgttgacagtcgggacttatatgattcattatttttaatacaactgatacatttgattcattaacacaaagagttctaatttagttgtctttttttttttttttgagacgggagtcttgttctgtcaccaggctggagtgcagtggcatgatctcagctcactgcaacttctgcctcccacgttcaagcgattcccctggctcagcctccggagtagctgggactgcagacacgtgccaccacgctggctaattttttggattttagtaaattcggggtttcaccgtgttggccaggatggccttgatctgttgacctcgtgatccacccgctttggccccccgaagtgttgggattacaggtgtgagccaccgtgcctggcctaattgtcatcttaaaagcttggagctttctcttttttcaggcttctactttcttttctctacacacatcagtaacagtccttttggcccccttagttcattcccagcagaccagataatttagaattctgataatttattatgatgaaattgatggggctcttagacttgataaattggtttaaatcagcctttgcaagttagttcagagataaattagtgctaaagaacatattctgagaaaagcagaacttgtggttaacattgcaagattattatttctgttttttttttatctttgaatcctgtgggtgttcattactgtccaatgcaaaatcatcataccagtttttgcattttataccagtgttagcatggaacacagataagcaaaaaaaaaaagtcattatttcaccactcaggaataaccactgttaatatgttacatatattctttttcacctgtgtgtgcatttgactatacatttacaaaatgtaatcctaaaggaaatactattttgtatcttgcctttttcaattaataaattgatttttaaaatttcttctcattttcagtatgccactgtctagattctggttacttctgctattcttgccttctcatatctctgtcctctctctcatcagatacccttctgtcaaggaatattgatgcttcagtgtagtcatctatgatcttctcattctgtcttttctttcttggtctttgacactagatactcaacatcccacccctaatttgcctgcctcacccttgatgaaactctgttctatagagctagaagcacagcaagagagatgcttttttcctcgatacttttcagaaatgcattgcacctaatacctgggagaagctattctttagccaagtttgttgaatgaaaccattcattcaaagtactgtcagctgtagcagtactttgtaagcttgactgattttcctggaactccatagtctctcaagtcgaaatttgaaattgcattaagatgtattaagcatgtatcttctatgtattgttaaattcctaaacagaatactgattaacaaaatgttaattttcagtcgcatacaactaaggagttatactagataagtttttctttttttaatgctcctagttgaatactactggttttctgatagaagtatgactttctggaagtgtttatactttttaaaaaatttgtgaaaactgataacctatgtttgtttcatgtctaactgattatatcttaaaagcaactactaaggtgtttattagtttgtttgttttttaatcttatttagcaacagccaactcagtttataaatccagaaacacctggctatgttggatttgcaaacctccccaatcaagttcaccgaaaatcagtgaaaaaaggttttgagttcacactgatggtggtcggtaagaaattaatctatagtctccaacttactaaataaatatctcccctttccaatctctggagtatgataacgtgacctataaagaaagaggaaaatttggcagagtcaaataacttgagaatttgaacaaatatatgtgtattcattagaaaatttttctcaggagcaaaattatttttctgtcactttcttatttatatgtagtgaaagtttactcattgtgtcagctaggctccaaaatggcccccagtgattcttatctcctggtattcacaactttcttgtcccttcctgcattgaatagggttttacctgtgtagccagtaggacattgtggagatgaaagtgttgtcattttctaagactaggtcataaaaggcattatggccccccaccttgactcttctcaaattactcactctggaggaagccagctgtcatgtcaagagaacactcaagcagccttacagggaagcccaccaagtaaggaaccaaggcctgccaatggctgtgtaagtgacccgtttcagaaatatcctccaggccaggcatggcggctcacacctgtaatcttagcactttgggaggccgaggcaggcaggagttgaagatcaggctgggcaacatggtgaaaccctgtctctacagaaaatatgaaaactagccaggcatggtggcatgtacctgtagttcctctcacctgagtccaggaggttgaggctgcagtaagctgagatcatgccactgcactcaagcctcaagcctgggtgaatgaaaccttgtctcaaaaaaaaaaaaaaaaaaaaaaaaatccaggcatttacagtgtaacattcacaatgtctaatgtctaatagaaaattgtgtggcatcaaagaaacaaaaactgtacataatcaggagaaaaagcaggcaatagaaacagatccagaaatgatagaaatggatctcgatggcaaagaagaactctattacttaaaggaaagcatgaatataataagataaaggaaagatacaacagaaaaccaagtggaacttctaaagattaagatacaaccgaaataagaaattttcatgataagcctgacagcacattatacactgcaggagaaaaagcacagtagaagcacagtaagggaaaagctggaaaaaaaaaagaaattgaatgtgccctcagtgtcctttggtacattgtgaacagtctaatatatggattatattcacagagaagacaggaaagcaaaaaaaaaaacttgaaaaaataatgcctgggaatggtccaattttccagcaaagtttataattgccaggtaacggggtaccgagcctg

SEQ ID NO: 691356 - DNA, 112 bp, Homo sapiens
  misc_feature (3)..(3): n is a, c, g, or t
tgnaggtgagagggagctgcatggatcggctgtggggctcgaaaggatgtggcatcgtcctcattagagctcagcagtcgcatcaactcgaaggctgcacatcgtccaggag

SEQ ID NO: 691357 - DNA, 2389 bp, Homo sapiens
tctgaaaatgtggtgagtttagtgactagcagaactgataattgaaaacctgctttgcattctatttgtcaaaaataaaaaccaacctctaaagtacattcctcacatttgtgaacagttatgtttctaattatatgatgttcaagttctgtagtctcatagacctggattcaaatcttggccctgctctggatagtactctgaccttgggcaaattagagtttctttgagtaccctcaaagatcatactgcaaacatagtagtactgtaggtactaaacacagaatgatgtttgtgaggtacttagcccagtaccaggccttatgtaaacacttaaccgattgaatggtgtcatatgaataaggtcatgacaaggtttttctttttatttaaaggtgaatcaggtctaggaaaatcgactctcataaacagcctattcctaactgatctgtacccagaaagagtcatacctggagcagcaggtaaaaacattcttatgttactgtaagtgtaattctacatgaaagatgctgaagactgcctaattaatattttatgtcttagctgtgtgttttgtttgttcttgttcagctttgaacacaaggaaaacacttttatggggtaggtgtgctgcaccgaggtccttggatttgggttgtagactttctttgacacgtatccatggatccatcctctcttgagtttgtctgtaaaatgtaataagtagtttctgcctatattaaatatttgatggaaggattaagtgagaatgttttacatcaaaaatgctgtgtaactagaagattactaggatagatgttcgaattcatctactgtcagaaagttccagcacaggacaccagcatccacaaatgactgttgaatgaaataggcacacatagtgagagcctaagacttgggctgctgcaagaatatgtagccctttcagaatatttttgaattcagtttttaaatgaattcgtaaattgctttctttttcccaggaacagaaattataatttttaacatttgtgtttttaaccttccccagtagcacaataatcttagctttaaccttcccctttctgacttctctgggatctttttttcttaatccccatggtatctttggagaacctacctctgtagagaggcagtagactctgaagtcacctgtcgtaagaacgtgagctttcctcttcacatgctgcttatattccctattaagtttgtttcttttctagaaaaaattgaaagaactgtccagattgaggcttcaactgttgaaattgaagagcgaggggtcaagctacgcctgacagtggtagatacccctggctatggtgacgctatcaactgcagagattggtatgctcccccatgcccagggatctgcatttgtttacttaatatacttcataaatttatagatagtgttaatgagtgattattaagtttgggattgctgtatataataaaacacctagacaatttaaagcgtgttaaatgttgactttttaaataaggaattttatagagagtaatttttttctggtactctactgtaatttgagatcgcaaagccagtcatccatagactgctagtataaatgaaacacctggatttgagccgtggttggtgaccgagatactgtagtacatcctttctatgtggaaggaagtgaaacctgttagagagtgggttgagtcgtagtgtctgtaaatgactgctcattggcatcattttcacaaataaggaaatgaagaagtagaagatagagcagtctgtcacctgtactgtgcaaagaatgccacttttgttgtacaaactccctcctggttctattcctgtcaacataaagcatcaggtttccaccactagatgaaaaggggaaggttctgttatctttctcctacatttaggaatttctcccttcttacatgtgaaagtgctgtactgtttcccagctcagttaaatgctgtttcccagctcagataaacctgttcttgacccatgttctctaccaccctgttcctctgccccttttcacagtcacgttcctgaaaagaattggcagccctggctgggtgctgggattacaggcgtgggccaccgcgcccggctgtgcgtctgcacattgcaaattcacttatttgttcttgattttcccagaattgttttattctgtaagggacagggtctcactctgtcacctaggctgaagtgcagtggcatgatcatagcctgctgtaatctctaactcctgggctcaagcaatccttctgccccagccactcaggaggctgaagcaaaagaatcgcttcaacccaggaggcagaggttgtttgcagtccagcctgggtgacagagcaagactccgtctcaag

SEQ ID NO: 691358 - DNA, 306 bp, Homo sapiens
gagagcactgatcatatggatagatagggctataatgccctcatcttgctgcatctcttctaggcctctttagtggtgaagtgcatactcccttctgagaattgctggctctaatcgtgttgctctaaattcgacgtccggtttctatggattgtttgtaaccagcttttgctgcaactgttactctgattaatatcttgctaatcataggttatggaaagactgtgtttctgtttaaaggctctgttagaaattactgatgcacacactgtattgtaaattcttatctctgtatactatacttct

SEQ ID NO: 691359 - DNA, 313 bp, Homo sapiens
gccaaacctcccctttcccttgcccaaggtgaatttggttgggcctccctggcattttcctccccgggagggggaagaagaggaagaggaagagggggggagggggaaggaaggggttgggaaaccagaggggggggaagagggggaccttctccctttggatggatccccaggagaagccaagcctcaggtccgtggcttttttttcccccgcagcagcccggcccccggggcccccaaaagccggcttgaaggctccgggggccaggcctcttcaggttttggggtggggggccccctggggccccgcgga

SEQ ID NO: 691360 - DNA, 702 bp, Homo sapiens
agcggacatccgcctgcgcgctgggcggggcggggcgggctggggcgggctgtgagcggaccgcgagcgctgggcgggtccgcggcgcggtcggtcggcgcctgttctcgggctgtttggcggacgaagcttcacaaaagatgtctaagcaacagccaactcagtttataaatccagaaacacctggctatgttggatttgcaaacctccccaatcaagttcaccgaaaatcagtgaaaaaaggttttgagttcacactgatggtggtcggtgaatcaggtctaggaaaatcgactctcataaacagcctattcctaactgatctgtacccagaaagagtcatacctggagcagcagaaaaaattgaaagaactgtccagattgaggcttcaactgttgaaattgaagagcgaggggtcaagctacgcctgacagtggtagatacccctggctatggtgacgctatcaactgcagagattgggatgcttccccaggccacgggactgggattggtacctaaaaacactcataaatatagggaggggtgatgggggatatttaagttgggaatgggtgtattaataaaacccttacacattaaagggggttaaaggtggctttttagggatttttaggagggaaattttttgtggccctcccgggaaattgggaagccgccgggtttctctcgggttggtttt

SEQ ID NO: 691361 - DNA, 746 bp, Homo sapiens
  misc_feature (7)..(7): n is a, c, g, or t
  misc_feature (9)..(9): n is a, c, g, or t
  misc_feature (11)..(11): n is a, c, g, or t
  misc_feature (33)..(33): n is a, c, g, or t
ccaattngncnttggccggggggtcggcgcctnttctcgggctgtttggcggacgaagcttcacaaaagatgtctaagcaacagccaactcagtttataaatccagaaacacctggctatgttggatttgcaaacctccccaatcaagttcaccgaaaatcagtgaaaaaaggttttgagttcacactgatggtggtcggtgaatcaggtctaggaaaatcgactctcataaacagcctattcctaactgatctgtacccagaaagagtcatacctggagcagcagaaaaaattgaaagaactgtccagattgaggcttcaactgttgaaattgaagagcgaggggtcaagctacgcctgacagtggtagatacccctggctatggtgacgctatcaactgcagagattggtcacgttcctgaaaagaattggcagccctggctgggtgcgatggctcatgcctgtaatcccagcactttgggaggctgaggtgggctgatcacaaggtcaggagttcgagaccagcctggccaacatggtgaaaccctgtctctactaaaaatacaaaaattagccgggcgtggtggcgtgtgcctataatcccagctacttgggaggctgaggcaggagaatcgcttgaaccctggaagcagaggttgcagtgagccgagatcacgccactgcactccagcctgggcaacagtgcaagactcagtctcaaaaaaaagacgaattgcagccctgt

SEQ ID NO: 691362 - DNA, 349 bp, Homo sapiens
gccgacacgcccaggccgacgagatcgcagtccggctgtgtggaatagccctggaagttgcggtgcagcaggccctggcgcttggcgacggccagcgggtcgtcgggcagcgcgaaatggtccatgccgatgtaggcatagccctcgccgagcagcgcgctgatcgcaccggacagcatggccagcttgtcgccggccggcggcagcagctcggccacgatgcggcgctgcggcttgaagcgctgcggcaaatgggcgtaggcatacatcgcgatgcggtcgggccgcagctcggccacctggccgatggtgcgggcgaagctggcgggcgtctgcagcggcaggccgt

SEQ ID NO: 691363 - DNA, 391 bp, Homo sapiens
aattatcaagtaaagtttgctcattcttgaaattgccattgttgctacacaacagtgacattttatcaatgttctatttttttttttcctaaaattattttcttcctggccaggcacggtggctcacgcttgtaatcccagcaatttgggaggccgaggcaggtgcagcacacgaggtcaggattttgagactagcctggccaacatggtgaaaccccacctgtactaaaaatacaaaaattagccaggcgtggtggcaggtgcctgtagtcccagctactcggaaggctgaggcagtagaattgcttgaacccaggaggcggaggttgcagtgagccaagatcatgccattgtactccagcctgggcaacaagagtgagactccatctca

SEQ ID NO: 691364 - DNA, 2933 bp, Homo sapiens
ggaggcggaggggagcggagcccggagcgtcgtggaaagcattggacacatttccaccatgctaatggcattttaaatatatttggcaattttcccaattttttactgaagaaaactgtaagtttatacttgaggactgaagtgtgactctgccgattatcaggctttcaagatgaatctggaaaaactcagcaagcctgaactcctgacactatttagtattcttgaaggagagcttgaagcaagggaccttgttatagaagccttaaaggcccaacacagagatactttcattgaagaacgctatggaaaatataacatcagtgatcctttaatggctctacagagagattttgaaacactgaaggagaaaaatgatggcgaaaagcagccagtctgcacaaacccactctctattcttaaggttgtgatgaagcagtgcaagaacatgcaggagcgcatgctgtcccagctggctgctgctgagagcaggcaccgaaaggtgatcctagaccttgaggaagaaaggcagcggcatgcacaggatacggctgaaggagatgatgtcacctacatgctagagaaggaaagagagaggctgactcaacagttggaatttgaaaaatcccaagtgaaaaagtttgaaaaagaacagaagaagctctctagtcagctggaagaggagcgctcccgccacaagcagctctcatccatgctagtgcttgagtgcaagaaagccaccaacaaggcagccgaggaaggacagaaggcaggagagctgagcctgaaattggagaaggagaagagccgggtgagtaaactggaagaagagttggcagctgagagaaagagaggcttgcagactgaggcccaggtagagaagcagttatcagagtttgacatcgaaagggaacaactgagagcaaaactgaaccgagaagagaaccggaccaaaaccctgaaagaagaaatggaaagtttaaagaagatagtgaaggacctagaggcttcccaccagcacagtagccctaatgagcaattgaagaaaccagtaaccgtgtccaaaggcacagcaactgagcctctcatgctaatgtctgtgttttgccaaacagagagttttccagcagaaagaacccatgggagcaacatagccaagatgacaaacactgggctgcctggtcctgccactcctgcttactcatatgcaaaaaccaatggccattgtgacccagagatacaaactaccagggagctgactgcaggcaacaatgtagaaaaccaagtgcctccacgggaaaaatctgtggcattggcccaagagaaaccagtggagaatggtgggtgtcctgtggggattgagactccagtcccaatgcccagtcccctctcttccagtgggagctcactgtctcccagcagcactgcctcctcctctctaacatcctctccttgctcttcgccggtactcactaagcgtttattggggtcatcagctagcagccctggctaccagtcatcgtaccaagtagggatcaaccaacggttccatgcagctcgccacaaatttcagtcccaagcagatcaggaccaacaagccagtggcctacagagccctccatccagggatttatcccccaccctcatagacaactctgccgccaagcagctggcccgaaacacagtcactcaggtgctctccagattcactagccaacaagggccaatcaagccagtctctcccaacagctctccctttggcacagactatcgaaatctagccaacactgccaatccaagaggtgacacaagccattcacctactccagggaaagtgtccagtcccctgagccccctgtctccaggaatcaagtccccaaccatccccagagctgagagaggaaaccctccacccatcccacccaagaaacctggcctcaccccttctccatctgctaccactccattgaccaaaactcattcccaggcagcctctttgaccactgcagaagaccttgccagcagctgctcttccaatactgttgtagcaaatggtaaggatgttgagttacttttgcctaccagcagctagtccctaggagggagtctccacgtttgacattccatcagatttcgtccaaaagctcagtcagacttctgagtcagattatgttatttattttgatagtagctgaaaccatctgtataatacatttagtatatttcaccatgttggccaggctggtcttgaactcctgacctcaagtggtctgcctacctcggcctcccaaagtgctggaattacaggcgtgagccaccacactctgccagcagttttcttactgttttcattatgattggttgctgaatttcatatgcctcatcagcatctattaatgcatgattttttttcccctatactgtgttgttggattaatattggtagatgcttttgatacattcctggaatctaattgctagcaaatattgtattcaggatttttgcatttatatttgtgagtgagattggcctatggcgttcattcattcctttgttcctttcttatgtctccatctgggtttgttattaaaactgtgctgtcttcataaaacaaattgttttcccttttctctatagaggcttggaatagttaaatgactttggtcttgtccaaggttagatggagttcaactctaacgtcaagtcttggtccttttcattggtatgtctttaatcagctgcttagtgatacttgttttagtcagattttccagtttttggttctgtattggtaatttacagtgccccttttttctgcattttcagatttggggccattttgctacatgtagtcttctctgtcattattttagctacttttctatatttgctattttttcctgacttgggctcgtgaggcatctgtctctgt

SEQ ID NO: 691365 - DNA, 1027 bp, Homo sapiens
agcggacatccgcctgcgcgctgggcggggcggggcgggctggggcgggctgtgagcggaccgcgagcgctgggcgggtccgcggcgcggtcggtcggcgcctgttctcgggctgtttggcggagtgagtgtctcgccggtgtaccccgcacaagttgtgggccggccctcccgaggagctgcgggggacgcgccgctcgtcccatactctcgggcggtggtcggctggctctggggtgccggcggggcggtgtgggggaggggcggccgagcccaggctcttcggcacttatcgtgggctcccccgtcccgggcggtcctagtgccggcgacagtggctccgacacgggcaggcccgggcgcgggagtggggattccggtgaccccttgttgacctgcgggaattcctctgcactgtcgtcggtgctgggcctcggggcgtcgagtgcggtcgaggtcgggaggtttggtgcttggagggaggatacaggtttaggcccgacaaacacttagagcttgtgtggccatcttgtctttctaacggtgccatttcctccctgaggcgtggaggactggccagcccccaaacctccaagcccatcggctggatgccgtggataagcgaggggagagcgactaggccctgtctgcgggtaccttcggcgaggagaggcgacgaaggtctgcaccagcgaggcacggacaggcagcagggggtagggtatagggttggaggccgccgagttggcccggggatgaggagcaaacctgtggcttccgtggtctcagtggagtcccaactgtgacctggcctactggcccagacaaacctggcttgcttttttaccttttcggtctaattcttgtcagtgccaccagaccttgtcctctctccgcggaaacacacgaaccaactacactgaacttcttgtagttcaaacttctgcacctttggccattgcccaaactcttaaatctggctacttcccaccttaaatggcttctcttaactagtctgtgcttgtgg

SEQ ID NO: 691366 - DNA, 765 bp, Homo sapiens
agcggacatccgcctgcgcgctgggcggggcggggcgggctggggcgggctgtgagcggaccgcgagcgctgggcgggtccgcggcgcggtcggtcggcgcctgttctcgggctgtttggcggaggactggccagcccccaaacctccaagcccatcggctggatgccgtggataagcgaggggagagcgactaggccctgtctgcgggtaccttcggcgaggagaggcgacgaagcatacagaaactgctgtaaaagaagaagttgtgggtatttttttttttttttggtctggaggaatggggacaccaaaactcatttggcagcagaggtgagggtccaggtgaggcgtgaggggtccgtggggcagggtgcgggaaaagggtgcctctaggggatattccatgtgttggccacgtggggtgggttgtgaaattcaggatactgtttaatggggtgattaaggacgaagtttcacaaaaggagtgtcctaggcaacgagccaacttcgagtttataatctccgaaaaacccgcgggctagtgtgggcattggcaaaccttcccaaattcaggtttcaccgaaatctcaggtgaacaacagggtttggagtttccacccgtgaggggtggctcggggaaatcgggctctaggaaaattcgacttctcataaacggccatatcctaacggatcgtgtcccaaaaggagtcatccgggagcagcagttttggacccgggaaaacccttttgtggaaaacactgga

SEQ ID NO: 691367 - DNA, 1471 bp, Homo sapiens
  misc_feature (32)..(32): n is a, c, g, or t
  misc_feature (371)..(371): n is a, c, g, or t
  misc_feature (438)..(438): n is a, c, g, or t
  misc_feature (466)..(466): n is a, c, g, or t
  misc_feature (535)..(535): n is a, c, g, or t
  misc_feature (553)..(553): n is a, c, g, or t
  misc_feature (565)..(566): n is a, c, g, or t
  misc_feature (573)..(573): n is a, c, g, or t
  misc_feature (606)..(606): n is a, c, g, or t
  misc_feature (610)..(610): n is a, c, g, or t
  misc_feature (618)..(618): n is a, c, g, or t
  misc_feature (627)..(627): n is a, c, g, or t
  misc_feature (649)..(649): n is a, c, g, or t
  misc_feature (829)..(829): n is a, c, g, or t
  misc_feature (837)..(838): n is a, c, g, or t
  misc_feature (873)..(873): n is a, c, g, or t
  misc_feature (890)..(890): n is a, c, g, or t
  misc_feature (902)..(902): n is a, c, g, or t
  misc_feature (906)..(906): n is a, c, g, or t
  misc_feature (914)..(914): n is a, c, g, or t
  misc_feature (1471)..(1471): n is a, c, g, or t
gagcccatggcagggtcgaggccgggtgttantcggtgcgaggctcacatcttcaacggaagtaatggatcatgctgatctataaagggggtgatgaatatgacaaccactgtggcaaggagcagcgtcgatgcagttggtgatgatctcctgcaatcgatcgacgaccgctagcggacaattttaaccctgtgtctgaggagcgtggcaaagtccaagatagtttctacctcttatgagagttggatagcagtctggccgtgttcaccaggagatcgtcccacctcaggtgtgggttccatcttatcttgtcgacgttctgcatcagctggttgctgtttatgtcgttggggggttcctataccagcgantggtagtgggagccaaaggaatggagcagtttccccacttagccttctggcaggatcttggcaaccnggtagcagatggctgtgactttgtctgncgttctaaacctcgaaatgtgcctgcagcatatcgtggtgtgggggatgaccagcggggggaggagtcngaagaaagggatgaccantttattaccaanngtagatngcactttatatgtccagcctcttcctcagtccnccanaccaaagntacacagcnaggtttctcaagcagtctcaantccagtccctcatctcacccttactattgctcttgcttgccagttggctttagatttgcatcttctcactagtaaaactgccttccctttgttccttattttctgttgtttttctcgtagagaggtacagtggtaagtcagagttaatataatagggccggtgaaaacagaggctttgcnttgtctcnngacatcagaagttacaataggcatatgggcaaaanggtgtagcaggctcacnggccgttggttntaanacacattntcacaagttgtgagacactggatttctttaattaacaaaaaaatgcagagaaacattatttatacaggggtagatgctgtcagtgttgcagttctggtaccctatagtagcctccatgagaatcgggaataccattgcgggttggaactacttggcagggattacttgggttgacgccaagtactctcggagagactgagctggaggatgttcaagacatggctctcccacctctgaggttaggaccggacaatgtgaacttcccatacaacggcattaaacgggaccacaactcattgtggcaccgggggcgacgtcaacaccggcgacgggcgaaagacgggggcgaacgtcgccacatgccaaaaggcgactaaaacaagctacgaaagagaaggcccctgcacaggcccaaaagagacaaacaccagggggcagagacgacatacatagctaagagagacaccgccgagcgcacgacaaaacgaccccagcaggcgtcaccaaagaagaagacaacacaagaacacaagcaacaaccaacacacatactcggn

SEQ ID NO: 691368 - DNA, 951 bp, Homo sapiens
tcctgcctccggtcggcgcaggcgggtgttggcccgggctggcctcgtggccagggtctctctttcgggcactggcgggctcgctttggcccactggtggtcgcgtgcgccgggtctcctgtcgcgccattacaggccgtgtgtggtcttttggtctgtgcatcatctctcctggaggcctggagtcgtgcaggtctggcggcaagggtcctgtccggagctgtgcttggcaggcaatcccgcgctttggtcccgtgacacccattgatggcagaggccattggtctttgccctaggaccagcgtccaagtgagcaaccagttctcatgcatgagtcctcaaggcaggttttttgccgtgttcaccgttcatccaaaatggtttcatatccttgtattttctctccgcccaggggttacatggaacacctgaggtgaatgacagaagccttgatggatcggaatctttgtttccgcccaggctccagcgggttcctgggcacgtttccaggcaagcagcatttctgcaggaagtggagggaaggcatccttgtagggtggaggtcgctctcctcttctgaatgtgtagtagtggccactttgatttgttggcggaaccagcccaccttcgggtgttgcaggccaaacttctccttgggtccaaaccggccacggaactcatgttttgatctcacacctacacacaatccgggaaaaccacagcaaaacagcgtcagtagccagaaggtccgtcctgaggccgcctctgtcagcctgccagcttttgctgttccactcttataagcataagaaaaccgagctcataaggtaggaactgtggcgaaacagggacaagccgccatcttggtaaaggagaagaggctacgcttgacctccccccccacccccagcctctatatggccaactgccgtgggaggagcacggcgcttg

SEQ ID NO: 691369 - DNA, 142 bp, Homo sapiens
caccccaggcgcttgtatggggaggctcagtatcctctacagtcagggggaagaaggcccccggaaggtgcatgtacaggtagctaggtggaagccacaggatcctatcatgagggaatagtcaatgccaacaagcgcctgg

SEQ ID NO: 691370 - DNA, 665 bp, Homo sapiens
  misc_feature (226)..(226): n is a, c, g, or t
  misc_feature (308)..(308): n is a, c, g, or t
  misc_feature (322)..(322): n is a, c, g, or t
  misc_feature (504)..(504): n is a, c, g, or t
tcttaacaaacccggtcctggggtgggtgtgggtttaatactaagttgaaatgatttcttttacgggggaaggcgcttgggtgaagttaggccttatttctcgtggtcctttcgtacagggaggaattttgaagttagattagaacaccgaccgtggatttacctccggtctcgtgaacctcagaattcagcgttgaggcacttttaatctcgttgtagacacaanagcagacacccttttaatataaggcggggctgtgacaccacattgtggtgaatgtgtctccgtgtatctccacacatctcgnagggtctcgtatanaaccccctatatgtgtgtgtgtgatatatgtgggacctctctatagaaaatataagggaattgtggccgcgtgttatatctcccccatagggggtataaccgtgtgtgccctgttggtgctcacatgttttattggggtatacacattggatgttatcagtaagttcccgctttggatctgnggtggaatgtctcttagctatggtactggtctccggaaggtaggggttcctggctcccgaggtcgccccaaccgaaatttttaatggcaggttgggaagttttaggacctcgggggtttggtaaggtaacggtgtggcattaataaattaaaggtccccta

SEQ ID NO: 691371 - DNA, 126 bp, Homo sapiens
acccctcccagccccccctaaaaaacctaatactgttgcattggggattaaatttcaacaggaatttgggaggcgatccaacgttcaaacctatagcaggggcctgaacataacaatgaatatatg

SEQ ID NO: 691372 - DNA, 1969 bp, Homo sapiens
  misc_feature (478)..(478): n is a, c, g, or t
  misc_feature (561)..(561): n is a, c, g, or t
  misc_feature (1562)..(1562): n is a, c, g, or t
gtgactcctctaatcgttcttgagtgacccactactaatgaccatggtctgtcccacttagactttagacgccatgtataggagacttacgtaatactattccagtatactggctgggagcaccccttagatttgtgtgtccggcttacttaggcgtgtcttacagatgctcgttctgccttatcttccggcatatataccatcttctcactaatcgcaaggtcgtacgtttagtaagcaggacaggaatggtaccctatcgtccctgtctatagggtcaagcacggagcacttcgtaagcgtgtaaagcattcgtacatcgctattacagccattcttttgcatgactatcatttgtactaacacactacgcctacgctcaccgtgttctcctaactcgctcgcgtttgtgtatggcattgacgctcctgtacctattaggcaacattcacagtcatcgctttggcacgtcacttgnccagacgcggtactatacacttactgtgagtcaactgagtggagagaacatacgcgatggccccctttccagcgacatgtccngcgtcatgtgcaagagccacattaccaaacgtgtatagcggtgatttttgaatttccttctcgaagttcagccctagaggaccgcattcgttcagagtgtaggttcctacctgtagtttagaccctttttgcaccagtggaatccatgtcctgtgaggtataggttatgcttccaccccatatttaaaaagccgccctttccgtacctttagacgaaggacaccttattaacgagtattactacctcctaatcttttacccttttgatccacgctaaagtgtcttcggaactcaaggttattatgtttccggtggccactcaaaggggcctaaccctccaactatgtgggccttgccgagtttcaaccccttggattaaaatattccccgccacatgggaccaatattatcctcagcggcgtaaggcggcctttgcaaggtggcccaaggcggcatagtggcaatcccaaccttataagctacaggacccatttacagtggataatttctcctttccacagaagaggatattaaaccttattagggaaggcaaaccccacagggcgccttatgtgggggcccacaaacaactttaaggggctgcaagacttttgtaaaaaaacagcaaaccatttgttctttatagagacacagcacatttcaatgtcttatggtgggacccagattatggggatatacaggtttggtttagccccctatcccatggactatgaggatatccagccccaagagccttatatattgtgccggtggaacacggccgtttggtctgatgagcaacaccggaaatctccacccaattgtggaacggccaatcgtgtgctgtaacacggcgcgacattggcacagcggcacctactcccatggcaaattacagcgcatgattgtaggttaccacacccgacccctcaacgacttgacgcccacctctaaccctaggtccccctgatggcaaaccaataccatcgcgacgtcagtanaggagacaccccatggatgccgtaccacaacaacgaacggacgagtcacccactccacacgggcggcgacagccgaccgctctctataaacacgatctctccgccccaccccaagcgacaagtgcgaccacaaccagatcctatcacacctcgtcattcccccccgccgagctctccttccgtgctgtaacaaaccagacggtgccctcaccacacgcacaaccgcaccacaaactatctaggcgccccgcccacgcccatccccgaccgcatacacacaaccgacttgcatcgcctgacgcaacacgactatccgactgagcacacttacccccacggaaagccaccctctcctaagccggtgatcgactgacgacagctcagcagtccacctcacctgaacgcac

SEQ ID NO: 691373 - DNA, 719 bp, Homo sapiens
  misc_feature (660)..(660): n is a, c, g, or t
agtttgtgctgtgcactggagccactccaatgctggacgcttcactcctggaatcttcagctaaccagtatccaggcagccttccgggagccacggcttggcttgtggttactgaccccaggggcatgaccaacagcctctcacgggtgcatctatatgtgaacctacctaccattgcgctgtgtaagacagattctcctctgcgctatgtggacattgccatcccatgcaacaagcaagggagctcagctcagggggtttaatgtggtggatgctggctcggaagttctgcgcatgccgtggacccatttcccgtgaacacccatgggaggtcatgcctgatctgtacttctacagagatcctgaagagattgacacaccgaagagcacggctgtgctgagaaggcggtgacccaagggaggaattcagggtgaactggactggtcccggtccttgagttcactgctactcagcctgaggttgcagacttggtctgacggtgtccagggtgccctcttgtgccttattcagcaattcccctactgaagactgtagcgctcagcctgccaggaagactggtctgagactccccagtggtcagggcaactgaaatggtaggagcaaccactgagctgtctttaggctggtcctggcatagnggtgcttaaagggagccatgggaaacaggggtggagtgcaaagtaaacgatcagtttgt

SEQ ID NO: 691374 - DNA, 133 bp, Homo sapiens
agttaatgaggaagtggagaggggatttgcacattagggaagaactgacttcttgaaacttgcccaggtgtgacatgcgagccagacacgtaatgatgcaggactgtcattaaaagttgattgatcgctgtga

SEQ ID NO: 691375 - DNA, 455 bp, Homo sapiens
  misc_feature (51)..(51): n is a, c, g, or t
gtgccggtggaagggcccaatgcctgcgcccctggggccctcattggaggntgagcatccactggactcttgtagcccgctttgtagactgatcagtagtttgtgacatgacgatgtttgagtaaagtagaccattttttgcttcatatatcctacaacgtgctgggatcaggaggcagtggtgggtccatggcatttgacccagcccgacgcccttgtggtctccaggcggtcatgacccatggcctgacccggcttggtcagcccggcctggccgtgttttcccaggttcacacccagccctggcccctttttgcccccttgccaggaaatttgagtcctccttaacgtttttcaaaattgtggttttgttttgttttttttcattcatttgttttttaatttttggcttccgttttttatgggcccctaattgtgtgtgttttaaaaattta

SEQ ID NO: 691376 - DNA, 812 bp, Homo sapiens
acctacagcggggtctttttaaggcgttttccccaaggaagttgtaaatatagctacccctgttgatatttttctggggaaaatttcccccccccccgtggtgtaaacgacacaaaactcaggtctcttcacacgggggtgccacccgtgtgtacccccacaaacttcattgacgtcgatcactcactttcttcgacgatcaatgttggctcacagagttttcattcttccacaccccacgcgtggtacaataagatgtgcgcctacaagggtgtcgaagccttgccatcaacccctggtggcatatctacccttggaaagtccccccggcctctcgggcatcaccaaggcctttcgcgaacctgtggttttagagggagcaccccaccactgggggtccacgctgtttttagagggcactacgacgattgacggtgtttagaccatccacccgtccacgcgagtgttccgtgaaccctccctggagtcccagcaagtcgattccttgccatggagactctgtgtcccttccccccaagaatacttgcgcgacttggccacgcgcattgaccgcaaatcatagttcatcgctctcggaataatccatttacttatagaggattctcgacattttcatggattatattggcagggcgagccactctactctcaaatagacaacatcgtgtaatatggaggagagacccacataggaaccttacgctgtgttctaggggtaggtcttctctttcccgcccccgtgagcaaaaaaagatacatgaaaagttgtgtgccgccgcccaacaaagaca

SEQ ID NO: 691377 - DNA, 121 bp, Homo sapiens
  misc_feature (92)..(92): n is a, c, g, or t
  misc_feature (110)..(110): n is a, c, g, or t
gacgcgtggtagcctagacgtctggggatgcttctgtccacctgtcctgcagaggagtcgtttccagccctggcgtgcgcccaaggatgggnttgatggttttcaaaaancagggaaaacg

SEQ ID NO: 691378 - DNA, 283 bp, Homo sapiens
tttttttttggggttttccccccctttttttaagggggggggcccacatttttccccccgggttgggccccgggttttttttttatggggccctgggggggggcccccccccccccccccccccccccccccctcccggccccgggggggggggggggggcccccggggttttttttttttggggggtttttttccccccctttttttgggggggccccccgggggggggggtttttgggcttttttttttttttttaaatttttttttttttttggggggga

SEQ ID NO: 691379 - DNA, 457 bp, Homo sapiens
  misc_feature (54)..(54): n is a, c, g, or t
  misc_feature (68)..(68): n is a, c, g, or t
ccaatgcaatgtaaatgctatgtaaatagttgttatactgtattgttttggaantggaatttttttantgttatattgttatttttcatttttttctatgtattttcaatcccacagttgaatgaatcagaggatgtggaacccacagatacagagagccaactgtattgcctatttgaaaattgcactgggcatggtggttcacgcctgtaattccagcactttgggaggccaaggtgggtggatcacctgaggtcaggagttcaagatcagcctggccaacatggtgaaaccctgtctcgggaaacccctgtctctactaaaaatacaaaaattatctgggcatggtagtgcatgcctgtagtcccagctatttgggaggctgaggcaggagaattgcttgaatcccagaggcggaggttgcagtgagtggagacagcaccaatgcactccagtc

SEQ ID NO: 691380 - DNA, 225 bp, Homo sapiens
ttttttttcaagctttgtctgctttatttcactacattaagttaagtcaataaggcaaaatctagtaacctgtcatctcatcaaagatcaaggagtacctctctgtcccaaaaggcacgaaaaagggtgttcttcacaaatcatagcatgacacttagctcattattgctgatatgctacttcatacatagaataaggtctagtctcgtgcgtttctgcgccggg

SEQ ID NO: 691381 - DNA, 648 bp, Homo sapiens
cgtcacatccggtagagttagagcccgtgcggaggcggtgcggagcatttcggctctgagcggtgggcgaccggcgctgtcgtgcaggggctgcaggcggagcctccttaaggaaggtgctaagaggttggcagatttcgattgaagcactatcgaccggtgactagcagccaggagtcatgagtcgacagcggagagcaagaactacggagagcgggtgaatgttgaagaaggaaaatgcgggaagtcgtgcatttgacaagttttataactgagtatttgaagctcaggaataagtgaagctgagaaatttgaaaactatagcagacaagactgccgatgctagttatcagagcagaagtcccacttgtagaatatggagcaattggtgtgaagtggggacggatgaaagaagtcagaatttgaagcgaagatgaaatgatcaaggaaagcaagaaatactggttgggcgctcggtcgccccaaagaaaagattgagttaagaacactcttggtgggccgcgggagcccagacctttgtcgacaactgtggtcacagggcgttgcaccaagaaaagtccggtcggcacaaacggggggggtccccacctgtaaaaaggcgggggcacccgcgcggctctacccatc

SEQ ID NO: 691382 - DNA, 160 bp, Homo sapiens
cacgaggagtgccttgccctatgtcacacagctagaaggtggcaaaatcaggctgggcatgcatggatgtctgactccataccctgtgccctgggctgcttggctcccaggacatgccaacccctgcgtcagggctgcctgacataactcaaggatggtc

SEQ ID NO: 691383 - DNA, 1035 bp, Homo sapiens
catgagagttgagagggtgaggactctgtcgcctgcgaggaatttgctcacgtcgcggatcccccgtgctgccgacatcagtgtcgtcgcaggtaagacacccagagtccatcggactatatcgccgaagcagtgtatcacaagcaggaactcccgcgaagagcaaccttccgggcaaagcgaccatcagtcatatccgctacaacccgctgcaggatgagtgggtgctggtgttcagctcaccggatgaagcgggcctggcagggtcaagtggagccccatgcttcgtgaagacagtgccccgcacagtgaccctctcaacgcctctgtgtcctggggccatccgagccaagcggtagaggtgacatcgccacaggtacgagtagcacgcttccatgtttgagcaagcgacgttcccagtactccatggcagcctgagtgcccccagatccatggacccagttgatcatccccttttccaagcaaagtctgctcgaggagctctgtaaggtcatgtgcttccaccccgtggtcggatgtaacgctgccactcgatgtctggtcccttgagatccgggctgttgttgatgcatgggcctcagtcacagatggagctgggtgcccagtacccttgggtgcagggtgtggtcaggagggagttgacattggtgtcttgggactaacagagctccgtatcctatctgatagatctttgaaacaaggtgccatgatgggctgtatctaacccccaaaccacactgacaggtatgggccacaagaatcctgccagatattgcccaagcgttaaggagcagatctcagcgaggcctattagagtcagcatggagaagacccttgcttaatgggaagtacagcacgccagggacatactccaggggaggatcagttcaaggtactaaaccagtgagcactcgcgtagatctgggtccccttactgtggaacaatgggccttaccatagaaccagagtgcttggcccagcaagcgtttcatgaggataactggaccagacacg

SEQ ID NO: 691384 - DNA, 598 bp, Homo sapiens
  misc_feature (112)..(112): n is a, c, g, or t
  misc_feature (369)..(369): n is a, c, g, or t
ggcagttcggcggtcccgcgggtctgtctcttgcttccaacgagtgttgtgagactggaacgagatccaggggactctcttccagcctccggaccgccctctctggatttcncgttcctcgcgctgtgcgacctccggtgaccagtcttctctggccgatctcctgcttgctgggggaccctgcacagcaaccggtgttgttgtcgcgtttagactccgttccttttggtggggggggcccccggccccaaaaaaaaaaaaaggccaaaatccgccaaatttggaagcctcccaggattcgtcatgaagttattcgcacccgaacggttgggaagtgcagccctgtctagatcatggcccctttggtgntttcccaaaatttttggtgaccgtgcaggtccttccgtatcaaccttacccctttcttttcctttccttggggggggccccttttttgttccccccctttataaaagtttttatcctccgcggggaaccccgcggcgagacttagattggtgggcgtcccttggggggggacaaaaaggggggccaggtttgaaggccccaaatttttttccgttatccccccagggag

SEQ ID NO: 691385 - DNA, 411 bp, Homo sapiens
tcttgctactgataatgccctctgacccaactgcttagtgtgtttcatcatgcatgtattttttttgcttatgggatggagtttccctcttgtcacccaggcgtgtgatctcggctcactgtaacctccgcctcctgggttcgagcgattctcctgcctcagcctcccaagtggctgggactgcaggtgcatgccaccatgcctggcttagtttttgtactttttgtatttttattttattttattttattttttagtggaaacggggtttcactgtgttggccaggatgatctcgatttcctgaccctgtaatcccaccactttgggaggccaaggtgggcagatcaccaggtcaggaattcgagaccagcctggccaacatggtgaaaccccgtctctgctaaaaatac

SEQ ID NO: 691386 - DNA, 1049 bp, Homo sapiens
atttataggtagaggcgattaaaactaacgagcctggtagagtagctggttgtccaaggatagaatcttatgtctcaacttaacgattatgcaccagcagaagcctctaaatccccttgtaaatttaactgttagtccagatataggaacacgcctctttggacatctaggaaaataagccttggtagagagagtaaaagggagttgtaacacccattaagtaggcgcataaaaggcaggcacaccagagttaaagaagagcggttcagaggcctctaagctacccatttactctaaaaagaatctcctacaatcagtagtaacatgaaactctttcacaccgcaattggaccaaatcgttgatcatcggcctaatagaaagaaggctataggtgttaagtaattaacgtaacatgaaagagcagtgctccatccgccataaagcgcgtgcgtctagattaaagagttattgaactgacagaattaaacagcccaatagtctaataattcaaggcatgcttaaaaagaatagaagaagacccatcatacattaagaaacaaaaaacaaatgaatcgagagattacacacacagagcaggtggcggtggctgaatgaacaagaattgcccctaggaggggtgggccctgaggaagaataagcgtctctcgtcggaagagggacgaggccgacagaaacgggctcctgtttaataacacaagatgatgaggcgggctccccaaacggcttggccgggtggaagacaggggacaactggacgtcatgcggaaagacgcaccagaccctgctggggggaggactgggtgacgaccgtcgcaacagaggataaacgagcggaggaaaacagacccccacggggcttgtactgcgtcaccacaaagcgagttatgccggcgcgagaaagaggccacccgccagtatgcagaaaaattactagacggagcgacgtaaatagaaccgccgcaacgacagacgacgcgcacagatgcgaagccaccgcgcaccaacaacaaaccaccaagcaaactcc

SEQ ID NO: 691387 - DNA, 320 bp, Homo sapiens
acaaacgacctggttttataggtactccagtacatactggatttagcacgatggtcacgttgacaaacctgtaagctcacggaccacgggaacacatctatgtacattcagaactaatctaagttcactttcaagtgacacgtataccacattatcaagtagtacaattactttataacagaatattcccaattcctttgtcctcttccttattgctgtcattcattttacttatccatcagctgtaatcactgacacattgtagctattatttgttttgaacaaactgtagtctgtcagttaggaataagaaaaagatt

SEQ ID NO: 691388 - DNA, 1604 bp, Homo sapiens
  misc_feature (886)..(886): n is a, c, g, or t
  misc_feature (915)..(915): n is a, c, g, or t
  misc_feature (919)..(919): n is a, c, g, or t
caatgggctgggttggtgccgcccacacatcgtggagcgacgcctgtctttttgcttgttattctgctacacccaaagagtaatgtatcattgttgggggacgcgatgaaaatgaataaaactccgtgtaacatcccgttgtctgtaataaaaaaacggcgtttgtgcatagagaataatcttgggggggaggatacccccccctgttgtgtatcattaactgtggagggctccacatgtgggggtcagaagtttgcggggcgcgcccaacaagaggggtcgctggcaatatttcctcctttgattaaaggccctccccctatatatttaagatggacaggcgctcatcaaagaaaatggtctcctttggtggggaagagggggcccaaagtttgatgaacgcccaacgatcgtgtaatttcagtccggtgggaagagaccgttgttgctctaagcaaaaagcgcggtgtaatggtaatgggccgtgtataaacacaaaaaaggggggcgcgttcataaaccacacggtttagtgtacgccccctccatgttggaatacacatactgtccccaacatttgggggggtgtatcaccatatggggggttgatataccccaccatcattatctcaacaggaagaggaaaattaatcattaatagaagggttgcaaccacgcatgggggtaggaaccccacaggatgaacccatcaggatgaggggcccgcctccccatcaggagataattattataagagctggcgctcctggcgcaacattattatctccgtcaatgtgcacaaacagccttattatgtgtcttcggaagattattcctcgtgttgaagcaccaccaaaacacccccttcggaaggagagtatctatnaataaccccatcagaggcacaacacaatngggnggaaaaaagggaggagatttccccccctatagtgtgtataagatataaacaatcggggtagtccttggtgttgagtaacaccacctgaggaagataataggccacacatatgatcgtgtatagcgatgaagccccttgagaaacaacattgaggagatacttcacgtttccctctatacaccccttgtatatagacacacatagagttcacacatgtcccaaaagagatgggagatctataaaaagagatgtctattataaacgtgtatagagaccctcataaatcacgcacatatataaacacctctcatagagagagagagagacacgcctatagagcgacaggtagcgcacagttctacccgagacacatataggggcacataggggggcacacaggagaccttacaaatggtctcacacaaacacactcacaaaacgcacacatggcgacacacacacataagagagagaaacaattgacgacacacaatgggagtttataattataaactaaaagaagctttctgcaccacgcacaataagaaaactatccactcacgaggtgaacacacggcacaacctatccaaaatgggaggaaaaatttttgcacaacctatctcaattctgaaccaaaggggtaatatcccagaatttacaatggactccaaaccaaatttacca

SEQ ID NO: 691389 - DNA, 1038 bp, Homo sapiens
gaagaggtgcagcgtgtccgtggagaggcggctcaagcagccccaggccgacttcagcaagaatcgctcgggcttcatcctcagcgtgcccgggaactgacgccccgcggaggcctggcccggagcccggccacactccgagtcctgggtcccagtccagctgctgcctccgcaacccatgcccgctagaaacctgctgcgagggcccactcccagaggagccccgaacacacatgtaacgatcgccttacctggtctactgccttgggatatcatcttcctctgtccttactgtacacggtccctgttcaataagccaaagacctggtgccccgcccagacccctgggcatgacgtccaggaccactctcaacccagaggcaactggactggtgccttcagctcggcgccggatgcccgtgcaccaggatcaagctcagagcacatggacacggctgtccatccctgatgctgaccctgccacagggaagcgcgtgcgggatgcacagaaccacctacgccgcaagccccacagacaccacactctgcccaacgatgcaacccacccgcccgcaccccacctccaggcacgctctaggccccgcagacccgcccgaaaccctccccaaccccagctcccgcgccgccagcaccaccccagggcgacgcagagaccaccacaggacagcacctacgcacagagcacacgacaacaccgaccaagcccacacgctcaaaaacaaactccacacacaaccggcacacaaaccacccgaagcacgccgcaacagaacatcgccgcacatccccacacacacgcccacgcacaccacccaacccgacacccagcgagcggacaccgaaccaaaaacgaagagaccacgacaaaacccacccgcacacggacacccccacaacacggcaacctgaagcccctcgtcgacacgcgcggcgcccgcagcacgcactcgacgctaacgctcgacgagcaaggagtcaaacaacacgcgcaacgccagggcgcgacgcccgcgaccc

SEQ ID NO: 691390 - DNA, 103 bp, Homo sapiens
  misc_feature (7)..(7): n is a, c, g, or t
agacatnggaaagcgatggcgcgctgggtcggagaggtttggccacccagcaggaagattatcttcccgtgccatccccgcttccagctctgcatccacgccc

SEQ ID NO: 691391 - DNA, 361 bp, Homo sapiens
gacttcgggcattggtgttgcacggatctggtttagccctgcatctgttgcgttatagtgtcgcagagctgggcttgcgcatctgggcgttgttcgttgtgtttggccgctaagtcggtgcgttatctggctcctgcttgagcgcaatgctccgtactgggctatcctctagcagtactagatgtcgagggtcggaagcttgcgaatggtggggtcgatatacgatagcctgatcgatgtgttcctggatgcccaaaaccaaagttaccagtatctagagaagttgtaattacttaactcatactcccgcacctttagacccttctccaagatttcttctgccttggcccctcgaactgtg

SEQ ID NO: 691392 - DNA, 636 bp, Homo sapiens
  misc_feature (20)..(20): n is a, c, g, or t
  misc_feature (465)..(465): n is a, c, g, or t
ttaatgttttaaaacagttntcatgaaaagaaaataatataagggttcaattagatttggaatgaattcatttatttattcgacaaacatttatagagcacctacaatgttccagaaattatgcaaagtactagaaatgtagcgataaacaaaattgacaagtctctgtcttcatggagcttacagaccagtgagggaagctgacattaattaagtgatgacaaaaataaatatatgattattcattgaggtaagtactaggaaacaaacaggctggaatggttggaagagggctcactgaggtacttcctggggtcaggcagcaaagctatgagctacaattatgagtttggattttattctgcacaagatgaaaaatcactgaagagtttcaagtcagagtaagacatggtctgatttttgtttcaaaacatttactttgcctgagtagagcccaagtggganaacagtgtgagtggaaatgagaaagtcactcaggaatgcttaggtaggggaagttgggaggctgaggcaggagaatggtgtgaaccgggaggcagagcttgcagtgagccaagacagcgccactgtactccagcctgggcgaaagagcaagactccgtatcaaaaaaaaaa

SEQ ID NO: 691393 - DNA, 286 bp, Homo sapiens
gcgaattcactagtgattgtgagctgagatcgcacccggcctacagtacttctaacgtaacatcgcagaaacactgaaggagagaagagaatacacttccactcggaattcgcaccctggtcgccttcattcgctgggttcactcgctgaactgcctcgcccccgcccgggaggatgacatctcggcctgggcagagactcgaaagcctcctcctgccgctcgggatgctaacagcagggagagctgtgtctagtttttttttttttttttttttttttttttttt

SEQ ID NO: 691394 - DNA, 216 bp, Homo sapiens
  misc_feature (27)..(27): n is a, c, g, or t
  misc_feature (71)..(71): n is a, c, g, or t
  misc_feature (78)..(78): n is a, c, g, or t
  misc_feature (145)..(145): n is a, c, g, or t
  misc_feature (211)..(211): n is a, c, g, or t
ttgacctcttgccaagacaaggaaccnccttatgagatgtcatcttctgagctctctcgatggagggaatnccacggngatgattgaatatgaaaagtcttggcacagtggctcacacctgtaatcccaacactttgggtggccnaggtgggaggattgcttgaagccaggcattgagaccatccttggccaccaaacgagaccccatcanaacaa

SEQ ID NO: 691395 - DNA, 642 bp, Homo sapiens
gctgttctttcctttcgcgttgcggtgcgcctctcttccgagggggtggcatccgctgtctctgaggggtgggggttcccccctctaaattggctcccatatcatttgactttagggttctggtgtttggtttcttcattctgttactgcaactcccgatttaagccttaccaagggacaacgcctctggccgtccacacgtaggacgcctgaaggtcactcgtggtgaggctgacatgctcacaccattaccaccgtagagagggcaaatcctacagcaccgaggaactcccagagatgagtgtctggagcgcttccagttcacgctttaaaggcccggacgggccacacgtggctggcggcctcgttcccagtggcggcacgtccttgggcgtctctaatgtctgcagctcaagggctggcacttttttaaatataaaaatgggtgttaatttttatttttttttgtaaagtgatttttggtcttctgttgacacattcggggtgatcctgttctgcgctgtgtaccatgtgagatcggtgcgttctcctgatgttttgccgctggcttggggattgtacccgggacccgctcacgtaatgccttgcctgtaaccatgtaattaaaagcctctttcttta

SEQ ID NO: 691396 - DNA, 175 bp, Homo sapiens
  misc_feature (38)..(38): n is a, c, g, or t
ctagaggatcccatctcaggcaggtacgagtgggaacntagagtgggagagattagctgaaagaagatttgtggtaaggggcgatattgtggggttgttaaagggaacattggtcatatagaatgatggtgatggaaacatttattgtacagaactattggtgatggcctgagat

SEQ ID NO: 691397 - DNA, 378 bp, Homo sapiens
tcgagctcggtccaccactcctatagatcagtgctttgggaggccaaagagggaggattacttgaggccaaaatttcaagaccaacctgggtaacatagaaagacctcatttctacaaaaaataaaaatattagccggccatggtggcatgcgcctgtagtcccactacttgggaggctgaggtgggaggattgcttgagcccaggggttcaagttatagtgagctatgatcatacctctgcactccagtctgggtaacagagcatgactttgtcaaactataatatatatgtacacacacacacacacacacacacacacacacatatatgacacaggaatggagaggaagagacaaaagtgatctataagagtggt

SEQ ID NO: 691398 - DNA, 121 bp, Homo sapiens
tatcagctcggtaccctctcacatgcaagacaaattgttccctccttttatctgaacaaaatgcattttttgtcttgattgagtttcttccacagagagaatctgttccattgtcagtaaa

SEQ ID NO: 691399 - DNA, 230 bp, Homo sapiens
gagctggaactacaggcgcctgcaaccacgcccggctaattttttttttggtatttttagtagagacagggtttcaccgtgttagccaggacggtctcgatctcatgacctcgcgatccgcccgcttgggactcctgaggtgtagggattacaggcatgagccaccacgcctggcctcttatatctggattaaggtcctgtctgggcctacaaaggttcaattggcttaa

SEQ ID NO: 691400 - DNA, 235 bp, Homo sapiens
cactttgcactctcaatcccctaggctcaagcaatcctcccacctcagcctcccaagtagctgggactacaggcatgcgcctctatgcctgactaagttttaaggttttttttttttttttttttttgtaaaaacggggctttgttttgtttccccaggcgggttctcaacggaggtccccatccttataaggagaaacaaaaagtttaaatagggaagggaggttttgattcca

SEQ ID NO: 691401 - DNA, 296 bp, Homo sapiens
gaaatgggcagtggaggattcgtccacacccacagcttctcaacgggcctgaatttggccaagaaaaacctttatgagcttgtccctctctggtcaactggttttttgttcgtttgtttttttgagacaggtttgcccttgttgcccaggctggagtgcagtggcacaatctcggctcactgcaacctccacctcaggttcaagcaattgtcgtgcctcagcctccctagtagctgggattacaggcaccatgcccagctaacttttgtatttttagtagagacagggtttctcca

SEQ ID NO: 691402 - DNA, 278 bp, Homo sapiens
gcaccaagtatgggtcagatggactgctactgtgtggttcactcaacccctcccctagacggggctcagaacactgcacttcccaagatgaaatgacatctagtgggcgtgcacgtagggatcgcccatggcacacgtccacttcgtcaggcctctagctctgaccccgccttcctgaactctcacagcagttccccagtggaatccttctagaagtcgaccatgcaggacatgctatgctttggcacctggtccgctcgctttatacacacgtacgt

SEQ ID NO: 691403 - DNA, 640 bp, Homo sapiens
ggcaggccacctggctctcacctactagtgtccccatactcctatgatctgagatacagagaccatgtacttctaccctggaatgagttgaggccactgtgttccttaccgctatggagctattttaccaggctatctgctggggcctgggacaactgctcccacctcctgacacccttctcccactctacctaggcattctggacctctgggtatgggatcatggggtaggaatggaaatggatgtgagcatcaacatgcagtggtgggcttgttggggcctgggagggtgcaatcctacaaatgcggtggtgtgtggtgcagcacaggagtggctggcctccttctgagctcctgtcccctgctacacctattatacccagctagcctaagattcagtggaaagtgcggacatgcttgtagtgggaggggctacctttccataaatccttgatgattgacaacacccatatatacctattagcctgatccccaagagtttcgggcgttgtagcttcatcatcacgagaatatgtgggcttccaagtatgttcgggccaaggacctgatgacctgaagggttgactataccccatttgggtgggagtgtatgagcatctgtcccccttagatctctgaa

SEQ ID NO: 691404 - DNA, 316 bp, Homo sapiens
  misc_feature (172)..(172): n is a, c, g, or t
  misc_feature (175)..(175): n is a, c, g, or t
  misc_feature (279)..(279): n is a, c, g, or t
  misc_feature (288)..(288): n is a, c, g, or t
ccgcagccccctgtgttgggactccgttccagctgttccaggctgtctgtttcctattccttgcagacagatggggtgcttgagaggaagcccaggaagccaagccttaagaggacttggaagcaatttttggatataaatcccttgtcctaaactcagggcaacagtgtantcngcccagcagtgttgaactgcctgtgtttgtctagtatgtgtgtactggctggttggctctgggcttcattccatgtatgccactgctctattgccaagataaantgtaagacngtctgcccaagcccttctttagtactta

SEQ ID NO: 691405 - DNA, 184 bp, Homo sapiens
gtattatagtactagttctctactttctatcttctatgagttatatatatatatactctatttagcttccacatgtaagtgataccacatagcatttgtctttcacatggcttatttcatttagaaataatagccctctcaggttcatactctgtatgccacactgtgaccagcgttttccatc

SEQ ID NO: 691406 - DNA, 448 bp, Homo sapiens
acaggagataccaggatagtgaacagtcaaaacagcaggctcagatggtgagcggggggggggtaaagagacagggggatgagaaggatgaacatggccgagctttactattgaattccgagaggaggcttaccacagccgctcaaagtcttccaactgcctccttgaagaagaggcaacagatgaggaggaggatcaaaactctttgtgacccttggacacggtaataacctcggatctgcaatttcaagtgagcaaagaccgctatggagggcagccaacttttctcagagaagttccccacccttttggtctggggcaaggagtactttacgggagtgccaaatgggacacagtcttgctttgacggaaatggtaacccagaatctcccaattggaatgaaatgtcgctgctcagaggtctctcctccttcgagcttgggtaggc

SEQ ID NO: 691407 - DNA, 1038 bp, Homo sapiens
  misc_feature (412)..(412): n is a, c, g, or t
  misc_feature (699)..(699): n is a, c, g, or t
  misc_feature (1038)..(1038): n is a, c, g, or t
agcgggagtacgagtggagagagcgagctgagctggttgtgtggtccgcgtctcgcgaaaccggtacgcgctgtgccagcatggactgaccatactgaactgagagagtcagcattgcaggaacttcaatcagaacgcgtttcttgcagtactttgcacaagagagtgggtgactggtgaactataagcacacaagaggatgttggtgaacctgtaactgaggatctctgggcgcagaagtccgcgcacgaagcacgagttacaggagcagtgatctgaagtcgaacgtacgagtgctagatgcgtcacactgggcagcacattcgaacttccactggaatttgtcgtgacgaagtgataggcagagaagagacatgcaacatgaccaccagactagtgcacagtaacgtangacattagaagaacgccattgccggtgtgatcttgattaaatggcatggtcaattggtctactaattaagttcgcatggctagaatacgtatctggcgcaatggtggatgacgataaacgcttaggtagaaagaaagttaacgagaattgtaaggacagttcgatcgaatattgattctagggcatagctaggatattggcatggttggatgtgtctaaagtaagactagtgaatggagttccgtacaatattgagtggatcaggtcaatagtgatacgaccgttgntaacaggatatgctgtttagaagtatctcgtgtgtagccaataaaattgttccaattatgtcctgtgtgtcatttgggtgttgctaagctgtcattctggtaaccaatggtgttcatcaccgatacgtgtgtcaatagagccaattatggctatgctattagctacatctagaggactttcaattctcatccataggttagtctatcacctatagtcttaacgtggatcacattgtcccttaggaaccctgtagtgtgaagaaaaccattgcatcaaggtaaacgatggttggcagtggtggactgttacatcctggaataataatctaaagacccctn

SEQ ID NO: 691408 - DNA, 983 bp, Homo sapiens
gacgaggggctggattcctgaaaggctgtactgtgaggatccccaaccgcctgctgaaacccaagcctgccgcgtagagagcgtgctgtactgggccctcttctcccacctgattcgagtcccacatccccaggatgtcaacctcagtccctcaaggccatacactggacccaactgggctgaagaaagactgattgaggatggcaggacctgcatggacccagctgatcatccactgctctggcctgtgctatgaccatacacccactatctgccaggtgccaccgcagtgcactggcccaagccccaagagacctggcgacacaagccaagccacaggagcccggcgcccaaccgactatgcactgacgctgcacacgcaggcgaccgcggcacggaaggcagccggcaaacggcacgcacacgcacccaacggcacgagatgcaccagccacgctgccgaccccaccaaagaaccgaccactaacccacaggtaagaccgggacacatgccacacgaagcacgcacacccacaagacaacgaccgaacacacaccacgcgcacacgaacaagaccccctaagcaactgcgacgagcgtgagacaaccacagcccccaaaacaccagccgggaacgacaacaccgcaacaccggagacccacaggcaacgcaccaccgccagaacccacccccacgagccaaccacgaccaccccccagaacacagggacaaacatataaccagagcaagtgttcaaatcacttgacatacaaccagcggaccaatgacactgactcatcagcaaaagtttctcttccaggacgaagggatctgctgatccacagcactacgagagggaatacttaactccgctagcgtcataaaccatcacctgcatacttgtttactaacatggtatactaagtgagcacccaacacacagcccataccgaactctcactgatgtcacataagtgtgca

SEQ ID NO: 691409 - DNA, 121 bp, Homo sapiens
aaccgaagtcgcgggaacttggtcgaatcggtcacgtcttgcacgtagagcagcactgcatcggggtcattggtcaggaccacatcgccctcgatgtcgaacggggcggtgccgcggtcgt

SEQ ID NO: 691410 - DNA, 283 bp, Homo sapiens
acaggatctttccgactagcccgacagacaggagagtcattggtggctgggggtgagctgctggatagatggcagtaagaacatattgtacattattgatgaatgaggtgactgtgaagaatctccagaggaggccacgggagaacacaatgacatgagtgactgtcctgcttggttaggaaagggaaacgtaaagttgtggaattcttgttgatgcatggatgttgagcagtggtgaagcccttgtcggggctagtcgggggggggggtactgaggctccga

SEQ ID NO: 691411 - DNA, 103 bp, Homo sapiens
gaaaagccttgccttcccaaggagttggcttggctctttgaattacgttagccaaattatggggctggtgttgtttaggaaggaaaccaggctgtaagggtaa

SEQ ID NO: 691412 - DNA, 361 bp, Homo sapiens
aaaaccaggcctcagatttaagagaacgttcaaaacagtctttggttggcacggggaacactggcatgtaagctctccttaacccggagttgccacatgggtgtaaatcaagtctctgcgtatgtttaagaatttaactttatgtggccgcggttctctccttaaaaacgattacgccctttcgtgctcgcgtcaaagtttaaagagtataacgcatttttcacaatgatccacgcgttaaaatcgcggatatttcttaaccacagtattcaacagcgcacacaaagcgataaacccctttttgttgtgccacataacaatagagactgctttatacagtttttttcacacacactaaccc

SEQ ID NO: 691413 - DNA, 114 bp, Homo sapiens
cgacccaagcaatcagcaaacagcatgcaaagcaggacagcaagcaaaaccagcaggtccaacaccacttccagttttcacagcaatgctcattcccagcatccaacatgccca

SEQ ID NO: 691414 - DNA, 248 bp, Homo sapiens
aataactatttaattaacctttttatttcttcatctattaaaaaattttcagtagtgcgttctgaagcatttaagtaattgaaagactaaagttagagcttgaaaggaaagatgctgaaatccagaagctgaaaaatgtaatcactcaatgggaggcaaagtataaggaagtaaaggcaagaaatgcacaattattgaaaatgcttcaggaaggtgaaatgaaagataaggcagaaatacttctgcaa

SEQ ID NO: 691415 - DNA, 704 bp, Homo sapiens
  misc_feature (354)..(354): n is a, c, g, or t
  misc_feature (475)..(475): n is a, c, g, or t
  misc_feature (540)..(540): n is a, c, g, or t
  misc_feature (543)..(543): n is a, c, g, or t
  misc_feature (547)..(547): n is a, c, g, or t
  misc_feature (580)..(580): n is a, c, g, or t
  misc_feature (590)..(590): n is a, c, g, or t
  misc_feature (609)..(609): n is a, c, g, or t
  misc_feature (653)..(653): n is a, c, g, or t
gcttaaactcatgataatgctgcgatgtgtggttttgcttgattttgtattttatttgggcatctggaattgacacaccattacattctgtttgcaggattttttttgtaaccatgaaattgaacatttccaaattataaactatgttaatacctataaaatatatagccaggaaccatttatcatcaagaaaagtgtaagaaattatttttgagatgtaatttaagattgttttatgtaaaaggaaaatcttgtatggcatcgaatagccttaatgaatttaattctttcacaaaaatgatttcaaattatcctagagtataacatttttatcaaagatattatttccggagntcttctttctttcttttttttttttttttagtaatttagcaaaaacattactgttctaatgctgaagtgacttttgccagtgccatgtccagggggggaggtataagttacttgctcttancatttgggctggattttttggtttgggggacacctttgggagtattcccaaagcatgtctcaagnggnggcncccgagagcatggtttaaaagcttggacccctncttgggcagnaagaaaaacagggttttantaaggaataagtccaggaataggtaacccaatgctttgcttttncctacccaggctaatggttttaaacccgcctgaaattggaacctgccggga

SEQ ID NO: 691416 - DNA, 570 bp, Homo sapiens
ccgccttaggcgttttttttctaaaaccaaatctttattctctagctttgaacaaggaggggtaaatggttgtcctgttatagtcccagagaacagaacaaggcccaataggtagaaattataggaaagcagaattcattcattataaggaaggattctctaacaattagaatttctaacaattagaatcatccaggcctcaggaggtgcggaagttccgtgtcacctaagttgctcaagcagaggccaggtgtccatatgctagaaaatggacgaaaaggaaactcaccagcaagtttcccctcagtgttggccctccattcaccaatgtgcggcagctcctttgctgtgacagtgctgagctcgtggagaggagcgaaggagggcgctgcgcgtgttcagacaaagagcctggacacagtgcgtgctgacagccaggggaaggctctcagcgcctgggacggggcgacagactaaacgcgagacagaccagggagtaaatgcctggggggtctgcctcttggggaacggaacgaggatggaagtactaacagcagacgggtctctcca

SEQ ID NO: 691417 - DNA, 205 bp, Homo sapiens
  misc_feature (104)..(104): n is a, c, g, or t
  misc_feature (112)..(112): n is a, c, g, or t
ggatcctcttgccttagcctccctagtagccgccatacctggctaatttttgtattttttgtggacacatgaggtttcaccatgttgcccaggctagtcttganctcctganctcaagtaatcctcctgcctccgactcctaaagtgctgggattacaggtgtgagccactgcaccccaaggggggggggggggggggggaattc

SEQ ID NO: 691418 - DNA, 926 bp, Homo sapiens
ttgaagatggaccacgtcatggacgtggtagtgaagtccgtgaactggatatgctcccggggactgaaccacagcgagttcacaaccttgctctatgagctggacagccagtatggtagcctcctgtactacacggagattaagtggctcagtcgcgggctcgtgctaaagagatttttcgaatccttggaagaaatcgactccttcatgtcatccagagggaaacccctgcctcaactgagctccatagattggatccgagacctggccttcttggttgacatgacgatgcatctgaacgctttgaacatctctctccaaggacactcccaaatcgtcacgcagatgtatgacctgatccgggcgttcctagcaaaactgtgcctctgggagactcatttgacgaggaataatctggcccactttcccaccctgaaattggtttccagaaatgaaagcgatggcctgaactacattcccaaaatcgcggaactcaagaccgaattccagaaaaggctgtctgatttcaaactctacgaaagcgaactgactctgttcagctccccgttctccacgaagatcgacagtgtgcacgaggagctccagatggaggttatcgacctgcaatgcaacacggtcctgaagacgaaatacgacaaggtgggaataccagaattctacaagtacctctggggtagctacccgaaatacaagcaccattgcgcaaagattctttccatgttcgggagcacctacatctgcgaacaagttgttctcccattatgaaactgagcaaaaaaaaatattgctcccaggttaagggattccaggtggaatctggtcgtccacatcgaacgtgatggcaagaaaatcctggcagggcctatggtgggacaggtggagctcagcccaggatcggcgtgcca

SEQ ID NO: 691419 - DNA, 164 bp, Homo sapiens
ttcgactcgcacccaatgaaattctgtcaaaagttcctttctggatttcatgactgatttttgagaagagtcacacacttctcaggacacacttgtctctttctccacacacattgacctgcgtaatttctcttgggactcatttccccaaaaaggggtacttt

SEQ ID NO: 691420 - DNA, 916 bp, Homo sapiens
gagtccgagtggagagagcgagctgaggggtggtgtggtcgcgtctcggaccaccggtaccgcatgcgagcatggctgaccaattgactgaagagcacatgctgaatccaaagaagctgtatggcattattggacaaggatggtgatggaactataatgactgatggatatggggaactgtattgagatctcttgggcatgaatccctacggaagcagagttcctaggacttgatttgtgaagtagatggtgatggtaatggggcaaatggtcttcgctgaatttcgtgacaatgaatggcgagagagttgaaaggactacagaccagtgagagaagactattagagaagcatcccgtgtgttgataaggagtggcaaatggcctattattagatgcatgctgaacttcgtctatgtgatgacaatacacttggagaggagttaactagatgaagaagttgatgaactgatcatgggaagcagatatggtggtgatggtcatgtaaattatgaagagttgttcaaatgatgacagtgaagtgaagagtgtacagaagtgttaaacttctgtacaaaatgttattggcttttcttgtgtgtgcttatcggaaagggtttctccctactggcatagatatgctgtctcgtatgaggacttcatctccctgtgtctcccgtatttatgcgtgtccagagctatggttaaaatggcagcacacggtggaggggtaacggatgttctagcgtgggatatagtaaaagggtggggctgggcacatggggtactcctaggaattggaaggaagagtgagcagggggtacggggacacaccatctcacattaacggggcgcacaccttgggccaaacacgttggactcctattgtcttagaatatcattgatacttgtaggtgg

SEQ ID NO: 691421 - DNA, 471 bp, Homo sapiens
cacaccacctgagtctaaaagtttgagaccagcctcggaaacatggtgagaccctgtctctacaaaaaaaaaaacacacaaaaatggccaggtgtggtggtgtacacctgtggtcccagctatacgggaggctgaggcaggagaattgcttgaacccagaaagcaaaggttgtggtgagccgagatcatgccactacactccaccctgggtgacagagcgaggctccattttacaaacaaacaaacaaacgaccaaaacaaaacaaaaaaacaactggaatgttcagactcccatcatgaacttattgaacgggagagggagaaacatacaagcccttgtccctcagcatccagacccagattattaagctaaacacactggcgcgcatacacacacacacacacacacacacaaatacaaattcacatgtgccttggaggtttgtattttcaaaacagcttaaaaaattc

SEQ ID NO: 691422 - DNA, 477 bp, Homo sapiens
  misc_feature (35)..(35): n is a, c, g, or t
  misc_feature (141)..(141): n is a, c, g, or t
tctgtacccaggaagcttagagggtggctaccagntgagacaatgagctatcccccagggtggcagcatgtctgcacatctaaaatttgtggggtttttgtgtttttttaagacggagtcttgctgtgtcgcccaggctgnagtgcagtggcgtgatctcggctcactgctacctctgcctcctggggttcaagtgattctcctgcctcaggctcccgagtagctgggactacaggtgcgtaacaaacccagctgattttggtatattgagtagagatgaggtttcatcatgttggccagcatggtctcaatctcttgacctcgtgatctggccacctcgcgctccgaaagtgctgggattacaggcgtgagccaccacactcagcctggcctttaagactgggaaagtcatggccgtgaattctcagaagtcatgagtccttggatctcttcggtgtctctcttcacagacttttt

SEQ ID NO: 691423 - DNA, 332 bp, Homo sapiens
ttaagtgatcctcccgcctcagcctcctgattagcttggtatacaggtgcacatcatgaatacgctgggactacagacacacaccatcacacttggctacttttttttaaatttttgtaaagataaagcctggccaacatggttaaaccccatctctactaaaaatacaaaaaattagccaggtgtgatggcggttgcctataatcccagctactcgggaggctgaggaaggagaatctcttgaacccgggaggcaaaggttgggttgcagtgagccgagatcgcaccactgcactccagcctgggtgacagagcaagaccccatctcaaaa

SEQ ID NO: 691424 - DNA, 706 bp, Homo sapiens
  misc_feature (37)..(37): n is a, c, g, or t
  misc_feature (64)..(64): n is a, c, g, or t
  misc_feature (70)..(70): n is a, c, g, or t
  misc_feature (73)..(73): n is a, c, g, or t
  misc_feature (75)..(76): n is a, c, g, or t
  misc_feature (121)..(121): n is a, c, g, or t
  misc_feature (123)..(124): n is a, c, g, or t
  misc_feature (182)..(182): n is a, c, g, or t
  misc_feature (242)..(243): n is a, c, g, or t
  misc_feature (277)..(277): n is a, c, g, or t
  misc_feature (486)..(486): n is a, c, g, or t
  misc_feature (570)..(570): n is a, c, g, or t
  misc_feature (626)..(626): n is a, c, g, or t
gggtaactaacacattctctctatatcgcaggtggtnacgtctgcctgtcctccattgctggtnccacanacngnntacataaattgagtaggaaagggttatatatgtgggtggcctgtncnntacagagtacggtggcatggtctctgctgtgtccctttttcaaatattttcccaaaanggaccagtgcccctttcttctcagccctcctccacagcctgactgtactgccagccgcanncatgagaaggaggtgtgaaggaagcctgaggacntccacctcgagaaaaggaaacaggaaaactatttccttccgccttctctggaccaaattcactcccctcagctccagagagtgctgcaaaaatcttccttagggacgctgtgaagacacggggaagaggccagccctgagcgggcaagaagaaaagcttgaactttccatgcagtaccaagcaaggctattttggaaacaagcaaacanacaaaaaatggaaaccaacaccatataaccacaggttgggtagctcctaaatcctggacagcatttggattgggggtaagggcnattttactccagctccttgtttataacccgcacaagtgccagaggtttaggaccanactgactctcttcctcgtagacatacgcgggggatctctgagtcactgagctcactgatgctcacaaaggtgggggtggg

SEQ ID NO: 691425 - DNA, 342 bp, Homo sapiens
ctcaagtgatctgcccgccttggcctcccaaactgctggtattacaggcatgaggcagcatcccccagcctcagtttcttaattattcctgctacaccagccttgccattgttattccttacacctgtaacagataccaaatcttgtgatggcttattaacattgtaatctacattttttaaaaccataagtaagcaaacaggctttctgagaatattatttttcttctctgtctcctgacagatctgcctctgacttccttttctttctattaccaggtttttctgtgatatattctgtctactgtttttcctcccatttttgtctcaattaattatattt

SEQ ID NO: 691426 - DNA, 276 bp, Homo sapiens
tgatcctagagttccgattgcttgtgtataggaatcgcactgtgcgacgaatcgactaggattactgagagccgggttgactatactccaccatggtgccaggctggggggggaagtaatgaccaccgggagagagctgatgggtccagaaaaaaaagacaagaattgaggagctggggacctcaatggagtagaaaagctggtgttgagttaatggagtgagaaagcccaaaggatgaaatgttgggatcagacagcaggaatcctggaagtgaa

SEQ ID NO: 691427 - DNA, 230 bp, Homo sapiens
ggccacttatccagtgaaccactatcacgaaaaaaactctacctgtctatactaatgtccctacaaatcttccttaattataacattcacagccacaggacttatcatattttatatctgcttcggaaccacacttatctccaccttggctatcatcacccgatgaggcaaccagtcagagacgcctgagacgcaggcacatactttcctcttttacacgctagtagggt

SEQ ID NO: 691428 - DNA, 1419 bp, Homo sapiens
  misc_feature (315)..(315): n is a, c, g, or t
  misc_feature (681)..(681): n is a, c, g, or t
  misc_feature (1364)..(1364): n is a, c, g, or t
  misc_feature (1419)..(1419): n is a, c, g, or t
gcttgccatgtgttagagaaggaggaggaagcccatagacccccaaggccccactgatgggcccctaactgatggccaggtacccagatgtccaagacacccgagtgatccatggccacggatggcttgaacgacgtgcttgacaccctcagtgtagtcgatggatgggtgggcggccgacggacccgtggcatgcgatagggtcgtcgctggcaatgtccccggtccaaagaaggaacgaacgaatgttctcgtaccactcgtccttgttcttgataggaacgagcaatgacggacacgatgttgaactccctngagaggtccgctgcaagtctaagcacgtggtcgctcgtcgcggtgacgcgaacgcttggttgtctgtcaggctgtcgcgcgcaggtcgagcagttctgtggcttcctgtcctgtgttgtatactcggatagtgcaatacatataagccaagggactctaccagacgtaggagggtccctctctgggtgaaccaggtacccgatgtaagtctccctgggacgttgaaccgcagagtgtggtgcatcaagacagacccacagctcactagacctggctcgcacttgtacctactcaggaggccttcggactttcttggggcgagactatggactctctccccactacgggcggggggacgcgctgacntagagttctatgcgctccatggtcgtggccatgggtacatgcaacgggcgttccttgctgcattttggcctgcgcaggtcgacccttcccttggagcacctcaatgcattttccgtgcccgggcccctcccctgtttgctggaccatacacgcatgatttctcggttcttctgggtctgtgcgttaccctcctcctatcccttaagcggtcctccagggttgaaccggtgactccacgcactcctggggcttcgagtggttgggaagtgctccatctggacccgggtggatccttccttcaaggtcctacttgtccaaaaagtgccctggtgaacacgtggtgaaagccaccgctgggtgttgtcgccaccatgacgggggcctttgacaaagggggccggcttttgcggaccccaaccttctctggctgcctgagaataccccccccaagtgggggtcgacgattgtgccacgggtgtggtgccgtccctcccaaaggtgagtggtcttccacgtgttgtgaccacgaagatcccctactcagcagagccgagtcaaacagcgccacccaagcatatgacaactcaggtgaaccatcaagagctgcgcgaaagcgacaagatttctagagtgcgggcagacgaggacagaaacacactagtccgcaggaagaacgatgttanataccctcatgtccaagcatacaatgagtcagatcgatctttcatccacaaacgn

SEQ ID NO: 691429 - DNA, 204 bp, Homo sapiens
accgctccttaagtaaaaggtgtgacatcataacgggtgtcacattggctggatggttttacagtgcacgactatatatatatatgaagtatgtacttgacaaatctagatggctttcttatagcagaattcctattcttcatctatttcttcggctggataagctgtaccgatggtgatagtgacacggatgtccagaaatcc

SEQ ID NO: 691430 - DNA, 89 bp, Homo sapiens
agaaataaataaattgcctcccttcctcggctcccctttcccatcaccccttcccctcctctcccctccttttccttccttccttcctt

SEQ ID NO: 691431 - DNA, 424 bp, Homo sapiens
atagctgacattattaaaaacacatccgaagaagtagggggccctgtggcgtgtagaagacaaatcaggcatcctgtgaaactacagacatcaggggccagagcccgggagcacctgagtaaggcaaatgcagatgataggcggagagccgaccaggctcacaccaggaatgacgaggtctgatcgaattctccttcacttcgggcactacgctggctgtgaatcaccttcttactcgaagtccctttctttgttctgacaaagtggcctcggctataggcaagccagatgccacagaccaagattcccaggagaatcagggttacaaggacggctgccacgatgacccgcacattccgctccacagcttccatgcgcacagcatttgaagtcaatgggtgtcccatacccattccgtgcccac

SEQ ID NO: 691432 - DNA, 112 bp, Homo sapiens
cagccattgcttaggccttggctcgcctggaccacaagtatgcacctgcatgttatgcccaaacgtgcactgttgcttacacttggtcacgcttggggaaggtcaacgagga

SEQ ID NO: 691433 - DNA, 208 bp, Homo sapiens
tcttgatcatgtaagcttcatacacatccttcttgatgaggacaaatacgtactccatctctgtacgcttatatgatctcatcctcatacttgtccttgacgtcctccaccagcccctgaatgtagacaagctcaacacccactagctaaaaaatcccaaaactataactgaactactcatacccagttggaccaatctataaaccta

SEQ ID NO: 691434 - DNA, 1621 bp, Homo sapiens
tgcttcaccttttctgctgtcaccttatgcacgctccttttcgagctctgatgaaatctctcgcgtgcctgcggtgcaccatggctcatcatgacgtgtatccactgatagacacagcggcaatacgtacggtgctctctttcatggagcaatgtcctcctatggtcatttctctgacactctcctcgagtgctgcttcgacaagtgtctccctcgtgtcactatgactgcacacaggcacccctctggaccggcggggaaccatatgtgtgggtggaatgcctgaacggcaaaacgtaatactcgcgtcttctaacgatacagaagatgtcgcggtctccataatcggtgtaccaaggcgactaacgttgaatcagactactacacagagaaatttccgcagcgtgggagacgtacatgttggatacaatgtatctcgcgtctgacataatcagtcggccccactttctgttcgacgtcttgcgcgtgatcttctgcgttgttctccttggttctagttgtcttgtatgtcgtgtcttgtttgacccgtctctgttgttgtgtctccgaacggcttagactcctctgcttgccgagaacctagggctcactttctgttacgcaacgtcggttaactgaaacgtttgttctgctgctgcgtcgcatgggaacggagtcctcggaatgaactctcattgcggtggcttacgtaaatggttgcagacgggttcgtcatggcccaatttctacggattagtctttgctctgatgtatccctcatccaccaggttctccttcttcgtgtatgtatggcgctgtcatgtacgttggaacgatatctctctgtgttattgtgtgagatgccccttgttgttatagtggatgtcccctggtcattctcgcctcacctctctgcatggctcatccatgcaagaacgacgtgtccactgggtcactctcaagatgatcctatgctctctgtgattactgaatgctgagtgtcattgtggtgctgtcatgttctcatgatgccccttctctgcccctttagtattctgagatcctctgcttctcaggaatcaggagccatgtccgtttggtccactcatgttcacacttctgatgtgagtgttcatcgggtctcactaagcaaataattattcatgatcctggttgcactatcagtcatgaactgcttagcctccaagggtgtcctggcagcctgtaatcgtcttgattctatgattgatgaactagtccgatggtccacagcttggcctctataataatgctgctcctatgggacgccgctctactttttggtgagaaattagaagagtatcctaatgttgaaaaccatgacatgcgctcttgggatctgctgttctctccagggctccagaagcctgatacctgttaccaaagctaggaaagagctttatcacaagccttcactgtcctggcatgagaactggctatacagctctcagtgtaccccagtacatgagtcgtggggtgtggttgtgcgttatgtggtggtgttggttgttttgtgcttgtgtttgtttgttgtatggtggtgggatgtgttggtgtggtggtgttgtgttgtgggggagcg

SEQ ID NO: 691435 - DNA, 328 bp, Homo sapiens
  misc_feature (49)..(50): n is a, c, g, or t
  misc_feature (55)..(57): n is a, c, g, or t
  misc_feature (210)..(210): n is a, c, g, or t
gcacttctcaacagcaagcagtgatagcacagcctccgcagcaacgcannctccnnngcagccgaatgtctcctcagcataaagctttcttaagcctcattaagaaaaaaactgaaagcaatctatccttgtgtgccactggtgttctttccactttatacgaaagcaagtacccatgctttgttgtgtgttggcctttcatattagacntcattcacaagactttcctctctctgagatgtcatcacctgtatgtcatttattcatcatacacaagagataaatggttataacgacaaatctcattaccgactccctttcagatcct

SEQ ID NO: 691436 - DNA, 285 bp, Homo sapiens
  misc_feature (69)..(69): n is a, c, g, or t
ctggcatctagtcattggaagccgggaggcagaggtagagtgagctgagatcacgccactgtactccangcctggggatagagcaagacttggtctaaaaaaaaaaaaaaaaagaaaagaaaaaaagaaaaaaaaaaaagtttttggttttttatttatatttttcttctttttaaattgatccggccttgggggggaaaaaaaaccattttggaaaacctccagagaatggaggtaaaaaacaaaaacttcgccaccatccagagcgacagttaacactttctt

SEQ ID NO: 691437 - DNA, 444 bp, Homo sapiens
gacccacgcgtccgcccacggcgtccgtcagggctcttctcagggcgctctagggactgccacggctgttgtcagccaggaaggccaaaatcaagagtgagatgtacgaagagttgtaaaatagagaaaagtggagtaggctgaatcggtggttctttgcctcgacattaggatgatggtcatgaaggttctctaggcatgtgtccctccttttcttcaccctccccttgttatcttctagttgaatcaggagaaacttcaaacgttgatgggatggtcggatctcacaggcttgagaactcgttcaccgtccaagcgatttcatgaaaagagctgcgttcttgattaatcatacaaacgtctcaccatgatgtgaagagttgtcacaaagtccttcaaaatagaaaagtaatgacttagaagatgcaaacatttaaataatgg

SEQ ID NO: 691438 - DNA, 366 bp, Homo sapiens
acggagaggactcggcgagatggaagggatgcttcagcccaaaaggctgaggctgcagtgagctgtgattgtgtcactgcactccagcttaggcgacagagtaagaccttgtctcaaaaaaaacaaaacaaaacactagcatggctctgcaaacccagggcctgtgagaaggtgaactgaagcacagagaaacccaggacacaggagaaagaagctccagcccaggagaggtgctctcctgcctcctctgcgagtctgttgaccgctggagaggttgatgtgactgtgacaaagctggggaaattctaatgtgacggaaagttcagtttgactcagctaacatttgttgagtccctgtgatgtgat

SEQ ID NO: 691439 - DNA, 576 bp, Homo sapiens
gtacacattctaaagcatttctgatttgaatatttttgtacattatgatcaattattaaaccttctcttctagtgtgtaaaaaaaaaaaaaaaaaaaaaaaaaaaaaaaaaaaaaaataaaaaaaaaaaaaacaaaacaaaaaactaagctaaaaatctacttaaagacaactgaggacacatgtaatgttcatcaacttcaggatggatggtgaactgtaagaaagatccgatatataatctaattcaaatcactctataggcaatgcaaagaccatcactattggccaaccaccaatcctatatgtccttcatggagatttggaaatgttaattccacacgtttagtgagaaccattgatgacagagtgttgctgtggagtgatgtgcacactctactagccagtctcgtttagcgtctgtttgccataatgaaaaactctgcagtttatgtctccaaatataatcacatgactaaggatcaaataaattgtcagcagcaaccttaatccttgtgcaaaatccaaactatccaacattcaaaccaaaacatgcacaaccttgtggacgttgccc

SEQ ID NO: 691440 - DNA, 109 bp, Homo sapiens
gtaattagtatctgatgtcttgttaagactgctgaagaattatttttttgctgttataataaggaataaaccccacctttattccttcatttcatctaccacttttctg

SEQ ID NO: 691441 - DNA, 814 bp, Homo sapiens
  misc_feature (54)..(54): n is a, c, g, or t
  misc_feature (61)..(61): n is a, c, g, or t
  misc_feature (70)..(71): n is a, c, g, or t
  misc_feature (106)..(106): n is a, c, g, or t
  misc_feature (114)..(115): n is a, c, g, or t
  misc_feature (117)..(117): n is a, c, g, or t
  misc_feature (135)..(135): n is a, c, g, or t
  misc_feature (137)..(137): n is a, c, g, or t
  misc_feature (143)..(143): n is a, c, g, or t
  misc_feature (214)..(214): n is a, c, g, or t
  misc_feature (220)..(220): n is a, c, g, or t
  misc_feature (227)..(227): n is a, c, g, or t
  misc_feature (230)..(231): n is a, c, g, or t
  misc_feature (233)..(234): n is a, c, g, or t
  misc_feature (237)..(237): n is a, c, g, or t
  misc_feature (245)..(245): n is a, c, g, or t
  misc_feature (258)..(258): n is a, c, g, or t
  misc_feature (263)..(263): n is a, c, g, or t
  misc_feature (265)..(265): n is a, c, g, or t
  misc_feature (267)..(268): n is a, c, g, or t
  misc_feature (288)..(288): n is a, c, g, or t
  misc_feature (291)..(291): n is a, c, g, or t
  misc_feature (321)..(321): n is a, c, g, or t
  misc_feature (324)..(324): n is a, c, g, or t
  misc_feature (328)..(328): n is a, c, g, or t
  misc_feature (346)..(346): n is a, c, g, or t
  misc_feature (351)..(351): n is a, c, g, or t
  misc_feature (361)..(361): n is a, c, g, or t
  misc_feature (369)..(369): n is a, c, g, or t
  misc_feature (398)..(398): n is a, c, g, or t
  misc_feature (401)..(402): n is a, c, g, or t
  misc_feature (413)..(413): n is a, c, g, or t
  misc_feature (418)..(421): n is a, c, g, or t
  misc_feature (429)..(429): n is a, c, g, or t
  misc_feature (431)..(431): n is a, c, g, or t
  misc_feature (442)..(442): n is a, c, g, or t
  misc_feature (452)..(452): n is a, c, g, or t
  misc_feature (463)..(463): n is a, c, g, or t
  misc_feature (466)..(466): n is a, c, g, or t
  misc_feature (470)..(470): n is a, c, g, or t
  misc_feature (605)..(605): n is a, c, g, or t
  misc_feature (610)..(610): n is a, c, g, or t
  misc_feature (681)..(681): n is a, c, g, or t
  misc_feature (801)..(801): n is a, c, g, or t
attggtagatcccacttatcctcccctccctgcaaaggcatcttccccaatcangccctancccacccanngccaggagaaacaggaacacccactaggacggagnccctcctnntncacaactcctcctcactncncacctngcctcctttggtccaccctactttccaccaatcagccaaccaaccttgaccacagagaaaccctcacttcnccaacntcatttnatnncnnctntcataccncactaacacccanccacntntnnaccaacacacacccctcctnacnttcaaacactcacacaacccactcttcatncantcancacttcaatcatcacacnacaanacaacccatntcctcaanccattcctccatcttaccaatattccccnctnnccaactacgcnaccannnnaatatttncnaaccccttccnactacttccnctctcttaaanacntacntcacttccaaaagcacttatcaccacacacctgcctcacccctgccctgcagagccaatggatgagaggccaagagggaggcaggctcggggctgggccgcagcagccctggcagacaggctgagccagcctgtncccanataggtctaggggccagagaggtgttcgactacccttgtggcatttactatggtgcagacgacagggagcnacaagcagttaagctcccccaaaaagagaaacacagtataaggcagtgttagaaaactttaaatacaggattaagatcaaatcggtaaggcatcacaaatttgtaaaaaggaattttggntgcattcggcata

SEQ ID NO: 691442 - DNA, 1803 bp, Homo sapiens
  misc_feature (55)..(55): n is a, c, g, or t
aaaaaaatagaacacggattgctagtaatttttatggcgccaaaaatgaattcangtttacgttaacctatgcaaataaagtttttgatttggaaaaactaaatgcagatattaacgcttttaatgtccgtttgaagcgctgggtttctcgtgaaaatttgggtgaaattgtctatatgtttgcacgagaagcgcatgctgaccggaagttggcatattcatatgctgattcggtttaaagaccaaaaaaaggtttatattccgaatcgttttaagtaccaaaataaaaagaatcagtttacgcaaaagctacgtttgaacaaattaagcgcgataaaattgatgcccctatttttgatttatggggaaatggcgttgttagagttcaacgcatgaataatattgatagtgttgctaattatctttgcaacttatatgactaacgttcttgttgatgaacttgatgaaaaagaattggctaaagtgaaaaagcaaggtaagacgattagcccgactgtcagtgatgagagcaaatcttacatcaaagggcaacgattaaaatattttcctagcaatgcccggatattcagttggtctcaaaattatgttgagcctgaagtatttatgatgaaatacggggaagctcgtcatacatttggtttgaaagatgaaaatatgaattatcgtacagccaatgaagttgtaatagagaatgataattatgaaaagccttttattaatcgaattgttagggaaggctataccagtaaggtaatagttaagcataacgtgttcctatcacgtcaagtatgggcgaattggcaagcacaacccaaagagatgattaagaatgacattgaatggtttaaggttcatgcccccacttatttagctaatacagcaaaagcctttgttaagttttatcactacaatgttttgagtgaatttgataaagataccaaacaaggctacttagcatggcgcaaattcgtcactaaggcagaagaaaagaaatatgaagagttaaggcgattgtatcaagataccttaggtattagtatccaatcattccgagaagtaatgacactagcaaagtatcagcagtatgtcggagttaagggatagaaaagagtgatcgccagaggagtgcgtagcacatttatagcgtccgttttgtttgtacgtactagatgttaaattagccattcgctctgctcatttgagttatttcacagttagaaagctattttttgaaagaaagagagatagcttgtttcgttatgttctgaatcaataaaattgtaagaaaacggtgggatgggggacttctagtgactcgaccgaccagggagaggcagacaacccacgcccgcggaccagctctgctgggaacgcagtgggcttgggtgccgtttagcccgaagcgaccagcgtagggtaggcaccttgtccctgctagaagtgcgccagcacgccgtttagcgccgcaggcgctattaacttgacttacaatacaataaaaaacaggccaaaaggatttaatgcatcattccataaataattaatgacttaattttgccgttcaaaatttctagagaattttacactccttatattattaggaaaggagttgtaactatgaaaaaaaataacgttgttattgtggagaatgtattgtttattatcaaaataatttattggattgttaaaattattttgatggtgttttttccgtaattaacccgaacaattaaactctaaaaaacgcctaactggaaatattctggtcgggcgtgtttttaa

SEQ ID NO: 691443 - DNA, 452 bp, Homo sapiens
ggcctacaagaaggaagtatatcgttgaactcatacggttagtagccttttttgattggcttcatttcgtttagtaattatgcatttaagtttcctccttgttttttcatggctttctggctcatttcttttgagcactaaatgatattccattgtcaggatgtaccacagtttatttatccattcacctactgaaggatatcttggttccttccagctttgggcagttatgaataaaactgccataaatatttatttcctggtttttgtttggacatagttttcagttcctttgggtaagtaccaaggagcacaattgctggatcatgtggtaagagtgtgttgatttttacaagaaatcaccaaactgtcttccaaagtggctgtaccatttagcactcccaccagctatgaatgaaagttcctgttgcctcacattctccatggtgggg

SEQ ID NO: 691444 - DNA, 372 bp, Homo sapiens
ccgcgctgggcccggccccttaaacggcttcaacaggaggagcgccccggaggcttccccggggtgtgggcacccacacccagccccaggccggagcactaaacgtgagatggggctgcctcgagccccaacaaagtaatttgggagggactaggagctgagcctttttccttgacggtgccctgcaaaaagccaatcaaacgttgcaaagcccccccgcccctatgcttgggccccccccgagcaggggtggggaacttttagcaaaaggcggcaagcgggacttttggtcccagcatttcctcctttggcctgtgggttattccccccccagtgatctgtttccccccataaagtttcaaatttttggga

SEQ ID NO: 691445 - DNA, 1370 bp, Homo sapiens
  misc_feature (112)..(112): n is a, c, g, or t
  misc_feature (513)..(513): n is a, c, g, or t
ccgttgaataagttgtttttgcaccccgttggtgtttatgtttccaccacaccttgtggggggcgcacgaacagaccacgcaccaacgactgatgtgttggccgtgtggagnagaacacaactagttttgtcttgggaagtgcgccaccacacagggggtgtcgcctcgccctgtctccagcctttttggttgcttggtgggtgaagtggtcaattataaatggcgccccctctgggtgggaataagctctttgtggcctcctcatgtgagtagcccgcctattgtgtagttgtgtatcctcctcataatttcctgcctcgttgagctcccctgttatatcccgctttctggtgttctaaaccccacaccgagggtctccacaggagaagtgggacgagcggcgtttcctaaggaaaacaaaattgtcctgtggtcggcactacaagaattgggggggcctttatgggggcggacgaaaatagggagaaattgtgggggatgagcctccacanggggcagtatatagaaggtcttataaaaggggcgaccacggcgtgggatcccacgaacacaacccgcgttatacccacgcgagatatcttctcggcgagaaagggctatagagactacttctatagagatattctacacgcagacatcctcttgtgggtgtctctcacacatgttgtatatagagacatgtttgtcgagcaaatctctggggagagatacacacggagacattgtgggggaataaagaaaatgaggacacacagagagattgtgacccccacattatgagaccccccacactcttggagtaaagtatagagaggggtgtttcgctcacatatatcactcagaggacacacagatatcgagagagagagtatgcgctcttggcctctgtgttcccccccctcggcacatatattgggggggttttgaatagaactttagagacagtgtggtaagagtgtgcgcacagtgcctcttcatatatggcacagagagttcttctcctcttgcccttacccctctctttcactgacacgggcacaaatatatacacacacggctagaacccctcgttttctcctcacaccctcgttatatcctgtttttcccctataattgaacacatttctatatcacgccccacaaccctccactttctgaccgggccaccctggtgtgtggaaggtggcgcggaaggggtacacgtgaacttctgggggttctcctccacgtgagcccccaataccctcactcactgaaacccttgggtaggcttgagattttgcctaccatcccgggaaacttgttgctggaattgctgatggaacaccaattaaatatttactatata

SEQ ID NO: 691446 - DNA, 323 bp, Homo sapiens
cggtatatagcctaggctagctaggacttgagtctctggggctaacagcatatccgaacgctagttcagatcaatgtgcttgaagcagcagggagagctggactctccaccagcccttctgccatggctagcacctcagaacgatcacgaggtgagcatagcaaggctaacaagcctatctcttgcctggcctatttgagcacagcagtgggatgtctggcatcaaatgctcctagtgctgccaaactgcttgtacagttgtgtacacagaacttgatttctgctgcaacaggtgtcaatctaaccacaccacgacgacgaat

SEQ ID NO: 691447 - DNA, 187 bp, Homo sapiens
gtcctgattagaatcttggagacacaatttattaaacttcttggatttcaagaaatacaggggcaacaaggggaagttggagcaataattatgggtcagtgttctgaaagtgggagagctcaagtgagcagtaagtgaacaatgatcaggtggaggatgccgaggtggtgcatcaaaccggcgggcc

SEQ ID NO: 691448 - DNA, 225 bp, Homo sapiens
  misc_feature (150)..(150): n is a, c, g, or t
  misc_feature (215)..(215): n is a, c, g, or t
gcggggtaaccctttcatttcttcaattttgtaaaagggccaggtgtggtggctcacgcctgtaatcccagcactttaagaggccaaagcggcctaacgctgacacagaatcacttgaactagaaaggcggaggttgcagtgagccaggntcggaccactgcaacctccgcctttctagttcaagtgattctgtgtcagctaactggggaggctnaggcaggaag

SEQ ID NO: 691449 - DNA, 120 bp, Homo sapiens
  misc_feature (90)..(90): n is a, c, g, or t
ggccggtctttgggggtaggcggctgtggcggccgaggttcggcggctgctggcgtttcaggatcggaagccagagaaattcctaaactnggtgtgtgagccttttcactggatttacaa

SEQ ID NO: 691450 - DNA, 745 bp, Homo sapiens
  misc_feature (123)..(123): n is a, c, g, or t
  misc_feature (129)..(129): n is a, c, g, or t
  misc_feature (683)..(683): n is a, c, g, or t
  misc_feature (690)..(690): n is a, c, g, or t
  misc_feature (695)..(696): n is a, c, g, or t
  misc_feature (703)..(703): n is a, c, g, or t
  misc_feature (710)..(710): n is a, c, g, or t
  misc_feature (716)..(716): n is a, c, g, or t
  misc_feature (721)..(721): n is a, c, g, or t
  misc_feature (724)..(725): n is a, c, g, or t
  misc_feature (731)..(731): n is a, c, g, or t
  misc_feature (736)..(736): n is a, c, g, or t
  misc_feature (740)..(740): n is a, c, g, or t
gagagcagcaggaggaggcagagcacagcatcgtcgggaccagactcgtctcaggccagttgcagccttctcagccaaacgccgaccaaggaaaactcactaccatgagaattgcagtgattngctttngcctcctaggcatcacctgtgccataccagttaaacaggctgattctggaagttctgaggaaaagcagctttacaacaaatacccagatgctgtggccacatggctaaaccctgacccatctcagaagcagaatctcctagccccacagacccttccaagtaagtccaacgaaagccatgaccacatggatgatatggatgatgaagatgatgatgaccatgtggacagccaggactccattgactcgaacgactctgaatgatgtagatgacactgatgattctcaccagtctgatgagtctcaccattctgatgaatctgatgaactggtcactgattttcccacggacctgccagcaaccgaagttttcactccagttgtccccacagtagacacatatgatggccgaggtgatagtgtggttaatggactgaggtcaaaatctaagaagttcgcaagacctgaatcaggtaccctgatgctacagacgaggacatcactcacaatggaaagcgaggagttgacatggtgcatacaagggccatcccggtngccaggnactgnnagcggcntctgatnggacangccgnggnnaggacngtatnaaanagtca

SEQ ID NO: 691451 - DNA, 498 bp, Homo sapiens
  misc_feature (50)..(51): n is a, c, g, or t
  misc_feature (192)..(192): n is a, c, g, or t
  misc_feature (302)..(302): n is a, c, g, or t
  misc_feature (316)..(316): n is a, c, g, or t
tgatctagaggtcctagacggactgactgtgtgacgaatcttattgtggnngagtactgctccttattcacttcatgcacagtgcagcgtgacagggctttattgatggggcttggagctgtaataaagtcagcatgcagattgtgaaggttcgtatagccaccaggagacaagggtcaaaggaacgagccnctgtgggctctgctgcttagagtactttgtcctttctcagttcttaagggcaactgggaaggaagagggatcagcacttcacaaactggtgggtgacctcatagattccnacagactcctgggncttttcatcatagtcagtccagtccttctcctgcagattaatgtcactgaaggctgtcccggactccacaccttcagcagcaaacccagcctgcggctggaaatcaactggttcaaggccccggcactcaaactccactattgtcttgaagttctcattgtcttcagcattgtaaggcttga

SEQ ID NO: 691452 - DNA, 764 bp, Homo sapiens
  misc_feature (354)..(354): n is a, c, g, or t
  misc_feature (377)..(377): n is a, c, g, or t
  misc_feature (389)..(389): n is a, c, g, or t
  misc_feature (421)..(421): n is a, c, g, or t
  misc_feature (446)..(446): n is a, c, g, or t
  misc_feature (454)..(454): n is a, c, g, or t
  misc_feature (466)..(466): n is a, c, g, or t
  misc_feature (503)..(503): n is a, c, g, or t
  misc_feature (523)..(523): n is a, c, g, or t
  misc_feature (565)..(565): n is a, c, g, or t
  misc_feature (590)..(590): n is a, c, g, or t
  misc_feature (607)..(607): n is a, c, g, or t
  misc_feature (618)..(618): n is a, c, g, or t
  misc_feature (621)..(621): n is a, c, g, or t
  misc_feature (623)..(623): n is a, c, g, or t
  misc_feature (629)..(629): n is a, c, g, or t
  misc_feature (632)..(634): n is a, c, g, or t
  misc_feature (636)..(639): n is a, c, g, or t
  misc_feature (641)..(643): n is a, c, g, or t
  misc_feature (645)..(649): n is a, c, g, or t
  misc_feature (651)..(654): n is a, c, g, or t
  misc_feature (658)..(660): n is a, c, g, or t
  misc_feature (663)..(663): n is a, c, g, or t
  misc_feature (666)..(666): n is a, c, g, or t
  misc_feature (668)..(668): n is a, c, g, or t
gagttgttttttcctttggccagatgctttttggtcccgtctgtccttgcgccctcaggatttcgggttctcaatttgtgttcaatttttgtgcaagccttgtctagcagctgcttttgtgaaccagaaaaggccattaacatggtcccggatcatcaagtcttctgactctagatgggacactgacagggacttgaaacccttgcatattcaggaatgcatgagatttccagagagcctaccagtatgaaatcattgttcgaccaacaataagccagcttgcttctgaaatagctgtctttccccagtagctactcacctgcctctggtggctgggattccagatagcccacnaaactgtcagtatctatagaccnggtctgtgccanctcctctctcctctgtgctcagtgaggaggcngtaaatgaagttacaggctagcacnatacctantcatgtttcccngtacacctgtagatattactgtacttttatgttctcnagaaataagttgttgcctantcagtgttacagatttctttgtttctttttaattaaaatacnagaagcagctgaggaaagggagacnaggtattttatttctgnctgattttagnaanancttgtntcnnntnnnngnnncnnnnnannnncccnnnttnctntntaagtgtttttgtaattaactttcagattttctttgttttttaagaagttgatgtgcttgtttgacatttgtctcattaaaacttttctacgttga

SEQ ID NO: 691453 - DNA, 791 bp, Homo sapiens
  misc_feature (123)..(123): n is a, c, g, or t
  misc_feature (129)..(129): n is a, c, g, or t
  misc_feature (729)..(729): n is a, c, g, or t
  misc_feature (736)..(736): n is a, c, g, or t
  misc_feature (741)..(742): n is a, c, g, or t
  misc_feature (749)..(749): n is a, c, g, or t
  misc_feature (756)..(756): n is a, c, g, or t
  misc_feature (762)..(762): n is a, c, g, or t
  misc_feature (767)..(767): n is a, c, g, or t
  misc_feature (770)..(771): n is a, c, g, or t
  misc_feature (777)..(777): n is a, c, g, or t
  misc_feature (782)..(782): n is a, c, g, or t
  misc_feature (786)..(786): n is a, c, g, or t
gagagcagcaggaggaggcagagcacagcatcgtcgggaccagactcgtctcaggccagttgcagccttctcagccaaacgccgaccaaggaaaactcactaccatgagaattgcagtgattngctttngcctcctaggcatcacctgtgccataccagttaaacaggctgattctggaagttctgaggaaaagcagctttacaacaaatacccagatgctgtggccacatggctaaaccctgacccatctcagaagcagaatctcctagccccacagaagtgctgtggtccatctgaagaaaccatatgactttaaacaagagacccttccaagtaagtccaacgaaagccatgaccacatggatgatatggatgatgaagatgatgatgaccatgtggacagccaggactccattgactcgaacgactctgaatgatgtagatgacactgatgattctcaccagtctgatgagtctcaccattctgatgaatctgatgaactggtcactgattttcccacggacctgccagcaaccgaagttttcactccagttgtccccacagtagacacatatgatggccgaggtgatagtgtggttaatggactgaggtcaaaatctaagaagttcgcaagacctgaatcaggtaccctgatgctacagacgaggacatcactcacaatggaaagcgaggagttgacatggtgcatacaagggccatcccggtngccaggnactgnnagcggcntctgatnggacangccgnggnnaggacngtatnaaanagtca

SEQ ID NO: 691454 - DNA, 762 bp, Homo sapiens
ccaagcgtcgcgacgagtgccctggcggatgcccccgctgccttcccatggtccagttgagctgccaggcatcacacttgactctcagctgtgctcttgtcgcttctgtgttgtggtgacgccagtgctgctccccagtgggccaagacctgcactgctggaggtctgtgcccgagtcacccacggtgccatactttgtagtttcagcctttcgagccacttggcagcctgtcagttgcttgtgctcctaatgccagtgggaccctgatgttgactgcccccctgtggcgcctgcccatgtgccgtgaggcccttttcatgaaccgggcgaaagctcagtgccttgatctctgctgggcccgtgtgggccgtgttcccatgtggacagtgtggtgatgcctgtggccggactgtgctcgcacgtgctgatgcgggacgcccccctcttggcttgtggttgtctacccttgtgctggctggcatggggccagggtatattgcccgaattatccctccctacaacgatcaccgtcacacaccctcggtcaatactcacttggagatcaccggtaccacagccaaaatcttggaaagacaatgccactatttgattacatctccaataagatgatgcaaagtacctagcaatctaggaagtttagcgctatataagacattgcggactctcagacccaggccaacgtgtgtcatccaatggctctgccaactctatgctgcttctccgaaagaaacgagtgggcc

SEQ ID NO: 691455 - DNA, 87 bp, Homo sapiens
cttctcttctcccctccgcatcggtagcagcaagcactctgcgtctctccctttatccccgcccgcatggctgctctcctccgcacg

SEQ ID NO: 691456 - DNA, 285 bp, Homo sapiens
gaatagaaaaagaagttatactctcacaattataatttaacattgactgagaacttattatgtgccccaagcgtggtttaataacggaagtctttttgtaaagtttaaagaaagtttttattaactagtttaatttttggtgagatgcgcacttttactaccctcattttatggaaggaaagggacaaaacctaagagggggccagggaaatttaaaggggaaaagggccgttaaaagccttttttaaaaacccccgttttttaggcctgtggctggaataagga

SEQ ID NO: 691457 - DNA, 165 bp, Homo sapiens
ctgcttatagaggatcccggtagcgcggtcgttattactctccgcggaaagcaagctcagccccaatgcgtgttgctcaggaaagcagcgcgtcgtggtttctcccctaggtctgtgcttgccaataggaacaatggatggtcgtgggatgcctccgtgctcccg

SEQ ID NO: 691458 - DNA, 509 bp, Homo sapiens
tgcactcaaagccggggcctttccccacaaccaggcaggccacactctccatctacaggctgtgggctggaggacaatggacggacctgcctcggtggctccagaccccacctaacaaacctgaaaagcaaaatccaacatgatctgactgctttcaagtgactgagttccagaacaaagttcaagaacattcacacgaagaagagtccttagcaccatacaagttttgcaaaacccacccacatcctggcatcagctacaggttaccagatgtgcaaaggaacaggaaacatgacccacaatggggagaaaaacccagtcaatcaaaaagcccggctttgacacagatgctggattagcaaacaaggtcattaaagccattggtgggctgggtgaggtggctcacacttgtaatcccagcactttgggagaccttggcgggggaatcacttgaggtcaggagttcgagaccagcctggccgacatggtgaaaccctgtctttactaaa

SEQ ID NO: 691459 - DNA, 157 bp, Homo sapiens
  misc_feature (32)..(32): n is a, c, g, or t
  misc_feature (38)..(38): n is a, c, g, or t
  misc_feature (107)..(107): n is a, c, g, or t
  misc_feature (120)..(120): n is a, c, g, or t
actgtttcattgacttggaaatgctgggccgngcgcanaggctcatgcctgtaatcctagcacttagggaggctgaggcgggtggatcacctgaggtcaggaattcnagaccaccctggncaactaatacattccgggtgtgctggtgcatgcctat

SEQ ID NO: 691460 - DNA, 232 bp, Homo sapiens
  misc_feature (33)..(33): n is a, c, g, or t
  misc_feature (47)..(47): n is a, c, g, or t
  misc_feature (111)..(111): n is a, c, g, or t
  misc_feature (121)..(121): n is a, c, g, or t
  misc_feature (210)..(210): n is a, c, g, or t
ggagtacagtggtgcaatcatagctcactgcancctcaaactcctgngctcaagtgattcttccattcttccacctcagccaccatgcccagttaatttttaaattttttngtagagacgnggggtggggctcctgctgttgctgaggctggtcttgaactcctaggctcaggtgatccttccgcctctgtctcccaaatttgctggganttacaaggcatgaagtcaccca

SEQ ID NO: 691461 - DNA, 118 bp, Homo sapiens
aaagggctgggtcaaagtctccaagagatgagacttcggagagggtagaaatgctgtacccaccatcttgaaattcacactccaaggagtctttcaattgggtgttcggggataaata

SEQ ID NO: 691462 - DNA, 913 bp, Homo sapiens
gttttttcactgacccggtgaggcgggggggcaaaaaaaaaaaaaaaaaaaaaaaaaaatttttgggccgcttgctaaaaagttttaaccccttcgtttgggcccgggccccatgttacttgcagtgtcccaaggagaaacccgggggcagtgctatcgtcgctgggggtttcctacacaataaaaaaacgccgcggggggaaacccgaggcggtgtcttagaccaactccagagtgggaggtccagagggcagatacggggatccatactcaacaggggggcccacaggaagagagcgatttattaaatttatacgccccggcgctgggtcaaaaacagcagaaacagacaaccaaaataacgctacgcagtcacgagtatgaatccaatatacacttcaccaatatatattaaactattaccaaataataatcttacatacaaataaaaaaacacaaaataaatataaataaaattatcttaataatatatgtacaaaaattatagactaaaaatgactcactaaaccaaataaactataataataaagattacatactaaaaaaaacataaaataaaaaattaaacatagctaaatactacacactctaacacaaccaacataaccaacacaaccaaaagaggtcgagagcagaagacaaacgcaagagcagtaggacacagacacagacagacggcgtcaggagaacacggacaacggtgagacctatcagacccacgcggtacacgacgatcgaataaacgagagcagatacgataacaaaggcaccaagcgaacgacggatacgcgtaacagacaacaaacgagagaaagaagaagcagcacagtcagagaaggaaacgaaagacagaacagccgagtcacatacagagcgcgtgcatcagtcggtt

SEQ ID NO: 691463 - DNA, 81 bp, Homo sapiens
  misc_feature (80)..(80): n is a, c, g, or t
gatctcattccatgggaaaaaaaaaaaccctgtctggtcaaaaaattgcaattgcaattaattggaaaaagggtacactnt

SEQ ID NO: 691464 - DNA, 947 bp, Homo sapiens
  misc_feature (1)..(1): n is a, c, g, or t
  misc_feature (92)..(92): n is a, c, g, or t
  misc_feature (94)..(94): n is a, c, g, or t
  misc_feature (96)..(96): n is a, c, g, or t
  misc_feature (103)..(103): n is a, c, g, or t
  misc_feature (105)..(105): n is a, c, g, or t
  misc_feature (127)..(127): n is a, c, g, or t
  misc_feature (156)..(156): n is a, c, g, or t
  misc_feature (193)..(193): n is a, c, g, or t
  misc_feature (195)..(195): n is a, c, g, or t
  misc_feature (216)..(216): n is a, c, g, or t
  misc_feature (219)..(219): n is a, c, g, or t
  misc_feature (223)..(223): n is a, c, g, or t
  misc_feature (228)..(228): n is a, c, g, or t
  misc_feature (255)..(255): n is a, c, g, or t
  misc_feature (296)..(296): n is a, c, g, or t
  misc_feature (487)..(487): n is a, c, g, or t
  misc_feature (494)..(494): n is a, c, g, or t
  misc_feature (506)..(506): n is a, c, g, or t
  misc_feature (548)..(548): n is a, c, g, or t
  misc_feature (585)..(585): n is a, c, g, or t
  misc_feature (707)..(707): n is a, c, g, or t
  misc_feature (711)..(711): n is a, c, g, or t
  misc_feature (718)..(720): n is a, c, g, or t
  misc_feature (723)..(723): n is a, c, g, or t
  misc_feature (752)..(752): n is a, c, g, or t
  misc_feature (755)..(755): n is a, c, g, or t
  misc_feature (770)..(770): n is a, c, g, or t
  misc_feature (773)..(773): n is a, c, g, or t
  misc_feature (779)..(779): n is a, c, g, or t
  misc_feature (781)..(781): n is a, c, g, or t
nggcagggggacccacggcaaagcaggcggcagttaccccaccagtcaacccccgcgggagtcataattccctccatagccaacactgtggngngngcctccngngccgcgctccacgcaaagtccncgtggcggcggaccggggcgcacctccgncactgcggctggggcggtgcggggcggggggggaggngnggacggctggcaccgctactntgncggnagtcnctggcgaccaaaccctccactaaatcngctcttagagacgtccacgactgcgacccttgtagtggtgntcataagccatgttttctaaccaagacggcacttcttgtttagcttcaacaagaagatccaacaaatccttagtaatatttatgttcctctcgttaaagaatgaggtggccaggccaaggtttcctacacgtcccgtacgaccaatacgatgtacatattcttcaatatcacttggcaagtcaaaattganaacatgnttcacatttganatgtccagtcctcttgctgctactgctgtagccactaaaatngggctttttcctgagcggaacgggtgaagggcctctnctctatccctctgagaacgggctccatggatgcgggtacatgcgtatccttcatggtataagaaatcctccagagaatctgcaccctttttggtctccacaaacactaaggtcagtgaattnttgnctgttgnnnttnggaggtcaagcagaaatgaccgtttgtcngantcttccacccaaacnacnttccgngngatgttttcagaggtagagccaactcttcctacagccaagaagatatattcatctaagaaatcacgagccagcatctgtatttccttaggaaaagtagcactaaacatcatagtgtggcggacaccctttggaggcatagtatcttgttcgactattctacgaatc

SEQ ID NO: 691465 - DNA, 303 bp, Homo sapiens
tcccaggatgagaaagttgggaatgggaaggatcatattttacattaaaaaattatggaataagcacatgaaaagatgctcaacatcactagtcattagagaagtgcaaatcaaaacaacagtgagatgccaaatcacaccagctaggatggctgtaataaaaagacagtgacgagtgctggcaaggatgtggagaaactgggaccctcacaggttactggtgggaatgtaaaatggcacaggtaattaaaacaacctggcagttcctcaaaaagttagagttaccatatcacccagcaattc

SEQ ID NO: 691466 - DNA, 1035 bp, Homo sapiens
aaggctggggagtctactaagaaattccttccctataaaactgacagtccaatctagccatgcctgatacgagtatagacgcgaacgatgatattaactagcctctgagtactgactcttggcccacaggtagggctgtctaaggaaacagttgccttgggagcctactatacatagagaaagaagaattctggtcctgccgaggcttgagataagtagtataacagacgggccctagccatcgttggtgtggaataggacagccctgataattgaaccactaagagagcatgaggctccacgactacagactgcacgcccaaggctcgattatctcgtcaaaaggaggatctagacgaaatggccttcacgagtgaatgaaaaatggtcaacctccattgcgaaacaacaacgacgtttcagattacagggccccgcagtgtaacaaggtgcccaaactgtacttattcggcaatataagctggcgcttctccgcggcataggattcacctgccacaggtgaacactgacaggagccaccgaatgcaataccccgggtgaattttcctatacacaactccacaaaccacacgggagagccaagccccgccttctgacacacgcatcggcgtgcacctggcgacaaaaatcgcccagccacggaacattctgctgcacaacgtgggagaccatcatctacctgtgaaccccccgctacccgggtacagacaactcgcctcaaccatcatacccactctttgcgaaacatcgggacccctaggcacaatcaaagcctgcttcacacgctgggacacaaagggcagagccaaccgagataagaacgggacaacacgcggggaagggattcgaaataaccaagagagaaaagagcgatcacacagtaaagaacgagaacaaaaccagaacaggaccaacacagcgacggcaacagtaagagccagaacccacaaacatggacccccagagccgaaggagaaagccgccacacgacaccaagaaagaagaaaacaaaca

SEQ ID NO: 691467 - DNA, 324 bp, Homo sapiens
tcgagatggaatttctcactgtcacctaggctggagtgcaatggcgcactctcagctcactgcaacctccccctcccaggttcaagcgattctcctgtctcagcccccaaagtgagtagctgggattacaggcatgcaccatcacacctggctaatttttgtatttttataagaggtggggtttgaccatgttggccaggctgatctggaactcctgacctcaggtgatccacccaccttggcttccgaaagtgctgagattacatgtgtgagctactgcgttccggccaacactcttcttaagcaagcttaagcagccttgtc

SEQ ID NO: 691468 - DNA, 345 bp, Homo sapiens
  misc_feature (251)..(252): n is a, c, g, or t
  misc_feature (256)..(256): n is a, c, g, or t
  misc_feature (270)..(271): n is a, c, g, or t
  misc_feature (276)..(276): n is a, c, g, or t
  misc_feature (307)..(307): n is a, c, g, or t
agataggagggtgttaatctttatgtgaaaaatcttgatgatggtattgatgatgaacgtttccggaaagagttttctcaatctggtacaatcattagtgcaaagggttatgatggagggtggtcagcagcaaagggtttggttttgtatgtttctcctccgcagaagaagacagtaaagcagtgacagaaatgaacggtaaattgtggccacaaagccattgtatgtagctttagctcagcgcaaagaanngcgncaggctcacctcanntaacncagtatatgcagagaatggcaagtacgagcngttcccaatccacgtaatcaacacctccttcgagcggg

SEQ ID NO: 691469 - DNA, 1013 bp, Homo sapiens
  misc_feature (721)..(721): n is a, c, g, or t
atgaatgagattgttacacaaattgatgcacaaaataatgctggaaaaatctgaggctggcttagtcaggagctccagtccgtgctgtatcacgcgtgtacaagaactatgaaatcttcctgagatcccaagaaatacttaacattggtgacatcagtataaaagtgccaaactctgccctctttgaaataaaaatgttaataaggccactcccaggtgaaaatccagggtgcgaacgagtcatctaagtttgaccatgcagttgtttaccaaaaattagaggcacggagagtcttacctttggctcttggatttaagtcgaggtactgtatagaaggtagtgtagaatcatgtatgaaagttcaatgtttgctggttcttgactgagtgataatcaagagataggttgagtatgttcgctatgtgatttgaggaaggcatttttgtgaagcctggattctttggtgccctagctgtacggcattgacctgtcactgttcctagcgcgattcaataccgtgagcttttgacaaagtcgttggcgagtatcattactcctatactgtctgtacaacccttacaccatgtaggcgggtaccggagatggtatcacgaagtgtcaggcattccttatgtcgccatgttctggctaaatattgatcaccaacagattcggtgcaatcttagggacaaatgcgcaaagcttcgtggatcctacgcnttttccacaacgcacctttttgcatgggacatattgttaaataccttcgttcacagagttttcaaccaatccacactgctacccccagggaggtaaaaagctgagggactggttggctaacgtaaattcccatttggccaaaaaaaacgcaaaacacacgcgatttatttacaccaaacggcgcattttgaatgtcggccccccattttctgggctccgctccataagaaaatcgcggattcattcaacctcgcgaatggggtcccggggcacgagaacgagcgtcccacag

SEQ ID NO: 691470 - DNA, 183 bp, Homo sapiens
ggctgggtgcaggagcacgtgggtgctccacccctcagaatctccggctgacgctgggggacagggggctctggggatggggttctcaaggatgggaggacggtgaagagatgacatactcgataaaaaaccgcctgggttttccgtcctgacaagatcatccaggatagttggagctagagc

SEQ ID NO: 691471 - DNA, 448 bp, Homo sapiens
tagaggatccccgctacccaggcgcacttctcactgttctccatgttctcactttaggatagttctcttgacaaaacctattaggcaaaagtcttattctctccatttgacagggtcacaagactaaggctcaaagaggtttgaaacttgcttacagtcagcaagtagccagtataaagccaagttaggacccacaccttagtccaggatccaaactcttaccagccttccataccacagaagcagcgttgtttctggtgtatgattaccctctgtagactctgtttcaggtcccatgtgattaccatcagaagtgcgcctgggtgccacccaggcgcacttctgtgccctggcgcacttctgcgccccggcgcacttctgcacccatgcgcacttctgcaccctggcgcacttctgctcaataaggcggtcactctcacagccactc

SEQ ID NO: 691472 - DNA, 149 bp, Homo sapiens
  misc_feature (9)..(9): n is a, c, g, or t
ccgtacagnttcgatcaggaccgatctcccgcgcggagttatcccgacggacccatctatccaaagccagcatcaccagcctggccgccgagctggcggcgagggggctcgtgcgcgagggaagcccggaccgcaactggtacggcggg

SEQ ID NO: 691473 - DNA, 459 bp, Homo sapiens
ctttcaccagacgatatggcaatatacaatatattgcttgagctgtttgagaaggctgtgatgtatttttgtattgacatagaaaattataaattacattgaattagtatccataatcactatatatatacacaaaccagttctaaaaaaatacactggtttaaatttatgagtgaaaacctcacaaggtacagtaaacaattagcatgcttcggtgccagattttgatttcaaaataaaaaattctagcctgtccaatgaacgcaccccaattccattagcagcacgagcattttcaactgacttgcctaataggatttattttaggtctgttaaatatgcagattgcaatttatttattaattgtttctccttgttaacaaggtcaatattggtgactcagttaaaagaaaaatgacccaccaaatgaaacaaaaaaacgaacaaataaaaaagcca

SEQ ID NO: 691474 - DNA, 375 bp, Homo sapiens
aagacaagaaaagcccaacaaaggtcggctctccctagtcaaaggactaagaaaagagcaacttggtaagtaagacaatattcagacaataactgtattactctacacacacaggcaggaaagccacagaccacatttccgccacatttccgccgcatgaagtgaaaggttggaggggtgagcctgtaccttcctggccttggtcaggctataatgaggcaaccccaaacccaatggggtggtttccttgggcattccttttgccttattatcccagattagtagctggagaagaagcgacccaaaaatgccagtgggcaaagacaagaaaagctccaacaaaggtcgggctctcccctttttcaaaagaaaacc

SEQ ID NO: 691475 - DNA, 1357 bp, Homo sapiens
  misc_feature (67)..(67): n is a, c, g, or t
  misc_feature (217)..(217): n is a, c, g, or t
  misc_feature (220)..(220): n is a, c, g, or t
  misc_feature (277)..(277): n is a, c, g, or t
  misc_feature (371)..(371): n is a, c, g, or t
  misc_feature (407)..(407): n is a, c, g, or t
  misc_feature (445)..(445): n is a, c, g, or t
  misc_feature (486)..(486): n is a, c, g, or t
  misc_feature (513)..(513): n is a, c, g, or t
  misc_feature (539)..(539): n is a, c, g, or t
  misc_feature (590)..(590): n is a, c, g, or t
  misc_feature (595)..(596): n is a, c, g, or t
  misc_feature (605)..(605): n is a, c, g, or t
  misc_feature (658)..(658): n is a, c, g, or t
  misc_feature (688)..(688): n is a, c, g, or t
  misc_feature (728)..(728): n is a, c, g, or t
  misc_feature (746)..(746): n is a, c, g, or t
  misc_feature (755)..(755): n is a, c, g, or t
  misc_feature (925)..(925): n is a, c, g, or t
  misc_feature (936)..(936): n is a, c, g, or t
  misc_feature (1073)..(1073): n is a, c, g, or t
ggctgaattatcccgccccgggcccgcggttccctccccttgtgctccggagagaattcttcccggncgtgggctaaaacacaagagacacgaggggacccacattagccgcagagaggaaaatgtctatcctgagaacaaagagggccggacgaacgcgcgcgccaacgtgaaagtgtctccccatagggagctagtaacaaagccgcggaggggnaanaaatgccgcgcgcccccgcgaaaaaactgtagtgtggtgtgtctcttctctcctggngaaaaccgcgcgcgccctccgttgcggcacatgcgttgtaaacaccaatgaagaagcccctcggggccgagataaactcatcctgtagacaatnacgagacagatacacaggatggttcgtaacccaccnaaagagaggtaatccgaaatgtcgcggtcgcccttggnggataagagaagatgatcctcctcaaccgagatcagtcccnctctccgcggatagcctacacaaactngagtgtgatcctatctcatcaaaaanaaaaaggagggccggtgaccgaaaattgtgccttcctcaccccaggggtanagacnncaccggganagccatgggaggtccaactaggccctctatgaatccccccacgtctctgtctngaataccggtgagggtgggtacagaagaanacgaaacgtacctcggtcccgaccgcctcttcgccaccanaaatatttcggagttgtnttctaaacnacgaaaggatgaaaacggatcccggcgagcagccccgaattgtgaataataccctccggttgtcaacccaccgacagtagggatagtgatgacatattactatcggggaaaagaccacaatagcttggggctcgtgcctcgcaggcctaatactctatagtgtatgaganaatcccagcanagacaacaggtttcacaggaagataatcgagtgttctgtcagtaacaccgggcgtatatgtaaatcaaaagtaacacgacaacaatacctgtatgcgggggcagcctttgtataggtgcaatatcccccttgggttnacaacaggactcgttgtctgttgttcggatgtgttaacacacacgtcactaccacgcacccatggctcacaaaacattatgctttgtcaccacgtgcgcttgtgcttcacacccacacccccgcgcacatgtcaaagattgtctagccggaacgatccccacccaaaaggagcgaataagagctgtgataggcacaaattggaagtcttgcagaatcttattacagacattagttttctccaaagcaacacaacaaacggggaacgcggtcccccaacatacac

SEQ ID NO: 691476 - DNA, 1582 bp, Homo sapiens
gcttcgtacgagagtgatagccatcataatcggaggcttggggaacccttctagggtaaggaccaggatgtaggaggattcactcgttcacagacgcaagctattggtgaatgaatgtacgtacgatagtcaagtagcccatccataagtcggcaggcctctagggcaacatgagcgtagattccccgtagtaatcggctgccccgcgcagtatggccgtctgtcgccgacatataacgaacgataagctttggtgacctgcttacctcccatcgtctccgtactgcctgccgcgcgagtcgtgtctctagctgggaggcccggagcccaggcacacgagggtcggaaccacctcctgacccctcacgctgtagccagcgggaaacctgacaagagaagagacacaccccacaacaaacagaaacacaagaagccaatacaaacaaacagcgaacccacaacagacacccacaacacaaaaaagaagagccaaggcagaacccgacgggaacccgggcggcgcgagcggggaatgaagacacagacgcggaacccgacagcacgtacgagcacataaacgtcacaaaagccgaaggcggaacctacagggcaacacgctacggcgcccctcccggaccaaccacaagctcgtcagaaaaacagaacgcacgccaataagccaaacctacatggcctgtggacgaccacggcgacagacaaccgacccatacaactacacccgaggcgcgggcaaccaacatcccaccccacaacattaaagacccctccagccaccaaccccgggaccaccgccggcctggcacattaccccaccgcctatagacacacccaggcccccgcggcgcactcccctacagtccgaacgcgccgcgccgacacacggcaccgcaaaatcgtcacacatacccacagccccaccggacccaccgaccacaccacacgtaccgcacacgagaacacccagcacccacacacaccacagccctaacagggaaccggaaaggacacatcaacagcgaatcacccaaccggaggcgactgagcacaccacccaaaggacaaacgaacaacaagcaagatacgacagacacccaacgcgaagtgaaaacactacaaagaggctacagacacacgataacgagacgaaaaaacacagcagcgaagctaagaaggcaacacaaaagaaccccggcaaacacacactaccaccagggagagcaaaaagacatacaaagacaagggcagagacgaggacaacgcaacacagaaaccaaacagaagaccagaccaccacgcacccgggccctcgcgagcatcgcgcacacacgaccacacgcgcgacacaaaaacagcacaataaaagcaccaccaagaccagacacaccagggagcgcacagcacgaccacgaacgagcagagcgacgccacccccgcagcaaacaacacgaccgcccaagcaccgcccacacactcgcccagacccacgcagacaaacaagagaccgacaacaaaaccccaacccgtagaacaggacccccgacggagagtaggacgacgagac

SEQ ID NO: 691477 - DNA, 96 bp, Homo sapiens
ttcccccagaagatcaatggaaggtggattccaaagagtgggcaagtgaggaccccttctctgttaccaaggtgaccccaaggaacacagtaaatg

SEQ ID NO: 691478 - DNA, 725 bp, Homo sapiens
ggcctgctggagctcagtgcggcgtggcgcggctgggatgtgcgaagatgcaacggagagaatggtgcctgtgctgctgccctgcggcctggggaaatgcctgtcgggaacccgggatgagcctggcccagtggcccccgactgcctgtcaaccgacctggactgaacctcatgcgtctcgtcgtgtgtcgttgacctctgtgagtgcctaactgtgctttcggcctgatgcggcctgctatctgacaacgttcgtgcttccatcgttggtgctcgcaagtggcggccgatgggcgcgctggagtgaatgtaccctctgtgatgggtgcttgatgtgccagagtggagtccaacgtgtgctggacattgctcaacaactgggacaaatggactggccaagaagcacaaaaagattcgtctgcggtgccaaaatgggcatccctgcttctctgcgtgggcctgtgcttggcagtacctgtcaggaggcaaggtgaagttacatgcagaaccctggaaagtttgacgagcttggacatgtcccctggggaccccaagtggctggacgtgcattgagcgtgacctgcaccgtgcatgtcccattccatgagatgtttgtgtcccgggggggccacggtcagcagtgacttatttcctgtgtgctgacaggcctacacgctggtacctgtgcctgacgaggtgctacttggctaggcccagtgcgccca

SEQ ID NO: 691479 - DNA, 453 bp, Homo sapiens
  misc_feature (27)..(27): n is a, c, g, or t
  misc_feature (44)..(44): n is a, c, g, or t
  misc_feature (453)..(453): n is a, c, g, or t
gccccttaaaaaagttgtgacctagangccaattaaaaaataanggggaaatgtggtaggtttttaaatttgtacatccctcttatttaagtgttacccacataaatgatgaagtttgtgtggttcctgttttcccatttttgttcctaactgaaaactttttggctgggcacggtgccctcatgccctgtaatccccagcactttgggaggccaaggcgggcagatcacttgagatcaggagtttgagaccagcctggccaacatggtgaaaccctgtctctactaaaagtataaaaaattagccatgtgtggtggcacacgcctgtaatcccagctactcaggaggctgaggcaggagaatcgcttgaacctgggaggcaggggttgcagtgagctgagacggtgtcactgcactccagcctgggtgacagtgagtctttgtctcaaggan

SEQ ID NO: 691480 - DNA, 225 bp, Homo sapiens
  misc_feature (19)..(19): n is a, c, g, or t
  misc_feature (88)..(88): n is a, c, g, or t
  misc_feature (108)..(108): n is a, c, g, or t
  misc_feature (139)..(139): n is a, c, g, or t
  misc_feature (165)..(165): n is a, c, g, or t
  misc_feature (219)..(219): n is a, c, g, or t
ttttttttgaaggtcgganagcatctttattgtggggagggagaacatcaggaaaaatagctaatgcatgccgggcttaatacctaantgatgggttgataggtgcancaaaccaccatggtacacgtttacctatgtnacaaacctgcacatcctgcacatgtnctctggaacttaaataaatttttttttaaaaaaagaaatgcagatggatagganaatgat

SEQ ID NO: 691481 - DNA, 442 bp, Homo sapiens
ctgcaggtcgtgtggagtttgctggatggtccactccagaccctgtttgtctgggtatcaccagcggaggctgcagaacagcacatattgcacaacagcaaatattgctgcctgatccttcctctggaagcttcgtcccaaaaggggacccgcctatatgaggtgtctgctggcccctactgtgaggtgtctcccagttaggctacatgggggtcagggcacccacttgagggggcaatctgtccgttttcagagctcaaacaccatgctgggagaaccactgctctcttcagagctgtcagacagggatgtttaagtctgccgaagttgtctgctgccttttgtgcagctaagtcctgcccacggagatggagtgtagaggcagtagggcttgcttgagctgcggtgggctctgccaggtcgcacttccaggccactttgt

SEQ ID NO: 691482 - DNA, 573 bp, Homo sapiens
ggccctccgccgagcgatcctggcaccgtggccttggggtccaccagatgtatggcttttcctgttgagtactcgttttcggtgccccagcgcgtttcgcgcgccctggcaccttgccccttgtgggcatcagacactaggtgttccctgttgagctcgcgtcgcggcccagtggcctgctgcgctgcacctgacctctcagggcatcagagttgatttcctgtgagcttggtcggggcccatccgcctgccgccatgcacctgcctccgtgggcaccagagtaaggtttcctgtgagctggtcggggccatggacttgccaacctgggacacctggacccaataggggacaacagatgtaggtttcctgtagagttaggctccgggccacacggctgccgcctgcactgccctggggcacagactaggtttcatgtgagctggtcggggccatggctgctgccaggcacctgcctggggcacagagtaggtttcgtgttgccttggaacattaaggcgtaattttgattcagtttttcctaaagaagcattttgcatttttatggcttttgc

SEQ ID NO: 691483 - DNA, 270 bp, Homo sapiens
acaaaggtaattacttttctttttacacttatccacatgtgaacttactggaaagagacaaaacaagtctaaagaagaaattttcataggcttcttgttcagtagcacaggccaaagccttagtcgtcgtcttgcagggtccttataaatgtgtaagaccagacagcatatactattgagtcctacagagaaacacacagcaagcaatacattgctcgggagtgacactatcacctactcttacgactactggtactccaagtcccctaa

SEQ ID NO: 691484 - DNA, 358 bp, Homo sapiens
  misc_feature (131)..(131): n is a, c, g, or t
  misc_feature (209)..(209): n is a, c, g, or t
  misc_feature (272)..(272): n is a, c, g, or t
  misc_feature (325)..(325): n is a, c, g, or t
ggttatccaattgttggaatataatttttcatagcattgtcttatgatcctttgtatttctgtggcattagttgtaatgccttctttttaatttgtaattttattttagagacagagtcttgctccatcanccaggctggagtgcagtggtgtgatctcagctcactgcatcctctgcctcccaagttcaagtgtttcttctgcctcancctcccaagtagctgggattacaggtgcacaccatcacacctggctgatttttttgtattttnagcagcctgaccaacatggaggaaaccctgtctctactaagaatacaaaattngccgggcgtggtggtgcatgcctgtaatcccag

SEQ ID NO: 691485 - DNA, 377 bp, Homo sapiens
tcgacgtcgcagtggacagttcatgcgcaagtgtgtcttacgagatcgctacttcccctatcatagaagagcttatcacactttcatgatcacactctctcatcatcattttccttatctgcttcctaatcctggatgcctcatgaccttgcagtcagtagcataactagctaatactacctttttatcacgcaccggaaatataaaccgactgaactatcctagcccgccgatctatcctagatctctcatcgtccctcccattctctactcgtcctttacataacatacgaagtctacgatccctcccttaccatcagatcaattggccaccaatggtactgaacctacgagtacaccgactacggcggattcgg

SEQ ID NO: 691486 - DNA, 176 bp, Homo sapiens
ccgggcttatactgaggtcgggtgggttcgaatcagtatggggacatttacaaacagggtctcagctgacacttccatcagcagtcccactcgctgcaggttcagcaggcctggcggctgggccagaccatcctccttgtggcgtggggcatgccaagctcgcttggctctcatcc

SEQ ID NO: 691487 - DNA, 119 bp, Homo sapiens
taattccaagtgaagcagcacagtgctgagaaacagttcatccatggttgcatgttaaagaagttggaaatatatcttgaaaattctatcttccttttaggcttgaatatgatgctgaa

SEQ ID NO: 691488 - DNA, 94 bp, Homo sapiens
agtaatctccataaagaactaccatccgaagataagaatcatcactcaaatgctgcagtatcacaacaaggcccatctgctaaacatcccgagc

SEQ ID NO: 691489 - DNA, 333 bp, Homo sapiens
cttaaaagctcaacctgggcttggtgcggtggttcatacgtgtaatcccaggcctttgggaggccaaggtgggaggatcacttgagctcaggagttccagcccattccaaagcaaaaacaaaaggattttgagatcagtgtgggcaacttagcaaaacaccatctcttaaaaaaaaaaagaattagccaggctttggtggtgtaagcctgtagtcccagctacttgaaaggctgaggtgggaggattgtttgaacccaggaggttgaggctccagtgagctgtgattgtgcccctgcactccaggttgggtaatgcagcgagactgtgtctca

SEQ ID NO: 691490 - DNA, 756 bp, Homo sapiens
  misc_feature (309)..(309): n is a, c, g, or t
acgcctggcactcgtgggctgtgggtgtgtactgtgatgtttgtcgttgagggtcacgctgctgttactccgaatgtgtgtcgatggatgtgtgggctatcggctcccgatccctgggccggagcatgtcagtcctgtggggggagggcgtgctgacctagtgggaggacgccccagtgtgcatccgtgatgctgcctgccacgcgtccctctcccattgtatgcgatccaccctcttggaggtggtttggtgcagctctgaggttgtgtatcgtggcggtgttgctcttcctcgtatctccgatcgtncctgcttacttcacaaccagttcgttgggtcaggcgtgcggagaggtgttggaggtatgtgttcggcgttgggtagagggtcatcttgttccatcgtcgtcgtaagcgaatggtctgattagtcttgaacatggctctcccgatcccctttaccttgggcactatatacatccttacagctcttgtcactaaatatatagtaacaggtagcaagaggccagagtaataggaactatccatctaattgttcaaaaatagaagatatataagatatatatagagctttctagagtggcggcacctctataaatgcatcgggggagttatgggagcgacaaaaaaaggagtatgtgtaaaatcagaaagagtttggggcacgcgaatagggggttgcgattagacaccgtgatatctcccgttggaacaccaacaagggataattaaaag

SEQ ID NO: 691491 - DNA, 442 bp, Homo sapiens
tctgagcaagcgggaaatttaggtagagacaaccacgggggatgactattggagggcagggggggcgggggggagggagttctgtgcaaaccaaggggtatggctctcgcagggccaggccgggatcaacggcacatgaatggcagccgctacgccaggagccgactcagcatttcgcttcctctctggctcagtccaggatatgaggatatggcaaaatcaccctcggtctcacttttttttggggtcagttattactatttagtccggtagctatcggtttctctggcatgaatttttttctagatagcattcttccccaaaaaacttttttaaaaggtagtacccaaagatgaatccaataaggtaccatggactttatcggcaaattccaccacctcttaggagaatcccgggatgctcatctttcttcccagcggct

SEQ ID NO: 691492 - DNA, 325 bp, Homo sapiens
gctgtcagagttcacatgcccacttagaaaaatctaatatgggcagggcgtggtgtctcaagcctgtaatcccagcactttggaaagccaagatgggcagatcactttgaggcaggtgttcaagaccagcctggctaacatggcgaaaccccgtctctactaaaaaaataccaaaattagcgggtgtggtggtgcatgcctataatcccagctacttgggaggctgaggcatgagcattgcttgaacccaggaggtggagattgtagtgagccaagatcatgccaccgcactccagtctgagtgaccgagcaagactctgtctca

SEQ ID NO: 691493 - DNA, 847 bp, Homo sapiens
  misc_feature (9)..(9): n is a, c, g, or t
acccctccntatgatataataatattaacatataaaaaataaaaaaaaaaaatataataattgttctcattactcgtgtatttatagattgataaatttttgatattccaccttccctctttagggaccctcaactggggttacccaaaaggtttcctgtatataatgtgaatgataaagctttgtctttaagccacgtttccttctacaaaccgcttattcttttggtaagaaatacttgggcttcctttatcgcccaaaacattttcaatcataaaatccccttttttcgtaaagacaagacccatattttggtataaaacacattcgggcccctacacacattcacaccttctttagcaaaatcaaagtggtttaaaacacacgtgtaattacatttggccccctttaacaatatgtttccccgtggttccctgcgataattcaaacaggagggtgttctccccccgaaatttggctcataatctttctcctagttgacaatagcttttacaaaagtaccctttattccaggagaacacaacacggagccctccctgatatgtcaccaccccaacacttgtactcttctcgttatgttccattaaaccaaatccatctaattgtgatattctcccgatacttagaaaatttgagtttacacaatctttcccataagagcacaagcttatcaacacacgtgggccctccaccataactagtcgcacaattctgtgtctcacacacactcacaccaacttgcataaaataaatacttcttctccaaaagcagtgggttcttttttccccctaaaaaaaaataaacccttccctcccccaaataaca

SEQ ID NO: 691494 - DNA, 125 bp, Homo sapiens
  misc_feature (22)..(22): n is a, c, g, or t
gtgtagatgcactatattattngccttcttctccccctctccttgcctctgcattagacaggccaatatttgtcctacaaaatttcctctggtctctttaaaaatcagttatgtcgagcatgtag

SEQ ID NO: 691495 - DNA, 387 bp, Homo sapiens
aggtgggtggatggcttgagcccaggagttcgggaccagcttgggccagatggtgaaaccacatctctgtttatttttttaattttctgtttattaaatttttaaaattaaaaaaagaaagaaactggctcaaatataataggggaaaaagttaagagagagcagtcacagctttgcaggagcatgtagtgcatgttatttatatgttaggatgctgttaagaaacagcttttcatttgaagatcatatgtttgattcttttctgtaagttcaaatgagggaacccttatttcttcccattttgttcatcacactcctgaagtcagtgtctagacctgagattagaacaaagaggccttttcactcctgtgcactactcactactca

SEQ ID NO: 691496 - DNA, 166 bp, Homo sapiens
ggggaagatcacgaggtcaggagttcgagaccagcctgaccaacatggtgaaatcccgtctctactaaaaatacaaaaattagctgggcccccagggaatctgaacggaagagaccagaagtctatggcaattgctcatgaagagatgagggtctggccaaggggc

SEQ ID NO: 691497 - DNA, 290 bp, Homo sapiens
gaattcttggatgagaaacctgatatcttccatgagagataactaaacagccataggacagtacagaacaaatgtgggcaaaagtcaaatctacaaatgatgaactcttccctttatatccaacccaatagtcatcataaagaagtctgaatatcttggttgagagctagactttggaaacagagagaccctgtataataacagactaaggaagtaaggaagacaagcccagccagtcccacaactatttcattaataccagggtaaagcaacagacctgccagtgaagg

SEQ ID NO: 691498 - DNA, 208 bp, Homo sapiens
tgaggatccctaaagccaaggagattcaggaagaggacaaattgacaagaagtataaagcgtgaggaagtataaagcgttgaggaagtataaagcgtgagaagtataaagcgttgaggaagtatagggcgttagggcgtatagggcgtatagggcgtcgagagggttgaggcggtgaggagggttgaggcggtgtaaagcgtagagcg

SEQ ID NO: 691499 - DNA, 125 bp, Homo sapiens
ctcatgagggcgtacagcatctataagaataggtcagctatctctagcagttataactctttccatagaataactttttctaagcaccttaaatcacatgaatatatctgccttacataaatttg

SEQ ID NO: 691500 - DNA, 438 bp, Homo sapiens
taatacatgacagtgtgatgagtcatgactcccgtcctagacagattcccagagcacctgcagatcattcagatcgcacgtatctctagtgaggggattggtgattatccaggaacaacctacaggactgcatctgagttcgtatgggccggaaaacatctgcgtgacagagaggcaacgtagtcgcaaaggaaggggcaaggaagactggcaaaacagatggcaagggatgcccctctttttcataaaactctccaaggttcaactcaatgcaatgtatagtgacacttcaactcgatctttcatttagacaactattaaacaatccagagaagtaaacactgttacattgactgtatatatttgcttcttaaaactacctgtatcactgtttgctcacctaatttatatcccggtagttccattatctcccagttc

SEQ ID NO: 691501 - DNA, 166 bp, Homo sapiens
  misc_feature (150)..(151): n is a, c, g, or t
taggtgctcgtgatgtcggtcggagcttcagactaggcgaggcagggtgaggcctcgggcacacagccggctgccagtcacccggcccagatggagggcggccgggcctgcgcaggcacttgccaaggtggctacacacgtcaacgcacnnactcgcaccgaggac

SEQ ID NO: 691502 - DNA, 1471 bp, Homo sapiens
  misc_feature (2)..(2): n is a, c, g, or t
gntggttgaccgtttgttgcgcctgcgtgtgggcgcgcccctgcgtttgtgtgttgcgtctttagattgtgtcgtgcggggtgctgcgctgtgccccttgtcgttgtgtcgttgtgcggcgcgggcgggtgtgttgtctgtttctctgtcgtcgcgcgggggtgttctgctttgtgcgtcggttcgttggttgtgtgggggtgcggccagttgtggtctggacgtcgttctgtgtgttggtgcatgcaggcgtcggggtgttgttgttgtttcgttgtcgtcgtgtgttccgcgcggtgggtgtggttgtggtgcctgccgcgccgccggtcgcgctgtgtggtgtgttgtttcttgccgcgcgtgcgtggcttggggatcgacccgcagctcgggtttggttgcttgctccggcggtgagttgtgtgtgtttgtgtatctgtcgtgcgccttcgtgggttgagttgttgttttctgtggggctgggtggttgtggtgtgtgtgtgttcgtgggcctgcgccgcgctggtcggcgttgtggttgtgttcgtaggtgtgttgtgtgttggcgtgcggtgccgtgctcgcgtctttgtattgtgttctgtggctgggcgtgtctcgtctctctctggcgcgtgggcttggttgttttggtgtgtggctgctcgccgtcgcgtgagaggtgtggtgtgttggtgtcgggggttcccgcgactccgcggtctcgttgtgtggcggtgggtggttgtggggggcgcgtcatctctcttctcgtttctcgtggcgtggttagcggttactgcgtcctctttctgttttttgtcgggttgctgttgactctttctctcttggtggtgtgtgtgggctggtgtgtgttgctggctggcgcggcccgcgctcccccccgtctctcgtgtttgtttccctcgccgcgtgcgcgctgtgccgctgcgcgcgcctcgcggcggcgttcgtgtgttgttgtctttctttttttttctgtatgggagcgggcgcgcgtcacgcacacctctctcgctctcggtgcttcgtctgtccgtctgtgtgtggcttttcttcgcgcgtcgtggttgtgtcgcccccccgcccgccgcgccgccgccgcgcgcttcctttcctattattcttctttattgatttttctctctcctcccgccgcccgcgcgcgcgcgcgctcgttgctcgcgctttctgttttcttctcctccttgtgttagcacacaccacccgcccacaaatcttctttcctctctctctatgaatataatattatatttgtttttttctttctctccttcttctcttcttttttatatataaagaaaacacacccaccctcttttttttttttttttctttgttgttgagacccatcccgcccccccccccttctctctttttgtgtaggaaaaaaaaaaaagaagtctctccttctcccccatccata

SEQ ID NO: 691503 - DNA, 1565 bp, Homo sapiens
cgccctcttcttgtctccgtgtcgctgctctagcttgtcgtcgtgtctctttgtcgcgtgcgtgtgcgtgtttgttctcgtgctgtttctcttgcttcttctcgtggcgcttggttggggcggttgtcttgttcggtggccctagtgtctggtcggcctggtgtggtgtgtcgtggtggtggtgggtgttcgcggggctgcgcggtcggggtggggtcggggcgctggggccgtcatgcagccgtggtgggagagcagcggggtggaatccaaggctcgtggggcgcagggtcagcgcgtggcggggtcatgtgtctgtctggccgtgagttgttagcggtctgtgagtgtgcgtgtgcttggcggtccgacgtcgggccggggggtgactcttgccatcagtggcttttggtgcacaggggtggcgggtccgggtgttgcatggatgtctggcggcgtcgtgccgggccatcgtggctcattggtgtgcttgtgagtaggtcgtggctgccggccgttagggtggcatgcgttggcggtggtggggggccgcgtggcggtcttgtcagcggtgcgcgttctgtgttggtggtcggggtggtggcgggtggggtggcagcgggagtcccgttgtgcacctgcgcgcgcgctatgggctgggtatgctgtgggcgtctgcgatcgctcgggactgggaagtgtcagttgggtgggcggggggttgagtggggctacggggtgggtgtgtctgtggctgtagtggatgtccgcgggttgtatggtgtcggcgtggggtatgttgtggttggctctgggtcccgcgcgtagcgcatgggttgttgccatgagggactggtgttggacgcgttcgccatcgttgtgtcggccgtcggaggggggcttgtgcagggcggatcagcttggcggcctgcggtgtcatgtggtgtaggttgcgtagcatcgcgatggtgtgtgtggtatttgtggctgtgtcgttttgctgctcgtacggaggtcgcagggtggcgtgcggtggccgtccgcagtggatgttacttgtattgtgtcgttgtggctgtgtggaggcctcatcgcgcagtggaccgtgcgttgttgatgtgatctgggccagatggcatcagatggagttgtcatgtcctcgcgtccggggacagccgggtccgagcgagaggtcgtcgttggattgtccgagtaaccacgctggagtgacagtgtcggatatgatcgtggatcaaacccatgagatcgaataagagcggtgcgctacactgtgtgtctgaggctatggcactcgctggggacggtggctccggtgccttttccactgacggtgtgatagtaagtatataacctgattttgtaatatggtgataatgataaatatgctgggtagcctgtgtggaaagtctgaccgttttaagaagtggcatgtgccttgaaagggggcagtaatgttcagtcgttcgtgtttttaacatcagagtctctagaagaggtgcatgacatcccgtctgactgtccctgtgactcgctcagttgtatgt

SEQ ID NO: 691504 - DNA, 117 bp, Homo sapiens
gactagttctagatcgcgagcggccgcccttttttttttttcccagaagaacggggtctcgcaacattgcccagactttcctttgggtgttagttaataaagctttctcaacgtgcc

SEQ ID NO: 691505 - DNA, 283 bp, Homo sapiens
caggaattgagcataaaattataattttatctagtctaaattactatttcatgaagcaggtattattattaatcccattttatagattaacttgctcaaagtcacattgctgataagtggtagaggtagaattcagactcaagtagtttaactttagagcctgtcctcttaacaactatcctggttgaaaagcaaatacagcctcttcagacttctcagtgccttgatggccatttattctgtcaaatcatgagctaccctaaaagtaaaccagctagctctt

SEQ ID NO: 691506 - DNA, 365 bp, Homo sapiens
  misc_feature (30)..(30): n is a, c, g, or t
gacgaaggaaggaaggaaggaaggaagganggaaggaaattgattctcttccagttgaggggttcagaagtctgaaatcaaggtgtgggtggggctgccttccttctggaagccctggggaaaaaccattcttcatctcctccagctctgggtggtgatgggcagtcttggtgctccttggcttgtggcagcatcacaccaatctctggacccccaccccagctcaacccctgtggtcacattaccttctcttctgcgtcaaatcaccctcttagaaggacacttgggatacatttagggcccacctggatgatccaggatagtctctgcatctgaagatcgttaacttcatgacatctatgaag

SEQ ID NO: 691507 - DNA, 135 bp, Homo sapiens
tgtgcccaggtagtcgggttacagttttatacatttgagtggagacagaaggtccaggcgagagccataaatcaatacatgttatgtatacactgtgtttggcctggaaagggccggagatcttgaagaacacgt

SEQ ID NO: 691508 - DNA, 151 bp, Homo sapiens
tctctatctccatacccacctctgcttcaataagctatttgttgaagatctattatctcgattagattaagagaagaggcatagctgtctggaagcaatgagcaattaaaactagatggggaagtacaggtagatggggttgacctcagga

SEQ ID NO: 691509 - DNA, 327 bp, Homo sapiens
cggaccactcaggtcaagcattcttctgcctcagcctcccgagtagctgggattgtgggcatgcaccatcacacccggctaattttatgtatttttagtagagacagggtttcaccatgttggccaggctagtctcaaactcctgacctcagttgattcatctgcctcggcctcccaaaatgctgggattacaggcatgagccactgtgctccagctaagggcaaataattcatccagtgcaaacaatgcaagcaaaaatttccagaaactgcaaggcacatctcgtttctcacaattgcaacagtgctccagccacctattcaatg

SEQ ID NO: 691510 - DNA, 164 bp, Homo sapiens
agatggcacaggaggcaaagagcgtctacggtgagcgcttccccgatgagaacttcaaactgaagtcactacggtgtcctggctgttgtgagcatggccacacgcaggcgaccgacaccagacgtgctcccagattctttcatctatcgacagatcaacgacag

SEQ ID NO: 691511 - DNA, 1101 bp, Homo sapiens
gggaaagatggcgtccgcaaggaaggtaccggctctactgccacctcttccagctccaccgccggcgcagtgaggtaaaggcaaaggcaaaggcggctcgggagattcagccgtgaacgcaagtgcacgagtacgatggcctatgtggtacttcaccacgatacagtcaagacacttatcaacgaacgaacggaccacacggaacctgaacgttgttcacatggtacgtgcttcagggtctggcttgtacgaaccactcggcttcgaaatttaccagagcgtgctcttccgttgtccctccagtccgacacgagcagggatgcatgcttgcactcttgcagtgcacatggtccaatcatccagatggcaacgtcgcatgcggcagccttgtcgctcatgctaacccttgtgtatctatcgttcacgctgggcgtggtacttctaggtgcctatcatagcgtactgggcatcatttcggttgaacccaccgggagcagttccgtgtgcactcgtacaggtgttatgttacctcatgcatttggcccattgtcgacaacgaaattctcgtcagttgctccaatatgtagtaggatgcccagtagacaccaactgtcctcaaagggcatcatcttctcttaacctacatagtgcactaacgaagcaactggagcctccttaatcagcctgactgggcaagtccacgctcaagcaggaactaaggcactatgttacccaccttgacagacaaatgcgcaaacgaacaacgcacgaactcaatgtcagcacctttcttggactggtcaacaagtcgttcactggcctctgcgaaagggttggctccggccatctttaggttaatgtttcaaacacactctgtatctaagtcatattccttggaacttcctagcctggattcgccttcccagtaggtctcgctgcggaaatgcttacggacaaagcacgaagaacggttcgcatggcgcctcggttcatcgccacctcaaagtatatacccccatgttgggcaacacttcggtccatatccgcagccttctacgacaccaggaccacgactagaggtcaacataatccaggtgctga

SEQ ID NO: 691512 - DNA, 101 bp, Homo sapiens
  misc_feature (84)..(84): n is a, c, g, or t
gcccactccaccttaccaccagaacaaccttaggcaaaccatttacccaaataaaggtataggcgcatagaaagttggaacctnggcggcaatagatatag

SEQ ID NO: 691513 - DNA, 990 bp, Homo sapiens
  misc_feature (990)..(990): n is a, c, g, or t
gttcttcgggtggtccccgtccgccctcctcgtccctacccagtttcttgcttccctgccccatctccgccgctccccgcagcctccgccgagcgccatggctcctaggaagggcagtagtcgggtggccaagaccaactccttacggaggcggaagctcgcctcctttctgaaagacttcgaccgtgaagtggaaatacgaatcaagcaaattgagtcagacaggcagaacctcctcaaggaggtggataacctctacaacatcgagatcctgcggctccccaaggctctgcgcgagatgaactggcttgactacttcgcccttggaggaaacaaacaggccctggaagaggcggcaacagctgacctggatatcaccgaaataaacaaactaacagcagaagctattcagacacccctgaaatctgccaaaacacgaaaggtaatacaggtagatagaaatgatagtggcagaggcacgccagaccgacgaccactgcacgtcacgaatcttcaaacctgcaagcacgtcggacaggtgtcctccatcccaagaagagaactcagtccatcacaaggcacacgcccccccggacgatcgggtccgccgtggcttacccctgtttaccccaggcgtgggcccgattggggggtgtcatggtcaacgcaactccaggcctgacacccaggttgggcctcagggtctcaagaccctggcctggtactcaggcagcaggagagcggattacagcatctcagggaatggcagcctctgctgcagcaagagctcttcttcctgtgccatggccggcgagaacctccggtattggccagattgaaggcagttgccctgtccaggctggacactcgaggcacggtgccttgggttggccatggaccatgcgtggttgggctggcgaatccccgttgggtcgcacgctctgggcaggccgttgcgccctggggcctgcttctccttccctgcgctgn

SEQ ID NO: 691514 - DNA, 141 bp, Homo sapiens
agactgcccccttgggagaaacacatgcacaggtaggagtaagatggactcaggacaccgaaagcagtaagcagtagaaacatcagatgacgatgcctggaagtaggcatataaatgctcacagtgtaaatctggacccag

SEQ ID NO: 691515 - DNA, 125 bp, Homo sapiens
tgactctagaggttactatttatcgcccaacaccacgccgttataatttttgtattttaggtagagacggggtttcaccatgttagccaggatggtctccatctcctgacctcgtgatccgcccg

SEQ ID NO: 691516 - DNA, 112 bp, Homo sapiens
ccttgatcattacgcaccaaaagcagccaggacgtacatactgaggagggtctgacttttctagacctgaccctagacctcttaagacgtgttttggcttcttatttcttac

SEQ ID NO: 691517 - DNA, 184 bp, Homo sapiens
tggggaaacaggattaaaaagaaatttttaattccttgccttttttttgagggctgaacagaactgcggggccaaatggaaagcttttttttaaaattcccttgcagaccttgatctttcgcagaaatgcaaagccccctgagttatacaacttgcattttttatttaatagacagaagtgcca

SEQ ID NO: 691518 - DNA, 275 bp, Homo sapiens
  misc_feature (24)..(24): n is a, c, g, or t
  misc_feature (34)..(34): n is a, c, g, or t
  misc_feature (131)..(131): n is a, c, g, or t
  misc_feature (178)..(178): n is a, c, g, or t
  misc_feature (238)..(238): n is a, c, g, or t
  misc_feature (241)..(241): n is a, c, g, or t
gggactttcccatgcagcctcatnaccataaatngttgcttcaactctagacagaatatggaatgaacctgtccatcaacacatgaatggataaagacagtgtagtatatacacacaatggaatactattnagccataaaacaggaggaaattatgtcattccaacaacatggatgancccagatggcattatgttaagtgaaataagcccggcacagaaaaacaaatactgcatganctnactcacatgtgatattttaaaaactcttaggaat

SEQ ID NO: 691519 - DNA, 100 bp, Homo sapiens
gtcagctgttacagatgaccccaagtgcgcaaaattaacccccgtaataaaattaattaaccacatcattcatcgacgctccccagtccaacatctccgc

SEQ ID NO: 691520 - DNA, 118 bp, Homo sapiens
gcatcacagttgccgcagcccgtgccgataatgccgttgtagcaggtcagggtctggttgcggatcaagtccagctggcggactatcaccaccagctggacttgatccgcaaccagac

SEQ ID NO: 691521 - DNA, 907 bp, Homo sapiens
  misc_feature (1)..(1): n is a, c, g, or t
ngcccggcggatgtggcgccgcggtgtcgcgctcggtcgggcgtgtggcgcgctgtgtgtttgtgtcaggccggctgtcgttcgtggtgcgggccggtgctgcttcgagcgcgggtggtggtgcggctgcgtgggttggcccgagcgtcgggcggcctgtgcttgggggttcgttcttgcgtgcgggtcctgtgcgtggaccttggcccactggggcctagttggaggtgggccgcccacgcggtgtagtcggggcccgacgtggggtcgatagaggcagtgggtcggagcgtgtgcgttgccgcccgacggctgttgggggcctttgtgagccgcttggcgacgcgctcccctccccgacgtggtggctgtgacatagttctgaggagtcgaccagcgcctgtgtgggttagtacacacagggggggtggggtgcccgcagccaggcacgggtaggcgaggggagtgacaagggagcggaatgagatatgtgttgttgtgggcggcgtccacgccacgtgccgtgtgtttgtccgaagcaccagagtgagaggcgcccccgccaccggctggtgggggccctcgccgcccgcgggcggtgcgtttttccgttgtcccacgcaggggtgggtcttcgtgcagtttcttgtcgccaccaactatcctgtgtccttacctacctaagtcgtccccaacacgttgatcttcttgtcacacaattctcacaccacccttgttatactcacactataaatttattagcagtccccgacaggagaagtctaaacaccccgtctcgggtctataacctctgtcgtcagcattaaaactacgcggaatgcccactatgtcgcacctctgaacactccacacgtttccaaaacggtttaaaacgcaaacatgaaca

SEQ ID NO: 691522 - DNA, 642 bp, Homo sapiens
  misc_feature (3)..(3): n is a, c, g, or t
  misc_feature (347)..(347): n is a, c, g, or t
gtnggatgttctttatttggagcaaacaggtgttcctgggaggaactgtcctcagatggctggagggggtgccattctttcacacacataaaaagttcctcttccctctgcccgcaggaaaattagaattaactacagctttttctttttgaatggaaaaagagaaataaaaatatggcaccaggttttggctctggctggatttccacagagcatgcaatctatgataagtgatgagaattcttgaagcaaagcatgcttgtagtttcaacattggagatgctataaaaagtagatgaacgcaaagaatctttttaccaaaagatgtacctataaaatcaaaaagnccttccctctgttattcatttgttcattcaccaaatatttctggagcagctgcgattccccaaacactgtgcttaggactagggatgagagtgaacatataacaagctctcgccttatagtagcttgcctgaggtagaaattgtaggaacatggaagtgaacctcggttggcttttgtagaacataagcagaaaggtgttgcttgacccacaaaggatggttttttcgcatattacccctatcacggaattgctcacttggtttatttgggaaaaatcttttaaaattttccttc

SEQ ID NO: 691523 - DNA, 285 bp, Homo sapiens
ttgatttgtcagcatctccctcaggactctgctggtctcttgcagagtgaatgagtggctcctgcctctcccatgggtcctttgggatctgagccctaggccaccgtctggctgcagtcctgaagctcctgggccctctactctcagctccttgggacagttctctgcctggcacacaaaagaccctcctgacaccagccgacctagacacaccccctccaaagatcccatcggagcccaacatcctgggagcatcacctaaaacccttccggtctcacgaattc

SEQ ID NO: 691524 - DNA, 174 bp, Homo sapiens
ctcgtaccgagacaggcgactctcgactcttcttggcttacttagctggggctgagcagcagcagacagtgtggtggagcagcacagggcagcagcacaaaggcgatggatcagcaagaaggcttgaccttttcagcaagtgggaaggtgtaatccgtctccacagacaaggcc

SEQ ID NO: 691525 - DNA, 111 bp, Homo sapiens
tagtcttagaggatccgatcacgtgcattgtgaggaaggttcagctgcacccacatgaaggctgcatgctgtgggctcatcgcctactcttcttcaccaacctggacgagg

SEQ ID NO: 691526 - DNA, 251 bp, Homo sapiens
ggacacgaggctggtcacgctgagccgccgctgcatcgccgatgcgtatgctggcggcctgtgcgcttcgatcaggtaccgcatgcgcctgcgcctctgctccagccttgtcttgaccgcactgcttgccgcctgcagcagtgcgccgccggccgtggacgtggcggcgcagaccggcactgcggccagccccgaagccgccgaggcctaccaggaggcacgcgaacgtcgactgccaggcggctcggtgg

SEQ ID NO: 691527 - DNA, 447 bp, Homo sapiens
cctggctagagggcagaggatcaggatgctctgattgaggaacgatttcagctctactgcaggatgtcgaaacagtggatgtctacccacatttgcccgtgttcctagaaagacaaatggagaaacagagcacttcacataaactgcctcatgtcctagcttttttctgtgttcaacacacattttgtcacctctgcacaatttgccccaacaatctagtgagggtacccctgcttaaacttgggtatctgggttttctgtcctaatataccactttgaatcaattctctgatgaacagtttcaagattatcttccatatgcagtacataataatgttccctaataatacctctcaagtaaaagaaacaagaaatacaaacagatttcattatgtttgaacaagtccactctgaagacttatgtaatttgggtatttttattattta

SEQ ID NO: 691528 - DNA, 777 bp, Homo sapiens
tggatcgagatctagagcctcagagatcccacgtggcgtgcgctgaaccccgtggcgtggatgtgacacagcagtaacgcccacttgcagactaccacctctacacagtgacatgcaacagcaagttaatcatggacctgctgggctggagacctagactggcgtgtgggcagttgagcgccattgtcggtgctgttgtggagtagttccgcctggcagggtccacgcgtacgtctgtgtgttccgctgctccgattctcatgggtctgcctgcctgtggctcctacgtgtccttcaagtgcttctggattgcctgggtagccatgtttgggtggagttggtcttgcaaggggcatgcaagagctcccaactggtgtgtcacgtgcgagtccattagccacgctcctgtatcgtgacctgacagggtgacacagcccctttcacactctgtgcctcctatcttcctgggtagatgccctggtgtagggctgagtactgaatggtcttccatccccagccacggggtgtgcagacccaggatcaggcccttcagaagccacggcagagggacgcacggtggctagagaccgctgcactatccttttcagagcacttcatccacttgctcctccctctaccctcggacaccctggagtgggacaggggttgatgcttatcatttattgacagggacagcactcactaacggagtccagacctacacagggggtgggggacattccctcccccacccacgaacgacgtccgcacttggct

SEQ ID NO: 691529 - DNA, 221 bp, Homo sapiens
  misc_feature (98)..(98): n is a, c, g, or t
  misc_feature (100)..(100): n is a, c, g, or t
ctctaccttgaggacgaatgtgttatccttctctggcatttccaggggcatggtggtgcggacctcaatgatggctgacagtgggatgctgaccttgngnctggaggctttgggcggcacgaagaactccaggcggaagcgttcctacggccacagccctagcgcaggagcaggcggcacttctgccactgagccgaccccctggagccgcgcggccgcgc

SEQ ID NO: 691530 - DNA, 320 bp, Homo sapiens
gatcccgggccgtacgtatgtgtgtcagatcacgcgtccagcgctaccccgggcgcgtgtgtgagccacaagtgcgagcacacgctgggctcctacctctgcagctgtaccgtggggtaccggactctctgtggatggcaggtcatgtgacgacatcaatgagtgcagcagcagtccctgtagccaggagtgtgccaatgtctacggctcctaccagatgttactgccggcgaggctcacagctcagtgatgtggatggagtcacctgtgcagacctctgacgagtgcgccctgcccaccggggtccacatctgctccta

SEQ ID NO: 691531 - DNA, 322 bp, Homo sapiens
tagaggatccgtgtcatccccttcgtgcagaatagaggtgagtgctgctagggctgcataatgaagggcaagatgaagtgaaaggtaagaatcgtgtgagggtgggactgtctactgagtagtctcctccagattcattgaactaagtctggtccaatgtatgggattggcggataataagtttgtaataactgtgggcccttcaaatgatatttgggctcacgggaggacatagtctatgaaggctgttgatatagttgccagcaggagggataatgccgatgtttcaggtatctgagtagaagacaatgatccgtaatat

SEQ ID NO: 691532 - DNA, 1152 bp, Homo sapiens
taacatacggctaggtacgatgcccggtggttagtaggacgagggggacatgtctgtctcactcgtggctgatgagaaccccttcagcccagtgtggacctgacagtccgaggactgcttcatcctggaccacggcaaagatgggaaaatcttatgtctaggaaaggcaagcatggcaaacacgtgaggagaggaatggctgccttcaaaacagcctctgacttcatcaccaagatggactaccccaatgcagactcaggtctcggtccttcctgagtgtgctggtgagaccccacatgtatcaagcagttcttcaagaactgtgctgtgtgacccagaccagacagatggcctgggcttgtacctacctttccagccatatcgccaacgtggagcgggtgcccttcgacgccgccaccctgcacacctccacatgccatggccgcccagcacggcatggatgacgatggcacaggccagaaacagatactggagaatcgaaggtaccaacaaggtgcccgtggaccctgccacatatggcacagtactatggaggcgacagctacatcatactgtaacaactaaccgccatggtggacgccaggtgcagataatctataactggcagggtgcccaagtctacccaggcatgaggtcgctgcatctgacaatcctgactgcatcagctggatgaggagcttgttgaggttccccctgtaccaagagaccagagtgaggccaaggcaagggagcccagaacaaactacatgaagcctgacagggtgggacagcacatgaatcattctaccaaggacggaacacacccgacgagggcagggacaagaaagacgcagagcacgcaccacggcctcaataccaaagacaagcgaccaacaagagccgagaccaaccccgggaatagacacggacatggcctaaaaggtaggtacactggactcacaaacggacatcccgtggggccgtaaaaagccccgtaaaacagcacaaccgctgcgaggggcaccagacacacacgaagagcacaaaacacgggggcacaggagaagacacaggatgcaatgcggcacacccgttgtgcgtgagagaaagcagaacacacaaatcaatgggagcaccgcaagaagaacgcaa

SEQ ID NO: 691533 - DNA, 123 bp, Homo sapiens
  misc_feature (47)..(47): n is a, c, g, or t
  misc_feature (74)..(74): n is a, c, g, or t
  misc_feature (95)..(95): n is a, c, g, or t
gaatggcaaaactgggaaggctctaaatggcctcactatagaacaantctttatactaagcagtctttgattancttggaattattcttaaaaangacatctaatggaaattgttgttgttag

SEQ ID NO: 691534 - DNA, 310 bp, Homo sapiens
agttccacggagactctcagaaaactcaaccccccgtccgggaaggatcaccattttatcttattttattttatttatttttgagatggagtctgctccatagcacaggctagagtgtggtggcgcaatcttggctcactgcaacctctgcctcctgggttcaagcaattctcctgcttcagcctcccaagtagctgggattacaagcagcaccaccacacctagctaatttttgtatttttagtagagatgggtttttgccatgttggccaggctggtttcaaactcctcacctcacgtagtccacctg

SEQ ID NO: 691535 - DNA, 216 bp, Homo sapiens
  misc_feature (42)..(42): n is a, c, g, or t
  misc_feature (204)..(204): n is a, c, g, or t
  misc_feature (209)..(209): n is a, c, g, or t
cggacccgggcagttacccaggtcctagtacccgggctgccngcaggtgggagcgcaagtttcctttcaaccagtggggcctgcagctcgaagtctcctcctccaggccgcgcgcgattatgtcgtccggaaaccagcccagtctaggctggatgatgacccacctccttctacgctgctcaaagactaccagaatgtcccccnggaanttgagaa

SEQ ID NO: 691536 - DNA, 186 bp, Homo sapiens
cttgatatggaagtgctataaaacatggtacactgtttatcagtctgtggtatcgtacactgtgaaagtggcaggactgagaaacccacttcaaagagttcaaatatccggaatcgtacacaaggaaatcactggaggcaatcgaattcagttgcagaataacatgtccatctttgatttggtaat

SEQ ID NO: 691537 - DNA, 124 bp, Homo sapiens
tccttgactacggagctgtcatatgtgtacagctaagttgtcgagcttagtcgtgcaagacgagctgacgcactgtggtctgaagtctgatctactggtgtgagatccatcaattttgggtatc

SEQ ID NO: 691538 - DNA, 785 bp, Homo sapiens
  misc_feature (4)..(4): n is a, c, g, or t
  misc_feature (84)..(85): n is a, c, g, or t
  misc_feature (134)..(134): n is a, c, g, or t
  misc_feature (173)..(173): n is a, c, g, or t
  misc_feature (201)..(201): n is a, c, g, or t
  misc_feature (203)..(203): n is a, c, g, or t
  misc_feature (228)..(228): n is a, c, g, or t
  misc_feature (235)..(235): n is a, c, g, or t
  misc_feature (245)..(245): n is a, c, g, or t
  misc_feature (271)..(271): n is a, c, g, or t
  misc_feature (287)..(287): n is a, c, g, or t
  misc_feature (290)..(290): n is a, c, g, or t
  misc_feature (328)..(328): n is a, c, g, or t
  misc_feature (336)..(336): n is a, c, g, or t
  misc_feature (344)..(344): n is a, c, g, or t
  misc_feature (365)..(366): n is a, c, g, or t
  misc_feature (368)..(368): n is a, c, g, or t
  misc_feature (400)..(400): n is a, c, g, or t
  misc_feature (409)..(409): n is a, c, g, or t
  misc_feature (500)..(500): n is a, c, g, or t
  misc_feature (595)..(595): n is a, c, g, or t
  misc_feature (651)..(651): n is a, c, g, or t
  misc_feature (660)..(660): n is a, c, g, or t
  misc_feature (685)..(685): n is a, c, g, or t
  misc_feature (687)..(687): n is a, c, g, or t
  misc_feature (720)..(720): n is a, c, g, or t
  misc_feature (779)..(779): n is a, c, g, or t
aaanggggtactcacattcatttgtcacacatttcaggccctcatacaccccttttaaattgtctaactcctatcccagtctcnntttatagtctaaaaacaaggcatcacccaagtcagacactccttcagancactgctgaaaacggatcaaacgtggagatcccccaganccctgtcctcaagtctcaaaaatatttnancttagcacatagaatacccttaganatattcngtcatgtccnaaagactttgtctctccccctttttnatgatgtcttcaattnccnctgacacctttcctgtatagtcatttggctctattgcntttaactnctcttganactccagcggcaaaccatttnngnttgcacccatgcaaataatctttttatactgnggggatgtngggagcactttcgtaatttgtcatcagataacttcgacaggttatttcttttccttcttgagttgcaactttaacttctattacaacatanattccacttttaaccccttcttgctcattcagagaatttaaattgcttttgttcattttccatactactccccacacttcatcgccaggtctctnaaaaatggtggctatccctccatgctaagtttgatttgttttgccttgtggagatngccaaagtnaagcttaaaatcctgcaggcgggcnanatagaagaacgccgccgaggggtttcggaggtngattctctttgttagctggttgctgccgtcgaaaaatacagaaactctcctcatctggnccgtga

SEQ ID NO: 691539 - DNA, 889 bp, Homo sapiens
  misc_feature (794)..(794): n is a, c, g, or t
tgtttgggctgcgatgacgccaaccgtgttgtggcttggggtcccaatgtgcctcggcacgtggtctgttggccggtccttggtgggttctttttactgggccttctgtccattgtagtagtatagtgcggctgacctttagctctggtttgtgtcgctgcggacgagcgtttgtggtctgtctagcccgaggggcggctgcctgtttgagcgtccccggccgtttgcgtcttaatggtaagttgcggggggtcgtgttaagcccgccgcgggcggccggtcagttgtagtgcgggcccccactttgcgtctccccttgttgtggtgtattgtataacgtcggccgttctcgctggtcccaccgtatccctgaggagtctgtttctcactcgcgcgccgtggggttgctgctgcccccgcgagtagaccgtcctcgtctttttttgtgacgtctcctctccgtggagtcctctccctctccctccaatgtgtggtgtgcctttctatgccgcttcctcacagacagagaatggggtgtgcgcctcctcgcgcggccaacgcctcgccgaccatcgcgtgggtgtgggctctccgctgaggagacgtgtcgcttcgtgcgcgtgcgtatttcttttgagaaggcagtcgtctcttcgcagcacggatgattgaagcgccgcttggggtgcgctcctcgggatggtttttcatatgggcgcacgacgcttctattcgggtaatatggcgcggttagtatgggcatgagagacgatcgaacctcccccgggacctcnaaatagcgcggtcgcgttactatcatggttgctcgcaacaggagccccctgtggcgcccagataacgagaaaaaaaagttttgaaaaaaaagaag

SEQ ID NO: 691540 - DNA, 948 bp, Homo sapiens
ggacgcgtgggtcgacccacgcgtccgcagtgaacagttgttatcccattgtaaagatgaggcaactgaggcgcatcgacagtaacatcttacgtcaaggacacagtttaagtccagtgcctggcatctgtagttatttgtctcagaccctgccctgactcggttccctcacagcaggatggaaccaggtgaggagctggaacacggagggctctccagtgtggcctgtgacggatggcattcaacctgtctgagcaacctgtgctagcagagtgccatggacagctgacatggacccctgagactagatgtatgatgcaccgcaacaactgcctgccacatgagctggatgcctgtgctggacaaagtaccacaacatacccaagttaccctgactatgagggaccccaggtatcaaccaaactcagagcctgtgggcatgagacttgcagtagtatgtgtgcagggacataccagaccccaaactccagagggacgtgcatggagactgcaggcagacatgaggacagacatctgcagaacccagaggagcgggcccaaatcaaccacaccgggataaccacatggagagaccacgaataacgacagagacaacacccaaaccaacagatgacaacacggaaaaacaaagatggacataaatgccaatcctgagacacccgagggacaacaaagaatggagaacagaaagacaaatgaagacaatgcagaaatatggccccagagaacacccgaagagataggaaaaggagacaagagacatcaacagacgaagaaccacaaaaaagcatacgaaaacaccaaaacggatgaccaaaacggaaacgaaagaacgacacaagccaacggaacaaaacaagatgatcacaaaacacacggacagacaactacacacgcaaaaccaaacatagcaaatagaaaccaagg

SEQ ID NO: 691541 - DNA, 1158 bp, Homo sapiens
ggctggcgggtgctggctcgtgtttgcgggcctcggcccggtgcgagcggctccgtgatgtggctgagcccggagtgagtgtgctggtggccaatgcgctgtgggtgacggagctgggccaaccccgttctatctgtgcttgcatgctgactgcctggtggccactggtcagggagctggctgtgccttactgggtcttctcgtgggcaccctgtgacgtgtgtgctggactccagtgcccgctgtgggcccttacctgcatcctgcaccagacccaggactcccagtgtctactggacagtggcgtgtggttcttccctgcaaagagatcacaaaacactgggaatggctggaaaataacttgctccagacactgtccatcttcgacatgtgacggacgatatcaccaccttcgtcaagggcaacgatacactggaatcatctgcacgaagagaacaagaacctgcagccccagtggagacgaggaccccgggaagttcaaggaggctgagctgaacgatgcggaacgcagaagggatgcctgagggcgagaagctggtgaattactactcctgcagaggtggacatctttgagctcctgaaagtgttcctatgagaaattcagcagcctgagggccgaagacattgagcagatgcggttaaacagaggctgaaagtgatccagtaccttggacggaccacgggcaagaggagtgtggtccgagctataactggtgaccataggttcataccacttgatcagcatggaagacctttacatggtgtacaaagcaaggaacgtgaaagcagacactggggataacaagcacgacaatggcagtaagcggaccacaaccatcacaaataggaaactaccgaattgaaccgcaagtcacggaacactatgcaacccatggtgcacagagacacatcacaacatcaccaaacatcaactcagaacacatctaaaaaacagcaccactaagcaacaaactaaaacctcacttctaactcacccactaactaattaaacaaacactacaagacacaaaacaaaaacaattaaactataaaaaaaaaaacaaacaaacactcaacacacactcaaacgaacacattactactacttacctataaatcataccaccactatacaaa

SEQ ID NO: 691542 - DNA, 202 bp, Homo sapiens
  misc_feature (15)..(15): n is a, c, g, or t
ggtggagctgagggnggaaggggagttaggggactctcggaagctcccttgagactatcatccgctgagggtggaaggggatggagcagacactcgggacgtgtcttgagattatcatccgctgagggtggagctgaggaaagagctgaggctggtaggtattctgagcatgacactcgggaggttgcttgagattatcatc

SEQ ID NO: 691543 - DNA, 511 bp, Homo sapiens
tgtgacagtttctcagactttccttgttttcagtgaccttgacacttttgagagagattttcctcaactgggatttgtcagttgtctttctcatgattagactgaggttatgagtttttgaaagtaggaccacggagaagaagtgccattttcatcacatcatacaggcatactttggagccaatgcagatttggttccagatcactgcaatgaagcaaatattacaataaagcaagtcacacaaattttttggtttcccagtgcatataaaattttatgtttaccctatcctgtagtctggtaaatgtgcaatagcattatgtttaaaaaccaatgtacatcccttattttaaaatactttattgctaacatgtttttggcccaaacaagaagtgagcacatgctgttggaaaaatggtgccaatagacttgttggtcacagggttgccccaaacttttaatttgtaaaaaatgcaatatcagcaaagtgcaataaagtgcagcccaata

SEQ ID NO: 691544 - DNA, 120 bp, Homo sapiens
gtggtaccctccactaggctggtggagcggcaggcaggcgggatgtgaccccagacgggctggatgtggaggggctcaggctccagtgtccgaggagccccagcctgggctggactcagg

SEQ ID NO: 691545 - DNA, 1142 bp, Homo sapiens
aaacatacgaaaaacacacccattatttaaaattattaaccactcattcattgacctacctgccccatccaacatttcatcatgatgaaactttgggtcccttctaggagtctgcctaatagtccaaatcattacaggtcttttcttagccatacactacacatcagatacaataacagccttttcatcagtaacacacatttgtcgagacgtaaattacgggtgactaatccgatatatacacgcaaacggagcctcaatattttttatttgcttattccttcatgtcggacgaggcttatattatggatcatatacatttatagaaacctgaaacattggagtacttctactgttcgcagtcatagccacagcatttataggctacgtccttccatgaggacaaatatcattctgaggtgccacagttattacaaacctcctatcagccatcccatatattggaacaaccctagtcgaatgaatttgagggggcttctcagtagacaaagccaccttgacccgattcttcgctttccacttcatcttaccatttattatcgcggccctagcaatcgttcacctcctcttcctccacgaaacaggatcaaacaacccaacaggattaaactcagatgcagataaaattccatttcacccctactatacaatcaaagatatcctaggtatcctaatcatattcttaattctcataaccctagtattatttttcccagacatactaggagacccagacaactacataccagctaatccactaaacaccccaccccatattaaacccgaatgatatttcctatttgcatacgccattctacgctcaatccccaataaactaggaggtgtcctagccttaatcttatctatcctaattttagccctaatacctttccttcatacctcaaagcaacgaagcctaatattccgcccaatcacacaaattttgtactgaatcctagtagccaacctacttatcttaacctgaattgggggccaaccagtagaacacccatttattatcattggccaactagcctccatctcatacttctcaatcatcttaattcttataccaatctcaggaattatcgaagacaaaatactaaaattatatccataaa

SEQ ID NO: 691546 - DNA, 936 bp, Homo sapiens
aaacatacgaaaaacacacccattatttaaaattattaaccactcattcattgacctacctgccccatccaacatttcatcatgatgaaactttgggtcccttctaggagtctgcctaatagtccaaatcattacaggtcttttcttagccatacactacacatcagatacaataacagccttttcatcagtaacacacatttgtcgagacgtaaattacgggtgactaatccgatatatacacgcaaacggagcctcaatattttttatttgcttattccttcatgtcggacgaggcttatattatggatcatatacatttatagaaacctgaaacattggagtacttctactgttcgcagtcatagccacagcatttataggctacgtccttccatgaggacaaatatcattctgaggtgccacagttattacaaacctcctatcagccatcccatatattggaacaaccctagtcgaatgaatttgagggggcttctcagtagacaaagccaccttgacccgattcttcgctttccacttcatcttaccatttattatcgcggccctagcaatcgttcacctcctcttcctccacgaaacaggatcaaacaacccaacaggattaaactgcatgtgtcggatgtcctgggaatttgctggaacagactacaaagttctgctcagccggcagatgggaatggtttttgccttggattatgaccctgtggaaagcaagatatattttgcacagacagccctgaagtggatagagagggctaatatggatgggtcccagcgagaaagactgatcacagaaggagtagatacgcttgaaggtcttgccctggactggattggccggagaatctactggacagacagtgggaagtctgttgttggagggagcgatctgagcgggaagcatcatcgaat

SEQ ID NO: 691547 - DNA, 175 bp, Homo sapiens
agtcagcttctccagtgtcagcacgcagggcgtggaattccactcaggagggtgacgtacgcgatggccatgccagacaggcccaccttgccgttccgccagatgcacacggttgtagtgcaccctggactcctgctcctccaccaccttgggcgcctccctcctgcggaggttc

SEQ ID NO: 691548 - DNA, 435 bp, Homo sapiens
caataaattggctgggcgtagtggcacacacctgtaatctcagctactcagggggctgaggagggaggattccttgagcctgggaggttgaggttcaaggaggttgaagcagtgagccgtgattgtgccactgcactccagcctgggtgacagagtgagaccctgtctcaaaaaaaatttttttttttccatggctgggcacggtggttaatgcctgtaatcctagcactttgggaggccaaggtggccagatcacatgaggtcaggagttcaagaccagccttgccaacatggtgatcctgtctctcccaaatcaaaaattagcagggtggtaggggccgtatcagtcagaggtcgcatagaacctaagttgggagttgcagtgacgagattgcttctgcactccagctgggtgcagagtgagattgtctcaca

SEQ ID NO: 691549 - DNA, 221 bp, Homo sapiens
gccaaaaccactccaccttaccaccagacaagctgagcaaacattaccaataaagtataggcgatagaaattgaaaccttgcgccaatagatatagtaacccgaagggaaagagtgagaaaattatagacccagcctatatatatgcgcaggggctcaacccctatatacctctgcataaatggagttaactagagataaactcttgtcacaggagagacc

SEQ ID NO: 691550 - DNA, 284 bp, Homo sapiens
ggcgctctgcagtaactcacgccatgtaatcccagcacttgtggaaggccaaaagcaggataatctcgcgttcaagaccagcttgggcaacagagcaggacccccatcgtcgtacaaaaaatatattcagtgtgtcgagcaagaagtgattcaaattgctgctcagattttaaaacttattgtaactatcagtgtaaagtacccatgcctggatccgtgtacattgttgagtatcaacttggtggacctgctgttcttgaaaccctgtcctcgctatacgtaaa

SEQ ID NO: 691551 - DNA, 233 bp, Homo sapiens
  misc_feature (51)..(52): n is a, c, g, or t
  misc_feature (80)..(80): n is a, c, g, or t
ctaattggttcttcgatgacgagtcttttctgtcccttatgcagctcctcnnccttcaggtctcagatgaaacatctccnctgagaaacctcccagggcccccggcaggggcggggggtgaggcacctctgctctgggcccccaccacaccctggcctcctttcactatcgaaactatcaggcactctgatgacatagtcctgcctctggagcgtcatcgaagaaccaattag

SEQ ID NO: 691552 - DNA, 105 bp, Homo sapiens
ttcgtcatctgagcagaaccaacctccgagcagtacatgctaagacttcagccagtcaaagcgaactactatacgtcgattgatccaataacttgaccaacggga

SEQ ID NO: 691553 - DNA, 236 bp, Homo sapiens
ctgaatgttgccaaatgcaaggagagatggaggacattctccaggaagcccggcaatgcagaagaaaaggccaagaaggccatcactgatgccgcctagtgactggctgaggagctgaagaaggagcaggacaccagcgcccactggagcggatgaagaagaacatggagcagaccgtgaaggattctggcagctccgtctggatgaggctgagcagctggccctgaagggtgtga

SEQ ID NO: 691554 - DNA, 198 bp, Homo sapiens
gctgatgactccagaagtcgactcatctcaaaacacacaactgtagaaatggccatggaacaaatggttcacaccttgtcatacccagaccctcaggactgccaaggacaagaggatcacttgagcccaggcgtaagagaccaccctgggaacgatggtgagaatctgtctctacaaaatgtatataaaaaattggct

SEQ ID NO: 691555 - DNA, 472 bp, Homo sapiens
  misc_feature (148)..(148): n is a, c, g, or t
  misc_feature (151)..(151): n is a, c, g, or t
  misc_feature (394)..(394): n is a, c, g, or t
  misc_feature (434)..(434): n is a, c, g, or t
  misc_feature (455)..(455): n is a, c, g, or t
agtccaagagttcaaaagctaaggaacctgaagtcggatgtttgagggcagaaagtatccagcatgggagaaagatgaaggctgaaagactcagcaagtctgccctttccatcttcttctgcctgctttattctagctgcactggcantgnactagatggtgcccacccagattgagggtgggtctgcctctcccagtccactgactcaaatgttaatctcctttggcaacaccctcacagacacacccaggaactatactttgcatccttcaatccaatcaagttgacactcaatattaaccatcacatttcctaaaccaatataccaattattgattatgattatggacaatcatttcacattgtatacatacatgtattcatcacactgtnacatcttcaaatattatggcaagttttatttgttcaatcntacttcagtataggtgaggancaagttaaatggggaca

SEQ ID NO: 691556 - DNA, 114 bp, Homo sapiens
tagttgttgctgtaggtgaattagaggatcccccagcccattgagattggtagcccagggggggggggggggggtcgcaccagtcgtggtgggagaaggaggggtaccggagct

SEQ ID NO: 691557 - DNA, 200 bp, Homo sapiens
  misc_feature (48)..(48): n is a, c, g, or t
  misc_feature (88)..(88): n is a, c, g, or t
ttggttcattctctggtttgataggatttaaactcataacattgaaangtcaatataacattcattcttaggacatttgaaatataanattgttgaagacctttaaagtgagataaaatgggcccatgacttgcttgattgcattgtgctgagtcattctttgtgccttaatgagtaagcagttaaggccaaagtaaatg

SEQ ID NO: 691558 - DNA, 1190 bp, Homo sapiens
ggcctggcagtcggctgcaccgaacgcgagggtatatgcatgtatagactgcctttgatcctggattacagtggcgacctggaaacctcgtacctcctcgtgtggctgaaggaaccgaggcttatgacgatgtatgactatctaggccgtagtatagcgcgctatcatacgagagagtctccgagtgatagcacgagcgaagtagaggtcagtggcacatgcttgggcgcccattaagaggggctcatgggaggcttgtacaggcaacgggcattggtgtgtgaggggacgttccactctggagccaggccgactcccacgtccgacgtctgcgagctgtcatagaaggcatacagtcgtaacactgtcgtgagggcaccgtcggacgtgtgcgcacgagtgccctgggacttcggcccgcaatgacaagtgtgagcagagtcagcaacatggctggagacctggagagcgcagaggtagtgttttccccgagcgaaggagactcaccgaggcgacagaggcgcgagatcggactccacgggttccagggttatgaaacactcatcttttgtagtaacgtgcaagcgtgcttcccacacacgcgaagaatgaatagggttcgaatgtggctcaaccttgtggaagcggaatggcccttgtaaatctgcttagatattgcggggacccgaaggggagaccaggggaccctgaagacattgaatttggcacgggaaccaacgacaaaggtccacgggaccggagggaatagtccgccagtacactccgggggtcatctgcacggataattaaaccccgatagttcaagctagtcgcgcaagtggacagaaacacatcgagtgtacagagttcgagtgccaacggtaacgcgacttcgcgagaaattccatgggaagcgcaaacccggcaggattggagaaagcggatgagaagaccaatcggcaaggcggccctccataagggacaggagaattaaatccctaacgggtacccgcgaaggagcagaagatatgggaccacgagcgagaggacatccccgcgatatgaccacaattcctgcgggaagcaaatgcagaaagagtagcacaggacacaaaaggggggagtccccggggggtggaagaggggtggaaccacacacggacaagaggggacttgacaccaccaaggcc

SEQ ID NO: 691559 - DNA, 389 bp, Homo sapiens
ggcatcctccagacccccccacaggggttcccttgtagccccttccagggggggtgccccgttggtccacccacaattcaaggtaacttaattctcccttcagggtggggaagccccccccaggagaaagctggttccagccccctttttgataaggccccgtcggtgtagggtgccccttcccaaagtaatttgcccgcgtcccacgctgcttttgagtgcgtcgcggccgccaggcatgcgcgtgaggccttggatgatctccacctcgtcactgtagtgcagcgcgcctgcgttccacaccaggtttcggtcacagcggtagtacctgtccctcaggttgtcgatgaagcgcttggtgaaggacttgacgtcgacgcggccgcgaa

SEQ ID NO: 691560 - DNA, 174 bp, Homo sapiens
tgtgatcctcgcattggaggggcagttgtgccatcagtggcggatatggaagcagagccggaggcagctatggctttgggaggtggtgccggtagtggatttggttacggcggtgtgagctggtgtgtggctttgggctcggtgggggatctggctttggaggtggcttcggtg

SEQ ID NO: 691561 - DNA, 138 bp, Homo sapiens
cgctcggtaccgtcccccatcacccaacctacagggaaaatcgagatcaaaatggtccgcccatgggctgaagggactgaagagggtgcacgtggctgactgatgaggacacgagaaacctcaacgctatctcttccc

SEQ ID NO: 691562 - DNA, 949 bp, Homo sapiens
gtgggaatggggctgcccgaggccggcctgggtgctgcagcgcaggaggcggtccggtggctgcggtctggcagactgtgagcgcgaggaggcggagtgctgctgggcgggggcgggacggtctgtgcggtggcaaggcacagtgtgtaatggataggtaacagagaagacctcgtcccttcctatgtcgatgggggatcatgtaatgactatgatgtgcttcacattgcccccgccaccatgcaagccccatggtgaacacctgcatgggttgtgctgcaattgtgcaagctgtggctttaccgcgggacccccgagctctgaatgacgatcaggtcgctagcctaatgtttcccttgggtttgtaccgtgcatttggatgatggccctcaccttcccccgattgacagtcctccattgaggcctccttgattgtaggtggtctggattgactggaggaacatgattcagttggtgagatggagagagaaaatgtgggaaaagttttaaaggagttaacattgggaaagatgcattgtgaccttggaagggctaattggcattggcttttgcatgtgaaaaggatttaaggtttcttggggacgcattgagggcgagaataacactgtcccgtttctagtatagttggacggaggtgtcccaaagggggtacatactcaggttgtttccagatgaagaggcaccagcgttgttttggaaggacgggggcgaggtcgacaacgggcgaatttgcaagaaagtcactaacgacgaagggcccaagccaggagcgaacgtaggccatcagacgggattgaaccggccacgaggctgaaggaagaacattcacatgaaggaaacacgttcaagaacgaggtttgaaagagcatggcttgattgtttgtcaaaaccagtggggagagcgaaaacttcctaggggaatgatttg

SEQ ID NO: 691563 - DNA, 800 bp, Homo sapiens
aatagggggggataacaattttgtagttattgatagttgtctaaagaagtgaggggcatagagcattttttaaagagatatttttgcccgcaaacaaaagggggatttagtggaatatataagtgagttgaacaacatagttgggaatgatttattttatatataaaacggcggagtgcaagcgagtgagagggcgaggagtttataatcgagagagatagatattgcgcgtccaatatatggtgacactcctcgttgggggggtcccaccccccctcctccttgttgttagaaaggtttttccccgtccctcgtggggaccaactgcacgcgagctgttttgttttgttgattttttttgttgttccctccttggggtcacgatcgcccccgtttcttgaggttcttcttttctgttaactcccactgggttctcacaagttaatttgggggggaactacccctgagccacgagataccactggggaaagagtctctaccccctttctgttcgagagttcatttttatccccctcctcgtctgaaccacaaactgtatgggatcaaccacccacccgagctctgtggggacaaaagaaaaacctgctcccttcgtctctgctggaaactggaagggtggctaaggcccccgggtagtagtgcataagaaattttagacttttttccccctttttttgtataattggggtcagagaggaggacactgggtttttatgtgaatatggcacccattagccctttacccacaagtatcttgtttaccattttttttggtttta

SEQ ID NO: 691564 - DNA, 667 bp, Homo sapiens
  misc_feature (583)..(583): n is a, c, g, or t
actgccatctcagacacaacaatcaaataagatgaagaaataataagcatgaataaccatcttttcatatgttactggccgcctgtgaataactatatttatatcctttgtcattattctgttgtacatgtcttgatttgtaggcgtactttaaatattctggatactacagtctttttggtcgtgcgcatcataaataattggtgccacactttgggtttttggtctcgaactcctgacctcaagtgatctgcccgcttcagcctcccaaagtgctagaattacagatgtgagccaccacacccagccatttttttttttttttttttggaaacagagtcctcactcttgtcgcccaggcgtggattccaggtggccccatctcggttcaccggaacctccacctcccgggttcaagctgtttcctccgtgcctaagcctctcaagtagctgggattacgggcccccgcccccattgccgggctaatttgtggtattcttcaagtggagacgaggttccccccatttttgccccaggctggtctggacacttcttgacctcaggtgacccgcctgcctcggnctcccaaagtgctgggatacacggcttgagcattgcccagtcctcatttagatgtctcaaccttccaatggtccgagcttccat

SEQ ID NO: 691565 - DNA, 137 bp, Homo sapiens
tgtcataacagtacatgctcagagcaagtttgctcagtcaaaggcaggaaacactgatgtccagctcatgagtcaggcagagaagctcctctgctcagtctgtgtctagccggtctccaactgattggctgaggctc

SEQ ID NO: 691566 - DNA, 488 bp, Homo sapiens
tttttatattaaaagacttcaaacaccaaagagaggtcatacacgtcttattttttaaaaacatgcgtcaaactatagctacccaggacgctggggaaccatctctggaggagaatatggcagagagggtttatgtataaatacacaacaatatttgtacacaactggtaagctgctctgactagccctatagacaatgtcctagagttcgtgagggctgccatacaaacttacttacctggttttaaccgcgcgttgggtgtgcaggcccattccacttccacagctgccagggctatttgaacgggtcatctaaaagcccgtgaatgcggccacatattttgctgttcacctgtggtggaagggctcaaatacactaggactgccgatgtacctagcccccaggttgtaggctcttttggcgtacatcagtacatccaatatggtggcaactgtggacaccagtccaaatgggagtcttgggagaa

SEQ ID NO: 691567 - DNA, 656 bp, Homo sapiens
tataccatccgtttggcgcgcggatccgatacttaatttagtatgctttataggtgttccctttgatatcctggtcttgagtagctgcttggaattctcaccaagtaggaatggctcggcggctgagcagtatggtactgatataaacttctttatgagcgttgcgtgagggctctacttacatgtgcctcttactctatgcagtgagctgctagagtcagcagtgtacgaataagtcatgagttgatggcctcactagcccagccaaaaatctattagtggtgcagccaaagggccatagaaaactagaagaaactctttctgactgcactgctcccaggacaggacgagccaacgtgcgacgagctatgcgctggcgtgggggatggcgctgtggagtctccacttcgcttgggattctagcgctcccgtctcatatcagtgcacacgacttattcaacatcgtacaggcatgtgcgacatctgagccttcatgtaacgcaaaatgttaaggtactggcaaaactgggcttctctttcgtgagaattacagctcttatggtgtcttgtaatcgtccgtgggtggggacaggaacatggtgtcattatctccatcccattgacagaaaccaataaaacctcaggtgtacaggcac

SEQ ID NO: 691568 - DNA, 1054 bp, Homo sapiens
cattactttggaaagttacactttatttttcctttcatcaccgtcttagaaacaaattattttccaattcataagaacttggtaaataaaaaaaaataaaaggaaattatatgttttgtcttgggacattcatgggaaggcttgtggaatgacatgatcccccagaaagccttagttgagccagatctcaaccagagactcaagatagcctcaatgtacagtgacaagattatgtatccaagaaaaataaaaaaaaaatcatacaataaaaagggaggagggaagggcaggtcttgctttgttaaacgcccaaatgggtgtggtaaactttacacaagggtggtttttcgatttttttttccctaggggcatattacccaagaaagttgtgtaaagtgggggaaaaatactgttgtaataagcgattttaagtgttcgcaacgaggggttgactgtgtgggccctctaatagcgttcattacaacgattttactccccttataaatgttttcagacacaggggaaaatcaatcttctgggcaatacatccttttaaatgaaactgagcaggggacgatgatatacaaagtattcatcactatataattctacctaaaataactaattcttcggtgacagagcacaagcgcacatctttctaccgccattatgtttcacaacagcattggcacgaacactgcttgttgcggcgaaacaattaatctcacatacgtagacacttagcctggtgggcgaacactctaacgcccagctatagtaaaaaggtcacatcgattaacaaatccatgcgtggtcggaccatttttgcgccccggaccactcgccgtccgttgtatcacatcacaccaccgtacggtctccaccataagatattcccacactaacagtcgtcgtacagcagattactcacacatatacaaggctctcctctaaatcaaacatctgagtgcagccatactcctcctactgttacaccacattagttggttattcggacgcactgacgcggtcagacatacactctatctcagca

SEQ ID NO: 691569 - DNA, 120 bp, Homo sapiens
gtaataatgcctcactttgctgaaccttggctatcctgccatgctccagacactccttgcagcttccagcttatcattcacagtggatgccaacggcctgttccataccggggaaggtta

SEQ ID NO: 691570 - DNA, 124 bp, Homo sapiens
ctcacccccaccgcctgacgctgtgccccggacccagcagagctgggagggacagcccccaaagaaaggggtcatgctggcctgccccctgcccacccccactttcaggcaaaaagggccaggg

SEQ ID NO: 691571 - DNA, 220 bp, Homo sapiens
tcctgcgttagtggatgtagtttcaagaataactggatggttgttctgactcatcttcttatgagcccatactctattagtacaaactgagggttcacggtgatctcctggtccatggcttatcagccgctcatccagctcacatgcacttcagcatctcctcgatcaatgttatgaagcatggctggagttattatatttttcagaggttatcatagga

SEQ ID NO: 691572 - DNA, 464 bp, Homo sapiens
  misc_feature (98)..(98): n is a, c, g, or t
gggcataaaaacctgggcctctgggttaagcgtgtttttgttctccttatccactcaccatccattttcattattatcatccaggtaaagcgccttcnctggtcccttttcaccaatttggtaagaaccctcaaatgggtcgatccaaaccctaagatcctgtggcagattgccacgaacatcatcaatgtccaaacccctttctttggatgcttgttcaatcactggggcccctttttcccctatgggtatacatttaaaccccgatcctttgtatggcttttcaggaaaccagggcccttcatattttttcttaagaagtctttcaagtttttccccaaaaatgttgacccgtttcctgggaagcttattggccaaatacgaaataataaaatttagtgctacttggatttcaagctgcatagctggtacgccccaaaattaggtttcaactccccccccca

SEQ ID NO: 691573 - DNA, 549 bp, Homo sapiens
cccttcacggtgtctgggacagcaggtactgccatgtgcactaccatggcccccgaggcaggcatgcaatggtgacgggactggaagccctttgcagatgccgttggaggagctggtccgtccacaatccaatgtagtgccactctgcacttagcaggggatggataagcagggaaacattgtgcattcctcacagccaacagtgtaggtctcggtgaagccccggtcgctgagctaggctcaggctgttccagggagccacaaaactgcgggtagtgatgttgcaagagtccatcctgcagttttccagcactgagaaactcctcgttgcggttgtgggacctgtggaagtatgcgcagacactctccatggatgatgggtgtcgacgaaccggatgttagcgggatcccctaaggcttgtgaacccttattctctctaggtcatcttgatctcttaacgctggtataagggcggtctggttgacttctggtgtccgccagactttggggcgtgatgacgaggtcggaattgcagaacaccgtcgaag

SEQ ID NO: 691574 - DNA, 148 bp, Homo sapiens
  misc_feature (77)..(77): n is a, c, g, or t
  misc_feature (112)..(112): n is a, c, g, or t
aatcgacgacaatttaaagaaactgtacagcaaagcgacgattgagaaaaacgatgcaattagaactgaaaagaatnaaaatagcaagcgaattgatgcgccagcaagaatnagcgggtaacgcctctgcaggtacgagctcgaatcg

SEQ ID NO: 691575 - DNA, 349 bp, Homo sapiens
  misc_feature (38)..(38): n is a, c, g, or t
  misc_feature (46)..(46): n is a, c, g, or t
  misc_feature (109)..(109): n is a, c, g, or t
gtttatgggggggccttggaaggggaaacccccattcnccccggcnccccagggggtttttgggtggggcggggggaattttcccccccccgtttttcccccccccaanaaaaggttttttggggggtttagggcccccaccccggggcctgtttgggtttcaaaagggccccggggttctttcccggccgtgggaaaaaaccccccggggggccccaagttttggaaatttttttttgggtttcccttccccctgggggcccccccccccccagggggggcccggggccccttttaaagcccccctcccccggaaaacccggtgtttggaaaggggttttttttttta

SEQ ID NO: 691576 - DNA, 813 bp, Homo sapiens
agatggcggcagctgtggcttcgcttcgcaggggtagtgttgggcccgctgtggcgcggggctcccgggctgcgcgtgcccggggtctgctgtgcagtgcgcggcccgggcagctcccgctactgacacctcaggcagtggccttttctgtcgaagtctggttgccttttcccgtaggccggacaggtgatgcttgtctagctgctggtgcatgtcttggtcggcagggggttgcggggctggactgtggcgtctgcatattcggcgtgttgaggtgccacgtgaggctggagcatgcaaccccacccatgactatctcgtggtctcaccgtggcctccttctcgttcctttgtgatcgcacacgcagcatcctggaggggttccccacggtatataagcaaggcttgtgccgcctcctgccacagtcattgtgacttcgattgggcctaccagcacagcatggtgggctgtgtgctacactggatggatgataggcgtagaggatgctggctgccggcagtgtggactggttcaagaaccgggccctaagtgatagcataggggagattgttcatagtggctcaggtgaaggctgtatcgacttattttcccgaaaagcatatcgcccaagagttgacggctgtgtcgaggctgccgatcacactgagcgttggccgctgagctagctacatcgtgcgagtagcattgtggtgggccacgtgtctcctgccagggctatgcgatccaccacgggtgtctggggggttcactcaccctatttggcggctgcaggcctccataagagttaatgc

SEQ ID NO: 691577 - DNA, 139 bp, Homo sapiens
tcggaaaggtgaagtaacttgtccaagatcacaaagctggtgaacatcaagttggtgctatggcaaggctgggaaactgcagcctgtacttggcgctgcccttgatcatccgtgcgtgctccccgagaagtctaggagg

SEQ ID NO: 691578 - DNA, 130 bp, Homo sapiens
gacggcgctaaggggcgcgggagtgtacggtcagctgggcgtaacaacataccgcgggctaatggccgtaaggggcgtcagtggatttcgggaatggtgggaactattgtttttctttttttttcctttg

SEQ ID NO: 691579 - DNA, 179 bp, Homo sapiens
gagtaataatggtttcaagagtatttttaaggaacaaaacgagcatgaattaactcttcaatataggctatgaagtaatagttggttgtgaattaaagtggcaccagctagcacctctgtgttttaaggggtcttccaatgtttctggaataagccctatttcagggttcataacagtc

SEQ ID NO: 691580 - DNA, 750 bp, Homo sapiens
  misc_feature (298)..(299): n is a, c, g, or t
  misc_feature (314)..(314): n is a, c, g, or t
  misc_feature (326)..(326): n is a, c, g, or t
  misc_feature (335)..(336): n is a, c, g, or t
  misc_feature (403)..(404): n is a, c, g, or t
  misc_feature (411)..(412): n is a, c, g, or t
  misc_feature (453)..(454): n is a, c, g, or t
  misc_feature (469)..(470): n is a, c, g, or t
  misc_feature (480)..(481): n is a, c, g, or t
  misc_feature (492)..(492): n is a, c, g, or t
  misc_feature (514)..(514): n is a, c, g, or t
tataacgattaatataactttgatatctccttgtactgcattttgatcacttggagcattatgtcatgaatacttaattgatatcacagagtacgataggatcatatgttctgaagcgattatcacaatcataaattttatgcccggatcgtaacctcggtggacagataccataacatacctgctagcaatagttgttagcatatagattgcctgtcatatgatgtctgatactggcacccatttccgctctgactcgattatattagatttctgagcatgctatactaagtatgcnnttcagtagaagccanccacatatgtcnatctttgcnntgtaaagctgcaacggacaactttttacaacttctgtggacactttgagttacgactggtaacatannctgactnntacgaaacgttgaacttgggttgaaggcgggcccaaatcanncctgacggtcagcanngtttgagacnntagcctggcanacacattgactgaaacccctgnttcttcttacttaaaaaaataaccaaaaaaaaacaaaacacacaaagcaacaaacaaacacaacttgttgtgcgcgcgcggccttctgggtgccctctcgcgaagaaacgctcttctcctcgagacaccctctctcctcttgtgcggcgcgcgcgcggtgcccccacttatggtgttcaacttgtcgaacctcttggctctcactaaacttgtgtttctccccctggggaactctg

SEQ ID NO: 691581 - DNA, 458 bp, Homo sapiens
cgactctatgagtgatccgtactttcatcattgtggggtggctgcgcttcccacagatgaaggaatgtatttgtaacacatcgtcccccatctggctccaccgctccaccaacaaatgattaaagggacccacttcaagaggggcaaacgaaagacactacgacatctgattccctgcacactgggtagtggtgactgtgctactcacaggtcgggtaacttctgttttcaccactgaagatactgtgcctggacttatttatgcaagagaacacggtcagtgcggattcacaaccctctctacacacttcagaagcctgggtggtgaaagccagttcttcccctttgcagaatcttaaacaaaaccgaggtttaccctgagtccttttctttccttctcattctcagttactgaatatctgctttatgtcaggcacagtggtaggtttgaaggtgag

SEQ ID NO: 691582 - DNA, 353 bp, Homo sapiens
gctacagatgtctctatagaaaaggggaaaatcaaattattgggtaaaagtgcctgccagtaacacggcagtggtctcagaagtctctgaacacctcctaccctactcactagtgatttttaaagaaagcggtaggggtggtggtggagtggggggaggccagtaatgaccagttcagtgagttttgtaccttgtgattcctctaacctgaccaaaggtgatgagaccagctgtcactgccttgtccttgaagccctttggactttgaggtggtctccagtgggaattccactcaggagggccactgggttagaatgaggtcattggccccttttggagtaggagtggggagc

SEQ ID NO: 691583 - DNA, 273 bp, Homo sapiens
cgacgatcccgacgcctctctatggggtcactgcacgtcaggtccatgtacatgtcatgttgacatccatgttcatgtatggtgtgctggccccatgggtgggtccactccctcagcccagactgccccatgggagggctcagtgcaggcccggcctccaccaaactccatgcacatgggagtgcctgcaggccctcacccacagccatctgcccgggcaacatggtgggatccctcttgttggtgctgcctgcatcatcctgctccatctcc

SEQ ID NO: 691584 - DNA, 383 bp, Homo sapiens
  misc_feature (197)..(197): n is a, c, g, or t
  misc_feature (298)..(298): n is a, c, g, or t
  misc_feature (310)..(310): n is a, c, g, or t
tgaacgcaaggaaaggggccaacaaagggaagaggttattttccggcatgaaataagatttgttccttttccttggtgggattttccagggtccagcacttggagagtttgggggttggtttttttactgccaggattcctttaggaaaaccctccccaagccctggcagggggtgtttggcccttacctgaagggnccccattcactcccaagctagtggccttggtggatttggggtttgctgaattcaaaggttgaacaaagcaaacaggtttcccaaaaaagggccctcaaagngggcaaaacggntttttgcaaacaggtttgaaaaaagccttttccctgttcctttttccattaaaaaaaaaaaaaaacgcctgga

SEQ ID NO: 691585 - DNA, 119 bp, Homo sapiens
atcagctcggtcctgtgtagtgttgagactatgaaagactcattgtcttgtattcagctcttaaatagtgtaactatattcccccccccctgttggaaaagtaccctgttggaaaagta

SEQ ID NO: 691586 - DNA, 280 bp, Homo sapiens
gaaattttaaataaatgggatcaggatcttgaagcctttcattgaaaaattgtaacaggagatgaaacatggctttaccagcgcaatcctgaagacaaaacaaagcagtggttaccaagataagtagttcagttaaagcacaagaggacttgttgagagcaaaggtcatggcaacagcttttgaatgctcaaggcattttgcttgttgacttctgtagggccaaagaatggtaacgtgcttatcatgggagtcctttcagaacttagcaagcttcacaga

SEQ ID NO: 691587 - DNA, 130 bp, Homo sapiens
ccctctataatgtgtgccatcataaactgtgttactgatgggcaaatggcaggtaaaaaaaaaattgtataggggccgggcatggtggctcacgcctgtaatccctgcactttgggagaacaaggtacct

SEQ ID NO: 691588 - DNA, 197 bp, Homo sapiens
ttgtgaaacgagtggacaggacaaaccagattatatatatacctgcaccctatgtcctaagagatgacaatggaaaaatcacatgtgtgctgcattacagacatgtttatcgagaactgtctcacttattaagaactacagggctacagagaaactgacatatcttgctagactgaggtgagatgagactttcagca

SEQ ID NO: 691589 - DNA, 601 bp, Homo sapiens
agcgggagggctgcagtctggagttggagccctggtcccaaccagggctggataaaaggtgtgggtggtgctctcggtgtgcgaaggctgtaagttatatgatgaggttccatggatctcaatagtgccagcactgtgtcttcaggtgtacacaggccacagtcaggatactgtggtacaacagctgaggagcagttgaagccgtgggagacacagccaggtttctattcaggtgctgaatattttcaccaaccacacttggatataaatgtaaggtggcttgctgtactgtattttaaacatggaattgatcgctactggagacgtgtagcacctcatgctctctcagaggaggagaaaactactctggcgtgccgggctcatcaccaacttcaaatgaaccaataaaccagattgcaactcagattgcagtggtcattgcaaaaagttgctagatgggatgtcccagacagtggtctgaacctaatttccccactctaatagagtttgttaaagtccaggatgatcttcgaaagcacagagcataacttacctttctatcatgttacaagacaatggattaaacgattgctgtgataga

SEQ ID NO: 691590 - DNA, 306 bp, Homo sapiens
gggggagacttgatgttccacatccaaaagtccagacgtttcgatgaagcccgagctcgtttctacgctgcagagatcatttctgcactcatgttcctccacgaaaaaggcatcatctacagagacttgaaactggacaacgtactactggaccacgaaggccactgtaaactggccgacttcggaatgtgcaaggagggcatttgtaacggggtcaccacagccaccttctgcggcacgcctgactacattgccccagagatccttcaggagatgttgtatggacctgcagtcgactggtgggca

SEQ ID NO: 691591 - DNA, 381 bp, Homo sapiens
aaaaaaattttttttttcccagggggggggggatttttaaaaggaggaggggcggggaaaaaaaccccccccgttaaattggggggccaaaggaaaaaaaaatttttttttttctaaagttttaaagggggatttgttcccaacaagttttgttgaaattccccccgggggtcgggaaaaagggttttccgggaacgggtttcttttttaattttctaaaaaaaaaaaaagggccccccggggttttaaagggggggggggatggttttcccgggtttaaaaaggcccaagggggaggttttaaaaagggggccccctttatgggggggggagggggtcacccccttttttttaaaaaaaaaaaaaaaaaagggcccggta

SEQ ID NO: 691592 - DNA, 1073 bp, Homo sapiens
tggggctccatttagtggttttaaaatctctttgaagttaattaggggaagaaaaagccactcctctcatacgtgactctttggggggtaaccattattgtttatactttagaaatttacgctagtatattaagattaagtgaattctctttttatatctaagattgtgaacccattttacattattattcttgcgatatctcaattattccaaaaggcctatattgactgtgtgttttcaactggactctaacttttacacaaatttttcataattttcggggtcacactccatctaggggggctacccaggtttgggcgcgccattatagaattagaagtatgttttggcttgtggcaaaaaaaaacttttactctttcataggaagagaaactcataatgtaccactctcctggggggtatccgctctaaaatctaaaatttctgtgctcgtgttaaacacaggcggtgaccagagtttttcttcttgcaaaattaactgtgaaacctctttttacaaacaccttacaacctgtgggtcctttgggataggctcaacacacggggggcgtattcaaaacgcgccaaaaacaacctgtttgcatttattttgaggagatgtcgccctctgtgtaataaacgggagactccggggttcgagcatgtggattccacgggggcgaccaccggtgtaaacacgcgtgggacccttcatttaataacgccaacacagtatctcgctttaaatagacatattccccttatatgtgtgggcctaactgggggttatacccctaattttgcgccacttgtgtatcaccaaatctttcacccccaaaacacctttatgttgcgcgcgattaatataacccccgaaaacaccctttggctattttgggtccataaaggtcccttgcgcaacttgaacaggaacacatcttcgcacaagtgtgggccaaactctaggggataagatccatacaaacacaaggactcctcaacaaacgaggattatgaccacaagtaacactcgacggggattaacatctaaatataacagggggccaatatg

SEQ ID NO: 691593 - DNA, 258 bp, Homo sapiens
cgggtgatctaaggatcccgatatgcgtctcaggataaaaaataatgggtccggtatggtggtcatgctgtaatccagtgttttgggatacgaggcaggaaaattgcttgaggtcaggagttcaagaacagcctggcaatatggtgaaaccccatctctacaaaaaatacaaaaattagccgggcttggttgattgcgcctgtggtcccagctactcaagaggctgaggtgggaggttggggcttgagccctggaggt

SEQ ID NO: 691594 - DNA, 119 bp, Homo sapiens
  misc_feature (29)..(29): n is a, c, g, or t
  misc_feature (54)..(54): n is a, c, g, or t
  misc_feature (84)..(84): n is a, c, g, or t
tttccatagattatttaccccaaggttgnaaaaagtgaatctaattggtgactncttaatatctcttaggttcttttagctgtnggttgcattactgtgtctctgaggtgcggtcgacg

SEQ ID NO: 691595 - DNA, 920 bp, Homo sapiens
atgatcatcggcagcatcaaggatgagatggagcccagcttccaggaggtctccttctactacagcgaggagaacaagcctcccgagccagaggagctggagatggagctggagatggagcctgagaacatggagagcgtcccactggacccttcggcctcctcagcctccctgcctctgcctgaaagacactcaggacacaaggctgagaatggcccgggccctggcgtgctcgttctccgcgccagttttgatgagagacagccttacgctcacatgaacgggggacgcgccaacgagagggccttgcctctgccccagtcctcgacctgctgatcctcggacacaccgaagcacgcgccaacagtaacgtgtgtgcgcccactcggtgggcgggggggcggggaggggagagcaggttgtaacaatctattcacaagccctccctgtacctcagtggatcttcagacctgccattgctggccaacgggagacggctttctctggcagtaaaacaccaccctggggaacctcccctttctcacaaatgtgacacacgcgcttacttatctcctttacccacgaaccattaagctgacgatgggcctctggacaaccttgaatgacaaccacttaatagccagcaggacactcgagaaagtgagtctcttccgctgctctggccttattcttctgcccttgcctttccgtctcttgccctcttcccttccccgccccggcttcctctttctctgttttccgctggcccgactgcaagtggcggcacctggcaagccggctgcttcctataccacagcgacgcgcggcgctcctggtggctccgcgtccgtccccgttctggatgtggccctgggccctttcgcacagcccttccgctactgccggcggctcgcgcctcg

SEQ ID NO: 691596 - DNA, 784 bp, Homo sapiens
cacagcatggcatatcatgcccacggtgctatcactcagatcatggacacagacaccgtgggcatggatatgccatgctgcactgctgcctggtgattgcagctagaggtgggagtggagaatggttcccaggaagacaggttccacctctaaggtccgaaaatgttcccgtattaccctggagtgggagtgaggggtcatacaccaaaggtattttctcctcaccatgtctaggcgtgactaggcattcatgaagaaattcgccacgcaacacctcctcgaacctcattgtcgagcagagagggccctatctgtagtcgttgaaagcatgcctttcgacatgtccacaccttcttgccatgttccagctgctctcccaagctggaaggccgtctcccctatagccaagtcctcctcaggcttggatgaacttcctcagcgtcacctccttcattgagccttctctgatcactccatccctctcctacgcctccctcccccatgcgctcaatgtataaagttgctgcttgatgcgttagcattcagaattatgattgatcgtatcagtgtgtgtgtgtccgatctcacacagtatatgtaaagcccttcggtggcgagggggacatatccgtagaagctctctgtattacctcgagattatctgtaatggtgtcagggcacacagctagggtgatcaatgacacacttgttgattgagcagaagggaagaacgaagaagaagaaacttaggggctcacaagtaggggggcgcggaaaagaggaa

SEQ ID NO: 691597 - DNA, 590 bp, Homo sapiens
atcagcctctcagtctgtcctgcctgtattttgtcctccctcccagcaaggtaacctggatttaggttgtgttttgctctatcttagagcactgcaggcagttgctctgcttcagtccttgagacctaagcctttaggtaatgaagataatactgataatgatggtaatacaattggttcatttattcagcaagtatttattgagtgcctaatatgaaccagcatattctggtcactggtgactccaataatgaacaaaaccaggttcttacctgattgtgagagatggacactagacaaataggcaataaatatatatgtcctacggtaataacaaaaataaagcaaggtcaagaagatacaggaggatgtgggattataggccaaggtgctattttatatggagaaggtcaggaaagtatcacaaattgggtgatttttgaacagagacctggagtgatgtagtaagcacttagcaacccctcttgaaagtagaacatttagggaaaggaggcagagagcacaaaggccacagagcctgcaatgtttggggcatatttgaggaatagctggaatgaattgggtaccga

SEQ ID NO: 691598 - DNA, 89 bp, Homo sapiens
cgcggagagtgagggccaagtctgccctgctccgccacttagtgccgccccagacgcttccctcggggctgccaccgtggtcgggcgcg

SEQ ID NO: 691599 - DNA, 95 bp, Homo sapiens
aaagttttaagtggaaaactggaagccccaagtccgggaaggcgaaaaaaaaaataaagaagataggggaatttgaagataaaaacctcctttta

SEQ ID NO: 691600 - DNA, 815 bp, Homo sapiens
gctccacgagggtcatgctgtctcttactttcacccagtgaaattgagctgcccgtgaagaggcgggcatgacacaggcaagacgagaataccctatggaggctttaagtttattaatgcaatacagctacctaacaaagccaacaggtctcctgaaccttaccgaaacacttgcatgtatgaaattgtcggctaggttgcgacctcgagagtcagaagcccaagctaccgagcgagtgtacatgctaagacgttcaccgaggtccatgagcgacactacgtatactcaacttgatccgagatgaacttgaccaatcggagagcacgttaccctagaggataagcagaggcaatgcctattctagagttccatatcgacaatagggttaacgacctcgatgttggatcaggacatcccgaatggtgcatgccgctattaaaggtgcgtttgtctcaacgactgtaacgatccttacgtgactctgagattcagaccagagacgtaatccaggatacggtttcctactctcacttcaaaattccctccccttgttaccggaacaggggacccacgcaggacacattcaatggggaccctaaccgtttcgaaccacagaaagcctgcccctttgcccccccccggtaccacgttgcaagtaattccgagacactagacacactaatcacaccgacccagagaacaacaacaagcgaaatacaacgacgagagaagaatcagcacaagggaaatgaatgcgaccacaatgtgtaggaacgagagacgaacaaaggagagaaggaggaaaagcagaaaa

SEQ ID NO: 691601 - DNA, 289 bp, Homo sapiens
  misc_feature (73)..(73): n is a, c, g, or t
  misc_feature (82)..(82): n is a, c, g, or t
  misc_feature (221)..(221): n is a, c, g, or t
  misc_feature (253)..(253): n is a, c, g, or t
taagattagccattctctgctgctatttccctacataatgtcaattttaaaccataattttaacatgattganatgtacttnaggcttttaagttttaattgagaaaagactttgcaattttatttaaggatgagcctctcctagacttgacctagaatataacatatccctccagtaatactgaagagcaaaagagaggcaggtttggggtcacagccgnttcttcagcatggcccaagtgggccttggggnttgcagcgttctcgaagtggctgtaggcctcgaatt

SEQ ID NO: 691602 - DNA, 126 bp, Homo sapiens
ccaaatgtgccaacgcatgatttctttgagtaaatttctaaacgtcacagaagtttatgaaacaactttgtacactcaaagaaatacatttggaaataaactctgtcgatagtttatgcccattta

SEQ ID NO: 691603 - DNA, 412 bp, Homo sapiens
aaattttggacttttttattattcttactagctgctattcaatatatagtcgaccatttttaatttcctggtatcaactgctttgtgagactgaattcttgcaattgcattagatattcaagcaaatatgactcactcatttcttgtgggtcgctcttcctcattctctggaagaggatcattactgaaacaacatgagactatattatcatgtgcttttaacatctgtgaggatgacaaggactagcaaataatatctcactttcgcatttaatggttggattatattttaggcccttcatgactatgtcgcagattatcaacactttataattatttctcccattttattgtgtttgattgcagtacaatggatgtactgggtgatttctttaaaagatcttaactctct

SEQ ID NO: 691604 - DNA, 340 bp, Homo sapiens
  misc_feature (160)..(160): n is a, c, g, or t
  misc_feature (244)..(244): n is a, c, g, or t
  misc_feature (264)..(264): n is a, c, g, or t
  misc_feature (296)..(296): n is a, c, g, or t
ctttttgagacgaagttttgcttttgtcacccaggcttgagtgcaatggcacgatctcggctcactgcaacctctgcctcccaggttcaagcgattctcctgcctcagcctctggagtagctgggattgcaggcatctgccactatgcccggctaatttncggtatttttagtagagatggggttttaccatgttggccaggctggtctcaaactcctgacctcaactggtccacctgcctctnctttttttgttttatttttnatttttttgttttgaaatattaatagcttttnatgttgtatttttaattttttgaaaacttccatactgttttcca

SEQ ID NO: 691605 - DNA, 342 bp, Homo sapiens
tactgacaacatgatcttatatatagaaaaccctacagactccaccaaagaactgttcaaactattaaatgaatacagtgtatgtgtatgtgtgaatatatatgtgtatatatgtgtgtgtatatgtataagtatatatgtgtatgtgtgtgtgtgtatatatatatgtgtgtgtgtatatatatatatatatatatatatatatatatatatatataaaatcctacagactccaccaaaaaactattaaatgaatacagtatagttgtaggatacaaaatcaacacacagaaattagtagtatttctatgcactgttaacaatgaactatgcaaaaaaaaa

SEQ ID NO: 691606 - DNA, 417 bp, Homo sapiens
  misc_feature (279)..(279): n is a, c, g, or t
gcgttacagtgtctccttcgcgttctccaggtatctgcgaagccactccacgcacgtgccctccaggtaggctctcagtgtgctcggcctcacggcccgcttcccacttgcgctgggtgatctaacccgcggtgtccgcggcggtccagaagcacaggtcctcgtccaggccaatgtaaccctcgccgtcgtagcctaccgggtcatgcccgcgaagaaggcgcccgtcgggccccagttcacagccatacatcctgtgaataatgtgagacccgggcncggcccccgtggccagccccgtccccagagccgcgccacagccgcgcacaacccgcgggaattgtgcgcctaactctgaatatgaacccgggtaaaggtgtctggcgctctccgcggtagagtgtctgcgcgcgtgcc

SEQ ID NO: 691607 - DNA, 323 bp, Homo sapiens
tggcgcttagccagcatgcccggcctagattctacattcttgaatcttcccttctattcgtccctatctcccattctttttttatattttgagatagagtcttgctctatcacacaggctggagtgcagtggcgcgatctcagctcactgtaacctccgcctcccaggttcaagtgattctcatgcctcagcctcccaggtagataggactacaggagcacgccactgtgcccggctaatttttgtatttattggtagagacagggttttgcctcgttggccaggctggtcttgaactcctgacctcaggtgatccgcccacc

SEQ ID NO: 691608 - DNA, 167 bp, Homo sapiens
tgagttgaatgtgcatcccagaccctgaattcccagtaacctttgaccgcttttgtggcctcatggttcaacttttacgcaagctcagtgttcgagctgctgatgagcccccagaatcgggtcgaactcggacgtggttcctctatagtcggggctgcggcctcaat

SEQ ID NO: 691609 - DNA, 1081 bp, Homo sapiens
ggcgcccagcgtccagggctgcgcctgtcccgtccaggcctgtggacactggttgcaaacacctgtgacttgcatgtgtgccgcgcggggcacagctttgcagtcgacaccatgtaggcccccatcatgccgaagattatccatacctgaggcagcggtcgggtgagctagaagcctctcagtcaacacacctgtggacatctgtgacacctggccagcacgacctgtggtcgcggactgtgcgtctgcttgcgatcaggagctcgcattaccttcacgcctggtcatagacagccatgaatccggacgaccataacatgccccttgctggacaggagcagatggctcttaggctccatgagaggcgcaagtcccacgcggtgcgtgatatcgagagagtgtgcatcccttggagtagatcaaggcgagcgagcatgctagtagacgcggggcttgcaatgggggcaatggagagcaagaggtcctcagtcatcctgatttgccgtcgctggcactctgggaaaggcatctttgcgacgtctgcgaacggaacacatgatgcgagggtccagaacggacagcgtcagaatcttcaagggtgcctggagagtctcgtgagacccggacgagtcatgagtagtgactcagtcactactgcagcaagggggaaggtgggccctgccccccgagggctgaagactggcgggagcgcgccggctgggaaaaaccaaattttccgcttgcgcactggcgcaagccagcgcgtcgcttctcgtggatgctgcggagaataaactcgggggggaaccccgggccgaaccccgcacaagggtggtaccgcgcctccaggccgggaagctggttgctgggcgaagaagggcccagggccacctggtgagcccaagaactggaagggcaaaaaggggccccctgccaagttgttcccaacccaaccaaaagggtgtggtggcccccagaggggactattccttgggcacacaagcacaattgctgggactctcaaaggccccagggcccccctctcctggcccaagcttggtgacgcaggggggaactcctg

SEQ ID NO: 691610 - DNA, 172 bp, Homo sapiens
ggatttgctggtgcagtacaactaggcttaatagggaaactaaataaggcacagaacagagatacgtgcacttccagacagagaattcaaaatagctgtgttgaggaagctcagtggaattaaaagataacacagaaaaggaattcagaattctattgaataaaaaaaaaaa

SEQ ID NO: 691611 - DNA, 272 bp, Homo sapiens
ctttgttttttttttttgggacccctgtggaccccccggggccggggttttcccccccccctttttcatttggggggactgaattcccaaatttttttttattggaaacggctttttttggcccccaaaccccttgctaggggtttatttttaaaaaaaaaagcccgggggggggggggaaaattttaaaaatgtttttctttccaagcttgcttttttttttcctttggtttttaaggcccctaaaaaaaggaaggcccttggaaacccca

SEQ ID NO: 691612 - DNA, 317 bp, Homo sapiens
agcttattctaatgcagactgactcaggaggtctggggtggggactgggattctgcatttctttcttttctatttatttatttttttgagacagggtcttgctctgtcatccaggctggagggcagtggcacagtcttggctcactgcagcctccatctcttgggctcgagcaatcctcccacctcagcctcctaagtagctgggactgcaggtatgacgaccacgcccagctaattttcttttattgtttttatagacagtgtcttactatgttgcctggctggtctcaatctcctgggctcaagtgatcttccca

SEQ ID NO: 691613 - DNA, 355 bp, Homo sapiens
  misc_feature (13)..(13): n is a, c, g, or t
  misc_feature (149)..(149): n is a, c, g, or t
  misc_feature (300)..(300): n is a, c, g, or t
  misc_feature (323)..(323): n is a, c, g, or t
  misc_feature (352)..(352): n is a, c, g, or t
atgttattgaagntgtttatagtagacttaatccacacaaagacaatgatgggggcgctggcgatctagaagactcattggtagccttataaccttctaaaatgcttttgattctgaaaattgggggaaacttttaatcacattttctncaatacaaggggaaatattcttgtgaattcacactgttttgtgatatgagcagaaaccaattagcatttcccaaccattgcctcccatttgtgttccccgtacttaccactcttaagcattgcctgggactctacagtattttttgccaanctcaggcatctgggttacaactngtattgaatttttggcccctagaaaaacnaga

SEQ ID NO: 691614 - DNA, 382 bp, Homo sapiens
  misc_feature (99)..(99): n is a, c, g, or t
  misc_feature (327)..(327): n is a, c, g, or t
actgagagagaagaaggatacagatccatagtgacctctctggcacatgaggcagttctcagtctgtggtcagatgctgaagaatctgaggcatcttgngacatacaattagagtgtgggatgttgggtttgggaggctaaagtcactttgacaggaaataaagtgtttaattgtatttcctattctccactttgtaaacgtttagcatctggaagcacagataggcatatcagactgtgggatccccgaactaaagatggttctttggtgtcgctgtccctaacgtcacatactggttgggtgacatcagtaaaatggtctcctanccatgaacagcagctgatttcaggatctttagataacattgttaagctgtgggat

SEQ ID NO: 691615 - DNA, 106 bp, Homo sapiens
aggatattgcgaaactacataccggtcgactgctcgaagatgccgccgatcaccatcgtacgccgtggtcgaccagtacctgggtcttcacgtgctatagtgttga

SEQ ID NO: 691616 - DNA, 310 bp, Homo sapiens
  misc_feature (59)..(59): n is a, c, g, or t
  misc_feature (112)..(113): n is a, c, g, or t
  misc_feature (162)..(162): n is a, c, g, or t
  misc_feature (243)..(243): n is a, c, g, or t
  misc_feature (300)..(300): n is a, c, g, or t
  misc_feature (302)..(302): n is a, c, g, or t
  misc_feature (310)..(310): n is a, c, g, or t
aaaggcgcgcctccatttctgccagtgatgtcttccaaggcagctttcatgctcagctngtgactgcagctcaatctcatagaccctgattggtgcgccgcaggtcagtggnnctcggactcctcatctggatgctgcaaaagtgtgggccagcgatcctcnccggttcaattcttcaagtccggctggtgataccaggcttcagcatccttccggttcctgctcgggccatgacctcatatntggcttcgcatgtcaactcaggatcttggccgagatcggtgcccggagcggaatccnancttccacn

SEQ ID NO: 691617 - DNA, 712 bp, Homo sapiens
gccgcgcggggggcgagtaagccagcggcaggaccagcgggcgggggcccacgaactgaaagctggcgaggcgtgacagaggcggcgctcagggacggacctgtctggctaggtgaccgattgtgcgtgtggttttcccggactgtggtgtaggtgtgagatcaaccgatggagttccgttgcacgtttagaccccagagaggagtttgtgctgaatcagtcgcgagagatgggcctgggttccgtcatacatagagtcaaacgttgcgcgaactgctaagatgtgcagaaagaggaagagcgatcgcctccaagcgctagcaagggatgccgttgccctcgcaggttccgtgcagaaagctgacttggcctggaagagtgcccagggaacccgtctgggagcctggggggaacaagatccgagccatcgaagggcttctgtcatcactcaggtgtgccatgtaccccgtggaggagagaagagtacgaggatatgaagcagtgtggagaaggtgaggagatgtaaaaggtctggcttgagtatcatgcagacgaacgggtgatcacttggagttgtgtatggcgcaaagaccaaggcctctccgatcatggatgtcaggaaaagctggatgcgtgtcattgaaagcgacggaaaggacatgttggataggactggaagtgctcaccgcctcaaccagtggttgggcactcc

SEQ ID NO: 691618 - DNA, 462 bp, Homo sapiens
  misc_feature (100)..(100): n is a, c, g, or t
  misc_feature (102)..(102): n is a, c, g, or t
  misc_feature (104)..(104): n is a, c, g, or t
  misc_feature (161)..(161): n is a, c, g, or t
  misc_feature (165)..(165): n is a, c, g, or t
  misc_feature (360)..(360): n is a, c, g, or t
  misc_feature (364)..(364): n is a, c, g, or t
  misc_feature (371)..(371): n is a, c, g, or t
  misc_feature (377)..(377): n is a, c, g, or t
  misc_feature (429)..(429): n is a, c, g, or t
gaatcagactccagtgaggaggcggcggcggcccaggaacctttgcagttaaagaacgggacagttggagggcccaggccagcccccattaatggccctngnanccgggtggccgggggtttgaccaacaggcacacaacagccacatagccgggcggggntggntgtaaggggttgcccccccgccagtgccttggatatttttggggtgattggactggcgcccctgggccccctttttggaaacaaggaagggccccacccggggtgggtgggaaggtttatgatttgtttccagccccttctttttgcccacccgccctttttccctttgggcaattggacaaatttgggagccancagntggatgntgtggntggccaaaaacccctccaggctgtagcctgggggttggggggagccccaggntgaaaagggtccaattaaaacaaatggagccca

SEQ ID NO: 691619 - DNA, 305 bp, Homo sapiens
cgaataatttccaaagtaccaaatgatactggtaaatcattctcggcaggcgcggtggctcatgcgtgtaatcccagcactttgggagactgaggcgggcggatcacaaggtcaggagattgagaccatcctggccaacatggtgaaactccgtctctaccaaaactacaaaaattagctgggcatataagcgggcgcctgtagtcccagcacttgagaggctgaggcacgacaatcgcttgaacccatgaggcagaggttgcagtgagccgagattgctctactgcgctccaaagcctgttagg

SEQ ID NO: 691620 - DNA, 365 bp, Homo sapiens
atcgtctcggcacatgctgaagcacagggcaagcatatcgtgcgaaacagagtctccaggacggcagcgtaagaggtagtccagcagggctgtggtcagggtagcactcggcccagaataaaagggaaaaagcaaggtgtcagtctgggacggcaaggcagcagaggactcagctgagtcacctagtccggcattccttaaaaactcccaagaagaagaggagcagcaatgagaataaatcacgagtttcatgctgtcccacgtatgaggaaacaggcatgtgtgctttcctgttggcagtgtgaaaggcaaaactttttctaaagggagaacactttaaaatacacccgcataagctcgtcata

SEQ ID NO: 691621 - DNA, 515 bp, Homo sapiens
  misc_feature (17)..(17): n is a, c, g, or t
  misc_feature (259)..(259): n is a, c, g, or t
  misc_feature (354)..(354): n is a, c, g, or t
  misc_feature (476)..(476): n is a, c, g, or t
taagcggtttaagaggnccgcgtccagcccaagaatgtggatattctctccctattgaccaaagtgggtgggtttcttcagaaaagccccaaaggcagggaccagtaagccccaaggttagaagtggaactggaaggcttaagtaaaatgcggcttccacgcttccaggctgggcagcaaggaggagaggcccataaggtgccaggcctccccatctgaaaccagtaaagtttggaaggacagccgcggcacgcctgcntttcccagggggccaataatggaagggagctttccagggtcagagggctgagtccggaataggagcgggggcagggccctgcggagaggcacttntggcctgaagaaagccccattgagcccctccagtccaggtgtggtccctaggaccaagcccacagcctggaaaggggcgcctgcaagggccacggccaggaggaattccccgaagccttgcncccctggggcagcagggctgtgggagggggtgacattaa

SEQ ID NO: 691622 - DNA, 228 bp, Homo sapiens
cgctttttacagcgcaggatgctgtggaggcgttcctgctgactaaacaagtggctagcagtagccagagcacttgtcacatacatgccacttaaagaaatcatgcaagtatcaacaaactgttggaccctaaatagtgttaccgttctcaaaagttggttattagcactttaacaaatagctctcataacatgctggcccatgacttcaactgaataaggacacacc

SEQ ID NO: 691623 - DNA, 189 bp, Homo sapiens
atgacacctgcggacggatagagtgcccagctcgcgatgccccaggcgcacctcaatatctcattccctgaatcccgactattggtctggccctgacgtaacccaacaaaacccaaatttacttgctcgcatgaaggagtctgattcccacattgtggaaccctaacttaaccaaaatgacccattaga

SEQ ID NO: 691624 - DNA, 167 bp, Homo sapiens
gcagaaacacaataaacatacaggaaaatagtatacaaagcatccacaagatgtacaccatgtacaaataggatacatacataaaactctactacctaaacccagaaaactatctattcagataaaatactttactctatcatagttacagcatataattcgaatta

SEQ ID NO: 691625 - DNA, 140 bp, Homo sapiens
tgacgtatatacaaagtgaaataatatagagctccattgccaacataaggagctacataatttctattacgcttgcctaggcatgagaaacgcaaaagcaactcaagaggagcaagtccaggaaaagaaaagctatgaag

SEQ ID NO: 691626 - DNA, 564 bp, Homo sapiens
aatgatagaatcgagctgtgtaccgacagcatcctaaccagaacagagtgccgtgcaggcatgctgtgggtgatcaggccacgtttccactcagatggagtggggcaagttccaaagactagtcttaccaagtcaagccaagtcaaaaccagaacaaaagtgccaatacaggcacaccgtgggtgatcaggccacgcttccactcacgtggagtggggcaagttccaaagactagtcttaccaagtcaagccaagtcaaaaccagaacaaagatgtcaatacaggcacaccgtgggtgatcaggccatgcttccactcacatggagtggggcaagttccaaagactagtcttgacaagcttcagatgtctggacttccaagtgccatttccttcccgggtgtacagccagtgttaatccttctcgggagcctgctatgcgctgctctggcaaggcgttcaactgggggccattttcctacccgggagcgcctctttggatttgcgtcactcaggctggccggagtcctctgcagggacgctccaacgggggcccacagggcttg

SEQ ID NO: 691627 - DNA, 626 bp, Homo sapiens
  misc_feature (299)..(299): n is a, c, g, or t
tctctctctctctttctgctgtctacttactacagacaacttagcaaacattacccagataagatatggaagaaattgaaactggtgcataatatatactgattggactgatggaattataacaagcatatatagaatgactaacctatacttctgataatgaattaatagaaataactttgaatgagagccaaagctaagaccccgaaaccagacgagctactaagaacatgctaaaagatgcacacccgtctatgtagcaaaatagtgggaagatttatagtgtagaggcgcacaanctaactgagcctggtgatagctggttgtgcaagatagaatcttagttgaagtttaaatttgccgagagaaccgtcataaatcgcgttgtaaatttaagtgtttagtccaaagaggaacaggtctttggacagtatgaaaaaaacttgtagagagagtcattttaacaccgatagtagtgctatatgcagcgacgaattaagaaagtgttgaagctcaacagccagtaacttatagaattccaagatattaatttaattcgttacaccaatttgacaatctatcacgctattgagaagtaatgtaagttaagtatggatctcgtcgct

SEQ ID NO: 691628 - DNA, 388 bp, Homo sapiens
  misc_feature (151)..(151): n is a, c, g, or t
  misc_feature (193)..(193): n is a, c, g, or t
  misc_feature (265)..(265): n is a, c, g, or t
aaggaaaatccatatatggagacatctgcacctgccatgctcgttccagcactattcacagtacccaagattggaatcaacctgtgtctatcagcaaatgaacagataaaatgtggtatatataccccgtggaatactatttggccattanaaaaacagaattctgttattctcagcaacatgtatgatcttngaagacattatgttaagtaagccaggcacagaaagataaatactccatgtactgtacttatgtggaaggtanaaaagatctcatagaagtagagagtggctcatgcctctaatctcggtgctttgggagtctgaggtgggaggatcacttgaggcctggagtttgagaccagcctgagcaacatctctcaaaatt

SEQ ID NO: 691629 - DNA, 473 bp, Homo sapiens
  misc_feature (5)..(5): n is a, c, g, or t
  misc_feature (27)..(27): n is a, c, g, or t
  misc_feature (64)..(64): n is a, c, g, or t
  misc_feature (111)..(111): n is a, c, g, or t
  misc_feature (126)..(126): n is a, c, g, or t
  misc_feature (151)..(151): n is a, c, g, or t
  misc_feature (473)..(473): n is a, c, g, or t
acccncaaaaccctacctccccgaagnagtttggggccctaccgtttttaaggggttttgggantggggttgaaagtgttaccagattggaacgggtccaaccgaatgccngggtaaaaccccatnggacagggaaaatgaagaaactatnccttaggcctgattcggttccttcctgtgagggtcctttaaactggatggccctcagcctgttaaattggaattcaggatcctacttaaacaattcttaaacaaaagcctcatgattcctaacacccagagatcccaatctaaggccagaaatactatctataggaacaaccaggatgcaaatggtcagtatccagtgttatgtgactttcagttacaaggaagtgggtcaaagcacagactgaataatgcttaattatagctatatttctgtctagaattctttttaaccctgtgaacatggcttcagcaggaaacaatan

SEQ ID NO: 691630 - DNA, 219 bp, Homo sapiens
agattttgaaacctactcagcaaggtgatagtattagaaggggggggctctggaaaggctccaccttaggaaagtcatcagtggctcagaaaagagtgcccagagagctggctggcctttccaccccatgagaacaggtggaaggcgccatctattaggaatggccgtccccagactccaaatcttgtgggaccttgatcttggacttcccaggctcca

SEQ ID NO: 691631 - DNA, 426 bp, Homo sapiens
aaatgacttgtgtctcagcttcttcatctctaaaatagaaatagcaacaaacccttccttacacacagaatggttataaagattatattagataatatatgtaaaacatagattgctgtctggcacagagtaagcactaagtaaataaaacttcattgattatttaaagaaggtaaaacatggttatcttaagagatactgaaaattttaggaaataaaaattcattgttaatgaagtccttagtaaccaaagttctttagcttgataaagggtgtctcttagtatcttatttcaaacactatatctgatggatatactacacctgtagtcccagctactactcaggaggctgaggcatgagaattgcttgaacctgggaggcagagattgcagtgagctgagattggtgccactgcactccagcc

SEQ ID NO: 691632 - DNA, 373 bp, Homo sapiens
gtaaatgaaaaagaaaataataaggtaaacgtaaagagagcataaaaaaaatgataaaaataaatcctaaaaagacataagaaagagaaattttaagagagaaacagaagcttgaagagtaatagcaaaaaataaagaacgaggatcagcgaaaaggaaaagacagaaatatgggaatgagttaaaagaaaaaaaaaggtgagagtgttgatgtaattataggaaacgacacgagaaaatttaaaaggaagggaagcgaaagagaaaaaagaggaaacaaaaggaaaaagggtgagaatgggagaacacacaatctctctctctctctctctctctctctctttctctctctatctctctcaacgtgcgaaat

SEQ ID NO: 691633 - DNA, 1309 bp, Homo sapiens
  misc_feature (333)..(333): n is a, c, g, or t
  misc_feature (750)..(750): n is a, c, g, or t
aatatgatacaagtggtaaataaccaccctggtgataaactcgagtagcgatcacggcggcgttccttgcggtccattgatccagttgcataagtcgaggacgggatggtccatacgtatcgtgcacgtatcttcgtccgcgagttcgcttgaggcgtgtcgttggcgagtgctaccctgataagcgtagcgtaagagcgaggagcgcggagatagtctacgaaagctagctcgacgctgtgcgttcagagcgcgcacagtctccggaagtgatggagagggcctcatctcgtgatcactcgaacgaccgtgatgtcgtggcatgtatgtctngagtgccacgccctagtgacaggtgtaataatgtaacttaatcgcatcactcgagtgctatgcggggaatgaatcagtccccgataatgggtgaacgtgtcacatagatccgggggataagaagcaatgaatggatgttagcgatgaggataagggtaatgggtcttggaggcatatgaatatcgaaatgtatgtccttctcctaaggaggtgttcctcgggacgtagatgcgagaacgaaattaattattgtcaccaaagttaggggagattataacggttagcaggcaacttagcaataaatttacgaccgatctcgactaactcatgagatcatcgccttattcccgacacggaggagtcaatgagatattgtggaactggactcgaaccatgacgtcgcacggaaaaagccanatcatgcaagcgtggaatgcgtgacgtgttcaaggggtgcttgcctggacgttgcactgagggcaattacaatgcttctctcatgtatatgcgaacgcggaaaggggttggagtggcatggaaactggggtaaatttggtgatttaaggcagaaaacgtaccaattgcagtaaggaaacattccggttaactggaggagcggaactggtgttacacttaccgatttggtgatgggataaaacttcatactcaaactaaattgggttgcacttaatttcacaataaggggaagggcctggtaacattttaaggcgggagtacgaataagggaaaagggggtgtcacgagctgtgcaacttttgggagatattgggcccacgcgtagtataagtaaatagggctataaatggccgggtagaaaatgcgatggatcctgtataggcacagagaagatttccgagtttacacacagttacttgggtaattattcagattgcgtgggagggtatagatgtgtgttatcatttgtgtgtgttccccataaatcagggtatatgtc

SEQ ID NO: 691634 - DNA, 363 bp, Homo sapiens
  misc_feature (250)..(250): n is a, c, g, or t
  misc_feature (259)..(259): n is a, c, g, or t
  misc_feature (274)..(274): n is a, c, g, or t
  misc_feature (306)..(306): n is a, c, g, or t
  misc_feature (353)..(353): n is a, c, g, or t
gcgtgggaatggctgcattgtgatcgagggggttgggccgcgcggaaactcacagcacagccctgcgaggagtctgtaatgtccgccatgttggccatggcgtattgaaccagggaggaacagcggaccgcggagaacagggagaccgaccgacagcgaccgacacccgggcctgcgcggctccgttcgcaccgcaccttgaagcccgccgtccccaccgatcaattcacggataaacaccaatttcctncatgagatnctcggagcagggttnctgttcatcttggctttggatcgcataggttnatgctgcgctgcatattgtagagaaatgagtaaactgttgttttcgngcccgggctt

SEQ ID NO: 691635 - DNA, 194 bp, Homo sapiens
  misc_feature (169)..(169): n is a, c, g, or t
aatgcagttaatacagactcattataaaaagtacatcatggtttcatggaaacaatgccccaccatgggtgggctgcctggagatggatccctttccaaaaacctgaaaatgcagaatggaagatgacgggggtgaactggacgtgtgtgtacggggtgcaggtgtcancttcagcagaggttcccctgggttt

SEQ ID NO: 691636 - DNA, 740 bp, Homo sapiens
  misc_feature (174)..(174): n is a, c, g, or t
  misc_feature (176)..(176): n is a, c, g, or t
  misc_feature (212)..(212): n is a, c, g, or t
  misc_feature (223)..(223): n is a, c, g, or t
ggtatctcctgttaactgttggaagatattgatgaggttttatttttccctgttttctttttccttaagtcactattgaggctgctctggtttgttgtgggtttttggcttttgtcagccttttctgggctatgcagtgatgttcttgtgcctgctcgtgagtcagagggcctntnagcctgtgtctgtggctgactgtggctttcactcanaggcacctggntgggccatttccttacagcacccttgtcagcttctttgggtttcttcagattccccagagaaatatcttgtagccctttgcctggctgagtggccaagtgaggagagaggcctgggagcacagcagtaaccataaaagagcttacttccctcttttcagaattgtttccctcctctgtaactggtgtccccagtccaaagattctacttccctttgcagacagaaaagcgatacctttttgccaggataggagagggactgtgcaggttggctctgtgtggctgtgcagagttgtggggtgcatcttagggatcttcgtgccttttaaacctatcagccaactctgtttttaattcaggtctcctggcttccagtcatattgccagttggccttccccattgccgatacaggattcagcccttttaggtctgtttccagtttctagcctccagtattttaatgttcttatctctattcttattctttgctttcgtgatttgtatcttaaaaaaaaaa

SEQ ID NO: 691637 - DNA, 462 bp, Homo sapiens
gcacccaggaaaaaggccccaaacccattggggcccaacagcgccggcacctagccagggcgtaaggtgaatgtgagcccctgccgcactaagacatatgggcggattgtgtaggcgaacgagacatcttggaactggacctggtcctccatgtgtgacggagctaacacaccactgggtgtccagcaagaggtgcatcccaagcactaatacattctctctgaagagcccacagacttctgtactgtggggtacatggaaagcactgcctccacagtctgggttaacagcatctggataataacaaatgtcacaaggctgccattgcttacagtccatctgattaccaggtgccctctaatgtacaggatggccactttcataagcatacctgacacttataatgacaccataaaaaattggactgtagtctagaaatctggaggggacacaacgaaccgc

SEQ ID NO: 691638 - DNA, 213 bp, Homo sapiens
ttttgggaaaccgggggcccctttttttccccttttaattttaaattattggggtcaaccatttccgggaagggaggggttaattttaggggacttttggggccctttggggaatttaagggatgggaggggtttttacaggggtccggatttggccccaaccggggtattgggggtatccagggttttgaaataaaatttaaaaccccccca

SEQ ID NO: 691639 - DNA, 117 bp, Homo sapiens
gccccgtgtcctgtcatccatgtggccgtccatgtggtcacttttgggcattgccctgcgcaggtccatggggactgggcacctttggcattctttctttggttgtctgtgcaagta

SEQ ID NO: 691640 - DNA, 203 bp, Homo sapiens
aggtagcccggcggcgccacccactcccagggagaccaaaagccttcagtacatctcaggtggggggacaaaaaagggggaggggggggcacgaaggctcatcattcaaaatagaacagaataaaaaagtattaaggcgaagatgaaaaaaatttggcattacataattaacacgaaagcaatgctatcacctcccctgtgtg

SEQ ID NO: 691641 - DNA, 396 bp, Homo sapiens
  misc_feature (1)..(1): n is a, c, g, or t
  misc_feature (45)..(45): n is a, c, g, or t
  misc_feature (259)..(259): n is a, c, g, or t
naataaaaagacgacagagggtacggccgagaagacgacagaggnacagacttaagagagcaaaatgtaaaacagtgctactcttataaatattctttcctttagaaatttattttgaggccaggcacggtggctcacacctgtaatcccaacctttgggaggctgaggcgggcggatcatgaggtcaacagttcaagaccagcgtggccaacatggtgaagccctgtctctactaaaaatacaaaaattagccaggcntggtggcaggcgcctgtaatcccagctacttgggaaactgagccaggagaatcacttgaacccgggaggcggaggttgcagtgagccgagacagtgccattgcactcccgcctgggcaacaaagcgagattcgtccc

SEQ ID NO: 691642 - DNA, 249 bp, Homo sapiens
gtcgacccattaggctcttctgaagtggaccctgtgatcccagatcaggtctgttctggtctactctattctgccacaggtacagcatgtccccactaggtggtcccattagaccgaaatataaggccagggacctaaaggacactactgtaagcaacattaacaacacacacacacacacaccacacacacacacacacacacacacacacacacacacacacacacacacacacacacacgtcgacg

SEQ ID NO: 691643 - DNA, 152 bp, Homo sapiens
cccgcagcctgctcgcgcgggtcgtgttcccggagatcggcatcctcaccagagcagggcgaccatgtgcgggccaactggccaatcacgaaaccggccctgcccctgcctccacctcccgcgaagctcggcgacgaagcgcacgacatcgc

SEQ ID NO: 691644 - DNA, 725 bp, Homo sapiens
ctcgccgcgttcgccacgggctctgccagcagacagccttgtgcacacagtgcacaagggctggagcccagagatgagatgtgcccaagggagatgtgagcctggccgggctgccctgctaacctgtcgctgaagccccagaagcgggccctcaggccagtgcctaccctgcctcctggcccagcatgcgcctgtctggtgctggagggtgctgctggccatttcggctgcgccctggtcctgtgtgctggcggttcaggctgggacagcaggtgctagagtgccgggcggtgctggccgggcctgctggagccccccggggggccatgcgtgctgagcagagagagagctaggttgattggtgaggcacacaacacagcggtggaaaatacccgatatggcacatgcccatgccagctcaatcatatcgtggagttgtccagttgcctcgcaagttggcaaccaacgattgatgcgcgccaaatgctggaacagccacaacccagaggggttgcggcatgggtcgcgaagggaagaaacacgcagtcaattcccgagtggcgattgactgagccaaatgctacccatgggccattggatacaaaggttcgtgggccggaggacaaacccttggcgaggactgggacttcacgggccggggggattgaacgagatgacaggttacaaggaacggacgaccaaatgctagggacataaccatccag

SEQ ID NO: 691645 - DNA, 318 bp, Homo sapiens
gttatgcacaactagggtcagtcttgcaggtgagtaaagccatttaccaagatagttgtaggtaaagaagggcagatttattagagaaattgtgaaaatatgttgcagtgggcagctcagcagagaaggggctacctgcaaagaggcaagggctggaggaaagttttatagggtcctgctgaagggtgctacgtgtggaatgaggtcattgtgcccgcaggttgtttgtgattagctgtttctaacaattgttcatacaataattgttcattattgttctcaacttggggctctccccaacctggggacccttcctta

SEQ ID NO: 691646 - DNA, 472 bp, Homo sapiens
caggacctcacagtgatcatccggcctcggcctcccaaagtgcttgggattacaggcctgagccacggcgccgggccgggttggtttttggtttttggagatggagtctcattctgtggcccaggtgggagtacagtgatgcaatctcagctcactgcaacctcggcctccggggttcaactgattctccttcctcagcctcccgagtagctgggagtacaggcatgcaccaccacaccgggctaattttggtattttttagtagacacagggtttcagcatgtggctcaggcgggtcgagaactcctgacctcaagtgatccacccacctgggtttcccaaagtgcggggattacaggcatgagccatggggcgggcctgtttggttttggtttttgagacaaggtttcgttgtcgcctaggctggagtggtgcggtggcgtaatcatagctccctgcagccttgacttcc

SEQ ID NO: 691647 - DNA, 420 bp, Homo sapiens
gggatctggctcccactggtgcagactgtggaggtgctaggagggtggcttgccaagagagggcttggaaactctgtgcccctatactttgccctgtgcatctcttcatctgtatcattttaaagtccttcataataaactggtaaacgtgtttccctgatttctgtgagctgttcgaccaaattaatggaacccaaggagggggtcatgggaactccaatttataactgatcagttcggagcacagttcacaacctgggactttcaattggcgcctgaagtgtgagacagtcgtgtcgggactgagtccttactctgtgagatctgacactatttagaggtaaataatgtcaaaatcgagctaaatcataggacacctagttggcgtacacaggagaataacttcggcgtactggggaa

SEQ ID NO: 691648 - DNA, 889 bp, Homo sapiens
ggcaccaaagcagtgcttcctggctgagcacggtggctcatgcctctaatcccagcactttgggaggccgaggcgggtggatcacgagatcaggagatcgagaccatcctggctaacacggtgaaactctgtctctactagaaatgcaaagaattagccgggagcggtggcgggcgcctttggtcccagctactcgggaggctgaggcaggagaatggcgtgaacccaggaggcggagcttgcagtgggccgagatcgcgccactgcactccagcctgggcgactctgtctcaaaaaaaaaaaagcgggcttccagacaccaagaagaggaaaggagccgatgtgactcacgcctgaatcccaggcttgggggaggccaaggtggggaggattgcttgaccccgggaggttgaggctgcagtgagctgagatgtgcaccattgtaccccagcctggcgaagagcaagactgccaccgagaaaaatttttttaaaaagatggacaggattgtgggacatgctgccatggggcatcacctgtgtgctgctcacaacacagctcacagtcccctgcctacgtattggattcactactgggtctgcaaggggaccggggatccatctttagagaaaccgcgggaaccagctcggttccctcagggtggccggaccggcattaatgggcccgcgatgtggtgaaagccgctcgggcagggggggatcacctggaacccagctcggagccaggagagactgagccagagtgacaactggaatgaacctgctcgcatagatccgggggcacgacacacggtgaagaaacgaacacaggaatgaagacgacgaaccaaagagggggcaagaagggaggaaaagatcgcagccgccgg

SEQ ID NO: 691649 - DNA, 143 bp, Homo sapiens
tttagaaatccagagtgtatctttgatgatcaccggagttgtgcggcagtggttgagccgtggaggggaaattgagggctttcgccttaacgcccactgctcctgtgacagcaggcataacacactgcaagtggacatcaacg

SEQ ID NO: 691650 - DNA, 291 bp, Homo sapiens
ggggaggcacatactacgactctccgctcagaggcaagacgggggcgtaatctctgcccaattagcagcacgagaacatcagggaaagacaggtgtcacaagacttttcagtccttcctattatgaagcgtctgtgagaggggctgggtcaaggtccctggactctggcttcagggcgcattaggcctgagccaaggcggctttgatgtgcggcaccaacttcagaaacttgctttctgtgttcacgtagacatcggcttcttagagtgaatcaactccccgggatacagg

SEQ ID NO: 691651 - DNA, 356 bp, Homo sapiens
cggaggatccccgcacgtaggcacctggtaatacagatcatttcctggtatgatactggacaggacaaaactagtgaatgccacctacaaaaaaatcagaggattcatagaaacctgcatataccaagaccccattgatgctctctcatgagatctggactgctgtccctccactacagaaacctcacagaacacagcaaaggataagtgcaagaaggctgcttccagctccaacagcacctgataatggaggtaaagcgaaggattcacgcatacgactacagaggacatttccaagcccaaagatgactaaagaattacaagttaacgtatctggtatctgcatgtaaaatctt

SEQ ID NO: 691652 - DNA, 126 bp, Homo sapiens
atgctccctgggcacaaatgggcatcaaaatgactgttgtgagaggaacgcaagccgaggggtcatatgggatttaccatggtttagaggctgccctgtcccgcctaggatgctcagacaggcaga

SEQ ID NO: 691653 - DNA, 234 bp, Homo sapiens
gcagcctcctgtattgtcttctaatagttttagttactatatttaggtcattcattcatttttagttaatttttgtacatagagtgaggtaggggtcctacttcattattttgcatgtggttcctagttgtcccagcatcatttgttgaagagattattctctcctcattgagtagtctctggtactctctgtcacaaatcaactgccgtagatttttgggtttatctctgact

SEQ ID NO: 691654 - DNA, 517 bp, Homo sapiens
gagggtggaggcccctgcgtccgagggccctggcgatctctgcctgctagtggtcttgctgtgctcggcgggctacctctggctctgagcctccccgtctctgggtcctacggtctctgccgtttcctctcaggcgcgccctgagtgggggacccgcagggctggaaggaacgcggggctgggtgccgtgccccccagcgctaagtggaaacagactgcggaaaccgacgcccggggcgctgatccctgggctgcccgcttccctgccccgcgccccgcgcgcccctgagggggagggagcgaacgttgggaaggtcaccgccttgtccccgccgagaaggggctgtcgcaggcttcaagccctttacaaccgtcagaggcccgggggttgaaaggcaggcagccagggcccaaggccctgcttgaccttaagccgggacccttgaccttcggcctcgcctcttagcccgaccagcttcaggagcaaggattcgcggccggacccggaaagttgccc

SEQ ID NO: 691655 - DNA, 967 bp, Homo sapiens
gggggcccgccggtcgcaccgtcctctttcctttccttctccctccccttttcccttccttcgtcccttccttccttcctttcgccgggcgcgatggaagccggggcagccggggggccgcggcgcgtgctagcgctgctgtgcgtggccgtgcgcgctgcgcgccgggggcgctcaaatacgaacgctacagcttccgacagcttcccacgggacggagctgatgccgctcgagtcggcctaccggacacgcgctggacaaagtacagcggagagcatctgggccggagagcgtggggctaccctggagatcacgcctgcggggtggcacgggtgtgttgcgccgacgggcggagggcctgtcttggccaaccgcaaggtgaggcgctcgcgccgaggaccgagtcccgccgcgcggctcgccaagataatcccgaagacgtgcgcctcctcggggggccctgctgcggccggggcgcacattgccttaagggcgctggaaaggggggcctgggcaagcgctgtcggggcacgtcccccagaggcccacgcccgaccgaaggagggcgggtgggggacattcgcaaagcagcacggggagaggaccataagaaagttgccttgggcccgggatccggcgtacattgcaggggagatgtagtcctccccccaaaagggcaattccgggcagtggtcacaacccttttcataatggaagcgcctgtctggtaggtcagactggcgcacagagggacctatgggatattataaataaagaggccgcccctgggagccgggagaacaacttaataagagcgggcaccacgattcttagaaggcgtcgccccgaccagcggggaacaccgggaacaggggagagcatcacccaccataggcggggggccactccacacgcaacaatgcgcacagcgcgccggggacaagcagctcatccctctaccgtagg

SEQ ID NO: 691656 - DNA, 532 bp, Homo sapiens
acaagccccctttgtcccacgattcacatcagaaccatctctcagcatccctcctagacaacatctagcccgtcacatcctcagaggccttggtgatgcacgcggacctcccgtctacccttggtctcctctgtctcattctgtctagtgtggcaaaactaaaccagtttctgtcactggcggccttgaccccgccattgcccttctttctcccatcctaagtccctctcctggggggcctgggtaatcttcccccaacaaagtctctcctctccgggccacaccggcagctggctggctttcagcaccacaggttcctgtctgcacaggcttgcttccctgtgcttggagaccctcccagatctccacttgactcagctccgtctctctcaggtatctctctgcccagcggtcaccatacaaagccttcccacctttggaggaacactaaggtcttgaagtgaggaattaagttagcctttttcttcttcgctcccctcttccttgctgataatttcctttgaattttctt

SEQ ID NO: 691657 - DNA, 163 bp, Homo sapiens
tctcagcgaaggtaggtaatggaaatgatttggaagattgatacaaaagaggaactggaacagcataccgagatggggatgtgaagaggatgaggaagaggaaaatgatggagaaacacctgagatcttcacatgaaaaatcataatctgactaatttgggga

SEQ ID NO: 691658 - DNA, 411 bp, Homo sapiens
atggggagggtgttcaggagaaaaccagcagtcacagcagaggacatgcaggaaacacaagcaaaagcatgcgagggctgggggacatgcaaggggggggccagtagaatgagcagtagccgggggggcttggttgggccctgggccctctggggggaatccattcagctctgtctcccttgcatgcccctggcgggcaccaccatccccagccatatctggccggttcgggccagccagattgtctcgaccccattccttgggggtaggagctcagcagcatctcttcccccccagttctaatagaggggaggcggaaggggaatgtggtccaaacccgtccccttctggctgcgattcgtgccctcagttcagtcgggctctggggcacaagccgaggtgattcacttg

SEQ ID NO: 691659 - DNA, 287 bp, Homo sapiens
cgtccctgtgtgttccatgtaccttaagatactttacaaagtttaacgatgataatgtgtgtggtatggtttgggtctgtgttcctgcccaaatctcatgctgaatggtaatccccagtattcgaggtggagcctggtgggaggtgattggatcatgggggtgagttcatcatgaatggttttgcaccatctctttgatgctgtccttgcaatagtgagtgacttctcatgagatctggctgtgtctgtgtggtagctctctttcgctcctgcttatactgtttgaa

SEQ ID NO: 691660 - DNA, 317 bp, Homo sapiens
  misc_feature (298)..(298): n is a, c, g, or t
  misc_feature (305)..(305): n is a, c, g, or t
aaaggtctttttacattgtgaatgctgtgggaagcaattttctctgcacacaaaggctacgtttggaaagtgatgtatgtatttgatgctgaaaaatgacctgtaattgctctaaaagtatattctcttgttgacaaaatttaacttcaaaaaaaatttacaggtacccacccctggttggggccccaagctaaaagccttttaatggacccttgcccatgttccaagtgacaaaactattttaatgttaagcaccatgttgatttccaaggtatttggggtattctattaagggaanctttganctatgtctaaaa

SEQ ID NO: 691661 - DNA, 262 bp, Homo sapiens
  misc_feature (63)..(63): n is a, c, g, or t
ctcattgcatgtagtgaggacacagcgggaggaagattatgatctgctgaggccctctcctanccagattacgatgttatactgatgtgtttttccatcgacagccctgatagtttagaaaaaatcccagaaaagtggacccagaagtcaagcatttcttggtccaaacggtgcccatcatccctggttggggaataagaagggatcttctggaatgattatgcacacaaagggggggagcttagcccaatgattgaatgca

SEQ ID NO: 691662 - DNA, 506 bp, Homo sapiens
taccataggctaagagaacatacagtaacctacactagctatggacacacggaacaagcaagtagtatcaactacagaataccactgacagactcaacaaataacaaaaacactagctctatcagatccatacgaatctaagtgatcttaggaaataccctactacactggctaagcaaccatcttaatcagtctaagtgacgacccgtattagccttcaatctacagatcaagtaaatcaaaactcttacatatattggctacataaaatctgaggcaagtgataatttctctagcaacttattcaacatgtgcaagtagtaaacaataacaaaaaacaccagtaaagtaacacatgaataaaacatatcagaatcagtcatctttaataaatgaacactggatattaaaaaagaatctctatctgaaaaggaatctataggactgaaagaagaaaacaggctacagttaattaaggtaaacgtatagtgtagtccgtcccatta

SEQ ID NO: 691663 - DNA, 108 bp, Homo sapiens
  misc_feature (102)..(102): n is a, c, g, or t
gactctagaggatccccctatcaactgaggcgattccgatctaaacacatcatagacgggccacatggcgttccatcttctacatagccctcatccgcttanccaatg

SEQ ID NO: 691664 - DNA, 662 bp, Homo sapiens
cccatgatggtaacttactactccggaaaaagaccatttggatacataggtatggtctgactatgatatcaattggctttcctagggtttatcgtgtgagccaccacccaaatatttacagtaggaatagacgtagacacccgagccatatgttcacctccgctacccattatccatcgctatcccccccggcgtccaagtatttagctgactcgcccccctccccggagagccatatgaaatgatctgctgccgtgctctgagccctaggattcatctttcttttccgccgtaggtggcctgactggccttgtattagccaactcatcactagacatcgtactacacgacacgtactacgttgtagctcacttcccctatgtcctatccataggagctgtatttgccctcataggaggcttcattcactgatttcccctattctcaggctacaccctagacccaacctacgcccaaatccctttcactatcatattcatcggcgtaaatctaactttcttccccccacactttctcggcctatccggaatgccccgacgttactcggactaccccgatgcataccccacctgaaacatcctatcatctgtaggctcattcatttctctaaccgccgtaatattaatacttttcatgaatta

SEQ ID NO: 691665 - DNA, 130 bp, Homo sapiens
cagggacgagttgcgcagcttgttggggaggacgaagcctttggttttgcccatcttgcccaggctgcccaggtcaggatcctctatggctgcagctggaggaggattggatgaggcccctgccatcatc

SEQ ID NO: 691666 - DNA, 133 bp, Homo sapiens
tgctgtgtgttagatcgaggggagagcgtaggtccctggttgcgttttagcgatatgagtaacctatagaactaagcaactatttttgtttatttcagatgctctacatatgtagatcttgattcatcgcatc

SEQ ID NO: 691667 - DNA, 572 bp, Homo sapiens
ttgcagccgcctactctctcacactaacacgtagacaacacacacataccgcgtcacacacaccaagcagcactcatacacaccaacacagtagacagacacacattctgacatacactctcttacactcacacgatacagaatcatatgcacacacacccacgacacactctttcacactcacactccccctctacagtcacgtttccgccttcctgctgtgacccagaatggtttgggctcacgttgctgagctgctgtctttgtcccgagatgtcctgatagccccagaacaagaaatggggcataagtgtcctccctgcctcctgggaaaggtggttggattttctagggtgctaggagccgagtactgtcctgagagctggtcttagcccacggatcccctgatgcctggtgatacattggtgggatggatgacggctctgtggcttgaattctgctttccgctgcttactagctgtggacggatcactcatgccattagcaactctagtacctcactcgtgcagttactgaatcccaggccatccagggatgaatgacgatcatgt

SEQ ID NO: 691668 - DNA, 297 bp, Homo sapiens
cagaatataagagttaacagaatatattagctactacatatcgatttccattatccattgtttctctgatttcactaatgttttctagtcttttaatttccttagttatgtttgattgaatactgtgatggttaatactgagtgtcaacttgattggattgaaggatgcaatattgatcctggttgtgtctgtgagggtgttgtcaaaggagattaacatttgagtcagtgagctagtgaaggcagacccacccttaatctggtgggcaccatctaatcagccaccagcaaatataa

SEQ ID NO: 691669 - DNA, 124 bp, Homo sapiens
ttataggaaggactaggtaggggtagtatctcgtagtcagagggggcttggaagtaatcagaagaatatttgacaaaggcccccgtcttggactgcatagaccagtttgtgacttcctgtgcac

SEQ ID NO: 691670 - DNA, 609 bp, Homo sapiens
ggtctggacggagtagctccaagagctctcactgtgacagcccacctcgctcgcagacaccacaagataccaacagggcttctgaaacagatacccatagcatggagagaaaaacagctcacagtctgaggaagatgatattgaaagaaggaaagaagttgaaagcatcttgaagaaaaactcagattggatatgggattggtcaagtcggccggaaaatattccccccaaggagttcctctttaaacacccgaagcgcacggccaccctcagcatgaggaacacgagcgtcatgaagaaagggggcatattctctgcagaatttctgaaagttttccttccatctctgctgctctctcatttgctggccatcggattggggatctatattggaaggcgtctgacaacctccaccagcaccttttgatgaagaactggagtctgacttggttcgttagtggattacttctgagcttgcaacatagctcactgaagagctgttagatcctggggtggccacgtcacttgtgtttatttgttctgtaaatgctgcgttcctaatttagtaacactaaacagaatagacactaaaatcatgttgatctataa

SEQ ID NO: 691671 - DNA, 725 bp, Homo sapiens
cgaagaagcatcgttaaatgtctctcttcacgcctgcgcgttcatgtctaaggtcatgagttctcctaagagagcccgaacagtctgaggaagctcttcattggagggttgaggctttgactacagactgatgagagcctgaggagccatttgagcaatggggaacgctcacggactgtgtggtaatgagagatccaaacacgcaagcgctccagggctttgggtttgctcacatatgccacgtgtgggaggaggtggatgcagctatgaatgcaaggccactacaaggtggatggaagagttgtggaaccaaagagagctgtggtcctagtagaagattctccagcgtaccaggtgcccacttaactgtgaaaaacgactatttgtgggtggcatgttaagaagactactgatagaacatcaccctaatgagattattccgaacaggtatggagaaacacttgaccgtgaattgacaatcagtgacgtgaccgaggcgagtggcatagaagaggggctgtgcctgtgtaacctttgactgaccatgactccgtggctcacgattgtcattcagaagataccatactgtgaagtggccacaagtgtgaagttagaaaagccctgtcataagccagagatggctagtgtttagccaggccgaagaggtcgaaagtggtgtcttggacactttgggggtggtcgtggaggtgggttgcggtgggatg

SEQ ID NO: 691672 - DNA, 210 bp, Homo sapiens
gaatgccttgttttcactaagttgggaggttttgtttctgggttttttttttggggtgtttttttttttggaaacagagtctggctttgtgccccagtcaaaggggcacgggggcaatctggaatcacggaaaccttggcctcgggggtaaagggattcctcctgcctaacccttggaaaaaccgggaattatgggcgggcccccccccc

SEQ ID NO: 691673 - DNA, 725 bp, Homo sapiens
cgcctcccgctcctagcagtgttgctactgccccgaacccgcgctgcagggaacagcgtgggcaaacagtgagtggggttcagcgtagactctggaccagtgagagtgccctgcggtgtgacctgagtgcctggtgccccggaaaccaatagagccatggcgactccctctgctgacttcgaggcccttatgaatggtgtgacaagctgggatgtacccgaagatgctgttccatgtgaactgcttcttatttggagaggcttcatttcctgtgatggtgaatgacatgggccaggtcctcatttgctgcctcctcctatggccgtggccgcactggtggtcgtagtcccaatgacggactacattggtggaatgcccatgctcacgccacgtttctcctgaaacagcagatgagaggttggcttatgcgtcttccccatgtgggatcccaattggtgtacacccaatcaccatggcaccttttggccaaaatcctcgaggtgctctggagtggatgcacacggttgagccacgaaggtgagcagactcccttgggcgtttactgtacttggatgccttacaatgaaaccatgacccgtaaccagctggtcaacgttcatgaacatggtcgtggctggcttgctcagtaggaggaccaagcctgggattgggccaaccaagggggcaggctgcaagggttctgttacacgtaccctgcgcaacca

SEQ ID NO: 691674 - DNA, 287 bp, Homo sapiens
  misc_feature (77)..(77): n is a, c, g, or t
ttttgggggccgggggggccccccccccccttggccccttccctcccgattttgggggttaaaaccccttggggaangggccctagggggggaagggccccctggggggggttttaaaaaaaaaaggcccccctttggggggggccccttaccccggggtgccccccccccggggggggcccccccggggggggggttccccgcttttggccggggggttttttttttttttttttccttttttttttttttttttttaaaaggaaaaaaaacccccggggggggga

SEQ ID NO: 691675 - DNA, 205 bp, Homo sapiens
tcgatacgagttcttttttctcaaatagagtaccgtcatagttaacaatttcataacgttctccttcttctcctccttcttagttgttcttcctacgtctcagtcttgctcttcttcttagccgtagtattccttttgttcttttattcatagcctttcttgtgcctgcctcttctgcgtactatcccccttctgtcgtcttctc

SEQ ID NO: 691676 - DNA, 346 bp, Homo sapiens
acacataaacgtatatgacagcaaaatggcgatggtttcgcttccacactgacaaagcctccccttcaccctagctgtcaccagattctgctcttgatcaaacccttagcccactgatctggtctgtgcttctggcttttcctttgcattctggccttggtcatctactttcaggattattttcttgtctttgaacgttacagtctcgattaggctagttgatgtgtatatcctgcgaccctgtgtgatttttttcctcgtagaacacattagctccctacatgggacgcagtctccctctgacatgtgtctctgcccttaaccaagacagaaagggggtaaatgg

SEQ ID NO: 691677 - DNA, 799 bp, Homo sapiens
  misc_feature (569)..(569): n is a, c, g, or t
  misc_feature (599)..(599): n is a, c, g, or t
  misc_feature (646)..(646): n is a, c, g, or t
ggtcatcgcacagggaaatctttctggaaccgggcaccaacttgcgtgttgttttcatgctctttgtgcggggattagctgtcgtgccgggcctgaaaatgctgcgagcgccgggcgacatctaatccaggatttgcctctgcctcgcggttgatggaaaacagatgtcttactgctctgggcctgagcacagaatggaaatgaccgaccagagagccatttggagccgaggacacccggtgaaagccattcagagtccagccaggaggccgactttcctcctctggtctgtttttactacttgagccgctcgctcagaaaacggccttagataaagcagtttcaccttcagatcgcctgaggctgcagaagggcggctgcgggggaggaaggaggaggcggagaggagcgggtgcgaagtcctgggtcgcctgcccgctgcctgatgtcgtgagctagggcacctcggccctggctgggggcgcagcgaggcccaggcccgaggggtgaggcccaggccactccggagcgcgcgctgttcccgcgaagcgagtcgccgtctcgtagtnaagtcgtggctcgggctgtgccctgggaancctaccgccgggcaaggtccggtggccggagcgtgcgggagctgccnagagtccatttccggacgggcagctgcggggcttggcagccggctggagccggtgcaggggtccgcggggccagtgtttaaggccgtgacagaactggacagggtgtcaggcgccgcggacccggggggggacctgagcaacgcagagaaaaa

SEQ ID NO: 691678 - DNA, 1086 bp, Homo sapiens
tggtggaaatggagtctcactctgttgcccaggctggattgcatggggcaggatctcggctcacttgcaacctcgtgcctccgtgggttcaacggtgcttctcatgccatcaggcgtcccaagtagctgagattataggcacgacaccaccgaggcccagtgagattcaggggtttcaagtagcagactgggggttttggccatgttggtgccaggctggtcttcagaattccgtgacctcagggtgatccaacacaccttgggccttcccaaagtgcctgggaattacaaggcggttggagccttgggcctagctaatctcgacggtaataacggggacagcgcattgttcgccactttacaagtggacggtggaaacacccttcgtacaatgccccacctggaacttggttgtttgcccaccccactcgagggcccaaaccaaaaagggtgggaccgtgtaccgtgcatttaccaaggggtttcacaacaaccgtgtgacctttctgttaggacccacacctgatacgtggttccacccccaggtgcaacatgttgttacccccattgtgccatataagcacgcaacaaagcacttgcaccggcgggcaactttccacacattagtggcggacgaacaacttgccccgggggaagcggcccacccaaagcgcgcccaaaacaatgcgcgtagtgtagacatgggcgcaccaaatacgccaaggctaccaattttacacacccaccagcttgcggatacagccaccatcggtgtgccacggggagcgcacatatcgcacagcagacagtcccaacatccattagtccgaccaaggcctcaactcacactaagcaccgggggggtggccagcacaaacaaacaagggggttcaaaacagaccggcgcgggcccatagtgaacgcatccacccattgtgaggacgacacgcgaccgacccttaagagacaaaactagtctgcccactaaccacaccggtgggacgggttcataacaccggacccaagcaaccaaatagttggcggccccacaccacacggctagtctgaggagcgacactgcggtaa

SEQ ID NO: 691679 - DNA, 871 bp, Homo sapiens
  misc_feature (12)..(12): n is a, c, g, or t
  misc_feature (612)..(612): n is a, c, g, or t
tttggcaaagcngcacctgcataaacctgttcaagaactaggacacagcttacacagcatgttaagttcatatacattatcagcagcaaattagaaacagaaaaccacactaaactacaagtctcctataattttgagagagagaagggaagaactaagtcagttatgtccaatctgaacagctgagtgtttacaggacatcacctgccatcttaaggtttatttttaacaatgcctagttttaaggtacaaagcagcttattgtatctaccacctgctattttttgaccccacttcaaaagctttaaaaggaaccctcatctctatttttttagtggcatctaacaaatttccaaattccagggatctaaacttgaaattggggggtgttatcaatgccccaaaaggcgttttgttaaattaatatccggaccgaatttaagcctcccaaaaaaaagagaggcccctcccttagaattcattggagaaacctaactttttacattgttaccaaaacccatttgtcttaattttttgcacggtaaaaatttcgccgctgttgaggtgatattccacagatttaatattgggggccccctgctcttgggtttngcttcacggcgggtgcaaaagtcaaagggctaggaaaagggggtttatctacctgaaaaaccgtggtgggagctcgggaccacctccctgctgtggttggggaacagcctcgagctggaacggggttacgcggccaaaaatggggggacccctggacgggtgcacgaatggaccccgatggaattgaactgaaggtggggcggataacaaaaaaccatggatgtaaggcgcgaccagatggacgactggaaaaaaaaac

SEQ ID NO: 691680 - DNA, 107 bp, Homo sapiens
agtcccaaaatctcaaaagtagggaagccagcagtgcagccttcagtctgtggtcaacggtccaagagtccaaagctgaagaactggagctattgttcagggcgaag

SEQ ID NO: 691681 - DNA, 721 bp, Homo sapiens
gcgctgcccgcccacccatgtctgtctccgtcgcacactctggggccttggcctctgcagtctctgtctccttccgtcagtctccctgttgccccctctcccgcatggcagggatggacggacgagcagtgttctggtgcgggggacaggggtgtggcccatcggggtcatggcgaggcgcccggtatcgtggagtgcagtggctgacgacggggcagccctgtgtcctgacacgaaacagacgcgtctatggcctagggcgtacgccttctagctgctgcacgggctcggctccctcgtcctggggcatgtgtggccgtccaggcacacgacgtttcgggggacccaggccaagcgagagatgcatggccagaggtctgtcgtctgaagagggccctagaactactgagagggaccagctgggtggcagactgacccccgttggggccctggagcaagagaacgaaaaggctggatgaggccatctagggctccctttcccgtgatcgcgtcccatgtcctggccctcatgttgggaaagcatgccagcagatgaagagcaggcctgggtatgtgacccaggtcaccgtgctccgtcccaggggccatgtgatcctgtgcctcgttctgctaccgttcctggtgctggggactgtggagccttctggtcgatgggtgtgcggcggggtggggggcggctgagagctgtgggtgtgtgact

SEQ ID NO: 691682 - DNA, 553 bp, Homo sapiens
tgaacctgtcacccaggtactaagcgtagtacccaatagatagtttttcagcccttgcccccctcctccctctagtagtccccagtatctattgctcccatctttatgtccatgtgtacccaatgttgagctctcacttgtgggaacataactgcatttagttttctgtttctgcattctgtttctcctgttctcttaggataatggcctccagctgtatccatgttgctgcatgtactacattttctttttagcctgggcacccacagtggattgggcactgggcccttgatgggcacctgggttcattccacatttttgctcttgtgaatggcgttaagatgcatacaggtgcatatgttcttgtggcagaatgcaaaaatctatactcttaagaggactctgacctccatcctctttttgcctttgctacacagttctctggccatcctctatatggaaatacttagggtaagtagtcaatcagccatggccaatgaagggttgggtcatacacccaacacttggctatttatcacccgacacattcaga

SEQ ID NO: 691683 - DNA, 193 bp, Homo sapiens
ttggacccgggcccccttttttccccccggggggggggggtttccccttgccttttttaagggggcgcccggttttccctggttcccgaattgattttggggggggattttttttcccattggttttaatttttttttttggggggttccccccccccccccccccctggttttggggcggggtgggcgggga

SEQ ID NO: 691684 - DNA, 308 bp, Homo sapiens
gggggggggggttttccccccccccccccccctttgggaaaataaaagcaaaggttttagagaattcccttttgaaaggggggtggggttcccccgtaaacctggccgggggggggtggggggctaagggcccccccttttggggttaggggggggggggcccccccgggcccccgcttttgggccttgggttcccccccggtcccccggtcttgggggccgcgggcccccctggccccctttttttttttttttggccccctgttctccccccccctttggggataaggggggggggttttttttga

SEQ ID NO: 691685 - DNA, 636 bp, Homo sapiens
  misc_feature (396)..(396): n is a, c, g, or t
ttttaatactagggcagtgccccaccataattacccccatactccttacactattgctgatcacccaactaaaaatattaatcacaaactaccacctacctccctcgccaaagcccataaaaataaaaacttataacaaaccctgtgcaccaatatgaactttttttgggggggggcattcattgcccccacactcctaggactacccccccgagtactgctcattctattccctcctttattgatcccccccttcaaatatcccaccaacaaccggctaatcaccaccgaacagtgcctactcaaacctaccccaaaaaccttttttccccctccacatctcttttggctgtccctgtcctgttatgctggctccctccaatatatgttttcgcnacaacccacttccccgacctgtcctcttctcctctttcacccaccgcccacctctcttttttcctatgtctgctcacctccccttttgctctgcgcaccttttatcatctctctgttttatgtcttttcctccccctatcacctcctcccccccgtcccctccacaccccaggatggcagccctgggttcttcggcaccttattcctcctcattctcttttctgttcagatatacaaaaa

SEQ ID NO: 691686 - DNA, 346 bp, Homo sapiens
tggagactgagactcactctatggcccacattggagtgcagtgccacaatcttggctcacggcaacctccgcctcccaggttcaagtgattcttgtgcctcagcctctagagtaagtgggatcacaggcacccgccaccacgcccggccacttttggtttttttagtagagccagggtttcaccatgttggccaggctggtctcgaactcctgacctcaagtgatctgcccgattcagcctcccaaagtgctgggatcacaggcgtgagtcactgcgcccagccatgacctttttcttctttttcagctcccatttttctctgctttctataaattatatgcttgg

SEQ ID NO: 691687 - DNA, 352 bp, Homo sapiens
  misc_feature (1)..(1): n is a, c, g, or t
ncataagaatagtccaccattgccagattcaccgaggtttcagagatccagtctttcaaatgttgaatgtcctgagaagttaatggcctgcataagtgaagggctccagtaagcctctgcaaaccactgccagtatttgagagtcgcctaaaatcggtagttccgatcttcataaatacaccacaaggtactaaatcctcaaactgccagatagggccagaagctgcaagagctccaactaccatatgaggatatttcatcctaacccaggcggcaagcatgccaccataggagcctcatatggcaatgacaggttgattttcagctcctgggagtgctcttctcgcgtgcc

SEQ ID NO: 691688 - DNA, 827 bp, Homo sapiens
  misc_feature (37)..(37): n is a, c, g, or t
  misc_feature (68)..(68): n is a, c, g, or t
  misc_feature (71)..(71): n is a, c, g, or t
  misc_feature (76)..(76): n is a, c, g, or t
  misc_feature (79)..(79): n is a, c, g, or t
  misc_feature (119)..(119): n is a, c, g, or t
  misc_feature (133)..(133): n is a, c, g, or t
  misc_feature (156)..(156): n is a, c, g, or t
  misc_feature (159)..(159): n is a, c, g, or t
  misc_feature (165)..(165): n is a, c, g, or t
  misc_feature (182)..(182): n is a, c, g, or t
  misc_feature (196)..(196): n is a, c, g, or t
  misc_feature (221)..(221): n is a, c, g, or t
  misc_feature (258)..(258): n is a, c, g, or t
  misc_feature (296)..(296): n is a, c, g, or t
  misc_feature (347)..(347): n is a, c, g, or t
  misc_feature (378)..(378): n is a, c, g, or t
  misc_feature (380)..(380): n is a, c, g, or t
  misc_feature (387)..(387): n is a, c, g, or t
  misc_feature (463)..(463): n is a, c, g, or t
  misc_feature (466)..(467): n is a, c, g, or t
  misc_feature (636)..(636): n is a, c, g, or t
  misc_feature (766)..(766): n is a, c, g, or t
  misc_feature (793)..(793): n is a, c, g, or t
ctaaaggttacagagaaatagctggagcagtttcaanagcctgtctccaataacatatcagcaatggnggnggggnggnagtattctcttcccacttcctgaggcttttaaatataatnatgcgaatgggggngtttgcctccggagtcaactggnggntttgantccaccactcaaaagcnttccttaaccaganacacctgaaaaggggagtcagaagnctgcagaatcacttccaatgacgaaagcctgactgtntcccagcctcaaaaaaggatacagcctagtagtaatgngaatcatgactggcagaggggactgagcctgacgttgaacggcctggaagnaacacagcagtattcaaacaccggagggtcngngaggganccggagggggaatgggggagacacacttgtagcgtgggagtccaatttttttgtagtctgaggggaggagaatatnaanntgggccacagcaagccagactatatgtgtaataaaggaaggactgcatggatcctttatcatacactcctctcctccatgcaccaattcctatgccaaatcacagcaaagcagatggctgagcaaactgaagcccagacttcagagtaagtagtcatcttcaaggttantcatcaccagacatggaagcagcttctgataagcttgaggcaggacagggtatgtgttatctctccagagctcttttttggtctcagtgagccacgtgctgagagaggcatctgtttctgtggccatgtncttcaacatgtctgggacagctctgtnttcatctatgttttcaggaagctcacttgcgtat

SEQ ID NO: 691689 - DNA, 380 bp, Homo sapiens
ttttttttttgcagggggctccccaacaagaaaaaagggggggccaactggaaccccatttgcagtgcacgtttttattaacccccccccgtctggcttgcccctgtcccgaaatttaaggttggtacaaaaaatgtttgtcaggctcagagggccccctccccccccctacaggtcaaaaaaactaagggcacttccctaggttcattacccccctgggcaaaaggaaagggagacagccacccatcccctgccccccccgccccagggccttgaatccttttttgttttcaacagtcttgctgaattaaacaaaaaggcccttgaatcctggcctggaatttgggcaaaaaaagcattaataaaactgggcatcccca

SEQ ID NO: 691690 - DNA, 2174 bp, Homo sapiens
  misc_feature (2155)..(2155): n is a, c, g, or t
ccggcctcccacccagctctctggtcccggcggtaagatggcggctgccgcggagtgcgatgtggtaatggcggcgaccgagccggagctgctcgacgaccaagaggcgaagagggaagcagagactttcaaggaacaaggaaatgcatactatgccaagaaagattacaatgaagcttataattattatacaaaagccatagatatgtgtcctaaaaatgctagctattatggtaatcgagcagccaccttgatgatgcttggaaggttccgggaagctcttggagatgcacaacagtcagtgaggttggatgacagttttgtccggggacatctacgagagggcaagtgccacctctctctggggaatgccatggcagcatgtcgcagcttccagagagccctagaactggatcataaaaatgctcaggcacaacaagagttcaagaatgctaatgcagtcatggaatatgagaaaatagcagaaacagattttgagaagcgagattttcggaaggttgttttctgcatggaccgtgccctagaatttgcccctgcctgccatcgcttcaaaatcctcaaggcagaatgtttagcaatgctgggtcgttatccagaagcacagtctgtggctagtgacattctacgaatggattccaccaatgcagatgctctgtatgtacgaggtctttgcctttattacgaagattgtattgagaaggcagttcagtttttcgtacaggctctcaggatggctcctgaccacgagaaggcctgcattgcctgcagaaatgccaaagcactcaaagcaaagaaagaagatgggaataaagcatttaaggaaggaaattacaaactagcatatgaactgtacacagaagccctggggatagaccccaacaatataaaaacaaatgctaaactctactgtaatcggggtacggttaattccaagcttaggaaactagatgatgcaatagaagactgcacaaatgcagtgaagcttgatgacacttacataaaagcctacttgagaagagctcagtgttacatggacacagaacagtatgaagaagcagtacgagactatgaaaaagtataccagacagagaaaacaaaagaacacaaacagctcctaaaaaatgcgcagctggaactgaagaagagtaagaggaaagattactacaagattctaggagtggacaagaatgcctctgaggacgagatcaagaaagcttatcggaaacgggccttgatgcaccatccagatcggcatagtggagccagtgctgaggttcagaaggaggaggagaagaagttcaaggaagttggagaggcctttactatcctctctgatcccaagaaaaagactcgctatgacagtggacaggacctagatgaggagggcatgaatatgggtgattttgatccaaacaatatcttcaaggcattctttggcggtcctggcggcttcagctttgaagcatctggtccagggaatttcttttttcaatttggctaatgaagggcaaccacccagaacccagaaaatgcagattcactcagtttaatcttgaatgtggaaacagttcacctcctcccttcatcacgtctccgtgtgcttagagcagtttcgttttctcagttggatgccctgtgtctctgtgagtggggtggagcaaagggaaccaatgccgaagaccgagggcaggggagggaggcgggggtggacagggaggcagcttgtgaatttttgttttactgtttaactttattaaaaaagaaaaaaaaaaagagaataaaatgttttgacccttcctggccctttgctctggcatctgcattgtctccagtctgtgagccagagctgagcccgacctggacttggggtgcagcaagctgctgcatgcgggctgtgggcacccagcctagtggcaggtggggcactctgcctctcccagacctgtccagcatgtgagtgctaggcaggccccggctgtgcctctgggcccagcctaacatcagtcacagagaagcgagttcagaaagcatgctcactttacggtggggccccagaaatcactagaagctgtgtgtgtccaaagctcaggtgggtactaaaagctgtgtgcgtccaaagctcaggtgggtactnacctagacagggcagttta

SEQ ID NO: 691691 - DNA, 243 bp, Homo sapiens
catgataaccagacctgctgacgagacaaccgacacggctgggccttctgttcctaccgccagggcgtctgatgtgctgaacggcgccactgtagtcctgatagattccgatgcgcagccaggggtaccaaatgtttgcgcatggaggccccgcgctgggacgcccctttcagggacccaaacttgtaaccagcgctatgagggatagtaattaaaactatgcatccctcgggaccccactct

SEQ ID NO: 691692 - DNA, 1953 bp, Homo sapiens
ccggcctcccacccagctctctggtcccggcggtaagatggcggctgccgcggagtgcgatgtggtaatggcggcgaccgagccggagctgctcgacgaccaagaggcgaagagggaagcagagactttcaaggaacaaggaaatgcatactatgccaagaaagattacaatgaagcttataattattatacaaaagccatagatatgtgtcctaaaaatgctagctattatggtaatcgagcagccaccttgatgatgcttggaaggttccgggaagctcttggagatgcacaacagtcagtgaggttggatgacagttttgtccggggacatctacgagagggcaagtgccacctctctctggggaatgccatggcagcatgtcgcagcttccagagagccctagaactggatcataaaaatgctcaggcacaacaagagttcaagaatgctaatgcagtcatggaatatgagaaaatagcagaaacagattttgagaagcgagattttcggaaggttgttttctgcatggaccgtgccctagaatttgcccctgcctgccatcgcttcaaaatcctcaaggcagaatgtttagcaatgctgggtcgttatccagaagcacagtctgtggctagtgacattctacgaatggattccaccaatgcagatgctctgtatgtacgaggtctttgcctttattacgaagattgtattgagaaggcagttcagtttttcgtacaggctctcaggatggctcctgaccacgagaaggcctgcattgcctgcagaaatgccaaagcactcaaagcaaagaaagaagatgggaataaagcatttaaggaaggaaattacaaactagcatatgaactgtacacagaagccctggggatagaccccaacaatataaaaacaaatgctaaactctactgtaatcggggtacggttaattccaagcttaggaaactagatgatgcaatagaagactgcacaaatgcagtgaagcttgatgacacttacataaaagcctacttgagaagagctcagtgttacatggacacagaacagtatgaagaagcagtacgagactatgaaaaagtataccagacagagaaaacaaaagaacacaaacagctcctaaaaaatgcgcagctggaactgaagaagagtaagaggaaagattactacaagattctaggagtggacaagaatgcctctgaggacgagatcaagaaagcttatcggaaacgggccttgatgcaccatccagatcggcatagtggagccagtgctgaggttcagaaggaggaggagaagaagttcaaggaagttggagaggcctttactatcctctctgatcccaagaaaaagactcgctatgacagtggacaggacctagatgaggagggcatgaatatgggtgattttgatccaaacaatatcttcaaggcattctttggcggtcctggcggcttcagctttgaagcatctggtccagggaatttcttttttcaatttggctaatgaagggcaaccacccagaacccagaaaatgcagattcactcagtttaatcttgaatgtggaaacagttcacctcctcccttcatcacgtctccgtgtgcttagagcagtttcgttttctcagttggatgccctgtgtctctgtgagtggggtggagcaaagggaaccaatgccgaagaccgagggcaggggagggaggcgggggtggacagggaggcagcttgtgaatttttgttttactgtttaactttattaaaaaaaaagaacacaaacagctcctaaaaaatgcgcacgtggaactgaagaagagtaagaggaaagattactacaagattctaggagtggacaagaatgcctctgaggacgagatcaagaaagcttatcggaaacgggccttgatgcaccatccagatcggcatagtggagccagt

SEQ ID NO: 691693 - DNA, 2085 bp, Homo sapiens
  misc_feature (2066)..(2066): n is a, c, g, or t
ccggcctcccacccagctctctggtcccggcggtaagatggcggctgccgcggagtgcgatgtggtaatggcggcgaccgagccggagctgctcgacgaccaagaggcgaagagatatgtgtcctaaaaatgctagctattatggtaatcgagcagccaccttgatgatgcttggaaggttccgggaagctcttggagatgcacaacagtcagtgaggttggatgacagttttgtccggggacatctacgagagggcaagtgccacctctctctggggaatgccatggcagcatgtcgcagcttccagagagccctagaactggatcataaaaatgctcaggcacaacaagagttcaagaatgctaatgcagtcatggaatatgagaaaatagcagaaacagattttgagaagcgagattttcggaaggttgttttctgcatggaccgtgccctagaatttgcccctgcctgccatcgcttcaaaatcctcaaggcagaatgtttagcaatgctgggtcgttatccagaagcacagtctgtggctagtgacattctacgaatggattccaccaatgcagatgctctgtatgtacgaggtctttgcctttattacgaagattgtattgagaaggcagttcagtttttcgtacaggctctcaggatggctcctgaccacgagaaggcctgcattgcctgcagaaatgccaaagcactcaaagcaaagaaagaagatgggaataaagcatttaaggaaggaaattacaaactagcatatgaactgtacacagaagccctggggatagaccccaacaatataaaaacaaatgctaaactctactgtaatcggggtacggttaattccaagcttaggaaactagatgatgcaatagaagactgcacaaatgcagtgaagcttgatgacacttacataaaagcctacttgagaagagctcagtgttacatggacacagaacagtatgaagaagcagtacgagactatgaaaaagtataccagacagagaaaacaaaagaacacaaacagctcctaaaaaatgcgcagctggaactgaagaagagtaagaggaaagattactacaagattctaggagtggacaagaatgcctctgaggacgagatcaagaaagcttatcggaaacgggccttgatgcaccatccagatcggcatagtggagccagtgctgaggttcagaaggaggaggagaagaagttcaaggaagttggagaggcctttactatcctctctgatcccaagaaaaagactcgctatgacagtggacaggacctagatgaggagggcatgaatatgggtgattttgatccaaacaatatcttcaaggcattctttggcggtcctggcggcttcagctttgaagcatctggtccagggaatttcttttttcaatttggctaatgaagggcaaccacccagaacccagaaaatgcagattcactcagtttaatcttgaatgtggaaacagttcacctcctcccttcatcacgtctccgtgtgcttagagcagtttcgttttctcagttggatgccctgtgtctctgtgagtggggtggagcaaagggaaccaatgccgaagaccgagggcaggggagggaggcgggggtggacagggaggcagcttgtgaatttttgttttactgtttaactttattaaaaaagaaaaaaaaaaagagaataaaatgttttgacccttcctggccctttgctctggcatctgcattgtctccagtctgtgagccagagctgagcccgacctggacttggggtgcagcaagctgctgcatgcgggctgtgggcacccagcctagtggcaggtggggcactctgcctctcccagacctgtccagcatgtgagtgctaggcaggccccggctgtgcctctgggcccagcctaacatcagtcacagagaagcgagttcagaaagcatgctcactttacggtggggccccagaaatcactagaagctgtgtgtgtccaaagctcaggtgggtactaaaagctgtgtgcgtccaaagctcaggtgggtactnacctagacagggcagttta

SEQ ID NO: 691694 - DNA, 888 bp, Homo sapiens
  misc_feature (259)..(259): n is a, c, g, or t
  misc_feature (720)..(720): n is a, c, g, or t
  misc_feature (784)..(784): n is a, c, g, or t
taaaaaaaaaaggccttacatatttataactggaatccagccaaccaagcgtgtccataacagattcagagaggaaaacacgttcgaaatcctccagataggtgggtgacatttttcagctggatagtggttaacagtgatcgtgaccttcagaacagcataaatattgtgttgccatctcagtgtgcaatctccttatagacccagctgggttcttctccaagtgtcctccttttgggacagttgtgtcaccgtgaantttaatttctccgagtgtttctcaactccgaaactccacgtggggaaaagtgggacacgaaatattgtgcttttgtggtatctcttggtggccgaggaatatccggcttaaaaactcccgtgaaaagagttcttgtggtgaaagaacagagaccatgtggcgcagagagacaagcggaaggtctcaagaaaaacaacaccacacgcagaggttgtgcgggagaccacaatgtgtgtgcgggctctcaccaaagggacaagaatgtgccaggacaaagaatctcccgaaatgtgtctccccctatactcggccggagaaaccgcgccgtgagttggacggtgccgtaggatgtgcgggacaaaagaaaaaccacccatgtgagaatgtgcgcgcaatagggtgccacatctcccgagaagggtgcgccgcacctctgtggtggagaaaaagacgaagccccnacaatggcccttcgtggggacagaacaacaccttgtgcgttggccccctacaaaattaactccncggggcgcgggacagacaaccttgctgtgcggcgccctcttgtcggtgggttctccacccaacagggtggaaggcgacccttacacgcttggagagcacctccg

SEQ ID NO: 691695 - DNA, 753 bp, Homo sapiens
agaggctggtcgtggacttgtggttggggtgatgtgggagctgtttcaacctgtgatgccccctctcctgttgccggcgtgggcatcccccgggggcagtggcaaacgctggcgctcctccagcttccgagtccagccagcctggcgcgcgtgggcgccgtccccggatgacacctcggacggagtcctgttccttccctgagttgctgtggacttgtggacgctggtctcgttgtgcgctcagcgcccgttgcgtggtggttcgactgcgtacctgctggcagtgtccgtcaccaagtggctgtgacggagcgagtgatggaagtggcatgagcctgagcttgagcgacactccgtgctcgcaaacgtcgtacaactcgaagggtgtggcccattgtggtaggggtgagagatcctccatgttgctttatccggagttccacgaccttggtgtgggtatgacttgcgtgcaggatgaacttgtcagctcgcgaggtcgctggaaggttgtcggtgcgagggggcgcgcagtgtggcaggagtgcccattgctgaggctgtgctgcacgtctggtgcttctgctcccggcaggatgatgggaagttccagatacaatgatggtgagggcgaccgtcctccaatttgcgcaccgttgggaccccaggagttttactgtgacttcatcgagttcagttatgttcgtgtctcttgtgaggactggatgtgccctgccaggcgtgggggtcagatcc

SEQ ID NO: 691696 - DNA, 2664 bp, Homo sapiens
  misc_feature (2645)..(2645): n is a, c, g, or t
ccggcctcccacccagctctctggtcccggcggtaagatggcggctgccgcggagtgcgatgtggtaatggcggcgaccgagccggagctgctcgacgaccaagaggcgaagagggaagcagagactttcaaggaacaaggaaatgcatactatgccaagaaagattacaatgaagcttataattattatacaaaagccatagatatgtgtcctaaaaatgctagctattatggtaatcgagcagccaccttgatgatgcttggaaggttccgggaagctcttggagatgcacaacagtcagtgaggttggatgacagttttgtccggggacatctacgagagggcaagtgccacctctctctggggaatgccatggcagcatgtcgcagcttccagagagccctagaactggatcataaaaatgctcaggcacaacaagagttcaagaatgctaatgcagtcatggaatatgagaaaatagcagaaacagattttgagaagcgagattttcggaaggttgttttctgcatggaccgtgccctagaatttgcccctgcctgccatcgcttcaaaatcctcaaggcagaatgtttagcaatgctgggtcgttatccagaagcacagtctgtggctagtgacattctacgaatggattccaccaatgcagatgctctgtatgtacgaggtctttgcctttattacgaagattgtattgagaaggcagttcagtttttcgtacaggctctcaggatggctcctgaccacgagaaggcctgcattgcctgcagaaatgccaaagcactcaaagcaaagaaagaagatgggaataaagcatttaaggaaggaaattacaaactagcatatgaactgtacacagaagccctggggatagaccccaacaatataaaaacaaatgctaaactctactgtaatcggggtacggttaattccaagcttaggaaactagatgatgcaatagaagactgcacaaatgcagtgaagcttgatgacacttacataaaagcctacttgagaagagctcagtgttacatggacacagaacagtatgaagaagcagtacgagactatgaaaaagtataccagacagagaaaacaaaagaacacaaacagctcctaaaaaatgcgcagctggaactgaagaagagtaagaggaaagattactacaagattctaggagtggacaagaatgcctctgaggacgagatcaagaaagcttatcggaaacgggccttgatgcaccatccagatcggcatagtggagccagtgctgaggttcagaaggaggaggagaagaagttcaaggaagttggagaggcctttactatcctctctgatcccaagaaaaagactcgctatgacagtggacaggacctagatgaggagggcatgaatatgggtgattttgatccaaacaatatcttcaaggcattctttggcggtcctggcggcttcagctttgaaggtaggtgggcctgctgttcttgggagttcccagatcacaagccaacacactcattgcctcttaggcagctctttgggagtcagaggggcccatgagcgggggcagctgaattctcatctagcagggcatctatccactcggctgttgctaaggatgaagacaggaaggttcccaggcaccccttgccttgggacctttagccaccgcatctctgcagggtcagggaggcatctctaactgcctagtaccaaggcttctctgcaagagcaaaggtactatatagataatgctgaggtcagaagctacccatgtataatacagtcacgtgctccctcttgcacccaaaaacagcctgagctgtttgatacccatagagtttctctctgtgtttgagtttgaagcagcccttgaagacttttccataatcagagcaaagtgatcttccttagaaaatccatagccaactaccaacccctcttttctctttcagcatctggtccagggaatttcttttttcaatttggctaatgaagggcaaccacccagaacccagaaaatgcagattcactcagtttaatcttgaatgtggaaacagttcacctcctcccttcatcacgtctccgtgtgcttagagcagtttcgttttctcagttggatgccctgtgtctctgtgagtggggtggagcaaagggaaccaatgccgaagaccgagggcaggggagggaggcgggggtggacagggaggcagcttgtgaatttttgttttactgtttaactttattaaaaaagaaaaaaaaaaagagaataaaatgttttgacccttcctggccctttgctctggcatctgcattgtctccagtctgtgagccagagctgagcccgacctggacttggggtgcagcaagctgctgcatgcgggctgtgggcacccagcctagtggcaggtggggcactctgcctctcccagacctgtccagcatgtgagtgctaggcaggccccggctgtgcctctgggcccagcctaacatcagtcacagagaagcgagttcagaaagcatgctcactttacggtggggccccagaaatcactagaagctgtgtgtgtccaaagctcaggtgggtactaaaagctgtgtgcgtccaaagctcaggtgggtactnacctagacagggcagttta

SEQ ID NO: 691697 - DNA, 2663 bp, Homo sapiens
  misc_feature (2000)..(2000): n is a, c, g, or t
  misc_feature (2005)..(2005): n is a, c, g, or t
  misc_feature (2012)..(2012): n is a, c, g, or t
  misc_feature (2644)..(2644): n is a, c, g, or t
ccggcctcccacccagctctctggtcccggcggtaagatggcggctgccgcggagtgcgatgtggtaatggcggcgaccgagccggagctgctcgacgaccaagaggcgaagagggaagcagagactttcaaggaacaaggaaatgcatactatgccaagaaagattacaatgaagcttataattattatacaaaagccatagatatgtgtcctaaaaatgctagctattatggtaatcgagcagccaccttgatgatgcttggaaggttccgggaagctcttggagatgcacaacagtcagtgaggttggatgacagttttgtccggggacatctacgagagggcaagtgccacctctctctggggaatgccatggcagcatgtcgcagcttccagagagccctagaactggatcataaaaatgctcaggcacaacaagagttcaagaatgctaatgcagtcatggaatatgagaaaatagcagaaacagattttgagaagcgagattttcggaaggttgttttctgcatggaccgtgccctagaatttgcccctgcctgccatcgcttcaaaatcctcaaggcagaatgtttagcaatgctgggtcgttatccagaagcacagtctgtggctagtgacattctacgaatggattccaccaatgcagatgctctgtatgtacgaggtctttgcctttattacgaagattgtattgagaaggcagttcagtttttcgtacaggctctcaggatggctcctgaccacgagaaggcctgcattgcctgcagaaatgccaaagcactcaaagcaaagaaagaagatgggaataaagcatttaaggaaggaaattacaaactagcatatgaactgtacacagaagccctggggatagaccccaacaatataaaaacaaatgctaaactctactgtaatcggggtacggttaattccaagcttaggaaactagatgatgcaatagaagactgcacaaatgcagtgaagcttgatgacacttacataaaagcctacttgagaagagctcagtgttacatggacacagaacagtatgaagaagcagtacgagactatgaaaaagtataccagacagagaaaacaaaagaacacaaacagctcctaaaaaatgcgcagctggaactgaagaagagtaagaggaaagattactacaagattctaggagtggacaagaatgcctctgaggacgagatcaagaaagcttatcggaaacgggccttgatgcaccatccagatcggcatagtggagccagtgctgaggttcagaaggaggaggagaagaagttcaaggaagttggagaggcctttactatcctctctgatcccaagaaaaagactcgctatgacagtggacaggacctagatgaggagggcatgaatatgggtgattttgatccaaacaatatcttcaaggcattctttggcggtcctggcggcttcagctttgaaggtaggtgggcctgctgttcttgggagttcccagatcacaagccaacacactcattgcctcttaggcagctctttgggagtcagaggggcccatgagcgggggcagctgaattctcatctagcagggcatctatccactcggctgttgctaaggatgaagacaggaaggttcccaggcaccccttgccttgggacctttagccaccgcatctctgcagggtcagggaggcatctctaactgcctagtaccaaggcttctctgcaagagcaaaggtactatatagataatgctgaggtcagaagctacccatgtataatacagtcacgtgctccctcttgcacccaaaaacagcctgagctgtttgatacccatagagtttctctctgtgtttgagtttgaagcagcccttgaagacttttccataatcagagcaaagtgatcttccttagaaaatccatagccaactaccaacccctcttttctctttcagcatctggtccagggaattcttttttnaattnggctaangaagggcaaccacccagaacccagaaaatgcagattcactcagtttaatcttgaatgtggaaacagttcacctcctcccttcatcacgtctccgtgtgcttagagcagtttcgttttctcagttggatgccctgtgtctctgtgagtggggtggagcaaagggaaccaatgccgaagaccgagggcaggggagggaggcgggggtggacagggaggcagcttgtgaatttttgttttactgtttaactttattaaaaaagaaaaaaaaaaagagaataaaatgttttgacccttcctggccctttgctctggcatctgcattgtctccagtctgtgagccagagctgagcccgacctggacttggggtgcagcaagctgctgcatgcgggctgtgggcacccagcctagtggcaggtggggcactctgcctctcccagacctgtccagcatgtgagtgctaggcaggccccggctgtgcctctgggcccagcctaacatcagtcacagagaagcgagttcagaaagcatgctcactttacggtggggccccagaaatcactagaagctgtgtgtgtccaaagctcaggtgggtactaaaagctgtgtgcgtccaaagctcaggtgggtactnacctagacagggcagttta

SEQ ID NO: 691698 - DNA, 2122 bp, Homo sapiens
ccggcctcccacccagctctctggtcccggcggtaagatggcggctgccgcggagtgcgatgtggtaatggcggcgaccgagccggagctgctcgacgaccaagaggcgaagagggaagcagagactttcaaggaacaaggaaatgcatactatgccaagaaagattacaatgaagcttataattattatacaaaagccatagatatgtgtcctaaaaatgctagctattatggtaatcgagcagccaccttgatgatgcttggaaggttccgggaagctcttggagatgcacaacagtcagtgaggttggatgacagttttgtccggggacatctacgagagggcaagtgccacctctctctggggaatgccatggcagcatgtcgcagcttccagagagccctagaactggatcataaaaatgctcaggcacaacaagagttcaagaatgctaatgcagtcatggaatatgagaaaatagcagaaacagattttgagaagcgagattttcggaaggttgttttctgcatggaccgtgccctagaatttgcccctgcctgccatcgcttcaaaatcctcaaggcagaatgtttagcaatgctgggtcgttatccagaagcacagtctgtggctagtgacattctacgaatggattccaccaatgcagatgctctgtatgtacgaggtctttgcctttattacgaagattgtattgagaaggcagttcagtttttcgtacaggctctcaggatggctcctgaccacgagaaggcctgcattgcctgcagaaatgccaaagcactcaaagcaaagaaagaagatgggaataaagcatttaaggaaggaaattacaaactagcatatgaactgtacacagaagccctggggatagaccccaacaatataaaaacaaatgctaaactctactgtaatcggggtacggttaattccaagcttaggaaactagatgatgcaatagaagactgcacaaatgcagtgaagcttgatgacacttacataaaagcctacttgagaagagctcagtgttacatggacacagaacagtatgaagaagcagtacgagactatgaaaaagtataccagacagagaaaacaaaagaacacaaacagctcctaaaaaatgcgcagctggaactgaagaagagtaagaggaaagattactacaagattctaggagtggacaagaatgcctctgaggacgagatcaagaaagcttatcggaaacgggccttgatgcaccatccagatcggcatagtggagccagtgctgaggttcagaaggaggaggagaagaagttcaaggaagttggagaggcctttactatcctctctgatcccaagaaaaagactcgctatgacagtggacaggacctagatgaggagggcatgaatatgggtgattttgatccaaacaatatcttcaaggcattctttggcggtcctggcggcttcagctttgaaggtaggtgggcctgctgttcttgggagttcccagatcacaagccaacacactcattgcctcttaggcagctctttgggagtcagaggggcccatgagcgggggcagctgaattctcatctagcagggcatctatccactcggctgttgctaaggatgaagacaggaaggttcccaggcaccccttgccttgggacctttagccaccgcatctctgcagggtcagggaggcatctctaactgcctagtaccaaggcttctctgcaagagcaaaggtactatatagataatgctgaggtcagaagctacccatgtataatacagtcacgtgctccctcttgcacccaaaaacagcctgagctgtttgatacccatagagtttctctctgtgtttgagtttgaagcagcccttgaagacttttccataatcagagcaaagtgatcttccttagaaaatccatagccaactaccaacccctcttttctctttcagcatctggtccagggaatttcttttttcaatttggctaatgaagggcaacgagggcgtagaagacgggagatgatgaagagggaatagtaagtggaagacggaagagtgtggaggaggggggggggaggggcagatagggaagcgaaga

SEQ ID NO: 691699 - DNA, 2173 bp, Homo sapiens
  misc_feature (1510)..(1510): n is a, c, g, or t
  misc_feature (1515)..(1515): n is a, c, g, or t
  misc_feature (1522)..(1522): n is a, c, g, or t
  misc_feature (2154)..(2154): n is a, c, g, or t
ccggcctcccacccagctctctggtcccggcggtaagatggcggctgccgcggagtgcgatgtggtaatggcggcgaccgagccggagctgctcgacgaccaagaggcgaagagggaagcagagactttcaaggaacaaggaaatgcatactatgccaagaaagattacaatgaagcttataattattatacaaaagccatagatatgtgtcctaaaaatgctagctattatggtaatcgagcagccaccttgatgatgcttggaaggttccgggaagctcttggagatgcacaacagtcagtgaggttggatgacagttttgtccggggacatctacgagagggcaagtgccacctctctctggggaatgccatggcagcatgtcgcagcttccagagagccctagaactggatcataaaaatgctcaggcacaacaagagttcaagaatgctaatgcagtcatggaatatgagaaaatagcagaaacagattttgagaagcgagattttcggaaggttgttttctgcatggaccgtgccctagaatttgcccctgcctgccatcgcttcaaaatcctcaaggcagaatgtttagcaatgctgggtcgttatccagaagcacagtctgtggctagtgacattctacgaatggattccaccaatgcagatgctctgtatgtacgaggtctttgcctttattacgaagattgtattgagaaggcagttcagtttttcgtacaggctctcaggatggctcctgaccacgagaaggcctgcattgcctgcagaaatgccaaagcactcaaagcaaagaaagaagatgggaataaagcatttaaggaaggaaattacaaactagcatatgaactgtacacagaagccctggggatagaccccaacaatataaaaacaaatgctaaactctactgtaatcggggtacggttaattccaagcttaggaaactagatgatgcaatagaagactgcacaaatgcagtgaagcttgatgacacttacataaaagcctacttgagaagagctcagtgttacatggacacagaacagtatgaagaagcagtacgagactatgaaaaagtataccagacagagaaaacaaaagaacacaaacagctcctaaaaaatgcgcagctggaactgaagaagagtaagaggaaagattactacaagattctaggagtggacaagaatgcctctgaggacgagatcaagaaagcttatcggaaacgggccttgatgcaccatccagatcggcatagtggagccagtgctgaggttcagaaggaggaggagaagaagttcaaggaagttggagaggcctttactatcctctctgatcccaagaaaaagactcgctatgacagtggacaggacctagatgaggagggcatgaatatgggtgattttgatccaaacaatatcttcaaggcattctttggcggtcctggcggcttcagctttgaagcatctggtccagggaattcttttttnaattnggctaangaagggcaaccacccagaacccagaaaatgcagattcactcagtttaatcttgaatgtggaaacagttcacctcctcccttcatcacgtctccgtgtgcttagagcagtttcgttttctcagttggatgccctgtgtctctgtgagtggggtggagcaaagggaaccaatgccgaagaccgagggcaggggagggaggcgggggtggacagggaggcagcttgtgaatttttgttttactgtttaactttattaaaaaagaaaaaaaaaaagagaataaaatgttttgacccttcctggccctttgctctggcatctgcattgtctccagtctgtgagccagagctgagcccgacctggacttggggtgcagcaagctgctgcatgcgggctgtgggcacccagcctagtggcaggtggggcactctgcctctcccagacctgtccagcatgtgagtgctaggcaggccccggctgtgcctctgggcccagcctaacatcagtcacagagaagcgagttcagaaagcatgctcactttacggtggggccccagaaatcactagaagctgtgtgtgtccaaagctcaggtgggtactaaaagctgtgtgcgtccaaagctcaggtgggtactnacctagacagggcagttta

SEQ ID NO: 691700 - DNA, 1775 bp, Homo sapiens
  misc_feature (1510)..(1510): n is a, c, g, or t
  misc_feature (1515)..(1515): n is a, c, g, or t
  misc_feature (1522)..(1522): n is a, c, g, or t
ccggcctcccacccagctctctggtcccggcggtaagatggcggctgccgcggagtgcgatgtggtaatggcggcgaccgagccggagctgctcgacgaccaagaggcgaagagggaagcagagactttcaaggaacaaggaaatgcatactatgccaagaaagattacaatgaagcttataattattatacaaaagccatagatatgtgtcctaaaaatgctagctattatggtaatcgagcagccaccttgatgatgcttggaaggttccgggaagctcttggagatgcacaacagtcagtgaggttggatgacagttttgtccggggacatctacgagagggcaagtgccacctctctctggggaatgccatggcagcatgtcgcagcttccagagagccctagaactggatcataaaaatgctcaggcacaacaagagttcaagaatgctaatgcagtcatggaatatgagaaaatagcagaaacagattttgagaagcgagattttcggaaggttgttttctgcatggaccgtgccctagaatttgcccctgcctgccatcgcttcaaaatcctcaaggcagaatgtttagcaatgctgggtcgttatccagaagcacagtctgtggctagtgacattctacgaatggattccaccaatgcagatgctctgtatgtacgaggtctttgcctttattacgaagattgtattgagaaggcagttcagtttttcgtacaggctctcaggatggctcctgaccacgagaaggcctgcattgcctgcagaaatgccaaagcactcaaagcaaagaaagaagatgggaataaagcatttaaggaaggaaattacaaactagcatatgaactgtacacagaagccctggggatagaccccaacaatataaaaacaaatgctaaactctactgtaatcggggtacggttaattccaagcttaggaaactagatgatgcaatagaagactgcacaaatgcagtgaagcttgatgacacttacataaaagcctacttgagaagagctcagtgttacatggacacagaacagtatgaagaagcagtacgagactatgaaaaagtataccagacagagaaaacaaaagaacacaaacagctcctaaaaaatgcgcagctggaactgaagaagagtaagaggaaagattactacaagattctaggagtggacaagaatgcctctgaggacgagatcaagaaagcttatcggaaacgggccttgatgcaccatccagatcggcatagtggagccagtgctgaggttcagaaggaggaggagaagaagttcaaggaagttggagaggcctttactatcctctctgatcccaagaaaaagactcgctatgacagtggacaggacctagatgaggagggcatgaatatgggtgattttgatccaaacaatatcttcaaggcattctttggcggtcctggcggcttcagctttgaagcatctggtccagggaattcttttttnaattnggctaangaagggcaaccacccaaaacccagaaaaggcagatccactcaatttaaacttgaagggggaaacagattaccctcctcccttaataacagatccggggggctaaagcaatttcgttatctaaagaggaagcccctgggccttgggaatggggggggaccaaggggaaccaaggccgaaaaaacactaagcagaagagcattatcgttttgcacaaattgcaaatacatttgatctggatactgagacacacag

SEQ ID NO: 691701 - DNA, 1794 bp, Homo sapiens
ccggcctcccacccagctctctggtcccggcggtaagatggcggctgccgcggagtgcgatgtggtaatggcggcgaccgagccggagctgctcgacgaccaagaggcgaagagggaagcagagactttcaaggaacaaggaaatgcatactatgccaagaaagattacaatgaagcttataattattatacaaaagccatagatatgtgtcctaaaaatgctagctattatggtaatcgagcagccaccttgatgatgcttggaaggttccgggaagctcttggagatgcacaacagtcagtgaggttggatgacagttttgtccggggacatctacgagagggcaagtgccacctctctctggggaatgccatggcagcatgtcgcagcttccagagagccctagaactggatcataaaaatgctcaggcacaacaagagttcaagaatgctaatgcagtcatggaatatgagaaaatagcagaaacagattttgagaagcgagattttcggaaggttgttttctgcatggaccgtgccctagaatttgcccctgcctgccatcgcttcaaaatcctcaaggcagaatgtttagcaatgctgggtcgttatccagaagcacagtctgtggctagtgacattctacgaatggattccaccaatgcagatgctctgtatgtacgaggtctttgcctttattacgaagattgtattgagaaggcagttcagtttttcgtacaggctctcaggatggctcctgaccacgagaaggcctgcattgcctgcagaaatgccaaagcactcaaagcaaagaaagaagatgggaataaagcatttaaggaaggaaattacaaactagcatatgaactgtacacagaagccctggggatagaccccaacaatataaaaacaaatgctaaactctactgtaatcggggtacggttaattccaagcttaggaaactagatgatgcaatagaagactgcacaaatgcagtgaagcttgatgacacttacataaaagcctacttgagaagagctcagtgttacatggacacagaacagtatgaagaagcagtacgagactatgaaaaagtataccagacagagaaaacaaaagaacacaaacagctcctaaaaaatgcgcagctggaactgaagaagagtaagaggaaagattactacaagattctaggagtggacaagaatgcctctgaggacgagatcaagaaagcttatcggaaacgggccttgatgcaccatccagatcggcatagtggagccagtgctgaggttcagaaggaggaggagaagaagttcaaggaagttggagaggcctttactatcctctctgatcccaagaaaaagactcgctatgacagtggacaggacctagatgaggagggcatgaatatgggtgatttgagctagacggagtatggatgggcataataggcaaaactggatgattttactatgaagcatgggtatcagggaatgggattattcagtcgacgaatgcagtgttgtcactctgaggtgtgggagtggcagtagactcaggtatagctcgaatgtggagtgaggttagcggttacctcgataacgagctggtgggtatatgtataagtgtggatgttatatgagattgagttagttctatgggcgagcgaggcatggtggggaacaaaagatatggaggcacggattgtgatatttgcggggaaatagagtgggtggggaggagttgatttatagtatctttacgggtttgtaatgaaaccgaaagtaag

SEQ ID NO: 691702 - DNA, 227 bp, Homo sapiens
actgaatgtatttcactatgagtagtagaaatcatagttcataagggtatattggaagggaaacataatatatatatatataatagtcacagattgtccgttatcaaccagtataacatatacagctgcactttgtttgcctatgttcagtatataatggcttgttgtagcgtaattagtccaagctgagagatataacgcaaaacatacatgacatatttatgtct

SEQ ID NO: 691703 - DNA, 2120 bp, Homo sapiens
  misc_feature (2101)..(2101): n is a, c, g, or t
ccggcctcccacccagctctctggtcccggcggtaagatggcggctgccgcggagtgcgatgtggtaatggcggcgaccgagccggagctgctcgacgaccaagaggcgaagagggaagcagagactttcaaggaacaaggaaatgcatactatgccaagaaagattacaatgaagcttataattattatacaaaagccatagatatgtgtcctaaaaatgctagctattatggtaatcgagcagccaccttgatgatgcttggaaggttccgggaagctcttggagatgcacaacagtcagtgaggttggatgacagttttgtccggggacatctacgagagggcaagtgccacctctctctggggaatgccatggcagcatgtcgcagcttccagagagccctagaactggatcataaaaatgctcaggcacaacaagagttcaagaatgctaatgcagtcatggaatatgagaaaatagcagaaacagattttgagaagcgagattttcggaaggttgttttctgcatggaccgtgccctagaatttgcccctgcctgccatcgcttctctgtggctagtgacattctacgaatggattccaccaatgcagatgctctgtatgtacgaggtctttgcctttattacgaagattgtattgagaaggcagttcagtttttcgtacaggctctcaggatggctcctgaccacgagaaggcctgcattgcctgcagaaatgccaaagcactcaaagcaaagaaagaagatgggaataaagcatttaaggaaggaaattacaaactagcatatgaactgtacacagaagccctggggatagaccccaacaatataaaaacaaatgctaaactctactgtaatcggggtacggttaattccaagcttaggaaactagatgatgcaatagaagactgcacaaatgcagtgaagcttgatgacacttacataaaagcctacttgagaagagctcagtgttacatggacacagaacagtatgaagaagcagtacgagactatgaaaaagtataccagacagagaaaacaaaagaacacaaacagctcctaaaaaatgcgcagctggaactgaagaagagtaagaggaaagattactacaagattctaggagtggacaagaatgcctctgaggacgagatcaagaaagcttatcggaaacgggccttgatgcaccatccagatcggcatagtggagccagtgctgaggttcagaaggaggaggagaagaagttcaaggaagttggagaggcctttactatcctctctgatcccaagaaaaagactcgctatgacagtggacaggacctagatgaggagggcatgaatatgggtgattttgatccaaacaatatcttcaaggcattctttggcggtcctggcggcttcagctttgaagcatctggtccagggaatttcttttttcaatttggctaatgaagggcaaccacccagaacccagaaaatgcagattcactcagtttaatcttgaatgtggaaacagttcacctcctcccttcatcacgtctccgtgtgcttagagcagtttcgttttctcagttggatgccctgtgtctctgtgagtggggtggagcaaagggaaccaatgccgaagaccgagggcaggggagggaggcgggggtggacagggaggcagcttgtgaatttttgttttactgtttaactttattaaaaaagaaaaaaaaaaagagaataaaatgttttgacccttcctggccctttgctctggcatctgcattgtctccagtctgtgagccagagctgagcccgacctggacttggggtgcagcaagctgctgcatgcgggctgtgggcacccagcctagtggcaggtggggcactctgcctctcccagacctgtccagcatgtgagtgctaggcaggccccggctgtgcctctgggcccagcctaacatcagtcacagagaagcgagttcagaaagcatgctcactttacggtggggccccagaaatcactagaagctgtgtgtgtccaaagctcaggtgggtactaaaagctgtgtgcgtccaaagctcaggtgggtactnacctagacagggcagttta

SEQ ID NO: 691704 - DNA, 650 bp, Homo sapiens
gccagagacgcagccgcgctcccaccaccacacacccaccggcgccctcgatcgcctcttactccgggagccaggtccgagccaccgaccgccggcccagcgccatgcgccaccctccgcagccatgtccaccaggtccggtgtcctcgtcctcctaccgcaggatgttcggcggccggggcaccgccgagccggccgagctccagaccggagctacgtgactacgtccacccgaacctacagcctgggcagcgcgctgcgccccaagcatccatgccgcagcctcgtagcgcctcgtaccccgggccggccgttgtatgccacgcagctcctcttgccgtgctgctctgcaggagccactcgtgcccggggtggccggcatcctgccaaggcactcggtggacctccctcgctgggccgacccgccatcgagcagcggagtttccagagaaacaccctcggcaccccaaccgccagaacagcgcgagcacgctagccagggcacctgtagacatgaagccggctaatcgcgcgaaccttacattcggcgcacacggcttgccgccttcccggcgcccccagcccagacactacagactccctggcgggcccagcagcataagacgcagcctcacggggcccacggcacg

SEQ ID NO: 691705 - DNA, 1021 bp, Homo sapiens
gtccgcgtaaacataacagttaaaatacagcccatttagggcctcgctcataggtttgcacaccaaagtgctgcaaaaatccagcagacagcagagcagctagtacccatctgggcagcagggcacagcagcatgcagcttcatctcgcagcacatggcatacacagctcatatgctcaagttcaaaatagcacactcgttcacccagtgtgcataaagcttcgcaatgacaaggtagacacacactgaccccaccacacattgcacctatctcgacagcttggcaaaatcatagagtcaaccctatgggcttccctgacgtagaagaccatatcatggacaagagtcagtgatacttactgacgttgctataccatccgtacgactatatctagacacggtctcatttcatctaaactacgaaatgcaggtacacatggatgctgctcccttagggcaaatgggagaaaacaagaaaaaaagaaatattcaaagggagtgataaacaataggggcttcaaaggggaagaattaaccaaaaagtcattggaaacaaattgcaatatcatataaggaggcatggataaaatgaaatatgggaagagaaggcaagtcagtaacgtggacaggccagcaacgactcacaggaacaatatcccgcacaaaaagtggaaatgacacacaaagaggccaaagaagcacaacagacaagcccagaacctcaagggccagaaaacacactggtggtacctggccagaaaccgagtactgtaacaaaacgactaagggaaccccaacacatggctaccagcacttggggaaaatctaattgggagccaccaaaccaggcaatttagcacagagaagtccactcgaaattaccccaacacaaattggcaagagtggattaaaaacatctctcccatcaatgagaagcacgtcacttggtgcccaatacgcaacagacaactataaaatccatgctgagaggggaaatattgcgccacgacaattggagcat

SEQ ID NO: 691706 - DNA, 315 bp, Homo sapiens
  misc_feature (164)..(164): n is a, c, g, or t
  misc_feature (186)..(186): n is a, c, g, or t
  misc_feature (198)..(198): n is a, c, g, or t
  misc_feature (207)..(207): n is a, c, g, or t
  misc_feature (249)..(249): n is a, c, g, or t
  misc_feature (266)..(266): n is a, c, g, or t
  misc_feature (275)..(275): n is a, c, g, or t
  misc_feature (295)..(295): n is a, c, g, or t
ggttctgctctgccatgtatttagttttacccctatctcatctctgtgtaagaaaaaagcccatgttttaggggacggtgggctaggagtcaagatttctgatttctagtgtgttggcctctttgcagtcttgagtaagctttatgcgttgcctgggcttccancattcctcctttgcaaagcagnatggatttcacntcttatccnttaagacatcttccagactcttactctctctggtatttctangaattaacctctatccnttatccctngagcctctcgtaatctatcnatttaatacactaggcacga

SEQ ID NO: 691707 - DNA, 108 bp, Homo sapiens
ccacggtgtgcttgcggaagtgcctggttactcatcacttcttgcaaaagcgccactcacacccttcccatgagcatctgtaaggcttttctccgcgatcgaagtgtg

SEQ ID NO: 691708 - DNA, 131 bp, Homo sapiens
gtccgcccccgggtccgaattaagaaaaaaattcccatggctgggctgggggtggaggctttatttaccaagatgtttacttttcccttcccctactcatggccctaattttccctccccccccccttgga

SEQ ID NO: 691709 - DNA, 277 bp, Homo sapiens
  misc_feature (59)..(59): n is a, c, g, or t
attatcgagctctgtacatgtcgcggcgcgagacgcgtatcgatggcgcagctgaggcnggcgcaatatgcatcctaggctacttactattcccggagtatacgtaggcggctaacgtaaccaccgtacctctagaactatagctagcattgcgccaaatttaaagcgctgattattcgatcgcgcgcagattctgtcatgatgctcattgcaattggctcccaatatataggggccggggttaataataacctcagggtcgacgttccccatggcc

SEQ ID NO: 691710 - DNA, 404 bp, Homo sapiens
taattgattgctcaccgctcctcacctaagagattattttgaacagtatggaaaaattgaagtgattgaaactcatgactgaccgatcgcagtgcaaagaaaaggggctttgcctttgtaacctttgacgaccacgactccgtggataagattgtcattcagaaataccatactgtgaatggccacaactgtgaagttagaaaagccctgtcaaagcaagagatggctagtgcttcatccagccaaagaggtcgaagtggttctggaagctttggtggtggtcgtggaggtggtttcggtgggaatgacaacttcggtcgtggaggaaacttcagtggtcgtggtggctttggtggcagccgtggtggtggtggatatggtggcagtggggatggctataatgg

SEQ ID NO: 691711 - DNA, 1070 bp, Homo sapiens
  misc_feature (358)..(358): n is a, c, g, or t
gtggtgttggaagtcactcagagcctcacacgatggcagatcactaagctgtaatctatgtttccaagttgtaacaatacttgtgactatgctctatgaaaatagggacatttaaagatccaggtcaagaccttgtctgttttttgttttacacaggagttttgctatgtagctagtctagtacttgctgtacatgagacaagccttctgccttagcctttgtgagtggtgtgattactgaaatgtgccatctcacccgaataaatgttctaacataaaggagagatttactcagggtgggtggtgtccaggcagggagaaaaagggcattaaaaaaaaatacttagaataattactntggagaactgtaagcctaagtattaactgagaccatgagtctaagaagagagaattctttacagatgaaagatacatttttattggtgcttaagtagagcggaggtgtagctgccctgggtggcacacattctcagcactgatagtccagtccttgtccctgagcttgctgcttcccccctaggtatgcagtgctctgtggtcagctggctgagcatgagggcatctcgaaacgcatccagagtggctttagcttcaaggaacatgtggacaaagccatgaacttcagccagaagaacccaggggtcacttttcttcttggcacgtggtggctaccaaggtttctcacttgaactgggtttgcgcacaaacaaacgggtaccggccttgtttgaaagccccttaggcgtacgtgcaagaacgctgaaaattcctaaggtgagggatacagcggattcaaacgggagggataaaatccaaggggctgacaaaattgggaaaaccgtggcgcacaggggggaacgggccacgaagcggaaggccacaagagaaaggtcaaaacaggggaaaaacagctgagaaaacagcagcgaagtcagcccaaggaaaaaacagaagcatcgtgacccagagaaacaaactgcgcgacggaaccacgcagagaaacacaagcgagagtcgacgacacgccgccccctccttcctcatctctt

SEQ ID NO: 691712 - DNA, 513 bp, Homo sapiens
  misc_feature (34)..(34): n is a, c, g, or t
  misc_feature (257)..(257): n is a, c, g, or t
tctctctctctctccttatatatgtaatatattntctatttcattaccacctatactataaatgaacatacaacttgggactgtaaaaaaatatgaaacagcaaaacaattacatgtgctcttaccagtatctgagacttttgtacccaatgtaattataatgatgtttcggaaaaacttttcatttttctggctttctgaagattttgctatgtcagcaacattctttgtgctcatcagaaagtaccgaatactcnctgagggcatatgcagccttccacaaaacaaagtaaaaaaacaaattggacaagcatttaaaaaagcaaggaaagcaagtcagatacatacagtggcacatgtcagacagatgaagagttgactgcaacacttctttcatgttttccctgacgtgaggttaagtgttgaatataagcccttatgatttggggaatgtaatttactgttgtattctgttgattttaatataaatgattaaataaaatgttacagttt

SEQ ID NO: 691713 - DNA, 110 bp, Homo sapiens
catttgatagctacgaactccttgcagtagacataatcatcaccatccacactcaattgtattctgtattgcgctgtatgaactcttcggcagccctggattcatatatg

SEQ ID NO: 691714 - DNA, 354 bp, Homo sapiens
tgagcattcgtgaaggaagcggatcattgaaaacaggtgattacgagttcacaaattgcgaacactttgacataattttaacttcatggggtatacacggaagtctggagtttcagaaagtgattttcagttcccacaaaagtcgagcacttgagaggctagaactttcagtgttaactttgccctaaaaagtggagacgtattctgataatcataacagtcacatgattactgatgctcatctggtctgttaataataaagtcgttcatttggatgtattgttcttcaatgtaaattacaggaaactggatataggatttcgttgcaatgctattgaaacttctaaaactagg

SEQ ID NO: 691715 - DNA, 248 bp, Homo sapiens
acttcgtgaactcagccagccagattgcgatcaaacactgggcaccaatggcggcggcttcttcggcgtcactcggcgcacccgtttgaagacccgacggcctgggccaacctgttcgagctgtcggcaatcatcctcatcccggtggcgttggtgtcaccttcggtcactacgtgaaggacctgcgtcagagtcgcgcaattctcggctgcatgctggcgctgttcctgatcggcggcgcgacttcg

SEQ ID NO: 691716 - DNA, 1226 bp, Homo sapiens
ttttttatttttttttggtctaaaaacattttttattggggtaacaggtcccaaaacaggtcagttaataaaataaattctaaagaatatgtccctatgcaaagccctcccatccccaaaaataacgctgggggtaggcattgcccttcccccattgggctacctcgggtgttttcaaaacaacatgtttagggaagctacagggttaaacatcgtgggactgtgggacaccagtttccagtgtgtccccaatattccctagggttacagcagccagctaaagtgggttgcaaaaaacacttcactccatacccacaagcccaaaaaacatatatacagtgagcacacaacccacgaggaattaccgggacacccaaaaataccgacaccaaaacgaggccccccatataaaactgagagggcgacgagaggaaaaggagaaacaagtgacacacaattacacggcggcccatgaggacacaaacaaggggacaacggggacactaaggtatgtgcggacccatccttacaaaccatcataagcagcgccattaacaagcgcgcagactactgactacgaaagagcccaaacaagaatagaattaccccacaacaactttaggcaagagggtagacagaaacaaaatatgtgcggcgtgccacgctcccccacatacgacaacacagcggcgagaggacacggcgaaacaataacgactacattaaaaggggataagacgagcgcataaaacgacgataactttaggcaggggaggaagcaccacacacgacaacagtgttggcgtctgggataaatgcagtcgaaaaagctagggggataaataggaaccaaacaacgacaccaaaccagacaagatgcacacagaggatctcattgaggacaatcgttctcaataacacgccgatgtaccacacaagagaatgtggctgcataacaacaacactaacacaattacaccccaatttatataccataataacctaatatatatataaaacaccaacaccaccactaatatataaaacacaaaccaaaaatatttcattcaccaaccaatcaaataatataaccccccacaaacatatactacaatcatccaacatgaaaaaccaatacatgttaactcaaataaaaatatcgagcacccaacatattattagcacacacaccaatctataaataaaacacaatacaccaacaaaac

SEQ ID NO: 691717 - DNA, 240 bp, Homo sapiens
  misc_feature (88)..(89): n is a, c, g, or t
  misc_feature (97)..(97): n is a, c, g, or t
  misc_feature (105)..(105): n is a, c, g, or t
  misc_feature (110)..(110): n is a, c, g, or t
ggcttttaaatgctttttcatcttgttttttcccccccctcaccccatttaggtatgtatgagctaatctgtccctaagaagttctcnngctccttngtatcccnttctngtcttcctcctaccttttgtctcttggtgtttggactttttttttggccttttgtacaaagattagtttcaatgtagtctgtagcctcctttgtaaaccaattaaaaagttttttaataaaaaaaaaaaa

SEQ ID NO: 691718 - DNA, 783 bp, Homo sapiens
agtcggtccaagttccaaaactgaagaacttggagtctgatgtttaagagcaggaagcatccagcatgggagaaagatgtaggctgggaggctaggccagtctaaccttttcacgttcttctgttgctttatattcgctggcatctgattagatggtgcccatccagattaggggtaggtctgccttccccagccactaactccaatgttaatgtccttggcaacaccctcacagatacacccaggattaatacttcgcatccttcaatcaagttgacactcagtattaaccatcacactaagagttggtggtgcatgtctgcaatcccaggtactttggaagctgaggcgagagagttgcttgagcccaggagttggaggctgcagtgagttatgattgtcttactgcactccagccagggtgacagaccaaggacctgtctccaaatatatgtatgtttataatcagttggaagaaacagaggttcactacgattcagggattaccatattgaataatctaaaaggcaacttccagtatcacttgaagtttaaaaaactaagtaggatttcaaaaaagagttgaatgcagaaattgaatgaaacatggaaaaggatcaagaatgggtattttaataacaggtcccatgaatcggccaatatgaaatgtcaaataatgggtgtttactaaaaagaattggtagcattattggggaggttagggttttacaatacgcaattaagtgaggattcagaaaataaaggtgcgtaatcgaaaaggat

SEQ ID NO: 691719 - DNA, 102 bp, Homo sapiens
  misc_feature (91)..(91): n is a, c, g, or t
cataaatttttctccttaaagtcactctttcccattcctccatttctatcggtgttaagaaaattaaataattaaagtgagctccgtaggnacataagttaa

SEQ ID NO: 691720 - DNA, 250 bp, Homo sapiens
tacccagaagggggtggttaaatggacagcggggataataaaattacttttacttttccctaaaccaaaagcgggaataccagacagcagacagattcagtgatgctggcaaaagaaatacacacacacacacacacacacaaagcgtattctaagacctgcctgtagctagatgtgagcaaagcagacgcaggtggggggggcacaggaaaatacttctcactagggggggtacaaacagggggggcgg

SEQ ID NO: 691721 - DNA, 966 bp, Homo sapiens
  misc_feature (2)..(2): n is a, c, g, or t
  misc_feature (122)..(122): n is a, c, g, or t
  misc_feature (425)..(425): n is a, c, g, or t
  misc_feature (500)..(500): n is a, c, g, or t
  misc_feature (507)..(507): n is a, c, g, or t
  misc_feature (509)..(509): n is a, c, g, or t
  misc_feature (551)..(551): n is a, c, g, or t
  misc_feature (748)..(748): n is a, c, g, or t
  misc_feature (797)..(797): n is a, c, g, or t
  misc_feature (812)..(812): n is a, c, g, or t
  misc_feature (846)..(846): n is a, c, g, or t
  misc_feature (905)..(906): n is a, c, g, or t
  misc_feature (957)..(957): n is a, c, g, or t
gngcacaaagaccaggccctggcagccacgaaagccctccagatgccttgaggacgccgtctctagccgggtgggccacgaccgggtgggggcagacaatgacaagaggcaagacagccgcncagcccccctgccagtcccaggccctgtgccagagcctgccccctcctgtgccgggggctaaggccccagggcggcgggggcgcgggccagactgggcggtcgccgtgcccggcctccgcggacctgcggctcgggctcgcggcccccggcctgcggccccttgctcggggggggggcgtcctgcttggggtcccggccccgggagcgcctcagcctggcgctggcctcctcgggaccgccgggtctccgggtgccgcttctgtgatccctgcccaccttgctgttccgggcaccctcctgcntgccgcgcgtgtggggcctgtccctggggtacgcctcgctccgccggtccccgtcgtgctgggcgtcgtagccanctgccananggccgaagttgcaggcatgttggttcctggcgtggccgggancccgaggatctcctggcagagccgcgcatactcctcggcggggtctgcgtccgtctgcgtgtgcagggcctggtccaccttggcgaggacgatctggcgcaggttgaagaggcacctgtgttggcctgccgggactcaatgagcttctccaggagctcccggggcacggcgctgcctgtgcggtagtgccgcgacanccgcagcagcggctcctgctcccacacccagttctccagcatctgcganggcgcctccacaaantcccgctccacgtgggtcccgctgaacatggcgnactccgcctgggagcagagctggtgcatcacgtggccaaactcatggaagtaggtctcnnctcgtcatgctgcagcagcgagggcgcgtcggctgtgggcttggtgaagtnggccacatg

SEQ ID NO: 691722 - DNA, 147 bp, Homo sapiens
cgtcgtcctttctgctctgcgtcgaccttctgctcttggtatcgcaccatcgtcatcctcatcatcttcagctgcccgcttgcccgtagctgacgatgatgcggatgacgatgtcgataccaagagcagaagggggtaccgagctcg

SEQ ID NO: 691723 - DNA, 601 bp, Homo sapiens
gcatatgacggagagaatgtttaaacatgattatctcagagcttacgaagtttctctctgtagtgcatagaaatagggaattatatgacaaaggaggagaacaggcaattaacgagggtggatctggtggcggtttggctcccccatggacatctgtgatatgtttataggaggacggaggaaggatgcagagagaaaggagaggtaaaagatgttgtacatctagctcttcagtaatcctagaagacgttatagtagatggtgcaataagaagactgagcatctgggaaagaatgtgatttgtgacgaaatgtgaaggtagaggaggtaagaaaggagctagcagagtgtctgatcccgagattgtccgaggtatctggaatgcaagagtatagaataatcatctagatatggatcctagtgcacagtggtgtgcagcgagattcagtgctgtggttgcatggatgtgccatgtgcatggggagcggatcagatcctatatgatagatgtacaagtgtgcgacggaaggaagatagtacgagagaagaaaatgtgagacagtctgtattgacaatggtatgagagatgggcagaagatcc

SEQ ID NO: 691724 - DNA, 210 bp, Homo sapiens
tgcggagcctaccactgaccagtcctagttcattgatttttataaaagccctccctttttaaacaacaattttaaagcaaatttggctaacgcaccaagcagtggtttttccagtagggatggtacccactagcatggggcccgtccaccatcttgtttatctaagcaactctaacacacattatctgctcaaataaacaaactcggcag

SEQ ID NO: 691725 - DNA, 157 bp, Homo sapiens
gaagagcgccggagctggagctgaagctgatggcccctcggcgcatgaggacgtgctgggggaccggcctctccaggggcagtaccggcagctcgtaacacactcccattgaatacgcccgccctgcatccgcgcggcgcccgccctgccgcggccg

SEQ ID NO: 691726 - DNA, 150 bp, Homo sapiens
gtgcatgtgtaactattagggtcatctgagacagtggcgaggggaggggaggtaggactctgagatcaagcagacctggaatttacttctatgggccattaggaactgtgtgacgctgggcgcatctgtcttcacctatactagagatct

SEQ ID NO: 691727 - DNA, 377 bp, Homo sapiens
gcacgaggagagagagagagagagagagagagagagatagatatactgagagagccgtataagaacgtggtggttcgaatcctgagcagtgggattattgtgtcacttctagtatgtgtagagaatgcctatgattatttccaagctgtcaagatctgtattgcctgctccctggctgatccacttgacaccactccagattctacacatggattagtggtggagtcaatccatgactcatacatgtcatagatgttatgcacacgcgtattagctgtggctgtttatttgatagctgttgctgtgtatttaataggaatcctttctcatggattgactcgtgacttgaatactgtctctttacaagtatcttcttg

SEQ ID NO: 691728 - DNA, 310 bp, Homo sapiens
accccgcaactggttggatgccttcgaaggggggcgacgccttcttgggatgctttctgggaagctatcaatccccagccctcattcatagtttgcagccgaggagggacttcttccctgtccttttccaaggaaaagaatgctattgtcgtactcacctcccacgaactccggggtcttttgggagtattctcccctaaccattacaactatttttttggatactcgctcttgcatgcctcccccgtccttttttctttgccagttccctggggacagttaccagctttcctgaatggattcccggccc

SEQ ID NO: 691729 - DNA, 748 bp, Homo sapiens
  misc_feature (239)..(239): n is a, c, g, or t
  misc_feature (313)..(313): n is a, c, g, or t
  misc_feature (357)..(357): n is a, c, g, or t
  misc_feature (366)..(366): n is a, c, g, or t
  misc_feature (393)..(393): n is a, c, g, or t
  misc_feature (400)..(400): n is a, c, g, or t
ggaaaatgattttacttagcaatgttatcttggtgtgttaagagttaggtttaacataaaggttattttctcctgatatagatcacataacagaatgcaccagtcatcagctattcagttggtaagcttccaggaaaaaggacaggcagaaagagtttgagacctgaatagctcccagatttcagtcttttcctgttttgttaacttgggttaaaaaaaaaaaaagtctgatgggtttnaattgaaggaaagattggtactacagttctttggtggtaaagagtggtgtggttcttttcccccaaagtggttncagcaatatttaaggagatgtaagagctttacaaaaagacactntgatactgntttcaaaccagtatacaagataagctnccaggcngcatagaaggaggagagggaaaaggtttggtaagaaaccactcaagataacaggaacagtgaagtaatccgtacctggtgttggtcggattactaacataacaaataaccaacccttccctgaaaacctcaatgcatacatacacatatatacacacacaaagagagtactcacctgacagtggttccttcagttgcggaatatagaatggcaagttttacagcagcccccatacagggatctaacctttttagaaaagcttaattcctttaccaaacggtggtactttactacacagttcccggaacactacgctcaagaagaggtctcgagccaaagaagctaaaa

SEQ ID NO: 691730 - DNA, 285 bp, Homo sapiens
  misc_feature (71)..(71): n is a, c, g, or t
ttcaacagtgaatagtctcttgggtctgaatatacctgggtttgtttttgtgtttttgagacggagttcgnctctgtcggccaggttggagtgcagtggtgcaatctcagctcactgcaacctccccctcctgggttcaagcgattctcctgcctcagcctcctgagtagctgagattataggcctaccaccatgcccagccaatttttgtatttttagtagaaacgggacttcaccatgttgcccaggctggcctcgaactcctgacctcaagtgatccacccg

SEQ ID NO: 691731 - DNA, 959 bp, Homo sapiens
aacgcggctgaggaaggggaagatagaaggacaatgtggcaaatgatccagattatgagccaatgaaggatcagaaactccagctagagtgcatccgaagtgatgctagatgtagtgtggtcttgacgggtaagcctgatatgtaatagctcgtaagagatataatcttatttacttagcagaaccttatgttttagtatgttactgggtagaataggtaatctgttcttaccaggatcagggaactgtttttttgaagaccaattcggttctacctagtcatttcaaactaatctgactggcagctatggttgactggcctagatagcggtcaggcgtgtcattcatggctactgtaatgtgggttctgtctggaagtatttgaatgtaagcggctttggagatagatgtataatgaatattaacaactagtttggaacgtgaaatactatttgttaaccatacggtgaaagagttattctgtgtggagagccaaggtgcattgaattacagggggggtggagacacagagtgatggcggcgttggaagtagagttgccctccagtgtgcttggtaaccaaggaatgtgggtgggtatgatttaggacatttgtggtaaatatctagctttgcaagtgacttttacctgcgatacaacttcacaaggtttggcccggcccgcgtaatgtgggtggaacgcggcagggaaacatcgggctccggggagaatcacgacggcggaggacgtgctcacatatggctgggtcccaagggagggtgtacacgggcttgccagataccgggtttactggattggactgacccaggaataacctgttgggggggactgccgccagaaggattctataacacacaagaaaggcgggggggggagcaaaaacaacggtcagatggtatcaagagacgtgtacactggcagtgtaaacaacccggtctc

SEQ ID NO: 691732 - DNA, 354 bp, Homo sapiens
gctcgacgtcggtttgagcctggacgggctgtatgtgccgggccgcctgcgttcccgtggttttgcctggcgattgcggcgaatctgcatcgggtcaaggacgcgccggtgacgggcagtggcgctatctgggctggttgctgctgttcagcgtgatcagcgaagtgccgtaccggatgttcattgacgacgccgatacgctcaacgtactgccgaccctggcgctggggttgctggttgcccggggatggcagcagaaggcggtcattgatcgaggattggcgttgatcgcactggttttggcggggttgttttcggcgcagttgatgttcgggttttttggtgtgctggtcg

SEQ ID NO: 691733 - DNA, 209 bp, Homo sapiens
tcgacctttacaccagacacagcttctaagattgcatacagtgatctccttccatgacttctgccactaactactactccaggccaccactgtcgcctacctggatagctatttatagccttcaacaactgattcctccttgattcactctagctataatatagtatccactataatgcttatccaataacaccctattcaactatatt

SEQ ID NO: 691734 - DNA, 581 bp, Homo sapiens
cgatctagaggaccccggaatgtgtggtgtatggccactttgtaaaataattgatggcttctaaatatattaaacatagaattgtcatatgacccagaaatttattcctaggtatacacccagattattggaaagaggtgttcaaacacaaattgtacacaattatttttagcagcagtatttaaaatagccaaaggctgaacacaactcaaatgtcaataaaaatattattggataaacaaaatgttatatccatgaaattgaatgttatacggttataaaaagaaataaagtaccaatacgtacatgaaccttgatagcattatgccaactgaaagaagtcaggcacaaaaggccacctattgtatgattctatttagatgaaaacagaataggaaagtttatagagacagaaaacagatttgtggttgcttaggattgagtaggggatgagtctataggatgttaacagctagagaaggtggggtttctttttgaagtgatgaaaatgctctaaaattcattgtgatgatggctccacttatctgtgcataacaccacacaattccgggtaccgagct

SEQ ID NO: 691735 - DNA, 627 bp, Homo sapiens
  misc_feature (532)..(532): n is a, c, g, or t
  misc_feature (626)..(626): n is a, c, g, or t
cctgtgagtgaacggaaggggtgtcgtctgcagatccctgccttccatactcctgtgttcaaggctgcaaattgggagaagcttctgacttcatcgtccgccagggacactgatccaggtgccgtcctctgcaggggaagttggttgctacaagatctgttcctgtggacaaagtggcctcttggaaaactgtatggaaatgcactgtatcgacctccagaagtcttgtattgtcggaggaaaaagaaaaagccacggaacatcctttactattgattgcaatgtctgttcttgttttgcgggtaatttagtgtgttccacccgcctgtgcctcagtgagcacagttcagacgacgaccgccgcaccttcacaggtctgccctgtaactgcgcagatcagtttgtcccagtgtgtgcacagaatggacgcacttaccccagtgcctgcatcgctcgctgtgtgggtctccaggaccatcagtttgagtttggaccttgtatctccaagaatccctgtaatcctaaactctgncccaaaagccaaaggtgtgtggcaaaaccacaagtctggctgacgacttttgataaatttggatgtaggccatatgagtgtgtgtctagaaagnt

SEQ ID NO: 691736 - DNA, 268 bp, Homo sapiens
tggttatcagctaatactggagcagtatgttcctgaatccgtgcccaaaacatcactggagaacagctcctgcagttggatggaaactaaacttaaggctcttggaatgacagcatcccaggaccgagcagtggtcaacacagacactcaaggaaatgaagatgtctctagagaaggctcggaaggcccaagagaaaatggcaacacaaagagaaaagctaaggagagaggagcaagagcaaatgcagagaaaccgtcgaattcgatg

SEQ ID NO: 691737 - DNA, 108 bp, Homo sapiens
agaggtatccctacaagtagaagagacgaaaggactgagcgcatctgggagacatctttggcctgcttgctacacttggggttatagtcacacaggccgggccacccg

SEQ ID NO: 691738 - DNA, 115 bp, Homo sapiens
gacctagaggatcccgtgatgttatccccaacacattctaaagaaactaagtagggcatgtacttggatctctgcgtcgataaccattgcttctctccttttgtgcttggtgctt

SEQ ID NO: 691739 - DNA, 435 bp, Homo sapiens
  misc_feature (84)..(84): n is a, c, g, or t
ctcctcttcagagatcctgaccatgtgggtcatgggcggggcatgagtgatgtgatgggaaactggctcctggctccagtagangtgaacaactggagcctgacaggaagtccctggcactggtccagcccatcaaaccaggtaagtccttggagtctgagtagggacaagagactgttctgtgctttggcagggatcaggaagatgttagaatgtggttgttggaacttatctttggagctgaacaaacatggctttgcatctccactttgctatcaactgagtggctttaattaagtggcttcatttcttagatcctcagtttcttcatattcacctgtaaatttttttttttacatttttagactgttgagggcggtaaattagatcatgtacataaagcaccgagcactgtgctagacacattggtactta

SEQ ID NO: 691740 - DNA, 393 bp, Homo sapiens
acatgtacgccgggttagcagatgtgctgcttttagtattcaaagagttggatatcctccgggcaatcttaaaagtacaggcattcatgtgctggaggtatacggcccatccacttctctcccatgcaggtgcgccagcagatccatccggtcagagccaaataagcatgtgggttgggccatccacatgggccacggtgatgtcgacagcccgcaggctccgtttctgcaggctgcctcagatggtctccttgagctggttcttcacctttggcgttgcgatcttttccagaagtccctgggcttgttctgcagacataccagccttctctgcagccgccaggatgctctgcggctcggtgatgtcttcattccttaacccgagcgctacca

SEQ ID NO: 691741 - DNA, 175 bp, Homo sapiens
gagagcaagtagagcccgaacagacgagctactagactgctaaagagcacccgctatgtgcaatagtgggagattataggtgagcgacaactacgagctgtgatagctgagttgtcagatagatcttagtcactttaatttgccacagaacctctacatctctgtaaattaactg

SEQ ID NO: 691742 - DNA, 262 bp, Homo sapiens
atgttggtagtctgctgacgtgtggatttagttaacatttatcaatctgaattagaatattctatttctgtgtctttctcacatatgtacaccagtccctgtgaagataaaactccatgttctactcagctcatagttagccccagcacctagcccagactcttggtcagtgtgtcaagtgatgaatgaatgaagagaacatatataaatggacacatgcataaatcctcttatcataattcccagggaattctatcgagtg

SEQ ID NO: 691743 - DNA, 252 bp, Homo sapiens
aaccacgccaccggagaaggcttcagagagacagcagggccctggagtagcagatataggttagaattcgctcccactcagctgagtaactctaagctagttcactgggtgccagccgccacagtaagtgtgcagtacccacttggctccctgctctttttagcacagcagctttatgaccacttacattagagcttgttctcacacggcttgtaattgcatcccttctccggtggcgtgtggccgccactg

SEQ ID NO: 691744 - DNA, 123 bp, Homo sapiens
gcacatgaggtgttccattgggggtgtcataaccaatgatgcccttccttgttgctggctccagatccacattgtccacgacctgtgccagccctgcccaccagctggagtttctcagctgcg

SEQ ID NO: 691745 - DNA, 1630 bp, Homo sapiens
  misc_feature (690)..(690): n is a, c, g, or t
  misc_feature (1123)..(1123): n is a, c, g, or t
gcttgtgtttgttagccgcgacgtgtgcgtgtgatgctgccgcacgacaatgtagaatcctatgaccccctttgtgggttctaaagcaccctattatcgtagtttttggggggacacccctcgtggagactccctccctgaagggggtcgccagcacggaggtgtgtgcaccacaatagatgcccatggcgcttgttgataaataccgtgtcggggccccctcattgtacctgttttagccggggtgtcttattagggtttttgccgtagggctccctttgggggtgtggcgccgacaattttcctgcgggccactcacgtgggccgaagagtaatattttgaaagagactatatattttttgttgtcacgccaacatgtatcatcggggtcctggtgttggagcacacctcttttccccccacagagaaaaaattgtgtgcggcaccacaacaactaatacctcctctcgtaaagagtgtgagaccgcccaccccacgccgtgtatttctctcttgatatagggggccccccccccaccgcagaggggagaagaccccttctctcgcgagaggaggaagactttttctcacttgtcacaacactgctcacacatgttgtagatgatacttctcacccccctcctctcgtttctgcgagataagagatataatataaaagaggaggtctnctctccggggtgtgatgagacacacacagtgggtgtgcgggggtgtaaaacacagagacaaagggagatacctcttggggttgaaacccgcctgttttcggcggagactcatctatgttgtgagagtggtcacagctggtggtgacacccgagacacactctgagttctcaaacagagggtgtgtgtacacacactctggggtcgtcttcttctcccttctgatcaccacacagagtgagagaggagtgtctctgtgtggtgatatggtctctcacactactgtctctctcacactctcacacgcgctgtgtgtgatactccacagagagagagatattgtgaggtctcttctctgtgtgtgtgatgtatactcttctcaggaatatttttctcttgttgggtgtgaaaatataacacactctcccacagagngtgtgtctggagtaagtagagagagacccacagagtgtgtgtgtgtctctggtgtgttcaacagtagagtttctctcacacagccccacgagataagagtatgagagttgtaatactctctctctgagaagagagaaaaagacgacactctgtgagagctcttgtgtttcacacatatttcacagccggctctgttgagtagttcacagccacgtcccccacacacctgttataaaacacacacagcgatatatactcacggagagaaaaatttgttgggagtgtggtgatatctcatagtgtctgtcttgagaaaataagagagaactctgttttcacaccacagggtctgagtgagataaaagattcttaaagagagtttaaccctgtggtcaccacaaaagataagaatgtccccgatgcgccacctttagaaccctaccttgtgtgataaaagttataatggaatgcccattataaggaccctatttgtgatttgtggaaata

SEQ ID NO: 691746 - DNA, 1375 bp, Homo sapiens
  misc_feature (46)..(46): n is a, c, g, or t
  misc_feature (69)..(69): n is a, c, g, or t
  misc_feature (73)..(73): n is a, c, g, or t
  misc_feature (75)..(75): n is a, c, g, or t
  misc_feature (86)..(86): n is a, c, g, or t
  misc_feature (94)..(94): n is a, c, g, or t
  misc_feature (110)..(110): n is a, c, g, or t
  misc_feature (130)..(130): n is a, c, g, or t
  misc_feature (607)..(607): n is a, c, g, or t
  misc_feature (1350)..(1350): n is a, c, g, or t
cggggaacggggggcccccaacaaagggccgcccatcgggatcacngaagccacgcgagaagacatgangaangngcctaagaacncacaccgntggaacgattctgccngcatcaacctggcagggggntttgactgtctctgcccctctggccctcctgctctggtgactgtcctcatgaaggggggctgaagcacaatggccaggtgtggaccttgaaagaagacaggtgttctgtctgctcctgcaaggatggcaagatattctgccgacggacagcttgtgattgccagaatccaagtgctgacctattctgttgcccagaatgtgacaccagagtcacaagtcaatgtttagaccaaaatggtcacaagctgtatcgaagtggagacaattggacccatagctgtcagcagtgtcggtgtctggaaggagaggtagattgctggccactcacttgccccaacttgagctgtgagtatacagctatcttagaaggggaatgttgtccccgctgtgtcagtgacccctgcctagctgataacatcacctatgacatcagaaaaacttgcctggacagctatggtgtttcacggcttagtggcncagtgtggacgatggctggatctccctgcacaacctgtaaatgcaagaatggaagagtctgttgttctgtggattttgagtgtcttcaaaataattgaagtatttacagtggactcaacgcagaagaatggacgaaatgaccatccaacgtgattaaggataggaatcggtagtttggtttttttgtttgttttgtttttttaaccacagataattgccaaagtttccacctgaggacggtgtttggaggttgccttttggacctaccactttgctcattcttgctaacctagtctaggtgacctacagtgccgtgcatttaagtcaatggttgttaaaagaagtttcccgtgttgtaaatcatgtttcccttatcagatcatttgcaaatacatttaaatgatctcatggtaaatgttgatgtattttttggtttattttgtgtactaacataatagagagagactcagctccttttatttattttgttgatttatggatcaaattctaaaataaagttgcctgttgtgacttttgtcccatctactgcatacttagtgctgagatccctgtaaaatgttttgatgaaaatatgtatgtagagtccagtcgcattatacatacatttcatagtgctgaaccttcttaaatgcctactcattcagcttaaaacaggctgaagccaagtatgacaaagaggggaagggccaaaaacataatcaaagaataattttaaagagaantcttgtctctcttgcaaaaaaaaaa

SEQ ID NO: 691747 - DNA, 121 bp, Homo sapiens
agttcgacggagactctccaggatacggaggatagctgctggattatacgtatcctggcagagtccaataagaattcgtgggctcgctagtcgccagtacacgtgcaggaggaactgcatc

SEQ ID NO: 691748 - DNA, 823 bp, Homo sapiens
  misc_feature (24)..(24): n is a, c, g, or t
  misc_feature (65)..(65): n is a, c, g, or t
  misc_feature (67)..(67): n is a, c, g, or t
  misc_feature (72)..(72): n is a, c, g, or t
  misc_feature (76)..(77): n is a, c, g, or t
  misc_feature (80)..(80): n is a, c, g, or t
  misc_feature (172)..(172): n is a, c, g, or t
  misc_feature (174)..(174): n is a, c, g, or t
  misc_feature (178)..(178): n is a, c, g, or t
  misc_feature (203)..(203): n is a, c, g, or t
  misc_feature (270)..(270): n is a, c, g, or t
  misc_feature (408)..(408): n is a, c, g, or t
  misc_feature (418)..(418): n is a, c, g, or t
  misc_feature (763)..(763): n is a, c, g, or t
  misc_feature (804)..(804): n is a, c, g, or t
ggccggcagcttcaaccacttggncaccttgcccaggctcctcttcacgggctgggccgtccctngnatggncttnnttnggaccagcgccccctcctcagcagctggctcagacttaggtgcagggtcaggggctggcaattttgaaggggacccggcggccctggacatntncctngccaccagcacatcggccgcagatngggagatggcatgctccagcaggccaggctccaggtagacacctgccggctcctcggctcccaagtncaccagagcggccgggaagaggttcgcctgaaagagggtctgcgtgtggtcgtccaggactgtttttggaggggtgatgaacaggtaaaatgacagctcggggttccccaggtggctcctcacgaagtctcgcaagtnccccactgtntcgctggggcggaagaagccctgtaggacgtagcggtcggggaacaggaccctcagagccacctttgggtagcgctccagcttctcctttatctgcgcctccctgaaggccttggtcaccaagggggcttcttccaggcgcttccgctcactcttgagctgggccaagcgtcttctcacgtcgtccaccgtcagctcaaagaactcatcaggcagctccgctggccaggcctgcagccgctcctccaggtcggggtggcacacaccgggctcccggtccacgggctcccggtccacgggccgctcccgctcctgctcctgcttggggatcccgctcccgctcctnctcctgctcctgctgggggatcctgggccgacttggacttnttttggtttggagggggct

SEQ ID NO: 691749 - DNA, 849 bp, Homo sapiens
  misc_feature (81)..(81): n is a, c, g, or t
  misc_feature (824)..(824): n is a, c, g, or t
ccctcccagtgcacattgctggccagtgctgtaaggtctgccgaccaaaatgtatctatggtgtttcacggcttagtggcncagtgtggacgatggctggatctccctgcacaacctgtaaatgcaagaatggaagagtctgttgttctgtggattttgagtgtcttcaaaataattgaagtatttacagtggactcaacgcagaagaatggacgaaatgaccatccaacgtgattaaggataggaatcggtagtttggtttttttgtttgttttgtttttttaaccacagataattgccaaagtttccacctgaggacggtgtttggaggttgccttttggacctaccactttgctcattcttgctaacctagtctaggtgacctacagtgccgtgcatttaagtcaatggttgttaaaagaagtttcccgtgttgtaaatcatgtttcccttatcagatcatttgcaaatacatttaaatgatctcatggtaaatgttgatgtattttttggtttattttgtgtactaacataatagagagagactcagctccttttatttattttgttgatttatggatcaaattctaaaataaagttgcctgttgtgacttttgtcccatctactgcatacttagtgctgagatccctgtaaaatgttttgatgaaaatatgtatgtagagtccagtcgcattatacatacatttcatagtgctgaaccttcttaaatgcctactcattcagcttaaaacaggctgaagccaagtatgacaaagaggggaagggccaaaaacataatcaaagaataattttaaagagaantcttgtctctcttgcaaaaaaaaaa

SEQ ID NO: 691750 - DNA, 119 bp, Homo sapiens
ttatgttggagtgggagggagacggtgtcttagcgtaggctcatctatgtactgcatttatagagatgtagctttaatatttctgagagatgtaaaacattctgctttcttagtcttac

SEQ ID NO: 691751 - DNA, 989 bp, Homo sapiens
tagtaaaggcagagtttcaccatggttgggccagggattgttctcgatctcctgtgacctggttgatccgcccacctcggcctcccaaagtgcggggattacgggtgtgagctaccgcacccgtgccaatataaactattctatagctcaggggcatagtgcaaagcctttaggcgtgaccccgtgaactccagaagcggctctctcggaagaacaagccattttctggtgagcgtgccccgagtggtgataacgtgagtgtgtggtgcagatagcgtgagtgtgtggttatagtggccttctccacatctcatacgtgacattgtgctcaaaacacaaattgtgactgtgcaacagcggacacagtgtgtggaggggcggcgcgtgacattattgcacaaacacaatatactcttttcaaatagaaaggtgctcctttcagtggagctcttcttctctcttcctcttacatatcacgtgacatcaccttcagtgtgtagaaaaccactatcaaatttatttcacccccgagcaccttaatcctttgttacaccccaaagtggtgcccatcgttcattccctagggtttgggggactacaaccgtggcaaagggagaagtaactgcactgatgaaatactctcataaaccattaatagtgtgtgtcccaataaaaattcactccctcaaataaatctggagagatagacaaaacctcccacaccctttgttacagcccttcatccatgcccctccaatacatcaattcacaaagaagattaaagagggacagacagcatgaaaaacgtcagagcagacccaaggcccagataaggattaccacagatacaggccccagagaactcccctaggagaaatacaaccaaagatacccacgagagggggacaaaaaacccgtaagaactctcaagataataacccaataccaataagaaaattgggagccagtctataaaaaaacgcgaccga

SEQ ID NO: 691752 - DNA, 170 bp, Homo sapiens
gtgctccaggacactggcacgtggcagagcgactctcttcctttcgccctttccattgtctaccccaccgcctccccttgaaagtgttcaggtttaactttccctccctattcccttagttcccgttggtaggcaggtctccctcccctgcaatcccataccatgttcaa

SEQ ID NO: 691753 - DNA, 759 bp, Homo sapiens
  misc_feature (26)..(26): n is a, c, g, or t
  misc_feature (414)..(414): n is a, c, g, or t
  misc_feature (494)..(494): n is a, c, g, or t
  misc_feature (533)..(533): n is a, c, g, or t
  misc_feature (540)..(540): n is a, c, g, or t
  misc_feature (566)..(567): n is a, c, g, or t
  misc_feature (582)..(582): n is a, c, g, or t
  misc_feature (594)..(594): n is a, c, g, or t
  misc_feature (606)..(607): n is a, c, g, or t
  misc_feature (613)..(613): n is a, c, g, or t
gcattaattactgcgcttaatcagcnaggctatcagctggggttattctcatcagatggctttaccagcccgctgtatcgccaggcattgttgtcagatttctcgatgccgagcgtacgcacccaatccgacgagcagaccgccacgcaggggatcaactggctgggacgctacgcacaagaagataaccgctggttctcgtgggtttctttcaatggtactaacattgacgacagcaatcagcaggcatttgcacggaaatatagccgggcggcaggcaatgtcgatgaccagatcaaccgcgtgctcaatgcactgcgtgattctggcaaactggacaatacggtggtgattatcactgccggtcggggtattccactgagcgaagaggaagaaacctttgactggtcccanggtcatctgcaggtgccattagtgattcactggccaggcacgccggcgcagcgtataatgctctgactgatcataccganctgatgacgacgctgatgcaaggcctgctacatgtcagnacactgncagcgaatattcgcaaggtcaggatnngtgcaacctcaacgncgcttactgggntaccgcacggannaacgantacgctggcgagtaaccaccacgaacaagacgcggtactgaaccaatagcggaaactaccgcactagacacttacgtggtggaaagagtgacagatgaaaagcacagaaacgatggaatgcactgcatgacacacgcaaagcgaaa

SEQ ID NO: 691754 - DNA, 368 bp, Homo sapiens
tacaggacctcgcgtatccgtacactcccaatatcttacatttcgtctgcgtaagtaatgcgtaactaggctataatgacgcacttctccctgcgtcatggattcaaggtcttttaatcacttcgtttaatctctttaaagatcgcttcaatatttaatcactacaatttaaactaaactttaagctgttaagtcaccttcattttaatctaaaagccatggcctttctattggtattaattcggggcctctgtagtcctttctctcaattttcttttaaataccattttttactccatgaaggagcttcatctcaacctcccgtcatgttttagaaaccttttatcttttccttcctcatgctactc

SEQ ID NO: 691755 - DNA, 207 bp, Homo sapiens
cccctggtgcccactggtagcctttgggcccacccagcacccacctgccactctagggcccacccagcacccgcctgatgagcctttgggccccccagcacccgcctgatgagcctttgggtcccccggcacccacctgccagcctagggcccgcccggcacccacctgccagtctagcgcccacccggcacccacctgatgagcct

SEQ ID NO: 691756 - DNA, 649 bp, Homo sapiens
gggtagacctgtgggggatatctcatgtgtgctggacagatggactggctggggacaatggtggctggctggtctgagagtggctgtgagcgtcaagtcccctgtcggttcctccgtccctgagtgtccttggctgctgcttgtgccctgcccagcgcctttgcatccgctcctgggcaccgaggctgccctgtaggatacttgcttgttacttattacggctagagtgcatcatggacctgatctaaagaaaactgcatttcaggacctgttaagtgctacatgtccagtttggagtgtccaaaacgtgttctcgtgactcagcaaattccttgtcagaatccattacctgtaacatatgtggccatggctcagcgggtcattgtgtccttcaaattcttcccagctgcgttccttatgcaagcacaaaagcttgtctccagtcacaagccggttcagaatcagaagcagaagcaatctgcaggcaaccagtgtacctcatcctgtctccaggcactgaataacacccaaaagagcaagcagcccctgagatcgggacctgaaactaatcctgaggaggaacctgggatcacaaaggaaacatgcacgaatcaaacaaagatgcccgtcggctttggaagactttgaa

SEQ ID NO: 691757 - DNA, 128 bp, Homo sapiens
tgatatgatcttccccattggcatacgacacaatcctgaagccctcgggacaggagctgctccagcaggcacgtagtgactggaaatgtttatcctctagcatgctgctcccacgcacttgacctcga

SEQ ID NO: 691758 - DNA, 189 bp, Homo sapiens
ctttctaggcaggagagtgtgaggcagtgaggagggccacacccatcggtaggcaggagtcagtgcgatgatacagaggggggacgatactgccagattcaggataagttcagaggtgaatgccaagactgtgggatcagttggatttgctgcggctcggcagcgaccccgtgtcgggctagtcggggg

SEQ ID NO: 691759 - DNA, 261 bp, Homo sapiens
  misc_feature (55)..(55): n is a, c, g, or t
  misc_feature (75)..(75): n is a, c, g, or t
  misc_feature (93)..(93): n is a, c, g, or t
  misc_feature (138)..(138): n is a, c, g, or t
  misc_feature (178)..(178): n is a, c, g, or t
  misc_feature (218)..(218): n is a, c, g, or t
ggaggattgcttgagcctgggaggtggaggttgttgtgagccaagatcatgccantgcactctagcctggagganagtgtgagaccctatcgnaaataaatcaattaaaaaaattaaaattaggtttggctgggtgtnggtgcacgcctataatcccagcactttgggaggctaaggnaggattgcttgagcctgggaggttaaggattgcagtgggntatgatcatgccactgcattcccacctgggtgacagagtgagc

SEQ ID NO: 691760 - DNA, 164 bp, Homo sapiens
ccctataccagccagacaccaaaaaaagtcgtagccttctccacttcaggtcaactaggactcatagtagttacaatcggcatcaaccaagccagcacctagcattcctgcgacatctggtacccagcgcctctcttcaatagccatgacatatttatgtagct

SEQ ID NO: 691761 - DNA, 977 bp, Homo sapiens
atgcccctcatggacataactgtcatactatcatccatcatcgcagtgtctaggaataatagtgtatcgctcacaccgcatatcctcccgactatgcctagaagtgaatcattgctatctgtttgattcatatatacgttacctcatcataatccatcacatcagccacatcacccatctcttagccatactaatgtgtgctctaattgcgcatagctagtggtttgccgactgcgactgaataggtgtggctttgcacctactatatctctacactggaccaataaatcttgagactaataattaagtaacttaatcctacatccatatatctcaaatcgataaatggttattcgtacctcaaacaaatttgagaattagtacccatcttgaacatttgaatcgtatgttcccacagaagagatctacactcaatgtgcgacactccatactagaaatcacggcaccggctctatatctacataagtgatcatacacacttcatgactactctattctcaaatccataatcaaacaaaataatcttactttaggttagttcgctaaagccctttttccttcacgtactcctcatatactaattccatctatatgaatgagctaatgagcgtggattcttaccaatcacaagtctatggcaaagtcttagcatattcttcagtgggccactttggaggaaataaatatggtaggctctaccgtactactctactataaacattcttaattaaatcattcatatgctcctgaaataatcctgtgttctatctacttccgtacaatccttgttccagacccggtattatttcgcgatgggacggagatgagttgaacgttattcatttccttcttcccaagaggggcccccaaggggggaagccgccgagagtgaaatgggcgtcccggaaagaaactctgcaatttggggtaacctgagacctaggaataggggagcc

SEQ ID NO: 691762 - DNA, 342 bp, Homo sapiens
tgcaggatggcgacacatcaccgtgatcaggacctcaaggatcagggcacttccctggtggtcaaggtcggcaccaaggtcaagaacatccgcctgtgcgacggcgaccacgatatcgactgcaagatcgacgggatcggcccgatgaaactcaagtccgagttcgtgcgcaaagtctgaacctgctgcattccatcccgcgcccgccgcgggatggcgtttcgcactctgcgttgatcgaacgcaatacccacacagaaaaacccagaaattgccaatagacgcttgctattctacgaataagaattattctcattgaaacccatcaaggagaacgaccca

SEQ ID NO: 691763 - DNA, 534 bp, Homo sapiens
ttttattctaaatatttgcctgtacattccagagtgaatctgtagagcgtaatgtggcaagtcaagactgtgagtcaattagtgaggtggactttgtaccctatggtaagttcttaaattatactatactcttggcttgcaaacatgtttagaagagtagtttgtatggacatttggcatctttagcattctcatctatgcgtgtgtgtgtgtgtgtgtgtgtgtgtgtgtgcgcgtgcacacgtgtgcctgtgtaatccagagatccatattagatttccttctcaatcactctccggattattctttgagataaagctctcactgaacctggaactcaccaacctggctatactcgctagccagcaagctcccaggatccccttgactccatcaccctagcagtcagactgtagatgcaagccactacatctgatttaaaacaaaaccaaaaacaaagaaaaccatggttctagagatcaaattaaacaaatttactgattgagccatatctccagcttttatcacacagtt

SEQ ID NO: 691764 - DNA, 126 bp, Homo sapiens
ctgcagaaagatttcaagctttcataaccagttgtgtccggagcacgtgatcatgcctgtatcccaggcactttgggcggtggaggcaggcagctgacctgaggtcgggagtacgagaccagcctg

SEQ ID NO: 691765 - DNA, 343 bp, Homo sapiens
  misc_feature (16)..(16): n is a, c, g, or t
  misc_feature (23)..(23): n is a, c, g, or t
  misc_feature (55)..(55): n is a, c, g, or t
  misc_feature (59)..(59): n is a, c, g, or t
  misc_feature (94)..(94): n is a, c, g, or t
  misc_feature (110)..(110): n is a, c, g, or t
  misc_feature (167)..(167): n is a, c, g, or t
  misc_feature (221)..(221): n is a, c, g, or t
  misc_feature (241)..(241): n is a, c, g, or t
  misc_feature (263)..(263): n is a, c, g, or t
  misc_feature (342)..(342): n is a, c, g, or t
gcgccttgggattgantgtccangctcgcccggctcgtccgaagcgccctccgcnaacngaaaaaaaaaaccgcaagcaatgccgtgttctccntgcggctcggaaaaanaataagaacaataagtgtttcgtctcccaaccaatttctaaggaaaaaaaaagggancgggccaagaaaaaccactggcagctttgaaaaaagggaaaactttaaaaaaanttgaaattggaagcctcaangtgaaaaattaaaaaaacggantccggcaaaattcctctaactcgtcttgttgctgaataaaagtgcccctgtctccaatttttctccaaatcctgggaant

SEQ ID NO: 691766 - DNA, 2644 bp, Homo sapiens
  misc_feature (46)..(46): n is a, c, g, or t
ggagtccaggcaggtataaggccacctccgcaggccaggacaaccnagaagcaaaagagcagagctaccatgtcctcttggagcagacagcgaccaaaaagcccagggggcattcaaccccatgtttctagaactctgttcctgctgctgctgttggcagcctcagcctggggggtcaccctgagccccaaagactgccaggtgttccgctcagaccatggcagctccatctcctgtcaaccacctgccgaaatccccggctacctgccagccgacaccgtgcacctggccgtggaattcttcaacctgacccacctgccagccaacctcctccagggcgcctctaagctccaagaattgcacctctccagcaatgggctggaaagcctctcgcccgaattcctgcggccagtgccgcagctgagggtgctggatctaacccgaaacgccctgaccgggctgcccccgggcctcttccaggcctcagccaccctggacaccctggtattgaaagaaaaccagctggaggtcctggaggtctcgtggctacacggcctgaaagctctggggcatctggacctgtctgggaaccgcctccggaaactgccccccgggctgctggccaacttcaccctcctgcgcacccttgaccttggggagaaccagttggagaccttgccacctgacctcctgaggggtccgctgcaattagaacggctacatctagaaggcaacaaattgcaagtactgggaaaagatctcctcttgccgcagccggacctgcgctacctcttcctgaacggcaacaagctggccagggtggcagccggtgccttccagggcctgcggcagctggacatgctggacctctccaataactcactggccagcgtgcccgaggggctctgggcatccctagggcagccaaactgggacatgcgggatggcttcgacatctccggcaacccctggatctgtgaccagaacctgagcgacctctatcgttggcttcaggcccaaaaagacaagatgttttcccagaatgacacgcgctgtgctgggcctgaagccgtgaagggccagacgctcctggcagtggccaagtcccagtgagaccaggggcttgggttgagggtggggggtctggtagaacactgcaacccgcttaacaaataatcctgcctttggccgggtgcgggggctcacgcctgtaatcccagcactttgggaggcccaggtgggcggatcacgaggtcaggagatcgagaccatcttggctaacatggtgaaaccctgtctctactaaaaatataaaaaattagccaggcgtggtggtgggcacctgtagtcccagcaactcgggaggctgaggcaggagaatggcgtgaacttgggaggcggagcttgcggtgagccaagatcgtgccactgcactctagcctgggcgacagagcaagactgtctcaaaaaaattaaaattaaaattaaaaacaaataatcctgccttttacaggtgaaactcggggctgtccatagcggctgggaccccgtttcatccatccatgcttcctagaacacacgatgggctttccttacccatgcccaaggtgtgccctccgtctggaatgccgttccctgtttcccagatctcttgaactctgggttctcccagccccttgtccttccttccagctgagccctggccacactggggctgcctttctctgactctgtcttccccaagtcagggggctctctgagtgcagggtctgatgctgagtcccacttagcttggggtcagaaccaaggggtttaataaataacccttgaaaactggatcggatgaattggctttcattgtgttcctagcatcttctcaaatcaacttcccaggactccagggtgaaggaggaaaagaggcatggcccaggccctggggtgtgggatatggtctccctaggggatgacagttgggatcaatggcctgtgacttctcctctcccttcccccatcctgggacctaactggaaataaaaccttgactgttgcccgggtgtcattttaccagtggatttctgccagggcttgtgtcctaggagaaggtttaagttaaaccagattgcccaggtctccaaacgatttgtcatgctgacctgagatcatcgaagggggcacctgcccccgggcaaggttgcaggggcaggatggggctgaagggatgagcagggtcccgggcccacctgctgatacagcattggccatgtgggggctgcaatcggatttggaagaccctggggcttgggggcatgtccagttttcccagctccctaaaaaatgaccatgcagcctggcgccgtggctcatgcctgtaatccaaacactttgggaggctgaggcaggcagatcaccggaggtcaggagttcgagaccagactggccaacatggcaaaaccctgtctctactaaaaatacaaaaattagccaggcacagtggcacgtgcctgtaataccagctacttgggagggtcaggcaggagaatcacttgaacctgggaggcggaggttgcagtgagccaagatcacgccactgcactccaggctgggcgacagagtgaaactgtgtctcaaaaataaaaataaaaat

SEQ ID NO: 691767 - DNA, 133 bp, Homo sapiens
  misc_feature (54)..(54): n is a, c, g, or t
acaaaagatgactttttctttgagcctattttgggcacagatatgtaagctgantttgtatcccatgcctgcctgagttcgaaatgcacagcagtcaagggaaagagaaggccaaacggcagattcctaaaac

SEQ ID NO: 691768 - DNA, 1838 bp, Homo sapiens
  misc_feature (46)..(46): n is a, c, g, or t
ggagtccaggcaggtataaggccacctccgcaggccaggacaaccnagaagcaaaagagcagagctaccatgtcctcttggagcagacagcgaccaaaaagcccagggggcattcaaccccatgtttctagaactctgttcctgctgctgctgttggcagcctcagcctggggggtcaccctgagccccaaagactgccaggtgttccgctcagaccatggcagctccatctcctgtcaaccacctgccgaaatccccggctacctgccagccgacaccgtgcacctggccgtggaattcttcaacctgacccacctgccagccaacctcctccagggcgcctctaagctccaagaattgcacctctccagcaatgggctggaaagcctctcgcccgaattcctgcggccagtgccgcagctgagggtgctggatctaacccgaaacgccctgaccgggctgcccccgggcctcttccaggcctcagccaccctggacaccctggtattgaaagaaaaccagctggaggtcctggaggtctcgtggctacacggcctgaaagctctggggcatctggacctgtctgggaaccgcctccggaaactgccccccgggctgctggccaacttcaccctcctgcgcacccttgaccttggggagaaccagttggagaccttgccacctgacctcctgaggggtccgctgcaattagaacggctacatctagaaggcaacaaattgcaagtactgggaaaagatctcctcttgccgcagccggacctgcgctacctcttcctgaacggcaacaagctggccagggtggcagccggtgccttccagggcctgcggcagctggacatgctggacctctccaataactcactggccagcgtgcccgaggggctctgggcatccctagggcagccaaactgggacatgcgggatggcttcgacatctccggcaacccctggatctgtgaccagaacctgagcgacctctatcgttggcttcaggcccaaaaagacaagatgttttcccagaatgacacgcgctgtgctgggcctgaagccgtgaagggccagacgctcctggcagtggccaagtcccagtgagaccaggggcttgggttgagggtggggggtctggtagaacactgcaacccgcttaacaaataatcctgcctttggccgggtgcgggggctcacgcctgtaatcccagcactttgggaggcccaggtgggcggatcacgaggtcaggagatcgagaccatcttggctaacatggtgaaaccctgtctctactaaaaatataaaaaattagccaggcgtggtggtgggcacctgtagtcccagcaactcgggaggctgaggcaggagaatggcgtgaacttgggaggcggagcttgcggtgagccaagatcgtgccactgcactctagcctgggcgacagagcaagactgtctcaaaaaaattaaaattaaaattaaaaacaaataatcctgccttttacaggtgaaactcggggctgtccatagcggctgggaccccgtttcatccatccatgcttcctagaacacacgatgggctttccttacccatgcccaaggtgtgccctccgtctggaatgccgttccctgtttcccagatctcttgaactctgggttctcccagccccttgtccttccttccagctgagccctggccacactggggctgcctttctctgactctgtcttccccaagtcagggggctctctgagtgcagggtctgatgctgagtcccacttagcttggggtcagaaccaaggggtttaataaataacccttgaaaactgga

SEQ ID NO: 691769 - DNA, 389 bp, Homo sapiens
  misc_feature (294)..(294): n is a, c, g, or t
ctagttttagaagtttcaattagcaaatggggtggaaagtagagttctcatttactccctgccccgactcatgtataaactctcccactatcagcatcctccaccagagtgtacgttggttacaatcagtgaacttatattgacacttcattatcaccccaaatccacagtttatatcaagcttcactctgggggtacattcaaggggtttgggcaaaagtataatgacatgtacccaccattacaatatcatacagaggtgtttcactgctttaaaattcccctgtgctctgnctattcctccctctcttccccctaagcactgatctctggtattggaacttctagaactaggtgctatttgaaacttctaaaaactaatgggggat

SEQ ID NO: 691770 - DNA, 649 bp, Homo sapiens
gcaagggaacagatcaagctatggatgaatgtgcttcacattccacacccaagtcatttgccttcttagtagagacggggatattcaccatattggaccaggctggtactcaaactcctagacctgaggtgatctcatccacctcaggctcccaaagtagctaggtgatcaccaggcgatgcaaccaacgactgcctgtggtcgacctttgactttatactataaggccacacggcattccatggcgtgaaccaaccgcgcccatggcgcgaagcgctaagtcgactatacgttagggccaacacgagattgaccaaaaatgcacgtccgcgttcgtagccaagtgggcagaacagacaagattatccagtaaacaatcgcactatgaaatctagatacacactatgaacactggaaggaagaagagtcagaatacacgcacacaggcagaccaccttgatgacaacgaaaaccgaggacaacgcctcaaccacacaacaaggagcggcgagcacagacgcgggacgacaccccacaggcccaaggtcgcacccacacaggcctcccggacagcccaccaagggcgcagaacacaaacagagctgagagccaccgcaaagaaggaaaagacgagcgaacacacaagaca

SEQ ID NO: 691771 - DNA, 345 bp, Homo sapiens
  misc_feature (261)..(261): n is a, c, g, or t
gtcggagtggttagctggcagtacgggctctggagcagtttgccactgtggtggaggccaagctgatccacaagatggggattgtcaatgaacagtttctgctgcagtggctggcagacggggccatcgacctctatgccatggtggtggttctgtcgagggccttaagatccctgagtgagggccaccacacggtccaccatgagtgctatgtgacacctggtgtatcaaggctgcagctcggatccgagagggcatgancggcctgaagtctgacccctggcatcaagagctctaccgcaacttcgttggattatgaatactactgtgcagggtctgttcttt

SEQ ID NO: 691772 - DNA, 762 bp, Homo sapiens
  misc_feature (46)..(46): n is a, c, g, or t
ggagtccaggcaggtataaggccacctccgcaggccaggacaaccnagaagcaaaagagcagagctaccatgtcctcttggagcagacagcgaccaaaaagcccagggggcattcaaccccatgtttctagaactctgttcctgctgctgctgttggcagcctcagcctggggggtcaccctgagccccaaagactgccaggtgttccgctcagaccatggcagctccatctcctgtcaaccacctgccgaaatccccggctacctgccagccgacaccgtgcacctggccgtggaattcttcaacctgacccacctgccagccaacctcctccagggcgcctctaagctccaagaattgcacctctccagcaatgggctggaaagcctctcgcccgaattcctgcggccagtgccgcagctgagggtgctggatctaacccgaaacgccctgaccgggctgcccccaggtgggcggatcacgaggtcaggagatcgagaccatcttggctaacatggtgaaaccctgtctctactaaaaaaaaaaccaaaacaaaaaaaaaaacttttttgggccccgcccgagggcccctgcgaaaagaagttgtatgagcacatcgcggttgtgcgcgccgcggcgcccagagggtaagcggaaccaggggcacaaacgggtgtcaccgaggacaaccccggggacagaacaaggggctgtggattccaacaaatgaaaaacgcgcgcgggacaacggagggtgtgaga

SEQ ID NO: 691773 - DNA, 2048 bp, Homo sapiens
  misc_feature (46)..(46): n is a, c, g, or t
ggagtccaggcaggtataaggccacctccgcaggccaggacaaccnagaagcaaaagagcagagctaccatgtcctcttggagcagacagcgaccaaaaagcccagggggcattcaaccccatgtttctagaactctgttcctgctgctgctgttggcagcctcagcctggggggtcaccctgagccccaaagactgccaggtgttccgctcagaccatggcagctccatctcctgtcaaccacctgccgaaatccccggctacctgccagccgacaccgtgcacctggccgtggaattcttcaacctgacccacctgccagccaacctcctccagggcgcctctaagctccaagaattgcacctctccagcaatgggctggaaagcctctcgcccgaattcctgcggccagtgccgcagctgagggtgctggatctaacccgaaacgccctgaccgggctgcccccgggcctcttccaggcctcagccaccctggacaccctggtattgaaagaaaaccagctggaggtcctggaggtctcgtggctacacggcctgaaagctctggggcatctggacctgtctgggaaccgcctccggaaactgccccccgggctgctggccaacttcaccctcctgcgcacccttgaccttggggagaaccagttggagaccttgccacctgacctcctgaggggtccgctgcaattagaacggctacatctagaaggcaacaaattgcaagtactgggaaaagatctcctcttgccgcagccggacctgcgctacctcttcctgaacggcaacaagctggccagggtggcagccggtgccttccagggcctgcggcagctggacatgctggacctctccaataactcactggccagcgtgcccgaggggctctgggcatccctagggcagccaaactgggacatgcgggatggcttcgacatctccggcaacccctggatctgtgaccagaacctgagcgacctctatcgttggcttcaggcccaaaaagacaagatgttttcccagaatgacacgcgctgtgctgggcctgaagccgtgaagggccagacgctcctggcagtggccaagtcccagtgagaccaggggcttgggttgagggtggggggtctggtagaacactgcaacccgcttaacaaataatcctgcctttggccgggtgcgggggctcacgcctgtaatcccagcactttgggaggcccaggtgggcggatcacgaggtcaggagatcgagaccatcttggctaacatggtgaaaccctgtctctactaaaaatataaaaaattagccaggcgtggtggtgggcacctgtagtcccagcaactcgggaggctgaggcaggagaatggcgtgaacttgggaggcggagcttgcggtgagccaagatcgtgccactgcactctagcctgggcgacagagcaagactgtctcaaaaaaattaaaattaaaattaaaaacaaataatcctgccttttacaggtgaaactcggggctgtccatagcggctgggaccccgtttcatccatccatgcttcctagaacacacgatgggctttccttacccatgcccaaggtgtgccctccgtctggaatgccgttccctgtttcccagatctcttgaactctgggttctcccagccccttgtccttccttccagctgagccctggccacactggggctgcctttctctgactctgtcttccccaagtcagggggctctctgagtgcagggtctgatgctgagtcccacttagcttggggtcagaaccaaggggtttaataaataacccttgaaaactggatcggatgaattggctttcattgtgttcctagcatcttctcaaatcaacttcccaggactccagggtgaaggaggaaaagaggcatggcccaggccctggggtgtgggatatggtctccctaggggatgacagttgggatcaatggcctgtgacttctcctctcccttcccccatcctgggacctaactggaaataaaaccttgactgttg

SEQ ID NO: 691774 - DNA, 317 bp, Homo sapiens
  misc_feature (32)..(32): n is a, c, g, or t
  misc_feature (57)..(57): n is a, c, g, or t
  misc_feature (71)..(71): n is a, c, g, or t
  misc_feature (180)..(180): n is a, c, g, or t
  misc_feature (182)..(182): n is a, c, g, or t
  misc_feature (261)..(261): n is a, c, g, or t
ccttgattttgaaaatttccccccaagaatgnggcagtaaaaacaacaagacacccnaaggaataatgtcnccattgtcttaaccctgttccaaaacaaaaatcacctcccttccttaagagaaaggaatctccataaaattccagtatttaaaaagcagtttactgttctggaccttcngntggatcacaatcaggtaaaagcccccttaaactgaggaaacggcaaaatgtgttttaaagctctttggatttccccagntcctgaccctgtaaaattggaaaaaagcaccaaaaaagccttttttaaaatcctga

SEQ ID NO: 691775 - DNA, 453 bp, Homo sapiens
ttgcctccatgcctgcatgtactcaggaagaccgatcacaggtgaacatgcttgcctacaaggcagcgacacacccacgcatatgcacaaacacacactcaaccacttccccgtgcaggatcttgtgttttcaaacacacacataactgcaggcatgcaccatgtttcacaggccacactccccaaaggacaagggcgcacttagaaatggacagggatgcacttgtgtgagacaaagagagcgagggagggagagagagagattagctgactcccttggatctccttaggaggttcttagtggactgaggagtagcgcttctactcccccgaccgcaatatcttctccccagatctctggagaaactagatttttttttttttttttttcacagagtcttgctttgtcacccagactagagtgcagcggcacaatcatagctcactacagcc

SEQ ID NO: 691776 - DNA, 716 bp, Homo sapiens
aggtgtaaatgatggccagtgtaaaaaggacgagcaagtgtaaaaaaagagggcaggcacaacgacgtgtagttcatactgatgtcaaggactatatacgcaggtatgtatactgggggactagtcacaatagcaaacaattggaaccaacccaaatgtccatcaataatacactggataaagaaaatgtggcatatatacaccatggaatactatgcagccataaaaacagatagagttcatgtccattgcagggacatggatgaagctggaaaccatcattctgagaaaactatcacaaggacagaacaccaaacaccgcatgtactcaatcataggtgggaatttaacaatgagaacatatggacacagtgcagggaacatcacacaccagggcctatcatgaagtgtaggggctgggggagggatagcattaagagaaatacctaatgtaaaatgacgagttaatgggcacagcaaaccaacatggcacatgtaaacctatgcaacaaacctgcacatttgtgcacatgtaccctagaacttaaagtattagaataaaaaaaattaccaaacaccacaaaaaattaagatgggcaagaaaattccacgtccccgaaatccaaaaatagaagacaagaggaagtaaccaacttggcccatggcaagtgccaagacgacggggaaaagttgctgtgcctgagaccaagtggcga

SEQ ID NO: 691777 - DNA, 369 bp, Homo sapiens
  misc_feature (82)..(82): n is a, c, g, or t
atgttgtatttttagtggagatggggtttcactatgttggtcaggctggtgtctaactccctgacctcgcgatctacccgcntaggcctcccaaagtgctgggattacaggcatgagcgactgtgcccggccagcttacaaactttttaaggcattgaccactgcccagtgaaaagaaagaaatagtcaacatctatattttgtgaacaggcaacaatatgagtgaatccatcaaatggagataaagccccatactgacttctcaaggctgggcacccacctctaaaaggatgcagagtcacaagatactatggattggggagcagatccgtcgacgcggccgcgaatttagtagtagtaggcggccgc

SEQ ID NO: 691778 - DNA, 149 bp, Homo sapiens
cgatctggttgctttttaaaaaactttctatagagacagggtcttgccatgttgcccaggatggtcttgaactcctgggctcaagctatcctcccacctcgtcctgccaaagtgctggaattataggcatgaaacaccccacccgatcg

SEQ ID NO: 691779 - DNA, 197 bp, Homo sapiens
ctacttggaaggctgaggcatgagaattgcttgaacccaggaggcagaggttgcagtgagccgagattgcgccactgcacgtccagcctgggcaacatagcgagactgtctcaaaacaaaaaaaaaggagcaatgacttccgccttcatacaggctgaggtttttaattcaaaagtccttaacttttattatgttat

SEQ ID NO: 691780 - DNA, 241 bp, Homo sapiens
  misc_feature (20)..(20): n is a, c, g, or t
  misc_feature (36)..(38): n is a, c, g, or t
  misc_feature (63)..(63): n is a, c, g, or t
  misc_feature (75)..(75): n is a, c, g, or t
  misc_feature (89)..(89): n is a, c, g, or t
  misc_feature (110)..(110): n is a, c, g, or t
  misc_feature (118)..(118): n is a, c, g, or t
  misc_feature (138)..(138): n is a, c, g, or t
  misc_feature (141)..(141): n is a, c, g, or t
  misc_feature (219)..(219): n is a, c, g, or t
  misc_feature (238)..(238): n is a, c, g, or t
ggagcatgtataaataagantgtaggcatgtataannntgtatgcatgtataagttctttganaattatattatntccacagattttcnttctggatactaatgatgtgncagatgantcaggtactgattcatcttntgncatcatctaatgtgttttatccagttatcttctagcagtgtgcaattcaaaaacatcattggtgtctaaactcttaanacatccgttagagcaaatntaa

SEQ ID NO: 691781 - DNA, 609 bp, Homo sapiens
  misc_feature (106)..(106): n is a, c, g, or t
  misc_feature (179)..(179): n is a, c, g, or t
  misc_feature (249)..(249): n is a, c, g, or t
gcttctcgcctaacgccgccaacatggtgttcaggcgcttcgtggaggttggccgggtggcctatgtctcctttgtgacctctattgccgggaaaattgggtcgcngatctggtagaatgtttattggatccaggacacgaaggcgctttggtcgcatggcacctgtgcaactcaaagntgacggaagacaggccatgccccttttcaaagtgcatggcaagctcactggggatttcatgcctcaaggntttttccccgggccaacaaaggtggcgccccaacccaaggaaaagcttaattggttccccggaccataaggccccttgggccaggcaaaaggggccaggaccgagttcaaaagttagcgaaaaaaaagtgggggggccaacggcccccaaactcacccgggaaattgggggggtccccccaaaaaaagggaaaacacaggcaaacatttttgggagaaaaataaaccccaagggcaggcaaaaaaaggcggaagaagaagccccaaaaaggcgaattggaaaaccaaaaggcaacctttttcttctttgggggaaaattttccccgggggttttttttctttttttacacaaacaaacgg

SEQ ID NO: 691782 - DNA, 374 bp, Homo sapiens
gatgaaacgtgcccagcatatataatattaccaatcattggttttggtactaatctcatgcttttatcgtttttaccgagcaaaacataagcagccagtacggagtcgggagctgaaggcacattgtgagaagtgagcagaggactcgagtgaaagtcctctgtcacgccctgattagggctgcctgatgacaccttggttctagacagtagcgccgagtgcctggtaagggcacccgttacttagcatacctcagatcttgcggttgcgcctgtgcctgggaaggcaactgttacttagcagactgggacagggaactctccttgggggagtccgagaacactgctccaccagctcttgtgggaggcctgaca

SEQ ID NO: 691783 - DNA, 132 bp, Homo sapiens
ggagtcggtacccccacttcatgcgtgggaccaaaccctcgatctggcgcgtgacgacgcatgacgccaggcggcctcacctccggctcagttcgtatctccccaaccaaaatatatcccttatacaaatta

SEQ ID NO: 691784 - DNA, 964 bp, Homo sapiens
gcttcgtacatagtaatacccatcataatcggaggcttaaggaacctgtctagggtaacgaccagatctacaacgttatcgtcacagcccatgcattggtaataatctatctacatagtaatacccatcataatcggaggcttaggcaacatgagcgtacgttccccgtaagtaactcggtgccccgcgatatggcgttgccgccgcgataaacaacagtaagcttcgtgactcttacctccctctcatccgtactcctgctcgcagtcgtgctatagtggaggccggagcaggaacgagggttgaacagctctacccttccctgtagcagggaactaaaagaagaaaaaaaaaaaaaataaaaagaaaataataaaaacagagaacatcacaaacagaaataaacaacataaaaagaagagaatgcgccggtgacgcctgcagatatctggggagcgtgaggggggaaatggagagacaggcacggaagagaaaaaccatggagacctagcgtgcccaatgccagcgcgcacctcctgccgacagccactccgcggggcgcctatcggcgaacgcggcaaacgcgagcgcgctgacaaaagaatccaggggacgaccacgcccaattaatggacgaggggcaagcaaggccactcaacagtccaccacggaaatccaacccgcgccgccgacgacacagaccgagcgcacatagagaccggaagcacaagggcgcccaaccccgacaccggcaagcgcggcacactcggaacgctacacctagaaaggcccctggaacagactagtggcgcccccaagggcgcacttccccataaacgtgggggacaaagccgggacgccaccgcggcgtaacccgacacaaatcaaagaaaacaaccccaagagccccccagaggacaaaccatggacccaaacaacaacagcagccaatcagccaaccagg

SEQ ID NO: 691785 - DNA, 870 bp, Homo sapiens
attaatcccctggccaacccgtcatctactctaccatctttgctggcacactcatcacagcgctaagctcgcactgatttgttacctgagtaggcctagaaataaacatgctagcttttattccagtgctaaccaaaaaaataaaccctcgttgccacgagaagctgccatcaagtatttcctcacgcaagcaatcgatccatagatccttcgtaatagctatgctcttcaacaatatactctccggacaatgaatcatagccaatactaccagatcaagtactcatcattgaataatcatgaatggctatagcaataaaactaggaatagccccctttcagttctgagtcccagaggttaccccaagggcaccccctctgtactatccggcctgcttcttctgcaacaatgacaaaggaataggccccatctcgaagtcatataccaaattctctcccgtcactaagagcgtaagccttctcctcagctcttctcaatcttatccatcatagcaggcagtttgaggtggattgaaaccaaagccagtacgcgaaaatctttaggatactcctcaattaccacataaggatgaattaatagcagttctacccgtacaacccgtaaataaaccagtgcttatttaactatttatatttatctaataagaagcggagttcctaatactcaacttaaaatccagagcacgacctataatattttggctcggaaaaggtacatggttacaccttattaatcgacctctttcctagagggggcccggaaccggtttgcgccagggcgtcttcgcgccacaaaaagggtttcccccatttggaagccttcctttcatcgatacccacacaacctta

SEQ ID NO: 691786 - DNA, 149 bp, Homo sapiens
gtttgagaacccacgacgtgggggctgggcgtcgacatgtgtgcgctcccgcacactcttcccactgggtgtggtgctcacggacacctgcgctttgtgggacgtatgcagtgaggcacggagtagaagctgcctgctgaaaggcaggc

SEQ ID NO: 691787 - DNA, 197 bp, Homo sapiens
tcccccacttgagccccttgtatgcgcagctcctccagcattcatgagcgtggaccacttggagcggcgctagggaggataactcccacgtgcttgtcgtctggcgagggttaggaaggcgtcgcgcccctccattaggtcacagctcagcagggggtcggggtcaacgattggtggcagggtgttgcttacagtgc

SEQ ID NO: 691788 - DNA, 422 bp, Homo sapiens
ccccgattatgcaccactgtgagctaattaaacctctttcttcataaattacccagctttaggtattctcttttttctttttttttggagacagagttgctctgtcacccaggctggagtgcagtggcgcgatctcgatctcagctcactgcaaactccacctcccaggttgaagcgactctcatgcctcagcttcccaaagtgctgggattataggcatgagccactgagcccggctaagtattcttttatagtggtgcaaatggactaacacaagaggtatcatgctttcttgcttcctcatcattcttgtgtccttatcattgatatcttacacctggtttaatgatcccttcttccaattttatggattagctttcagaggcaaagactttttcctgtagatgtatttatacggggat

SEQ ID NO: 691789 - DNA, 100 bp, Homo sapiens
ttgggcaacatccatggtatcacaaggccttcaccacggagaagcaacagtcctgacaaattcaaacggcccacgccgcctccatctccccgggatacag

SEQ ID NO: 691790 - DNA, 528 bp, Homo sapiens
gggcgcgtcggacgtgtatccagtaatgcgatcattcggtgggggctcacatctgtattctcagcactcttgtgacagctgagatggaaggatcgattgcagtcacgcaggttgagaccatcctaggcaagatagaccccaactctagcaaaaatttaaaaataagccaggcatgatggtgtgcacctgcggtcccagctacttgtggaggcagaggtgggaagatccctggcgcctgagaggtcgaggcagcagggagccgtgatcatgcccctgcattcgagcctaggtgacagcgcgaacgaaaccccagtctcaaaaacaaaagaaaagacaacaagacagccatatgggttccgggaagcagaactcaaagaagaccagagaatctagaaacaactctcatagcggcagaagttgcataagaatagatatgatgtagaattaagtgttgaaatagatgtctttgcatatatggggaaaagtagaactagattcgtatcttaatagtatatatagaattagttc

SEQ ID NO: 691791 - DNA, 643 bp, Homo sapiens
  misc_feature (7)..(7): n is a, c, g, or t
  misc_feature (156)..(156): n is a, c, g, or t
  misc_feature (165)..(165): n is a, c, g, or t
  misc_feature (169)..(169): n is a, c, g, or t
  misc_feature (185)..(185): n is a, c, g, or t
  misc_feature (190)..(190): n is a, c, g, or t
  misc_feature (194)..(195): n is a, c, g, or t
  misc_feature (243)..(243): n is a, c, g, or t
  misc_feature (257)..(257): n is a, c, g, or t
  misc_feature (264)..(264): n is a, c, g, or t
  misc_feature (289)..(289): n is a, c, g, or t
  misc_feature (303)..(303): n is a, c, g, or t
  misc_feature (312)..(312): n is a, c, g, or t
  misc_feature (362)..(362): n is a, c, g, or t
  misc_feature (366)..(366): n is a, c, g, or t
  misc_feature (388)..(388): n is a, c, g, or t
  misc_feature (400)..(400): n is a, c, g, or t
  misc_feature (409)..(409): n is a, c, g, or t
  misc_feature (445)..(445): n is a, c, g, or t
  misc_feature (453)..(453): n is a, c, g, or t
  misc_feature (481)..(481): n is a, c, g, or t
  misc_feature (639)..(639): n is a, c, g, or t
gtatggntttggtggtttcttacactgtaacattgtccatgtacaccttaaaaacagaactggcctaaagggaaaaataagacgtcggtgtgactaaagaacaagcttatttggcatcaattatacatccttcattattttatattcctttaaaanacacaaaanacangtttgttctttcttcnctctnaaannagtgatcaacctgtacaaagtaatactcaacaatacatttcaaacggngcactgtatacttnggggaanatacgtgaaccggtatacaactaanatccataatttccnggttttgcnttgttttattattattttttccaatggggggggccgacacttggccatcnaccnggggcgggaagcaccaatcgcnacacatggcccnggggcatgncgccgttgtgggccataagggtccatcgggggcgcngcgctacngtacacttttcaaaacagaaagatgggnggtcccaaaaatgagatgccaattctgtgagcaatggtgtgattttttttttttgtttttgtttttgtttttctttttttctaaaaagaacaactgaaaaaaaacctttcaacaacatgctaaatgattctcaccctttgatatgattatactatggncggg

SEQ ID NO: 691792 - DNA, 119 bp, Homo sapiens
tccatggtgctcggtagtcttaagtcctggctcaagctatctcccgctcagcctcccaaagtgctgagatcacaggcgtgagccaatgccgccaccccaaaggtgctgtcaaagcttga

SEQ ID NO: 691793 - DNA, 395 bp, Homo sapiens
  misc_feature (2)..(2): n is a, c, g, or t
  misc_feature (28)..(28): n is a, c, g, or t
  misc_feature (30)..(30): n is a, c, g, or t
tnagtttccttgggggcgatgctgcccnanccctcaacagggctccagcgcagcaccccagcatgcttggagggtgagaacaaattgaaaaaaaatcccacatttttttcctctgaaaattttggtaagacggccaggtgcggtgctcatgcctgtaatcccagctcttggggattccaaggctggtggattatgaggtcaggagttcgagaccagcctggctaagatgacgaagccccgtctctactaaaaatacaaaaattagccgggcgtgatggtgggcacctgtagtcccagttaattgggaggctgaggcaggagaatcacttgaacccgggaggcagaggttgcggtgagccggtatcacgccactgcactccaccctgggcaacaga

SEQ ID NO: 691794 - DNA, 695 bp, Homo sapiens
ccggacctgatcagtgacaccgcttctacatttcatcttttgtgcttcatgttgtgagacatctctgagaatcgattaatgtgaagttttctgacaatgtcaattcctctgggatatcttcattcttgtaatcataaccactttccgaatgcacgttgataagctcaccttccttaagtttctctagctgcatatctggagtctcttgtatggcagcagtgtcaacatttccacagttggctatttcttttataactctctatatagagttcaattcaaatttcacttcttgcattattgttctgtttcattgtagcactttgtttgacaattccccattcaagtatccattttttgtaaaatatcatgtcagtttatcactgggagacaaggagttaacacaactatctgctttgcagactgtacagtgaaaaacatacacagtgaccagtcattgacagactttgaaagaagttatgtgattggttactaattatcacgtgcacttgttatttatgtagtgctttgtgaagtgagggctagcagctactactttacaagtactaatagttcaaattcttcggtaactgagatttgaacaaatgttgttaggagagactgatgtaatttaactaaaccagatttatgaaactggtgcatgtaagacccatgccacatgagaaactgctgtcatc

SEQ ID NO: 691795 - DNA, 749 bp, Homo sapiens
agcggagcggatggggccagcaccgcctcgcgccggtggtggaagcacgtgctgggggcgggagcagcaatcgcaggccatgtgcgtcgttactgtgtgggaggcgacgcaggggcgcggggagagcgagcggtgaacagccacttttcaagaacctcagacctaatcccggtaagaacctttggggtattacgagtactgcagtccgaaacatagatggttctattaataacatcaattgaacgatgatgaacgcacgatgtacgtggatttggcacgtctaatgcacgtcttaaacaagttactccatcgaatccttagtagaatccagtcaccgtgtggaagtttcacacgaaggatcccagctctccagctttagctgcagtaaacgacattttgaacgacgtctgcgcgctacacatggaatgagttactaacaaggaatctatgcaatgggatttaatacggccatctaaaatccaagagatggctctccctagtgatgctggcacatccagcccagaacctcatagcacagagccagttctggacacacggagagacagcggggattcgtgttggcaatgttaagcatgagttactgccttggaattgttccccacagtgcctctgcctagctcctacttatgaattggctctgcaaactggccgtgtggttggagcagatgggacaagtctgtgtggaattgttcaagtggatgtatgccattcgaaggaatcgaattccc

SEQ ID NO: 691796 - DNA, 946 bp, Homo sapiens
cacgcgtcgcctacattccggacatgatgtgtgcacgtggtggtctattgggagtcggtggtcagatgcaggagcttcggagggttcgtcctggagtcatagagtgaaaaggaccacatggtgacaatgcatgatgtgcttgatgctcagggctgtatgataaccacaaggatgcagagtcaccctgcggagagcttgtttacccttgggtaaaagctgtagacgatctcgataaacggctggttatgacagacagtgcggtaaatgccatctgctatgggggccacagattatgtcttccacggtgttctctcgcatatgaggacggcagttgaggtcaataccaggagattgtggtggatcagcaccaaaggagaagcaatctgcatggctattgcattaatgaccacagcggtcatctctacctgcgaccatggtatagtagccaagatcaagagagtgatcatggagagagacacttaccctcggaaggtggggttcaggtccaagaggcaagtcagaagaagctgatgatcaagcagggcttctggacaagcatgggaagcccacagacagcatcacctgccacctggaaacaaggagtatgttgaactacagtgagtctgcaaaaagaggtggtgctgaagtggtgaaagcccgcaggtagttggcgaaaacagaaaaaactgcgaagggaagcgagagagtgaaagtgaacgtgaccagactcttccagagtctcagttgatcaggagaaccacgaagagtagaggcagcaaagcaagtggtgggaaagggcagctggcatgggaggtccccagagaacaaaaagggggggcaaaaccaggggcagtcggccgtcggaaggcaatagaaaggggggtaactgaagatgctgagacttggaggcccacgaagttggacggcctaaacagtttctcggtac

SEQ ID NO: 691797 - DNA, 249 bp, Homo sapiens
aatttttttataaagtgctttgtaaaaaaaaaaaaatgtattctagcttttgcgggacatatgtgtgataacttttatacccctgcccgttaagtgccattatttcctccctctaaaaatgctatttttgtgtcagttcccgccggtgttttcatgtctttgcaaaatgacccctttttatgccttttttataaagtggtagaccttttgtagctttttaaaaactttgtattccttcggtatccatta

SEQ ID NO: 691798 - DNA, 187 bp, Homo sapiens
cagggaggtcctgacagcttgggggttagagaccctggaaaactgcagggaaggctcataaagaactctcaaagggagatcaaaaggctgaaaggtttgctcacccagcacgggatccccctacacgaggcccacagaaaattccaacttggagcacttgggccacgagacgcccaaggagccaagt

SEQ ID NO: 691799 - DNA, 148 bp, Homo sapiens
ctatcatgtgcgcgcagcatggtcacacatgcttacatacattcttataaatacacaagtttctcacacagtgcccacagacatgtttcacacacacgctcacacatgctcagcacagatgctcacacagcatgctcgcagcatattc

SEQ ID NO: 691800 - DNA, 515 bp, Homo sapiens
tcatgtctgtgtctgggtcgccatgcctgtgcgacgatactctgctgaatcgtgtctccattgacccaccgccaatttacggctgtctactcttcaactttgtggggaggctgattcacttgactggccctctccagtctgtgccatttcgcctgtctctctgtgtttttctctcttcgtcttagtgcgattcctctgtcgttgatagatcggccctatctgggcagctagcagctaggaagaacctagttgagtggttataggtgatttgggaatccactccccagaggctatgtatgccacataaagacatacacacccatataatttgacataaagatgtgtataattatatcatgtttgcatttttttaaaatatagtctttctgtttgcttgcattcctcctttcccatattcctctctttggtggttatttatctttccaaagtagattttaatatgcttccttccattttgccattttcattcaataatccctctctaaaatctttct

SEQ ID NO: 691801 - DNA, 507 bp, Homo sapiens
  misc_feature (22)..(22): n is a, c, g, or t
gcgcagtaggtggatacccacngtgatataaacaaatgtctacacaaaaacttgtgcacagatgttctttgcagcattatttataatagcccaaaattgaaacagccctaatctctatcaactaacaagtgaataaacaaaacgtggcatatccatacaaggaatattattcagcaataaaaaaagagatgaagtactgatatgcaccacaacatggaaaaaccttgaaaacatatcaagtgaagaatgccagacatgaaaggccacatattatatgatttcatttatatgaaatgtccagaacaggcgaatatatatagagagaaggcagattagtggttgcttaggctgaagggttggggaggacaaaggggtgactgctaattagtatggggtttcttttttggggtgatgtaaacgttgtaaagttgattgtggtaatggtggcacaactctgaatatactaaaaaccactgaattgtatactttgaatgtttgaactgtgca

SEQ ID NO: 691802 - DNA, 324 bp, Homo sapiens
ttccaagtagcagggaccacaggtatgtaccaccatgcctggctttttaaattttttgttgagatggggtcccactgtgttgcccaggcagatcttcaactcctgggctccagcagtccttccacctcggtctcccaaaatgttggtattacaggcatgatccactgcctgtcattattttaaagagtacttcaacttaaccaaaaaataaagttaattgtgaaacagctttcggcaggtctttcaggaggtattcctgaagaaaccattgttatcacatgttatttgccccttgaggccttccattgggacatgatgtaaaat

SEQ ID NO: 691803 - DNA, 264 bp, Homo sapiens
actcctgcgtggactgttgtcagtcgttcacctcataggtgttgtctggccgcacaatcatgtgtgtacaggtgtggtaactcatcatccttgccacggatgtccttgttggtcagcacgattcttgcccttgtcgttaaagatgacaagagccaggtggagtccggcaccttagaagacgattggaacttcctgtgtcacctacgacgctaaaggatcctgatgcttcaggaaccggcagggctaatccctgagttacgtggg

SEQ ID NO: 691804 - DNA, 639 bp, Homo sapiens
  misc_feature (157)..(157): n is a, c, g, or t
  misc_feature (279)..(279): n is a, c, g, or t
  misc_feature (290)..(290): n is a, c, g, or t
  misc_feature (313)..(313): n is a, c, g, or t
  misc_feature (586)..(586): n is a, c, g, or t
tcccgggttaagttcggcgggaagttcgagaatccctctcaggtcgttgaaaggttgaccaggaaatacaacgagctgttaaagtcctaccagtggaagatgctcaacacctcctccttgttggaccagttgaaagagcagtttaattgggtgtccnggctggcaaacctcacgcaagggaagaccagtactatttgcgggtcacccggtggcttcccacacttttgactcggacgttccttccggtgtcactgaggtggtcgtgaagctctttgactntgatcccatcnctgtgacggtccctgtagaagtntccaggaagaaccctaaatttatggagaccgtggcggagaaagcgctgcaggaataccgcaaaaagccccgggaggagttaaatgtggatgttgcttttgcccctacgggggcatttgagtccagctccccccaaaatgaggtgcagccccccaaaaagagctttgcacgtccccaagtaaccaggccccagcctccaggcccccaaatccgcccagcctttccccgctttggatcctgcactttaacactcgactttgctgctcatgggaanaacaaaattgctcctgcatgcaactaattcaataaaactgttttgtgagctga

SEQ ID NO: 691805 - DNA, 297 bp, Homo sapiens
tttgaccgtattatgaggacgtggtctttcccggacttgacaggtctcatcactatgtctgaagtgttcatccccttctcggtgacccttggagtatcggggatgaccaggacacggacctgctgcagtggtgcgcggcccatgcaatttggccacgtgcatgtggagctgcagcacacaatagcagccaaggccctgatgtcctgtttctacacctttgcgctacccgactgagtctcatcccatataattgcaggggcgttcaacacctatatggccagccctggtccaaagtca

SEQ ID NO: 691806 - DNA, 1733 bp, Homo sapiens
ctcaggtgccctgcccgcaggacaagggacttcctctgtgtgtccttcctgccaaaacatcttggtgctcctccacctcccctgagcccaaatgtgccagtgcagtgtctgaacaccatgctctgaatgtgtggcatggtgcccccacggtgaggacatgccactgtggacgctcatgtgccagctgtccctctgcctgtgccacctttgccgtcaatttgttgcatgctgtgccctgtccatgtgcgccccctctgtgccaccattgcatgcgttgcacacctctgctacgttgctgtgttctcaccgcatgtgtgccccacccttacttgcctcccatctcgcacggcggcgccctggcgacggacacgacccattccagcgccaacgcacccccgcaggcggcacaccggggcctacccttcggacctcgcgtcggccacctctctcaacacctcacgcgcccccaggcgacttggacgcaaacaccctaccatcacggcgcaccaacacaccaccggaaacctaagaccgggcccctacataccagccagcagaataccagaagcgacatccccacaccggcacccggccacacccggatcaggcagcagccccaccaggaggagcgcgccacaactgcaacccgaaacaccagcacgcgtaccctttcggcgccacggccacacccttggcgccccacataggaccaccagataacacgggacacaaacgccccacacaccactcacagcggttccgcatctcgcgccagactcgccagctggccgcgggatcgactacaccttgcgccatcgcacgccgtcggacccgcacacactcaccacgggatcggcgacaccacaaccaactagcgacgcaccagacgtgccgcccacaccgccggccgccactcaccccagcggccaggatatcgcgcccagacgccgctgcgctctccccctacacctcggaaacaaccgcccacgacgacacggacgcccccaagccggcgactccgtatggcccaccaccaccatgcggggtgactcctccacaccgcccacgcgcccaccgcccgccgccgcaccacacggcccacccgttggcctcacgcgaccgccaacggacaccaccaccaccgcccgtcgtgacgctcccacacgccaccccgcgcaacggccggcccacccccacacagcaaacccatggccgccccacacaccgtcgccacctccccatggtgccgcccccacgcccccgccctgggacccgccgggggccaccagcgcgcacagggcgtgacccgcgcaagcacacgcggccgggcagcaccgcgccaccctgcacgccccaacgaccgcagctctgccgcgcgcccccaacacgcacacgcaaacccggacccccacccgcccccccgcgacacctgcgcccgccaacctaccgggagtcgcgaccgacacgccaccccccagcaccaccacaaggacccacagcgcgcacacacgccgccatgccactgggcggcaaaccccccacggggccaccctcgcacacccgcgctaccaccgcacaccgcccgcatcacgcgcatatcaccacccacacccaacactgggatccgcgagacgcccacacggcgccaccccggcgacccacactctcacgcacgcgcaccaaccagcggcgcccccccccaccagacgactcccccacaccccccccgcgag

SEQ ID NO: 691807 - DNA, 892 bp, Homo sapiens
tgaactcagttgttacatctcatcatggatatgacgacgtccccagctggcctcccaccaagctgtccccgcccagtctgccccctcagcctgccgcggcccttctctttaggtgtcctggcctgggacgtggatatatatctgtccatcggaaacgtgatgctgccacatccttttgtgaacaccgcgcccatatccgcggtacagtcacattttgacctgtgcccgttctcgttcagttgatctccctgagcgctgcaggtgtggcgagtttgcttgcactggatgtgctaagacaccacaggccgctttacaagagtctccctcgtaaggagcgttagtccgaacccatggggggccccttgttcgcctctttgtggagacgttaatcgtttttaaaatcacgagccccactcttatgtatgagattctcccggccgggccaccgaagtatcacatttgtttctctctttccgtcgcccctccggggagctcccactcctcccttataaaacgctctcgagtctctgttcgcgattccccctcctcctcgtggcattcccacgggtatagcacatagaggcaaagctcgccgctatgagaagggtcgccattcccctttattaaggtccccgaaaggtccccttggcccttttataactcttgcactgtaaatttgcccttgctttgacagcccatttcagcgggcgcctatttcgaatgtttttccacagaatggatcaccaggaaccttccgccggtgacttcaacttacgggaggctgcggcacaccagttgtcattcggcaacttgtccccgttgtgtccgaaggcattttcacgtaccccgccgctttcctctgtcacacagcggggataactaccgcgggacc

SEQ ID NO: 691808 - DNA, 389 bp, Homo sapiens
  misc_feature (130)..(130): n is a, c, g, or t
  misc_feature (133)..(133): n is a, c, g, or t
  misc_feature (138)..(138): n is a, c, g, or t
  misc_feature (144)..(144): n is a, c, g, or t
  misc_feature (176)..(176): n is a, c, g, or t
aatgaagaatatgaagtaagcctagaaatcacatgcagataactgacatcatatgaaccgtcgtctgtgaggatctgtcatcttgttatgaactgcgctctgtcttctgctcagtctggagatcccaganacntgctnacaggntctacaggatgatcaaacttggtctgggtatngatgaagatgagcctactgctgatgataccagtgctgctgtaactgaagaaatgccaccccttgcacggacgactgaccgacctactcacgcctggaccacacgtacgacctacactctctgactgacgggatgacctaccctgttccgtcctctacaacttcctctgactaatactattttcacggctgtttttctttattctctgttacct

SEQ ID NO: 691809 - DNA, 321 bp, Homo sapiens
gagaattatctcaaaaccagctgcaaccaataattatttttagacagtttaacaacagcttgaccatcacctgatgatcacctgacatttctgttggggcgcgggccatctcctgccccgctcatgtggggctcagtctgcccaacctttccccaggggcctgtctttactcattgtggtagccccagcagatggactctgttatgatccaggactctcacggcactctgtgatgacactagcgctgctctaatacatgctgtaaagtgtcagatcaaatgggtactatgtagaagcctaccaagagtgtgggagcatagg

SEQ ID NO: 691810 - DNA, 187 bp, Homo sapiens
ttcctgatcatgatggccataccgatgaaggacacagacagtgtggcggagatccgagaggcgttccgtgtctttgccaacgctgggaatggctacatctgcgccacaaagctgcttcgcgtaatgaccaccttgggctggaagcttaccgttgaggaggcgcatgatatgatcaggaatctggaac

SEQ ID NO: 691811 - DNA, 626 bp, Homo sapiens
cttttaggaaaaaacgggggggtggggttatttaaactgggtggattaccccgggtttttttgattgaaaaaccttgtggttgtgttcttcaaaaaagaatccctaatagaatgtgaaagccagaggaatttttttttcagaaagaggattttatttcctcctttaaaaaaatttttttaaaggaaaggacaaggtgactaatactcaaggggatgtttcttttagtgaggctaagagtcgcataaacactcttaagaatatgaaaatgtgtaatatataaatcgccagttccaaaagtgagcaaacctgttggtctagcattggcttggatagtatcatgagcatattttactcattaacatttaaaatcactttagtctagtagttcatcagtaacttaataagtaaatgggaatcatttattcatattatcaatagagtatattgaatgtagcattaagatctgagtagtgagttatgtcagtcctttaagtactttgggtagttttaagtttgtaatttcacttaaagtttctatctcaaaggctgcattacagtggtgcgatcatagctctttttagcaatcatactctagtatctgtttatcttgctatctcaatatctc

SEQ ID NO: 691812 - DNA, 867 bp, Homo sapiens
cggtcgggactcttcctcgggccccggggcacaccatggaggtctcctgagtgaatggcctgtcgtcgcccgtagaggggacccagcgcctcacctcccccgagagctaaacttgggaggctgatgacaggaggcactagggccaccgataagcaagggagaaagggcagatcatagggggagatgtaccgtgagtctggtgactgcgtaccctaacgtgacctctaacccgatgattccgccctcagctcctggaagagaggtcctaactatctctatagggacccagagccccgtaaagttctcctcgtcccccacttgtgatgttaacggtggagagggcataggcatcctcgtgtcacgtgatataggtgtctatgagcatgaggcgtaagaggttgttgtagttgtcctggtagccgtccagtcgagactctcccgtacttgtccgcatatttgcaaggaggaggggatttcggggctggggctccgattcaccaaagctgaggtggcttctcattaaccctttaggactgctgaagggtatggacgctatcgtgaatgtgtagtcagggggagacttgctggtgggattagtggtcctcatggatgttgatagaaacagtgcagtataaaaaggaagttggaatgggagttggcgggcagtgaacgagtgtgggtgaaggattgatgctggggcaacacggaacggggcctcgggcctcgtttggctgcacataactttggtagctgcagtgtgcataatagagctgggactggggagggagctaagcttgggctgggctaacttggggcttggcatagggtggaaagggctaacctggggctctgaccacattacagccc

SEQ ID NO: 691813 - DNA, 588 bp, Homo sapiens
  misc_feature (168)..(168): n is a, c, g, or t
  misc_feature (234)..(234): n is a, c, g, or t
  misc_feature (241)..(241): n is a, c, g, or t
  misc_feature (250)..(251): n is a, c, g, or t
  misc_feature (266)..(266): n is a, c, g, or t
  misc_feature (278)..(278): n is a, c, g, or t
  misc_feature (293)..(293): n is a, c, g, or t
  misc_feature (306)..(306): n is a, c, g, or t
  misc_feature (325)..(325): n is a, c, g, or t
  misc_feature (332)..(332): n is a, c, g, or t
  misc_feature (335)..(335): n is a, c, g, or t
  misc_feature (360)..(360): n is a, c, g, or t
  misc_feature (376)..(376): n is a, c, g, or t
  misc_feature (379)..(379): n is a, c, g, or t
  misc_feature (383)..(383): n is a, c, g, or t
  misc_feature (420)..(421): n is a, c, g, or t
  misc_feature (426)..(426): n is a, c, g, or t
  misc_feature (428)..(428): n is a, c, g, or t
  misc_feature (433)..(433): n is a, c, g, or t
  misc_feature (436)..(436): n is a, c, g, or t
gctcaaagccatgaagatgattcgggacaacctgccaccccgactgaagaacctgcacaaggtgtcgccatccctgaagggcttcctggaccgcctgctggtgcgagaccctgcccagcgggccacggcagccgagctgctgaagcacccattcctggccaaggcagngccgcctgccagcatcgtgcccctcatgcgccagaaccgcaccagatgaggcccagcgcccttccnctcaacnaagagcccnncgggtcaccccgccncactgaggccangtagggggccaggcntcccactcctccnagcccgggagatgctccgngtggcancancctccttgctgggggtagatgagancctactactgaactcnagntttngatctcgtgacttttagaagaacacagggactcgtgnngagcnangcganggntcccaaggaaccccagccctctgggaacaggcccatccccccaatgttcctctctgtctccagagaagggcacgcggccctcccatcactggaagtctgcagtgggggtcagctgggggtggagagaacgactaagaggtgaacatttataa

SEQ ID NO: 691814 - DNA, 165 bp, Homo sapiens
gtttccccctcataaaagtttggggcctggcatggtggcccatgtttccaattccggccctttgggaggtggaggctgggaggcccaggtgggaggattgctttattttaaaaattcgagaccagcctggggaacatgattagaccctgccttttttaaaagtta

SEQ ID NO: 691815 - DNA, 131 bp, Homo sapiens
gagagacatctgagaagtagggaaaagtaatgggtatgtcacaaggcaggtagaggatgaggagcctgtgaagttgtcattgaaaagccagagagatagttgggaaatgagtagcatagcatgatgccaga

SEQ ID NO: 691816 - DNA, 533 bp, Homo sapiens
cactatactactaacagaccgcaacctcaaacacacaccttcttcgagcccgccggaggaggagaccccatttctataccaagcacctattcatgattttttcggttctacgcctgaagattaatattcgtatatcctagccaggacttcgggacataattctcccagtattgtaacttagcatactccggagaaaaacagaacgcatttgtgagtagcagtagcgtcatggatcctgatgctactggatacgtcaaataggcgtaccaatagggtaaactcgatgttgagcacacgcattatactaaaacagacaggcaattcgaccgctggaccatcacagaagcaatactgttcagccatcccgacataacacaattacactcgatcgggcataatcgctcgcaaacacgggacgtcccaaaaggatactgtctagaacttggagcctccgagcacaacaacgttcccaacgggacaaggcaactaactgaaacagtggatcatgcgatgcaggtgcctcgtgaagaccc

SEQ ID NO: 691817 - DNA, 209 bp, Homo sapiens
tacaggcccaaagccacctcctagcgcccaggtgattggggtgctgctctgggttcgaacatgcggatctgggattgggggatctggctggttggagagacgccatggcttccgagagcacctcagtatggaaaggagagctgactcctaggtacttggagcaccaagtataggcagatcacggtgggcagattaggttggttggttgt

SEQ ID NO: 691818 - DNA, 698 bp, Homo sapiens
cttcttaaaacagccgggaaggttttcttaatttttggaatttttaaatatgtacccggggcccctttgcatttataaaaaaaaaaagtatttctgtgtgatacggccatggtctgggttttccccaaagaaagaccttttaacttaggttccccaccccgcaagggccctcctaaatatagggaccaaacggtgatgcccggaatggtgattggccgctctaaaagcatttgagtcgtcaagtttgcacatcttaatatatcaccctcactgcttatatcaccaggcttggaatgtgtgatagaagaactccactttgttcatcgagcacatgctcaataaccggctgagatcgtggtctgtttatacagttccgcggtggttccacgcctaggcgtcattcattccaagacgtgaatacctttgaggaccacaaagtcaatctgcgccatggagtggtggatactgaatggtcgcgaggtgtgcatactgccgtattcctgttcacatctacggtcaggagcggtgggataaactttcaaacgcgttaagctctgttgatgtgaccacaaccagcgggtccaaagctttatgttccccaagtgcttccccaacactcagtaaacttgtgtgaccacccctggaaggtttgtgttattcctaccaatggcgcgcaatatagtaaacaattaaattgt

SEQ ID NO: 691819 - DNA, 393 bp, Homo sapiens
tttttttttgagagggagtcctgctctgtcacccaggctggagtgcagtggccaatcccggcccaccgcaacctccgcctcccaggctcaagcaaatctcctgactcagtctctcaagcagctgggaccacaggcgcccaccaccacacccggccaacttcagtattcttagcagagttggggcttcaccacgttggccaggctggcatcaaacccccgatctcaggtgatccacccgccttggcctcccaaagtgctgggaccacaggcatgagacactgtgcctgacctaaaaaaattttttattaaaaaaataaactcctacttctgaaattcactagtgatatgaacaaagtcacaaggaatatacctcccactctagcaaacaacaac

SEQ ID NO: 691820 - DNA, 578 bp, Homo sapiens
cgaggatcaggaagctgctgatcaccagcttcaggtgtttctatttattgggagactgtctttccctggcaccagctgcaaccaatgattactttagagagacagtttaacaactgcctgaccatcacctgatggtcatctgacattcccgggactccagataagagcccaggccaaaggacaccttgattttgaccttgtcagacctggagttgaaaaaccagctgcacccttctagaattcttacttacaaaactggagatgttacaagacaagatgatttcactggaagctgagttttgccagctttggggaaatgctgatgcagaacatcatttatttaaggctgatactcatggatagaagagtcaaagtgcgaatatatgcacccttctatacggattctgcagaaagatatgcttgggtcatgactcagctatttacaaagttgctggtgactaattgctggaaagaagctgggacgttctgtggcccctccattttatatcccctccctttggttctctaggaaattgagttcaggaaagctaccaggaataaaactcttactttttaaa

SEQ ID NO: 691821 - DNA, 565 bp, Homo sapiens
  misc_feature (499)..(499): n is a, c, g, or t
  misc_feature (528)..(528): n is a, c, g, or t
  misc_feature (537)..(537): n is a, c, g, or t
cgaggatcaggaagctgctgatcaccagcttcaggtgtttctatttattgggagactgtctttccctggcaccagctgcaaccaatgattactttagagagacagtttaacaactgcctgaccatcacctgatggtcatctgacattcccgggactccagataagagcccaggccaaaggacaccttgattttgaccttgtcagacctggagttgaaaaaccagctgcacccttctagaattcttacttacaaaactggagatgttacaagacaagatgatttcactggaagctgagttttgccagctttggggaaatgctgatgcagaacatcatttatttaaggctgatactcatggatagaagagtcaaagtgcgaatatatgcacccttctatacggattctgcagaaagatatgcttgggtcatgactcaggtgaatttcctatgaaactttgtctttggtaaagcatcccattcttggctgttccatatatanatatatggtaagtttgggagtggccttgntagtaaagnataaattatttacttggttctaggtaaa

SEQ ID NO: 691822 - DNA, 316 bp, Homo sapiens
ctgtttttacagccgattcccattgcttccgttactgcctgagccccacctcctgttagatcagcggtggcattagattctcataggagtgcgaaccctattgtgaactgcccacgcgagggatgtaggttgtccgctgcttatgagaatccagcacctgccgatctgtcactgttccccgtcaccctcagatgggaccgtctagttgtaggaaaacaagctcagggctcccactgattctacattttggtgagttggaaaaatggtaaggaatgcaaatgtattattaatagaaataaagtgtacgataaatgca

SEQ ID NO: 691823 - DNA, 254 bp, Homo sapiens
ttaacatgtttgccagtaaatatagggagttatttggtaagcaaatcgatataaccagcaaagatacctgctacttctatatagatacaatatttctcattaaatcacaagactaaagacagtaagctcgatgacctggctcaatggtgctgggctatatgtgttcctaacactcttacgtaacagatgaaaataggatttaacatagtgtaacacacctgactagggttgtcaagcaacggtcttacacagac

SEQ ID NO: 691824 - DNA, 800 bp, Homo sapiens
  misc_feature (6)..(6): n is a, c, g, or t
  misc_feature (548)..(548): n is a, c, g, or t
  misc_feature (724)..(724): n is a, c, g, or t
  misc_feature (727)..(727): n is a, c, g, or t
  misc_feature (767)..(767): n is a, c, g, or t
  misc_feature (777)..(777): n is a, c, g, or t
  misc_feature (785)..(785): n is a, c, g, or t
  misc_feature (791)..(791): n is a, c, g, or t
  misc_feature (794)..(794): n is a, c, g, or t
ttttcntacaccaagttctcccgagagaagctggacaccctcgtggagtttcctatccgggacctggacttctctgagtttgtcatccagccacagaatgagtcgaatccggagctgtacaaatatgacctcatcgcggtttccaaccattatgggggcatgcgtgatggacactacacaacatttgcctgcaacaaggacagcggccagtggcactactttgatgacaacagcgtctcccctgtcaatgagattcagatcgagtccaaggcagcttatgtctttttttaccaacgccaggacttggcgcgacgcttgttgtccccggccggtttatttggcgccccagcttcccttgcttgcagctccccacccagttttgagttcatggatgttatttgagagccctgggtcctgccacaaaaaaaaaaaaaaaaaagccctttttgcaatttcgcttttggtgtccgccccgctttttttatttgtgttaggtgcccccgccaggcattgcaggtttagtcgtggctactgttttcctgtgccgntgcatcgctttctcccgggaaaaaacaggttgtgtttcctcctagcagtgggcgccccgcctgtgtttgcccttccagcagtgaccctcccttttagtttttatttatggtggggcccttccctttcctcagcccagagtgttttgggtgggtggtgatgggggttcccctgaacncanagtgtatttttttattgaggccctgtcccttttgctgggngtgggtatanataaagcnccagtntgntcccca

SEQ ID NO: 691825 - DNA, 533 bp, Homo sapiens
cgaggatcaggaagctgctgatcaccagcttcaggtgtttctatttattgggagactgtctttccctggcaccagctgcaaccaatgattactttagagagacagtttaacaactgcctgaccatcacctgatggtcatctgacattcccgggactccagataagagcccaggccaaaggacaccttgattttgaccttgtcagacctggagttgaaaaaccagctgcacccttctagaattcttacttacaaaactggagatgttacaagacaagatgatttcactggaagctgagttttgccagctttggggaaatgctgatgcagaacatcatttatttaaggctgatactcatggatagaagagtcaaagtgcgaatatatgcacccttctatacggattctgcagaaagatatgcttgggtcatgactcagacaatttggagagaattccctgaaacattcactgtacaactctactttcttgaatacttactataattaaagttcatttctgatttacataaagaaa

SEQ ID NO: 691826 - DNA, 106 bp, Homo sapiens
cgagttcacagccaacagcacaatataacgtcacagcactcctttggtttgatttcaggtgggtgtggcttgaagaatcacgtgaaatcaaaccaaaggagtgctg

SEQ ID NO: 691827 - DNA, 896 bp, Homo sapiens
tgcggcgctgggtctgttcttgtgtattttggggggaggggcggtgtgtgcggtgttgttcgcgggggggtggtgtgcttctgtcagggggtgacgatgtcgtggtggtgcgtggccagcggagtggtggagtggcccgctgggggtttgtcggtggttttcttttgcgtgcgctcgcattcgggtcggggggcgttcgtcttcgctgtttggggcggtgcgcgactgcggtggttgcagaaacagtggtgtcagtgtccgctcggtccgcagggttgggcgccggtgccgcgctgtgtggaagacgtgcttggtggggcagtggggttgtctgctgtggaaagaaggatttcttgggagggcagctgcgagagagacagaggtgttcccgtgagggtgcgtggtgcgcgccgcggggccagaagtcaccacgctgcggggggatcacactctcattgatggttgtgcgtgctgtgcatgtgtaggatgacttggtcgcacgacgtggccgcccctctgggatccggggcggcatttgggcagtcctctcgcccgccgttggatggggggttcgtgcgtgatgctgcgtgggccgcccggttgtgatagcagctgcgggcgggctttaaacaactgcgtccatggctggtgagttctgcttcttttctgcggtcgttctttgccacgaggccctcttgtggcacaacgccaaggtgccccacagaggaaggccgcaagaaaaaaaaacatggtaagacaaccgccgcagttttttctgtttccaactcgttacaacccccctcgaggagtttcactactagctctgtgtcagccggcggggcagccgggggtttagaccccgtttttaagtattattattttcgtccaacataaca

SEQ ID NO: 691828 - DNA, 570 bp, Homo sapiens
  misc_feature (11)..(11): n is a, c, g, or t
  misc_feature (439)..(439): n is a, c, g, or t
tcgtcacgccncacaagactgggctgctctcgacggggggcgcgcccaccgctgtgtcctctctgcccagtcctggtcttacctaaggtgctacctcagtgtggagatgaggttggaggaacgaacgcgaggttcctccgtgctttggtcgagaaaagtattcaggcaagtggtgtgtgtgggatgacctgataatggcgtgcacaggacatcgagcgtggtcggcctggagcagaagggcggctggctgtcctggagctgctgctgtagcctgccctcagagtgtccctttccagctgctgtggcactactgtggctgcttccccaggtgtggtgacggtggggtcggggtctccagctgtgacagttcaggacgttgatggtggacgtgatgcctctcgcaggagccttccccatgttcttgccttgtggagaatgntcctcccatgccgctgaggtgttaggtggtttagggccaaaaggggaaaaccacttgagtcttgtggtgtgtggtgggcagacaccacagggtggcatcacctggtggcatttccagaaacctcagccccg

SEQ ID NO: 691829 - DNA, 232 bp, Homo sapiens
gcaatcttcttacctcggcctctcaggtagctgggctacaggtgtgtgccaccatgcccagctaatgtttctattttttagagatgggatctcactttgttgcccaggctggtctcaaactcctagcctcaagcaatcttcccacctctgggcttccaaaggtgcttaaattacaagggttagcccaccacacccagcccttttttaggcccatatttttaaaattttctat

SEQ ID NO: 691830 - DNA, 1340 bp, Homo sapiens
  misc_feature (152)..(152): n is a, c, g, or t
  misc_feature (201)..(201): n is a, c, g, or t
  misc_feature (284)..(284): n is a, c, g, or t
  misc_feature (328)..(328): n is a, c, g, or t
  misc_feature (372)..(372): n is a, c, g, or t
  misc_feature (862)..(862): n is a, c, g, or t
ggataaatatgatagcgtagacatatacgcagtctcacttgtaggaagtactagtatatcgctcacaccgtcatatcctcgcgctgactagtgcctacgcaaggaagtaactatccgtgatccgcgtgttcagttcatacgctacttcgtcnatgattaccacgtcgaagacaacactcaacatcctcgtccttaagaccnaatagttgtagccgtcattgcccatacgtagtctcttcgccagcgatggcgaaaagctacgcaggatggagccctatgcaccntacatagtcatcaataggctctcgaacgacattgatggccatangagcgtaccgtacggagtccatgctaagaacctagactccaatntgctacaaaactaactcgtccaccaaagtacttattactttactatccacgttgaccatgacatttccagggacacaagaacagtaagtttcgaatcagatcacaaaccaacccacgagacctccaacagtgtagttacgcaatacgattcaccctgctcactaatgggtttgtaagcacaccatgcaaaagcaacgaacctggtttgatgccctgtgtcgcccaaagctttgtgcctctcgaggtgctcacatcaacctccggctggtaagtgactgaactaccctgaacatccgttacacgcccttgggcgaaatctaatggaggcgggtgcccgaatcagcgctaggattattcccatggtcgagaacccatcataattccaggggagacacggaagacgtacgtgaccttcccatcctcaggtacgtgaattcttcgcacgtaaacacaagtcatcccttctaagggaaactaaagcatttttcancaaggtgccacacagaaagctaaaggtccacctatgtggtccactgaggttccttatccatgtacgaggacaccaacaaactttgagtacgccgcgcagaccctttggagggctcactacgagttcaaccccgggaccgaagagggctagaacgcaagggggcaacgcaaaaccggccgtggacattggaccaggagaggcatttctaggtaggttgtcccgctggatggtccctaatggaagcccccccttagggtaaggggagttcgccgccttttgtaccgccctaagcttcaagttgcgggactcttgagagtttgcaacaaggcattccatacacaaggaaaccccactaagaggggtgccagcggtaaataaggcattgtgctaaacaaaactgggcagggtgtggggtcacactcgtgggtcggcccaccagaaacttaattacagagaactaccctgggagaggcgcaac

SEQ ID NO: 691831 - DNA, 406 bp, Homo sapiens
gaaagtgtgagatacatctgcttaatttaagctgtgaaatcagtctaagttcagttcatgtataacataggggcaggactgcttctgttatttatatgccattcttgtggacgatagcccgcgattagaagacatctcactggctgtggataaggtatatatcattatcgcactcgtaatgcacgaagaattgatagataaagtctctgagcattaaaggattaatatgttattacattgtgattaggcgtgtacttagatgacccatatcgaataagctgtaaggaggcatgcagtcaatctcactaatgaggagggaggtacttgcctggcaacagtgacccgtacaaacgaaggactgagacgagatggaggtgtctcaattgtgaactcatagaacagtcgt

SEQ ID NO: 691832 - DNA, 289 bp, Homo sapiens
agcgaccgccactcactgtgagttccacttaattcaggtgagccgctcttctgcacctcctcctcacacctctctacctatactaaccatttttgaaggttcaacaatgctctgcaaatctttttaagacccgttacttcaacaactcccaataccttcctcctcaacggaacaacttaaccgttaccttttaaacccgacgagctacaaagcaagagatacttcgcgagccaaattctacaaaggaccaaaaaagaaacccattaccttatagtactcatgcaaaaaa

SEQ ID NO: 691833 - DNA, 497 bp, Homo sapiens
ccatcctgcgtatcagtggcctctcccactcatgcatgacgtactcgttgccgatgcgcagtgaatcgccggtgtagaccgcctctgtcgccagatagtccttgcgttgcgggtccatgaacactcctcttctcgtcaaccacgggtaggtacggcgatcactccaacaggcagacggcgttaccgcaccagtttcaattcgggcctgccgacgaaggcttgcgccggcgttacattcgatttcagcagcagtgtctggaacccgtccttgaacggaaccctggcgaggatcgcgatactcagctcttcgaggtacagcgaaaagccttggagcatcttcaatggcagaccggcaagtacggcatatgcgatttcgagcagtaactggtcgagatagatcactagggttctttcgctgtaccggtgcagaatcgcttccagttcgatggcaaatacatggtagagagtgttgaggctctggctaccgtagcgaccag

SEQ ID NO: 691834 - DNA, 258 bp, Homo sapiens
cggtgttgagcttcacctgctagagagatcctaaaacactatgtgagatcatgtcactcctctgctcacagccctgcagtggtagatgaggtctagagtatgtgtagtatctacaataatttctgtgaatcatggtaatataattactgcacaggaatttcagttcttatggtgtgatggctcgcatttctaattcctcatacttacatgctgtgtactgggatgtggaaggtggtccgacaacctgttggtacgcga

SEQ ID NO: 691835 - DNA, 266 bp, Homo sapiens
agctgacttagaggatctcctgccttcaccacccccctgctccctttgtcctgtgctcaccctctaacatgctctttgaggctgaagggaggaataaaggagcaaaaacaaccgggcacagtggcttacgcctgtaatcccggcactttgggaggccgaggcgggtggatcacaaggtcaggtgttcaagaccagcctggccaagatggtgaaaccccgtctctactaaaagtacagagaaattagctggggtgggtggagagcgg

SEQ ID NO: 691836 - DNA, 173 bp, Homo sapiens
tacgagggttaccctggaattcataaactggcgccacaggttcataacacactatctaaacaactgaatgttagttaaatcgagctcctttgatgaaaccgcttcagtgtctgtttcttataaagaggccctctccttcccacacctccatttgagagggcagtcgaatgatc

SEQ ID NO: 691837 - DNA, 824 bp, Homo sapiens
tagtaccacagaaatacaaaagatgatcagagactgttatgaacaactatacactaacaaactgaaaaacctagagacaaaggataaattctggacacacaatataccaagataaaattaagcagaaatagcaagtctggacagtccaataacaagtgaaaaaaacaattagttatataaagtgtaccaacaaataaaagcccaggatctgatggcttcactgaaaaattttatgaaatattaaaaaaattaatactacttcttcaaaaataatcgagaaaacttatgagagtacttccaaacacatttttcaaggctcctgataccaaaatcagacaaggataatacaacaacaaaaaggaaaactacaggccaatatcccttattaacatatatgcaaaaattctcaagctaatactaccatatcatattcaacaacacatttaaaagattattcattatgatcaagtattcgtgcagggatgtaaggatagttcaatatacataaatcaataagtgttattacccattcacattaagagaaagaaagacaaaaaatatatgatcatttcaatagtgcagaaaagcctgggcaaaattaaacattcttcatgattaaaaaaaaactctcaaaaagtatgtatagatagtcatgtatttcaccacaataagaacttattatatgacgagctctttgctaacatcatactccatgggaaaaacaagtatgtccttttactatctgaaaaatccagaaacagtgtttacattgccaaaaaatagatcagaagaattacaaaatcattcaaggttaactaatgtaa

SEQ ID NO: 691838 - DNA, 252 bp, Homo sapiens
cccaaacctacttcaccttactaccagacaaccttaggccaaaccatttacccaaatatagtataggcgatagatattgatacctggcgcaatagatatagtaccgcaaggaaaagatgaaaaattatacccagcataatatagcaggactacccctataccttctgcatatgagttactagatatacttgcaggagagccaagctagacctcgaaccagacgagctacctagacagctaaagagcacacgt

SEQ ID NO: 691839 - DNA, 765 bp, Homo sapiens
  misc_feature (10)..(11): n is a, c, g, or t
  misc_feature (29)..(31): n is a, c, g, or t
  misc_feature (53)..(53): n is a, c, g, or t
  misc_feature (55)..(55): n is a, c, g, or t
  misc_feature (77)..(77): n is a, c, g, or t
  misc_feature (81)..(81): n is a, c, g, or t
gcccctcggnncgactatttaggtgacannntatagaacacgcttcgctgttnanttacatagctagtgtcgtcgancggnacgtgtgcactgcagtgcaagctggtcggtggtggcgtgcagcttgtgcagctgtgtgcacacgtctctgacattactgtgctgcacatctgcttgcgcatcagctcctaggtcggtgaagtgacgcacgtctgggtctcagtgccttgaaggtcatgcccctctgagctgggcatcaagtggggctgaggccgaacatgggaagcacggggagcagtatgctcagggggagatgtggggagcaggacccagacgtcccggagccccaagcccaccaggagaagggaggtgtcacggagtgagctcagtccagtgatacccagcgccgcaacctcatcattgtggtgtgcgtgggcttcctggtgctcatggtcgtcctgggcctggtgcgcatccattcccttcaccgccgcgtctcaggggccggcgggctccagggcctccagtgaccccaaggacccagacctcttctgggatgactcagctctcaccatcattgtgaaccccatggagtcctaccagaatcggcagtcctgtgtgacggggggctgttgggggccagcaggaggatgaggacagcagtgactcggaggtggccgatttcccccagcagcgacgaaagacgcatcatcgagaccccccaacccgtataaggctacacctctgagggctccctccatggac

SEQ ID NO: 691840 - DNA, 246 bp, Homo sapiens
  misc_feature (34)..(34): n is a, c, g, or t
cccaggagtgcgaggttgtggtgatgccgagatngcgtcactgcactccatgcctggggaacacagtgagactccgtctcaaaaaaaaaaaacaaaaaaaaaaaaagggaacccaattttaattttttcgggttttttccccgttttgttttcttgggaaaaccccaggggtttgcccaatccaggaactcaatttccccctttggtttttgggtccaagctttccctttttattttccccccccc

SEQ ID NO: 691841 - DNA, 607 bp, Homo sapiens
agcggagtggggctgacgctccggtgctcgcacaatcccccgcctcggctggcaacgggcgtccctccactccccgagtccccggcagccgccgccaccccagcgcgccccgagagcccctcgagcgcagcaggccgcacccgccaggcatggcagaagctgaggaagatggtgcagtgctgatactgtcagagcagatgatgagtgaagaaaatgaaagtcctgctgaaacagatccgcaggcacaaactccagatgtgccgagctcagtggatgtttgaacttgctccaggtgtaacgctctagcaattttacgaaaatcgcaccttgcagagccagccacagaggcatctcgtccaagaggaaccactcggcagaataccaagcaggacaaacaagaaccaggcaaaagaaggaaacggctcgagaactcttcctaaaagccagtagaacaaagaaccacaatggagcatatcctatgaaggccatacaagattagatcgaacggggctatgcaacgttgtaccctgatatagcagttccacggattacttatacccgggtctcccagatggtgatggcgttggaaacgctacattgacgatac

SEQ ID NO: 691842 - DNA, 372 bp, Homo sapiens
  misc_feature (160)..(160): n is a, c, g, or t
  misc_feature (289)..(289): n is a, c, g, or t
gctttttttccccctgagacagagtcttgctctgttgcccaggctggagtgcaatggcgcagtcttggctcatggcagcctccacctcctgggtttaagtgattcttctgcctcagcctccggagtagctgggattacaggcgtgtgccaccacgctggncgaatttatctttgtatttttagtagagatggggtttcaccaagttggccaggctggtctcaaactcctgacctcgtgacccacctgccttggcttcccaaagtactaacattacaggcgtgacagccnacgcctgggcaaattttaactttctgtaatagatctgtgttcattttatgggtagtaaatgataaaattagactaccaacata

SEQ ID NO: 691843 - DNA, 185 bp, Homo sapiens
ctatgtgttttaggggactttggcttttctttttgcaagggcctttgaatctgtttgtgtccctgttagcacaatgtgaggaggtagagaaacagtccccctttgtgtttaccatgacccccttcctcacactgacctgtgttccttccctgtttttttttttattaaaaataagaacctgggca

SEQ ID NO: 691844 - DNA, 364 bp, Homo sapiens
tttttttttgttggagactgggtcttgctctgccacccaggctggaatgcagtggcacaatcatgactcactgcagcctcaacctcctgggctcaagcgatcctcccacctcagcctccctaggagccgggaccacaggcatacgccaccacatctggctaattaagaaatttttggttttttttttaagagatggggcctcaccacattgtccaggccggtctcgaacctctgggctcaagtgatcctcccgcctcagcctcccaacttgctgggattacaggcatgatccaccacgtccagctgactctgactcttttttttttttttttaaactctcccaggttgtcaagaggtcgacgcg

SEQ ID NO: 691845 - DNA, 281 bp, Homo sapiens
ccttttttggaaccactccagcccagctccccctcagccttggccttcacgctgtggaaacaaacaaggcacttcctcaccccctcagcgccccggaccttttttgggagtggccggaaaactcccgggcctttggcctgcagggcagcccaagtcattactcagaccaggtcccccacttagctgccccccctcgaaagccaaatatttttgtagtttttatgcctttggctattatgaaaaaggttagtgtgttccctccaataaacttgttcctgaga

SEQ ID NO: 691846 - DNA, 165 bp, Homo sapiens
ttgctctgttgcctaggctaggagtgcaatggcaccatctcggctcactgtagcctcaatctcctgggttcaatcgatcctcccacttcagcctcctccacacatcaccatgccctgcgtaagttttttttttttttgggtgaccgcaattccttaaaggcggga

SEQ ID NO: 691847 - DNA, 249 bp, Homo sapiens
ccagttacaacagctgaaggaatttgaggggaagactttaggtgtcagtcaccaacagaaggcctggtaacttccagaggatgaatgaagagaaaaagaagcaggaagagaagaaaacaaagttcgagaacctctgcaaaatcatgaaagacatattggagaaaagaagttgaaaatggtggttgtgtcaaaccggattggggacatctccattgctgtagttgtcacaatgcacattatggctgggac

SEQ ID NO: 691848 - DNA, 939 bp, Homo sapiens
gctgtcttgaactcctaatgtcgtatccacccgcctcagcctccaaagttctgggtttacaggcgtgagccaccgtacctggcctaaatcgctgttctttataaattacttagtctcaagaattctgttatagcagcaccaaatggactaaaacatcatggttcctgcttttttggctcactaagtgctcgtggcttttctctttcaaaattttattgctaaaataaataaagatgtcactactttacaataattcatcacattccatttttttgtaagaaatagtaaaagttggatttctatgcccttggaaaagaactctatccttgaggcaatctgaaactaagcatttaacaacttgaaaaattagatcactaccctctgaccaaacaccagaaagttttatactgaaattcagatactctttgcttgtttattggcagggaaaaagccaaaatatcaagaaagccagcacaaatatgtagtagtaatatccccttagctaacatagatttgcaccacccatctaccttctatcatgtcatcctttttatttctttcattttatgtatgagtctttgaaatgtttgtgtttttaaaaaccttttatttttttatttccttcattaaaatgtaagctctccaagggcaggcctttatgctcatatttaccaccaatttgctgctgcctagagcagctcctggcacacagaatgacctcaaaaaataccagtggaatgaaagagtaatgaaagaaatgactcatctggttttactccaaaagaagtagttctaattttttttaatgcttaaagaaagccaaatggatatacatataggatttccagtgtcataaaagtaacaaaattagcttactcttccaaactcttattttattaatattttttaataataaaaaattatagaatgcttaaaaaa

SEQ ID NO: 691849 - DNA, 104 bp, Homo sapiens
cagaggagctggagaacgaagacctaaagctctggacttagaccatctaccagttttaaagcgttttaaaaggggccccacaatgagagttttcattcaaaatt

SEQ ID NO: 691850 - DNA, 377 bp, Homo sapiens
ctcggctcgctacaacatcacctaccagcagcctgccttggcctcccaaagtgccgagattgcagcctctgcccggccgccaccccgtctgggaagtgaggagcgtatctgactgagcgcccatcgtctggagatgtgaggagcccctctgcctggatggccagtctggagaagtgaggagtctgtactctgtccaatcgttcgatcccatctaggtaagtgagacagcgcctcttcccgatcgccatcccatctatgtaacgtgcggagccttctctgtgccgtgtgcagccatcgtctgaagatgtggggagcgcctctgacctgtcgaccccgatccgggatgtgatggagcgtctcttccctggaacgacaca

SEQ ID NO: 691851 - DNA, 154 bp, Homo sapiens
cgtccctctaccaagacctggatttcaggcagaagcaggaagcagcagaagcaggaagagcagaacagggcagaagcaggaagcaggtgaaaagggtagggtaggaaagtgttgttttatgtgcgtgtaaaaaccctgtggcagaagcaggaag

SEQ ID NO: 691852 - DNA, 279 bp, Homo sapiens
cacacagcccggtctcagctgccctggtaggcccacaacttccctaagtcaagctccccaggcccagctcaggcctcgccgtggcctctccaggctcagctcctggcccttcgatgacatctgcagtccccatttgttctttgatctttgttttctttttatttagcttgttcctcccggcgtcctctcgagtcccaaatcgttcttgtttctttttttcatttttatcttcttttttttttctttttttgcttctttttttttttttttttttttttt

SEQ ID NO: 691853 - DNA, 219 bp, Homo sapiens
agctttaaatagcgacgcacaccaggctcattggtctacagctgcttcaacccatcatgtctttgttgatcagtttattcctattccttagattttcttaagtctgaagtccctgagatatatagacacatttatggctctcgatagcactgccaactgttttctaaaagggtgtaaccgtgtcaaatgccactgtggtaaaaatcgtcacgcaacagc

SEQ ID NO: 691854 - DNA, 992 bp, Homo sapiens
  misc_feature (992)..(992): n is a, c, g, or t
tggagatctctggatccatgaccatccttttccttctccttgctccttctccttctccttctccttctccttctccttctccttcttcttcatttgagatggagtctcactctgtcgcccagacctggagtgcagaggcgcgatcttggctcactgcaagctccgcctcccgggttcatgccattctcctgcctcagcctccccagcagccgggaccacaggtgcccgccaccatgcccagccatttttttttggtatttgttagtagagacagggtttcaccagcgtcagccaggatggtctcgacatcctgaccctcgatgaatggcggccccgcatgggcagcacccgaaagcagtcgggaatcgacacgtggctgagcgacccacgaagcgacagcacagggaacaaccagggaaccaggggaaacgcagagcggcacagagcgccgacagccgcaagacccgcaggggcacacacacaccgcggcccacaactgaaccccacgcgaagacctatcaccacgctcccctaagcgcctcaacaaactaacacactgcacacacgcgcggacaacaagagagtcaacaccgaaggacgcacattaagcgccgcgagacccggccagtgacaacccacccaagggacacaaaaccgcggagccctactgcccacaacgggaaacccacgcacctctcctcccgaccccgcgcacgcgtacccggaacaaaacgcggcgcagcagtagacagccactatcccgcaccgatggccagccagacacccccccctcacaggcccgccaagccggccccggcggatcgccgccacgcgacgccgcgccacgcctagccacaccgccacgcaccgcggactacacctaccagagagtccagcagagccccggacacctgcaccgccctccgtgcattaccctagcaccactactcacctacatcaacaaaaccgcacggtgcagtcacgccacaccn

SEQ ID NO: 691855 - DNA, 539 bp, Homo sapiens
gtttttctgtaaccagtgggccttatctatactcctaattccagttccttgtaaacatcctttgtaaagtcccataagatcctgtctcctttgccatacagctgcaaggtcataaagtagataaaacctaagttgcaattctggttttcctcagaatctaagacatgttacaaagagttaattgtctttgtttctcatctggtaacatctacccgctgcacatatttcttaccttaaagagtttaaaaggcaatcgtataatccaactctgcctacactttcgggaccccttccacactctggaagctttgtactcttgttctgctcgataaaacctactgctcattctcggtccgggtctctatcacttgccgtggtcagctgccgcaccagtttttggtgtggctaggcaagaaccttaggcattacaatgtgatgcccccagatttgttctttttcttagtcttgctttggctatgcggggttccaacctgagaatcaaataacaactcatccattttcacaatagctgcaaaaaa

SEQ ID NO: 691856 - DNA, 1081 bp, Homo sapiens
  misc_feature (664)..(664): n is a, c, g, or t
gtgcacgaactccatggcaagcagcaataccgagtaccagtgtatcccagacagcaccatcccccaggaatgactactcgctgctgagcatacctaccactcgatggagagctgtcgtcgcatttcagtgttcacactctggactgtatggcatgtgtgatgtcgtgtgagaagcctatgcccgagttgctcgggcctgtttgttggttcaacacgaatcctagtagctaccgtggcatctaggttcgagcagacgtggtctttctattcaatgcactggcatggatgccgacagtggttcccctggatacccatactacatgaactacctatatgatgagaggcactctggtcgtgatcggctagtcgtgcatgtgtgactcttgtgcctagacctactgcctgaatgctatctccatctcagtcacgaactgcgggctctgccacttcgttgtgcacgaggcatgtgcatctctgacaagcttgggtcgaggtcgagcataggcgaatgggtcaactcgtagtggcacacgccgctgacgagtaccagagaggcttagacagtctcccagtgacatgacgagcattgtcgaccccaggcagcacatacggtgtcaattcaatgtcccaacatgcttagacacactggtggagcttctacccnatgccctcagctcattggcgacttgtctctggtctcccttagctcgccagcgaactccatcgggcggatactgcacgtgtgcctcttccaaacgccgtgttggcgctcgctacagcacacgactcaaggcattagttctacccacacgtggggggtctagttgcccacttcaccatgaggcacgagttcccgtcgggcaagcccgcatacacgtgctggttcacatcagttcgtgcagagatggtcacggtcaaatgccccccttgccttgcttggcctgcttcgcaccatctgcccaacagcgcacgtgcgtggttggtggcgctaggcagttgggggaccaatgtcctcatccgttggcaagctgtttctactcgacagcttacggttctcgcgacgaggaggcactttggcggg

SEQ ID NO: 691857 - DNA, 313 bp, Homo sapiens
gagcaaagggatgtggtgtgagttgcgattggatggcattcacaccccacccctcacccacatccagatacaagtcaggaaggcagggttatttcaggccccttttcaagatgccctggctagcagattctgcaggatgaggggtaggcggtgtgtaggcagtgagggggaggttccagggctggcccacagccgtgacatttggtccaggcatgggctccgattcttccagtcgccaaaacccctccttcacagggcccagaggcttgtgaggaagccacggtggacccagccgttagaagagtggagcaat

SEQ ID NO: 691858 - DNA, 117 bp, Homo sapiens
tagaggatctcgagctcccgtatatacacgaggatatgtgggtgtagagcccataggcataactcttcagcacctaggtctgttcgatgcagggccataggtggacagtaatagcta

SEQ ID NO: 691859 - DNA, 293 bp, Homo sapiens
tgtcctgacgacaggcgactcgggcgctttgtggcactacgagaacacgcttggcgtctaactctgcagctgttccgtgggcttccggctctctgtggattgcaggtcatgtgagacatccatgagtgcagcagcagcccctgtatgccagtgagtgtgccacacgtctacgtgctccgtaccaggtgttacttgccggcgaggctaccagctcagcgatgtggatggagtcaccctgttgaagaccattgaccgcagtggcgccctgtcccaccgggtggccacatctgctc

SEQ ID NO: 691860 - DNA, 349 bp, Homo sapiens
ctcccgtgggaatgaacatcttctgtctgtgtgccatgaggagtcagcacctccatctgcttgaaaaaatctaccccgcctcaattcttcaggcaggtaatcctgatgacaggctcagctgtacatggtggtagtagcttgatagcctttgccatagcccatatccttcatcagcctaatgagcgcgttcctcaggtgcaggggcacggggggcagtgtcccctgttggttcctcatgcaggctttgacggttgtttgttcgtcgctgtacacctcaatggatctttgctgctctggcaacgtcgaccacacactggggccagaggcacctacatgttccccagggggg

SEQ ID NO: 691861 - DNA, 175 bp, Homo sapiens
taccccctggcggaccctatcggcgtaactactacaaatgattttgggagtgactcacgaagtgatgaatgcacatcgaatggatcacaagatggaatttagcaaaccctagccttgcttgtcataaattattttttctataagaattatctgtagagtggtactgatctttgct

SEQ ID NO: 691862 - DNA, 135 bp, Homo sapiens
ttgtagttggaggatcccagcggggaacaatcatctttggctatggactagcaaaagtgaacaaataggattacatgaagtgaaaaagcttatgtacagcaaaggaaacaatcaacaaagtgatggttccccgcg

SEQ ID NO: 691863 - DNA, 169 bp, Homo sapiens
gctccagtatctcatgcttgctctcctctagactagatgctgcctcaggaggttgcacgacagcagaggctgaggtgatctatgcagacctggtcgcggaaggacgatgcccagagcgcagttgggcactatatacgatgagggtgtcatccgcttgctaacctagaag

SEQ ID NO: 691864 - DNA, 198 bp, Homo sapiens
tgacttgtatagaatccctgcatgatgatctactaaaataagagagtcacacatcgtgcggatcacgaagccgggattacaaggtcgtccgtagtgtgaagaatagctctatgcgacagaccttcacgttcccagatctgtttcccgagaaagacgagagccctgaaggcagtcctgccaagcactagtgtccgccaa

SEQ ID NO: 691865 - DNA, 378 bp, Homo sapiens
  misc_feature (1)..(1): n is a, c, g, or t
  misc_feature (37)..(37): n is a, c, g, or t
  misc_feature (74)..(74): n is a, c, g, or t
  misc_feature (234)..(235): n is a, c, g, or t
nctttgcgatactgctttattgaaattaattcacttntggacgggcgtggtggctcacgcctgtaattccagcnctttgggagtccaaggcgggcggatcacttgaggtcaggaattcaagaccagtctggccaacatggtgaaaccccgtctctgggaggctgaggcacgagaatctcttgaatacagaagacgaaggtggcagggagtcgaggttgcgtcactgagctccannctaaagtcatcttgtttcagaacatctcgtttcattctgccacgttccatgtgtggatctggccagtgtaacatctcaacagtttattttactctttccaactttttattttgaaaatttcataccttcataaaagtcttaag

SEQ ID NO: 691866 - DNA, 172 bp, Homo sapiens
cctcataccaggtatatgcagagaatggcaagtgtacgagctgttccctaccctgtaatcaaccccttaccagccagcacctccttcaggttacttcatggcgatctatcccacagactcataaccgtgctgcatactatcctcctagccaaattgctcaactgagaccaag

SEQ ID NO: 691867 - DNA, 206 bp, Homo sapiens
tggctggatagccggtgggagagcaagaactaggatgggataggagctctggagcacagatttgagcacagcagggtgacatgatggtatacgactggctgttggaagcagtgccctggctactgctcgcctcggctgattgtaggtagatgccaggagcagcaccaccaggacagcagcaccaccaggacagcagcaccaccaga

SEQ ID NO: 691868 - DNA, 1254 bp, Homo sapiens
gagtattaatcatgctacggttatctggtagcgaatgtatgagcgagtagtgaggtgttatcatctagcctggtagagcactcgtacgggtattctggttccgaaattcgtgaaaacaccgtcaaggtaccgacagggtaacggtcgtctgcggttgcattgcaatgtctcgagtctactaccaaccctgatgcagtaacccgtgcatcgtgtgtcgcgtgtagcacgagggccatggtgcgtctcacgtctgcagtgcggaggcttcccactaatcctccactcagcgctaggttggtttcgagagagtcgtccagtgcgtctactacccatcacgagacctcatcgggaccatctgaagttcggggccccttgctacgctagatgtcgcctcgtgctaggagtgctgggctgtgtgggagcgctcgaatcgctaggtgacgggtctctccttgtctagctccccagtgaggatgtctagagggcatagcacggtcggaggccttggctaagtcatagtcaacgcgactgccgagtgtcccccagccgtcggcgatccataaccaagaaggactcccgtgttggtaccttggacctcgcacagcttagatttctttaacagagagacgatcagaaaaggctctggaacgggttgtgacagctactagaacccatgcgtggcgactgtgtttggttccctatcagttaagtcttgcaggttgaaggaacctcccgcaagacattccgcgacggatcgttaacctttgctcgtccacgcatacttgtatcgggcttctctagctgcttgggtcgtcttggagctatgccgaacgtccgcgggtgtcggaccctgcgcctttctttgtgtttgtgcccattagcgcttgaattgtcttgagtctgtgtggctgttgtgaacttttgattgggccaattacccggtgtacccactgtgtcctcttacctaacgcctttatttcctttgcttgtgggaaccgttggtgttccataagttcggtcctggacttggcaatcgtgcctggggaacccggtgacctttgcccggtgtggtgggcgccctccggcagcatatcccccggcgggggcagattcgcttgggagctttgcggttttgccaaccccaagaaagcactaaccccgcggcccggattggggcttgtggctggccacgtcctttcaagcacgcgggaggggcttggggcggtttccaacggctggctttgcgactggccc

SEQ ID NO: 691869 - DNA, 371 bp, Homo sapiens
aataatgtgtagccaatagcaactgtaatttgtttacctttccatgaaaaaaaaaaaaatcctggcacaaaaatgatagattagtacctgcagttgtagccaaactcttggcaggtcctcagtcaatccaaggtattctctaatagagctagactcagtatataggaaggcaacatccgagatcatctggcattgattacctacatcaaaatatcccgggaaaattctagattaatttgaaaaataaaaggtccactctggaagaccagcaaaattcaaatttctggcatcgactgaataaatcctatttctaccgcgaaataatccctacatatattttcctagtccccatgggcacacattcatggcag

SEQ ID NO: 691870 - DNA, 90 bp, Homo sapiens
gtcatacttttgacgccgttgggtttctcataagtatcctagttcatgtacatccgatgctaaataatactgtgttttgttttgtgttgc

SEQ ID NO: 691871 - DNA, 304 bp, Homo sapiens
aatggaggagcccgactcgtagatactcctgcttgataatccacatctgctgagaaggtggacagtgaggccagagatgagagccaccgatccacaccgagtacttgcgctctggggagtgcgatgatcttgatcttcatggatgctgggcagccagagacggtgatctccaatctgcatcctgatcagacaatgcccaggatacatggtaggtgccgcccgcaaagcaccgagattggcagtacaggatctttgcaggatgtccacgatcacacattcatgactggacgttgtccagggggga

SEQ ID NO: 691872 - DNA, 577 bp, Homo sapiens
  misc_feature (531)..(531): n is a, c, g, or t
tccctgagaatccaaaattccccggccacctatcacaccccatcctaaaaaaaaaaaaaaaaaaaaaaaaaaaaaaaaaaaaaaaaaaaaaaaaaaaaaaaaaaacatatttgttggggccgtgctgagccccagaaaaacgcttttaaaaacaattgctgtggtggggcgcgggcgccccagtagcgataactagacagggtgtgatacaagcgggatttccctgaggaacaaccctggggcacagcgaccatgcggcgtggggtttctccaacccaactaaaaaaacgccgcggcgggggtcaaacggaggcgctgctttgctgaaacaacaccacaagagactgggagttctgcggacgtcatgagcgggtggatctattataccacagcatgagattcccaaacggggacgatcgccggaattatatcaacaaacattagacagcctccgcgcatgtggagtgtagcgacgagtcactgacgaatctgcgagaaggacgatagaactagtagcaagacgcaacaggncgaagcaacgactgaacagagccatacgatcgatgcaggcacgtaa

SEQ ID NO: 691873 - DNA, 785 bp, Homo sapiens
ccctcgccctgcgtcggcatccatccgagtacagcatcctgagggaggagctgcagaggcctgagcggtggacaagcgaggcgtcatcatcgagatcgtgcgacgccatcctcggcctcggaggagagccccaagcgggagcaggactcacccccgatgaagcccagggccctggatgccatcactgggatggagactggctgtcctggggcgcggaccgagacgattgctgccaattggctcggacggttggccgtggcccgagccgggttccttcctcgactacccctcaactgagccccaagtctggacccgagcttgcccctggagacgtgagccctggagcgctgagactgcccatgttgccacgtgaatgcctgataggaaggactcgcatggttccaatacaagaggtcctgcggccacaaaagggccctggggctctaggtccgtggtggccccgaacgcgccacttgccatgtctctcaatatagcaacacaataggctagttgaccctgttggcattggggcgggagcgatcgaacggcagacggcggatcgagtctggtgagttttccatgtcgtgcggtggctcttctccacgtgagcacagtgtcagacgtgcgtagaggcagtcgatgggcataactggacctgggccgcaactctcaggcaaccaatcaagaataaccggaatctacaaggtcgtgtttaacaaggcagtgccgaaaagcgacgaaaggaaggcccttttcaagggcatactggagacttgagaataaca

SEQ ID NO: 691874 - DNA, 135 bp, Homo sapiens
  misc_feature (38)..(38): n is a, c, g, or t
ggcaaagttgatctagagagatcccctgcactactggnagcagctaatgcagtcgcaattcttgtaattgcattgcattcaaccgctcccattgggtggaggctgcttcaggatgttgaagttcccagaggtagg

SEQ ID NO: 691875 - DNA, 98 bp, Homo sapiens
  misc_feature (6)..(7): n is a, c, g, or t
  misc_feature (23)..(23): n is a, c, g, or t
  misc_feature (27)..(27): n is a, c, g, or t
  misc_feature (42)..(43): n is a, c, g, or t
  misc_feature (56)..(56): n is a, c, g, or t
  misc_feature (87)..(87): n is a, c, g, or t
  misc_feature (94)..(94): n is a, c, g, or t
  misc_feature (96)..(96): n is a, c, g, or t
ggaganngggaacagattgttcntaanccagaagagaagttnncccagaggaaaangatatcccagaagaaactgaagaaccaaaancttatgncncg

SEQ ID NO: 691876 - DNA, 384 bp, Homo sapiens
gaggacaaggtctctgcccattctgagcctgtgctcagcccagctgactgtgcctgccccgggcagcctccacctctgatgtttggacacggctgcccggactcgattgagaaattgattattttttagtaacccgtctgatcttttccaccttcagagatggagagagttagaattttgctgtttttcctatgtcatctgccagtcaggcctatccgtcccctgcctcataggacacgatggagagaggttgggtgggggccggcagcctccatttccagccttctgtccttccagcacagaaggtagcagcggtagtgcccagcctgcctggcccccatactccaagcaccaccaccggggccactgagggacaagccttgc

SEQ ID NO: 691877 - DNA, 1417 bp, Homo sapiens
  misc_feature (371)..(371): n is a, c, g, or t
  misc_feature (917)..(917): n is a, c, g, or t
  misc_feature (1012)..(1012): n is a, c, g, or t
  misc_feature (1023)..(1023): n is a, c, g, or t
  misc_feature (1041)..(1041): n is a, c, g, or t
  misc_feature (1055)..(1056): n is a, c, g, or t
  misc_feature (1088)..(1088): n is a, c, g, or t
  misc_feature (1199)..(1199): n is a, c, g, or t
gactactccagacagacggctttggaatccaccagctacatccagctccctgaggcagagttgagaatggagagaatgttacctctcctggctctggggctcttggcggctgggttctgccctgctgtcctctgccaccctaacagcccacttgacgaggagaatctgacccaggagaaccaagaccgagggacacacgtggacctcggattagcctccgccaacgtggacttcgctttcagcctgtacaagcagttagtcctgaaggcccctgataagaatgtcatcttctccccactgagcatctccaaccgccttgggccttcctgtctctgggggcccataataccaccctgacagagattctcaanggcctcaagttcaacctcacggagacttctgaggcagaaattcaccagagcttccagcacctcctgcgcaccctcaatcagtccagcgatgagctgcagctgagtatgggaaatgccatgtttgtcaaagagcaactcagtctgctggacaggttcacggaggatgccaagaggctgtatggctccgaggcctttgccactgactttcaggactcagctgcagctaagaagctcatcaacgactacgtgaagaatggaactagggggaaaatcacagatctgatcaaggaccttgactcgcagacaatgatggtcctggtgaattacatcttctttaaagccaaatgggagatgccctttgacccccaagatactcatcagtcaaggtgctacttgagcaagaaaaagtgggtaatggtgcccatgatgagtttgcatcacctgactataccttacttccgggacgaggagctgtcctgcaccgtggtggagctgaagtacacaggcaatgccagcgcactcttcatcctccctgatcaagacaangatggaggaagtggaagccatgctgctcccagaagacctgaagcggtggagagactctctggagttcagagagataggtgagctctacctgccanaagttttccantctcgaggggactataancctgaacgacatannttctccagctgggcattgaggaagccttcacncagcaaggctgacctgtcagggatcacaggggccgaggaacctagcagtctcccaggtggtccataaggtgtgcttgatgtatttgacggagggcacagaatgcgaatctngtgccacagcgagtcaaaagtcagcctccttatctgcgatgtagtggagacaaggaccatggtgcgtttcagacaggcccttcgtgatgatcatggtgccgtaggagacacgccagaacatcttcttcatgagcaaagtcagcaatccaagcaagctagagcttggcatcaagcagggggcttccagtaaggaacttgggaatgagctggatgccggg

SEQ ID NO: 691878 - DNA, 1471 bp, Homo sapiens
  misc_feature (626)..(626): n is a, c, g, or t
ggagagagagaactagtctcgagttttgtgattatttttttattccttcgtatgccaccttttttggtgttccccaacttcctggggccccaatgtggttagactttggccacatgtggcttactggggcctcctgtggcctttcctataggggcttagcagctgtggtgtgggtcaaacacttctgtgccctgtgcgtggagaagcgtgccgaggccatgtgcccggggccacagagctatagtgtgcggcgcctcctgtggcttcagctccgtgaattaggcgaggtgccgagggacaggcgttagaagtgtgccacacgtgtggcggccctgtgggcctgtgcgggaatctcccgaggcaccacgtgtgcgggggagtgtgctcctgtcgccccaaggctctctgtgagcgccgaccactctgcgtctcccagggcgagagaaccccgaggcgcggggtgtctcctttgcgcgccacagctgtgttctccccagggacgccgcgggggtgcagggtgacatgtggtgtcgcgtgccgcatccctgtgcccacgtgtggcaccttctgtgctctccacagacggttgtgcacccaccagggctttcagaggcggggccccatanacgtggggtctctgtgcacagaactctcacagagggaccctatacgcggtcgcaagaacgaagctcatgttgtttgccgtgagcggcttactaccacctttagagcccaagtgggtctcgagggtgtcccccccccgagagacgagagtttagacaccaacagcgaggggatactaaggcgagagtttctcccgggcacccaaagtttatttcgcgggggagggtaacacaaacaccaccggagggacaactttcgcgaagggaaacaagcacacccgctagtctgtcgcagaccccgttcgccaaggggggggatactccaccaagccgaggcaccacaaaaggggtctcactcaggttcctctagctaccacaagagggacatctcctactaccaagggggtctaccgcaaggaggcaccaaggtctttgtggcaccaccagggggagacagaccccaccttctatcccgagggcacccctaccaacaggacaagtgctaatgtttggggccacacaaaggtctctcttattggttcccagaaaagaggtcttccgccaagctttgcccttttgggaaggcgatgttggggtcctcccaacgcctttgattgcccccgggtatggggcccctgtggcaaaggagttctctaccaggttaggaagggcccccccccttctcagggtaggggggacccccctcatatttgggtgcggggagcatcgtgtggtgtggtggtggtccccctctcataatcatgttggcgagcgagggtctcccatataggtgtacctattcttgtggtggtgcacaagtgcggcgtccttatcgcggcgtgcaggtg

SEQ ID NO: 691879 - DNA, 1055 bp, Homo sapiens
  misc_feature (555)..(555): n is a, c, g, or t
  misc_feature (650)..(650): n is a, c, g, or t
  misc_feature (661)..(661): n is a, c, g, or t
  misc_feature (679)..(679): n is a, c, g, or t
  misc_feature (693)..(694): n is a, c, g, or t
  misc_feature (726)..(726): n is a, c, g, or t
  misc_feature (837)..(837): n is a, c, g, or t
ctccacttaccagctataaccatgcacgggcagtcgttgtacagcaaatcgccataacctatgaacgagctcgtggtcaccctcaatcagtccagcgatgagctgcagctgagtatgggaaatgccatgtttgtcaaagagcaactcagtctgctggacaggttcacggaggatgccaagaggctgtatggctccgaggcctttgccactgactttcaggactcagctgcagctaagaagctcatcaacgactacgtgaagaatggaactagggggaaaatcacagatctgatcaaggaccttgactcgcagacaatgatggtcctggtgaattacatcttctttaaagccaaatgggagatgccctttgacccccaagatactcatcagtcaaggtgctacttgagcaagaaaaagtgggtaatggtgcccatgatgagtttgcatcacctgactataccttacttccgggacgaggagctgtcctgcaccgtggtggagctgaagtacacaggcaatgccagcgcactcttcatcctccctgatcaagacaangatggaggaagtggaagccatgctgctcccagaagacctgaagcggtggagagactctctggagttcagagagataggtgagctctacctgccanaagttttccantctcgaggggactataancctgaacgacatannttctccagctgggcattgaggaagccttcacncagcaaggctgacctgtcagggatcacaggggccgaggaacctagcagtctcccaggtggtccataaggtgtgcttgatgtatttgacggagggcacagaatgcgaatctngtgccacagcgagtcaaaagtcagcctccttatctgcgatgtagtggagacaaggaccatggtgcgtttcagacaggcccttcgtgatgatcatggtgccgtaggagacacgccagaacatcttcttcatgagcaaagtcagcaatccaagcaagctagagcttggcatcaagcagggggcttccagtaaggaacttgggaatgagctggatgccggg

SEQ ID NO: 691880 - DNA, 531 bp, Homo sapiens
  misc_feature (371)..(371): n is a, c, g, or t
gactactccagacagacggctttggaatccaccagctacatccagctccctgaggcagagttgagaatggagagaatgttacctctcctggctctggggctcttggcggctgggttctgccctgctgtcctctgccaccctaacagcccacttgacgaggagaatctgacccaggagaaccaagaccgagggacacacgtggacctcggattagcctccgccaacgtggacttcgctttcagcctgtacaagcagttagtcctgaaggcccctgataagaatgtcatcttctccccactgagcatctccaaccgccttgggccttcctgtctctgggggcccataataccaccctgacagagattctcaanggcctcaagttcaacctcacggagacttctgaggcagaaattcaccagagcttccagcacctcctgcgtgcccttaacaagtccagccatgagctgcggctgcgtgtgtaaagatgctatgctcgcccaagcgcagcttatcttactgggcaggttggtg

SEQ ID NO: 691881 - DNA, 1109 bp, Homo sapiens
  misc_feature (58)..(58): n is a, c, g, or t
  misc_feature (61)..(61): n is a, c, g, or t
  misc_feature (233)..(233): n is a, c, g, or t
  misc_feature (338)..(339): n is a, c, g, or t
  misc_feature (372)..(372): n is a, c, g, or t
  misc_feature (442)..(442): n is a, c, g, or t
  misc_feature (510)..(510): n is a, c, g, or t
  misc_feature (633)..(633): n is a, c, g, or t
  misc_feature (704)..(704): n is a, c, g, or t
  misc_feature (718)..(718): n is a, c, g, or t
  misc_feature (776)..(777): n is a, c, g, or t
  misc_feature (834)..(834): n is a, c, g, or t
  misc_feature (852)..(854): n is a, c, g, or t
  misc_feature (884)..(884): n is a, c, g, or t
  misc_feature (941)..(941): n is a, c, g, or t
  misc_feature (1058)..(1058): n is a, c, g, or t
  misc_feature (1086)..(1086): n is a, c, g, or t
  misc_feature (1100)..(1100): n is a, c, g, or t
gagccggcaataagtacctcaccctcattccacccctccttcactcagctctcaccgnctnctgttatctaatcaccgccacagattcctgtgaagcacctccacctatgcgtgaagaacatgcatcactgccttagtgtctaacaatgagctctagggctctgtacaggcctcgcatattgctcgggcgaccaactgcctcccagttggctcgttattcccactccatatgncgcggactgctcccaacacatccacggagggtagtcagtgtgtgcaatgggccactaaatagcacaatcctaccctggctcgaccgaagcacgagatgcaacaannaggcaatcactggaccactgatagtatccctgntcataacattgtcatttatccccctatctggcgagctacttcggccacactatcctgccccccacctatnccaccctctgccacctgccccgacccaaatcgcccaacggaatattcagcggaccactactctctccntccatcgcttggagcatcatcatatccctttgccccccttcggttagcagcatgataccttctgtgtcagtgaatcggtcgcactccaataccttgtgacctcttccccctcaccctttcccncccgcatcagtgctacaccgttcccacgatcaatcccatcgatcccctggcctcgtcttcattcggccacntctacataatgcgncctatacaccctacttcctgtctcactcttctgtccatgcaacgcccgagaaccctcnncatcgccacccgtatctacttcacttcctacttcccaccattcgccactaccatctnccatccgcgaggtctccnnntcctcctttacttatgcggtccctctcacncacactcctctacaccagcctcctcggctagcacatgttcgcgcaccgaccgcgccnccgtggctcacattcacttgactcccttccaccttctctccctcactacctctagcctctaacttcctaccagcattctctcactgactttctttagtgctatcgtgtctctattangcgactctccctatattagtgaggagantacgacaaacatcntatagtaat

SEQ ID NO: 691882 - DNA, 671 bp, Homo sapiens
  misc_feature (171)..(171): n is a, c, g, or t
  misc_feature (266)..(266): n is a, c, g, or t
  misc_feature (277)..(277): n is a, c, g, or t
  misc_feature (295)..(295): n is a, c, g, or t
  misc_feature (309)..(310): n is a, c, g, or t
  misc_feature (342)..(342): n is a, c, g, or t
  misc_feature (453)..(453): n is a, c, g, or t
accccaactgacgtacccacctgacgtagcccacctgagtctcccgtacgaggccaactagcccacctgactataccttacttccgggacgaggagctgtcctgcaccgtggtggagctgaagtacacaggcaatgccagcgcactcttcatcctccctgatcaagacaangatggaggaagtggaagccatgctgctcccagaagacctgaagcggtggagagactctctggagttcagagagataggtgagctctacctgccanaagttttccantctcgaggggactataancctgaacgacatannttctccagctgggcattgaggaagccttcacncagcaaggctgacctgtcagggatcacaggggccgaggaacctagcagtctcccaggtggtccataaggtgtgcttgatgtatttgacggagggcacagaatgcgaatctngtgccacagcgagtcaaaagtcagcctccttatctgcgatgtagtggagacaaggaccatggtgcgtttcagacaggcccttcgtgatgatcatggtgccgtaggagacacgccagaacatcttcttcatgagcaaagtcagcaatccaagcaagctagagcttggcatcaagcagggggcttccagtaaggaacttgggaatgagctggatgccggg

SEQ ID NO: 691883 - DNA, 1230 bp, Homo sapiens
  misc_feature (371)..(371): n is a, c, g, or t
  misc_feature (1033)..(1033): n is a, c, g, or t
gactactccagacagacggctttggaatccaccagctacatccagctccctgaggcagagttgagaatggagagaatgttacctctcctggctctggggctcttggcggctgggttctgccctgctgtcctctgccaccctaacagcccacttgacgaggagaatctgacccaggagaaccaagaccgagggacacacgtggacctcggattagcctccgccaacgtggacttcgctttcagcctgtacaagcagttagtcctgaaggcccctgataagaatgtcatcttctccccactgagcatctccaaccgccttgggccttcctgtctctgggggcccataataccaccctgacagagattctcaanggcctcaagttcaacctcacggagacttctgaggcagaaattcaccagagcttccagcacctcctgcgcaccctcaatcagtccagcgatgagctgcagctgagtatgggaaatgccatgtttgtcaaagagcaactcagtctgctggacaggttcacggaggatgccacaaaagcgcctagtatgcggctaccatagtggcacattatggcgcgactgtacctgtacaaggaacttcatactagccctggcctacagaacgctctatcaatcggacctcaccgtagagaagagacttggcaagcgtaccagcggcgacacacactcaccaagaatctcgcattcaaacgggaccctatggaccttctgtcaacgaaccacactggaatgcagctcccttgacttcgcagacctctacaagtcccttcacaatcttcaaaacacgccccccagcagacgatagggcggatggagttgctccacctgttcttggaccccggcactcgcaaatggcacttaacttccagactccaacagatcccaaggggggtttcgttcacgcttcgcaccgtcccctctgcatacactcccctgctccgtggcgctccactctttgcggctatgcgccgcccactttggcatcttgcgccccgcgtctctgncgcgacagtttccaatcgtctctatggatccagtaaggctacaccccccgtgtcttcactgtcttgcccccagcgcgtagaccctctggcgactccgtgaaccccgcccttgtggttcccccatattgtctgagcccctagctatgagcgtacggcttatctgcccgctggcaaagcgttgactcaagccgtacgag

SEQ ID NO: 691884 - DNA, 376 bp, Homo sapiens
cacgaggacgttgggcacctctttcagctcgaaatgtacgcatatctcattaccactgctcctccctcaacccccaagggtgcgtatctgccgccaattccaacagggtaataccatgttgagggcactttcgttcaagatggtctgtcaagatgtgttttattcaaacacaacattgacaatctggatgctgattttgccaatacccatgatgagtgagaggtacaggtaactgcacgcccagactttccaggtgcctctcgtcatgtggatgagtcacaagactctcatcaccggaactgaggatacactgatgcatcacctccagtgtaacaccgaatctcgcagtgatcagtatggggatctgttccagaat

SEQ ID NO: 691885 - DNA, 430 bp, Homo sapiens
  misc_feature (1)..(1): n is a, c, g, or t
nctcatcttcagctggcttctaagtgtcctgaaagagagcgcggccgccacgctggttggctatcttcagaacacgtctggtagccctcgcgtttctcctgggccaattcgcgaaagaagtggctcacgccttccagagccatatcttcgcgtgtcgaaataagagcccagagaaaggtaggtgtagaaggcttgcaggtccaaattgccgagcctgttcacgcctgcttccacgtcgtgtggaataattctgacgatatctgggagttcatggttggttgcgcaagaagaagctacccacaaaagcggtgttggcaggtcccagaagcaggagatggccgagaagatggtcccgagaggtcgcaagcggagaggatatcagagcgcggtcagagtctgaaagagagtccgcgtatgtgctgcgtccact

SEQ ID NO: 691886 - DNA, 1406 bp, Homo sapiens
  misc_feature (360)..(360): n is a, c, g, or t
  misc_feature (906)..(906): n is a, c, g, or t
  misc_feature (1001)..(1001): n is a, c, g, or t
  misc_feature (1012)..(1012): n is a, c, g, or t
  misc_feature (1030)..(1030): n is a, c, g, or t
  misc_feature (1044)..(1045): n is a, c, g, or t
  misc_feature (1077)..(1077): n is a, c, g, or t
  misc_feature (1188)..(1188): n is a, c, g, or t
taaagcatacgtgagaagcgcgagcacctgttaggtctgttgagcttggtcatacttggtgccctgggagatgctggtgtcatgtactagtgtgcttgcttctcaccaatagaaagacggcaaccagtcgggaacccagagacgattctgagacaagatcgcgagatgcgagtttctcgtctgtcatttaactgcgatctatcagtcgagggtgtcgctatgcgaggctcggatatcgcaagttacggcctcgaccggccctgataagaatgtcatcttctccccactgagcatctccaaccgccttgggccttcctgtctctgggggcccataataccaccctgacagagattctcaanggcctcaagttcaacctcacggagacttctgaggcagaaattcaccagagcttccagcacctcctgcgcaccctcaatcagtccagcgatgagctgcagctgagtatgggaaatgccatgtttgtcaaagagcaactcagtctgctggacaggttcacggaggatgccaagaggctgtatggctccgaggcctttgccactgactttcaggactcagctgcagctaagaagctcatcaacgactacgtgaagaatggaactagggggaaaatcacagatctgatcaaggaccttgactcgcagacaatgatggtcctggtgaattacatcttctttaaagccaaatgggagatgccctttgacccccaagatactcatcagtcaaggtgctacttgagcaagaaaaagtgggtaatggtgcccatgatgagtttgcatcacctgactataccttacttccgggacgaggagctgtcctgcaccgtggtggagctgaagtacacaggcaatgccagcgcactcttcatcctccctgatcaagacaangatggaggaagtggaagccatgctgctcccagaagacctgaagcggtggagagactctctggagttcagagagataggtgagctctacctgccanaagttttccantctcgaggggactataancctgaacgacatannttctccagctgggcattgaggaagccttcacncagcaaggctgacctgtcagggatcacaggggccgaggaacctagcagtctcccaggtggtccataaggtgtgcttgatgtatttgacggagggcacagaatgcgaatctngtgccacagcgagtcaaaagtcagcctccttatctgcgatgtagtggagacaaggaccatggtgcgtttcagacaggcccttcgtgatgatcatggtgccgtaggagacacgccagaacatcttcttcatgagcaaagtcagcaatccaagcaagctagagcttggcatcaagcagggggcttccagtaaggaacttgggaatgagctggatgccggg

SEQ ID NO: 691887 - DNA, 236 bp, Homo sapiens
  misc_feature (2)..(2): n is a, c, g, or t
gntcacgataacacacatatacacactataaatcaataagacaaaggccagtgcaggcaaggtgactcacacctgtaatccctgcacttcgggaggctgaggcaggaagattgcttgagcccaagagtttgagaccagcctgggcaacatagcgagaccccatctctacaaaaaattcaaaaattaggcatggcagcacacgcctatagtcccagcaacctgggaggctgaggtgg

SEQ ID NO: 691888 - DNA, 162 bp, Homo sapiens
ggcacgagagactttaaagccaaaaagagggaactagaggaaattgtacagccaattatcagcaaactctatggaggtggaggccctcccccaactggtgagggaggatacatacagaaaaagatgagtttgtaggtcacactgattctactagagctataa

SEQ ID NO: 691889 - DNA, 381 bp, Homo sapiens
gagaaagaagacaaggaagaggaagatataaacatagaagagagagagaaagggcaagaaagcaagaataaaaagaaaggatagaaggaaggggggaggagagagggagagagaaagggcaggagaaaagggacgagagaggagtcacgagaaagagagaagacagaagagggaagaagcgagaagaagggtgaggagaaaaggaggcaggagaatagtcagaggaaaaaggggagagaaaaagatgagaggaggagaaaaaaggcaagctagaagatgtctgaggatgagagtataagtataaatgggggtatgggtgtatgtctgtctctctctctctctctctctctctctctctctctctctctctctctctctctc

SEQ ID NO: 691890 - DNA, 1386 bp, Homo sapiens
ctattcacttgacccggagaaccccacgaaatcatgcaaatcaatgaggttccaatctatcgtgttcactattaagaacactcgtgaaactgctccaggcccatccaagggtcatgcattatacgcaacacagccacgcacagtcatctagcacacagcatgtccactatatcaccagcaaaccagatgtgtcacccattcacgcaacgttacacatggtggcagtatggccaaggtgttgcgccagcgcccacagccaatgggcggcatggcaccaccacagcgtccgcgtggcaccccacacacacagcagatgcatgcacatcttttagcctgccaccattgcattcaaaacaccacgccagcatgcagtcacattgcctgcacaccttcacatggcgttctcagcatcgtcagacattcatcatcggatccattcgcacgccatcatacccacacgtcgcacaccacacagccaccctcacacgcatcgctgaccgcccaggaaccatcaccaagcagcctccaatgcgtctgcgcatttacaacccctatcacaattgcacgcttcctcgctctatgccccaccattctgcacgcaattgcataccctctcaccgtgctacacacagcgccacaccccagcaatctggttcactataacacgctcagccacagccagcgcagcgtttggccacccagacacagcacacacaacagcagtccattccccgaggcaacagccacaacactgcacacgcacacacgcaacacaacctatcattgcgccaccgctgcgccgacctccaacatatccagcccaatccacacccactccaccactggctcacactccacacacagcgcacacacaacccaaaacaaaaacacaccaccacaacaagaaaaaaacaacaaacaccacccacccaacacaagcaaccgccaccacacaaaacacacacgcagcacgcacgacacaaacacacgctctcacacgaccacacgccacccccatgcaccccgacacagccgactaccccccagccaccccagaaccgacctaccccgcaccaccaaggaggcgacgacaacaaacatgcaccgacaacaccacaccaaaaaatacgccggcaccccccgcacaaacaacgagaacaaacaaaccaacagtatacaccacggtaccctcacaaacaatcaccttgaggcacatccccctcatgcccatcgctgcacgaaaggcacccgccacacagaagcccccaccaacgcgcccccacaccgacccacccacagaaccaccacaccaccatacacccacacgcaccccacacacgaccgcaccctccactacaccacacccaccccccacaccaccaaccc

SEQ ID NO: 691891 - DNA, 772 bp, Homo sapiens
  misc_feature (30)..(30): n is a, c, g, or t
cgcggtgggatcatgcatgtaagtcccggnctctcaggggaggcataagaggtcggtaggtatagcttgagccctaggagattctatagctgtgcctgggccatgtttagtcgagatcccgtgtacatccatggaaagagaaggagaaatagaaagatgagaccagaagaattgcatgtgagcgtgcgcgactcgcgagcctggggatgaacagtatccaaagaaagcaccgtggtcgtggagagagagcgagaagaacacaaaaagagaaaaaaagggacaaaacagggtggctgcacgagagcgcggggttccacaagagagcgagagaaacacgcggggtccaaaggaacacacaaaagggcgcccggtggagagagctctcacgagcgcacacagaaaaaaaagagggcacgcgggggggaaacaaatgcgcgcgaaagagcgtgtgcgtgtgaacccaaaatcgtggccgaaagagcagtgggggcaaccacaaagaaagcgcgtacgcgacagggggaggaaactcatcaacccaaaacggagagagaagacaccagagcgcgaggagagtactacagacattgtgtcagattttttaggcaccacaacgccccgggtggaaagaagaagagaaactcagacgagaagcccaacatcaactgtgaggagacaatatacaacaaacaagagaagaccacacaaaacgagaaaacggacccaagaaaaaccaaaaaattaacaaggccgcgccacacacgtggggaga

SEQ ID NO: 691892 - DNA, 303 bp, Homo sapiens
  misc_feature (58)..(58): n is a, c, g, or t
cgagtacggagggacggtccgaagggagggtaaatgagataaaagagctgctggaggngaagtaggtctggccacccagcggcccaccctactctgcaggttttatctcatttaccctcccttcggcccgtccctccgtacttcctgtggcgctcatcagatgcgactggtttgaaaacgcctgtttaaaaacactccgggccaggggcaggggctcacacctgtaatcccagcactttggtaagcttgagtgtggggatcacttgagggcaggggttggagaccagtctaggcaacatgggg

SEQ ID NO: 691893 - DNA, 944 bp, Homo sapiens
  misc_feature (635)..(635): n is a, c, g, or t
gacccacgcgtccgaggacgcgtggggagccctgtttgggctcaggagatagaagacaaaatctgtctcccacgttctgccatggcatcaagggggaagagtagatggtgcttgacgacatggtgtgaaatggttgccatctcaggcagtagatggcccggtctcacttcttggttatctgtctaccctgagcccatgagctgccttttatgggtacaggattgccgtaccttgaaggaccttggcgcgcgtctgtaaggcagtctgactcatctcagaaatgtcaattcttaaacacgtgtggcaacagggacctagaatggctgacgcattaaaggtatttcttcttgtgtcctgttctattatgttcttaaagagctcagtaaccatttcagcacgtctttgccagcaaagccttctccatagatatctcacgatcatgggaaggatcatcttatgcaggtagtcattccaggagtcgtaaggtctttatctgctctcaaggccactcgtgatgtttatgattccgggactgggtgttgggctgggcacaacagttagaagttgcctgtgagatcacacgttcagactgaagagtctgatggagtgtaggagatggggggtgaactttgctnggtcttctgcactttccattcgtctacccactttccatctagtgcatcccacagcggtagtccccctggcacttctgggaaaggcaccgcgggtgcttggtgccacccggggatctttgcccttggaggggcctcctgtgcaagaaggctcaagctcccagggtcacaaaggtgcccgttcaggaccccaggtccctgtgcctttcacagaggcctcccaaaagaaaggtctacaaaggtgcgcgttacaggtgaagaatcgtcaattaagattggaaaaactcacctccccaggaaggaaagagaccc

SEQ ID NO: 691894 - DNA, 171 bp, Homo sapiens
cctgtttgctgccgctccaagatcaatgatttcggaaggactcgctgagcgcttgtttctggttgaggtggactctgtcgcctgtgtgatatgaatatgcttcggcgtcacagtctcctcttcatctttgaattcacctttgagagatctgcctcttctcgctttcttttc

SEQ ID NO: 691895 - DNA, 205 bp, Homo sapiens
gagcccgattttatttgtaaagttgacagtcgagcaaatgttcctatttttgtgggatttgcacacgtttttgtcagttggggtcatgattttagtcccccgctaattatttttacaatgattacaacatttcctccctgggggaaatttttgacccgctttagaacttaaaacctgattttagcaaaaaaagggtccgagatga

SEQ ID NO: 691896 - DNA, 395 bp, Homo sapiens
tggaatgacaggggacagatccaaaataatggccacatagtaaacagtcgagccatagcgaaagcgcagtcctaaaagaaaatcatgtatggggtcacaccatcctcacggtagtccaatagagcaagcatgccatctggatgcatgtatccaccaatcaagaacgggtagtggatgaaatacgcaaggctgtgcttgatttgtactgcagcccgggtgtgcataaaaggttatactctgtgcgggtctctgttcttcacgtttccctttgattgatatcatgtaatctatgatgtacttctagtaggcttctttcgtgaaacttgtttccagcaggtgatggttcatgacaatatcgacaccagtgattactgtggtaacggtcacattatgtc

SEQ ID NO: 691897 - DNA, 1006 bp, Homo sapiens
gaaacaaatgggatatgcagtttatccgtggatggtgatgtgtgtagtggacgaagtgagtcagtgaatagcagcgggagtgctggattgggagatcagtgcgtgatctgagatagtctggttctagggaggtgctctaatgaaagtgtgaatgtgagcctggaattgataggatgcaagaggtacaggtagctctctagggagagttgcaggcagaggagattgggtcttgactggtgtcctcaggaaggaagcccctgggatggagtgcagggagccagctggaagggcacggcgaggggccagggaggccacaggccggcatatgagcatcatgggtcattacgggggcttgagctggctcagagggaggccaggagcttttggacaatttgagtttgaagcagtgatgtggtctgaatcttgacttatattttatcacgggtttaccccactagatccacatggactcaagtcacacacggccgaaacggctcctccatgcagatcaagccttgctcggcacgttcccataaattccagactcctccccaactccgttcctgaatacctctatacggatccccgagctcccagccagatataaccgcttaacctcgtatgcgtcatgtctctagcccctgcacaatggcaagccccctcctcagcttcaatacccctcccccatgttatgcgcatcctgggaggtagaccaccagacttccaccccgaaacggacccacgtgccatggccctgacgaccctcacgacaccaccggccgcccgtccgggaagatactccctaatggcgccacactggggcgaacgccaaacaggcaccaaccactcactaggccacggcacgaacagcacaagccaggacgacaacacacgccccgaccggaacagcactctgcataaacgcacagctactaccaatccgagccacataggccaccacacacccactacacaccacacccaggccccaacagaccacaccacc

SEQ ID NO: 691898 - DNA, 774 bp, Homo sapiens
agcggacttccgtgttgccgcggtgccggagcccgaggcggctgtagcccacatctccgcgagcgaccccgcggcgccctgctccttccgctgctggatgggccctggtgtcacacctcactggcccgcttgtgtccatacccatgtcatgctgccgctgcctgaaccccgtcctgctgcgcgcctgtgtggagctggctgcccccgtcgctgcctgccgagacccttggcgcctgcccctgcaacagggagccccacatgcatggccccaacatgtgcagccgttcctgcgcaatcgacttcaactcctatgagctgggctccctgcaaggccgaggacgaggcgaaccagcccttctgtgccgtgaacatgaaggaggcgctcagcacagagcgtgggaaaacactggtgcagaagaagccgaccaatgtatcctgagtggaagtcgacgttcgatgcccacatctatgaggggcgcgtcatccagattgtgctaattgcgggccagcagaggagccagtgtctgaggtgaccgtggagtgtgtcaggtgctggccgagcgactgaaagacgaccaatggcaaggctgagttctggctggacctgcagcctcaggccaaggtgtacgatgtctggttcagtatttccatggagcgacgtgcacttgcaacacacgttctatgcgcagatgaggacgacggccaacgtcccaacagagtgacccggccggggagccactcacaccagggccaaaatccactaacatcaagaac

SEQ ID NO: 691899 - DNA, 515 bp, Homo sapiens
ggcgcggcctccgcctctcagtacgcggagcggccggctgtcacctggggctcgcggagcggccagatcgcggcggatgtcggctgcgcttccccgaggtgaaggtgggagaggtggacccgtgacgcgatgtgccccgaatgccctctcgatgctgtacctgtccctgcgcctctctgatggctggaggatgctgggatgctgcatcttgggcgccgctctgttgctgctgctgctgcctgcttgctacctgcctgccgtcactgtgtgggctgtgtcccccggactaggcccacgccggtgagcttggagctaggaggccctggtgcctctgctatgcccttcgacctggtctctaacgcctatgctggttgctggcctgcacttactaacatgctgtgagactactgatgcgagctggtagcggctgacttaggaacgctgggctgctagctgcatgaccacctggctgccttgcgtgtgaaatcccgcactgcgctgttgcccgaccactg

SEQ ID NO: 691900 - DNA, 165 bp, Homo sapiens
  misc_feature (46)..(46): n is a, c, g, or t
cctcaagtgcccttcatatcatcaatatagtcaacctggatgcttnactttatataaaaagacttattcctatgaattcttggtattagaattccaagatagaatgttaaatatgtgtgtgtagatatagaagagtgccacttttgggggtacccgagctcgaaa

SEQ ID NO: 691901 - DNA, 761 bp, Homo sapiens
cgctacaacaggtaccgggcctggctattgccggctcacgattactcgccccttatggctatttacggctacaggccccggttacagactaccatcagggttagtccacaacttccgccagagcccagcgacctgggtggcccatccagaatttactcaccagccctatactgaggccggccacccggtagcgcacccaactgattgcacaaaatagctttgtttggatatggagtggacacccattatgtacccaatttaaacttggcgcaactttctattgcccgtcccaacagtgcatcttagtttaaaatttcccccctgggaatcaactctcctgttgactatttcccgagacttctaggtgtttaggcacgcgtgtggtgtctgagaggccatagccgccatcatgggctgatattgttattacccaggtccccccagaaccaggtgagaggctctgcgttcctgctgccaggctctgcagcgctggacctgtggacctggttgtaaagagtacaattgtatcttagggaaccccgtgtccacccttttttttccaccctttaattttatattattttgcgtcatacatttcccgtaacggaagtgctttattttactgtactttttggtaccttttgggcatttaatgtattgtaaggtattttacacgtgtcctgattttgcccccacctggatattgaagctatcccagcttttgaaatataaattttaaaaccccccaaaaaaaaataaaa

SEQ ID NO: 691902 - DNA, 378 bp, Homo sapiens
caatgtcagaataaaggaagagctctttaagagtagggtccagattttatgaatctttgtatttcttatcacaaaacaagaacatgaaagtatgcatttccttcagaaaaaccttctagctcacttaatacagtgttttctcatctctctgtacttttaagacaacttaaatgtagacaatattaaaattgctgaaacattaatgaactgaatacaattgtaccttaatcacaagatctatattgcattggaagaaactctgcatccatctgggagctatacacagctttatgctttatactcacagtcctatgggtaggaccgggtttcagatccatgttatttaacatggactatttcaggtccacattaccttca

SEQ ID NO: 691903 - DNA, 972 bp, Homo sapiens
tgcactgcgcaggtagagagctgtacatgataccagggcacgcacaacaccactagaagtactaatatataccctacttacaggaattgactctataggaggatgtagaacgaatcatacctatggaagttcccgatggctatgctcataagccatcataagcccctgccactgatctgcgaaatacgtgcctgattgtcaaaccagtataggaagctctgtctcaactgctctcgcgacgtggcatctactaatcatcagaggccgaggtattaccatcgcgtgcgtagtaagtagaatatatgtatcctaggttcatagggccatagagtcaaaggagcaagccgatcccattcatctacattggatataagactgagtatgccttcacaggatcaaacagtagggtgggaatcgttgatcaacagaagactggccgtgagataatgagatttgatagagtggttgatactctggtagactggagtgaaagagacctttacttttggtgtgtagcctgattgctgatttgggcagaaatgctgaagaatttgatactaggggatattatatgaacagggacagtggtgaaataaggcgcagtccagggattttgtggaagaaatcaattatgatgagtagtcaaaggagtgttgagcgggctaagaagtatatccgtggcatcctctgacccaggaggcagccagccccagatgacaaggacacatgaggaatacggctcatggaaggggacgaacaggggcagatgatggagaagacgcgggacaacggccgctggcacccacgggtccaggccaagggagcgagggacaaggacatgggcaagccccgtgagggcgtaacggcacaacaacatctggagggggacaagagaagaccgcgccagaggaaagagagacgcaaacacgcaaaggaaacacaggaaacaaagagcgaaccaacaatatccag

SEQ ID NO: 691904 - DNA, 1030 bp, Homo sapiens
  misc_feature (288)..(288): n is a, c, g, or t
gcacagagtacggaagatgctgccattgactatgtcccgagggtcactacaccattggccaaggagatcattagacccttgtgttggaccgacttcgcaaccctggctgaccgagatgcaacctggttcttcagaggacttcttggtgttccacagctttgagtggggtgaactggttctgtggttcacctccctgctcatggaacgtctctcagttgattatggcaatgaagtcacaagctggaagttcgtctcatttacccaagtaccccaaggatttccagcagnctgctagttgagtccctacaactccatcctcatccagccacactcatccctggcagcactctgatttgtgccttcatggtagacaactgaggccatctatgacatctgtacgtagaatcctcgaataatcgaggcgtcccagagcacttatcactaagccgtttaaagcgggcttagttatggcccggattggtggttccctctcagtgtccaactgtgctttcctgggagaaattgggcagtgagagcccgtgacatgtgtgtagacgcgtgccagaattttcccgtggacacacctctgggtgacccttatcccgcgcgtatccatcttccctctggccacatactgcccctgtcattctctgctgagaaagcctaccgattgaagcagctttctgtaggcaggagatcacgcaatgcttgctttgagccagccaaccagatggtgaacatgtgaccctcgccatggtcaatacatggctttgctgcctgatgtaccggtggtgacgtggttcccaacagatgtcaatgcttgccattgacacccatcaaaaccaaagcgcagcaatccaggtctgtggattggttgccacaactggcttccacggttggcattaaactaccagcctcacactgcaggtgactggtggagcacctggccaacgtacagaagagctgtgtgcatgctcgagcaagacaacaagcattggtgaggcggcgctccctggaccacaagttgaca

SEQ ID NO: 691905 - DNA, 208 bp, Homo sapiens
  misc_feature (12)..(12): n is a, c, g, or t
  misc_feature (14)..(14): n is a, c, g, or t
  misc_feature (19)..(19): n is a, c, g, or t
  misc_feature (93)..(93): n is a, c, g, or t
  misc_feature (101)..(101): n is a, c, g, or t
  misc_feature (103)..(103): n is a, c, g, or t
  misc_feature (109)..(109): n is a, c, g, or t
  misc_feature (151)..(151): n is a, c, g, or t
  misc_feature (160)..(160): n is a, c, g, or t
  misc_feature (167)..(167): n is a, c, g, or t
  misc_feature (170)..(170): n is a, c, g, or t
  misc_feature (174)..(174): n is a, c, g, or t
  misc_feature (177)..(177): n is a, c, g, or t
  misc_feature (185)..(186): n is a, c, g, or t
  misc_feature (197)..(197): n is a, c, g, or t
cttgtgcaaaangntagantcaatcataaagtgcacacctttattcagaactttagtattaaatcagttctcaatttcattttttatgcattnttttactncntttttnttcatacgtaaaattttcggattaatttgtgaaaatgtaatnataagctgngaccggnggntctnttnttaaaagnnccatattaaancctggaaacct

SEQ ID NO: 691906 - DNA, 424 bp, Homo sapiens
  misc_feature (110)..(110): n is a, c, g, or t
  misc_feature (119)..(119): n is a, c, g, or t
  misc_feature (370)..(371): n is a, c, g, or t
caccttggaaggcccgaaccttagaaatgaagctgctgttgttgattccagagaatactggcaaagtattggtggggagtcattcatggcccagtacttaggaatgtatntgacacagngcataagttttaaagccaggcctgtcaactagcaatgcaagtgctgtctatcagtgtactacacctggtggtatatgtaccccctcacttccttttagatactgtctttactaactcttggagaacgtcatatctgtctgtaatgcattttgattctgtccgtctgatctcctcttcctactcttcccagccaggctgatttagatctgcctgcttctgcttcccaagcactgggattaaaagtggccatnncgcttggcgtcgaaacgcccccgaatttagtagtagtaggcggccgctattga

SEQ ID NO: 691907 - DNA, 484 bp, Homo sapiens
  misc_feature (470)..(470): n is a, c, g, or t
tcctacataccgttacttagagcagactgacatactgtgccagccatgcatagtttgttaagtgccttgtctatcggacagagatggaccacctctagagtcaggagtcagaataagagcataccatcatctacaaaagcacatgccattgacatgagagtacgtgctttattgaatattaaagtcactcagcctgtccttttttccattcctgacatgactatttataagcaccaatattgcttcactgatctgcatcccctgtgtaatcccatgagacgatctgtcactgccgcatggatcctgcagccgacattgcctagattcacaagggacgcgttctcgcaagtactatggtcaaaaaagtcagaaggattccaggagccgtagctctaggtttttatctagacattagtcacttcactgtgctaggaccactaagatctatattcactgatatttctctaagnatgcggctatttat

SEQ ID NO: 691908 - DNA, 404 bp, Homo sapiens
ggggctgctttgctgcgtctactgcaagaacgaagactatggtgaccaatcagactggcggcatcccagaaaatgtcgacattactctgaaggaacgcgcagatttcgtgaacggccccagagtaaccctgcggagggactgaaatcgcataacggtctcaaacttattggaaagagctaaagaaggctccagattgtcaaatgacggagaaacataacggaactgactaccggacggactatttgtagacatggacagaacatgatcaagggcgttacactgggctaacgttacaagatgagggatgagtgtgctaactgactaatgaaccttgatatacagcaaattgaaggtcttggcgaaatccgaaatttgtaggtggataaatccattcgggtacgtt

SEQ ID NO: 691909 - DNA, 370 bp, Homo sapiens
tgatatcacacaaattcaaatgaaattatcttactacatgttagattgggcccaagaaaagtcgctctcctttttttttccaaaagggtgtttttccagtgttcttgaggtcatgaaaaaatgacttttatattttcgttaggagtacaattaaaacagttctttgtgaggtggatttggctctatccatcaaagtataatagcaatccttccgtaatagtcccctggattatatctcaggggactaactatgcctatattgatacctagtgtcattcagattttgatatgatatgggcactaatgtcaggctggtatgactcctttagtggtttgatttagggggggggtttcctactggaggccttgg

SEQ ID NO: 691910 - DNA, 177 bp, Homo sapiens
atgaagggaacaggcacacagaaatacaacggacagggaatccaccagacttcatccaaacttcaggagtgtctaggccaaaagcgccttttaagagatgctggtttgttaattggtataaaggccgagatggacagagccactgctgtacatgcactcaccgcaggatgctgcgag

SEQ ID NO: 691911 - DNA, 147 bp, Homo sapiens
ctgatcgctaggacagcgctctggcagaaacaggtcagtgccagccaggctgtggggtgagagctaccacgcgtcaggcgctgaactggcgtggcttccaatggtgacctggcgcatggctgtcgcagggttaccgagctcgtaatt

SEQ ID NO: 691912 - DNA, 740 bp, Homo sapiens
  misc_feature (321)..(321): n is a, c, g, or t
  misc_feature (560)..(560): n is a, c, g, or t
  misc_feature (613)..(613): n is a, c, g, or t
ttgttacatgctagtcagggcttccagtgagcaatgaaagtcgagcagcgagtgactgaagacctgagtgagctgtgactgaatccatgcaactggtaacggacgaagtggacagccgtcaagacttggcctttacaccgtgaccgagaggcctgctgcacctggcatcaggccacgaccgtttcagtgacgtatatggcgtcgcgactgctcgatagcgcgaagcaggtcgtcaatgtaaccatggacaattatgacatggcgaaatggcttgtaaccacctcactcgtgatgaaacttgatccatgtgagcaaaccttntagttaccagttggcacgcgtattgagcatgtcacgggaacatatgcaccatgtagatatcacacaatagagctctactagtcaaagactacttgacgggcccgcaaggacgtaccttggtgcagataggtccttcgcatccctcgtttgtcgcaggacagcaacaggtgtttgaccaggacgtgctgttgagggcttgacaccactctgctcccaatgtgacatcacggaatggcttnaaaaccgcacgaagtgcagaccttacccaagccaattaccaagtatccatgantgactaggcctggagcgcatggctgtgggtatccaaaccaggacgacgatgagtctgggtgcaggcagacagggattatccctagtagtaaggtaacggtaaatacctcgtttgaccagtcaacgct

SEQ ID NO: 691913 - DNA, 342 bp, Homo sapiens
  misc_feature (8)..(8): n is a, c, g, or t
cacgcatncaccagttgtattatgctgcagatatataatatatgatatcagttttctgaggaaggtgatgaaaccaaaatcacctaccctgcaaccaactcctgaagttcacaatggattacgagtgacttctgtccggaaacctgcagtctatattaagcaatgtgaatgtttgaattttggaataaaaactcttgaggatatttattccaagaatatgaacggacaaatctaatgaagcataggtgagggttcttcaggagtttccagtcttttactccaccctgagcccgttccaggtccttaaaaagaaaatgtccggactgtgttgaggaccgtaac

SEQ ID NO: 691914 - DNA, 774 bp, Homo sapiens
gcgaggcagccacgcgggagaggccgccaggcggcacgccggggcgagggccaggtgccagatcggccaccggggcaagggtacctgggccgttgaggacccggtcagcgcggcacgtgagttggaatcgaagcctcttaaaatggcagatgacttgtgacttcgagacatggagatgcagtggcctcagccaccttcccaatgcagtgctcagcattacgtaagaatggctttgtgggtgcttcaaaagggcggccctggttagcaactcgccagaagaagtgtcataacttcagaaaggatgtggcagccgcggtggtgcaccgcataggggctccatcgtggttggttatgacatctttagtgggaagaaatatgaagatatctgcccgtcaactcataatatggatgtccccaacatcaaaaggaatgacttccagctgattgcatccaggatgggtacctatcactgctccaggacagcgtgggaggtacgagaggaccttcgtcttccctgagggagcacttggcaggcgcatttgagcagaaggtacgactgtggaggaagagatcctgatcacgggtgctgtctgcatgacaagaggaggccagcttgtcgcaatcaacggccatggcaaaataactgtgtcccaggtggctgtggtggctagcagtgatcctctgaactgcatagagggcccttccgagctggctggtttggccggtctaagtggtctctctacacattattgcggtaattgggtccaaccccta

SEQ ID NO: 691915 - DNA, 510 bp, Homo sapiens
  misc_feature (458)..(458): n is a, c, g, or t
cggggtgggccaggagggtctcaatctccgggcctcaggatccggccggcctcagagaattggtttataatctaatttccagtctacatggaaatttccctacttatctcccaaatttccttcacacatctagggcaaaaccagtttccaaactaggaccaggcattccatggggggggtatgtatctcaaatctcttaattggcaacaaaaggttttttaataagtcttttaaaatctacaatagtcttggctttaaggataaggatctccggagagccggtgccagggtctggtaacagtttctagcttcgggattggccttttccaacccggggtggcggttagcttaatcctggtaattccggtgaacggaaagttacatctaagggtatgattagattcaagttcaacttttttccgtttttaagaaagcaaaatggcataagagataaggtngggtacttcaggctaagaccagagacgagcaatatcttatctcagggattgc

SEQ ID NO: 691916 - DNA, 359 bp, Homo sapiens
gtgacgaccttacgggtctcctaactttaatggccacttagaggaacatgacaacttacacaacaagcctcaaaagaacaggcagggctgggcgcggtgtgctcacgcctgttatcacagcacttagggaggccgaggcgggcagatcatgacgtcaggagatcaagaccatcctggctaacatggtgaaatcccatctctactaaaaatacaaaaaattagctgggcgtggtggcaggtacctgtagtcccagctacttgggaggctgacaggagaatggcgtgaacccgggaggcggacctcgcccagtgagctgagatcgtggccactgaactccagcctgagcgaaagagcgaga

SEQ ID NO: 691917 - DNA, 1699 bp, Homo sapiens
cgctggctgggtcatgcctgttaatcccagctctcagtggagggctaagagtgcgggagtgatagcttgacgcctcaggcagcttcgatgatcctgacctgggtaatatagcgagatcccgttctccagagaaaggaacgcaaaagaagacgaaaggccaaaaagaaacgcaaaataggccagaaaaaagaaaagcgaggcgggcgcgagcgcgacggctggaaagcagcgtgtcttgcactagaagcctggagggggtgggccagtcgtccgcagcttgtcagccggggggccacctggggcccagacagccggtgttcgcacaaggaaagaagcggaggcaagcaagagcaagcgggggggcgggctccaaccagatcgattagaagcacgggcacgcgcgggagtgcaacccctgcaagtggggcttgcgtaggaaagaccccgccgcagggggcgcgcaagaagagagcgagcaaggtatagaggaggaggcatataacaaaacggagtgacgtgcccacgtcgatgccggccctactaatcagggtgacccccccccggtgggggggggtggcgcactcgacaatgcctggacggtgggacacaccaccgggtggggcccagaacgcgaatatggccgggaaccaaggaggactcggagaagacaaccacccagatgcgagagcgcggagaaatacaagctacccattggaagctagggacgacgaaactttgggataccatcgaggcacgagaatgacactattggggaggaccaggaaaaaggagcaatcaccccaaggggtacactaggtggagcactcaacatcgaatacgagggcggcggagcaagggcacatcacggagcaacgggcgggaagacaaccacaagcagtgactgccgtgccttgtgtggaacaagtaacggattgtggtgcacttgtgaccttaatcgacaaagccgtgctgtgctgcaccgtgcatagagtgctgctccttgccgctatggatcaagatcggaggcctacccgtgctaattgcacgaccaacaaaagcagagaaaaaaaagaaagagaacaaacaacagccccatcatgctgctgctacttctatcttctatgtcattatcacaccatgctgtacaccgacacaaggcacaagagcgatccgacaaagacaagagacgacgagagaacagagggcgagccagcagaacgaacagggaaggagaaaggagagacaaagagcgagagacgaaggcgagaccgaagagagcaacgagacgaagagcggcaagaagagagcagtgaagaggagaggaagagagaagagaaacgacaaaagagaagagaaagaagacaaaaaaagaggaggtgaggaagagagaggaaggaggcgcgggaagaagaagcgagaaggaaggggagagacgagggagcgggatggagaacgcaggagagaggcgagacaccgaaagaacaaagaacgcgcgcgagaaagcaagagacgagcagagaagcgacgagagcaagcacagcacaagcgagacgaaagggaggagagagagagacagcagcaacagcagcatgggcgcggcggagcagcgacacaaccagcgaggcgaaggaccagaaggacgaggacagaacgaaaggagcgacagaggagagaggagacagagagagacacaccagga

SEQ ID NO: 691918 - DNA, 113 bp, Homo sapiens
ctagagatccgagtatgctgcacagcatagcataggagtgtggtgttaacaaatacagctcccttcactgcctttcagattctctattttctacagttcctgagatgcacact

SEQ ID NO: 691919 - DNA, 151 bp, Homo sapiens
ttacgctcggtccatcatagaggcacggaggcgtcggagtctgtgtcttgagcttgttctgcgttcaacactgagatccaccgatgtgcagctgcggcatcccctgttggtcagctccaaagcaactgtgacgtccgtgggcctctagatt

SEQ ID NO: 691920 - DNA, 391 bp, Homo sapiens
tctgtgggctcacgccctgcctgtcctggcagccgcgagctccgtgtagacctggtggactttgagggctacacctagtttgctaagtacaaatcattcaatggtggctgacgaggcagaaaagtacaagctggtactgggagcctttgtcgggggctgtttggattccaaaacagcccccgatattggcgtttacccgcgtaaacaagataaggcttctgactcttaactcccccagccccagagaaactggcacatacatcacaaaaacgcaaagattccccaatgaccttagccccattgctccattcactcccaggtgagaattcaggcgaacgtccacaaaggtcacaggcagcgtacatacggatctgtaatactggttccgagc

SEQ ID NO: 691921 - DNA, 137 bp, Homo sapiens
ccttggctgctcaggtctcctggcttgctcaggtctcctggcttgctcaggtctccaggcttcctcaggtctcttcacctctcatgtctcttcaccgtgccagacctgagcaagcccggagacctgagcaagccatg

SEQ ID NO: 691922 - DNA, 1130 bp, Homo sapiens
gctgttacggtcgggattttagggatctcagagaagctgccttggactgctcgtagacgccgggccttctctcctcgtcatcatccgggagcagccagtgtcctgtgaggcagaagatgcccgcactccagacctgcatccatccatcccgtgtcccaggtgtcacggggccagaaggcagccttggttctgctgagtgcctgcctggtgaccctttgggggctaggagagccaccagagcacactctctcggtacctggtcctccacctagcctccctgcagctgggactgctgttaaacggggtctgcagcctggctgaggagcatgcgccacatccactccagtgtaccggggcagctacttggaggactgtgctgggcctgcctgggcatgaccccatccgaccgttggggccctgttgcatgcatgttccatctagtttctacatactcaccatcccaaagtgcggtcaggctccgccacttcacgtatgggagtgcattgcctcatccctggggcctcgtgcgaggcaactgaacaatacgtcactgggacgctcagatggggacctggccaccaagcatgagatacgtctggcagatgtcgtgaagaaaggggaattcatccacgcgtgggcccacatggacgctggggcagcttggggtccagtatattaacattccgggaataactccgtgccgagccttgattcccttgccccagaagccatccaagatgccactgcgaactttcagacacacatctcaccgatttcaactacacatttcagcacacacaactgcgcgtgtccgtacacgacgagagattgccaagcgatgaactgccccaaacggcggactgagtggactacattagctatacctgtcgactttacgccccaagttttgagcgacaccgatggcagggcggctgattggccccctatcaagcagagccgacgaatggacgacttaacggtgcgccttgtcagagccccacacgaaccgacattatccgggccttgcacctgtgggaaattcatcaacattgtcgcccccaaacgcaaggaaacgcagcgctggaacccggtgtgaccgtgtggacacttacgaaggggcacatcacggg

SEQ ID NO: 691923 - DNA, 202 bp, Homo sapiens
tataagaagacaaagagcatctgaacgatgagaggagctcagccgggggtggactgagagaagaatgacacaggacagccaaacaccaggagaagatcacaacccaacccaaaccaacaagagcaccccaaccaaccaaccgagaccacctccaccacatcagcaaaacccccacataaaagctacaacgccccacacccca

SEQ ID NO: 691924 - DNA, 1519 bp, Homo sapiens
tggtgctcggcatggctatagatttctgcgactgtgctgataggagactgctgatagcgaaagatgtcattcagagaaatgctaaaactaggcgcacccatggccccacaagcattcaagacgcgcagcatgcatgctatagtgcccaggagtggtcaggctgttaagacgagtactcagtgcctggtctagacattacagacagggacaacactatggttgggtgttccttgctcttgtaagcaccatacttggagctttcaaccgtgttggctgctgcgcccgaaccggggaggactcaatttggcctattacacggtgtactaagcgggccaggcaaggacacctttctcacacgcacacaccgttcaacacctaggcctagaagcttgcactactgggcgtagcctaatccctaggttgggacttttcctgcaagctgtgttccgtggggttccgaattgcgtgaaagacctaacttggggacgctttccaacacttcaaacaatgcccttttgaaaggtacaaaaaacagacagggccaacgccgcacccattgggaaggcaaaccccccaaactggcaaactcgcactgtgcctctgtgactagtcgcggcgctcaattcccatggcataccccgcctggtatagagggcaccaggtcccataccctcgaagttactaggccgcttcccaacggagcacacttctacccttcggacgccgcgactgcccttctgccatctcgcgcggcccttggactttggcccaccggggtctcggtgccttcccggacttgcacatgacgcggcggcacccatctgctacgttacgcttccacctcttgcggccctctcgcactctacaccggcggcgtgtacttttcccctccttccgcgcgccaactgcacactccaccccttcggtttacaccacactcgtagccctgttccgcctcccttggtctgtggggggccccccgtgcttcctcttggccttgcggcccctctgccccgacaacccttacttgcggaaagcgcatctccttaacgcgtatgcaacatggtgcgccgctttctctccgcacgcgctttttcacacgtcggagccacgacacgccctgctttgctgctctgctaacaacgactcgctctggcccccctgacctctgttgacggtttgggggcgatagcccgcttgggtgtcacgcttgagtatttactgcacatttcagcaacctgggtcccctatgccatgtgctctcgcacactggtaacccagtagggccacatcacagcgaacactatactcctcgctcgccctaaacggtgtctgtaatccgttcggcacccgtgccttgagcagcccttggcatctccataacgcttggtccatagggctctggctcggctggcgccctgtcccctgtgtgtcaactccatacaacctccttcctccccccggtattatcgactatctgatcccccctctacacctatcacacgtcgcactagcgctc

SEQ ID NO: 691925 - DNA, 379 bp, Homo sapiens
  misc_feature (76)..(76): n is a, c, g, or t
aggggggccggcttttaaaaaaggggggcccggcccctgggcttttttttgttccgaggggggggaaaaagttccngggttccctgcaggccaaagggaggggggtgaagggggcccgtcccaaatttatttttttccccaggaagccctgggcccccaaaaagggggacagttttttttaaaaattgaaattggccccccaatttccggggccggttttgcccgtccggaaggtttttaaaaaggggaaggctcgggttttccctggggaaaaaaaaaattttaaaccctttgtttttttccgtttggcccgggcccacccccggttttttgggataggggcaaaaaaacccaaggaaccccccgaacggggttttta

SEQ ID NO: 691926 - DNA, 1178 bp, Homo sapiens
ggggcactgtgctcgctggccaagtgagtaccgattacaaggacccacgttcggcagtcgcctcgtgtgaccggatcctcgctggaggacgggattctggtggccaacatgcatggccagacgactagtatcatggcgtggatagcaagcgaccactaggcactcaataagaccgactggtagaaacagagatatctgcgtcctctactagccagtgtgggttggtggaacggaactggtgttaaacacttgggttaacaattgacagtttgattcgtgtacattatttgaacacactgggtagagagggcgagtaatgagtaggatattgcttgctaatgacgaggtttgcttgatttacaaaagaacttataaggtcccaccgttctgacccgtaatcatgaggaacagtttcctagggcagtcccagggtcctgcataaatgctttgggacgtggggtggtcctgtgtggttgccacacccgagtgggccagtcacactcacaccagcgtggaacaatcgtgctgagggtgtcattcataacagagtgcccagttcattggaatctcccaacaagggggaatagctgataaccccatatgtttgagcggcccttgctcgcataatacggaatatgggggtagctccatcttgcaaacaaagggtacctcaaattagatctgtgcgtacagagggaagtttgtcgccctttccacgaaatcacgacgacagattaaggttttagggtgcggcatttctatagaacatcgacctcggtatacgatagtgcgccacaactcagaattcggtggatggaaaataccacggtggaagtcccagtctctcctgcgggcagctttttggcacacccacgattggcgaacacggggggcgggagctcaagacacgttatctggcttatatcgcatctttgacttacccaccagtggaacacgcaagtcctttctatacacaccgtattggagacacacaatatcgttcgaaacaccagtcaccggtatcgagacacctttctagtacaatctctatagttaaaaaacgggttggcacaagataagtcgcgtcccggcttcggataaccctattggggcgcctaccacggcagtgcgttggacacggttttggaacttttcggttgaacctgtactagagaagg

SEQ ID NO: 691927 - DNA, 219 bp, Homo sapiens
catgcgagggatctaggttgtgcactccttatgagaatctaatgcctgatgaatctaatgcctcatgatctgaggttgaatagcttcgtgccgaaaccatcccccacccccatcccgctaccccgagtccgtgaaaaaattgtcttccatgaagccggtccctggtaccagaaaggttggggaccactggcttaaaataccaataaattgttgaacctt

SEQ ID NO: 691928 - DNA, 192 bp, Homo sapiens
tgtgcgctttcctgaagcgcactgcggaagcgccctaagcgtcacccaagcatactcacttaaagaaaaaacgagttctttcgttctgtgcgcagctaacaaggggcgccctacatctcacgtgccactccctgccccaggactagcacccaatgacctttggatccaggtggcgagcatgcaagggcaagc

SEQ ID NO: 691929 - DNA, 196 bp, Homo sapiens
ctacctcacaagactatatccactacagactacaattacagaaaacatccttaaaagcgcaagtatgacgacctctcaaagagacttatgtggcagaatatgaaaactcaatcctgatctcgagaatgcaacaaacacaagaatacctctcttcagtcgatggaatataaaagtcggtacagctcaatcgtatcat

SEQ ID NO: 691930 - DNA, 129 bp, Homo sapiens
taatctaagaaggtaccactgtaacctctcctgtgtcaaaatagttgcttaaatttcagcttgtagatagcactgattttagccctgggactcccatctgcagaccagcagactactatcacacgatgt

SEQ ID NO: 691931 - DNA, 465 bp, Homo sapiens
  misc_feature (212)..(212): n is a, c, g, or t
gaacctgtctaatgcaggtgaaaaccaccccattggcacccaggctttttgaaccgggggctgtctccccagaaggatcctcttgtgcttctggaggcaaggatggccaggccatgttatgggatccaacaaaggcaaaccctttcccccctaaatggtggggacatcatcaacgccctgtgcttcagccctaaccgctactgggtgtgtgntgccacaggcccccgcatcaaaatttgggatttaaagggaaagatccttgtagatgaactgaagcaaaaagttttcagttccagcagcaaggcagaacccccccagggcccccccctggcctggtttgttaaaggccaaactttgttttctggctacccggacaacctggggcgagtgtggcaggtgacccttggccccccctaaaagtttatggcaaagctttccaaataaaaaaaaaactggcttttttta

SEQ ID NO: 691932 - DNA, 451 bp, Homo sapiens
ggcagacactagaggatcccaattatattgaaaaacaaatttttacttctttgtatggaacaagtcatatctattcttcacaagatcagcaagcgcacttggaaaataaatgacttgtcccataccaagaattaaaaattagtattactcagtataattataaattaagtatcatggaactttagagactctcttgaatagtcagacacctcaaatattaagtccttaaatttcagttgtagggtttaatgcttttatattttcttatctccacaggtataaatggtataaagaattgtgggatgtattattgttaccagaattagatgccgtcattttaacttgtcagagtatgtgtatccccccgatatccttgattctctttctgtatggaacgtgtactgcctactggagtggcctactgtcttctgcatctgtgaaacttctttct

SEQ ID NO: 691933 - DNA, 300 bp, Homo sapiens
ctactgatggattttgaaaccaactacacgacattccctgattccaaccaccatgacaccatgaaactagtttttaatgacacagtatgtaaatgctattttgcaaaaacacacaccaaatattgtttgaagatgcagatcacgaggctcaaggagaacagtagaactatgttaaagtaaagtaatcggttaagcagttatttactactgaaaataagtgacacccacgtagttcatgttatataataatattgaaaccaaatgacagtctaataccgcaaataatttaataaaaaaaaa

SEQ ID NO: 691934 - DNA, 237 bp, Homo sapiens
actaagtgtcagacaggtatagtaggagacaagcagctaccagacacgatctcccaagtactccatcagcagtgtcattcaaggtttttcggtccatttttcaaggcaggttgtaagctcttccatcatttcacagccagctggctcatgtcaggcagtccctcccatctgcgcattggcatgcatgcatggcgtgcatccattcccaccatagctttgttcagcaggcatcccagc

SEQ ID NO: 691935 - DNA, 1245 bp, Homo sapiens
tgaaacagggttttgttcttgtgtgccataggcgtggagtgtgcaagtggtgtgcaactcttggcctcaggtgcaacctctccgcctctcccaggtttcaagcgatttttcctgtgccataaccctctcccaagttagcgtgggactacaggcattgcaccaccaccccgtggtttaattgtgtggtattttttagatagaagaacaggggttttgtcgccagtgtttggccgaggcgtggctcttgaaacctccgtgaaccctcagggtgtgaatccaatcttaccttcgaaacctctccaagaggtgcctgagagatttaccgggcgctattagacgccaactcgtttcccccagggccatgtgaacgcgcggatattcttgtttataaatacacggggagacacctttgaaggcatgtgttccctttctgtgttagacccccacgagaagttttccccctttcctataagggcaatataatgaaacatatttgcccccaacaaacaagaaaatgatttgcaacactcccatctccgttgtctctccaccacatctcacacaaaaaccctttttctctctaacaactttgggcatttttctccatattaataaccacggatggcttatgctcctccatataaatattacagtccccaaatcacaaatacccttgtaatacaaccccagcgcgccgaaatgttatacctatatatccacaccgagaatgttgaacgctgaggggactttataagaccaaaacaaatttgtgtggggaataaacaactcttcatgttgactgcagacctattcatctatcctcttctccacagcgcctacctgttggtaaaaacatgcgatgatggaacgtcggctctccgagataagatggccccgtagttggtgccttcatcagaggcccccggttgatgttactattccgcacacaggaccaatattaagaagcagcggaagcggaccacacccgtggtacacacccctctggcgcaccctgttgaggctgtctttaatacttgaacagcggctgaggatctattcaaacaataagtcgtttgtacctactgacgtggagagcacaacatttgtcgtgcgttcgtggtctcaccagcgctgcctcacctagaaacaaatcatttcaacgccacgcaaagaccgcaatcacaactagtcataataaactacatcctctatacaaatgtggaggaggtcatgacccccccgagg

SEQ ID NO: 691936 - DNA, 1118 bp, Homo sapiens
  misc_feature (781)..(781): n is a, c, g, or t
  misc_feature (1009)..(1009): n is a, c, g, or t
agcgggctccgtgggtccagtgagattgggcctgggctgctagaggacgctgctgtgagcgcccgcgcgacgagcggctgccattggtaggccatgccagagcccagaaaatcactgccgggggagagccgaagaacagaccgggtgagtactcaagtatgatgagatcagcggcttgtggatggaggcagcgagttgacccgtgcttcgtccatgcatgcaaggacaggcaggcagtgcagactcgtgttgctgtgcggatatccagtgcgagattattcgggtcgcaccaggggaggatgttaagtaccaccatgttttgaaatggagattcaatgaggccatcacaatgttagacaaagtgagagcatagttacatcgcgaagaatcagactccacttttatcgctaaggtcgcgtgttgtcttgtccatttgtagcgtggcgggtgatcttgtgtcatgtactcgacaaacggcgtggactcaggccagagagcatgcttagtcgcgttggtaacatcgctagcgttcataactgtgagacagactaaagtaccgtgaagagagagtaacctctgtcatcctataaggacttggatttccttgtactggcttattgatagtagatcattctcatgtatagtgataacatgtgaaacatcttcgctcgtatgcggaatactcttcgtgctatccgtcatatgggtaacaagacgctttaaggtgggaaacggtcgtactccttcgttgctaaccatgagatctcggggaccacccttnagcaaggatttgtgaactatagcattggtaggaagaagccataacgtttccacggtggagtatatggagggaagcaagaacggagttgggtacacaaaagaccaacgacgaaaattaatcggacaagttgctcggataggggttccgccaaattacataagttcggttccaatgttcacattttccatttttgaatttttgagctatatggggacgaaccctgggaanggcacttggagaacatgatgtaatagtacaagagaccaaagtgcatatgataacccaatctgctttgagttagatcttggacccaaattggtcacaggaaatgaaatgg

SEQ ID NO: 691937 - DNA, 545 bp, Homo sapiens
  misc_feature (2)..(2): n is a, c, g, or t
  misc_feature (66)..(66): n is a, c, g, or t
  misc_feature (72)..(72): n is a, c, g, or t
  misc_feature (107)..(107): n is a, c, g, or t
  misc_feature (118)..(118): n is a, c, g, or t
  misc_feature (149)..(149): n is a, c, g, or t
  misc_feature (172)..(172): n is a, c, g, or t
  misc_feature (174)..(174): n is a, c, g, or t
  misc_feature (185)..(185): n is a, c, g, or t
  misc_feature (206)..(206): n is a, c, g, or t
  misc_feature (293)..(293): n is a, c, g, or t
  misc_feature (351)..(351): n is a, c, g, or t
  misc_feature (373)..(373): n is a, c, g, or t
  misc_feature (398)..(398): n is a, c, g, or t
  misc_feature (433)..(433): n is a, c, g, or t
  misc_feature (440)..(440): n is a, c, g, or t
  misc_feature (454)..(454): n is a, c, g, or t
  misc_feature (483)..(483): n is a, c, g, or t
  misc_feature (536)..(536): n is a, c, g, or t
tnggggcaggccacgaccacggccccggcctgctgccgtgggagcatccacagtcgagcgggggtncttganggtttcatctacaaacacgaccaggcacccagccncagaggctccngtcaccccattcatccgcaccacacccggcncccacacgaaaccctcaaagtcntnaccaatctccncctcctaaaagtctacaccanaccaaatacccccctgggcatcccgaccccccaccctctcaacaatatctctcgcaccaaacccaccattctcacacaccccccctnggaaaatctccaaagccttcccaaaacccccaatcaacaccccccctcttcctcaaanaatcctcaactaaccccccaanaacctcaacactcccactctcaatngccccgccaccagccaccactgaatcattcttganggccctnctgacgatcatganggcatcatgcagggaccgctctgtctccnccataaactgctcggcgccgccacggagaatgaaggtgcatgttttggccttngggcagcca

SEQ ID NO: 691938 - DNA, 176 bp, Homo sapiens
tgagtatgacatggaaacgaaccatgaaatcggaaacagccataagcatctgggtttgcttagtagaaccgaccctcccaagcacccttagcaggacattcatcttttttggtagtaacacaggtctaaaaacactgtcgaagtatcagctccttagcaatctgtcaatcaaagtg

SEQ ID NO: 691939 - DNA, 859 bp, Homo sapiens
aagtctatcagaacttgtatgatttcatacatatgacagaagacttaaatatacacaacagatatgtacacttgggcatgaacagtgagttcttaggaggccacagaacaaagggccaatgtgtggctattaagaatagggtctgcactttgggaggctgaggtgggcagattgcttgagctcaggagctcggctagcctgggcaacatggcgaaacactgcctctacaaggaataaaaacaggttagctgggcatggtgacatgcaccttggtcctggctactcgcagactgaggtgggaggatcgcttgagcccaggagtccgaggctgcagtgacttgtgatcactccactgcacaccagcctgggaaacagagtgagaccctgtctcagaaaaaaaagaacagggtcccttgctcatttccatcacatctctggaaatgtccaatatgccttaatgaattcaagcacatcccaggaaatggtgaaggacagttacatagggctaatgcctccaagctttttctgacactaccacaaaaagcatggaagagaacaagttattctagttgaatcactcataacattattacgacctatatgaacatattttagtcaggccattcttactggtgatttactggtgaagaattggaaatctgtatggtcgtctctgacattaacgaattctggtgaactgttcgggtcgtacctttttcagggttaattaactttgaaagtgtgagctgggtgtgaaacactctgttaggccggaagtattggagcatgtttaaagaaatctcaaaaagcaaaaatgtgggggaaaaaaaggagatagggaaaggggatagatcaaaca

SEQ ID NO: 691940 - DNA, 251 bp, Homo sapiens
gaggatctacatgggtcgagtcaggaagggtacgttctgtgtgtgcgaagttatgtgagcaccaagcagtcggggaaatcccataggtcaggacttgagaaaccacggttccaggctgcaatccaggctgtacagtcatgccactgaacttaataagcatctacttcttcactttatttattgatctattataatgttctgagagagagactccctctgtaacccagggtggagtgcaggggaatgatttt

SEQ ID NO: 691941 - DNA, 301 bp, Homo sapiens
  misc_feature (21)..(21): n is a, c, g, or t
  misc_feature (36)..(36): n is a, c, g, or t
  misc_feature (77)..(77): n is a, c, g, or t
  misc_feature (97)..(97): n is a, c, g, or t
  misc_feature (132)..(132): n is a, c, g, or t
  misc_feature (146)..(146): n is a, c, g, or t
  misc_feature (207)..(207): n is a, c, g, or t
  misc_feature (225)..(225): n is a, c, g, or t
  misc_feature (238)..(238): n is a, c, g, or t
  misc_feature (286)..(286): n is a, c, g, or t
ttcttaccttggaggaggganatcccgcttccttanccttaacttttttgttgctcctccccactgccccttttaanttatttggttgttttcgganggaagggggaagggggtaggctgggccgggaactntccgaggtgctganctggggcgggaccggaatcctcccggtagggtcccagggactgagttggcctggggccgtntccaaggtgccaatgatncgggccgacagangggccgcactgtctgtctgtccgtctgtcccggaaagaactattaaanctggaagcgcctgca

SEQ ID NO: 691942 - DNA, 133 bp, Homo sapiens
cacactgtctgcttcagggttggagctaggagataggagagaaggtctgatctgttgactactatttcgccacctacctggatcttcctgggagcctgctcgtactgttcccggacagactttctaggtaaac

SEQ ID NO: 691943 - DNA, 206 bp, Homo sapiens
gcgccactctcggagtgtcaccggtagcctcttttggcttgcgggtcacgcagaagaggcccgagtaggtctagatcatccaggtgccgtaccgatccttgaggttgtgctgcaccgcggctgcatgcatgcaggtctgcatggccatgtcctctatttcgtcgtgcttgggtggatcctggtggatcacctggtcctccttcacg

SEQ ID NO: 691944 - DNA, 343 bp, Homo sapiens
  misc_feature (314)..(314): n is a, c, g, or t
  misc_feature (321)..(321): n is a, c, g, or t
gtgtgtgagtgtgtgtggaggaggcgaggccttagatcacttcttgagctcgtcgtacaggacagcacgaaggcgccccccatgccccgcaggacgttggaccacgcacccttgaagaaggccttgcccccctcatctctgacagatcttccgtccaactagtcgtacggtgcccagtgtacatgactgtcagctcctgttgcgcccgagactgcatcatcatgctgccgccgcaccgctgtcgaagcgggtaggacaccacgcctggccacggaccgtcacggctctgcgcgatcatccacgctcaccacgangacgaantacgaccacgacgtaattccgg

SEQ ID NO: 691945 - DNA, 101 bp, Homo sapiens
tagctcaaagaggcagagaaagagctgcacgagaagtttgaccgtctgaagaaactgcaccaggacgagaagaagaaactggaggataagaagaaatccct

SEQ ID NO: 691946 - DNA, 1249 bp, Homo sapiens
  misc_feature (1249)..(1249): n is a, c, g, or t
atttttgttttttttttggcatcccgatctggggttaatccaacccaattcttccactctacacaacaatagtacaaacacaaggtcatctaaaaggctacaaaggtgataaaactcaaaagagaaatttaataggtactggagctggtgacaatggaaacgcaaaaaagaaaaaaaataaaagcaatggtacattgtggccaagataacctggaaggaccaccaggaacggcaggcacaaccaggggctgggcgtgagaaggactcccgcaagagggggctcctcccactccattccgccaatttccagagtacacaggggagggggtgtggcggggtggtggctcggggcccggacagacaagaaccaggaagcaggaactaccaggggtgtgagaaggaactcttgggagggggttggtgacccttgggagaatcagaaagagaggccctcgagagaaggccgagggccaaacgaggggttggggcagcgtgcgacaaaaagccggggggccaaacctccctattccaaaagggaccatctggcccaggcaaacacgcaagtgggcacgggctcgggccaaccaatccccagggtcactcggggggaagggggaaactcgtggtggttccccaggtaacgcagggggacaaaccaaaccgccaaagaagccctcacgttataccccgggggtgggcctctgcccactgtgaagcgtggccctcctttagaaaccggggtaaacgcggagtgaagctttctaacccgagaaaaaccgcggggggaccttggacggggcccacacagggcgcccaaaccaaagagcacctttttggaagccgggggccccggtttgacaaaaagggttagctacctgagtcgcctagaaaattctggccagaagtcaaggggatgcgtccccaatgggggtcccttgtggggaaaaaaaggtgcacaactgggccgggggggggtaaaacaacaggggggcaaaacactacatagggccagtacacggaggaatggaacaggaaagacccctattacgagggacgcggaccaaaaatcttcagaaagaatgacatgagaagggacccacaaggggagaggaacaagagggggagcaccacgagtaaacggtgacaaaacagggaggagaaaaatacaagagcacgtatacaaacagataaaaataggaacaaatgaaaccactattctctttcttgtctttttttcttctttttttgn

SEQ ID NO: 691947 - DNA, 160 bp, Homo sapiens
aactacactacacataataatatatctttaaaaatctataactagcacgaagcccttatacaagcctccaacaggatagagacagatacgagtacacagctccagaagacaaactagattaataacgctagttctagacccaactaggacaagaagcagc

SEQ ID NO: 691948 - DNA, 202 bp, Homo sapiens
  misc_feature (19)..(19): n is a, c, g, or t
  misc_feature (95)..(95): n is a, c, g, or t
  misc_feature (182)..(182): n is a, c, g, or t
ccgggaaggatccagccanaggatgccacgccagcccagggttaccaggttgcccaaggggggggggcttgggaaaagccctacacggggcagcncctaggatggggcaaaaacttgttgcatttttgtccccagcaaagggtacatgttacctccttcaattgataataaacctttttganatgcagagggtccgggtcca

SEQ ID NO: 691949 - DNA, 235 bp, Homo sapiens
  misc_feature (110)..(110): n is a, c, g, or t
cttgtggaggaagaagggaagggaaaagatgcttcttgggaacagttaaagccgagccagccaaaatagaagctttccgagcttcactttccaagctagtgggatgtctnatgctcatatgatgcttattggcacgtgctgcacagcagtccacaccagctccagtggtacgcacgtcaatactgccacagacaggctgggtgggtttgtcgatcgaagagaggagctgcaacct

SEQ ID NO: 691950 - DNA, 509 bp, Homo sapiens
  misc_feature (187)..(187): n is a, c, g, or t
  misc_feature (504)..(504): n is a, c, g, or t
aaagatgtttgttttaacaggtcatgtactacgttgttgttttcatttctgttataagtaaaactaaaagcacagaatggtgggaaaggggctataatgtggttcattaataatgttagcagcttttttctagccctcctgagtggcagtattgacctgcctttatctgtaaattatatagttaaanctttggctttttcatatacctagtggtgcgttatcataatagcactgttacataaaataagcccctaccttcttactttgtggtttgttgaaaaaatacaatggtgctcttaaaagtgataaaatgagtgtttatgaatgggtgtaattaggaaatacttctcatttgacagctacaaataaataagtttggaggtattttcactctatatgaataaatatttttccataaaatagttgtgattatatttttgttttatataggtccccaatcatacatataaaatacatattttaaattaataaaagaatgtattnttagg

SEQ ID NO: 691951 - DNA, 1546 bp, Homo sapiens
  misc_feature (17)..(17): n is a, c, g, or t
  misc_feature (855)..(855): n is a, c, g, or t
gggtgctgctaccgtgngcgtggtttgttgcccctccgccgctcgtgggcgaggtcaccacgagtgggctgtttctacagcagatggtgttgtgtcgcgcatccaatcacgtattttttgttcgttgggtgggtggtccacaccgctcgcgcccagagcggtagatccagacaaacgttgtgggtgctaatttccccggcggggggggggacctaacatccccctgtgatcaccttatttcccggtcgctggcccagcaggaagggggcttttcttggaaaccgcccgcttttgtgtttgccacaggaggaacaactttctcttgggggagcaccgaacacaaggacggatgggtcgtgggcggccacacacacattgattgctgcgtgggtagtacgccgcggttgtccgtcttcgctgaaaccagaaggcccccaaggaattgtccttgggcttcccgtccttggtaggagaagaaggtgtcctcctctcgcccttgggggggaaaaatttccggtacagtagccttttttgaacggggagcacgtaaaaccgtttggtccccacggaaaaatttgtttggcccgttccgcgttatgatccacgcctgatacttgcccctcggagcgggaggttggcgtatatacttgctccccggaggggccccccgccgcagaggggggggatccccctccccgggcggtgtgagcccccgcgggggcccacaggtagacttttccacatctctcgagagagttggaggttttttttttggagaggatgtttcacgcccaccctcggtgcacacgcttggtgagagattttgtgggccgcttccacacgtcttactgtggncgttatcccccgtgccacgtgtttgcagcaccctcgggcgcctctgtggggagccacccttcgaggggaaaacactctccccccccgctgtgttgtgtgttcacacacggagatctgtcgccgctgggagacactccactttgttcacgcgggccaatagggcaacccctctgtcggtcacacgtttaccgcagaggctcgtgctttctcacaagagaaagggggaaccccccacacagattgtagagattagagagcgcctctatagagcacacacactgtatagtttataagagagttggaaactgtgataattggggacgccaccgcacgtgtatattcaccccacccactatagggcactcgagttaaccacaagcacacctctttccctcttcccccgcaggtgatgtttgcggaaaccccctcttttcccttcacagctctggcttaagaatgttcccaaatttatagagaaaggcttataaggcggcctaccacgagaaaaagggaaaaaggccaccacaaagttcccttctcacactttcacgtataaaaaataaattaaacacgcacgccgccaaccacaaatataaaatggaaattaaaagagaaccacacaatgaaataaaatatttgtgttgtgcagccatttaaaaaaatccaaaattacaattataaagtggagcca

SEQ ID NO: 691952 - DNA, 221 bp, Homo sapiens
agctctctctgatgggcacaagatcactacaggctggtggcttctgaacagcacgcatttatttcctagcttctgtgggtgcaggagtccaggcacaggacactcaacctagggtctcataaaggctgctattcagcggtgtttggctagggctgggttctcatcaggagacttgactcagcggatccacatccaggctcttctagagtggggacagaatt

SEQ ID NO: 691953 - DNA, 287 bp, Homo sapiens
gatccgcaacgagttgttcaccgcttcggtggccgcgcgccttcctgaacgatcgccggatccgcgtgagcaagcgcacccagatcgaggagtcgctgatcggaaccggctttcccttccgcatgatttcgcagatcgacgactacctcaagatgctgcggccagtgatggagaaggctgcgggcttgcgacgatccggcctgcgcgctcgacatggcctacaccgctgccggacgcttcgacgggttcttcgagatcgggctcaagcgtgggacgtcgcgtcgacg

SEQ ID NO: 691954 - DNA, 957 bp, Homo sapiens
tctagcatcaccagtattagaggcaccgtctgcccagtgacacagtgttaagcaggccgggtaccctaaccgtgcaccggtagcataatccacttgtaccttaaatagggacctgatatgaatggctccacttgagggttcagcatgactcttactttgaaccagtgaaatagacctgcccgtgaagaggcgggcataacacagcaagacgagaagaccctatggagctttaattggattgatatgcaaacagtacctgaacaaagccacaggtcctaaaatgaccagaatctgcattaagaaatttgcggttggggcgacctcggagcagaacccaagactccgagcagttacatgctaagacttcacgcagtcaaagcgaactactatactcaattgatccaataacttgaccaacggaacaagttaccctagggataacagcgcaatcctattctagagtccatatcaacaatagggttaacgacctcgatgtggatcaggacatcccaatggtgcatgccgctattagaaggttcgtttgtcaacgattagagtcctacgtgatctgagttcagaccggagtaatccaggtcggattctatctacttcaaattcctccctgtacgaaaagggacggcgaagaaatagacgtctacttcacggacgcgccttcccccgtaaaatgactatcattctccaactaaagtattatacccaagaaccaggccaagaaacgggtttgtacaaaagctaggagcacaaccaacacaagcaacaaaaaacggggggggggacaaggaagtgccccacgggaggcacaagacgcggcaccacctactgagacaggggccccaagaggggcgcaaaaaagaagacgacgcgcgtcaaacagtcaaagaaaaggcacacggatttggagagcctcccgtggggcatggggacacacaaaacatg

SEQ ID NO: 691955 - DNA, 338 bp, Homo sapiens
gtgtgacataggacatgaacatgatggaggccgggcagtagttggctcacgccgtgtcatcgcaacaattgagaggccgggatgggcagatcacttgaggtccggagttcgagaccagcctgaccaacatggcgaaaccccatctctactaaaaatacaaaattagccaggcatggtgcgcacgcctgtaatcccagctactgaggaggctgaggcaggagaattgcttgaacccgggaggtggaggtagcagtgagcctagatcgcactattgcactccagcctgggcaagagcgaaactccgtcttaaacaaaacaaaacaacattcttcagcacg

SEQ ID NO: 691956 - DNA, 175 bp, Homo sapiens
  misc_feature (22)..(22): n is a, c, g, or t
ggaaagaaagaaagccaagagngattaagaagaagaaaaaaggaagccaaagaaaaataagcaagagcagatgcaaaccacgcattccatccggctgggcctggccctcaacttctccgtgttctactgtgagatccagaatgcacctgagccagcctgcctcttagccaaacaa

SEQ ID NO: 691957 - DNA, 170 bp, Homo sapiens
cgggcctgttcctcttccgccgtgctcagttttcttttgcctgcagcagcactccccatggctggccctgcttgcctttcttgtgcatctttctgggtcaggggttgtgctcgctgcttcacttggcggccgtcagtgggcttctggtgggggcatcctctcagcgtcgc

SEQ ID NO: 691958 - DNA, 234 bp, Homo sapiens
acgacagggcgactccatctcaaaaaaaaaaaaaggaaaggaaaaagaaaagaaaggtttacccctaacctgggggaaccttgtttaacttagtgttaggcaaaaagagcagagaaaaccttattaaaccccacggtctccagaaaaaaaccagaaccccaggttatgcaaacaaagttctagtgtaaacggttcccctcgggattatgggacttcacgggatgactttttgtt

SEQ ID NO: 691959 - DNA, 457 bp, Homo sapiens
agaacatgcgaggcgaaataacgcagaataaagaaaacgaatcttagccaccgtcctatcacacagcggtggccattcattatgctttgtgaaatttcttccttaagagggtttttcatccataacggtgcattttccacatactgacattcctacttgcgtcacgacttcaacatccttattttaaaactcggtttcacatttttgaaaaacggtttttgtgattttcgtcgttttgattgaaataatgcaaacgttttctggaatgttctgtgttcctgtaaaactccagtgcacaattcattaactcgtgatccaaagacagctgtcaccgtgttctcttatgagggcaggagctgtggtctgtgtgtgtgtgtttcagtcttttgtcctcagtacctgcaaggacacttagaatttactgggtgcctaataaacattgtgaaataaagtaaaa

SEQ ID NO: 691960 - DNA, 252 bp, Homo sapiens
  misc_feature (9)..(9): n is a, c, g, or t
gtggcaggncacgggcgggagggggtgtcggctggaccatggcaggacagaaaagcgggagagaacatatccaagaaagacctacgaggactctgagcgcagggtgagcaggaagtacacccggttcccagtcaggactttttgcttgcccatcgctgagggagagctctcagataggaccgactggggcaggctgctagggcagcatgtggtctgcagtggggtacgggggcctgaggccgtcggtgtagg

SEQ ID NO: 691961 - DNA, 132 bp, Homo sapiens
tgtgatctagaggatgcgtgtagtggggtgagctgggattctagagatcggttgtgatatgtggaagttcatttccgtatgtggattagctgtacgagtagtgttcaatgtgtccataggatgtgtatactc

SEQ ID NO: 691962 - DNA, 896 bp, Homo sapiens
gtttttcagtcgggcgctgagtggttttcggatcatgtctggtggtccgggattataacagcgagaacatgggggggccagagggaatggaccccgatggttgttatccgagagcactggaagtgagaattgtccgataacttttgatgaatattgcatttacaggagtctctccttcgtggatctatgcttacgggtttggggaaaggctttcggtaattcagagagagctaattattccctggtatttacagggtatgaatggtgattgggtcaagctcagtcaggtactgggaatgacaggcacatttggctattttcaattcctggcaccagttggggaatgaggttccagtgagacccaagcactaggtattgggcccaacagagaacttgggtcaaaaggattccaaaagggtattctgggccttgggagactatatgtgggaggcattggtaatgtcctggcttggtgggacaaatggtccgaatggaatggaaaatggagggtgtaggaccaatattgttgttggacaccggaaaatgtttggtattgtttaacagaagatactttttccaaatggtcaaatgtggttgctgaagaaattaatgttgagcctgtggtttacgggtccaattattggaatttcagaattaaaacaaggatcaggttgggtgggttctggcccactgcactggtttgttgcttgcccaacaatctgaagtccgtgcgtcgtgcaacggaaattccttgaaagtcacaggtttactgtgaacggaaggagtgtcattgtgtgacaccacgggatcacagcggagggaacacaaaattttgtagcaggtaacgagtacatggaatgattcacatttttttttttttattttggagacagaag

SEQ ID NO: 691963 - DNA, 283 bp, Homo sapiens
cattgctgtccgttatctcatcctttgcaacgccttaacatacatatgcatccttttcttctcggaccgagggctgattcctgtaaatatctccttcctggtcaagcgaaaatgggaatcttggtagcttctctttgtcaactaaggaatattgtgcaccgtgatcattccaccgcacctaagtcattttgatgggtgaggatcagttgagctttccaccatctccacaggttttggtgctttccaaatattctctgtcactataatatccacagatttggta

SEQ ID NO: 691964 - DNA, 93 bp, Homo sapiens
gcctcctcttcgcgcggccggaagcgcaggactggctcacggccgtccaggtaggcggccagtgctcttcgcgctcctgctagccgcggtcgc

SEQ ID NO: 691965 - DNA, 397 bp, Homo sapiens
  misc_feature (191)..(191): n is a, c, g, or t
ccaggtgcccaggtgggtctcgaactccggacctcaggtgatctggcccgcctcggcctcccaaagggctggggataacggggtatgagccaccgggtccagcctagcaacatttttttttttttttaagtaataagctatatccctagggcaatttggggaaactatatagcggaaaatattatagcggnaaggtcaattcaagggggatgggggcaaccttatatctagttactctaaaaatgctaagcgggtgtcccctataaggggtcttaagagtaattggggaatcccggtaaaccactattaagcgcttaattccttgcgcccacatggggtcgcccgtggggcttaaagacgccaagacaggcaaggctctttctctttcacatctggg

SEQ ID NO: 691966 - DNA, 812 bp, Homo sapiens
  misc_feature (422)..(422): n is a, c, g, or t
gccaagaggaaacggcgtggaggctttgcagttcaggcgaagaagccaataaagaaacgaaatatgatgcggagccgccagctaagcggcacgccacaggcagaggaggtggacggaagaagagagggaccggatcccaggccccgtttgcgagggaagagtggaatcaatagaggaaccggattcgtcactcttttcttccagaggaaatagaatcttagaacaatgacatttaatgcaggacttgagaatgttgatgcctcagttctaagagcagactatcgtacaaactggagtcgtaaaggatacagctattttgtgacttaaccgagggtttgtgaaatgacagaatctgtaagtatgactgcagtctattttgaatgctaggggagataccaacgaggcagtctcttatcattgtnggcgttttgcaaagagttcgaccgtctcacaggacgcatcgtgcgtaagattcgcatatggttcgaataatcattcatcacccctctggttgaacttgaacgattggacctcggaaaacggggttgtgagaaagggattgcctcggggccctcgtttcttaggtacgttcttggaagcacttaactttatgtgaatggaactttaccgcacatttatgcttgtgttttagaacaggaacactgctctacattgtgctagcaatcgtttttaggttaacgaccaagcgggattattcagtgcccggaaaaaggccaaaaccccattaggtggggaacgcaccgtggttttgaccttttccaacacaatattgggaatacttagggactatg

SEQ ID NO: 691967 - DNA, 168 bp, Homo sapiens
tgaacgtgagccaccagtcactgttcagtcattgccaccgacagctcttcagccgcctcttccggctcctcccctgaagtctctcccgcgctgtcgtggtccagcgcacttgctgtccctccgcattctactctgcatctgctgtccaggacggtcggtctcgctagc

SEQ ID NO: 691968 - DNA, 205 bp, Homo sapiens
ttagcgaaaaacgcgcggacatcgccgatctcgccactgaactcgtgtatgacatcctgaactccttatccgccctgccgctttgcgtgcagcggtatgggcgaagggtaggtgtgcgcgccgataagcgccaccgcggagctgattctgtcgccggcgccatccggcagccaggcaacgtcgctgccttccaccgcgcggaggg

SEQ ID NO: 691969 - DNA, 173 bp, Homo sapiens
acgtatagtgtcaagtcactgcatacatgaactggtgtatacatttagtatacatagtatcctcctcgtgtataacccacatgggaaacaagagtacaggcaacagtgaggcatgttacttacaaatacacttatccgttacccagctgtaaagtccacacaacatgtctgaa

SEQ ID NO: 691970 - DNA, 160 bp, Homo sapiens
tccgaggattccaagcttacgaggtggggctgtcatctgtggtgcagtccttctggccccctggctgtcagtgtcgctccaggccttgacaagcagctcattcaagcggcccaccatgaccctgggtcgtcaccaagtccagcagcaatcatggcgttct

SEQ ID NO: 691971 - DNA, 129 bp, Homo sapiens
ggtagagcaggggggtctccctagagcgccagcagtgccctggaactccgtgagtctaagaaggccacagctgtatcccacgcgccatgactccccggagaccgagcatgaatgggcgcaaacgagagc

SEQ ID NO: 691972 - DNA, 520 bp, Homo sapiens
ggcccggggttgcgttgacccgctttggggcacaaggtatgttcgcccctttttgatgcccgaaaccatggccaaagccgccgaacccaaggctccgcagagtttcgaggccgcgatggccgagctcgaaggccttgtggcttccatggaaggcggccagctcaccctggaggcgtcgctcgccgcttacaagcgcggcgcggaactgttgaagtactgccaggccgcgctcgaggatgcgcagcagcagatcaaggtcctcgaaggcgacacgctggcagactggtccggtgcagacgataccgagtgacttcgccggctggatgcaggcccaccaggcccgcatcgaagccgcgctggaacgtgtcctgcccgcggccgatatcgccccgcagcggctgcatgaggccatgcgctacgccgtgctgggcggcggcaagcgcatccggccgttgcttgcctacgccggtggggaggcgaccggagccccggtcgacgcggtggaccgcatcgcggccgc

SEQ ID NO: 691973 - DNA, 224 bp, Homo sapiens
agaggtgggacacggtgaacatagctgctgctgtgtagagcaagttcaaaaataagccagactccccgagagtctggtcaccatagcaacggtgggagttgttctgcagaagcctcctcactgaaaggcccggtggccaccaccttcttcctcccctccctgaggaatcaagtcccaccagcaccaggaggagcctctggtgtcttcacacatgcacatgctgt

SEQ ID NO: 691974 - DNA, 777 bp, Homo sapiens
cgggatcgcgcacgtgccggaggcccatgccgaccgcaggcgccgtatccgcgctcgtctagcaggcccggttacgcggttgcacgtcggccccagccctgaggagccggacagatgtggaaacttgcgtgcccgccgcgggaccccgggcaggaaggagagaccatacagaactttttgactggcgtggcagtacagatagtgggcaaggaaaaacgtgtgccattctgattgcaagaatgagtcaggtcgaatcaggccgagagagtcagtggctagtgtataaacgtggcgtaaacttgttagcgttgtaagcgcatagccttgggtataggagaaaaaacagtagtagggaacaatattacgtacacagagagagaaggtacgaagttgtatactacaggtacaaagagcaggaagtgaaaattcccatggtagtttgaacagtttagagacagaataaagttgctatagagtcatgggatacaccgtatttggtagtacagttggacgggtagagacaaagaatggctaggaacagttgggcgatttttagcgcccgaagacgttatatggcacaaggttcagagggcgggaaatgggggttaattataacgttgtgtgtggtgaaagatggttaatggggcgaaggattaaaaattttccaagaaaagttaagaaggttactggacgccacccttgtttgggattatgacgagattgggcttcttattccataggatatattaaggaaatgggttcttccatgtttagaac

SEQ ID NO: 691975 - DNA, 190 bp, Homo sapiens
cttcggtttagtttgtttcaactttttgtaacaaactatatggatgcttgcttctggcctcgtagttcgtggcaattacgtcttgaagaatagcctttataaacagttgtttggactcctgtcgccaatattattatgaggcatctgacagtcagaagtgcctgatttagaggacttgcgattgataggg

SEQ ID NO: 691976 - DNA, 188 bp, Homo sapiens
ctgctaaaccaaccacggactgacaaccccacgggtaccttttcacgaccaaactactactaacgccaccattacgtacgtacctgacgctgacttacgacactcattgccactattactgactacaacacggctacttacctacctaacgaccacactacacgacacccacttacgtatctcaccca

SEQ ID NO: 691977 - DNA, 212 bp, Homo sapiens
cctgctgctgagtatcgtcgtgatgctgcgcgaagacaatgccgatctccgacgtgactggacacaggccgtgaactcggctggtggacgacgtgcgttgggcgcgtcacagcgagaagctggagcgaatcgaacgcgaacgtcagcgcctgcgcgacatctggatgcaccctgaatgctaggaacgtcgaacaggtcaatgctgctgttga

SEQ ID NO: 691978 - DNA, 131 bp, Homo sapiens
gctatgtgactcaccatgagtttcctctgtgcttctgcctgcccatggcattgttcaccatctttctgggtctaacactgtgcgcgagttgggggctcgatgaaagcctgcctgtacgcgggttgttgcct

SEQ ID NO: 691979 - DNA, 295 bp, Homo sapiens
tgcgatggcgggaacactatgcaaacggggcaaaatgaatgtatggcgtgtatcttccttactgggagacagagtttcactctgtcgcccaggctgccgtgcaacagcatgatctcggctcacagcaacctccagcgtcctgggttcaagcgattctccgcgcctcagcctcccgagtagtacgattacaggcacccaccatcatgcccagctaattttagtattattgtacagacagggtttcaccatgttggccaggttggcctcgacctcctgacctcaggtgatctgcctg

SEQ ID NO: 691980 - DNA, 267 bp, Homo sapiens
gatcctatatatgctgtctcataaacccagttggcaaatattcataggcctatatctagtcactctgggctggtggcagtgtttgtatttggtccacacatactttatgcccagggcacgccctggattaagagaaggttggtgccctaccagattgaaaatggccaataaatcatcaaggccaacatttggactgctaattggtacggcctgggattacataaggtggttcttgaacagcttcaggggtgagaccagcaatatcag

SEQ ID NO: 691981 - DNA, 578 bp, Homo sapiens
  misc_feature (406)..(406): n is a, c, g, or t
  misc_feature (418)..(418): n is a, c, g, or t
  misc_feature (431)..(431): n is a, c, g, or t
  misc_feature (487)..(487): n is a, c, g, or t
ctcatgcctttaatcctgaggcaggttgtatggactttgagaatattccatgctggggaaagagcataagctgacgtgttttgggaagagtgaatatattgcattaatcgcaaatgattgaataatttcactgttgaggtacagttctcaaaaacttaaattgacactatttttacattttgtctaatcacaaattatttttacttttttcatctaaattttgatttttcgtgtatttaacataataggaaccccattaataatcagtattattttgcctctttgcaaattctttctagagttaaaatttgtagtttagtgaaaattcacctatttggcacatatgtcccaggaagctttcctgctaactccgctgttgatcctgttgagttactcatttattcanctcacgctcatngagtgtgtgctanatgccaggcaaaatagggagctagctatgctgtgggctttctgttccctgcccttnggcaatcgtgtgtttgtgaatgttgcaggtggccggcacgcgacggctttaactgtcgatggaaaagtggtttcgtggggccaaggtgaac

SEQ ID NO: 691982 - DNA, 181 bp, Homo sapiens
tgtttaacttaatagtgtactactcaaccgtaatcggagaggtccgtacccttgaattgtctactccaattcttggcatctgtcaaattttaggtaaatacaacgaaagtgtcgacctcaaaaaaacctggaattgaactttatattctgttagttacgttacgaaggtatacaccggtca

SEQ ID NO: 691983 - DNA, 931 bp, Homo sapiens
  misc_feature (610)..(610): n is a, c, g, or t
  misc_feature (650)..(650): n is a, c, g, or t
  misc_feature (741)..(741): n is a, c, g, or t
  misc_feature (786)..(786): n is a, c, g, or t
  misc_feature (826)..(826): n is a, c, g, or t
  misc_feature (868)..(868): n is a, c, g, or t
  misc_feature (871)..(871): n is a, c, g, or t
  misc_feature (922)..(922): n is a, c, g, or t
ccctgcggtgggggccttcgacagtgagggccacccgctcagctcgaccgcggagggcagctccaaaggggaccccaaaggtgcccacgcggggctggggcctcctgggcgtcgttgggagcggccactaccggcccgggtccgagctgtcagcctctccaaagcctgcgcgagaggagccgggacacgcctagcgcgggctccagcagtggccggtgtccagctgcctactttctgcccggatctctggctcatctctccggtctccgcagactaaagccctcgggatatgcagcagccatgcctgtgcacacgctgagccccggagccccgtccgcccccgccctaccttgccgcctgcggaccagggtccctggctacctgctacgggggccggcagatggtggagcccggaaaccgagcgctgtggagcgcctggaggccgacaaggcaagtacgtcaagagcctgccacgtggcccaaccaccgcccaggagccctgtgccagccccctgcctgtcccaaaccagcccgcctccttccagcccctggagacctcgcccgccaccagtgcctccacgccccagcccgcccgcagcccctgccctgngccccctgcccgaccggcccccagcctgggaccctgtgancatccctccagccagccctccatccgactttgtggtgaacagccccccgtgatcccccctgcccggaggcccagcccgccactccctgggnacggggcccgaaggggagcccggcccgtccctcccccccagcccnccccctcccgcgaaccgccagccccagtaacctcttgcgngtcccgcccggggtggggacgtcccgcccccctgccccgccntcnccctgcccccggcccctgccccatcaaacccggcccctgccggccgccctnccaacccca

SEQ ID NO: 691984 - DNA, 334 bp, Homo sapiens
ttagatatgattcataaagcaaatcataaggcaaaatatacaacaaaagagtggagctatcaaacgacacataaggcactgaaagagctccactgggctaaccatgaacagcctgagcaacaaaatcagtaacaattgttctggattattattcacagtaaaaaccactgctaacatttttgagtccttactggtctaaatggccaaataaacgagaagaagcataacttccatctggagatattccatatgatactttagattctcccccttccaggaggttgagattaatttccctcccctttagagtgggttgtgtgtggtgacttacttc

SEQ ID NO: 691985 - DNA, 268 bp, Homo sapiens
acgagccggcaccttactaccccacgatcactgtgtcttgataagttgccgactaggataaaagatctaacttaggaaaaaaatctatcatacgtcactttataagatggttgcaccctgtgatatgccagttataagcagaaatgctgacacatttggccaaaggtttaaaagttgggagagggacattggacatgaatctgtgacttgaagaacaagttggtaaaataagtatcactaagctgctctcttcctttgacttttaatt

SEQ ID NO: 691986 - DNA, 839 bp, Homo sapiens
gacgtattgctggcgtgatgatatgggcggtaagcaggtgtgaagggaggacgtaagatatatgcttgtagagacaaaggtgtctgtgaagatttgtgtggtccaagatcttctattgatattgaagagtactcggatactgaggtacagaagttaccaggtactaactctggaagaaatggcaagacaagtgggtgaacggcaagaatgttttcatcaggaacaaggacatcagtattaaagaagccgtttagatactttccttaaaggcaagagtgactgagggtatttttcctctttgggaaaagcggttgagatgaggatggttgtggcggaccggggaccacagtgtagtggtggtggaaatcagtgaacttgggatacaagaattttttagaagagcagaatctttcttactcagaagaaccaatcaccgaaattcctggaaccaaagtatttaagagttcttgcggggaacatttcataggtactgttgcagtatttcgatcttcccaggacaaatatgtgggcaaaattgggccattgactttggatagaggagcattgagttgtgccatcaatgccaaggtgatcgcaaaatgctatgcgggattacaaattgtgtttccctccctgcgaacaacagttcacgaatctccctggtgtgttctttctttatgatccaataacactccaggtcaccattttttgtttcccatgtctgaaattgaagtggtgcggcacaatatgcgccatacgtgtcttgacaggtgagtttgagaacgaccaacactgggaaggctgcgtttgaaaagtttctttcacacagagtgcatcta

SEQ ID NO: 691987 - DNA, 459 bp, Homo sapiens
  misc_feature (74)..(74): n is a, c, g, or t
  misc_feature (100)..(100): n is a, c, g, or t
tctagaggacctagagagacagaaggtcacacgtcacataccgattcatggtcactcctccactgtcaatgtgntttgagggatcagcacagactgtgancatacgaacaaaggccgggcctgacagagctttcataaagaaaggtcgagttggttcccagagctctggattgtttgttaaatatgatgcctttctcatgcataccgatgcactgcagcccaagtttgctgccgaatcgagagctgtaatgattgtgcttcattatgtggaacatacttgaggacttgctgataatgagtgtttcctctccagagatccagactcgcatgaattctccatacacccggttgtagtagttgcaggcactgccgatccccatccacaggaatctgccgtgggagatgaggggtccaattcccatgcagtagccaggacctggtattgaggatgtgccctca

SEQ ID NO: 691988 - DNA, 1855 bp, Homo sapiens
  misc_feature (1)..(1): n is a, c, g, or t
  misc_feature (16)..(16): n is a, c, g, or t
  misc_feature (330)..(330): n is a, c, g, or t
  misc_feature (648)..(648): n is a, c, g, or t
  misc_feature (703)..(703): n is a, c, g, or t
  misc_feature (945)..(945): n is a, c, g, or t
  misc_feature (948)..(948): n is a, c, g, or t
  misc_feature (1097)..(1097): n is a, c, g, or t
  misc_feature (1100)..(1100): n is a, c, g, or t
  misc_feature (1286)..(1286): n is a, c, g, or t
  misc_feature (1289)..(1289): n is a, c, g, or t
  misc_feature (1371)..(1371): n is a, c, g, or t
  misc_feature (1433)..(1433): n is a, c, g, or t
  misc_feature (1483)..(1483): n is a, c, g, or t
  misc_feature (1703)..(1703): n is a, c, g, or t
  misc_feature (1716)..(1716): n is a, c, g, or t
  misc_feature (1753)..(1753): n is a, c, g, or t
ncagtgcggctctcgngcttctcctctgctgcagtgcgtgttcgttcctaccacgaagagatggggggggtgtatagtgtagtggcctctcttgtcgtccctctgtgttggcccgcccgagattagggtagaatactggtggggtgtgctcccaccacacacccgacgccgggtgttgtggggccggccacgcactcgatgggtccgctcacccacgtacgctcaagcggttctcctcccgcgcgggtgtagtttagaatcagtcttgtgttgctcgcgatagatcttgctcccccctcctgtcggggcccccttctgtctggggagtgntgtaaaagatcttctttttctcctgctcgtgcgagggagcacacccataattatggcgggctgctgcttctcacaaaaaatggtctccccaaggagagacgaggaggtggtttgcgcgttctacaccaggaggagagtggttgtttctctcctgctcctgttggggagccgatacaacgcgtttgtgtcgttgtggggggtgcgcacacgcccccgcacagaaatagtgtggtgcgccccgcccccccccactactggggagaacctcacaacccttgggggcggtgtgtctaccaccttgggccttttcacataggntgtgtaggttgttattctcccccctgggggagccgccaccgttctccctacaggngccgccctactagtttttattggcgcctcccccgcgcccttataatgcccccccccttggtgatttttggggaggtttgggccacaacaccccacaccgggcgtttcacacaacatttgggcacacaaacgcaccacaagtggtttttggctctggagaactctctgatgaaaggggagaaaagaggagttttgttgattgtcgcccccccctcgttgtctcgtggggtgataaaaaataanagnctctgcgaggagagagtattggcgccgcgcgtcaacaaggagtaggttctctcggagaaagtattctctgtgtgtgataagagtctcggcccatccctctgtggtgtgagagtataataaggggtgttctctctctcgcgacacacagnccncccacacacgagtggtgttgtggtgtttgaagaagagagcctcttttctctctcagagacttcattagccgcccccctcctctttggggttgtcccgcttctgttgtgggccgctgctgttcctgcggtgaggagagtagtgagagaccacacacacaacacaagcgtttgcttcgcgcgttgtgnggngtgtgtctactactctcacagagcgcacacgtggtgagcacacacagaaagagagcgctgctgttctgctgctgagagactnctgtgcaccaaacagggtggtctctccaccacacagggtgctgctgtcccccacagcaaganaaggcgtctcacgagagagggctataaagtgagaatatattatattcccntcataatatcctcgcccacaccgcacactctctctataatccacagcttggtgtggagaagagaccgcggttctccacgagacactctgtgttgtttgccacattgggccacactttaaagtgttatagtatagtataaagagactggttataatgagtaaccacacatgcactctgtaaacccctcacagagaaggagaaaggagagaaatgtttttgntggagcccccttnggttttctttttttgcgtgtggcacacgttttaaagnttattagattttttaaatcccgtacttttttatgggacaccaccttgaccccaaatttgtccccaggattttgagaccccctttaaaaagtttaatggagga

SEQ ID NO: 691989 - DNA, 530 bp, Homo sapiens
tcaagtggtaaccgcattccatgaaaagtgggcctgtaaaatacaactctcatttaatattcatgcttttgtgcctttaagaaaatattttttgtcatttttggtgttacagaactataatgtgattcaaggtgtttataggcttgtcataaaagggtcatttctgtgtgttactttctttttatatagctatagtatatttagaacaataaatactatcgttttataggggttcgtcttatttacctatttctttacctcagaccattgactgctagacctgtgtccacattattctgagtatggttaaacagtggcctttttcgatgcgaatcaccaacctttttgggcctggtccaccctggtggcccaaaattacagaacaaaattttggtgggaaggggcaggcttctaaacctttgttcccttgggaacccgtgcaacattttaatttccctgggtttccagcaacatcttcttacgcgaaaaacccaaaattggtattacacaatctccattttttccagtgg

SEQ ID NO: 691990 - DNA, 990 bp, Homo sapiens
  misc_feature (87)..(87): n is a, c, g, or t
  misc_feature (96)..(96): n is a, c, g, or t
  misc_feature (103)..(103): n is a, c, g, or t
  misc_feature (118)..(118): n is a, c, g, or t
  misc_feature (127)..(127): n is a, c, g, or t
  misc_feature (292)..(292): n is a, c, g, or t
  misc_feature (340)..(340): n is a, c, g, or t
  misc_feature (366)..(366): n is a, c, g, or t
  misc_feature (458)..(458): n is a, c, g, or t
  misc_feature (462)..(462): n is a, c, g, or t
  misc_feature (509)..(509): n is a, c, g, or t
  misc_feature (511)..(511): n is a, c, g, or t
  misc_feature (549)..(549): n is a, c, g, or t
  misc_feature (553)..(553): n is a, c, g, or t
  misc_feature (559)..(559): n is a, c, g, or t
  misc_feature (595)..(595): n is a, c, g, or t
  misc_feature (607)..(607): n is a, c, g, or t
  misc_feature (635)..(635): n is a, c, g, or t
  misc_feature (645)..(645): n is a, c, g, or t
  misc_feature (649)..(649): n is a, c, g, or t
  misc_feature (655)..(655): n is a, c, g, or t
  misc_feature (661)..(662): n is a, c, g, or t
  misc_feature (671)..(671): n is a, c, g, or t
  misc_feature (673)..(673): n is a, c, g, or t
  misc_feature (679)..(679): n is a, c, g, or t
  misc_feature (708)..(708): n is a, c, g, or t
  misc_feature (733)..(734): n is a, c, g, or t
  misc_feature (742)..(742): n is a, c, g, or t
  misc_feature (753)..(754): n is a, c, g, or t
  misc_feature (756)..(756): n is a, c, g, or t
  misc_feature (788)..(788): n is a, c, g, or t
  misc_feature (798)..(798): n is a, c, g, or t
  misc_feature (802)..(803): n is a, c, g, or t
  misc_feature (805)..(806): n is a, c, g, or t
  misc_feature (809)..(809): n is a, c, g, or t
  misc_feature (822)..(822): n is a, c, g, or t
  misc_feature (827)..(829): n is a, c, g, or t
  misc_feature (857)..(857): n is a, c, g, or t
  misc_feature (902)..(902): n is a, c, g, or t
  misc_feature (913)..(913): n is a, c, g, or t
  misc_feature (953)..(953): n is a, c, g, or t
ccatggcggcgccccgcagccgtcacccacctcatctttgacatggacggacttcttctggatactgaacggctgtattcagtggtntttcaaganatatgtnatcgctatgacaagnatacagctnggatgtaaagtccctggttatgggtaagaaggcattagaggcggcacagattataatagacgtcttgcagctcccgatgtccaaagaggagctgtggaagaaagccaaacgaagttaaaggaagtgttccccacggctgcgctcatgccaggggcggagaaactnatcatccacctgcggaaacatgcatcccctttgcacttggcaccagcncggggtcccgccgtctgttcgactantgaatgccaacgcccgccacaaaggccgttccttcacgcatttgttgttcccaacactttgtagctcggagaagatcgaacccccgaaagtngcangcatagcgcaaagctcagtaccccgtgtacattctttcccttagctntngttgctcaaagtagagtttcttcttccccccctacctngctnattggnagaaagttgctctttgttctttttgagagaattgcntccccaaaatgngggggtgggaaggcagggcccctaggcnaagcttgggngatnagaaancgtagnnacataaggntncctganaccggaaaacttttgatgcccgaagattnttgaacaaacaaaagggccaacccnnggttggtngaatttacccnngncaggaatttaccagacccgagatagttttggntttttgcccncccnnanngantagaagaggggangggcnnncagttctttccgccccccaggcccactnctcataggttccacacttgcttgggggggaaaggggaaagggaantcagcaacttnttcaattcccaaacctggcgctgttgatttttagcctccntgagatttggagttttccatccccatgtttggtttgt

SEQ ID NO: 691991 - DNA, 346 bp, Homo sapiens
agtgtaaatacctgggacaaaaaaattaattattagaataatgatcatactagtttaagacatgtacaaaaagacaaaataaaatatcttgttgaaaatagaaatatcgtttttttttttttttttgggaaacggggtctggctctgtcacccaggctgagctacaggggcgtgatcttggctcattagggcctcaacctcccgagatcgggtggttcccccacctcagcctcccaagtagctagaataaaaggaaggcaccacattgcctgaatagttattaaaaaaactttgtagcaagggggtctcactgtgtcgcccaggttggtctcaaactcctggaatc

SEQ ID NO: 691992 - DNA, 562 bp, Homo sapiens
  misc_feature (87)..(87): n is a, c, g, or t
  misc_feature (96)..(96): n is a, c, g, or t
  misc_feature (103)..(103): n is a, c, g, or t
  misc_feature (118)..(118): n is a, c, g, or t
  misc_feature (127)..(127): n is a, c, g, or t
  misc_feature (292)..(292): n is a, c, g, or t
  misc_feature (340)..(340): n is a, c, g, or t
ccatggcggcgccccgcagccgtcacccacctcatctttgacatggacggacttcttctggatactgaacggctgtattcagtggtntttcaaganatatgtnatcgctatgacaagnatacagctnggatgtaaagtccctggttatgggtaagaaggcattagaggcggcacagattataatagacgtcttgcagctcccgatgtccaaagaggagctgtggaagaaagccaaacgaagttaaaggaagtgttccccacggctgcgctcatgccaggggcggagaaactnatcatccacctgcggaaacatgcatcccctttgcacttggcaccagcncgggggtgcgcgtcgttcgatatgagcaaagccgcacaaagagttcttcagcttgtttttccacatggtgctcggagatgaccccgcagtgcagcattggcacagcagaccccgacatctttctaggtgtgccacgagggtctctcccctcctcctattgagagtgcctcttctttgaagagctccacttgggtgaggcggccctgcacctcggatacacgt

SEQ ID NO: 691993 - DNA, 869 bp, Homo sapiens
ctcccgggcagcgagggctgtgaaagaagttgtaggcatgcataccacagaatcaaaaaatgaacactttggaggatgaaaacttccaaacatctacatagctcctcagagtctcattgatcctaagtaatactgtcgacatgatacgcaaactaatagactgtctttatcagatacagaaagacaataaacaccacagtacaatataaggcagacataacgattgtcttggtcctcgttaagaggcagtattgcaatgtcaattattaacatacagatggcagtacattactgtatcgtcgcatgatggctcgcttatgcaccatggtcaatactttaggactctgtaaagctctccgctggtgcgacaacttctcatttagcggcttggtgtccagttcattctcttgtcatagttgcccattgattggtgcggacacaccagattctctctagcaaaacctgcacttaggagaatagcgcttattaggtagcgcctgctccacatttcgctaagcctcgttctctttgggggactgtttaacttaggcatggttgtttcccgaattaaggaaattgatgtcccaggtgtccatcaaaatagtaagcacttgtttccacttggttgccttatagccacgattcgtgtcctttcccaaaatgtatgtacaagaaaggccagtctgcgcgcttgaacgcagtggtatttcccttagagtaataaggaaggcatttgggcgccttgggcgcatctcggcatcccaaaccatgcgcctatctgcaaagcgcctagttctcgataggcgtcaaggtatatgtattccacgaattctgggcttggtaagggtaccaaattggcccgttcatgg

SEQ ID NO: 691994 - DNA, 102 bp, Homo sapiens
gcttgggcttttcacccgagacgttttacattctttaaatatgtttgtaatttgagtggtctgcacactccagatttggtttggaaagggaaactttataaa

SEQ ID NO: 691995 - DNA, 423 bp, Homo sapiens
  misc_feature (71)..(71): n is a, c, g, or t
  misc_feature (198)..(198): n is a, c, g, or t
  misc_feature (224)..(224): n is a, c, g, or t
  misc_feature (327)..(327): n is a, c, g, or t
  misc_feature (393)..(393): n is a, c, g, or t
  misc_feature (398)..(398): n is a, c, g, or t
  misc_feature (400)..(400): n is a, c, g, or t
  misc_feature (418)..(418): n is a, c, g, or t
  misc_feature (420)..(420): n is a, c, g, or t
  misc_feature (423)..(423): n is a, c, g, or t
atggtttaacattttgcaagtttttgaaaatttttggtaaagtttttgtttgtttgtttttgaagacggantctttgtttgtcgccctgggtagagtgcagtggcgtgatctcggctcactgccacctctgcctcctgggttcaggtgattctcctgccgcagcctcctgagtagctgggactacatgcacgtgcagncagacctggccaacatggtaaaaccncgcgtctgctaaaagtacaaaaattagctgggcatggtggtgcgcgcctgtaatcctactcgggaggttgacacaggagaatcgcttgaaccgcatcccccanccccctctgggaggcggaggttgcagtgtgctgagatcgagccactgcagtccgcttctgccacangggtngnctctgtctcaaaaaacantntcn

SEQ ID NO: 691996 - DNA, 462 bp, Homo sapiens
tggccaacatggtgaaacccgtcttcactagaaagcacaaaaattagccgggtgtggtggcaggcatctgtaatcccagctacttgggaggctgagagcaggagaacttgcttgaacccgggggcagaggttgcagtgagccaaatattgtgccactgcatctccagcctgggcacagagtgaaactccatctcataataaataaactaaaatatacaataaaataaaaagttacaatataaaatatacagtaggccagtcatggtggctcatgcctgtaatctctagcattttgggaggctgaggtgggaggactgcttgtagcccaggagataaagaccagcctaggcaacatagtgagacccctatctctacatagaataaaaataagaaatgaaaaagattgcttaagcccaggacattgagtttgcagtgagctgtctaacccagtgtactgctcag

SEQ ID NO: 691997 - DNA, 469 bp, Homo sapiens
tcccttttggggtctttgctgatgcaagattagttcaacgtatacaaaaccaataaatatgattcatctcctaaacagaactaaaataaaccacatgaacatctcaacagatgcagaaatggctttcaataaaattcagcatcctttcatgttaaaaatcctcaacaagcaaggcattgaagaaacatacatcaaaataacaagagccatctatgacaaacccacagccaacatcatactgaatgggcaaatgctggaagcattgcccttgagaaacagaacaagacaagggtgaccactctcagcactcctattcaacatagcactggacatcctagccagaacagtcaggcaagagaaagaaataaaaggtacccaaacaggaaaagaggaagtcacactatctctatctgcaatctgtttctatacctagaaaaccccatagtttctgcctagcagctcctagatc

SEQ ID NO: 691998 - DNA, 405 bp, Homo sapiens
tttggaaaaggaagaagagagaaaatatgattttttgttaaacatggtggattcaatcaggcagggatccctattacatccataacctttgtttcaaaaaacaaaaaaaaaaagctttggccaggggcagggggtcacgtttgtaatcccagccctatgaggggttgagacagggggatcccttggggtcaggggttcgagaccagcctgcccaacatggtgaaaccccatttttattaaaaaataccaaaaaattggccaggggtggtggtgggggcctgtaatcccagctacttaggggggtaaggcaggagaatcccttgaacccgggggggggggattgcagtgagccgagtttgggcccctgcactccagcctcaggggcagaacaagattccttttcca

SEQ ID NO: 691999 - DNA, 468 bp, Homo sapiens
atctagaggatgcccccggaatagatggatctcgtggactttagatgacattattctctgaggactattgtggataacaagatgtgggtgaaagccatcctgcattcctgaccacaatatctctgtactcgtgtaggcactttcatgttcgcctcacgctgatacgcaatcgcttgtgaaccaggctggtctcttctgtcgtcaatgaatatcctttggctggcagtcactcctgtaacagatgtctgtatgtaggttgtcccattggctgttaatgcatccatgaacggagatgtacctttcccgttaacagctaagcctgtggccatggctgcagtcacagggccgggcacctgaggcactagtgggtgtatcctgggcctgctccccatcctggccctctcggcaccggggcccaataaagctccgagcggcttttccgctgccacttcgggtgccactgtgtcc

SEQ ID NO: 692000 - DNA, 381 bp, Homo sapiens
gcagagtgccagccccagggccaatagaggcctgtgtcctactaacactacttcttactcctaaggctccaacaaccacacgctatggaacactcaacccaggtcaacttgtcagagacatgtgaaccagagcagctccatcttgaatgggggctgggtaaagtgaggctgagacctgccgggctgcattcccaggaggttaggcattcttagtcccaggatgagataggaggtcgcacaagatacaggtcatgaagaccttgctgataaagcagtttgcagtaaagaagccggccaaagcccacccccaaggtggccacgagagtgacctctgattgtgctcacggctcattatatgctaattagtgcattagctgctgg

SEQ ID NO: 692001 - DNA, 119 bp, Homo sapiens
ctagcacacctgggacccagcacaaccttcatgcacaacctgtgtgaccaacactaacctggtaccagcacaacctgttgccacaaagggacatgcacatacctggtgactcagcacaa

SEQ ID NO: 692002 - DNA, 130 bp, Homo sapiens
aagcttttaccgcaacacacacaaaaaaaaacacctcacacacacaggtaacagctcacacaatgcaacacatgcaacacacacaaaacactacacacactgcaacgcactcaaagcacctcacacgcaa

SEQ ID NO: 692003 - DNA, 702 bp, Homo sapiens
gttatttggttatttcattttatattccctttcccatagctttgtacacacctcatacttaaaaccaagtgagaggcctcttttcagatctggtttatttttggaatgcctgagtgtgtttccagattggggggggagaggtggtgttttactttttgacatgctcttagcatgttttgctagtcattctggatcttatgtttagaaattctgttgaacattcaatgatgtatttgaaatgagaaagtcctttatacacatagtgtgaatgtttgtggccaattcaattgtggaatcttatggcttcggtgctactttgtgtcgaagtttaacttccattgttcagattttaggtccatctagtgaaattgtgccatggtcttcgttaaacttggaccaattttgggaaatgaagatttatctgcgtctatttcattctagatcatcctttactaataatcattagttacagattcacattattcagagttatcctaactcttatgttgggaaattcttaaactgtgcttgattttatcgattctatctatcaattctcctttacgacactttccgtaattggataagttttataacagcgtgtttgattatcttcttaattgagctttcatccggctgtattaaatgcactgttcacctttaaatactttcatttcccatgtggattaatgggacaagctc

SEQ ID NO: 692004 - DNA, 180 bp, Homo sapiens
atttattgattagagaaacagaagcccaggcagggaagatgatctgtttaacggcatacagttagtcatagactggtccgctgctataatgtttctgatctctggtaccttagccacttcacctttttttttccaaatagtcatcagtgaatgataatgctttagctgatgggagcaaga

SEQ ID NO: 692005 - DNA, 505 bp, Homo sapiens
atgacgggggatttgactgaagagacaagaaattttctgagagcatcttatatagcaaatgcgacgcctcctttgcaggaatcattgcaaagacttccacttgcttctgctctatgtgtgtcttctgcaaaactagacggaatattctagcacagcgagacccaaatctctcctgaacgacggactccagagtggctgtgggtagggatgctaatgccttatggaggttgatgacatacattcctccaccactgtcgccagactttgcaacaaactctagtggatcatctgccagcagagtgagatactgatcaagaacttgcttagagatgttatagccaacaggtagggatctgaagatctcattggaagacaatggctgggtgaagggagcactagaggaagtggtaatctcactcattcggagcatggttcgcacaatctcgctgcttgtctggtccatcctgttagcaactgcgctcacaatggcttggtcaccgaagtg

SEQ ID NO: 692006 - DNA, 119 bp, Homo sapiens
tatcgaatgagctggtaccagacgtagtgttgtgctcgaagctgggagatcttcctctgaatgagtagaatagaaaagtttcataataggattagatttagtgaagccttgatggatag

SEQ ID NO: 692007 - DNA, 419 bp, Homo sapiens
  misc_feature (17)..(17): n is a, c, g, or t
  misc_feature (24)..(24): n is a, c, g, or t
  misc_feature (60)..(60): n is a, c, g, or t
  misc_feature (112)..(112): n is a, c, g, or t
  misc_feature (238)..(238): n is a, c, g, or t
  misc_feature (241)..(241): n is a, c, g, or t
  misc_feature (254)..(254): n is a, c, g, or t
  misc_feature (261)..(261): n is a, c, g, or t
  misc_feature (272)..(272): n is a, c, g, or t
  misc_feature (274)..(274): n is a, c, g, or t
taggtacaagagataanggtaatngtgacatggattggctctaactacagcttcagtggntggggggaggaaaagtcccaacccaatggggctcaaacttctagggggtatncttctcatccctttatctttctccctcgacatttcctccctctttcttccaaggaccccaaagccaggggcaacagattcagtaaagaagggtggtcagagataaaaccccggaagtatttttaantcntacctcaaaattnaccagtnacctgagagantnaccataatctagtccatggattcatggtatgtggtctgggataattggcacacctgggaatccggcttctaagggaattcaattgatgggaggaattttccaaacaccattttattggtgtgatatagccaatataattatctct

SEQ ID NO: 692008 - DNA, 127 bp, Homo sapiens
acggtctggtcgcttttttcgccgcattaaagtacgtttttgcgaaaccgatatgttcggacatttaaacaatacagttccatttgtttactttgaagaagttcggactgagtttttgaaagcactt

SEQ ID NO: 692009 - DNA, 298 bp, Homo sapiens
tatgatacgggtttcttgggtctgatgtacagtgtgagtaaatgcttgcagctcttagctctgttgtgatcgatgaagcacttttgtattagtatgttcctttgttaaaggaggaaccgtaactgtccatagctgtacatataacccttttctcctaagagaggagtcagtcaggtggctcctgtatttttcattttggtcagaagcgaggaagtagatgctttagaattgttagatgtatagatgaagcaaatagaggtgagtgttccacagtggtagcgatgtgctaacaagaaaa

SEQ ID NO: 692010 - DNA, 258 bp, Homo sapiens
tcactctaaggatctccccgggagccttaaccctataaataaaaaataaaagttatctggacatggtggtgtgtgcctgtactcccagctacccaagaggctgcagtggaggatcccttgggcccgggaggtagaggccacagtgagctatgatcacatcactgcactccagcctgggtgacagagtaagaccctgtctctaaaacagaaacccagaacttactggtgaaatggacggcgttaaggggctccccgggg

SEQ ID NO: 692011 - DNA, 266 bp, Homo sapiens
aaacaaaatccgggggggggttttttaaaggggggtttttcccccccttttcccctttccaatgggggggtccccgggtttaggaaacggggccccccccccccaaataaagggggttttttgttcccccaaaaggggaaaatttttttttcccccctttttgggggggggggggggcaattaaaaatttttttttttttctttttttggggggccccccgggggttttttttaaaggcccccccccccccggggggtttttggga

SEQ ID NO: 692012 - DNA, 760 bp, Homo sapiens
  misc_feature (667)..(667): n is a, c, g, or t
  misc_feature (731)..(731): n is a, c, g, or t
  misc_feature (746)..(746): n is a, c, g, or t
agaacaaagctggatggagaatgactttgacgagctgagagaagaaggcttcagacgatcaaattactctgagctacgggaggacattcaaaccaaaggcaaagaagttgaaaactttgaaaaaaatttagaagaacgtataactagaataaccaatacagagaagtgcttaaaggagctgatggagctgaaaaccaaggctcgagaactacgtgaagaaagcagaagcctcaggagccgatgcgatcaactggaagaaagggtgtcagcaatggaagacgaaatgaatgaagtgaagcgagaagggaagtttagagaaaaaagaataaaaagaaatgagcaaagcctccaagaaatatgggactatgtgaaaagaccaaatctacgtctgattggtgtacctgaaagtgatggggagaatggaaccaagttggaaaacactctgcaggatattatccaggagaacttccccaatctagcaaggcaggccaacgttcagattcaggaaatacagagaatgccacaaagatactcctcgagaagagcaactccaagacacataattgtcagattcaccaaagttgaaatgaaggaaaaaatgttaagggcagccagagagaaaggtcgggttaccctcaaagggaagcccatcagactaacagcgggntctctcgggcagaaaacctacaaggcaagaaggagaattggggggccaaatattcaacaatccntaaagaaaaaggaantttcaacccaagaa

SEQ ID NO: 692013 - DNA, 679 bp, Homo sapiens
gtgggctatcactaaagattcaaaaagaaaagagtgatagagtcaacttgaaattttagacatatccctctggctataatatattgaagagggccaaatctggaggcagaagggttaggtgccattcgtacaatgcagacataagatgaaaaagacttaaactagaataatggcagcagaactcaagatagaggaataaattgaggacacagttatgagagatgaacaacagaaattgaagtaagatttagagagaggggggatgcaataaaattatgtcttggatcacctatgcagggaagacagaattgagaatcaatctgcatggggaaaaaaatgtgtttgcttttaaattgagttttggatgccttcagagttttatattacaggagaccaataggcaggtgttattggcagattttaagcttgtgaaagaaatctggcctacagctatagatgtggaattgtttggcatatagacagcggtagcaacccttgacaggggatgagattgtctccaagggagaatgcttaccgtaagagcagaaaatcacccaggaagacacctaagtaaaaccatcacgtaagcaacaagaagatattgagaacaaccaaaaggaaactgagaaggagaagatagagaaattggagaaaaccagaaagtacttgtcttcaaacc

SEQ ID NO: 692014 - DNA, 475 bp, Homo sapiens
ctcattctgttgatccatcatcagttgatgggcatctgggtggtttgcactttttggctgttgtcaggaatgctgctgtgaacgttgaggtgcaggtttttgtgtatgtattaattgcaggatcagggcaatggagtttttcacacatgaaatttgaggaaaggagggatgctcctgatttcattttcatagaaattgaaaatcacattgcagtaacgacagactaattgttgtaattatttttggatgtggattttgtataaatccccacatagatctggccacccccttcaggcctgatgtttgtttgattgaaactgtgttagctaaggcaaaaaaacttggtaattctggggagtccagggtcataaaaacaaaaaaatctaaatgaacttatgagacgatatcaaatttggagcttacttagtaataatctgactctataaggaaaaatacaaattttctttaggtctga

SEQ ID NO: 692015 - DNA, 231 bp, Homo sapiens
  misc_feature (45)..(45): n is a, c, g, or t
aaaaaaaaaaaaaaggggcccccccttttttggggttttttcccngttcccatttgcaaagagacccccccccccacccccaaattttttctttttttaaaaatttttaaagggagggggaaaaaggggcctttttttttttttttttaaaaaaaaccccccccgttttttttttttttttttatggttttttttaaaccgggggggttctttttttttttttgggcccca

SEQ ID NO: 692016 - DNA, 1097 bp, Homo sapiens
cggcccgccgctgttggagtgccggccgggtgatgggtgtgccaagaagttgtggggggggggaaattactttgtgcgtggagaaagggtgttgtctcggaaatagtgttgcgccgccgtcggtgttcgattcccccttcccccccgtgaaattcgttgggggaatgaccttttagtgtccttagtgttgggagccgttatgtgaacacgacaccgacggttggtggggaacagacgcgtgttgccgtccactaggtgtaaagaggtcgttatacaaacagatactatcaagtgaaaacattttataggaaaacaccccactggtgtaaaatgaagaggccccccacgttgccacgccccttggaaaaaacctttataaggtggccccgcccttaattagtaactcccattttttataggagacgcttttaatttggtcgcctactgtggaccgccactcggtgaaattgccagagatgtccccccctttgggcctcgtggtgagaggtggcgaagaatatattaagagctcgtgtgatttctcttgtgtgggcgccgctctataggagaatatgtctgcgccacctctgttgccatatgataatataccttctaccctcttcactctaaatgtaactcttctctggcacaaaatgtgtttctcgcctctaggcacctccacacttgcactcttctctttgcctctttttctcttcctcgtgtcactctattcgctcttataatttctcgagaggagccactatggagggcttagaaataatatttatctcttcttataaaaattcaccacaaaaatttggtaataggccacaacccactttctcttaaagattgtatggcccacaattttataaatgtttatttttccatatccaatttataatctcttgtccaccatcccaccttataagaagtttggttatatttccaagtgaaaattttctttcccagaagtaggtgtttttttccgtgggttggggggtaacactttactaccaaattagtaaagtatggtgcagaatttcaagccaatgaggagtgcccgccgtgtgataatttaaacatattttaaccca

SEQ ID NO: 692017 - DNA, 141 bp, Homo sapiens
aagtggcaggatcactggtatgaagtggactgctgcgggctgtcaggagcagatctgaagctgcactcaggtagagcctcagggaaagcgctcagaccagctccagccagcgcccaaagccccccggggctccagcagcca

SEQ ID NO: 692018 - DNA, 253 bp, Homo sapiens
accaagccgacccgccattctcctgcctcagcctccctagtggctgggacacaggcgcccaccaccacgcctggctaattttttgtatctttagtagagagggcgtttcaccatgttagccagcatggtttggatttcttgacctcgtgatccgcccgcgtcgggctcccaaagtgctgggattacaggcgtgagccaccatgcccggcctgatctaaggatttgatggcaaacatggcacgcgacatcgcca

SEQ ID NO: 692019 - DNA, 478 bp, Homo sapiens
  misc_feature (225)..(225): n is a, c, g, or t
  misc_feature (271)..(271): n is a, c, g, or t
  misc_feature (408)..(408): n is a, c, g, or t
catgagatttcgttttaaaagcctatcgggttattttagaagaaaagtcttagccaaattaatatcttttctattatgctttactttattgtggaaaacatatagttaaaataagggattccatttgttctaactgcttgtgagaacagtaacagttcttaagatatttgtagctaccaaatgaggttattgagctcagaaatatactacctttgagcaggcaanttctctgaaattaatggaaccatgaagttccaggattcttttcaanctttaatttatccttttaccattctccaacactcttatctcccaaggagacaagtagccccattaaattattgataaacaaacttaggagattcatgttacagtttttcatggatcgctactatgaaccactcaaanttcagctcactcagtaagtatcatcgaatatagtctaaatacgatatttacgtcgtgtataggatgttcg

SEQ ID NO: 692020 - DNA, 1198 bp, Homo sapiens
gactaactacctgacatccataccccatcacaatcatggcaagccaacgccacttatccagtgaaccacatatcacgaaaaaaactactacctctctatactaatctccctacaaatctccttaattataacatacacagccacagaactcatcatatttatatcttacatacgaaaccacacatatatccccaacattgagctatcatcacccgactgacagcaacacagaacagaacgcctgaacagcaggacacatacttcctatactacaccctagtaggctcccttcccctactcatcgacactaatttacactacacaaacaccctaggctcactaaccattctactacatcactctcactgcccaagaactatcaacctcctgagccaacaactataatatgactagcattacacaatagcttactatagtaaagatacctctttacggactccaccttatgactccctaaagcccatgtcgcatcccccatcgctgagtcaatagtacttgcctgaagtcctcttaacactaggcggctaaggactaataagcactcaaactcatactcaaacccctgactataccacatagacaaccacttccttgtacatagacctatgaggcatcatataacaagaaccatctgactacgacgaacgcgaacatacacaccgcatcatcgcatcccaacaaacagccgataagccatcgagacaccagccataacacataccaaccccggaagcacaacagggcacacaacgaaacacacgcaggaaactcccatacatattgcggaaaccaaaaaaacgacaccagaggagaaatccagatcgaggctcaaggatgcccaaatagtatggagagaacaacagaacctgaaacagctgatcgactaaccgttggaaccctgtgaaccgatagataaataacaaagaggaaataactcgactcatacattcaagggcaagtaacatccaaagagcacttagccggcaccgctccgtcctgagcaagacaccgcgccaagtgacagcaaatcaatcatagagaaactgtcaagagaaagagctaagaagcagagatctacaacataaacgagatcaaatgaaaaagagctggagcagatacggtgaagcgaagacaaatgtcgagataacgagacacagtagtaaggtgatgaaacgat

SEQ ID NO: 692021 - DNA, 245 bp, Homo sapiens
  misc_feature (222)..(222): n is a, c, g, or t
gggaggattgcaacctcgtgccattcccccacggggtttccatacgctgactgtctcgtgtctgggccacccaagcagctgggattacaggcatgtgccatcacgcccggctaatttttttgtatttcctgttttacgataaacgaagaaaaccacttggcggcgctttgtggccaagtgatttgtggccaagcgggctggctcattcgaaactcactggcnctcaagagtgtagttcaccaatt

SEQ ID NO: 692022 - DNA, 449 bp, Homo sapiens
tgagggagcgatacaccaagatcgtcgagattcccttcaactccaccaacaagtaccagctgtccatccacaagaaccccaacacggctgagccccggcacctgctggtgatgaaaggtgctccagaaaggatcctggaccgctgcagctccatcctcatccacggcaaggagcagcccctagacgaggagctgaaggacgcctttcagaacgcctacctggagctgggtggcctcggggaacgcgtgctgggtttctgccaccttttcctgccggacgagcagttccccgaaggcttccagtttgacaccgacgatgtgaatttccctctcgataatctctgcttcgttgggctcatctccatgattgacccaccgcgagcggccgtcccggatgccgtgggcaaatgtcgaagcgctggcattaaggtcatcatggtcaccggcgat

SEQ ID NO: 692023 - DNA, 311 bp, Homo sapiens
  misc_feature (219)..(219): n is a, c, g, or t
  misc_feature (255)..(255): n is a, c, g, or t
acgacgcgtcgacacgacacgctcgtcaccacctgatcatccggctaacgaagcggtgtccacggcgacggtcgtggacaccgcttcaccctgcccacttgacaatcgggcctacatatcagggcgaggacctgcccaccccgtccccgcgtgtcgagcagcggcccgagcgtccggccggtgttgcccagggcgaggtcggccggggctcggaagtanaggtgccggccgccggacggtgtggcgacggtccangtatcgggaatgccgccccgggcggcggggagcgcggctatgacctcggccccgtc

SEQ ID NO: 692024 - DNA, 335 bp, Homo sapiens
gaagtgcaaaacttcccaaagctttgactaagctaatgtgcactataaatcttaaagaaggcagcaaagtctatggaagcatccggatttatttaaccatacaatcatttcctctgggagcatttcataggacgtggagtagaaactctaatattatatcatgtatccaataatataatgtataactctccaaattatgctctagtgtagattataagtttggtcatattctacttctctaaaaatagttcaggtacaaagtctacgataattctctatttaccacaacaacggaccaaagtacccaccattcccaagaaacactagattaaaaa

SEQ ID NO: 692025 - DNA, 255 bp, Homo sapiens
cgaaggaatcgttagattgtggataagtttgcatagtgcaggtagaagtttagcctggaaaggtaggaggattcgttctagagtagcaagaggaaggctcacgcttggtacgagtgcaaggaggtaatttgaggaaaaggctcgttctgcaggcaatgcagggaattatggcctggcggtagaagagggtttctggttaatattgatgacgttagaccttaggtacgggaatacgcaacttagtggacatgggaa

SEQ ID NO: 692026 - DNA, 179 bp, Homo sapiens
ggtggcctttctcagtttttgaatagaacatctatttcaaattcatttttaagtatattttgtgaatataggattacaggttgacacttttttctttgaggaccttcagaatgcactcattatctctactccatcattctgttgacaagtgatttcagtgctattgttctctttgagag

SEQ ID NO: 692027 - DNA, 1466 bp, Homo sapiens
  misc_feature (243)..(243): n is a, c, g, or t
  misc_feature (482)..(482): n is a, c, g, or t
ggctccctgaaagacgctccctgcatggacttactcgccgaggacatgtcactgctgctgatgctaggggacccttgggacacccaagtccctggcttctgaagatttagtggagaaggtgttctccccaattgagtagtatatcacgttcctggtgacagaggcacgccatgtcgtcagcgtgtggatctgatctagcccgtcgtgtgactgagtggatccctgtcggtccacagggaagtnttcactcattgtacgcggcggagtccactggatctctggctcgatggctgcgtggatcgttcatgccttttgcagcgtacgctgtgtgagcttacgaaatgtgcagtacagagtgacccgttgctgcgatgaactgcaccgaacaggccattggcacgactggccaggagctattactgcttttcgtccacaggtctggtggactcacacaaacctatcccactgaaacctcccacggnctgcccttcgggatccctggagttgtcttagccaaacacatcacgtgtgttccggtgcctgacctgcgggagtgacagacgtacatgcggacagagagatcacacacaccttagatgcttgtcagttgacactgcaaccagtcgttgtttcggccgccctctccgacatctgagtcctttcacttcgttcaaacgggaccttggtgcaccctagttgacgcgaaccatgcggtacttgtggatagaccatggcgtccgaaatgtgcatgtttcaattcaaccgtccgtggtcaactgcttgaagactgccacacttgtaacgaacaagacctaccaggagcattgcctggggcagggccggtaggagtatgatcctttgagggccctaagggccttgccacgcaagaggctttctacttgggctcataccttgcggcggaacgtttgtacccagtcgttgggccccggcacgcgagttgctgcaaggtaagaacgtgcttgccaggaatcacattcctggaaaggaaagcccgtattacccaattcctgtccatgtgcctgagtgtgcggagggggccccggtcagtgacaccacagggaaggggatcatcatgctgaaagccgggcggcctcacaggctattcccgcaatttcaacttgctgggcaagcacgctgtggaggagccccctttggctgtcggcactcgcggggtggaccgcccccttcgggcagggcagtgatacggccctgcagaggccccttttcagcccacctgtagtcggctcgcgttgtttgtccgggacggggcccctgagcggggttccttccccaagggttgtgtcccacggttagggagacttggcgtgcgccttttggtgccggagttaccccctgtcttctcgcgggtggaccgggggctttactgccgcgcgctaggtagtgggatccccgcgacgcaggtctgtgagtgctggcagctttga

SEQ ID NO: 692028 - DNA, 782 bp, Homo sapiens
gcctgaaaactttgcgatgggattttccctgcaactagatgaatcagctgcatgtttcacggacttgctgtgctgcttgtgtatgttcgtatataggtttaataagtctattgcggaacgacctactcctgtgtgaatctttgcgaagtactgctaccggtgaagaaatattcaactgtatcaacagttttatgcagaaacatgacacattgaatgggcaacacacatgtgttgcatgttcggtagtgcatgcttctagggcagtggcatgggcacaattgccgaagctgtcaccttactacaaatatgtggctcccgacagcaccagtagtcactgcctattatacagacatgcactggccagttaacataatgcctacatctctaacacaatgtgctagaccaggcagtacaaatcatcaaattatatcaaagctcgagcacatcaatccagactactcacacacattaactgtgaggacacctgggtgctccagtatcacagcaccttcttctacatacagacagtgaagtggcttactcgaggttaaaggtcctgggtcagactattggaactatcacgtgaactttgggattcccatggattctggtacccgactatctgactagtaaccaaattcatcttgggcctgctaacgacttgccgtatctggcggaatatttgtactaccattactgcagtacattggtccaatgccaggacacctgttgaccgttgtccggcattcgactacagtgtggcacatggtaacacactggac

SEQ ID NO: 692029 - DNA, 112 bp, Homo sapiens
actctctctctgtggggcggaaggcagcccctcaaagctggtgtttggcacagggacattgccagtgccatacaggggctgctatctggggctgttattttggagtcagtgc

SEQ ID NO: 692030 - DNA, 895 bp, Homo sapiens
taaaacagtaacacgcttaattcacttaattttcctggtataaaaaccctatgtggtagccacagttggagcctgagtccgttgcagggaaactcgggggtgggtctggacgagggggtcagtgaactccgtgatagggagactgggtgaatacggtctccttccagaggtcgggggtcaggtagcggtaggtctatagaaagggcatcaaagggggcctgggcgaagtcgcccaggtgggcagtgcagccccgggctgaggtgtagcagtcatcgataccagccatcatgagcagcttcttaggcacaggtgcggagacgatgccagtgccccggggtgcaggatgaggcgtaccagcacagagccgaggggcctggtcacctggcagggacagtggtgggggctggcgatctggtcccccagtagcctctggcgcacggtggacgatggagagctggtgcaggatgtgggccccacggatgggggtggccacctcctggggcatttaacacccagaccgaggggccctgtgtagtccccgatagcaaaaatggccttgatacctggtgcgctggccgggcaggggtctggtgtcgggactggataatcttcaaaacctcatccttgagaagaggcccccaggaagaatcgaggggatctctggatcccttaatgggccggagaaagaagatagatctcctcaaggaactttgaactcatgtccttgaccaagcgcgccattggtggcgggcttcaactcttaatcctcgggcttggccgggaagtcgggccgggccgggcctgcaaggcgggaaccgggtccgaaggcactgcgaactccggggacacggggtccccaccagggccaaggccgggcccggggcgggtccgatg

SEQ ID NO: 692031 - DNA, 216 bp, Homo sapiens
tgagcagctggagagtcaggtttggtttggggagggcacgcctcaggacaggaagcggtgtatagtatcagcgcacaagagctggactcgggtgagggcttggattcagctacccttccctacaagccgccccaggatcgtttcccctctgctgtgtctgtcctccttggagaggggaggcctgtggataggctggcaaggtcaaggcaggctcag

SEQ ID NO: 692032 - DNA, 127 bp, Homo sapiens
caaagggtactatcttaacagactagtgtctgctctacttcagagtagacttatgaataagctgatgaccaacttgagtagcactcacccccactttgtgacggtccatactgacccatctatgggg

SEQ ID NO: 692033 - DNA, 430 bp, Homo sapiens
  misc_feature (16)..(16): n is a, c, g, or t
tcagctcggtaccagntgctactccacaaacagctaattttgtatcttagagagacaggattcgccatgttgcccaggatggtttcaatctcttgacctcgtgatctgcccacctggcctcccaaagtgctgggattacaagtgtgagccactgcgcctgacccctagttccttaagttctaaagtcaggttattgttctgagatcttctttttgaacgtaggcatttatagctataagtttccctctaagcactgctcttactgcaccctgcaagttttgctatgttgtattttcgtttgcatttatctcaaagtatttcctaatttcccttttgatgtcttagactcattaattgttaagaatatgttgtttaatttttacgtatctgtgaattttccagcttttcttctgtttgtggaggtagcact

SEQ ID NO: 692034 - DNA, 296 bp, Homo sapiens
gtggtgcacagctggtgggagagtgatgcacagggtgaagggacgagactgagttccagtactgcggcaacggcgacagttgggaggacattccataagatatcttgttgatcaaaccatcgtgcacactttctttgcccatcagcaggactagcgtcttgtcagccttggtgacagtaacattgaagtgtagggtgcccaccgatgctcttgggacgaaggatccatgctaaataccccatcgctgcagcactgagtcccggatcaccgaagcatttctggcccccaagtgtaag

SEQ ID NO: 692035 - DNA, 247 bp, Homo sapiens
ggaatttgaggctgtggtaagctgattgcaccattgcactccagcctggcagataagggaagactctacctcaaaagaaagaaagaaaaaaaaaaaaaaaaaagtagccgggcttggtagcaattgcctgtttacctatagctactgggagaggctgagggcaacgggagggatccctttagcccaggagttccaaggggtgtggtgaacatattgagtgggtgccagggaatctccagatgggggc

SEQ ID NO: 692036 - DNA, 103 bp, Homo sapiens
cttgacctctcatgggaggtagtgcttttcttatacgtaacatggtgaaggtgggagtggtagtgagttttaaggtgtgggtggatacgagcgtggtataagt

SEQ ID NO: 692037 - DNA, 195 bp, Homo sapiens
gaaatctttttaactaccttgctatttatctgctaacagtttgaagttttaggagtgggtacatatagacatatatacctagccagaggacagtgtttctgccagtctatctatttgatttggactaccagcagagttgccacctgaggtgtatactacttggggattcgtgcacgttaacgattactaggacta

SEQ ID NO: 692038 - DNA, 283 bp, Homo sapiens
actgatgaggtgagctggaggaacaatagtcaggatgccctggacattgatgatgctctgttttgtgctcacaaaacagccatgtaacacatgagcggggagttgaagccatccagtcgcaagtcgagcagacagcagttgatggaattcttagtagaaattcagtaagggtgcccaaattttattttttttttcaccgtatactctaccaatatatggtatttaggaaaacttctttgatcgggggcacaaagaaaagcacacacatttttataatcatctg

SEQ ID NO: 692039 - DNA, 395 bp, Homo sapiens
cagaaaccgccactgctacacatcttatggaatgactcacgagttctccttcactgattaatccttttcctcatcccttcctccccctcccatctgccctaagaacaaagagcttgtaaaccagtaaatttggcagagctcaagagctctgggccgtgagcaagcctccgatattctggtcccctgaacccgccttttaaatgcttattctgtctctttctaactcctatgtctccaccagactcagggtacccactgggtggttgtggggctggtttccctaacattccccaccaaataaagcagctccaaccttctaggatggttgcttcagctcaggaagtcttaggaggaaattcttgatgcctttcctcacatttggttttgttcgggca

SEQ ID NO: 692040 - DNA, 900 bp, Homo sapiens
  misc_feature (444)..(444): n is a, c, g, or t
gcaaagcctgagttctgtgctaactctctccccggacagtatgagcttcagcattcgctcgcaccttctccaccaagctaccggatccctgaggtctctgtctcacatgccgacccagactaccggtattccctgcccgcggcagtcgagtcgcgtggccagtcggtctaatgcaaggccgcgtgggtggctctggttcctcgggatctcccgtgtgcccagttcctcgcagcttcacacggacgcggttcatgcgggtcactgggtgcctggagcatcgctggtgattacgcccggggtggtctcggcgattgcaattgggcatcgctagtcctgcaacgcacgcaagtgagaccgtgcaggcgccctggagcggagcggatctgtgccgttcttacgctgtgcacagagtgagaggatgggcctggacgatgcgtagagaanccgcgcagggttgtgacgtacgcaaatatgccgggatgcagctctgggaggaacaggaaggggatgcccacgtgttcaaggacgtacctgggtagccctgtgaactgtcatagagatcaatgcagaaggatcgcttgagagggccttcgggaatcctttcaacagaattactggtgagaccgatgacccgcatcgttgctgcacgcaattggacggatgcccgatgcttgcgatgctcggatgcacgttgtggaaagtcaacgttatgaagaacagcagctgtgcgatgtcagccagtcttgtggcagagacagacatccgatgggctcttgcaaggttttattggatgaccaccaataattccaataatggggagtggtgaccagaatcgaggttctccagggggaagtgcattatgaaaaagaaccccaagagggagtcaaggctaaaccgagt

SEQ ID NO: 692041 - DNA, 372 bp, Homo sapiens
gagtatgagtgcctgcttagttcaactaaaaaagctcctataaatgctcctgatgaagaaaactggaatgcctttgatctttgatcaggagatgatacagctgtgacaaatgggaattgacttctctgtctgtccatcatctctgggcaaacatgagaaaatcactttgtttcaggtggttatggcagttgcgacagtgaaccatgagaagggagacttgtttaaagaaactgggggagtgggtactctctatatacttccctaactaaagatgaagaaaattttttcatcaccttgatgaggctgattttactgcgtggctggcacattaagcttgagggccagctgcctgttctttcaaatatcttattg

SEQ ID NO: 692042 - DNA, 320 bp, Homo sapiens
ttcacacttggccacggttatcatgtccatccgcagcaatgctgcagagacaaggagcatgtgattgaggccctgcgtctagtgcccaggtacaagtttcctggtcgccagaagatccacatctcacagaagtggggcttcaccaagttcaatgctgatgaatttgaagacatggtggctgaaaaggcggtcatcccaaatggctgtggggtcaagtacatcccccgtcgtggccctctggacaagttgcgggacctgcactcataaggggttccaatgtgctgacccccctcttaatactcaccaataaattctacttc

SEQ ID NO: 692043 - DNA, 1049 bp, Homo sapiens
gtactgtgggccgcacatgtgatgccacgcagtcatttcgagacgacgtgtgatgacattagaaacatctataacaggatgcatagggatcagagttcgactttgaggaaatgaagggcagaaagactgatactactgatgagggaaaaataccactcttccctgtgatttctgtaatgcggacccctgtcagatttgggcagcgatacgcagtattatatgacatctcaatcatagtgtcatggcctggtttaaggtcatgtgcaaagtagtagtagaatgcaaagaggacctgggccagggaattgctccccattgacctggtgtctaaataatgttaccttggtttgcactgggagtgtgctattcagtccgtgtggcagcttacctacagttacatgtgtcataattttgtataacctgaaggaatggccttgagacccaaactccaagttgggctgttgagatattcgctcttggagtattacccgaagcaacaagatggactggcaaggatagaccatctcagagagacatcctgaaaatcccggggatagatcgagccgagagtctgattaactgcaaagagaaacgtggtgcaccatttgcagtgattgaatcatgtctcacctgataccatctggagagtaccaggtggataactatacatggtcttcttccacggatggggggtacatcaatccgtgaaagttttgcccgctagtacttggatagtgcgggactacctgcaacctgtgcatggaggagggccccaaggagaccgagggccgagttgggacaagcggaggatcaaatgctagcgccaaccccaaacatgagacggtattagggagaagccgggtagcggagttggacctacatcagttactaatagaaacggggcgaacacgacgatgagcggtacagaacaggacgcagagctcgaagcagaaatcagggggcacgcagaaccatatgacgtaggacaccaactcacccacgagccgaagcggcgaagaaaacatgggcgacgagaaacacaggctgag

SEQ ID NO: 692044 - DNA, 878 bp, Homo sapiens
  misc_feature (23)..(23): n is a, c, g, or t
  misc_feature (131)..(131): n is a, c, g, or t
  misc_feature (207)..(207): n is a, c, g, or t
  misc_feature (209)..(209): n is a, c, g, or t
  misc_feature (267)..(267): n is a, c, g, or t
  misc_feature (274)..(274): n is a, c, g, or t
  misc_feature (283)..(283): n is a, c, g, or t
  misc_feature (295)..(295): n is a, c, g, or t
  misc_feature (297)..(297): n is a, c, g, or t
  misc_feature (342)..(343): n is a, c, g, or t
  misc_feature (360)..(360): n is a, c, g, or t
  misc_feature (375)..(375): n is a, c, g, or t
  misc_feature (464)..(464): n is a, c, g, or t
  misc_feature (473)..(473): n is a, c, g, or t
  misc_feature (498)..(498): n is a, c, g, or t
  misc_feature (530)..(530): n is a, c, g, or t
  misc_feature (618)..(618): n is a, c, g, or t
  misc_feature (647)..(647): n is a, c, g, or t
  misc_feature (650)..(650): n is a, c, g, or t
  misc_feature (665)..(665): n is a, c, g, or t
  misc_feature (700)..(702): n is a, c, g, or t
  misc_feature (719)..(719): n is a, c, g, or t
  misc_feature (734)..(734): n is a, c, g, or t
  misc_feature (736)..(736): n is a, c, g, or t
  misc_feature (738)..(738): n is a, c, g, or t
  misc_feature (745)..(745): n is a, c, g, or t
  misc_feature (751)..(751): n is a, c, g, or t
  misc_feature (769)..(769): n is a, c, g, or t
  misc_feature (771)..(771): n is a, c, g, or t
  misc_feature (786)..(786): n is a, c, g, or t
  misc_feature (790)..(790): n is a, c, g, or t
  misc_feature (800)..(800): n is a, c, g, or t
  misc_feature (838)..(838): n is a, c, g, or t
tagttacaaatatggtatttaanaattttctactttatttcagtacaattttcaacgatacagtcgtactatttctcgaagatatttgaagacttgaaaacgataatagtgttctgatatgactactctgnaaatcagtaagagatttaagtaaaatgcttacattctctatttgaaaacaaaaatcaggtaaaaaaaatggtgggngnaagtactgctctgttgtaatcttactctcatatttattattcgcttttcttcgcttgngtctgtncttcttttnttcattattttncntggtctcttcttcatcttcaacaatcccatccccttggtatttgnnatgagttcatttaggtntgctacctgattttntgaagttaaagcgccctctgcgcacgttgaaaagtaccacgacctcttcctcttttggcccaataatccacaccatcatctctgttgtnatgataggntcctcgtggtcggctaactcctgcnaagcctgagtattctttcatttcatggtgagntttaaattcttcttctctttccttcttactctccttttcttctcgagaactgggagaagaaggtgatgctgaagaggatgaagatcgngaatgatcttgctctcttttatgtctacngtnatctttgtaagattngtattccttgtaatcttttggagtattttcctgcnnncttgatccactggattncctggagcccttggnancnccccganctttanttttttcttttctacggngnttaatgttatgccgnagtnagcagagtanacttaatttttatctccttttgatttcttctttaaaantctctcttccctgctaaacgggtatgcttctcagggtatt

SEQ ID NO: 692045 - DNA, 529 bp, Homo sapiens
  misc_feature (40)..(40): n is a, c, g, or t
gagacagagtttcattctgtcaccgaggctgtagtgcggnggcctcatcctactgagcagctgtggcagtagaatcagccgaacccactaggcattgttgaagattgaccaaatcacactaccgaacaaacagaggtgaaacagttcaattctcataccgcacggggttaaggatcaaaacacccccaaagacaacgaaagtattcttagctggccacgtcccttccccccctaaacccaaaccacgaagagctctatgtactcaaaccacccggaagggagaaagccactgtccaggccgaaaccggttaaccccaactctccttaatacacaagcacgttgcccgcccgtgctctcggggccctcttaagccaacatctaaagacggggatgcacgatactgcacgtcaccacggttggcgccccctgtaaaaaccctcaacccgactcaaagtcgccgatcaattcaccacagaactaacactctccctcaaatgagacccccaccccccctcacaaggaagctcg

SEQ ID NO: 692046 - DNA, 201 bp, Homo sapiens
catgcccctcagctttggtgtgaccccatatggttatgaatcccggtttgagatccactttgatgacaaatttgatgtgtcttttgggagagagggagagacaatgagtctaggctgtcgtgttgtcatcactcctgaaattaaacatttccagccagagatccagtggtacagaaacggagtacctctttctccatcaaa

SEQ ID NO: 692047 - DNA, 93 bp, Homo sapiens
acggccgtgtattactgtgcgattggtaattactatgatagtagtggttacggaattgactactggggccagggaaccctggtcaccgtctcc

SEQ ID NO: 692048 - DNA, 298 bp, Homo sapiens
  misc_feature (130)..(130): n is a, c, g, or t
  misc_feature (138)..(138): n is a, c, g, or t
  misc_feature (177)..(177): n is a, c, g, or t
  misc_feature (186)..(186): n is a, c, g, or t
  misc_feature (196)..(196): n is a, c, g, or t
  misc_feature (242)..(242): n is a, c, g, or t
  misc_feature (248)..(248): n is a, c, g, or t
  misc_feature (295)..(295): n is a, c, g, or t
agcagatgcaccttaacttcatggatgaaaaggatcggatcatcacagccttctacaacgaagcccgggcacgtagcggacaaacagaggcatccttcagcaggagcgacaacggctagggcagcggcancgccaccnatccgagccaacccaaggccccgagatcgtgccccgggncgccggccntgaagggtcnacctggatggggcctgcagtgcgttcccgctttgcttccttccctngacggnccggttccccgaaacgcgcggcaataaaagtgatttcggcagaaaanaaa

SEQ ID NO: 692049 - DNA, 976 bp, Homo sapiens
ttccgaagaaatgtcgccagtgccaaggccccccccttggaaggaggaggaaccccttggttcaaaatgccccaattcaacgatgtgaattgcaccacaaaatggaaaattttaagaaggggaagttgtgtttccaattgggaataaactgaaaccttcctgttgatgtagaaattccttttcctctgaaaagtttttctgcccccggctcacgttgcgaaataatttgcctgcgtttttgtaagtaaaaaaaccacacccacgctgttttcctttgggtaataaagactctgttggaagtttaccaatcgtgtcttttgctttttaaatttaatggtggaaatatccaccttagttataagtataacctctatatgttaataaacgcgcacacaagagatcttggttaaaatttttttgggaaaattacactagctcttgtcacaaagcactcccttaaacttgctaaaagaatgctatagtgtatagtatcgacccccttctcggaatttgggagaaggcccacatttaaatctttcttacaccggtgaattatatttaagaatattttaatagactctgatggaacttcccggcttatacaccccacgttcttgatggtatattgaaccacgagctgaaaaatattttaccacttacacacgggctaaaaggaggttcttcgtgtgttaaataactaccctcccttgtaacatcacctatatccccaaatcagttatttccaattgttaggagattttaccttttaaaatctcaaaaatggatattctcaatgttttctgtaattaaatgtattttcaatgagataggctgtttcttttttttgttgttaattgttgttgttgttatatccatacttttatctctaatgaaatgtagttgggttcttcctgtaatgcgctattatgtcttgggcttaataaaaatatttgtgaaattaaaaaaggaaaaaaaa

SEQ ID NO: 692050 - DNA, 894 bp, Homo sapiens
  misc_feature (7)..(7): n is a, c, g, or t
  misc_feature (61)..(61): n is a, c, g, or t
  misc_feature (63)..(63): n is a, c, g, or t
  misc_feature (80)..(80): n is a, c, g, or t
  misc_feature (103)..(103): n is a, c, g, or t
  misc_feature (111)..(112): n is a, c, g, or t
  misc_feature (115)..(115): n is a, c, g, or t
  misc_feature (129)..(129): n is a, c, g, or t
  misc_feature (145)..(145): n is a, c, g, or t
  misc_feature (171)..(171): n is a, c, g, or t
  misc_feature (196)..(196): n is a, c, g, or t
  misc_feature (292)..(292): n is a, c, g, or t
  misc_feature (420)..(420): n is a, c, g, or t
  misc_feature (438)..(438): n is a, c, g, or t
  misc_feature (478)..(478): n is a, c, g, or t
  misc_feature (484)..(484): n is a, c, g, or t
  misc_feature (729)..(729): n is a, c, g, or t
  misc_feature (754)..(754): n is a, c, g, or t
  misc_feature (813)..(813): n is a, c, g, or t
  misc_feature (844)..(844): n is a, c, g, or t
  misc_feature (854)..(854): n is a, c, g, or t
  misc_feature (880)..(881): n is a, c, g, or t
  misc_feature (890)..(890): n is a, c, g, or t
acgaggngctgcagaagtcgcgcatccgcatcaacagcctctctgcccagctcagccagcncnagaagcagctggcagcnaaggaggcgaagcttcgagaccnggagaacnnacnggcccgggagcggnacaccagccggcggcngctggcggaaaaggagcgggagatgncctatttttttttaaggatgcagcngcagctggacgagtaccaggagcttctggacatcaagctggcctggacatggagatccacgcctaccgcaagctcttggagggcgaggagggaggntacgcctgtcccccagccctacctcgcagcgcagccgtggccgtgcttcctctcactcatcccagacacagggtgggggcagcgtcaccaaaaagcgcaaactggagtccactgagagccgcagcagnatctcacagaacgcacgnactagcgggcgcgtggccgtggaggaggtggacgaggagngcaggnttgtccgctgcgcaacaagtccaatgaggaccagtccatgggcaattggcagatcaagcgccagaatggagatgatcccttgctgacttaccggttcccaccaaagttcaccctgaaggctgggcaggtggtgacgatctgggctgcaggagctggggccacccacagcccccctaccgacctggtgtggaaggcacagaacacctggggctgcgggaacagcctgcgtacggctctcatcaacnccactggggaagaagtggccatgcncaagctggtgcgctcagtgactgtggttgaggacgacgaggatgaggatggagatgacntgctccatcaccaccacgtgagtggtagccnccgctgagcngagcctgcactgggccacccagccanncctgggggnacct

SEQ ID NO: 692051 - DNA, 112 bp, Homo sapiens
tccccggtgttgagtagtgcatgaaagtgttgtgaagagcgaagacttttctgctcccagcttatatatgatctggcgtgacctaccccgttgccggaggtggcccatagtc

SEQ ID NO: 692052 - DNA, 543 bp, Homo sapiens
gataggcaaaaggtttttattgtatagagaggagttatctttgttcggagacaaaacccaggcctgggggggttggatttttctgcatcaccaggctctagggacaacaggggcacagtgaatattgagacccaaatggtgcctttttttgatttggatgtgatatttgacacaggcagggcaggaccaatgcttgcttcgaagtgtaggggatgatcactacagttcaggatattaatactttttgaagccgcgggcccatgacttgattatatgtatggggaaattgcatgggacagagcttctaggcccagactttaccatgaagccagtcctggaaagctagtggcgagggacaaacttgaccttttgtgcccaacaatgggcttgtgttggtacatgacaggaatatatcttgagtgctcccggcctaatgtggaggcatgatttactcatcaagacattttcagaccacagggtgatgctgataagtgagcccaacaactgggatgctctctattaacgaatgcatgttccgagctt

SEQ ID NO: 692053 - DNA, 931 bp, Homo sapiens
  misc_feature (7)..(7): n is a, c, g, or t
  misc_feature (61)..(61): n is a, c, g, or t
  misc_feature (63)..(63): n is a, c, g, or t
  misc_feature (80)..(80): n is a, c, g, or t
  misc_feature (103)..(103): n is a, c, g, or t
  misc_feature (111)..(112): n is a, c, g, or t
  misc_feature (115)..(115): n is a, c, g, or t
  misc_feature (129)..(129): n is a, c, g, or t
  misc_feature (145)..(145): n is a, c, g, or t
  misc_feature (171)..(171): n is a, c, g, or t
  misc_feature (196)..(196): n is a, c, g, or t
  misc_feature (292)..(292): n is a, c, g, or t
  misc_feature (766)..(766): n is a, c, g, or t
  misc_feature (791)..(791): n is a, c, g, or t
  misc_feature (850)..(850): n is a, c, g, or t
  misc_feature (881)..(881): n is a, c, g, or t
  misc_feature (891)..(891): n is a, c, g, or t
  misc_feature (917)..(918): n is a, c, g, or t
  misc_feature (927)..(927): n is a, c, g, or t
acgaggngctgcagaagtcgcgcatccgcatcaacagcctctctgcccagctcagccagcncnagaagcagctggcagcnaaggaggcgaagcttcgagaccnggagaacnnacnggcccgggagcggnacaccagccggcggcngctggcggaaaaggagcgggagatgncctatttttttttaaggatgcagcngcagctggacgagtaccaggagcttctggacatcaagctggcctggacatggagatccacgcctaccgcaagctcttggagggcgaggagggaggntacgcctgtcccccagccctacctcgcagcgcagccgtggccgtgcttcctctcactcatcccagacacagggtgggggcagcgtcaccaaaaagcgcaaactggagtccactgagagccgcagcaggcttcctcaccagtcaccgcatcgtcactagcgaggtcgcgatgtgcccgctgagtacgcgaagtgatgagattgtatggcacgcgcgtcaaggatattgctaccgagtctgcgcaacaagtccaatgaggaccagtccatgggcaattggcagatcaagcgccagaatggagatgatcccttgctgacttaccggttcccaccaaagttcaccctgaaggctgggcaggtggtgacgatctgggctgcaggagctggggccacccacagcccccctaccgacctggtgtggaaggcacagaacacctggggctgcgggaacagcctgcgtacggctctcatcaacnccactggggaagaagtggccatgcncaagctggtgcgctcagtgactgtggttgaggacgacgaggatgaggatggagatgacntgctccatcaccaccacgtgagtggtagccnccgctgagcngagcctgcactgggccacccagccanncctgggggnacct

SEQ ID NO: 692054 - DNA, 311 bp, Homo sapiens
  misc_feature (5)..(5): n is a, c, g, or t
ctgantatgctgtctcagcctcgcgagtagtcgtgatacaggcgccgccacatgtccggctaattatttgtatttttagtagagacggggtttcatcattgtggcctggctggtctcgaactcctgacctcgtgatccacccaccttggcctcccaatcttatttgctttacaagtcctgcttcagggttaccttccctgaccactgctgcctccctcccagcatttgccagggactgtcattgccttagtttattttttctgttttgtttttttttggtcgttttggttttttttggagacagcatatca

SEQ ID NO: 692055 - DNA, 207 bp, Homo sapiens
tctgaaaaagaaaaaaaattttaaaaggctgggcgcagggcctcatgcctataatcccagcactttgtttgggaggcaaggtggcaaatcacctgaggtcaggagttcgagaccagcctgaccaacatagtgaaaccctgtctttactaaaaatacaaaagaattaggtggatttggtggcacacttgtaatcccagtttgggaggc

SEQ ID NO: 692056 - DNA, 237 bp, Homo sapiens
ttccatcttaaaaaaaaaaagaattggccagaaaatagtttcaggttctaaattcagtagactaaccagcttcagaggtagttataggtttaggtttttttttttattttgaacctgtctttatttgtgaatacagttgaaattttcataagcatggtttgttattttaatttacatatacatcattcatttctcataaacaatttttttttcttttttgagacggagttttgctgt

SEQ ID NO: 692057 - DNA, 162 bp, Homo sapiens
ctggctgcgcgtgagcccataggatatatgtacactactgtggttgcctagaagactaattcatgaacgaataacagcaggatgagaaaaagagtcacgtgtgacctgctggaacaactacggttacaatcaccaacccctctagggctgagtcttagcaac

SEQ ID NO: 692058 - DNA, 613 bp, Homo sapiens
tggaatcccagcatttttatggagcgccccacatcggggaggggcggcaggggttcccaccggaacccaaagtagggttggtgcacttgctgagctcccagaatgcaaattagtaaaagctaaattcaaaagtaaaaggggctaatctccaaagagtacgataaaaacttatttggtatcaaatctggtgattaaaaaaaaaaaaaaaaaaaaaaaaaaaaaaaaaaaaaaaaaaaaaaaaaaaaaaaaaagagggggcggcgcgcgacactaaaaaaatcatctccccaccggggccgcccaaaaagctaacgcacgcgcagcacccgacgtttttcgtgagaacaaaaagaggggcgcccacaataaaggggagagcgcagtattattaaacgacgagcgagacagcggcgcccgctatatacacaaacagcagcagcaaggcgggaacaacacactgactaaccagacgaggacaccacattggtgggaagaagaacaccctaaacaaatgagggggggggaaacacaaatgtgggcgaaacaacaccctacaaaagagaaaataaaaccctagagaggacaaaaaaaaaacaatgcaaagggactaaaa

SEQ ID NO: 692059 - DNA, 344 bp, Homo sapiens
aacctgtaggctgaaggtcacagagagagacagtcatgagagaaagaaagagagagagagagataagtagtaaaggaaaaaacagtgtaccctattcctttaaaagccaggtaaatttaaaacctataattgataattgaaggtcttctccgtgacactgtaacactccaataccaccttgtccagtgtaaacaagggcatagcccaaaagcactgaggccactgacaactcgtagccttcctatcaaaaatccttaacccagtaacccgcagatggccctaatacattcaatctgtagcgacaactgttttgctaacacaagaaagtatgaggctattctgtt

SEQ ID NO: 692060 - DNA, 241 bp, Homo sapiens
caggcacattactgacaaagacatcctacgtctaccagagcgtgcactagcgatcctaaaataagctaaatctccgggcatgtgccccttggggcggaaggggcaggattgtgcagctgctttcgcattcctctgcctaaatttcattgagttgaattgtttccttcccaataggtgaccttaattactctcaaaatctttccaaaatagatatatttttaaattccttacaaatccttac

SEQ ID NO: 692061 - DNA, 527 bp, Homo sapiens
ggtactaccaggagttagaagaaatgcgtatctacgcagagtctcaaacgatttctactatcctgtcatatgtcccagaagtccttctgcttctcatactctattccgagaccctccagtatgtagtagaacgcaacagaaatccaatctagagctgctccggatgtccctgctgcccatcgaatcgtggctggagcccgtgcgcttcctcaggcagtatattcgccaacaagactgatgtatgacacctcgtgacagcgatgactatcacctcctaaaggaactagaggaagggatccaaacgcttatgaggaggctggaatacagaaggctggtgacttgggcaagatcctcaagcagacctacaggcgaagtttgacacaaactcgcaacaaccattacgcacttgtcaagaactacgggctgctctactgcttcaggaaggacatggaccaggtcgagacattcctgcgcatggtgcagtgccgttctgtgtagggcagcctgtggaattgataaacaccggg

SEQ ID NO: 692062 - DNA, 780 bp, Homo sapiens
  misc_feature (189)..(189): n is a, c, g, or t
  misc_feature (210)..(210): n is a, c, g, or t
  misc_feature (212)..(212): n is a, c, g, or t
  misc_feature (262)..(262): n is a, c, g, or t
  misc_feature (268)..(276): n is a, c, g, or t
  misc_feature (278)..(278): n is a, c, g, or t
  misc_feature (287)..(293): n is a, c, g, or t
  misc_feature (295)..(297): n is a, c, g, or t
  misc_feature (299)..(300): n is a, c, g, or t
  misc_feature (319)..(319): n is a, c, g, or t
  misc_feature (323)..(323): n is a, c, g, or t
  misc_feature (341)..(341): n is a, c, g, or t
  misc_feature (343)..(345): n is a, c, g, or t
  misc_feature (348)..(348): n is a, c, g, or t
  misc_feature (354)..(355): n is a, c, g, or t
  misc_feature (363)..(365): n is a, c, g, or t
  misc_feature (371)..(372): n is a, c, g, or t
  misc_feature (375)..(375): n is a, c, g, or t
  misc_feature (388)..(388): n is a, c, g, or t
  misc_feature (391)..(391): n is a, c, g, or t
  misc_feature (396)..(396): n is a, c, g, or t
  misc_feature (400)..(401): n is a, c, g, or t
  misc_feature (403)..(403): n is a, c, g, or t
  misc_feature (407)..(407): n is a, c, g, or t
  misc_feature (410)..(410): n is a, c, g, or t
  misc_feature (421)..(421): n is a, c, g, or t
  misc_feature (427)..(431): n is a, c, g, or t
  misc_feature (441)..(441): n is a, c, g, or t
  misc_feature (446)..(446): n is a, c, g, or t
  misc_feature (450)..(450): n is a, c, g, or t
  misc_feature (462)..(464): n is a, c, g, or t
  misc_feature (467)..(467): n is a, c, g, or t
  misc_feature (470)..(470): n is a, c, g, or t
  misc_feature (496)..(496): n is a, c, g, or t
  misc_feature (523)..(523): n is a, c, g, or t
  misc_feature (527)..(527): n is a, c, g, or t
  misc_feature (530)..(530): n is a, c, g, or t
  misc_feature (532)..(533): n is a, c, g, or t
  misc_feature (546)..(546): n is a, c, g, or t
  misc_feature (552)..(552): n is a, c, g, or t
  misc_feature (569)..(569): n is a, c, g, or t
  misc_feature (571)..(571): n is a, c, g, or t
  misc_feature (584)..(606): n is a, c, g, or t
  misc_feature (609)..(610): n is a, c, g, or t
  misc_feature (612)..(612): n is a, c, g, or t
  misc_feature (616)..(616): n is a, c, g, or t
  misc_feature (619)..(620): n is a, c, g, or t
  misc_feature (622)..(624): n is a, c, g, or t
  misc_feature (627)..(627): n is a, c, g, or t
  misc_feature (630)..(630): n is a, c, g, or t
  misc_feature (640)..(640): n is a, c, g, or t
  misc_feature (643)..(643): n is a, c, g, or t
  misc_feature (657)..(657): n is a, c, g, or t
  misc_feature (659)..(659): n is a, c, g, or t
  misc_feature (662)..(662): n is a, c, g, or t
  misc_feature (667)..(667): n is a, c, g, or t
  misc_feature (671)..(671): n is a, c, g, or t
  misc_feature (676)..(676): n is a, c, g, or t
  misc_feature (678)..(678): n is a, c, g, or t
  misc_feature (684)..(684): n is a, c, g, or t
  misc_feature (697)..(697): n is a, c, g, or t
  misc_feature (705)..(707): n is a, c, g, or t
  misc_feature (710)..(710): n is a, c, g, or t
  misc_feature (720)..(720): n is a, c, g, or t
  misc_feature (764)..(764): n is a, c, g, or t
agtcaggggtcggaataaattttagtatattttgtgggcaattcccagaaattaatggctatgagttcttttttgatcaactcaaactatgtcgaccccaagttccctccatgcgaggaatattcacagagcgattacctacccagcgaccactcgcccgggtactacgccggcggccagaggcgaganagcagcttccagccggagcgngncttcgggcggcgcgcggcgtgcaccgtgcagcgctacgcggcctgccggnaccctnnnnnnnnncntcctcctcnnnnnnntnnncnnccccctccacccccccttntttnccctctttctccttctcntnnnttntccttnnccctcctnnnttaacnnttncatctctactatnctntcatnatcnncncccnacnacctccctacncccaannnnncactacactncaacncatntcattcctcgtnnnaanagnccgtcgtctacccctggatgcgcaangttcacgtggggggggggggggggggntacnccngnnttttacccaagcnctctcnaaccgcctacacgcgcnanaaaaaaaaaaaannnnnnnnnnnnnnnnnnnnnnnccnntncctnacnntnnnccngangttttttatngcnacgcgttctttctntncgngcgcngatnttatntngttccnaaccggccatgangtggaaannnacncaagttgccnacaccagatcgctcggtggtgcgcagctcagccgaggcccctgncggccaatgaggcccc

SEQ ID NO: 692063 - DNA, 690 bp, Homo sapiens
  misc_feature (185)..(185): n is a, c, g, or t
gcccagccttcaggtgcctctcatgtccggagagtcctgtctgcctgtgtgaagatgcccacagatgcgtacctggtctgttatgacatgcacaacctctctgccatgtgtgctgcgtcatatcggcgcatctaccgtggacagccagtagaggagtgtccactcagtggggcctgctattcccntgagttcaaaggtcacatctgcagggtctccgcagtgacagcgattggctaagatgtgattggtttaaggatccgtcctctgcagtttcgctaaggccccctttgtgtgcatgggtcagtcgccatatgttccccccagagattgtgtctatatcctccttctagcagcgccttccccctgcagctactcttcgggtctggctctctgtaccctaaggcctagtatctttttctcttctatgggacatccgtaggtctacgcttgacttttttgaggtcttctcggcttgactacagttgtgctcatgattgtccttgcctttccggcttaattattttaaggggcgagtgccggctctgggtgggtggagtggctcatacctgtcctccccgctctttgggaggctacagtgggcagatcatctaaggccaggagttcaagacctgcctggccaacatggcaacacaccgtctataataaaaatataaaaattaaaaaaaaaaa

SEQ ID NO: 692064 - DNA, 1152 bp, Homo sapiens
  misc_feature (380)..(380): n is a, c, g, or t
  misc_feature (1152)..(1152): n is a, c, g, or t
gaatggcgagtgatggctgcggtggactcgctgatcagcggaatgggagcgttcatgagccgctgtgtccctcacagttccggagcccgtgtccgtgctctgtgccgatagggaacagtgcctacttttcctatttccgctgatatacctgatgtcccgccagtcggggtaccagcgtgcgtgctccgccctacggtggtccttactggtcgattcactggtgagatgtgacgtccgtgcgacgtgtcggtggtgcctggctaacatgaccaaagcctctctgggcgtgacttgacacccgcaggcacgccttacgaggacagggagtaattggggcgaccaagtagttgacttacacttgggcggatttacactcgctnccaaaatgaatagggccttttttcccttcgttccttgaatccgttcccctgtttgcccgttttgcacgggggtaatgaataccaacggcacgtggaacgcaatggaatgccgacggttaatggaacggaacaacgttaacccagtttcgccagaagggcgtatggcttatcctcggggcctagagggaaccgcccaaatttttgcctcttttggcgggagaaagggccaaaggcccgagaagagaatactgtttttttccaaaaacccaagggcatttctcccctctgggcccggtttccggtgttggcccagagccaatagccacagggagaaagtaaatcaaacagacgctcggaaaggcggtttctccccacaaaactagggaaatgggggccaccaaggcttggttccccgtttttggggaacaagcggttggcctttggctttcccaaggtcaaatatccggtgcggccttaggaatacgaagggttctcttctggggattccaagagccaggattcgcccttagaaccttgttctacacacggcaagattccaaagagagaaccttggaagcgccggacagttgtttcccctttggggaaaaggaggccgtttggtgataagagccttgtgccaaagagatcagggccttagggaagttctctttccccaacggaacttggacaccttttcgaagttttggggaaaattacgcttttttaagattcacttaatttccctttttaaggttttccgggaccgaaaagn

SEQ ID NO: 692065 - DNA, 106 bp, Homo sapiens
gtaacgacagatgaatcctagggctcagagcactgcagcagtacgtggagtgtggcgagtcagctaaatactttgacgctgtatgggaatatgctcgtgtgtctac

SEQ ID NO: 692066 - DNA, 105 bp, Homo sapiens
caatttcaccaacagatttctttcttacagttgatctgagcaacctcagcatgtatccggtaacgtaaaataaaatttaaaaaaataaaataaaataaaaagtaa

SEQ ID NO: 692067 - DNA, 459 bp, Homo sapiens
  misc_feature (114)..(114): n is a, c, g, or t
tggaacctctgtttcatcctcctggaaccttgctgtcctgatttgtgatagttcaccccctgagatccccttagccccagggtggccagaacttccctgattgacctggtccgntgctccttgggttacctgacctcttgctgtttttgctcgccctcccttttgtgccccactcattggggttccgccctttcccctttttcctttttttttttttcttcccccagaaactaaaaatgtgaatgaggatttttattaaaggggggccgtggaaaaatgatccgccttttttatgggagcgtccgggttggtgtgcttaggtgttaaaaaggggccctgtgtcccttgtgctttgctcttgtcccccgtgttttcccctttgcatattaacccttaactgtgcatagtgctgggatggaggggagtgttgggcctgtggtcccccctggcttataagga

SEQ ID NO: 692068 - DNA, 902 bp, Homo sapiens
atactgccatgtttaggtcttgtttatgcaaccatttctaggacagactgtttcatcagacttcctggtattctggctctaatcatctttctatcccactctccacaatgttccctgagacaaagaggcaggagctgcggtgtaggtatactcattggggctagactccccacaatctgttgatgcatgcattgtgtccagatgtggttttctgtgatggtcttgatatgctgtaatgggaggattcttgatgagggtttggtgataaggttgctacaattatctgaggttataaggatactgattagagtgaagtaaggaattgtgctgatctagcaggatggtactagtagattcttttctaaggcccatgacctcactagctcatgaatatgaggtttccagtaccaggatgattttcctcctagtcagtgggctttaagtccaattagacagcagtctgttacctctgacgtgtgagtctcacccattaaccattatgcttatcttgtaatgttagtaagggctgtggttcatagatgttaccactaggtatgactatttaagtgcttccatccttttgtggttgcataatatttccttagcatcgagataactagcaggaaaggaaaaataacgcaaatgttttaggggtaccccaggtacttatttggaccccatatatggcattggttatgtctacaatcttcaatttcccttatctctgttcctcaaaacaggtcccattcaggatacacgtatttggatatatttcattctccatgaacatagaaggcgtttccttagtgagaccaaaagtcttgatacaaacaacagtgttgatgaaattcctaatataattctgtaccaataggaaagtgcgatatacccagaaaagagaa

SEQ ID NO: 692069 - DNA, 751 bp, Homo sapiens
  misc_feature (395)..(395): n is a, c, g, or t
  misc_feature (541)..(541): n is a, c, g, or t
  misc_feature (550)..(550): n is a, c, g, or t
  misc_feature (581)..(581): n is a, c, g, or t
  misc_feature (615)..(615): n is a, c, g, or t
  misc_feature (625)..(625): n is a, c, g, or t
  misc_feature (634)..(634): n is a, c, g, or t
  misc_feature (654)..(654): n is a, c, g, or t
  misc_feature (672)..(672): n is a, c, g, or t
  misc_feature (682)..(682): n is a, c, g, or t
  misc_feature (702)..(702): n is a, c, g, or t
  misc_feature (719)..(719): n is a, c, g, or t
  misc_feature (739)..(739): n is a, c, g, or t
cttcctgtccttctttctgtcctatgtttattgaatgcttattacttggtcttaaagtttttcagattaattggaaaatgatacatatgataaaataattaaaggatgatataatcagtgctccgcaagaaggaataagaaaagtattcagaagccacagtaaattatgacatacattggcttgctcctgtgttgctatgaatagggagtaagtttgcggccctattgccatataccttgaaggcagtttctgtgttgtctgttgagtgatcctgtactacccaactgcttacactacttgtggggttctgatgtatccctacatcattgcttttattcgtgccttttctcttcttgtgaagtcatttgtacaggagttcccccttatctatcangaatacattccaagacccactagtagatggctgaaactgcagatcctagtggaccctatatgtactatggttttttcttaaagtttatcatatactatgtgataaaggttaatttataaaattaagtaaagtaagagttttaaccnaaataattnggaggggaaccaattataaccaatataatgnggataaaaaataatgtgaaatggatctctctctnttttcaaaanaccctattnatggtaccacggggctgagncctccaaaaggaaaaccntgggccctgngaaactactggataccattntttttctttttacccgnccggaactttaatggttgcnttaaaaaacacg

SEQ ID NO: 692070 - DNA, 105 bp, Homo sapiens
agcaaccacccctgaggatcagcgcctgctggcccatgtcaccctggagctccagcactatcaccagctacttgagaaggttcggatccgggatgccttgcgcag

SEQ ID NO: 692071 - DNA, 103 bp, Homo sapiens
tcacggtgatggaagctgcacattttttcgagggagcgagaagctgctggaggttggttctcccggcagcagccgacgcaaacaaggtctggggatcttcgca

SEQ ID NO: 692072 - DNA, 946 bp, Homo sapiens
  misc_feature (219)..(219): n is a, c, g, or t
  misc_feature (386)..(386): n is a, c, g, or t
caagcaagaggaagtggtcgctgatggcatcttcaaagctgggatctgaatgagctcatcttactcgggagctggcgtgaggatggctacgtctgggagttgaggtgcgagttgataccaagcactagagacagaattcattatcttagaccaccagaacactagaaagtgtttcttgtgttgaagaagggcccggaaggaattgacgtggcaacgtgnaactggctgtagattcagcaagtaggatattgagcttttgcgcaggagagtgacagtgatagagtgtttagtgttgagaaagggtggtgcattagaggatactggtggtgaccattgtgcacagcgggaaaggtgctctgttggttaaaaaacttcctaggagtggncttgctggtgcgtgaggagcctgcctatgggtgtgactgcaggtgtcactcgagtggatgcagatggaggcccaatgatggctggcggagcgattgtgcgtggattcctggtgacacatcactccggacgggatcacataaggtgggccataaagagtttcccatgggataactattagctggagagttggtcctgaactgaattcactataaacgtctgcgcatgagcgcacatgtgtttaagaacctgaactaactgttctggagcgactcgacgtaggtcgtcggccctagtgtttgttggggcgtccagaaatcagggcctagttggccttgtgggaccatgccataggggttggatacggaatccacttgtctctgggcacgtgcgtgaaacacgccaaatcttgagctaagagaaattctgggctctctaaacgaagaaggcgctccctgcgcgtgtaaacaaccgttgaaagcaattcttgtgggatatgcctacggagcagtaggacaaataacttgtgcaccgataccaaacccaccaattccttcgataa

SEQ ID NO: 692073 - DNA, 475 bp, Homo sapiens
  misc_feature (79)..(79): n is a, c, g, or t
  misc_feature (103)..(103): n is a, c, g, or t
  misc_feature (114)..(114): n is a, c, g, or t
  misc_feature (117)..(117): n is a, c, g, or t
  misc_feature (225)..(225): n is a, c, g, or t
  misc_feature (249)..(249): n is a, c, g, or t
cctaggagattcggactctcagaatagacccagaggcgtggccacacagagaaaaagacatgtggggacacagtgaaanaggagcggtgggtgagccacaganagaggactcanaanaaaccaactctgctgacaccttcatcttgaacttctagcctctagaactgtgaaaaaacaaatttctgttgttaagacacccggtctgtggtattttgttaagacagnccctagcaaactgggggggggggntgtacactaaataaagtccaattcaattttaattttatagaaactgaaacaaataatttaaagatttacttagtaaattacttcagattgggatcaaatgtgtacatgaattatgaaaatgtaagaaatggatatttaaataagtataccagaacataaaaattccggtgcctgggtttttttttttttttgaaagccacttatcccaacaataaaactgatgctc

SEQ ID NO: 692074 - DNA, 339 bp, Homo sapiens
gccacacttttaaaccatcagatctcatgagaactcactatcacgagaacaggataaggaaaaccacatgttctcactcataagtgggagttgaataatgggcatggacacagggaggggaacaacacacactggggccagttggggggtttgggggcaaggggaagggagagcattaggacaaatagctgatccatgtggggctttaaacctagataataggatgataggtgcagcaaaccaccatggcacacatatacctatgtaacaaacctacacgttctgcacttgtatcccggaaattgataacataatgggcagatacactgattgcttggt

SEQ ID NO: 692075 - DNA, 174 bp, Homo sapiens
gcgcgcggcgacctagaggaccgggagtagtcaatgcaaaaacataaagtaggtaattactcttgatcttgacattacttccgttacgaaagtacttacaccatttttcaaactaagctactatattttaacggcttccaaattcttctaactcttccaaaagccttctggctt

SEQ ID NO: 692076 - DNA, 134 bp, Homo sapiens
tgggccccaacggcggggtcacggtcctcagcgagaagggcccggccacccgggggaccgtcgacggcggagactgtggacgcgagccgggcccttcccatggatcaccccagatgcgacgggcgttgcggccg

SEQ ID NO: 692077 - DNA, 356 bp, Homo sapiens
ccatgtgacttgggctgtgaaatttgaatttcagataaacaattaataatttttttagtataagtttgtcccggccatgcacagtggctcacacctgcaatcacagccctgtaggaggctgaaatgggcggattttttgagctcaggagttttagaccagcctgggcaacccaaggaaacctccttttttcaaaaaatacaaaaattagctgggtgtggtgacacatgcctggagtcccagtccctggggaggctgcggtgggaggattgcttgagcccccaaggtttaaacttcagtgagccggggccgcatccccgccctccatcctgggtgacaaaataagaccctctttcca

SEQ ID NO: 692078 - DNA, 473 bp, Homo sapiens
ttcaaagtgtacttataaattatattacatcaattttatttactggtctaaggaggcagagggtggaagggtatacaatgtggaggaaacacattcataacggggtgaagagtgctggcgggagacacgggtctttaacatggaaaatgtttaaagtatttaggcaaagttaccgaaaacagatcaaacaagccagtttattttggtagaaaattccactttcatagggttaggcgatgtgctcgtgtctgtgaaggggttgcttccggtcatctccttcctaacggaagggaagggatgctaagttaggggcccctgtcaccaaggatggctggcgtccctttgaatgtctgtccctgggtccacacagctgcctggaacccacgactcccgagagcccgtctgctgcaggtgatgctggaagggaagcgcccccacttgacagatgagtgcacggagggtccgacagggga

SEQ ID NO: 692079 - DNA, 1387 bp, Homo sapiens
  misc_feature (140)..(140): n is a, c, g, or t
  misc_feature (1142)..(1142): n is a, c, g, or t
  misc_feature (1310)..(1310): n is a, c, g, or t
ggaaaaatgaattgcttggtattcattacttcatgtatatcaagcacagcagtaaaacaaaaacccatgtatttaactttttttaggactttttgcttttgtgacttttcttcttttccttggactacctgtggcctaancattgccatgtggtgcctgctacaaaatactttacaccagggaacaattaacctgtgacgactgcagtggcctagccttgtgtttacagtgtcttactgacaactttctcagtgacaccaatgtccacagcacatatatagtgtggttacaagacaccacgcgtgtgtatattatacacattctcacgtgtataaagtgtggcacatctaacacacgtttctctacgtgcaccctgtgtgcaccctttttctacacactttacacgtgttctgccttccttatagacaacgggcttgttatcatctacattgtgtcgttaaacgctgttctagaatgctcttgttgtggaggactcctcccgtagcagcacatcttttctcttttctgttcaccagcagtgtacaacaattcgttgcagtcaccccatttttttattcttctcgtagaacacacattcttttaatatgttttccacctgttataattttctccacccgcctctacctactgatagtgggccacagggtccccttatccatggtggcgggggactacatccgtgtttattcaacccctcagaccggttgttctctattacacagaccctgacgcgttatacaacagaatctgcttgttaagcttccgaaagtctaaagaagccgaccaaaaaaaactatcttcagcgatttaagcttgaataacaatgagtgattttgaaagaaacaactaagaccgtagtgtatacttacatcccacgacatgtcgtagcttaccccccgcagaacggtggaaagaacgttgcacgccgccggccagattacaggttgccatgttatctacatcaatttaccgcccgcccgacactaagccggccggctgattggatcaaccaaccagtaagcgaattcaagacatgttgcggcgaactgattctttctttcccacccctatccaattgctttagttacttagcatcgtgtccatagcccgttcgggcggcngtaacgaactcgaacaacatgcatacgtcggcctgtagtgaggacgacacacaacctttcgtcggccaacactgcttatatctacagctgcagtacacgcacactgcacggctcatctaacgaacacggaaaggctttcgtacacattaacagcgctacgtctgagcngagtcatcggtcagtcttcttcccgcgcccgcaatcaatgctttgcttgtcgagtccacactcactacacatcctct

SEQ ID NO: 692080 - DNA, 119 bp, Homo sapiens
tcgtctgcaggcctgtgatggcgaccactgctcccggggctgtgcttccccaagtagtcctgatagcagcggctgcgccggatgcgcccggactcagttataattttgcaaagcctggt

SEQ ID NO: 692081 - DNA, 736 bp, Homo sapiens
  misc_feature (360)..(360): n is a, c, g, or t
  misc_feature (661)..(661): n is a, c, g, or t
gagacaccaggggcatggtgggatggtgaagaccaggagcagagtagagcctcacagaacacgcgcggctctctgctcatgaccccacccggggctctgcacccagtgtagcagccccaggtcatcccaacccctctcagagcctcaagaggggtagctcgcctgccggaagagagggatgcactatacctggcaacacctacacgtggcgtactccatcacctgccaccgcctgtgacatgtgtgtgagctggaagcatacactctgagagtctaactctggaacatctgtgcacaggcacaagagaggactctatgtgttttgtgtaatatatatacatacatatatatatattccgnctgtaagagacatgtcttatacagatgctgaggagtaccccctgttagataatctcacagaggagactatatattaaagcacacaattggtgccaagactgagagagaaatgtgcatttcccccttattatcctgacggatatcttttttggggcaggggaccttacctgtgagacgtctgatgactctccctcctgtgtcaaggggcacacactctgatgaatgtgtccctcggcagataccgcttatagtgtttgaccagacgtcctacagatgccgggtgagcctctagatcttctgnatctacgacgaccgacacctgcgaccctagagccgacctgttatctaccactccggcggtcggtgtccagcctct

SEQ ID NO: 692082 - DNA, 229 bp, Homo sapiens
gatgactgcgacacctatggatactagttgggctcattactgctgagccacaatgggaactcctggaagtaatcttatttctgatttgaggagctcttctcaaaggtgtgctctctctctcatctctctcttgctcctctcaaacacacacacacacacacacacactttgtcagtaacagagatcttataaacaagagcctgaggttcgcagacatcctgcaggatcc

SEQ ID NO: 692083 - DNA, 131 bp, Homo sapiens
gttgtttatgcaggtcgtctagagctcccctctcacaaaccccctcgatggagtccttgtcgcagctggagtccttgtccttagctggtgatcacacagcctgtgcctgtacctgtcaccccactggatgg

SEQ ID NO: 692084 - DNA, 616 bp, Homo sapiens
  misc_feature (521)..(521): n is a, c, g, or t
gcctgcagtgcttctctctttcgctcaggcccgtggcgccgacaggatgggcaagtgtcgtggacttcgtactgctaggaagctccgtagtcaccgacgagaccagaagtggcatgataaacagtataagaaagctcatttgggcacagccctaaaggccaacccttttggaggtgcttctcatgcaaaaggaatcgtgctggaaaaagtaggagttgaagccaaacagccaaattctgccattaggaagtgtgtaagggtccagctgatcaagaatggcaagaaaatcacagcctttgtacccaatgacggttgcttgaactttattgaggaaaatgatgaagttctggttgctggatttggtcgcaaaggtcatgctgttggtgatattcctggagtccgctttaaggttgtcaaagtagccaatgtttctcttttggccctatacaaaggcaagaaggaaagaccaagatcataaatattaatggtgaaaacactgtagtaataaattttcatatgcncaaaaaaaaagaattctcgaaaatcgctgagaccggcgcggttattcactttggtgggcctaaaggagccgttgcacggtggcggggactccgct

SEQ ID NO: 692085 - DNA, 458 bp, Homo sapiens
attcattcattcattacaacttacactttcagtctacaggtgaattcccccaagcttcagaaatgcccctgaccatttcttacattgttctcacagcagcatggcttcacacttccgccttccagtttattcccagatcccctaactggtctgcagtggtaggatgagaaaatcattctttctcactctaaagacgtacgagtcttcttgctctgattccatccaccaacagacagaggagcctgaagcccatcaaaaaattacatgtggaaactcaggggtttaaatctactgttcgagagatagtgcttcaacagaatttattttaatatggcagagtcctgaccgatgttttctgctttaagtaaaaaattagctataagtcaagaatggtaaaggctttgtctcctatcccaaaaagaaacagaaagaccattagttgatgcttttggtcaaaa

SEQ ID NO: 692086 - DNA, 798 bp, Homo sapiens
ggaatggggtgagctggagccaggacctgcattaatgaatcggcactgggtcggccgactgggccagtcctgcctctagcatgtccatcaggatgacccagaagtctacaaggttgtcacctctggacccccgggccttacagacagcacgcatcctacacagagtgggcccggttacccgcattcagctcagctcgagcttactacccgagttgggacagcagcaactaatcgcggtggcctaggagcggcaggcatatacgtgcggagccaagacaggacactgggacggcagatcaaccgagcagggtaacggatcagacgcagacgccatgcagtgaggcacccacatatgatcctgagcagtgtggaacaccgaagacagtcacaaggaccagataggcagcaccacaggagaggaacggagcaaggagtcaaagaacccatcagatcacaccaagtatatgcgcgtccgttcgactacgaccagaggtacggattcccgtgcgagccaggcaagacacacagactgctaggaggacccaaagatggacgccgtagcctgacaagcaagacagacagaccaggcatacgaaaggcaaaccatagggagcaaacgatgatatcgcagaagcgataccagatcaaagcagagcgtgtagagaaggacaagagttggaaagacatacatgtggacacgaaggaagcagaggttgaaaagacgtgagacagacggccagccattgggcagacaatgacagaggagcctgggtaggaagggaactatgaaagaagagg

SEQ ID NO: 692087 - DNA, 1498 bp, Homo sapiens
  misc_feature (1403)..(1403): n is a, c, g, or t
ctctccgtgtccgctctcgtccttcgtttttctctttctcggcttttcttctctccgtccctctccttgggcttctttcctcccctttcctccttcgtctcgttgctcttgctttctctcttgcttttccatccctcggttttgtcttcctctctttgtcgcctctcggtcttcgtgccttgtgctcctgctgttcgttcgcttctcctctcttgtcttcctctttggctcccgtcttcgcttttgtgcgtttttcgtcctcctcttttctatgtttttattcttggtttttttcttgtttctgtattgttattttttgtttgtttttttttttttgtgtgtgctctagttgtgtttcttcactttttcttgtttgttatatgtataaacacaagagacacaaaagaagagagaggaggtgatatctctatgttatctggtcctcgtcctgttcgtctctcctcggttttgttacgttctcgattctcgctctcgatgtctcgtttgcctctttttgtctcttcgtgtctctggctgttctgactacgtcttgtctctcagctctcttccgtttctcctacctcgctctcttgactttcgctcttttttcttgtttggttgttcgttgtattgttcttttgttctccgcccgagtggagtgacggcgatgaggtggggtggttttagtaattgtagagtgtctattagaatggaggagtggtttggatgtgttggagtaatggtattgtattgtatagttttatattttgtgttgtagtatttttgtttgttttttggagatgattatgagtttataaagagggatgctgaggggaggatttgtgaggtggggataaggatagttgagagagtgagtagagagagtagagagtagtagagagagagagaaccctggcgcccgaccaggatgggccaatgtcgtggacttcgtactgctaggaagctccgtagtcaccgacgagaccagaagtggcatgataaacagtataagaaagctcatttgggcacagccctaaaggccaacccttttggaggtgcttctcatgcaaaaggaatcgtgctggaaaaagtaggagttgaagccaaacagccaaattctgccattaggaagtgtgtaagggtccagctgatcaagaatggcaagaaaatcacagcctttgtacccaatgacggttgcttgaactttattgaggaaaatgatgaagttctggttgctggatttggtcgcaaaggtcatgctgttggtgatattcctggagtccgctttaaggttgtcaaagtagccaatgtttctcttttggccctatacaaaggcaagaaggaaagaccaagatcataaatattaatggtgaaaacactgtagtaataaattttcatatgcncaaaaaaaaagaattctcgaaaatcgctgagaccggcgcggttattcactttggtgggcctaaaggagccgttgcacggtggcggggactccgct

SEQ ID NO: 692088 - DNA, 144 bp, Homo sapiens
gaggagtccctgattgcagtacatcgaagtacgacggtcgagagcgcagaagaacatgtctgtacacctgtccccctgcttcagtgaacgtccagatcggtgacatcgtcacagtgggcgagtgccggcctctgagcaagacag

SEQ ID NO: 692089 - DNA, 1277 bp, Homo sapiens
  misc_feature (611)..(611): n is a, c, g, or t
tggggcatatgaaaatttattactacagtgttttcaccattaatatttatgatctcttgggctcttccctttcttggcctttgggtattaggggccaaaaagaagaaacattgggctactttggacaaccttataaagcgggacctccaggaattattcaccaacagcattgacctttggcggaccaaatctccagacaaccagaaactttcattcattttctcctcaaataaagttctcaagacaacccgctcatgtgtgggttaccaaggggcgtggtgattttctcttgtggccatttcttggatctcaggtgtggacccctttaacacacttctccatagagttgggcagaaattgtgggcggtggtgtgtggccttctcaactctccttatctttttctccagacagcgaattctcctttttgtggcgtgtggagaaaagccacctctcacaagagaggggtgttgtgggcctttataggggcgcgtgtgtggccccaaagatgtgaaagcctttctcttatatatacgcgtgggtgtaaaatctccatgtggcccaacttttcgtgggtgctccctgcggtgcggggtgaactatagcggagagncttctccctattaaggcgagtttagcagaaaaagtctcccccaacaaaaacactttgttgcgccacatttcccgtgtgtgcgggggcgtgttgtggtatttgtttctccacagagctgtgttgtcacttttataatttttatacaccgtgtggtgcgttcagacaattatgtgggggagacgcatacgcggggtggaactgccggcaggggtcgcgcgacgctcaacacattatcaagggcgcggctaaggcgcttcacgcccacactcttcaacagaggcggcttcaaaagggcgacgcgggctcgcaacccgggcggcgcgcaccacaatgcaaaggggggggggggggaacatcacacaccgagagggccccctaaatgggggtctgcgtggcggaaaaacattcccttcgccggaaataaaggtggcggccccccaatctttgtggccgccaaaaaaaaaacgccccgggggaaaaagacaggggggtgggccaagggcccgtcccccttagggggcaccgaaagccagaagcgggcggagggaacctcgaggaacatcaacacgggggggtcgtcgaaaggacccactggtgatcaaccaccctcgggcttaccacaggggtgccgaagaaatcacagatacacaggggggctacgatgag

SEQ ID NO: 692090 - DNA, 829 bp, Homo sapiens
  misc_feature (734)..(734): n is a, c, g, or t
ggcaccatcagggcagtctttggttcccggcacagctgggccggtttctgggtaatagaattttttgttcggccaacagcacatttctgggaaggtccgcacatcttctctcgtctctggcgcctaagatagcctgcttggatttgcctgggcggccctagggccctttttgcggcagcaccgtcaccggtccccgtcgctttcggccctggcgggcgaatacgagcgtcccttcggcggcccctggggcccgacacggatgggcaaatgtcgtggacttcgtactgctaggaagctccgtagtcaccgacgagaccagaagtggcatgataaacagtataagaaagctcatttgggcacagccctaaaggccaacccttttggaggtgcttctcatgcaaaaggaatcgtgctggaaaaagtaggagttgaagccaaacagccaaattctgccattaggaagtgtgtaagggtccagctgatcaagaatggcaagaaaatcacagcctttgtacccaatgacggttgcttgaactttattgaggaaaatgatgaagttctggttgctggatttggtcgcaaaggtcatgctgttggtgatattcctggagtccgctttaaggttgtcaaagtagccaatgtttctcttttggccctatacaaaggcaagaaggaaagaccaagatcataaatattaatggtgaaaacactgtagtaataaattttcatatgcncaaaaaaaaagaattctcgaaaatcgctgagaccggcgcggttattcactttggtgggcctaaaggagccgttgcacggtggcggggactccgct

SEQ ID NO: 692091 - DNA, 572 bp, Homo sapiens
gtaatagatctgtggttgagtaccccaagagatatggtcgtcttattactaggatgtgtgtcacgttttgctgtacaagtggacagtccccgtcccaactcacgccatggctcgtcgcatggccgccgaaacgtgaacacatctcgcatggcatctcactcggctctgcatgttgcacactggagccagagtaaagctcatctgatctgttctagcttgggtcaaacaaagttctttaggcaagttccgtagattctctgggcttaacgtgcaagggacacacgaattccttattcgtgtgccgcatgaagatgcgggcagatctcctgtgtacagaacgattcttaggactgaaggcaggggtctgaggcctctgcgacctggctcgcccctttccatccagtaggctgctgtttcccaagacgggactaagcgtgttcttatggtgaaatgcttgggacaggagtgcttacagattattgcattatttcagacggttggaacactttgcatactatacataatgaggtatcttggtaggtctcatgtctaaacatgtaattcatcatgtt

SEQ ID NO: 692092 - DNA, 112 bp, Homo sapiens
taagaccctaatgcaaagtaaccattctcccaggaacctggctttcagaatgtgaagaacaagcaaaggcagacaagaaagggatgtggagtgaggggaacggttcacatac

SEQ ID NO: 692093 - DNA, 845 bp, Homo sapiens
ggcaccatcagggcagtctttggttcccggcacagctgggccggtttctgggtaatagaattttttgttcggccaacagcacatttctgggaaggtccgcacatcttctctcgtctctggcgcctaagatagcctgcttggatttgcctgggcggccctagggccctttttgcggcagcaccgtcaccggtccccgtcgctttcggccctggcgggcgaatacgagcgtcccttcggcggcccctggggcccgacacggatgggcaaatgtcgtggacttcgtactgctaggaagctccgtagtcaccgacgagaccagaagtggcatgataaacagtataagaaagctcatttgggcacagccctaaaggccaacccttttggaggtgcttctcatgcaaaaggaatcgtgctggaaaaagtaggagttgaagccaaacagccaaattctgccattaggaagtgtgtaagggtccagctgatcaagaatggcaagaaaatcacagcctttgtacccaatgacggttgcttgaactttattgaggaaaatgatgaagttctggttgctggatttggtcgcaaaggtcatgctgttggtgatattcctggagtccgctttaaggttgtcaaagtagccaatgtttctcttttggccctatacaaaggcaagaaggaaagaccaagatcatacagatatgacctggtgtatacacgactgtagttaccctaatttccatatgccaagaatcttcctgtcagagtctcgggggtccgttcatcgggggcggtcaaggaggttgttccatgtggccgttggctgaggggatctactggcccggcttgag

SEQ ID NO: 692094 - DNA, 332 bp, Homo sapiens
gcctgcagtgcttctctctttcgctcaggcccgtggcgccgacaggatgggcaagtgtcgtggacttcgtactgctaggaagctccgtagtcaccgacgagaccagaagtggcatgataaacagtataagaaagctcatttgggcacagccctaaaggccaacccttttggaggtgcttctcatgcaaaaggaatcgtgctggaaaaagtaggagttgaagccaaacagccaaattctgccattaggaagtgtgtaagggtccagctgtcgggctagtcgggggacctggtgggcgctttgctctgtcttcaagccccgtcggctagtgggg

SEQ ID NO: 692095 - DNA, 282 bp, Homo sapiens
  misc_feature (187)..(187): n is a, c, g, or t
tggggcatatgaaaatttattactacagtgttttcaccattaatatttatgatctctcctggagtccgctttaaggttgtcaaagtagccaatgtttctcttttggccctatacaaaggcaagaaggaaagaccaagatcataaatattaatggtgaaaacactgtagtaataaattttcatatgcncaaaaaaaaagaattctcgaaaatcgctgagaccggcgcggttattcactttggtgggcctaaaggagccgttgcacggtggcggggactccgct

SEQ ID NO: 692096 - DNA, 829 bp, Homo sapiens
attcgcggccgcgtcgacgatagcgcaaactgcccgggaagggaaaccagcactgtacagacctgaacaacgaagatggcatattttgttcagggaatggtgaattaagtgtggcaggaatgctttgtagacacagtaatttgcttgtatggaattttgcctgagagacctcattgcagtttctgattttttgatgtcttcatccatcactgtccttgtcaaatagtttggaacaggtataatgatcacaataaccccaagcataatattttgttaattctcacagaatcacatgtaggtgccacagttatccccattttatgaatggagtgatgaaaaccttaggaataatgaatgatttgcgcaggctcacctggatattaagactgagtcaaatgttgggtctggtctgactttaatgtttgctttgttcatgagcaccacatattgcctctcctatgcagttaagcaggtaggtgacagaaaagcccatgtttgtctctactcacacacttccgactgaatgtatgtatggagtttctacaccagattcttcagtgctctggatgttaactgggtatcccatgactttattctgacactacctggagttagcacagaccccacaagttaggggctcagtcccacgaggctatcctcacttcagatgacaatggcaagtcctaagttgtcaccatacttttgaccaacctgttaccaatcgggggttcccgtaactgtcttcttgggtttaataatttgctagaacagtttacggaactcagaaaaacagtttattttcttttttccgtgagagagggaagggggg

SEQ ID NO: 692097 - DNA, 676 bp, Homo sapiens
gcaggggtgcctgagtgggtaggctcagatgggggttcactggtttgggtccttcgagtatggggctgagactgaaaagttgcagaagcagctggcttcggagaaggaaatccagatgcagctccaggaagaggtgagtctcgctgccggcttctgcccccaccctggagagccactggcccagagtggggaccccaggcccttggagctacctgactctggagaggactagcaggaactgagtcttgtgcgtttccaccccctccatgcctggcacagcccagcaggtgacagttccatcaaggtctgagtggtgtggagtgcaggtacctgccctgtggtcccccacatgacactcggagtccagaacctgggcctctggccctcagcctgagagcagataggcaaggagtgctggactggggtgtgcctgggtcccagcagagcgtgtgggtgggttcccagctgcaggacctgcgggagaagtacatgcacttgtgggcggcattgctgattgagatgcaggaggaggttgaagaccctcctgcaacaagccccggtgtccactgggtctgccaccattaccatacagtgtgcctctggttgaggaccctcccctggttgccactttctacgtctgtgcctgtgtctcaccttggtggctgactgggatccc

SEQ ID NO: 692098 - DNA, 193 bp, Homo sapiens
tcatagactctcttcattatccccgttgaggaacctctctagatcttttttaacacatcaccatcccccgcaagtagaatagttagtatcactgatacactgtatgcctgtttatacactacatgtacatctgtgctttatacataagtaagattaaaatcacctcttgcaggtgctaacactcccactgaag

SEQ ID NO: 692099 - DNA, 244 bp, Homo sapiens
  misc_feature (149)..(149): n is a, c, g, or t
tggggcatatgaaaatttattactacagtgttttcaccattaatatttatgatctctttctcttttggccctatacaaaggcaagaaggaaagaccaagatcataaatattaatggtgaaaacactgtagtaataaattttcatatgcncaaaaaaaaagaattctcgaaaatcgctgagaccggcgcggttattcactttggtgggcctaaaggagccgttgcacggtggcggggactccgct

SEQ ID NO: 692100 - DNA, 719 bp, Homo sapiens
  misc_feature (671)..(671): n is a, c, g, or t
attcgcggccgcgtcgacgatagcgcaaactgcccgggaagggaaaccagcactgtacagacctgaacaacgaagatggcatattttgttcagggaatggtgaattaagtgtggcaggaatgctttgtagacacagtaatttgcttgtatggaattttgcctgagagacctcattgcagtttctgattttttgatgttatcatgcatcactgcccttgtcagatagtatcatgatcacaataacatcaagcataatatttcattgattctcacaaaaacaggtgggtgccacagttatccccattatatgcacaaaatgatgaagacttggggttaatgagcgatttgcccaagctcacctgaatattaagactgagtcaaatgttagtctggtctgactttaatgcttgctgtgttaatgagcaccatgcattgcctctcctatgcagttaagcaggtagacaggtgagagaagagcccatgtgatatcgggggaaattcaccccaatatttcatgtaggttcttttctattttccctgagtgtcggccggtctgagaaataaaaggaaagagtacaaaagagagaaattttaaaactgggtgtccaggggagacatcacatgtcagcaggttccgtgatgccccccaagccgcaaaaccacaatttatngtgattttcaaaaggagagggagtgtacgaatagggtgtgggtcacag

SEQ ID NO: 692101 - DNA, 471 bp, Homo sapiens
  misc_feature (18)..(19): n is a, c, g, or t
  misc_feature (423)..(423): n is a, c, g, or t
gagtatctcctccccgtnngcccaaaaaaacaggtgggtgccacagttatccccattatatgcacaaaatgatgaagacttggggttaatgagcgatttgcccaagctcacctgaatattaagactgagtcaaatgttagtctggtctgactttaatgcttgctgtgttaatgagcaccatgcattgcctctcctatgcagttaagcaggtagacaggtgagagaagagcccatgtgatatcgggggaaattcaccccaatatttcatgtaggttcttttctattttccctgagtgtcggccggtctgagaaataaaaggaaagagtacaaaagagagaaattttaaaactgggtgtccaggggagacatcacatgtcagcaggttccgtgatgccccccaagccgcaaaaccacaatttatngtgattttcaaaaggagagggagtgtacgaatagggtgtgggtcacag

SEQ ID NO: 692102 - DNA, 341 bp, Homo sapiens
tatttttttacaagatacggatgtgcttgggtcgtgggagtggaaatcctgtgagatggattgttatgatcattatacaactacagatgtgataaattcatttgagtaataaaaagattttttaaaaagtagccatattgaaaaagaaaaaaaaaaaaatccttaacaggagctgactgaatctagtgttgggtcagtccacaatgagcttcataaaaaaaaaaaaagtcattggtcaaatacttctggaaaggtgcccaagtgtccaggtgctgaggcaaggggaaagggagcaagggattatctgggaggtggtatctggtacaaataattccgggtcc

SEQ ID NO: 692103 - DNA, 591 bp, Homo sapiens
  misc_feature (514)..(514): n is a, c, g, or t
cagcacctaaaatgttgataatattaacatgtatctaagaggaaaaaagagttaatatattctggcacccactttcctagtaatgttttccatgattttccagttctgaggcacttattaaagtgctttttttttttctggaattaattaggtatgggtaaaatatatttttaaattaagtaagctttataaacacaattagaattacaattaattaacagaggtataatggtctcactttcagaagtgatcatttatttttatttagcacaggtcataagaaaaatttttagaaaactaatcaatttcatattataaagggattatttctccacctttaattatgggcctatcattggtaagcgtaattgggtcatattatggaactaaggtaattattccattcaaagtcttctctagatttaaacattgtttgcaaaagcttaggattatatcatgtgtaccgtattatagataacatcctaaaccttccagttagatatataatggactnggggtaatctcttgggtaatcggtttggacagatttcttaaattatgttagcataatcagggaagatttaccttgaa

SEQ ID NO: 692104 - DNA, 305 bp, Homo sapiens
ctgcgcacggctcccactcccgactgacatcaacacctaagcccaacgagcagaacccactgatgctagaggaagatggaggggtcataaccgcaccttcccagggagacttgcctgggcctctagcctgaacaggcccctagatgccatgctgtagactaggggtcttaacaggtcaggcataggtgtcatccagcaggctgaaccctgtagctggcctgaactttagttacttgccccctccacgatcactgaggcctgacagagcctgaaaccctgacaccccacctaatgaagctagtcga

SEQ ID NO: 692105 - DNA, 110 bp, Homo sapiens
  misc_feature (103)..(103): n is a, c, g, or t
agataagagcagagtcaggaaagggggaaaatcaactgcggataggtgaagattcgagggaagctcgctgagcttctggggagaactgggagaggaggctgcnaacgagg

SEQ ID NO: 692106 - DNA, 182 bp, Homo sapiens
atggctggccagtgagcatatatttaaactttttttttttccccctgagagacagggtcattacctcctgggctcgggtgatcatcccacctcagcctcccaaatagctgggattacaggcgcataccactatgcctggctaattttttttatttttagtagagatgaggtttcgccatctc

SEQ ID NO: 692107 - DNA, 103 bp, Homo sapiens
tggagatgtggagaacacatacacgagaaatcactcatagtcccaccttccacaggcaacactgctactgttagcacctttcttcttcttctccacatctcct

SEQ ID NO: 692108 - DNA, 207 bp, Homo sapiens
aacctttttttttttaaagggaggtttcctcccaggggatttatttgagggagccagtgggggagggttttgagactcagaagggttttttttaacaaaaccctggggggtttatcccttggacttgccccctgtaaaaggggtttcccttttgaacggtttccggcccaaaattttttttaaagggaataaaagggcccccagcca

SEQ ID NO: 692109 - DNA, 269 bp, Homo sapiens
  misc_feature (102)..(102): n is a, c, g, or t
  misc_feature (126)..(126): n is a, c, g, or t
  misc_feature (143)..(143): n is a, c, g, or t
  misc_feature (148)..(148): n is a, c, g, or t
  misc_feature (162)..(162): n is a, c, g, or t
  misc_feature (196)..(196): n is a, c, g, or t
  misc_feature (203)..(203): n is a, c, g, or t
  misc_feature (205)..(205): n is a, c, g, or t
  misc_feature (210)..(210): n is a, c, g, or t
  misc_feature (215)..(215): n is a, c, g, or t
  misc_feature (218)..(218): n is a, c, g, or t
  misc_feature (226)..(227): n is a, c, g, or t
  misc_feature (230)..(231): n is a, c, g, or t
  misc_feature (237)..(237): n is a, c, g, or t
  misc_feature (241)..(241): n is a, c, g, or t
gagaatgagggtatcaagtggtgaaagatggatcaagggggataagagtgagttgaatgaataaagaaatcagagaagtccagttagagtaaaagagagaanataacagatcacaggatgtatctnagagtcaaacagaaaantgaanggagagaagtaagncataatctacagcaagagagagacatcagagganttcaganangatgncagtntancccacgtnnganngggcantctnagtggggtagagcaagggagtcacggta

SEQ ID NO: 692110 - DNA, 309 bp, Homo sapiens
  misc_feature (303)..(303): n is a, c, g, or t
ctggcgcactatatatagtaccgccaggaaagatgaaaaattataacctagcataatatagcaaggactaacccctataccttctgcattatgaattaatctagaaataactttgcaaggatagccaaagctaataccccctaaaccagaccagctacctaagaactgcttagagagcacacccgtctattttgcacaatagtgggaagatctataggtagaggcgacgaacctaccgagcctggccatagcttttttctctctttaatatcatagttcaactttaaatttgccatttgcctnaatgaa

SEQ ID NO: 692111 - DNA, 181 bp, Homo sapiens
gataacccccccacggcggggtggaggacccccatgcaatatatggctctacaaacctcagcatgttaagcgaagcctggtggagcttcacaaagggtccatagaagattagacaaaggcaaagaagcagcaacaccttttcgaaccctagggctcactatatttattcaaaggagtcggg

SEQ ID NO: 692112 - DNA, 203 bp, Homo sapiens
gtctgagcaagcggggataccggttctccaactctgaaaatggttctctcatggtaccatcttccttttttttttttcccggaaacagagtttggctcggtggcccgggtgggagtgcaggggggcaagaggtgggcccagggcaacctctgcttccagggtaacaagcatttttcgggtttcagcctccggagtagctggga

SEQ ID NO: 692113 - DNA, 941 bp, Homo sapiens
ataacatctattttggccgggcgcggtggctcacgcctataatcccagcacttgggaggccgaggagggtggatcacaaggtcaggagttcaagaccagcctggccaacatggtgaaacctcgtctttactgaaaatacaaaaattagctgggcatgctggcgggtctcctgtaataccagctactcgggtgggctgaggcagaagtcacttgtagacccggggaggtggaggtggcgcatgagccgattatcatgcccatagtgcttccagcgttggggtgaccagagcatgactgtatctacaaaaaaaataaaaattaaacaattaaaaaaatcgtgattttctactaccacttaccgtcattaggacaccatgtctgaaacaaaggccatcgctatagagtcagctgtcgagcattggtgtcacaggagaggattcatggcgttcggtttggaggaatgtggttaatacggacactaaacatagtctcgtattttcagtgcaacgtgtcacacatcatacagttctgggcgagaaaggaaagccaatctagagtaaacaccttaggccgggcgcagtggtcacactgtagtccaaacactgggaggcgaggcaggtggatcatctaggtcaggagttcaagaccagcttaacaaatggtgaaaaccccatcggtgccagagattacaaaattagcgggctgatgatgggggcacctgtaatgccagccctcagaagggcggcggagaattcttgaaccggaggcggagtgcgggacgcagaacggacctattatccactgggcacccatggatctgttccagaaaaacgagacacagatgcttccaacgacagagacactctgcggcacgggagaaccaaatccaggggcacgggcacgaaaggtccagaagcttgcaaaaacagcggacccaacag

SEQ ID NO: 692114 - DNA, 1045 bp, Homo sapiens
ggtgcggggctggaagtgggcgtgctgcgggacgcgctgcgggagtcgctgcggcggtgcgggacctggcctgagctggagtggcgccggggatcggggctcgtgtgcgtgtccccgatgcccggcggagcgggcttctggggtgtctgcgtgcaggcgccgtgggtgaacgggctgggtgatgtgggcgcctagccgtggcgtgtggccgggtgcctctagccatgtacgcgtgggctgcacggacctgagctgtggccaacgagcagaggacctgaagggagaccctgaccaacttgcacggagccgctcaaggccatcggagcagttccaggacagagaatgggtgtgctgctgccatctcttcaggtcaggccctccccttcgttggaccctgcacggggacgccgcggctggaggtaccaagcagtcggtaatcgagtgaggctgcgggacaagctgctggagacgaggtgtacagccattcgccttcggagggggaagggctgacggacaaggggtacagaggagagctgggaaagaccgttctggaggaacgagccttttctctggtgaaggattgccgatccccatggcaggcccgttggttgattgtgcgtacatgatagcgagccatgcaccaaagggttcccggaagaaaaaagagcgtgaagagcctggatcaattgggcgtgaaaaagggaagactgtagtcgtaggcgcattgcagcccggatggaatgtgttgagaggcgggacagacattcatggcagagagacaaaccagggggccatctatcagggggacgaagggttaaccgccgacgttcccatggaaaagcgaagtgacaaattccatgagaaagaaagtggaagacgtcgggcacgatcttacaagagatacaagaagcatcgtacttggatcgcatgcacagaggttaacacaagggcccgatcgcgaccaaggaacaagggcgcccagtggtggaaggttggagtgagcaagtaatgagggggggattggatggggaacaaaaaggtataa

SEQ ID NO: 692115 - DNA, 332 bp, Homo sapiens
tttaaggaaaaaaaaaaaaaaaaagcccgggccccgggatggggttttccagggggctgggggtttgggccgggcatcccccccaaccttgcctttatccccctggggccagaacaaaccaaagcctttgttgtttggtggcgaggcccctttttgaatggggtttttttcccggtttttagccctttccccccctgtaatggggggccttggccttgtttatttttttttcgggtcacttttgaggggttttttttaaatccattttagattgtttcggggggggggcccccccaaaaaaaaaaaaaaaaattaaaacccctggttttgca

SEQ ID NO: 692116 - DNA, 155 bp, Homo sapiens
agactatttctatcataaccaattcagtattggattctgtactctttcctcagtttggtttatctacttatgtacggcaactcccacactatctcatgaccacagctttatcatttgttttgatatatgattggtgtagttcatggtttttgcat

SEQ ID NO: 692117 - DNA, 809 bp, Homo sapiens
aaaagaatagtcatgaggctggatcttgatgtttattcaggacgagggcatagaggcgaagtgtgtactaggttgcatggagtcgaagacaagcgatgtttccttcccgccaggcaagtgcccttagaaaccgggccaccgcccccttcctggactgcattcccatcccctctcccggggcggaggtgaggacctccttggttcctatggttctgtcagatgagccccatatccattggccatgaagctcgatgaggaagaacatcgagaaggacaatgcgggccaggtgacccatggtccccgaggagcctgaggacatgtggacacacattacaaccatcgtgcaaggtgggcagacagcctgcgcgcctccaaccatccgcaaggtacagacagagtcctccacgggcagcgtgggcagcaaccgggtccgcaacataccctcactcatctgagatggaggccatcgacctatcgaaatctcaagcctgccagctgcaaggagttaaggggaccaacatccaagagaaatgagtatgtcaagatggggggctataccacaccatcgagctggagaccaaaccgcaagtacaaccatgggccaagaaagcaggggatagtgtggaactgggaggcgcatcgaagcagagcctggtgaccaagctggagcgctgatgtggcgagctgatggacatgcagagaaggcatcgcccaatactgccaaggcacaacccaaattgaccccatcgaggcaggtggggaacaccctcgccacgacggaagactcgatacggcatggacgtccaac

SEQ ID NO: 692118 - DNA, 247 bp, Homo sapiens
ggaaatacataacttgtcaggtttcacaggtttacagctggagaggaattttgctgtagggtgaatcatacctcgttcttacccatacctaatttagatgatatttagatgaaactttgaacattaggcattagagttgatgatggaatcagttaagaattttggggctgttgggatgtaatgatgcatttgcatgttatagggcatgaatttgaggagccagtgcagaatcttttgctgattgatt

SEQ ID NO: 692119 - DNA, 130 bp, Homo sapiens
cagcggaccatgacaataaggatatttgcattaatccctcgtctgacctcgcttctacaatcgccaacagaatcaaacgttgttccactaggtctaggttgtagctcgcattgattaaggcattgtcttt

SEQ ID NO: 692120 - DNA, 186 bp, Homo sapiens
tggtgctgtaaggaatactgccggccctgactacatcaccgacaagtccactggcttgagagtggaacagcagccctttgacggggcccgagcctctagaaccaatgacaagccaggaggcccacactatatactgcgctggacgttcgccgcaggtcatcatggagaacagcacctctaaagtga

SEQ ID NO: 692121 - DNA, 450 bp, Homo sapiens
  misc_feature (174)..(174): n is a, c, g, or t
  misc_feature (192)..(193): n is a, c, g, or t
  misc_feature (202)..(202): n is a, c, g, or t
  misc_feature (214)..(215): n is a, c, g, or t
  misc_feature (288)..(288): n is a, c, g, or t
  misc_feature (357)..(357): n is a, c, g, or t
  misc_feature (369)..(369): n is a, c, g, or t
  misc_feature (421)..(421): n is a, c, g, or t
tgaacaaatagttacattcttcattgtctgccgcagtgctgtccagaagagcttcccacgataatgggcatgttccatatcagcaccgtccaattcagtagcccctggctccatggggttttctctctttgtttttttctgtttgttttttttttaagacagagttctcactcnttttgccaaggctggagnntgcagtggntgtgatcttagnnctcacagcaaccctctgcccttcctgggtttaagcgattttcttctcgcctcacgcctccctgagtagctggngaactacaggcccatgccaccacccacgcgctggctaagtgtttaatataatatattttttgctttggnttttgttttggnttttgaagatgggagttcttgtttctgccacctccaaccctggggccaaccnaaaagcccaaccttcccatatccaaaaaa

SEQ ID NO: 692122 - DNA, 523 bp, Homo sapiens
  misc_feature (4)..(4): n is a, c, g, or t
  misc_feature (25)..(25): n is a, c, g, or t
  misc_feature (118)..(118): n is a, c, g, or t
  misc_feature (122)..(122): n is a, c, g, or t
  misc_feature (249)..(249): n is a, c, g, or t
  misc_feature (262)..(262): n is a, c, g, or t
gccncggagggaggcctcaaatacncgaagattaggattgctattgtgggctagcaattataacactatttcggtcactattatttggggccttttagtactaaaatttaaccgtgtnctantagaactgatttaccccagtaatgcgcttgatgatttcagcatcgtggcttggctatttttacaaaacagcattgattgaagcagtcttggttttactaggtagggtagcatttgctattggtaagngataatacattanttcacaatacttgttatagtaccccagttgttgttagtggggactatgatactgtaataatatttttaaaatttacatcaagagaggcagtcattcacgatggttttgtgccagctctttttagggttttggatcacattagagatatttagaacatattaccctgtgattacgtaggaaacctaatatgctgagtatctggcacttgaattcctgcttttattgctggaggtccacatctgtggttgacctctgttattg

SEQ ID NO: 692123 - DNA, 848 bp, Homo sapiens
agcggggtaaggggtgattcagccgaggggcgcggacagacagacctcgggtcagtgcccggtgaaccccgagaggagagcccagcccctgagtggaggcaggcttgtgcggagattcggaagccgtcagcagctcaggcagacgttccagtgatcccacgcaccattgcagaagaccaggcctgtggtaagccatgttcccaccagtccagaggggaaggtgctgggaatgcagatggctgagtaggtcagattgaggacattggcagcgcaagctctggtaaaagagtgacactctggatacatggtgagaaacgggcctgcaaccgtagcatgtggaactcaggtttgatattgcacggaacacgaaagtccgtataatttgggaggttctgggtgcctgcctgcagatggggatgctacatgaatgcttctcaggatgggctcagggatggggggtgtggacatttccgtgttactgagccagcttataggaacagcgaacgtatgccctttccctgcagcacatacacctctgaagccatgcgaggggctatgtgagagccaggacgtgtgtagaacagcacgctggggccccctttatgcgccaagaggggcatgctaaggtgcgtgttgggagcggacaagtgtgaggaaggcttacaggtcgctcaaggagccacgtgtagggagggcaggtaaatgatgccagaattggtaactggtcccgctggtgctcacagggggctgtggtccaagtggtggcgcacttattgaataattgtgccccagggcgatcagggcccagtggccagggaacctataaatactgcagcaagggaggatgc

SEQ ID NO: 692124 - DNA, 155 bp, Homo sapiens
tccccgcgcaagcaacatagtctcgttcttggactcctggcccctctcccttggactctgatgaagaattgctgactgtagctctggaagttcagctctcagaaccgctatcatattccagttctaggagaataaaatcccgttgattactatca

SEQ ID NO: 692125 - DNA, 215 bp, Homo sapiens
ggatctccttggagatttggtgaaatcagctcaattgtgtcacccagcctgcagtcccaagtcctcgtgactgcggatggaccaggaatgcggcttcacatacagacatctagttaggccaggcacggtggctcacactataatcccaacactctgggaggccaaggcataaggcttgcttgagcccggaaattgaagaccagcctggacaatac

SEQ ID NO: 692126 - DNA, 490 bp, Homo sapiens
gttgataaaggtcctcgcgagaccccgtgtgttgagagcgtctcacacaatccacccttgggtcgctttgctgtttgtgatattagacacacagttgcggtgggtgtcatcaaagcagtggacaagaaggctgctggagctggcaaggtctcccagtttgcccagaaaggtcagaagggtaaatgaatattatccctaaaacccgccccccccctttttaacacagggggaagaacggtgtcagaactgtttgtttcaattggccatttaaggttaggaggtaaaggctgggtaattataaccaaggcttggtaaaccctccaaaagaaaggaaaaaggtttgggggcccccttgggttttctttttggggggtggcagttttaagtaataagttttaaaaaccggactttttaaagggaaccacctggcccaaaaattggtcccagaattttgagacccattaaaaaagttaaatgagaaaaaaaaaaa

SEQ ID NO: 692127 - DNA, 167 bp, Homo sapiens
ggagagtgtatgggtgaccagagggagagctgataggtaaaagggagacgctcctggcttgggaagcaggagtcctaggttctggtctctcagatctactgggcagcgcgatcagaggatttatctcacactgtcctaagtgttgtcagccacacgataactgctta

SEQ ID NO: 692128 - DNA, 218 bp, Homo sapiens
agctaattcttgtatttttagtggagacaggactttgccatgttgggcaggctggtctcgaactcccgacctcaagcgatccgcccaccatggccttccaaagtgctgtgattacaggcgtgagccaccgtgcttggcattatagctaacgtatttgttaattatgttttctttttttttccttttttttttttggggaggggggcacgcatcctggt

SEQ ID NO: 692129 - DNA, 680 bp, Homo sapiens
aggcttccattcgtggtggctaaccgttgggtctgtggtcgggggacggaaaaagaggataccacgctcggcgtgaacgtaatgtgataggtggagccgcatcggcatgagggtgtcttcattggtctgaggaaaggaagatgtgcactggtgtcaccgagacgtagacctggtcctgtggggaattcagtttatggagagatgagagtagtcgtcgatgtatcggaaggagattgacaatgagttgatgtaccgaggccgtggaacgcccgttccggtccaagcgtagtagtgaagcataatcctgtggtggtgtggagccagatctcagcagttcaaaacgcggagggactagaggttgctcgtacgctctgggtggcgtgcctctgggctaccgagcggtgtactcccatgtgctcttgacactcgttggctcctgtgtagtggctcgtatgctcttactgtggatgtcggtaggttcttgcgcgcacccttgctctcggccgttgatgctccattaataccttggtgcacatatgcaaaaagaggactcgatacaatcgattgcgcgtgatggaatcctgcaaggggagattgcgtccgaaacaagtcgccattgaccaatagatgaaccccgggcaattgcattcgaatcggctagaatgggatgcgagtgtgac

SEQ ID NO: 692130 - DNA, 300 bp, Homo sapiens
caggtgctcggtgtgtcatgtgtctggtgggggatgggtggactgtatgatttccaagtgactctaccagatcagtggattctgatgtcatcgggtggaggtggtgtactatacctaaaggatgactgctccagaaacagaaccagcacagaatgtatttacttctcttctgaaagttcaggctatgtagacccctcccctcctttgcaaaggtctgggatagaggagtcagatgcagatctctactgtcaaatgagctccctgatatctcctgtcttccctactgatccaaaacctaaa

SEQ ID NO: 692131 - DNA, 145 bp, Homo sapiens
  misc_feature (18)..(18): n is a, c, g, or t
  misc_feature (29)..(30): n is a, c, g, or t
ggttcacttataataatntaaataaccgnntaaatttttctgggacaaggccagcattgggatttttttaaaacacgtaaatttcttatggatggcaactaaagggggttggtagcatttttatcatacaggggtaccgagctcg

SEQ ID NO: 692132 - DNA, 439 bp, Homo sapiens
gtgacgtcatatgctatcatctattcaacaaagaagacgttgtctgtgtgcagcaaatccaaaacagacttgggtgaaatatatggtgcgtctcctcagtcaaaaaagtcaagaacatagtaaaaactgtggctattactggaatggaataggacatagcccaagaacagaaagaaccttgcagaggttggaggtttcaatatgcacatcatggagggttaagtgcttatctaatattgtgcctcactggacttgtccaattaatgaagttgattcatattgcatcatagttagcttagtataagcatcacattagagtaaaactgtatttcatgtaatatatagctagataagtaaactgtgtatagctatttaatactaattttccataaagctatttaggtttaagtgcaaaagcataataaatttagggttgaag

SEQ ID NO: 692133 - DNA, 440 bp, Homo sapiens
ctcccattcaaggacacatcttttgctgagggtgggggagttgttcatgtgacaatttcttgtacacagggatgctatcccttcccaccgatgtctggggcaggtgaccatgtgacacacagacatacagccatcctcagacaaaagtaaataaataatatacctgggctggattctctctctctctctctctctctctcacacacacacacacacacacacagaggcttgagctggaagcggagacggcatctgattaaaatacagcacacatggataataaataaaaattcataactgcacaggtgacagcagcagcccaggccacgctcacttgctcacacttcttccactcataagcacctctgatcttttcctatgggcagaaatgggatgaggggacaatggacttgggggatgaggaggaaatttaattctag

SEQ ID NO: 692134 - DNA, 360 bp, Homo sapiens
ggcttatgcggcaggagaatgttttcatgttacttatactaacataagttcttctatagggtgatagattggtccaattgggtgtgcggagttcagttatatgtcagggatattttaggtagatgggtgttgagcttgaacgctttcttaattggtggctgcctttaggcctactatgggtgttaaatttttacactactctactacaagtgttttttgcctaagtgtccaacagagctgttccatctttggactaacagattaaatttacaagcgggatctagacgcggaactgtaaatgatgccgggtaaccgagcatcggaattcgctaatcattggtcctaacttgtttccctgtg

SEQ ID NO: 692135 - DNA, 368 bp, Homo sapiens
  misc_feature (209)..(209): n is a, c, g, or t
  misc_feature (214)..(214): n is a, c, g, or t
  misc_feature (288)..(288): n is a, c, g, or t
  misc_feature (348)..(348): n is a, c, g, or t
tgtttaaacaatatgaaatctgggcaccttgaaaaaagaacaagataacagcaacgttcagggaataagagagataaccttaaactctgactgccagtgagccaggtggaacagagtcatatttctcttctttcaaaagcaaatgggagaaatatcattgaattctttttctcagcatgggaacatccctgaggaaagagaatgcgcantaggnggtaggcctctggaactgggacccccgaggtgttagccgttcttcttatgggtcgaggcttgcagagatggaantaaactcccagtctccccgttagtgcttcccagggcttattaggggaaggagggaaattncccgccttaattaaattttt

SEQ ID NO: 692136 - DNA, 820 bp, Homo sapiens
  misc_feature (693)..(693): n is a, c, g, or t
ggccgccccgtgaaggcaaggcgtttgctcccgccttcttgggtcagccgacgcgggtcggttcagacaacccgggcccagccaagggcccccggggggataagacccgtttgtgcagcgtttcccaccgcggtggccccccataaaaaggccgcggcggggttaggagcccccccttccccgccgaggcggtatggccccccctgagggcgccgccccagatcagtgctttgtcttataagcagtccctccgccgctgtgcaacacacgcgggaacagccattcgtaggtgctttctacagttacagtaatttttttaaatctcgcgccaataaaagtatttcatcggccatcataaaacatagccaaccaattctttaattagctgtcacctctcctgcaaaccaaagtaatgttctcatcatcgcacgctcgctcactcccgcactgggttgaaccacaccaccacgtcttataaacagctgctcttcacgctcattattattcacccccataaagactatctaaccccctgcacctaggccccctaatttcctcatccgcagatggcgtttgggtgcactcacctaaggctggcgccccgcaactgggttttggcgcacccccccacgatgatcgcccccactcattgtatgagtaaagaaaacaacccacaggtggtctacacccacnatgagtagatcttgtctttgtgtatgaatctcgcgatatgacgccgacgcccagcggtggttcacacggcgaatacatgtccttgctgattctatagcaaggcgcaaccccccgcccacataacaca

SEQ ID NO: 692137 - DNA, 815 bp, Homo sapiens
  misc_feature (634)..(634): n is a, c, g, or t
  misc_feature (641)..(641): n is a, c, g, or t
gagcgcgccagcgccggtagccggacgccctaggcttccgagagatcttcggtggggcgtaccgggtgttttcacgccagagacgctgaatgccgtgtgggttctccgtctgcagacccttctggacgctggtcacgacttccatatatgtaaccacaacagtagtcagacagcggccatggacctttctccagccgatggacgcatgctggcaaggactggcgggctggacgccaaaccggcaaattttcatgtatgcaaatgccgttgggccaacgggaaaggtggagtgttttccccaacgtttcttgcccatgttgcccgggtcaactaaatttcttgagcagctcgcgggagcttcttcgtggctcccgaggacaattctcgctccggtcgttttcctctgccttctgcgggcgcggaggggcggtttttcctatcaaaattaagcgagcacctgtggcagggttccgtggttacaaaggacggaacaaggccatccccgtcgtcgaagtggcagacaatgtaacccagtcttgtgtaacgtagtgaagacacgagagttcttccagaagtgatccagttcttcttgagcctcagtgaagaaatgcctcctggaatactatgagacccnggttttngaatccgtgtcggtgtataagccagcatgcaaaaatcgggtgtgggacagggctggttgtatttcaacaggtttatcttaaatactcagtagtggattttcacccgaggtattagtgtcactggcctttgcgctgaaagataacgaacaggtctagcccagtggtgaccctggg

SEQ ID NO: 692138 - DNA, 176 bp, Homo sapiens
caagggagagagaataagacaaacaggactttgtataaaataattaagtatagactaaagagatattaagaatctcaattttgctctaagattgtctcagctaattataacaatccttgcagtctttcgtggaaatactgttgccgtattacaccttggtcctttcaagaggtagt

SEQ ID NO: 692139 - DNA, 170 bp, Homo sapiens
gaagacattatcaaaaaaaataataataataagacggagaaatcccactgaaggacatgaatctcctaaaagtacccagcaaaacgaacagttcaaagacccaaaccaaggcactttctcttgaaattttagaccatcaggaacaacaatagtaaaagcttccagagaga

SEQ ID NO: 692140 - DNA, 211 bp, Homo sapiens
gttgcagtgagctgagatcctgccactgtgcccaagaatgggcgacagaccgagatcccatctcaaaaaaaaaaaaaaaaaaaaaaaatttctaaacccaatttgttgtgtgcctacaattcaaaccaaagtaaaaattgccctgttcctaccttctctgggtgtgtaagggagtacacttgcctttcaaacaagggggggatctccttct

SEQ ID NO: 692141 - DNA, 209 bp, Homo sapiens
  misc_feature (2)..(2): n is a, c, g, or t
  misc_feature (4)..(4): n is a, c, g, or t
  misc_feature (9)..(9): n is a, c, g, or t
  misc_feature (13)..(13): n is a, c, g, or t
  misc_feature (64)..(64): n is a, c, g, or t
  misc_feature (92)..(92): n is a, c, g, or t
  misc_feature (128)..(128): n is a, c, g, or t
  misc_feature (131)..(131): n is a, c, g, or t
  misc_feature (140)..(140): n is a, c, g, or t
  misc_feature (175)..(175): n is a, c, g, or t
  misc_feature (189)..(189): n is a, c, g, or t
  misc_feature (200)..(200): n is a, c, g, or t
cntnaagtntccnttggatagctgtctgagtgaccacggaacaaagtcttaacaaaactcaggnggaccaatgttatgtcaacagaacgcanttttaatctggtactcacataatcagaccatatagncgnggcactttngaaccacaagctttgctcacaaaaagagctttctnggttgtaggcccanactagactttnagcatgcat

SEQ ID NO: 692142 - DNA, 246 bp, Homo sapiens
cagatggtgcgcagcatcctgtgatcctgttcctcaacaagcaagatctgctcgctgagtaaagtccttgctggggaaatcgaagattgaggactactttccagaatttgctcgctacactactcctgaggatgctagtcccgagcccggagaggacccacgcgtgacccggaccaagtacttcattcgagatgagttcctgaggatcagcactgcccgtgaggattggtgttcctacagctaccc

SEQ ID NO: 692143 - DNA, 260 bp, Homo sapiens
atccatccagcagtgagctgagattgcaccagttgcactccagcatgggcaacaagagggaaactctgtctcacaaaaaaaacaaaaaaattaagatttaccaaaagtggattagggtcaatacttttaaacttcaatgggtttgtttttatattaccaccaaatacctaaaaattttaaaaaacacctttgaattattttcataaatcctttcatgggtgcattccctatattatatgacatgtgccccttaacaagac

SEQ ID NO: 692144 - DNA, 204 bp, Homo sapiens
tgtccgagtagcttcgttctcggattacacaagacatttttaaataatcacatcatatcaagtatcttctcagaccacaatagaataaaacaaatccataacaagaggaacttagaaactatacaaatacatggaaattaaacaacatgcacctgagtgaccactggatcaatgaaaaaaagaagagataaatttcttgaaaca

SEQ ID NO: 692145 - DNA, 292 bp, Homo sapiens
ccaacggggactggaagtgaaaccctataagacactctctattaatgataaaattgccagaaatttcctaccctgcagcaactgtctgaaaagaaatgccaagtaagggaaaagaataataactgggccaaggtgaagcacattagtacagattccatgtgggctaaacagtaagatgcaaaaaggatgtcataagggagcaactctcggacgctgtgtagagaagcatacaaagtacttagtttttgaaaaaaaatcagaaagatgataaatggagcaaaaaggaaaacac

SEQ ID NO: 692146 - DNA, 902 bp, Homo sapiens
  misc_feature (457)..(457): n is a, c, g, or t
tgcaatagctcacacctgtaatcccagcactttgagaggacagtgcagatggatcacttgaggtcaggagttcaagactagcctggcgaacatggtgaaaccccgtctccactaaaaatacaaaaaatcagccgggcatggtggtgggtgcctgtagtcccagctactcaggaggctgaggcaggagaatggtgtgaacccaggaggcggagcttgcagtgagccgagatcgcgccactgtactctagcctgggtgacagagcaagactgtctcaaaaaaaaaaaaaagggaaaatttattttgcggttttagcctcaagctgattcaggagctattttttccaagaacccatcctcttctaaagggaacaagaacaacatttgatgacaaattctagttttaccttggattcagaatgaatccctaagctctgataggtttggcatgggatctttncagggctacaatcgcgggggcatgctctaataatacgggtctctggaaacaaattaactcagcctaatcctcactcatacttaattcttccctcatgggaatggtatggcgcaaatttacttgaccttatgaattgggcaagttggtaagggctaattttccccctttagaatggaggggctccgtagaagccacagggagtttggcctcggggtcacgcagggaactcagtttccccccaggggcccatttggtgtggaaggcaagtaagcaaccttagggcagtcttcaaggcacacttcttgtggcccccgcggctataagggctcttgaaacgaaaaaaccccaaattttcccattggggaggcaccctggggggggggcaacactccaattctctcgaagtggccactttacacaggtatagcccccaagaaaagagata

SEQ ID NO: 692147 - DNA, 1087 bp, Homo sapiens
  misc_feature (373)..(373): n is a, c, g, or t
ggtagtgtggcgcggctgtgtctcgcttggggggtttttctcctctttgtgcgaggtgtggaccgcgtggtaatgttgtgtgcgctcaagcgggtctcccgggtggttggacgtccagtctctggtggtgctcccatgttgtgggtcccttgtcgccgtgggctcctcgcggttttggggccccaccccgggcgagttaaggcgcccctgcgggggctcttcctggggtgaatggtttttggcggaatcgaggccatcgcgggatttgggccaaatggtcacccagcacgcgtaccattgttggaggggattcggagagatatggcgggcaaccactgccccgaagtcacccaacgacctgcgggagccagcngccagtttcggcacaatctcgtgacatcgaggagcacacgcgcacacagcactggatcatggatgaaccaggatcaacagctggagatggtttctgtgagcatcccaggttctgaagcacatgtccggccgcgttggagaagagctggacgaccagggcatcatgctggatgccttcgccccagagatggaccacacccagtcccgcatggacggggtcctccaggaaattggcccaagtatccccccactgacgagtgagcccccgaccacatggtgtgccactcgccgtgctagtgggggtgcttctcctcgttttcactcttactattctctctttgagccccagccctccctggcacggctggtcccttaagcctggggaagccacccacagcacctttggaggctggcctcgccccctaggaggaagagggtccctcctgggtagctggaaaataagagggtcccccctggggagctgtccccactggctctcccctagagccacgtgggacccttcaggaccctgggctggaaccaccacccacctggtcctgttctcaagtgcaccttagggggtggtggaggcacgggaacaccctgagacaccaccctgtctccactttccacgttccacggagcccccaagccactttgcccctgtgccttatacacgtgcccacctggaaataaaatgtcagccttttttata

SEQ ID NO: 692148 - DNA, 408 bp, Homo sapiens
gccataccaggccaactctagagtttcattctggaaggtgagaaaagatgagcactaagcggaagtgaggccaccagcctgccagctgcagaggctctggttacagaactgagcggcacatgccatctcggagctatcaaaggaactgatttctggaggtcaccttcgaaggtgctgggatggtggcagaggggaaagggagagaaaatggaaggcgttactaccattcctttcaagtagcacaagatgtgggcactttacaaaaataaggccttaagaatatcttcggccgggcgccgtggctcacacctgtaatcctagcactttgggaggccgaggcgagcagatcacttgaggtcaggagttcgaaaccagcctggccaatgtggtgaaaccctatctctacta

SEQ ID NO: 692149 - DNA, 143 bp, Homo sapiens
tacctcgggcccgtttctccccgattgtcactgtttcgagtatgaggctgctggtctcgtttcaccatgcatttcatgtgctgtctccttgtggcctgcctgtcttgagacggaaccttccctgtgctggctcctgttgttat

SEQ ID NO: 692150 - DNA, 781 bp, Homo sapiens
  misc_feature (450)..(450): n is a, c, g, or t
  misc_feature (705)..(705): n is a, c, g, or t
gagactgacgtgtgagctgcatcgcgggaggcgcatggggggatggcgctggcgcgggcctggaacagatgtcctggttctactaccagtacctgctgtcacgggctctacatgctggagccctgggagcggacggtgtcaattccatgctggttccattgtggggatggcactatacacaggatacgtcttcatgccccagcacaatcatggcgatattgcactactttggaaatcgtacaatgaccaagatgcgaccaggatcagaggttccttggggaaagacccaccctacgaagttggaatgagaccatcagatgtgataagaaactcttctagatgtcaaataaccaacttataaagactaaaattcatgagtagaaccaggaaaatcatcctgatcattgtgtggtgtcttaattttcaattttcaaagaggctcttgtatangcagttttgtctattttaacattgtacgtcatttggtacttggatatcagtattttcttaaccttgtgtgactgtttcaatattacccccgggaaagcttttcttaatgtaactttgagtacattttaattgggcttctatttttaaaactcaaaatcattagtggggcttaagtgtcttgctatggtatgggatatacatttgctggattttttctactcttgaccaagtttggaaggacatatagattcgggnagggatgggaggggagcatttctgggactcttcaaagttttgagtgactggggcagtaggtataaatctaggttga

SEQ ID NO: 692151 - DNA, 390 bp, Homo sapiens
aaactgcgatttttctgaacacaataaactattttgaagatcttgggtggaaaaaaaaaaaaaaggaaaaaaaaaaaaaaaacaaaaaagaacaccccccggaaaaaaaaaaaaaaaaaaaaaaaaaaaaaccttgccgcccgcctgggccaagccgactttagactcgagcaagctaatgcttgcgcccccaattcaagcccactgggccaattcgcccaaaagggagccgaataacaattaactggccgccgtttaacaacgccgggacgggaaaaaccctggcgtaaccaaactaaatcgccttgcagcaaacccccttttcgcacagtttggggggggccgcgggtataaaaaaaaaacatctttcccactcgccccccccccccg

SEQ ID NO: 692152 - DNA, 443 bp, Homo sapiens
ctttcaattcatacctctatagtgggcttcccttttcgtcttcgttatcgacatcaggtggctcggcaggcttctgttcctaggagctatcccagcagtacaaacgcacgcagactcccttgtagactgatcactggccgtcatcaaagagtgtctgcatggaaccacagggctggaagacccttgaaggcaggaatccaaggaaatgtatgatgaatattggcattgccatcaaaagcagaacaggcatggaaaacttgggtgagtgggcgagacaaactcctcaccacagcagagttccatccatgcctggataatgagggagggatattgtgtccactgcagtggggaaccatgaaggacacatcaagggtgtggttggactgtggtgctccttggaggaatgaataaaaataaatagagatcctatagcgtgtctgtac

SEQ ID NO: 692153 - DNA, 542 bp, Homo sapiens
  misc_feature (195)..(195): n is a, c, g, or t
  misc_feature (205)..(205): n is a, c, g, or t
  misc_feature (247)..(247): n is a, c, g, or t
  misc_feature (430)..(430): n is a, c, g, or t
  misc_feature (436)..(436): n is a, c, g, or t
  misc_feature (450)..(450): n is a, c, g, or t
cagaaccctgcgcaccctggcttagtggcagatgtggctacctgcagctgagctgccagttcctctgagtcctcaaagaccaggccattttcttcatgtttcaccagctcatgtaaactgcagagagaaccaagggagcctgagagctgcctggagaagacaccagacccctggggtgcccacctgggctccccncccaccccangctcaagccaggctgggggttggaacagggggtgtggtttcngggagctggttcttagatttggcatctgaagggtataaaggggggtgcacatcaaaatggccaaaccgatttgaggagggagccttaaggggggtttgtaccttctgtgctggatgctcttcaaggactgaagaattatttttgcatgtttttcttaattccatggccatggaacaagtaaangcaacnccctggggactggntcagcacataaaagatgacttttctaggacaccagatttgatcccgacattcccctgagctcagctcacacgaggggctcgcacccctgaat

SEQ ID NO: 692154 - DNA, 527 bp, Homo sapiens
  misc_feature (9)..(9): n is a, c, g, or t
cctcccggntgggatataataaaaagagaagatgtttctgaaaaagcataggacaccattataaagtagatctcatatgacccaccagtttaatattatctgcgggtatatgtgtggaaatgagagaaaaaacattcacacagaaacaaatatcccattattgcgaaatctttaatacaccataaaaggaaaatggggaacgccaaagggcccgggtcggaaattccgggggacacaataataaaaagatcgcgagacagaaaaaacactttttttttttttttttttttctctctctctctctctccttccttctccttccttccttccttttttcccggtttcggttttttccttccttggttggttttttttttttttggttctggccttttggttttttccttggttggtttttttttttttttttttcttttttttcgttttttggttcttggcctcctctctcttctctgtctctctctctctctctctctctctctctctctcccttctgtcgtcttctc

SEQ ID NO: 692155 - DNA, 272 bp, Homo sapiens
gcgggacaatcactatggggctgtaaggccgtatgatagcctaaactagtccagaagtctagagatagaaatgaagattgacacagaggtccagatgcattccgtaatgagaatagtaaaaggatacaacaactgctgcttaggatatcaccggaaggcgatagtagacccagcaagaaggaatagcagacaatacgcgtgaaagaaatatacgtataagtggcactcttaaaatggtgacatctacaatcatcagaagatcgcaacagcat

SEQ ID NO: 692156 - DNA, 453 bp, Homo sapiens
  misc_feature (55)..(55): n is a, c, g, or t
  misc_feature (252)..(252): n is a, c, g, or t
  misc_feature (400)..(400): n is a, c, g, or t
  misc_feature (426)..(426): n is a, c, g, or t
gtgggaggtgcctaaaaccacaacgctaatgttatgttaatggcattatagtganctgggtcaaattaaggacatttaggttgatttgttgcacctgtgcctaagttgagaccgtccctgctgagcaacatcctggcataagggcaagttcttaaccacatttcttcctgttagctgcagaggcggggtaggtgctgtcctgcagttgttcctgtgaacattgttcctttctgtcccttctccctagacccnccatctctatctgcctatccagcccctaactcctctctcagtgctttccctccagtacataccccatatttttaattttcaagtgtgcaattttcacattaataaattcgttaagaaagaatgccagggaatgattcagatagtcatnaacacactgcagctgagtccagactncggctactttcttccctcttctggttt

SEQ ID NO: 692157 - DNA, 323 bp, Homo sapiens
cccgaattaacctgactcatatagatccaccagacagcccagcctcccaaagtgctgggattacagagcatgagatcaccgtgcccagccagactagatatattatatatctaactatccttcaatttgggtttgtctgatattttctcatgattaaattcaggttatatatttatggcaagaacaccatagcacaatcatgttgtgctcatctcagtgccttatatcacgaaggtacactgatgtcaaacagtcttctttaacatcttgactgtaaaccactgatcacactcgttgatcatggtgtcatgccaacatttctt

SEQ ID NO: 692158 - DNA, 712 bp, Homo sapiens
gttcgcttctctgctgaacctctcatcgtcgaccgctgccagacgcacgccagctgccacaacatgtctacacggtccaatctgcatgccactgcgcactcaatcgaaagacttcatccagacacacgacactcaacgcaagattgacagcaggcggacactacatgcctgccgaaacacaagtccgaacgacgcatgcgaaggcgaaggacccagccacagaaaacacccgacacgaacataaacaaccaaccgcgggaccaaaacccaccctgcgacaacacgacacaactcatcaaaccgagcacagaagacgacacagcacacaaaagcctccaaagacaagaaacaaacaaaggcgagcgaaacaacactacagcacaaacgcagggaacaaaaacgaagaaaaaaagaaggaagacgagccaaactaaccacaaaacacacacacaacccccccaccaacgaagaagcgaccacagccgagcaaaacacaaccaggggacaccaacaaaaccaaacgcaccccagaaaaaaaaccttcctaacaaaaacacacgcgaccagcatacaaaaacgccaacaaaaaataccacaccaaaaaaacaaagacgaacaaacccacacaaagacaacaaaaccgcaccacacagagaaaacaacaagccacaccaccacaaggacaaaaagcccacacacaacacaaaaccaa

SEQ ID NO: 692159 - DNA, 269 bp, Homo sapiens
ggagctcggctacccctggtagactaactaaaagacacagaaagattacttccaaaaggtacagagaatttcaagtgttcaattcttgaaacatctccatttaacacctgacacataatccaaaggagagcaggctgaagtgcgggtaaaagaactagtcctgagtttactacagtcattgctatggtggcgcatggagactggttacactaaaatccactctcactgtggctgaacctttccatgataaaatggttaggtctacctgg

SEQ ID NO: 692160 - DNA, 176 bp, Homo sapiens
tttactatatattaaattatataaaatagagatggggtcttgccatgttgccaaggctggtctcaaactcctgggctcaagcgttcctcccatctcagcctcccaaagtgctgtaatcctggcctgtccagaagttgtttttttttttgaagtcagttaccagctttaaaaaaaaa

SEQ ID NO: 692161 - DNA, 427 bp, Homo sapiens
  misc_feature (28)..(28): n is a, c, g, or t
  misc_feature (55)..(55): n is a, c, g, or t
  misc_feature (78)..(78): n is a, c, g, or t
  misc_feature (140)..(140): n is a, c, g, or t
taaagcccccccctgaagtaaactgggnaacctaaaaggtgtgcggcccacccangcccccgacctaatttttgtaantttgaaagtaagaagaatggggaagtttcaccccatgttggcccccggctggtcctcgaaantccctgacccctggtgatttgccccgcccttggccctccccaaagtgcctgggattaacaggccgtgagtcacccacaccctggccccatggtgggggatatgttttaagacccccagttaatgcctgaaaccgctgctagtaccaaaccctaatgttttttcctgtatgtacgtacatatgataaagttcagtttataagttaggcacagtaagagactaacaacagctcacagcaaaatagagcaattataacaatatattgtaataaaaattatgtgaatgtga

SEQ ID NO: 692162 - DNA, 312 bp, Homo sapiens
tccacccgtcttggcctcccaaagtgctggaattacaggctctagccactgcgcccagtcttattttttaatattgccatatctgaaatacggactggaagatttctgcaccagtcctagcgtgtgtggatgtgcattgaaccctgttggtgaatttttcttgccttggagaaggaccctaaacagtttcctatatagctctcctgtctgcgcttggttgcattcctgtcgtctgtgattcccgcacatatcgtttggagcatcttcgtaaccctgacgtccagtcatcactatcagatgggtaccgagctc

SEQ ID NO: 692163 - DNA, 238 bp, Homo sapiens
  misc_feature (199)..(199): n is a, c, g, or t
gccaagtcatcatgacactttgtatgtggaaggattatgaccacatcatattccaccagaagactttgatggccctccggaaactttgctatgccccgggctctccagaacatatcctctttacttgcttcaaggcttttggcaaggtcatccctacttgaccgggaagtttaattgcattgcttcccgttccccattnccaacggttcaatggggacctcacctccctttagaaaac

SEQ ID NO: 692164 - DNA, 267 bp, Homo sapiens
ttttccgggtttttttccccccccggggccaaaaaaggggtttttaaaaaaatccccccccccaaaatttttttgggggctggggtttccccccgggggcccccccccccccggggggggggggtttttttttttttgggtttttttgggggggggggttttttcttttcccccccctttgggtttttttttttttttttttccccttccgggggtcccgggccaggggcccgttttttttttttttttggggggggggtttgttta

SEQ ID NO: 692165 - DNA, 707 bp, Homo sapiens
ggccactgcgcagaccagacttcgctcgtactcgtgcgcctcgcttcgctttctccgcacatttgacaaccgatatggctgaaacgaaatcgaatcgaaactgaagaagacagagacgcgagaaaatccactgccttccaaagaaacgattgaacaggagagcagcggcgaatcgtaatgaggcgtgcgccgcatatgcactgtacatccacaagcatgccttcttatttacttcttttagctgttaacttgtagatgcaagaggttggatcagttaatgactgtgctgcccctttcactcaaagaactactgacaacgaaggcccgcctgcctttcccatctgtctatctatctggctggcaggaaggaaagaacttgcatgtgtgaaggaagaagtggggtggaaaagtggggtgggacgagtgaactaagtaaaccaactggccggtgtcctgcgcttatcgttatcaagtgctttttttgtcatattatatgatccatttttattgcataagttaaattaaaaaaaagggcgccaaaattctcaggccgttacttccgttcgtcaggcctggagcattagtgagcggttacatcgagaacgctgctgagactctggtgcttgcacacatagcagatattaggtggaagtcgtgatgcgttgatgactattattgtagatctagagtcgcatcgcgaagcaccc

SEQ ID NO: 692166 - DNA, 431 bp, Homo sapiens
tagaggattccccgtcgggtagctgtgactaatgtggtgccaacttactaagctaataagatataagacatataattagtttacaaagttatgtattttcttctttgtgcatttatttaatcaaaataaaaaaagtttataatacacaccctagagagaaaagtggctacttacaccagtcaccaattccaaataagtaggtttttttccgtttttattgtttcttttcaacaactgtcatcactggtaattacctgcacacagtttttcagggaaagaaaccaaaattggaattggcaaaggaggcccaccaggatggccatatcataggaggatgttttccaggggcaagagggacagctacatcaaacttgctcctttattgtactttccctccacctttcttttccttaaactgttagacaaagcca

SEQ ID NO: 692167 - DNA, 814 bp, Homo sapiens
  misc_feature (2)..(2): n is a, c, g, or t
  misc_feature (69)..(69): n is a, c, g, or t
  misc_feature (73)..(73): n is a, c, g, or t
  misc_feature (75)..(76): n is a, c, g, or t
  misc_feature (79)..(79): n is a, c, g, or t
  misc_feature (91)..(91): n is a, c, g, or t
  misc_feature (103)..(103): n is a, c, g, or t
  misc_feature (108)..(108): n is a, c, g, or t
  misc_feature (112)..(112): n is a, c, g, or t
  misc_feature (116)..(116): n is a, c, g, or t
  misc_feature (138)..(138): n is a, c, g, or t
  misc_feature (165)..(165): n is a, c, g, or t
  misc_feature (208)..(208): n is a, c, g, or t
  misc_feature (210)..(210): n is a, c, g, or t
  misc_feature (239)..(239): n is a, c, g, or t
  misc_feature (382)..(382): n is a, c, g, or t
  misc_feature (429)..(429): n is a, c, g, or t
  misc_feature (462)..(462): n is a, c, g, or t
  misc_feature (517)..(517): n is a, c, g, or t
  misc_feature (534)..(534): n is a, c, g, or t
  misc_feature (621)..(621): n is a, c, g, or t
  misc_feature (635)..(635): n is a, c, g, or t
  misc_feature (654)..(654): n is a, c, g, or t
  misc_feature (674)..(675): n is a, c, g, or t
  misc_feature (687)..(687): n is a, c, g, or t
  misc_feature (723)..(723): n is a, c, g, or t
  misc_feature (731)..(731): n is a, c, g, or t
  misc_feature (740)..(740): n is a, c, g, or t
  misc_feature (787)..(787): n is a, c, g, or t
tngttatggatatcaataagtcaattttattgcagagtaacaagtattccatggtaatacataaacaanaatnannatnaaccacctaaanaaggataaaaanaaagnctanaagnttcccccattacaaataaagcngctatgaacattcgtatacaggttttngtgggatggggagggttcatttctctgggataaatgctcagangngcaattcctgaagcatgacatatacatgngtggttttacaagaaactgccaaattatattccagagtggctgtaccattttacattcccagcaatgtatgagatcctgtttctcttcatccttgccagcagttaccaccattaaaaaaaaaagttaagctattctgataggngatatctcacgattttactctgcatttccctcatgcctaatgatgtngaacatcttttcatttgcttatttgctatctanacttcagggaaatgtctgtcttttgcttattttctaattgtatttacttattacngttaaatttggaaagtnctttatggagtttacatacaaatcccttgttggatatgatttgcaaatattttttcccaacctgtaatatcatctttgtaaaaaggnctcttacggggggnattatcttaattttgatgnggtccaatttaacatttttnntccttctaaggngcatgcttttgaatcatctgagccttcttagctcantcctaggncctgaagtngttggtttactgcctatggatatccaattactccaacagtatttgcngaaaaggcgatccctcctccattaaaa

SEQ ID NO: 692168 - DNA, 394 bp, Homo sapiens
  misc_feature (320)..(320): n is a, c, g, or t
  misc_feature (322)..(322): n is a, c, g, or t
aggaagtgggtccttgcctatcctcacgggtggccagagatggaaagaaaatcccatcctataagtggaccccataaacttcaaacctgtgatgcctcaagggtcaactctgtaataaaaaatgtgcgtgtatgcgcatgttctcactcataggtgggaactgaacaatgagaacacatggacacagggtggggaacatcacacaccggggactgcccgggggtcagggaagcggggagggatagcattaggagatatacctaacgcaaatggcaagttaacgggtgtagcacaccaacatgtatacatatgtaacaagncnctacgttgtgcacatgtactctataacttaaagtaaaataataataaaaaataaataaataaataaaaaaaa

SEQ ID NO: 692169 - DNA, 139 bp, Homo sapiens
ggcgacgagtgtggtgagcagcggagtgttatatgtatgttcaaactgtcattgtatctgtacgctgttcgatatggcgagtcgtgagattgaggtggagtagattaggcgtaggcagaagtagaggttaaggagggcg

SEQ ID NO: 692170 - DNA, 371 bp, Homo sapiens
  misc_feature (37)..(37): n is a, c, g, or t
tcaggggctctaagatagtaccgtgtctctttgtgcnctgcacctctgggcgccctgcctgctctcttgaaactggttcctgactgtgacttaattacaagtattaaaataaaattaacagtatacaaggtaatacctcataggaagtttagattacattcatactattgtttcatcttgctataaaaagttactttaaactatttcttttgtatataaatgaaaaaagatatgaatatttggtcaactggttatattgctaggcacagacgtcttcaactgcaaagtatataatatagagattatgttcttacccactactcatctggatgcacggggagcctcgctggggtcataatggtaagcctttg

SEQ ID NO: 692171 - DNA, 158 bp, Homo sapiens
ttagaggtctgtgtggagagggtctaggaaagtgcaggcagggagagagggcgaattccatccactggggagctctggggggccttgttgtggaggcccttgtatgtgaaagccgcaggaatacttgttacggttgtgtcacggtgaattggttaccc

SEQ ID NO: 692172 - DNA, 124 bp, Homo sapiens
gtagttgtatgtgtgctattgatgtgatacctatagattatatgactgtgatgatgtgatggtggtatggtgtgatgacagtggtatgggatgggatgatggtatggtagggtacgagctcgaa

SEQ ID NO: 692173 - DNA, 563 bp, Homo sapiens
  misc_feature (236)..(236): n is a, c, g, or t
agctcccaacacttcatcgtcacccccactgctgtccagggtgccaatgtccatatgatcatgggactctccaagctcaatctccaggccaggtttctcctacaactcagactgaaggtccaactccctactaacacctgcaaggaacggcttaatgagaaaaccaactttccagcccaggctcctgcctctctctcccttaccataagcacatcagtcttatctaggttcctggnggatatcacacccaaaatttcccacttcagggcctttgcatgtgctgtcctctcagcatgggagactctgtcccccaatttgtctcaaagctagctgcctctcacattccaaagattagctgaagtgagttagaaaagtcaaaggggagagatatatacacctattgtgtacccacaacattttaaagtaaaaaataaaaacaaagggaagataaaccagaaaaagggacatcaaaaagaggtgaagagcctctttcagtgaacagtgaacagtgtcggcaactgcaggggcaaggagaagccaagagcagggcagagagaggccat

SEQ ID NO: 692174 - DNA, 522 bp, Homo sapiens
gaattcctatgatcatagtgctggtcaagtcaatcatcgggccgagatctatcgtacaggtcagtagtgaacgtgcaaggcgctactcaacaccggcctacgtatgagttaatggaaaatccagatttcgagggcaaggtagatgatctctatcctctacagtcagacctgtcagtctgctctctgggccatggagcgtctacaacaaagatgtgcatgtgtgagggcctttgcatgtgctgtcctctcagcatgggagactctgtcccccaatttgtctcaaagctagctgcctctcacattccaaagattagctgaagtgagttagaaaagtcaaaggggagagatatatacacctattgtgtacccacaacattttaaagtaaaaaataaaaacaaagggaagataaaccagaaaaagggacatcaaaaagaggtgaagagcctctttcagtgaacagtgaacagtgtcggcaactgcaggggcaaggagaagccaagagcagggcagagagaggccat

SEQ ID NO: 692175 - DNA, 145 bp, Homo sapiens
ggacttcggaatcaccacggatacaattgagatattctggtatccacatcatcacagctgtccatgatgacacacacggcggacataagagttagcatgtatgtctttgtacttcttgttctcaacaaaggtcaaatgggagccc

SEQ ID NO: 692176 - DNA, 172 bp, Homo sapiens
gtgaaatacgttgaagcctgactctacaaacaatgatgctccgtagatgccgacagaaatgcccaatggagacgcgatgtactctgatgctagtatgagggtaaaatagagacctattaaactattgataaccaatgctagaaatatctgggatccgatgaatactattaga

SEQ ID NO: 692177 - DNA, 321 bp, Homo sapiens
  misc_feature (281)..(281): n is a, c, g, or t
  misc_feature (298)..(298): n is a, c, g, or t
  misc_feature (318)..(318): n is a, c, g, or t
caaaatagtggcatttaactcatatatgaccttcctttaggaaggcttgactggtaagggaaaaactcctccagtgaacacgtgcacaacttcagtaaaaacactgcacatgcgtcccctcccaagtgctggcaggccactgtgcatgcagacagcccgccccaaagaaaaatcagaggaggagaaatgggaaaccccgggaacaatgccaatgtattaaaaccccaagttcaagggcctaccaagggcaattgggatctctcaagttcacccgcttgggntctctttcaagtggcanttttgctttcctttttgttnttt

SEQ ID NO: 692178 - DNA, 222 bp, Homo sapiens
acgatctctgcaggatcccccttcgttatttgcaaacggcttctctgctgttccccgtgtgggtgtggctaggctactgcgtcttgaagcgtgcattgctgcgtgctctatgcttgtcccttttcgactcgtggtgatttacgcgtgtgaactcactggaacgggtatgcttgcctttgtaatcttactaatagctaatagaaaggctaggaccaaacctat

SEQ ID NO: 692179 - DNA, 404 bp, Homo sapiens
  misc_feature (194)..(194): n is a, c, g, or t
gagcccaccgcaacctggtggaaccacattgatcttgagcaaagttgttttactcctcgatttgtcccatattaaagagtaaagtgagttaggccaggtgcggtggctcatgcttgtggttccaacactttgggaggctgaggcaggaagattgcttgagcctgggagttcgagaccagcttgggcaacatagngagaccgccccccctaccccgccccacctcccgctccccggctccatctctacaaaaaataagaaaattagctgggtgttgtggtgcatgcctgtagtctcagctactcaggaggctgaggcgggaggatcacatgagccgaggagtttgagattacagtgaactatgattgcagcctgggcaacacagcaagaccctgtctctataaaa

SEQ ID NO: 692180 - DNA, 355 bp, Homo sapiens
ccccgtctgtgggaaaacatttaaaaatgaaggccgggcgcggtcgtcacgcctgtcatcccagcacttccggaggccggggagggcggatcacctgaggtcgggagttcgaaaccagcccgatcgacatggagaagccccgtctccactaaaaatacgaaatcagccagacgtggcagcgcatgcccgcaatcccggctactcaggaggccgatgcaggagaatcgcttgaaaccgggaggcagaggttgcggtgagccaagatcgcgccaccgcactgcagtctaggccacgagagtgaaactctgtctcgggggaaaaaaaaacaattaaaaacggtgtgggcacatgtggc

SEQ ID NO: 692181 - DNA, 210 bp, Homo sapiens
ctgaactcgtcactggcaacatgatcagacttcggtcgctcgcgtaagctgctccagcaactgggtgggaagattccggatcagcagagttttattttctgcatcaaattcaagcttattcccgagcaagtgctgctcaaagctaatagacaacccctcgaaacggccgctgaatcgttggatctgttcagaccttttgctgctggtccg

SEQ ID NO: 692182 - DNA, 329 bp, Homo sapiens
agagatgcagaactctacagagaaacatcttcagtgggtgactgtttgagggatagttcctactaaggtcgctggaaagggctcccagaggaattggcgttgaggtgaaggttgatatgaagccagtaccaggatggtctgcggtgagatgcaggctgagagagcagctacgtgcaatgctgattgccgactacagtggctggcttcagggcaatgatgaatagagtgaaggtgtcagggcctcagtagagtgagacccgggagagtgggaggtgatggggccttgttcgccacagatttaactccgtacttcatgaatgggacgttaa

SEQ ID NO: 692183 - DNA, 361 bp, Homo sapiens
acgtgatgcagaagggctctcgtgcgacttcctcaaacacagatttgatgccaggatctccatcacccgagtcacagccgaactctccctggcaaagcgatctgtgctcaacaattccgggcaagaggaccatcattgagcgctccactggcagctccagcattgcggaagtgcagagtgagatcgagcgcatatttaagctggccaaatccctgctgctagtagtgttggacgctgacaccatcaaccacccagcacagttggcccagagacctcacatggcccccaacatcgtctttgtcaaagtttcctcaccaaaggtactccagcgtctcattcgctcccgtggtaattcacatat

SEQ ID NO: 692184 - DNA, 849 bp, Homo sapiens
  misc_feature (41)..(41): n is a, c, g, or t
  misc_feature (70)..(70): n is a, c, g, or t
  misc_feature (74)..(74): n is a, c, g, or t
  misc_feature (86)..(86): n is a, c, g, or t
  misc_feature (92)..(92): n is a, c, g, or t
  misc_feature (132)..(132): n is a, c, g, or t
  misc_feature (155)..(155): n is a, c, g, or t
  misc_feature (157)..(157): n is a, c, g, or t
  misc_feature (172)..(172): n is a, c, g, or t
  misc_feature (176)..(176): n is a, c, g, or t
  misc_feature (196)..(196): n is a, c, g, or t
  misc_feature (219)..(219): n is a, c, g, or t
  misc_feature (239)..(239): n is a, c, g, or t
  misc_feature (241)..(241): n is a, c, g, or t
  misc_feature (263)..(263): n is a, c, g, or t
  misc_feature (268)..(268): n is a, c, g, or t
  misc_feature (277)..(278): n is a, c, g, or t
  misc_feature (284)..(284): n is a, c, g, or t
  misc_feature (293)..(294): n is a, c, g, or t
  misc_feature (300)..(300): n is a, c, g, or t
  misc_feature (331)..(331): n is a, c, g, or t
  misc_feature (338)..(338): n is a, c, g, or t
  misc_feature (349)..(349): n is a, c, g, or t
  misc_feature (357)..(357): n is a, c, g, or t
  misc_feature (361)..(361): n is a, c, g, or t
  misc_feature (404)..(404): n is a, c, g, or t
  misc_feature (410)..(410): n is a, c, g, or t
  misc_feature (416)..(416): n is a, c, g, or t
  misc_feature (444)..(444): n is a, c, g, or t
  misc_feature (461)..(461): n is a, c, g, or t
  misc_feature (482)..(482): n is a, c, g, or t
  misc_feature (485)..(485): n is a, c, g, or t
  misc_feature (489)..(489): n is a, c, g, or t
  misc_feature (503)..(504): n is a, c, g, or t
  misc_feature (507)..(507): n is a, c, g, or t
  misc_feature (511)..(511): n is a, c, g, or t
  misc_feature (523)..(523): n is a, c, g, or t
  misc_feature (536)..(537): n is a, c, g, or t
  misc_feature (547)..(547): n is a, c, g, or t
  misc_feature (554)..(554): n is a, c, g, or t
  misc_feature (564)..(564): n is a, c, g, or t
  misc_feature (573)..(573): n is a, c, g, or t
  misc_feature (600)..(600): n is a, c, g, or t
  misc_feature (619)..(619): n is a, c, g, or t
  misc_feature (621)..(621): n is a, c, g, or t
  misc_feature (623)..(623): n is a, c, g, or t
  misc_feature (637)..(637): n is a, c, g, or t
  misc_feature (641)..(641): n is a, c, g, or t
  misc_feature (643)..(643): n is a, c, g, or t
  misc_feature (649)..(649): n is a, c, g, or t
  misc_feature (653)..(653): n is a, c, g, or t
  misc_feature (658)..(659): n is a, c, g, or t
  misc_feature (661)..(661): n is a, c, g, or t
  misc_feature (670)..(672): n is a, c, g, or t
  misc_feature (674)..(674): n is a, c, g, or t
  misc_feature (676)..(676): n is a, c, g, or t
  misc_feature (679)..(679): n is a, c, g, or t
  misc_feature (684)..(684): n is a, c, g, or t
  misc_feature (690)..(690): n is a, c, g, or t
  misc_feature (693)..(693): n is a, c, g, or t
  misc_feature (696)..(696): n is a, c, g, or t
  misc_feature (698)..(698): n is a, c, g, or t
  misc_feature (700)..(700): n is a, c, g, or t
  misc_feature (729)..(729): n is a, c, g, or t
  misc_feature (788)..(788): n is a, c, g, or t
  misc_feature (848)..(848): n is a, c, g, or t
tggggagagggggtgaaaaaaataaggattaaaatgtaaantaaagaaaataggatgaaaaaggattttnaaanttttgaaaaaanataaanagtatgaaatgggaaaaaaaaaaataaaaaaaaaaaatantaaaataaaaagagaaggaaaananaaatgtgtaaaaaanagtnaaaaagatgaaaaaaaattnagtaaatggaaaataaaaaaaanattaaaaggaataggatggnanaagtagagataaagaatgtaanaaaanaaatttagnnaaaagnaaaagggannattgantagaaaaaaggtggtaaaagataaaatgganatgtaanaaaaaaaaatnaaataaanaatnaggtaaaaaaaaaaaaaaatgatttaaaaaaaaaaaaaaaaanaataanggatanaaaattaaatagaataaaaataaaaatnaaaaaaagtataaaaangataaaaaaaaaaaaaaaaanaanaaanaaaatataaaaaanngantatnaaaaaaaaaaanaaaaaaaaaaatnnaaaaattatngtataangatgggaggnaggaaaaangtaaaaatagtgtattataaaatattntaagaagaataaagatttngnanaaataaatttgagntaangntagatntgcngcccnncngaatttgtnnnantnttnagganagagtnagntgnantntttatttaattaatagtatttgtaagggntaggaaaagagtgggaaagtgggatggagaattaattttggggaggatggttatgaagntgaaaatgtgtggaatagggggaatagagagtgtaaaatgtatattaaaaaaattgagtna

SEQ ID NO: 692185 - DNA, 680 bp, Homo sapiens
  misc_feature (32)..(32): n is a, c, g, or t
  misc_feature (473)..(473): n is a, c, g, or t
ccccgcgtccgttttttaaattttgtaggcantattttcaccccatagaatttaaaagggggccggtaggagaaacacagctcgtttggaaggggaaggtctcctttaatagatttttaagaacacgcaagggtttggaaatagaaccctaggccccctccccagtgtgggtggggttagaattaaaaacagtgtgggtgcagtagcataaagggccctaaaaattccccttgccccgtaggggatggtgaaaccatccccaaaggtgttgccccttgacctctagtggggaggttttaaaaaactgggcccttcatgagaaattccaaattccaaaggattttcccttttggggtatcagcataaactggaatggagggtccaaggaaaccggggcctggtttggttatgttttttttttttattccaaaaaaaagacccagggaaaaccttttgtagttcctcaaaaaacnggcctttttccccccaaaaccaaaggggaagtttttttttttttatgggccccctccccggggctcctggatttaaaaagggatggggatggtaaaaactctttttttatccaaagtttccagccctttttttttttttatgccttgtttgttttttacaaaaaaaaaaagtttttttgattgaataaagccaaaaaccccggggga

SEQ ID NO: 692186 - DNA, 138 bp, Homo sapiens
agagatccgaaaaaacctcccgacattctctcctcgctgaacactgtacacgataaagagtagaactgcagaagttgtatgtttgttgaacctatgttatgattggcatgacttatgcatcggttgacaacatgaaac

SEQ ID NO: 692187 - DNA, 223 bp, Homo sapiens
cattttcccctgcgcatcctctcgatgctgcccaaggagttgctgcagttctggaccctcatctggactgggatctcccacggggcctccatggcttcagtccccacctggccctgacgcacgccagcccttcttaccccaccccggacctgccgtgcacggacgcaacggtctgcccgacccactgtcactgctctacccccacgggtcgactctcagcttc

SEQ ID NO: 692188 - DNA, 872 bp, Homo sapiens
cctgacagagtgtgttgcccctatgacccaataggcaacgcaatggccccaaaaaaaacgcggtaaaaagcgctgacagtatagaaccctccgaaagggagcccgccccctcaagacgtagctgcttggaaggccagcgtgcaccaaggggtggccccttcaaactatatgagaggggttcaaaacagcgaaaatcaccgcgacatggaaacaaattaataacggcggggagaagttctaccccgtggttgggagccccacgccaggatcaccccagtcatggccggcaatgggtcacaaattcctttgcaaagccacggggtagaagaataataagggtggccgacgatgataaagtttggccccccctattgcccccttcttactttagtttccccccgagatcaaaaatgggtgtgcggtgaatgttatcttgcaagcatcttttactgtgggcttacagtgcgtgaaatattcatacgacgttcttgccagacccctttgcctccttatgtacacaacgtacaagaaaggggacccactccctgttgaccaagatcgtggcaccgacgctgaacccgtcacaatggactctgagtagtgatgattctccaaactcagtacctcctagctatagcgtacacatatttacggcggtgtgtcatcagccgccccacttctgaggaaccacaagactgttgagagcctgtacttctacatgggacgagtatgtcatttcgcccacacataaaaaagagggtcacagcagaccggcaagaaaacaccccacaagtttcctggaaaataatatgcagtgtccaccacccaagaaaaaaactttaaaaaaaaaaccccaacattataacaaaaca

SEQ ID NO: 692189 - DNA, 570 bp, Homo sapiens
  misc_feature (9)..(10): n is a, c, g, or t
  misc_feature (75)..(75): n is a, c, g, or t
  misc_feature (422)..(422): n is a, c, g, or t
  misc_feature (461)..(461): n is a, c, g, or t
  misc_feature (481)..(481): n is a, c, g, or t
  misc_feature (519)..(519): n is a, c, g, or t
  misc_feature (525)..(525): n is a, c, g, or t
  misc_feature (546)..(546): n is a, c, g, or t
  misc_feature (562)..(562): n is a, c, g, or t
tgagagagnnagagtcttgctctatggcccaggttagagtgaagtggtgtgatctcagctcactgcaacctctgnctaccgggttcaaacaattctcctgcctcagcctcctgagtagctgggactacagttgctcgccaccatgcccagctaatttttgtattttcagtagagacgggatttcaccacattgaccaggcgaactcctgacctcaagtgatccgcccgcctcagcctcccaaagtgctgggattacaggtgtgagccaccacacctggccatcatcccctacaacttttacgttgctaaattaaatgttctttaactttgattccctctactcatgcagcaaatttactccacagacgctcatgaagtgccaactatatgccagtgaccccatccattctcttaccttcccnaatgtgattacccatattcttccaggtcgacgcgggcgnaatttagtagtagtagtganccggaattccgaccggtactgcagcgtaacagtttccnatgtgntcgtattgagttggggtaacngggcaagcggttccgngtgaatgt

SEQ ID NO: 692190 - DNA, 241 bp, Homo sapiens
aacacaaaagcggtggttaccgctggaatatgagaaaaatcatttcgggtttagtggttacatataagtataagaggatgtacatgtacttaaactggcttttgtatatatgtataaatgctggtgatggcgaaagtagtcttgtttggtgaggatgtctgcattaaagcagtaaaataagcttcctattttattcataatctaatgtatgtgtatatatgtatgtgtccgcttttgtgtt

SEQ ID NO: 692191 - DNA, 2001 bp, Homo sapiens
  misc_feature (65)..(65): n is a, c, g, or t
  misc_feature (67)..(67): n is a, c, g, or t
  misc_feature (74)..(74): n is a, c, g, or t
  misc_feature (79)..(79): n is a, c, g, or t
  misc_feature (90)..(90): n is a, c, g, or t
  misc_feature (97)..(97): n is a, c, g, or t
  misc_feature (101)..(101): n is a, c, g, or t
  misc_feature (958)..(958): n is a, c, g, or t
  misc_feature (1221)..(1221): n is a, c, g, or t
  misc_feature (1446)..(1446): n is a, c, g, or t
gaggcaataggacatatgaaagaaggtgaagaagaaaagacaaagacctacagtgcttatttggncnaataaancgatncagaagaaagncattganttcntaaatgacataaaggacttaaaaatcgaccagaaaacacctttgcgcgtccttcaccgaagcccctggctgtgcgagctcgcgtcattcacttcatggagacacagtacgtggatgagcaccacttccgcctccacttgaaaactcaggctggcacctacattaaagagtttgtacatggagacttcgggagaaccaagccaaacattgggtccctgatgaatgtgactgcagacattctggagctggatgttgagtctgtagatgttgactggccacctgctctggatgactagctttcaaatttggagacaaagagtatggttttcctggcatgatgtggacatccatggagcacatgccgtaaaatggctgtttacccaccataacggtgtcttgaaaactatttggatcatgttgatctatataattgttaatttgttgtaacatctcaggatctatatatgtgtatattttgtgttaaattgttccaaggatgtcttaggatttttctcattccctctttcacccccacaaaccaaactatgaataatgaaataattctccttaattctttcatttagagaggtgcacaaacaggacacattctctgttaacctaagaagctgtaatttcagcaagatttccctccacaagagatataccacctttaaaatcatgttctaatttttgtaaattatctgaataaaagttatatctagatttatgcagcataatatcctataatagtctaagattgcaaatgcaaatctgacatcattattttccccaggaagcctcaaacaagctattaccatgaagttcttttggctgtgatttgtcataaatcttaaccanactatgaataatgaaataattctcattaatactttcattaagaaagaattttgacaatctaaaattgtcaatataggtttcctgtggagggaaagtaaaaccgtaggagccaaggcatgccatggtaggagcctttcataaaatcttttaaataaggagaaacaagtgcctttaataacttcaatcccagggttaagaatttgaaaaattgagattgctaaacaaagacgaactggtattatttcagaatgcttcaatatatnatccaattataaacattttaataataccttattaaagtagataggatattgtctccattttataaatatggaaaccaaagactagaagttaaatgacttatccaaaattgttagctacttctatattgaggactagaactgaagtttcttggtttctagggtctttctaataagccctattactgagcacctgtttgtgtgaaggggcagctatggatgccattnaaactcatgtaactgataattaacttttggaatgtagttaccaaatcaaagagcttaccaaaaaatagcccaagactatttaatacaatcttatatagttaccatttgttattaagttaaacctcagttggtattatgaagaggaaaaacattaagctaaacctaaaaaaaaatgaatgggtcactttaagtttcagaaaggagcctcattacaatttcagatatgagtataatttccatccaccctaattcaataatttgagctatatatacgaaatacatgtgactttgactaatatcagaattcctaaaacattttcccatctcatatattaaacataaattcacagaataccaagaattcacctttagatatgacagaaaaggtttaaatggacacaaaaggagtatgccaagatgagaaccaaaaagttaaatacacaagttgaaaacaagtgagaagatatgcaaataatagcaaaataatattcatactagaaatgcacagacatttaaaggccaaaaatagaaaaacgaataaaatttgaataaaag

SEQ ID NO: 692192 - DNA, 899 bp, Homo sapiens
cagctttgtagccgctgtgtccaccgggttcgcgagactataggtcggggctctatataggccctggtttggtccccgctccgcgttgtcgggtgttttcccgggcgcacggcgaaaaaatggggtgttgaccacaaacatggctgttggctacccctttagtctgggaaacttgtcaccgttgtatggtcccgcccactattggggggtgcgcaccactcaccgcgcgtttttttccctggcatatcccacggcacctctttttttttgggtggcccccccctacaccccagtctgtgccatctatggtctgtccgcaagtcatccgggtccgccacaccaactacgtccgtatctcttggtgaattggaacccctccctgcagagcccccacgcggggcgtttccaaaaccgctgctacgtaacaattgcgggagataatcacggtgtctgatctcccccctatggggtgtttcttcctatacgcaccagtgctacacgcacactcagtcgaagattaggcccctgttgccgagaagcggttcccagcactttttcggccacagttcgccaccctatgcactcgtctctttaagcaaagtctgcgggtggcccccctccctgttatgttgtttccaccacaggtactcccccggcattcttgtgctccaccgcggggtattaacctcgagcgcttcttcacaaagggcgctgcttcttcaatgctgaggttccccctggaagcccaaagcaatcaggccatcagagcagcccgtaatggtgtgatgtctattatcatatagaaatggggcgggactggcagtcgtcagagtacaggttgaccttctatgcgtttcacttgggggggaatacaacccctgaaactgctcctcattaca

SEQ ID NO: 692193 - DNA, 262 bp, Homo sapiens
  misc_feature (114)..(114): n is a, c, g, or t
gatctgaggatccggcgagatgcatactgaaattactgatatgcgatctatgggcaggtcagttgctacaatagagactaattatcacatgctactacggtccatagtcaaggntgcgtataagcaccctagttcccaagtatagtttagttccctctcccccacaccactgatgtgttccatgttatcttcagttacaatgcaactaaaggaaaccacacaactgagtcagatataccaaagaatcaagtttgcacttttt

SEQ ID NO: 692194 - DNA, 1800 bp, Homo sapiens
  misc_feature (330)..(330): n is a, c, g, or t
gatctcagctctcgcttagtctttcgtctctcgtggtttcggtctgcgtctgtctcatctcattcttgtcacgtcatctgctataccatcttcatctcctagtcgctgtttgttcatgcatctcgtgtgtggtcggtggggtgtctgggttgtgccagcgcacctgctgttgtgtgttgtcgtcacccagttgtgtgtctgtctttgtgcgttccttgctccggctgtggcgagctctcatccgtgttgtgtgtggtgtggggagggcacccccgacggtgagaggttgcgcgtccgttcctacctttgaatcatcagttctttgctagntctgcttcgtctcgtcttgtctttggtgtgggaggcttggtcgtctcacctttcatctgttctagccactgcaatgtggcgatgtttcttttattgactcagattcgttctgtctgctttgtgttatgtctaccactgtctgttaggtgggctgagaccaatccttcgttgttacgttgtgtggtgggtgtctcgcttatgcactatgtttcgtcctcctgctcttgttagtctgtgtctgcgtggttgtgtttcgctatgctcgtttgctggcctttttgtcttcttgctctgtgtgtttttgtttcttttccgtcctcttttgtaagtttcatctctcgtgctctttgtttgttgtatgtgttcttcttttctgtgtgtcttttgtctgcatcctgcttgggttttggtcttcgtacttccttctgcttcttgtgtggctgctgtacttccgattgtgttgttgtgtcttggtgtgttctatgtcgactatgcgtgtgcgttctagtcccttttcgtcatgctagtcgagcttcgtacgcttgttttgtttttgttttgcttctactgtgctcgtcagcgttggtgtgttttgctgctgctgtcttcgtcccctctcttgtgttttgtttttactctctcctctgctcctcagctcgttgttttacacacgggcggggggtgtgttttttacagatatggttggtgtgcctgggtggttgtgtcttctgtttgctcaacatcacttttcttcttcttatggcaccccacgggtgtggtgttgggtgtgttttgttcttttcatcgcggcgctctcttctcttcacgggttgttgtgttttcactctacagagtgtgttgttatgtctgctttctctctctctctctctgggtgttatttctctttgcccactgtgttgacaccacactttgttttgcactctctctctctttttgtttttctctcacgggagagtctctctctctggcgcgccttggtgagtgagcaccgagaggtgcctttgtttcttcacggcctcgtgtgtttgctctctctctgtgttgggttgtcttttttctctgggcggcgacgcccgcccgccgcactcttctctcgtcactcgttctcgtcttctgtttttctccacgcgggtgttgtttgttcacactctctctctctctccccagcctctgtcctcctcgcctgttgtggaaatatattgaagggcccgcggtgtgtcaccacgctgccgtcagtttcatgccactagtattcacccgttttcttggggggcgtgggtgcgcccaataattctcgttgttttcccggtccccgctgaagcggtcgtgctggtgctccgacctgtattttctctcctctgacgtctcccctcttggggcgccctaattcctctttccttatataaaactactgcaaaattaataataaataaaagaagaaaataaaaa

SEQ ID NO: 692195 - DNA, 180 bp, Homo sapiens
gccaccgtgctagtcctggctttgcaataatgctggattaaaaaatgactcttaagggaaactacatgtctttactcaatatattctttctttcctctcggcaattattaattaaccatgagtatttttagggggccagaagagtgtaatgggcgttgagaagcttgggtgccgatgcct

SEQ ID NO: 692196 - DNA, 456 bp, Homo sapiens
  misc_feature (89)..(89): n is a, c, g, or t
  misc_feature (236)..(236): n is a, c, g, or t
  misc_feature (304)..(304): n is a, c, g, or t
  misc_feature (385)..(385): n is a, c, g, or t
  misc_feature (450)..(450): n is a, c, g, or t
  misc_feature (452)..(452): n is a, c, g, or t
  misc_feature (455)..(455): n is a, c, g, or t
aaatattcaatttgtatgttgccaaatatatatcccctatgtgacctaatgttcctaatccaagatatagaatatcttgtcatcccaanaaagttccccttgtgcctaatttaagaatgatcttttaaaaatagaaatcaaattacccagccagatgtggtgactcacaactgtaatcccagcactttgggaggctgaggctggaggattgctggagccctggagttcaagaccancctgggcaacacagggagactcccatctctacggaaaaaaaaaaaagaaaagaaaagaaacaaaaaanccaggcatggtgcaaatgcctgtgttctcaattacttgggaagctgaggtgggaggatcactttggcccaggaggttgagntgcagcgagccaagattacaccactgcactctatcctgggcaatagagtgaggcactgtcttaananaana

SEQ ID NO: 692197 - DNA, 931 bp, Homo sapiens
gcggagcatgtagcggatgctggcggcggggctcccggggcgggccgggcggtggccgcgggagccgcacgcggcgatatggactgaggagggctaagaagggcaaaaagcctggaattgtctcgccatttaaacgagtattcctaaaaggtgaaaagagtagagataagaaagcccatgagaaggtgacagtagaggcgccctctgcacactgtggtgttgtccattgcctgaacgcgtcgagccaaacgagactgttgacgcagactatattgagaacggaggtaaagtatttaggtcagttaacgtccataccaaggatacctgaatccctccagtaggacatgaaatcctgcatttcatagactaatgcaaaaagagagcccaccagcttccagggacagatagacgtcaggagcacgatgctgtgctcaaactgtgctgcgtacaaccgtcaatggctggcactgggagggacggggaggatatcatcctcagggtgtccatccatgacatcgacgccgatctcctatgttcgggatgacagctgtgagcacctggatggtcctgaaagacaggccaggaatccaggaatctgccccagacagagactgtgtgcggaaaagttccagaggcctcaaggtgtaagcatcctgtcggcagagtgcagttggggaccccgtggaacggcatgctgcctgggtccttcctggttgcagagaagccggtcgctggggaggagccttggctggtctgctaggcgcagtcctcccgcggtggttaccgggagtccaccattcatttccgggacgagcgctattggtggggcttaacccggacaccactttccctgcaggagaacctctcggtggcctcgggcctcagggcgcgcgtctggccgaggaggggggggcccccactttcggcgccc

SEQ ID NO: 692198 - DNA, 311 bp, Homo sapiens
taaacatcactcaaggacttaacctcctcttctggggaagaggttagtgtgattttagttgaatgcaggataattgtactatgtcaggcagaattatgaccttgttattgtctttatttggagattaagtacgatttaggaagatgtgtatgggtgtcaagttgacaacagtggacctgtgatggttcattttatgtgtcaacttgactggatcactgggtgcccagacatttggacaaacgttattttgttgtatctgtgagggtgtttccagatgagaataaaatttgaattgatagactgagtaatac

SEQ ID NO: 692199 - DNA, 709 bp, Homo sapiens
gagcggagtgtacgggtgcaagctctgcaagaccttggccgagtgacttctgctgctcttttgcctgtgggtgactctacatggcactggaccagcaacatgacgagacgcatggacgttctggcacaacccaacaacaagctggcttcagagcaacattggggcaatatgcctttccatactcttacctgggcactttatacggaacggaggccttgggctccacacttctcatatacagatggaactaccaacgcggacatccgttgaccaacacgttaacgcccaaacggtataagctacacaagggggcgtcaaacgctacattacctgggccttggcactttcttccagttttttaagttatatggccccagaatctgtcacaggttccccccttggcacaggtatcatacggacagcaaagttatcccctgggtatatacttccaacttgtaaaaagacgttgtccccagtagacagaacacccccggaaagggggcaccttccaaaacacccggaggacccgtataagctcccgcttaacaagagtggcttcataaaacccacatgtgccccggtaaataacccggtccgggtctcttaaggtgcccctaaaaccttatggatggtcccccaatacacacgtaataagcatgtggaaccaggttggattggcgcaatggggatcaggtaacttcgttcccca

SEQ ID NO: 692200 - DNA, 1259 bp, Homo sapiens
  misc_feature (327)..(327): n is a, c, g, or t
gaaactcctcgtgcagtatctcatcaggactgtcgacagcgttctccccgttttttcgaatggatcagagcatgttgccttcattaagcggtacagcagcttcccatgatcggaggatactgtagccatctttagtatacctcgttaccatgtgggccttaatcacgtgtggtacccttggatctcgagtagcctattagagatccctcttctgcgggagcgatgtaactctgagatgaaagatgattcatagtagtgcagcaagtagtgaaccaaggggggatcatctcgtgtcgattagatcgtgcgcatacacgcatggtattncttaaagtcactcgaagtaacacgtctctgtagagaaatatcgtgcgttctgagctgtcagactttcatgccctatgaaggaagagtgataacggtatcccacagatgaagggttaatggttgaagttagaccttattgacatagagtttgcaatatttaggcattcttactaggcgaagtagtggtgagtggcacttgagatggctctggtcgtattgggtaattcccttctcatagaatacttactccagcgttgcctccgacctaaaggatgaaacatccttggattgtagacgtaactaatctgtgagcgtgatcagtgattcacttggagatctatgggcgttttcaagttaatatcgacgaaagtatggctcaagcgcgggtccactacgagtactccgaagcgtggggtggagttccctaggggcaagtagctcgaaggtagcaaggtgagatttcgtaattttccccagaaaacatctatagtacaccaagaaggtggtgtgggtttcacacataaaaccgtccagtttatcccataacacggttattttggatcgccatagttactccgcgttggttcattgtgaacatcgtccacaattctgaaaaaaatccctttgaagtaagggaactaaaatgaggccctgtggcattggcccaaagggtttttcgccctacgtggaagggggtccatagagagccccggaggtatctttaacaaaagacctcgcaaagagccctaaaatttacgtaattctccaataagaagcgatcgtccatggtgtaagccaaaagaaactctcctatacagccgagcatagtgggaatatagctgggggccgatggcgcctaggggcactgtatgtgtatgggaacagctgtaacaggccggggaacagcatggacctaacatgtagaaccctgt

SEQ ID NO: 692201 - DNA, 1574 bp, Homo sapiens
gtgagcttaagtgaagaggtactgccttgttcggtggaaatcagccgtagccatgagtttctgccggtggctagccctagagtacgtgagcaggcgtgacttttctggttcccctgcccctgccatgtgtgtgctgtgtggcctactatgtgcctcctgtggcatcccctggtctcaatgtagtgcctcatcttgccgtgcaatgtgtgctgcccgaaacgcggtgaggctgccatgtctgctgtgttgcttactgccagacagctgatgagatgctgagccgtgatgacggctgatgccctgatgcctggagtgaacgacggaggctggttgtgctccatacaatcatggtgcccagactttagtgtgggcattgttcgcattctcgtcaccttgcgccccaaaaggtgtcccgggccatttgcctgtgcccttcctgtgcacacacattcaagagtggcttgtgctagccaggcaccttattaacacaagcagaaccggctagcatgatagaccaaccaaagggcacagacgaaagaccaagagaagtgaggaccagagcacaggaaggaaacagtcggcccacacacgcaagcgaacccacgacacgtccaagtgaaacgagaccacaacacagtaaacgcaagagtaaacaaaagaggagcagagacaacaccgaaccaaacaacggcagggaaagcaggacacgaagagcagaagacacccaagacgagaaaagagagaaaaaaaaagaggacagaccacaaaacgagaggcgcggccagcaggaaccacacacgacagcagacccagagaaaaggagaagacgcagaggatccaccccagcagcaccgaacccagaagggggcacgcagaaacaggaccgacacgagacaagaggacgaacaagaagcacgggagcgccaaacagcctcccaagacaagagacgcaccagaccgccaacgagatgaccaacagaggggacgagaaggcccacacccccgacagggagacaccagcaagagcaagccacagacggaaaccacccaaggaacaaggacgcgcacagcgacacaccagaggccacacgaagcccactcgcccgcacgcagccaaccacacacagccccacacacacactccaccgacacgcgagcccgaccagcacgcgaccacccagccgacgcacaggccccgagcgacaaggagggcccgacaccgcaccggcagaggcggccgcgcaccacacccccaggcgagggaagcacgcgacagccgcagtggcccgcaccacgagccacagaaccgacaagaccagcgcagagcagagaccgaaggaaagccagaggacaccaccgccgacagccaacagacacacacgacacaccgaaagagccgcgccgcagcggcgcccgcacgcccacaccagagcgagagacacacaggggtcacaccaagcaagacgacagaagcacggcacaccagcgacacagcgagagggccacacgcagagcagacacaccgagaggcacctacacagaccgcagcacgacacagagcagcagcacagaca

SEQ ID NO: 692202 - DNA, 605 bp, Homo sapiens
tagtagggctctgacaccataaccgacctccataatgaccacgtcagctgcgggcatagcaggagccgcgataaggtagactggttggataagcccatccgtcccatcattgggctaccataagcgccagcagttggccctgctgtagaattcaaaaaaagttctacatagctgtgatcgtaagcacccgcactagtacctgcagtagaatctaagaagagctccacatatctgtgtaggatattagctttgtctttggccatagctgccagagtatcttcatgagtagctgattcaacatctgcctcaccggtaactctgccatcgggtccaagtccaatatgtactctcatgggattcagaggtgagaagacattataaatatcattctcaggggctctgtacggtaaccccctcatgtgtacacagtgccctgtggtgctctggaaactggagccaccatctccgtatctatgatcagacattcctgaaaaacagtaattgaggtcacttccaaatctatcagacccaaaggcatatccatcattatagccaccatagtcatcataggctccataggctccaacatagggaccaagcctcat

SEQ ID NO: 692203 - DNA, 332 bp, Homo sapiens
tttttttttgatggagttttgctcttgttgcccaggctggagtgcaatggtgggatctcggctcaccacaacctccacctcccaggttcaagcgattctcctgcttcagcctcccgagtacctgggactacaggcatgcaccaccatgcccggctacttttgtatttttagtagagacaaggtttctccatgttggtcaggctagtctcaaactccataccccaggtgatccacccaccttggcctcccgaagtgctgggattacaggcataagtcaccgcgtccggctgaaaaaaaaatattcttaatccataacacttgatcagaaatta

SEQ ID NO: 692204 - DNA, 247 bp, Homo sapiens
tctgtccacatcacacaggcccgtccaaaggatcacgtatcatacacaagggagggaccagacaacactgcacttaattcaaatcaaaacaagaagttcggacactctacgctatgtgcctagttaaaggcaactaggagcaatcagaaacaacttacctaccaaccttcccctccaccaagtgatggctgctcattatgtcacattctaaaataataaatacaaagctatacatatcaaatctttg

SEQ ID NO: 692205 - DNA, 228 bp, Homo sapiens
gatttgcatggcttgcatttgttcagatgtcggtgtgcctaagttaatactgagcgctgcactaatgcgtgtgaaactttctgcttcaaagggattatcaatcatggcaggtgaggcgcccgcagccaataaaacgttggctgcataattggcagcaacactgttggtgatacattgcaccaaaggttgttgcgtttgcagggcagtccaagcttctgcaacatatgc

SEQ ID NO: 692206 - DNA, 176 bp, Homo sapiens
  misc_feature (69)..(69): n is a, c, g, or t
  misc_feature (95)..(95): n is a, c, g, or t
  misc_feature (100)..(100): n is a, c, g, or t
gctgaccagcacatgcggttgcagacagcgccttacgaaggcggcaaaagggagccagagaagtggttnatccattttctagaaagattggtatnatgtnaaagacctcctatgttaattagaaatattggaagccgttcgtcaaccaggacccaggaaccaaattgcatctatgg

SEQ ID NO: 692207 - DNA, 923 bp, Homo sapiens
gttcgcctataagacaccttggcttggctacctggagtgacgtacgagaagattagcgccgacctagtgttgcgacccacccaatgtgtgcccgcccaccgggtcgtccagacgcctcattttgttgggcgcccggtgcaacacagatatgcacgtgtgtaaaaaggggtaaaaacggttggtaaaactggcgagacgcctttttttcacacaaagggctgttttgccacagggaaaaagttggggaggttccagcaaagttgctgcgcgcgacccaccacagcaatttagggggacaagacacaccgaaagggggggaaaccacggcggcctctgtttaaccggaggccctagaaggacccactctcttcaaagggggtaagagagtccccccaaatatggccgcttcaaaagaagctggatgccccatttgttgcccccccccgcccccacgattggtaaattatgggatttaattgagggaaacccctggttgcataagacacccaggcgggtagtaacccccctcctgcaaggtgatattttcggcaggctcaatcgtgaggttggaacaaattttcttgttacacgcaacgaccacacgggcaaagaaccgctttttaggctttgacactaatatggaaacgctcatttccaggaacagtccttaaacagtgtgtctttcttcgtgggcacattcgccccaactaagggtaatttcacacagtcccccggtggtgtgtgtaaactgaccaaccccccacgtatatgtctccaccagccccctgtctggaacaaaaaatctgaacccgctgtctcccttgaccgcgcaggttccgcgtatttcattttttgtctgcggggcgatcagaataagttagtggaatcccacgccccaaaaacaccaaatttccccaacataa

SEQ ID NO: 692208 - DNA, 257 bp, Homo sapiens
ttttttttttgagagtctgaatgagcatttattaggaaagatttatggggtgaagacttagccaataagagtgtgatttttcagagactctaaacaatcaataggtacaatcagagaaagggagaaaaatcaataggtacaatcagagaaagggggaaaaaatacctacaaaagggccagatgcagtggcgtgcacccataatccagccttcggacgctgaggtaggaggttgcttgaggcaggagtcgacgcagcc

SEQ ID NO: 692209 - DNA, 596 bp, Homo sapiens
gccgggcacggtggctcatgcctgtaatcctagcactttgggaggccaagtcgggcggattacttaaggtcaggagttcgagagcagcctggccaacactgcaaaaccccgcctctactaaaaatacaaaaattagctggatgtggtataacctggctactccagaggctgaggtatgagacgcacttgattccgggaggcggaagttgcagtgagctgagatcacaccactgcactccagcctaggcgacagaaaaaaaaaaaaaaaaaaaaaaaaaacacccataaaaatagaagaaaaaagaaagataaaaaaaaaaaaaaaaaaaaaaaggaaaaaaaaaaaaaaaaaaaaaaggtaaagtaccacaggtgtcatttgaaactgaggcctgaatgatgaaaaaaaaaaaaaaaaaaaaaaaaaaaaaaaaaaaaaaaaatttaaaaaattaaaaaaaaaaaaaaaaaaaaaaatgcgcccgaatttggggttaattggcccatttgcccttatggggggcggttacaattcaatggcccgcggtttaacacggtgggactggggcccttggggtcccaattttccctttggg

SEQ ID NO: 692210 - DNA, 313 bp, Homo sapiens
tgcagctgggtggctcgtgtcatctgtgcaggtggctcttcctccacatcacgactggggcctcgaagaggacgggggtaggaaatcctccaggcatcttagcgaaatttcactccgacttctccatgctcaacggctctctttggctcggcagggctgttcttctcctgcgctctccgcttttcttcagcctggcccttatcgaagctggcgatttcccccatgtctggtttgtctgccattttcttaaaacaactccgtgcagtctcgctccgagcccgagcatcctggcgctcccgctcgctctgccaaa

SEQ ID NO: 692211 - DNA, 676 bp, Homo sapiens
  misc_feature (531)..(531): n is a, c, g, or t
  misc_feature (645)..(645): n is a, c, g, or t
ttttttttatatataaaatctttattacaggcagtattggtccatacactaacacaataccaacagtacaggtttaatctttcaaaatcatcatttaaacagcaaaagaccaagaaataaaatttgagtcaattatttttcaaaatattctcaatgcacattatccttaattcccttattatagtgaaacatacaaatacagaaaaataacccatttaacaaatactagtgttaaatggttatttggcttaaaatctgagttaagaaaatcctttttagcaacctacatacagataagtagcaaactttattatattaaacaaattcattctgctaaaacatgtaaagaatttcatccatccatgttattctgatcccagtacaagttgtttattctcttaccgtcacgaatccttatatgaaggaccaactccaaagagtttgtccctagaatataacccttatcctccttcccccaacacacttccatcccaaaagttctgttccaacagaatggcaaccgggttagcnagtccacttccacccatcctgaatgcccagtggttcccgttgagaaccgtttggccaagccctgttgaaaacagccccaatttccctacctactggtggggtttggctgctccngggaaggaaacgaatatacgccccaataccc

SEQ ID NO: 692212 - DNA, 237 bp, Homo sapiens
cccggggcctggggcccccccccaattttttttcccgttccaaaaaggggggggggggggggtcccctttttgtttccacttcaggggggggggggggggaaattttccccccccctttaaaaatagacccctggggaaaattttttttttccaattttccccccggggggggggggggtttattaaaggggaaaattccctaaattttggggcccaaaaaaaggggggccctggga

SEQ ID NO: 692213 - DNA, 591 bp, Homo sapiens
agttgaaatgtgttgttataatttttattgagagttgttttgtggctatcatatggtctttcttggagaatgttccatgtgctgatgaaaagaatgtatattctgcagttgttgggtagaatgttctgtaaatatgtgttaagtccatttgttctagggtatagtgtaagtccattgtttctttgttgcctttctgtcttgatgacctgtctagtgttgaagtccccgctgttactgtgtagctgtgtatctcatttcttacgttgagtactaattgttttataaatttgggagctcccgtgctaggtgcatatatatttaggattgtgatattttcctgttggactgatccttttatcattatgtaatgtccctttttgtctttttcgactattgttgctttaaagtctgttttgtctgatataagaatagctatttctgctcgcttagggttagtatttgcatggaatatcttttttcacccctttaccctcaacttatgtgagtccatatgtgttagcagatattaggttggtggattcgtatccattctgcattctgtatctttaagtggagcattagactattaca

SEQ ID NO: 692214 - DNA, 108 bp, Homo sapiens
  misc_feature (80)..(80): n is a, c, g, or t
aaataaatgagtattctcataagcaagacgccgtctcaaaaaaaaaaaaaaaaaaaagaaagaaagaaagtgcttctgcntccagcctgggcaacaagagtgaaattc

SEQ ID NO: 692215 - DNA, 881 bp, Homo sapiens
  misc_feature (881)..(881): n is a, c, g, or t
gacttagtatataaatacatcgttcagaaactatatggatttccctataagattcctgctgttgttgtggaaaaggcatgcagtatttattccagcagggtgggcataatgatcaagcaacacataggcaatattcacatgaaacattttcaaacattaaaagccagcacagcatcaattttgaagcacatcatcaactaaaaccacctgttcgaacagttttgtacatgagaaggacaattatcggcagcaagatgatcagagtagtttcttagtgaagctacagtccccttttagcaaagcaaccaccaactgcagctggaaggcctgtggatgcctcaccaagagtcccaggaggctccccacgaacaccaaatagatctgtatcatctaatgttgccagcgtgtcacccattcctgctgggtcaaacaaaaattgatccaaacatgaaagctggagctacaagtgaaggcgtactggccaaatttcttcaacagtctgtagacgtaaacaagactggctctccagagaagccctggtgtgagtggtagtagccctgcaggtggggctggaggtggcaagcagtggtataccagcatccagcataacacgtctgggccagcaagccctgtacttaagaatgtacattgccagaaacttacgaacagacatttacacggacaatccaagttaacacggataactatccacaacaacaccctaccaatcttccctaacgggaaagggacgacagcctttctttgaacgaattacccaacaataacaggccactcactcctggatatcctagaggcagtacatgttaaccatgcccttccggactgtgatcccttccaacaagtgcggacacttcagaccn

SEQ ID NO: 692216 - DNA, 2243 bp, Homo sapiens
  misc_feature (526)..(526): n is a, c, g, or t
  misc_feature (909)..(909): n is a, c, g, or t
atagttgtgttgagtgtgcattcgtgctcgttgttacagcagttgagtgtgtgttgttccgtacgcgtggggtggacatgtgatcagtgatcttgcactcggtgttcaatggtggagtctgtcgtcagcgtccgacgagctgacaaatcaagtgtgttacactagtggtaactaagaacgggtgtgtggcatcaagtggtggttagacaatacacgagtgtgtgcgtcattgtaatttcttcgtgcggggtctcacaccaatagtaatgaggttcagtcaataggtgtggtggtgacaccaagaggtgacccacaacaatagggtgggtgaacatatattcgctcgtgttttgatgaccgctacatcaaacatatgtgtgttcgacctcgtcggtgcgattagtaagactggcgtctgcctacaacactagtcggtctgttgcgtctggcatgggtgatctaatcaaaccatctatgtgggttgggtgtgtgcccccccccagcatacaatccactgcaggtgggngcatgttgaataatcaagtatctactgtcatgtctgatttgtggccagaatacgagtgatgattccatatcaatcatccgtctcgtgtggtttatgaataccatcatccgtgggccagcaactgtgtaggttgttagatcaacaaaccacattgccggtgggtcggaggtgggaccatccacacatcgtagggagtacgacaagagggatgttccactccatctgtgtgtggaggcaacagacacaatagctggtggagatggagagagacgatctggtcgtataccaacatgggtgagtgtagactagagacacaacaataacgggggtggtcaccccaccatcattgtgtttggtggtgggtacactccactacacgagtngcacaacacaatcgtggtgctccgccgcgtgagtgtgggttggaatgagaggtaatatttgttagctagctagagagtgttcttgggtatgcctaacactcttgagttgtggctgtccgcttgtcacctcagggtggtgggtgtgccctcccacacgtcggtcgcgtcctgcagcataacagtgaggtgtattgcttttgatagcaacaacacggctccatcactcctgtgcctacgcgtggtgtgtgtcccacacaaaaaaagatgtggttgtgggattggtacggatgtgtggctgtacatccagcagaatgtagagagccgagcgggggtgttggcactaccaacaagcggtgtgtgttgggtgaagtatgaatagtgtggtgttcgttgtataaatacaaacaatagtagctgctgcgggtggaatgagtacatccaacaacaaccccccgcctgtgggggggggatcacgcactctccaactaagcagtgtgggttgttctcgtgcactacaagtggtatgacgacgcaaacactacagttgttgttgtcactcctccaccacacataaaagtggtggtgtagataacaaccccacacccacagtgtggcgcccaacagtaggtgtgtgttctcgtgtagcattatcacactgggggtgtcgtcagctctacagatacggcggtggtgttctacacgtgggtcacggctgtgggtgacaccacaccactgttctacctccagagagatgagcagcgggagagaagaatacggcgtgtgtgtgtgatgcgatgtgtgtgtgtgtgaggagagaggtcccacacagagagagagcgcacacacagtgtgctccacaacaggagacccccctgctgtgcgtcacgacgtgtgtgatcatcacacacacacacaacagcagagagatagagaaatagtggtggtgctgagtaccctcacacaccccaatagacccgctgcgcgctgagagggtgtgtgtgtgtggcacgtgtgtgtgtggatgaatgtgagagcaacacacgtgtgtgtgagagcacacacacgccgtgagacacacccgctgtgtggtgtgatacacacagcgagagataggtgtgtgtgggtgcgactgtgtctggtgacacacagccctcagagaacacacacacacacgtgtgtgtgggggcaccccacacgggcgtgggcctacactgtgtggacgtgcaccgtggcgacagtgtctcttaaagtgtgcgagatgtgtgtgtcacacccttgtctcacacacgagaagtgttaaaagtggtgtaggttcctccccaaataaataaata

SEQ ID NO: 692217 - DNA, 1035 bp, Homo sapiens
  misc_feature (167)..(167): n is a, c, g, or t
  misc_feature (194)..(194): n is a, c, g, or t
  misc_feature (347)..(347): n is a, c, g, or t
  misc_feature (361)..(361): n is a, c, g, or t
  misc_feature (393)..(393): n is a, c, g, or t
  misc_feature (399)..(399): n is a, c, g, or t
  misc_feature (447)..(447): n is a, c, g, or t
cggaaataaacccaataggagcatcatcgcttggggccaatgtaacaaattgctccatggttttaatccagaggatatcttgctagcctctacgggtgtatgttaaagaatgcgtgctgcttagatgggaaactaagtttagtcgttcctgtttcacgggaaccagntgatcttctgacatgattgaccaatgntgatgaaacacactacattttccatcatcatttggtgtgatcgaatgtgcattgactggatcatctgattgtgaatcttgcttgtgtgtaactatagaaaagtagggactaccagtagtgaccagaggtcacgggataggaatcaacggtccntgataagctccgcnagtcgactctttgtgacaaggcatagagggcntgggcngggaaatccacgcatggaaaggacgggagtagaattcaaatggatcgnacgaccttgagacctaagcaagtggcatggaagacgcacatcatcatccgtacctcgtgaaaaatggacaagattcttagcctaggcgcagttgggtgtgccagcagtcacgtgaagtattcctgaaactcactactgggtaggtgctaaaagggcgaggtaagacctccatatgtgaaatccccgagcgacaggcaaagatgggtttgataggggagagagcttggattgttcggacaatccacttggggaacatcccataatgcttgggggcaaaccgggggaggcctaaaaacattgcgtgcgtccacttggatagcagaaaaaacaatactagcatcgaagggcgggggtgggccctggatactccgcaatttgcggacccctatataagcttaaaggttcggtgatttcaccagtactcacttgtgggccgatagagtattttaacaagcaggatttgtgtaagccttgggggtgaccccagtggaggagttttcccctcctatattataatacgtgcccttgtgtgagaggaatatgttcgcccccttatttggggtcggaggtcggcggtcgtatagctac

SEQ ID NO: 692218 - DNA, 304 bp, Homo sapiens
ctcgtacctggtactcactatcgatccggaaagcaaaggctttcgcatatcaccctgcgttcaccgctctacgtgcgcggcacctttaagtcgccgaatgcgggcgtgaaggcggggccgctgattgcccgcggcgcggtagcggcagcgctggcgaccctggtgacgccggccgccgcgctgctggcgctgatctcacccgccgaaggcgaggcgaaccagtgtcgggcaattctgtcgcagatgaaaaaatagtcggcaaggagacgcccctcgccggatggccaggggcgtggagggagag

SEQ ID NO: 692219 - DNA, 1957 bp, Homo sapiens
actggtgctgcaagtcgctgagctgacagttgtgccgaggactgtcaccattgggcaggcatggtggccagctcctcacttggctgaggtccagggatggacacaggtccgctgaacgcggccagcctgagggaggagcagctccacctgtccttgctggtgtccagcggctggagaacaatcagcttccacgtggtgcccgtggtgagaaggaagcttggggcgcctgccctggagggggtgcagcagatgcccggattccctgagggcagcttgagaagaatcctcagccaaggggtggacctggtgccggccagtgcccagctctggaggacctccactgactacctgctcacgaggctgctgggggagctgggctccctgcagggtcatcgcctggacagcctctccatcctcgaccgggtcaaccacgagagctggcgtgacagtggccagactgacggcctgacctttggccacctgaagatggtgctgctgtgggcctctgtgctcttcccggcgcccgaggactgggcagagccgcagggcgccgtgtaccgcctgctggtggtgctgctctgttgcctggccacgcggaagctgccccacttcctccacccgcagcgcaacctgctgcagggcagcggcctggaccttggtgccatctaccagcgcgtggagggcttcgccagccagcccgaggcggccctgcgcatccacgccacccacctgggccgcagccccccgccgcgcatcggctccgggctcaaggcgctcctgcagctgccagccagtgaccccacttactgggccactgcctacttcgacgtcctgctggacaagttccaggtcttcaacatccaggataaggaccggatctctgccatgcagagcatcttccagaagaccaggactctgggaggcgaggagagctgagctgggccacctggtctcagccacctgttcttggctccccaacagactctgcactgcaccatgggaggctcctgggatgtttggaagaagaaacgggcttctccttgagggggtagtggagggattttgtccccagcagtggcctctgagagtctttcagtgcctggtggggcagggcaggcctcttggagcacctcctccctgggtcagggcctggatgcaggtgccaagctctccatgtggtgcatgttgacccagccacgtggtgttgtcaagcaaacagcatcggcaggagacctggagctgaggacttggccctgcctgcactgtatgccattccttggtgatgaaatgctgtatatttggttttgaaaaaatgaatgtgctgggtatacacagcagaaagggtactgtccactttttgtatatcagtgtgaaaaatatttcccctagaagtagaaaaggctcatgtgctgatggataattttgagtcttctccattctctgtgaatgacccccttccccaggcatccccacctcctacctcgttcttagagcaaactaaagccaactgagggtgcacacacagccatgagcccacctgcccaggactactcccatctgcttcttcccgtccccgtggaagtggcccctgatatggattgtatctgtatccccacccaaatctcaggtagaattggatctgtgtccccacccaagtctcaggtagacttgtaatccccagtgttggaggaggggcccagtgggaggtgattggatcatgggggtggatttctcccttactgttctcatgatagtgagtgagttctcatgagatctggttttttgagtgtgtggcccctccccctctccttttgctctcttcctctttctccggccatgtaagatatgcctccttctccttcaccttccaccatgattgtcagtttcctgaggcctcccagccatgcttcctgtatagcctgcgggactgtgagtcaattaaacctctttattcatt

SEQ ID NO: 692220 - DNA, 1077 bp, Homo sapiens
cgagaacatgcttgcggaatgctcggcttagtcggaaccataggacgaggatgacgatggtgccggtggaagcgccgagtctgactccggggacgaggaagaggcaggggcccatctgtgcgtgggcagacgacgcaagaacagctttggggaagaacctgcagttgctgagtttcagcccgtggatttctgttattcactgatgaaaggccggggacgtaacgatggcagcatggtgccctgtgctgatgtcatgagccgaactccaagacagcagagcagggcagcccactcacaattcagccatgagcagagattgcagaaaccgttcgggaccagacacgatggcacaaaccagcagtgcattcaagagcaatgccaaaggtcctggccacggtccgcggaagagagggacgaagagaaaggcagaccggcgtaccagggcctccgtggaaatcccatgaaggggacgccaacgtggacaaggaaccccgtctccacaggacgcacgacttgcaccttgaacgggtacacgggggttccacagggaccatgacctcgaaacgggcactcctggtcatgcaacctgggatccttacagcttcagatgcatgtgcattgcacttggaccggcgagccaacttcgccgtccaaaccccacaatgtaggggccaggcaagttaccaattggttcccgagacacggctctaccaccggggggcactccgcgtcacacgcgcagccggcaacaagggacaaggcgacacgccaaccaacgggggaaccccccggggaacaggcacgcacgcggaacgcggcaacacccctagctacgcggggaagaacaaaacgtcagccacgctgccactccaagagacagcatcccgacaacgtgcagacaccagcagcgggccaacagcaaccaggcaatacaccgccatgcggacaccacagctgcgacaaacgcgccaagagtagcaccactcctcggggccgaccgcacgtcccagtacacgcatcggggagccaagagcgagagcacacaagacagtaacagcacagcggaccactcaactg

SEQ ID NO: 692221 - DNA, 259 bp, Homo sapiens
ggacggtcccatgctaccagtcgagaagcatgctgggcgcagagcagtgctattgacatccagagaaaccgctgtcacaggcaacagctctggatcaagaatgggctacactgagaggctcttgcttccctgtttcaacaagtccactatgctacaatgcatgattccaaatctaccttctactctcactgtgaaagtctttcaaaatgctaaaatatcacaaaagctttaaaaatcaatgtgtggatatatgtgcttt

SEQ ID NO: 692222 - DNA, 288 bp, Homo sapiens
ttgctttttaaagtttatttttacaatttttttatccctttattggatcatcccccttggtttcaaaaaggaaaaactaaatgttgaaccaattaaatgtcaaaattttttattcccaaagtccatgttaaaaggggggctttcaggggtttaaaaattttttttgttgttgttaacattcattgcaaaaggactaaatgggggataactctaaagttgaattttaagggattccctaaaatggaaactatctttttatttgaaggaaaaaaaaaacaatgattttga

SEQ ID NO: 692223 - DNA, 1521 bp, Homo sapiens
  misc_feature (234)..(234): n is a, c, g, or t
tgatggcctcctggggcctcccctcatgcccaacacttaagaatttttaccccagagcctgcagattagggggcaaaggccatgctctgtgctctcagcagacctgtgtgggcagggtgcggtgagggtggggtggtcaccggaggcagccttcaagcagcaccgtgtggggcctcctcctcagtgtaggcccatgccaggacgccgtgtgtgaggaggggctcagggagcagnagaggctggggccgctccgcctctaggatgcctgtccaggcagatacccggggcaggaaggcccggcatggcccagggagggccagttgttccacgctgtgctctcggcctgagagcttatcatgggctccaggggtccctgtaacccttctcccctgcaaccctgcctgtagttccaggtcttcaacatccaggataaggaccggatctctgccatgcagagcatcttccagaagaccaggactctgggaggcgaggagagctgagctgggccacctggtctcagccacctgttcttggctccccaacagactctgcactgcaccatgggaggctcctgggatgtttggaagaagaaacgggcttctccttgagggggtagtggagggattttgtccccagcagtggcctctgagagtctttcagtgcctggtggggcagggcaggcctcttggagcacctcctccctgggtcagggcctggatgcaggtgccaagctctccatgtggtgcatgttgacccagccacgtggtgttgtcaagcaaacagcatcggcaggagacctggagctgaggacttggccctgcctgcactgtatgccattccttggtgatgaaatgctgtatatttggttttgaaaaaatgaatgtgctgggtatacacagcagaaagggtactgtccactttttgtatatcagtgtgaaaaatatttcccctagaagtagaaaaggctcatgtgctgatggataattttgagtcttctccattctctgtgaatgacccccttccccaggcatccccacctcctacctcgttcttagagcaaactaaagccaactgagggtgcacacacagccatgagcccacctgcccaggactactcccatctgcttcttcccgtccccgtggaagtggcccctgatatggattgtatctgtatccccacccaaatctcaggtagaattggatctgtgtccccacccaagtctcaggtagacttgtaatccccagtgttggaggaggggcccagtgggaggtgattggatcatgggggtggatttctcccttactgttctcatgatagtgagtgagttctcatgagatctggttttttgagtgtgtggcccctccccctctccttttgctctcttcctctttctccggccatgtaagatatgcctccttctccttcaccttccaccatgattgtcagtttcctgaggcctcccagccatgcttcctgtatagcctgcgggactgtgagtcaattaaacctctttattcatt

SEQ ID NO: 692224 - DNA, 2003 bp, Homo sapiens
gcggtggaccaccgaggataccttcactgcctcctcggagggtgacgccaagtgccgtggacacattgtgcccagcaaggtcctgtgtgtcctcaaggacctgctggtggcagccatcgtacactgcaagcaccacagtctcatcgcaccaggtccgctgaacgcggccagcctgagggaggagcagctccacctgtccttgctggtgtccagcggctggagaacaatcagcttccacgtggtgcccgtggtgagaaggaagcttggggcgcctgccctggagggggtgcagcagatgcccggattccctgagggcagcttgagaagaatcctcagccaaggggtggacctggtgccggccagtgcccagctctggaggacctccactgactacctgctcacgaggctgctgggggagctgggctccctgcagggtcatcgcctggacagcctctccatcctcgaccgggtcaaccacgagagctggcgtgacagtggccagactgacggcctgacctttggccacctgaagatggtgctgctgtgggcctctgtgctcttcccggcgcccgaggactgggcagagccgcagggcgccgtgtaccgcctgctggtggtgctgctctgttgcctggccacgcggaagctgccccacttcctccacccgcagcgcaacctgctgcagggcagcggcctggaccttggtgccatctaccagcgcgtggagggcttcgccagccagcccgaggcggccctgcgcatccacgccacccacctgggccgcagccccccgccgcgcatcggctccgggctcaaggcgctcctgcagctgccagccagtgaccccacttactgggccactgcctacttcgacgtcctgctggacaagttccaggtcttcaacatccaggataaggaccggatctctgccatgcagagcatcttccagaagaccaggactctgggaggcgaggagagctgagctgggccacctggtctcagccacctgttcttggctccccaacagactctgcactgcaccatgggaggctcctgggatgtttggaagaagaaacgggcttctccttgagggggtagtggagggattttgtccccagcagtggcctctgagagtctttcagtgcctggtggggcagggcaggcctcttggagcacctcctccctgggtcagggcctggatgcaggtgccaagctctccatgtggtgcatgttgacccagccacgtggtgttgtcaagcaaacagcatcggcaggagacctggagctgaggacttggccctgcctgcactgtatgccattccttggtgatgaaatgctgtatatttggttttgaaaaaatgaatgtgctgggtatacacagcagaaagggtactgtccactttttgtatatcagtgtgaaaaatatttcccctagaagtagaaaaggctcatgtgctgatggataattttgagtcttctccattctctgtgaatgacccccttccccaggcatccccacctcctacctcgttcttagagcaaactaaagccaactgagggtgcacacacagccatgagcccacctgcccaggactactcccatctgcttcttcccgtccccgtggaagtggcccctgatatggattgtatctgtatccccacccaaatctcaggtagaattggatctgtgtccccacccaagtctcaggtagacttgtaatccccagtgttggaggaggggcccagtgggaggtgattggatcatgggggtggatttctcccttactgttctcatgatagtgagtgagttctcatgagatctggttttttgagtgtgtggcccctccccctctccttttgctctcttcctctttctccggccatgtaagatatgcctccttctccttcaccttccaccatgattgtcagtttcctgaggcctcccagccatgcttcctgtatagcctgcgggactgtgagtcaattaaacctctttattcatt

SEQ ID NO: 692225 - DNA, 950 bp, Homo sapiens
agaaccgttcgcggaggaaaggcgaactagtgttgggatggcaccaagtgggggagcctcttggagtgataaacaggagctagaggagctggcacggcatgggcgtggatcggggccctggctgagggatgtattgttgaggacctcacaggagtccacttcctcggaggtggtgagctatgccccattctacggctcttcccctcactggttcccagtgtcctgctggagcaagcctatgctggtgcatatggacttcacatctgcgtagatgggatgcatgtcgagacagaacgctgtccttcctggagcaaactctttccacgtaccatcaacaacaggtatgacatttacctgctcagtcatcttggtgatgatcgcactaagcaagtctcgtaaaagagggccttggccagaactgtgttcctgggccgtgaatcggtcagactagatgtctccaacgcgaagcggcagatggatcaccagagcgctgatcatcgtgatgcgagagtctaacgagctaatctctgcgcagctttgggggcgctggcctcggccggacccgagctgtgcaccgagatgttctcagtgtcctgagttaggaccaaccgaagctggatagatcctctctaataatcgcagtcgagggactggacctgggaatggccaaacgcctgggagctctacggtcacccaatgctctggctgatagtgatagctcgagagacggaacagaagcgatatttgaccaggcgtcgccaatgagagaatgagctacgtggccaaggagcatccatgtgatccgatgaacattcgagggttgtctctgaaacgggtcttggaccaacacgaaggcgtttgtggttggcaggaattggggggtaattcggggtgttaatgcttggaaaagtctaaaaatggagggtcacggggggacgcactgtgcctgc

SEQ ID NO: 692226 - DNA, 914 bp, Homo sapiens
ttttttttttaacatttccatataaagagctctgtggaatgtcatgaatagactggaaaaaaaaattttaagaacctgcatatgtggtttactagcagatgacaactacaaaaggaagtctgaagaacagcgtaaaacttgggtatttttattatgtttgtggggatagattaaaccatagcgggccttatttaaaaagggttaattcagctaaggggacaatgttatacttttgtgggtacttcagaactatatctttgatttgtcaaggttgtcacgaccggtaatttaagaatttatacggccacttgttattgtaaattttaagttggtctaaagtaaggaatggggtgaaaagctattatatgcgggagttggggctcaaaaggactttatgttggcaaaaaaaataaactacggggaaagaagggggctgtattattgaaaatacgggaagacctcacatttgtgggctgggaaaatttcccttataatgaccttacggaataaccctttgattttcccttgggtttacagctttctcaaaacgattgaaagtgaattttagcaaaattgttaaccctttttaaattaagggggtccccaatttttgacatggaatatggggtcttcttcaaattaaataggggtgtaataccccctttattgtggtcgtcaaccactctcagtcgggtaccacatcagggggcggtggcgagaccattaaaatatttctttcccccaggatctttttctttgggtggacacccctcaaattacacttgattactcgggtggcgttcacaactccaaaaattttcccgccaaattatcgcgtaaaaaacatggctcgggaccaaagacgttgggaaacacatggggccccacatatggaacaaacgctcgcggtaaca

SEQ ID NO: 692227 - DNA, 201 bp, Homo sapiens
gagctttgtctaactggctatcggagtgtattgtgtgcatagcgagcaggtgttatctgggcttcgtgctgtgactccacggggtgtagatggctggaggaggctgcatggctcgggtaggtacaccatgctgatgaggaacagattagccacattatcaggcgtcagcagaggctgcaggaactcagctgtgatgtccgt

SEQ ID NO: 692228 - DNA, 683 bp, Homo sapiens
  misc_feature (12)..(12): n is a, c, g, or t
cgtggaagacgnagccgcacttcccgggtgactcctccggccagccggcccctcagatgagggctgctccccgaagagcacctgcagctcagcctccagcagcagctgcgccatctgcagttggctcacctgccgctgcgccccggcagccaggcctgatggccaagatggctaccaccgcggccggtgtggctgtgggctctgcaagtgggacacaccctgggtcacgccatcactgggggcttcagcggaggtggcagtgctgagcccgcaaagcccgacatcacttaccaggagcctcagggagcccagctgcagaaccagcagtcttttggaccttgctctcttagagatcaagcagtttctggagtgtgctcagaaccagagcgatgtcaagctctgtgagggcttcaacgaggtgctgcggcagtgcaggattgcaaatggtttaatgtaatcaagaaattcaagctgaagagatgtaacattggttctgtataattgatagtacaagtgtggacccttatatttctaacagttcattgctttggaatggccgtgaaagagatctaactgtggatgcttactgaggcttgtatgtagtgttggttactggggaagtgtttggcctccttggactgtgttgtgattgtgagttaaaaaaaataaattggttattctga

SEQ ID NO: 692229 - DNA, 904 bp, Homo sapiens
gaaagatcatgtaccttggagttgtggaggcatgtatataagcagagctgagtttgccacactggaatttatttattcattgaacaaatatttaatacctactacaattcttagccgtctgttagagattgctggaggtccactacagacactgttttcctggatatccccagcagaggctacagaacagcaaagattcctgcctgccccttcctcttgaaggttgttccagagggacacctgccagatgccagccagagctctcctgtatgagatatgtgttgatccctgctgggaggtgtctccagtcaggaggcatgagggtcaggtaactacttgaggaggcagtctgtcccttagacagagctcaagtcctatgcttgggagatctgctgctctcttcagagccagccaggcagcaacggtcttaagtctgctgaaggctgcgcacacagacggcccttacacccaaggtgctcctgtctcacgggagaagggaagttaatcgtaaaagcccctgactgtgtcttgcttgactctctttcaaatatgccctgcccagtgaggcggacactgtagacagggacggacctggccacaggggggctttgcaatgatggaagctcagactggcccagacagaagtccggcaggtgcacaccgggacggggcaaacgtcgcagcaagctcaggacggacgggcctcccccacgacacggagacccacaggaggatacacggcgtgcggaaggacataagcaccggacacggggccacagcagccccagagaaaagcggcccgacaacacataggcaaagtgtcaagacacaagagagcacagcacacgagagaacggcacaaaacacacacagacaaacccaacgagcaacaagacaagataaa

SEQ ID NO: 692230 - DNA, 804 bp, Homo sapiens
  misc_feature (534)..(534): n is a, c, g, or t
gctcctctctccgtccatggggtgtgctcgcccattgtatatcggtgtactccggaaaagggggagtcatctggcaaacaatgtcactttggccatgctgatattactaggacgtcactaattgctgacctaagattattgtgaagctttgttctatcactctaagagcttgctgcaaaggacatacaggacaggccctattgactgtcgagtccgcaattgatgcaagtgtcaatcgaggactcagtgctgatctcttgggggtactggcagagctgtggctcgaattcccaaagtaacgacgtgctggtcgtggacttcagctggtcatggggccagagatcgccggttctgcgaaagccactggttgatcaggtggggaacgggtcccgtacacttgtttattgactaaaccctagagctcaatataggaccctgagagctgcccggctttggggccatttccggagttacgtaaaggcttggaaagcgaagcaaaaaccccgagaaaataaccaggcgggaaattagcgncggcctccgaacttcgttggcttatccatttggggcgccaccttttgcgggcctttggcctccggtgccaagggtctcccccgttaagctccgaagggcccaaaccttggggggtttctcacgttttggtttccgttcagggacaccggtgtgtcccaatttgcgcgggttcacctttgcggacacgcgggaacaagtgttgtgcctccttgtggacaaggccgttgtcccccttttcccccggcggttcacggtgtgtcgacgactgag

SEQ ID NO: 692231 - DNA, 107 bp, Homo sapiens
agtcgcctacatttcacgctacttcttctcattttccagacatagacgctccatctgcttctggtgcttctcctcccgggcctgtgccattcatctgctgcagctca

SEQ ID NO: 692232 - DNA, 1070 bp, Homo sapiens
  misc_feature (613)..(613): n is a, c, g, or t
  misc_feature (729)..(729): n is a, c, g, or t
ccaacgtgacaaaaccccgtctctggtaaaaatacaaaaattagccaggcttggtggcagttgcctataatcccagctacttggaaggctgaggcaggagaatcccttgaacccgggggacggaggttgcagcgagctgagattgtaccactgcactccggcctgcacaactagagtgaaactccgatctcaaaaagaaaggaaaaaaaagacaagcttgcttcccaggttatgaccttgggggctgagttgtgcagaaaagaccaattaggaagagcttgaccaggggctttggagctggggaaccgggggattcacttgcgtgagccaccaggccgggccaggttggatttaataagtacttagaacaagcttctcttacagaactccagccatttaaacacataggtccatgtatatgaccctcgtcttcccataccaattcctccggtaatgggcctggtcttcggtaggtaccctaatctatttataaggttatcaggtacaacggtggtctacactggataagattcctttggcacctggtttatacaccctgccccagaggctaaagctggtgggtccaagtgtgggtaacgccattaaccatatngtacgctgtcagcagttaacacggtgactacaggtaatcaaggtttcggacgatgggacgtctcagctcctggcaactcccagccgtgagttggacatgaggcagaggaattcccnggtcgaaaaatatatatcacaccgccgatacaaaagcagacgaacatcgagcactcttgtgggccccacacccatttataacacgtgggacacgggcccacaaaagtaccccagtagtgaccacgccgaaactagggcgacccagcaaaaaaaattcaggggggacggaacatagcaacaggtggggaccaagacgggcaaaaaggcaaaggagacggagcccaccaacacgcagcagagcgacccaaaggtcgcccccttgtgacacaacaagagaacaccacagcagggtggtgacaaaagcgacgagcggccgccgcatccatcacctaccaccaaca

SEQ ID NO: 692233 - DNA, 266 bp, Homo sapiens
ctctagaggatccgcgaaaatttccagtatgctctcctgtccatcagcagctctccattccctgttctgtgatcgtggcctcagtcctggtgtccttccctaattccagggccagtcctacctctagacattttgatttgttatccaatacagatccttggattatttataccaggtgagtcaggttttgtttgtttgattgtttgttttattttgtcacttacaacaaaaaaagccccgaaaaaccactggaaaaatacctggta

SEQ ID NO: 692234 - DNA, 982 bp, Homo sapiens
gtctctcctcccgccgtccaagatgccgaaaggaaagaaggccaggaaagaaggtggctccggtcccagatgtgcgtgaagaagcaggaggctaaaagagtgtgtgaatcccctgtatgataaaaggcctaatgaatttttggctaggtttggaccatggatatccagcaccaagaagagatctctatcccgctattgtgaagatgggttcccgtctatatcaggttgcggtcggattgaggagccatgctctataaacggctgaataggtgcctcctgtgattaaccagtatcaaccagtgccctggcaacggcaatacagctactcagtctgcattcagtctgggaccactaagtgatcagtaccattagaacagtgctagagagtaaccataatgactgtttggctccgggggctcgagtaacgaaggtcgtgctgccaaaggcgggacgtcccctcgactgataccatcgtgtgcttgctgcatcctagagagtttatcaccagtcaaccgccttggtgtatatacaacgacggtgctcacttggtgttgatttgcagacgacgtggactccatcaaagcttggattgttttcttgacaagccctgtgtccgttagaatgcgggtccattacttgcttatcacggaaagccaaactgggacgtagtagcctacggaagaacttgagccctgcgcctcacgaggggactcggcgggaacaaggcgctggctaagccggggaaccataagaaggagaaaagaaggaactgagggagcgcggccggggggcaaccccgggcccaacggggcgatagcagcaaaggagcgcacaaactcgcaacagaggagtggacggggggcgccgacaaaggagcatcgccgacaaaaaaaagggcgccgccaagacaggcgcacgagagaacaaagcagaaacgcaaagaagaggtcacagcaacctagctcgcacagcacacaacaga

SEQ ID NO: 692235 - DNA, 116 bp, Homo sapiens
cggacgtggtgtgtattttgaagcagatgtggtgatactgagattgtcgtcagtttccccatttgtttgtgcttcaaatgatccttcctacttgcttctctccacccatgaccttt

SEQ ID NO: 692236 - DNA, 692 bp, Homo sapiens
cataacacaccacgctcttcgccccatgtaatagggaaagtgagaattgcccaccacctcaccactgcgtttatctctcctcttcgctctcggcggcaatgcttttctcgtgtttcttcgatattttgtctgtctaaaatacacgcacaacactcctgatcccctctcccctcttcgctatccgcccttctctgttgtctagacataaaatttatgaatcatcttactctctctttctttttttctctcgatctcacctctctgccacaacgcgctagtctctttctgctctctgtcggggcgtgtcttgtctctgtatagatacaccacgactcagcctgcccacgcgccccccgtcttcgcgtggccaccgctcgcgcttcccgctcgcgcgcgcgtgtcaggaggcccgccagctgtctctctcgccctctgcctgctttcccctctccccgcctctcctcctcggcagaggtgcggctctgtcgctcgctggtcttcctctctcggccgtctcgagtatgtgccgcgtctttctgtctctcctatgtcgtcgttacctcccctccctcttttttttcttctatagagtacattctcttctgtgtgttttctgctcctctctaccaataaacaaacatagaatacaataattatactacctcccagtacccatagaagacatacaaata

SEQ ID NO: 692237 - DNA, 143 bp, Homo sapiens
attaaaaggatttttaaaaagtaattactgcacataaaatgataaataggtaattggaataatttgatttgcgctccttggattagttatttggtctatcgcctcagctataactccaaattgctacatactatggggaatta

SEQ ID NO: 692238 - DNA, 596 bp, Homo sapiens
  misc_feature (350)..(350): n is a, c, g, or t
tttttaaatgcacgtatgcaatcttttattcctcttgttttatggataagagatttgttcaggtcaaaagttgcaaaactgttctgaagcttaatattagagacccaagtaagattgtttttagtcttgcttgaggaatgcacactccatttaaaaaattgtgcgctctgtagatttggattttacagcagcaattacttggctaaattagagtactgcaatcttgtaagtagaaaacagccaccatgacaataaacaaaaacacttaaaaatatttttagcttgttttacctacatctcagtttcattttcatctatgctattgctattgttgactcatgctaccgctngatgtttgcccttgtcatatatcaagaatagggcgcatcatgtgtccccgtgaaatacatttgtgttgtgctatgagcctctggtaatcaaaatgcttggtactcagatagagaggtgtaacaatcacgcatgttgctatagtaacaataatatcttcataattattctggtgtaatctttataacatacttatgacaacccccagtgagggttacttaataataaaatgttattaaaaataatgc

SEQ ID NO: 692239 - DNA, 294 bp, Homo sapiens
agtcacaggatcatagctcactgcagcttcaacctcctgggctcaagtgatccttccacctcagcctcctaggcaacaaggaccacagcacaagccaccatgcccagtaaatgttttctacttttttgtagagatggggtctcactttgttgcccaggctgtcctcgaactcctggtcttaaacgatcctcccaccttgacctctcaaagtgctggagttacaggcgtgagccactgcacctggccgaaggggcctttctttatgatacagctgtcgacgcggccgcgaattta

SEQ ID NO: 692240 - DNA, 115 bp, Homo sapiens
atcaggccgtcagatcccagcatgaactaacatcacgccagccataccgagcaaattaaatccacccacttttcgccaaggacatacaacgccatcctagcggatataggttgga

SEQ ID NO: 692241 - DNA, 365 bp, Homo sapiens
ttttcagagttgaaggacacaggtttcctaactgaaagggcccccccaagtgcctagcataatgaataaaaatagatcacacagccgggcgtggtggctcatgcctgtaatcccagcactttgagaggcccaggtgggcagatcacgaggtcaggagatcgagaccatcctggctaacacggtgaaaccccatctctactaaaaatacaaaaaaattagccgggcgtggtggcgggcgcctgtagtcccagctacttcagaggctgaggcaggagaatggcgtgaacccgggaggcggtgcttgcagtgagccgagatcgcgctcctgcacttcagcctggtcggcagagcgagactccgtctca

SEQ ID NO: 692242 - DNA, 909 bp, Homo sapiens
  misc_feature (24)..(24): n is a, c, g, or t
  misc_feature (46)..(46): n is a, c, g, or t
  misc_feature (74)..(74): n is a, c, g, or t
  misc_feature (87)..(87): n is a, c, g, or t
  misc_feature (122)..(122): n is a, c, g, or t
  misc_feature (135)..(135): n is a, c, g, or t
  misc_feature (144)..(144): n is a, c, g, or t
  misc_feature (150)..(150): n is a, c, g, or t
cctcagccagatgccaccacttcnccgggcgtccagagagacctgngctagcacgctgctgctacagaggtagngctgaaacctccnggctcactactgactttcagtctagggctatgcantggacataacgancatacttgnaatggntaagtaatattccaccatatgatgtgtggttaattaacatctggtgaataaccaggactttaggttcccagttttcccaggaacatcatgcccctccatcattggcccacctggaaggataactacaggataagcagctcttagaactggaattgctgagttaactgctctgtgcatttccttgctttttcttgcttttcttttctttcttttattatttttttgggtaaatttttattgaactatagcatagcgtagatacaggaaagtgtaaaaacttaaatgtacaattcaatgaattttcgctaggcaaacactgtgtcaccagcacccagatttagaaacagaatattaccagaatcccaaaagccccatgagctgccgtccagtcactacttaccgtttccctgatcccctgcataggataatccttatcatggcttctgacactttcggttggttttggatgtactgacactttttgtgtgtgtgtgacacttttataatacaaagaaaatcatacagtatgttcagtttggggtctggcttctttcactcagtgtgttgttgtgggcagttggagtatgtttattctcattcttctgttctctttctctttggttgagtttactgggctggaagcagtacaaggaccagaatatgctgtgagctgaccagccactgggctggctggctggttgacaaatgacctaacaaatggttgacaaaatggatggatgaatgaatcacagacccact

SEQ ID NO: 692243 - DNA, 263 bp, Homo sapiens
ttacctcacaggtaatagagctgtgtgtcatcccttgatgcatcccgaatatgagtagaggtcagttctaacgtagcaccaagcatccctccagtaatgtcaagacctgtatagctcttcctccatttccactccgcttgcccccaaatcatataactgtatttgtcacttacaatcccatcacaacttcagctaacacatcagcagcttagccaactcaattgcagtctgcatagatgtaaaacagttgtcacaatgcccaa

SEQ ID NO: 692244 - DNA, 100 bp, Homo sapiens
cgacctagaggatccggcggcatggggctgtacgggagcaaagctccttctccgcagcgtcgacacacagcagctcagcccgccgatgatgcaggctgcg

SEQ ID NO: 692245 - DNA, 734 bp, Homo sapiens
gccgacccgtgcgcaaccttcccccggctctgtcgctcccaaggctttctgcagccctccgtgctccaggcctgcacacctgagggtgggaccccccggagtgcctgagccggtgtcggatcaaactcgtgagaccgagcagggcccaaaccgggacctgtgagtggggacgggcgtgaggaatgccaagatggctctgatgacctgatggctctgcccacccctctggctgcctgcctggacccgtgcgccactgtggggaatttcccttccctgacttccctgctgctgtgactacatgccccagctcctgtccatgccccctgcttcctctgtgcgcaccactgggggccagtggacgacggtcgatgccccctgaagactcctgtcgcatgcacccgtgaggggagtcccggggcccccggtttctggcctacgctaagctgggacctccatcctcgggcagctggtttgcatctgtgcccccctggtgcataggcactcttgtgtgtgaactccctgcctgggcggaattcaactctccaggggcccattgtgttcccagccaacgcacgggcttggttcaccgcaaggggtgagtgagacggcctgccgcgcgtagtaaggtagcaccccactaggctatttagaccagtttatggtccaggcgcacctggcttggaactgggccttcctcgcctcccggttacgccccctaacggggcctgttcaac

SEQ ID NO: 692246 - DNA, 730 bp, Homo sapiens
  misc_feature (123)..(123): n is a, c, g, or t
ctggccatccgcgagtccattgaaaatgagtcagacgggaacgtgataggcagtacaatccttctgcaatgaagctgaacgaggatgacacagtgcgtgagatcagaaaggaccatttcgagnaggccatgcgctttgccgccgctccgtcagcgataatgacatccgcaaatatgagatgttcgcacagaccctgcaacagagcagaggcttaggcagtttcagatttccatccagtaccagagaagatagtggaacaagtcagggctcttctggtggtggaggcggcaacgtcttcaatgaggacagcgatgatgatctttacggataaatgtgaccacgttgctgaccctcacaggccactcttcataaaggccgccatgtacaaaagacaaaaaataaaaaattccacatttttaggactgtgctttttttgtatcttattattttccgcttctcatggccattccccctgtttattattcgcttcgttcccttcctgtccacccccttctgttgatagagaaaagcatgtagctgcttgtgttttgctctggtttgtgaaaggatgatttctgagaactttgatcttaacattctgtgggtgggggtgaatttcagtgaaaaccatacacaatagtgatttcagtaacttttcacaagctatatgagcagctttagtggtggggtttattgctaggccgttggaaggattaaaaaaatccaaaaa

SEQ ID NO: 692247 - DNA, 218 bp, Homo sapiens
agatcgagctcggacccctagtttagaagttcaatagcaggtcgacgtgcgacctaacataaccatgtctaaagttaactatagtatattatcctaactactaccgtagtccgtactactacacagttaaactgcagcaccataaccttactgttattgcgcaaccgaaacatattatcctgactataaccgcgtactgcatacacgctcgtctgcct

SEQ ID NO: 692248 - DNA, 894 bp, Homo sapiens
ggggcctgcgtgctcagcatggaccctgaatgcgcccgctgctccggttctctgtgctgttctggtagatccatgcagccgttggcagatgatacctgtttgtgagacatgctcctggactggtttactgcggtcgacttgaaggagattcctgtgtcgtgctgctgcttgagcacccctgcctggtggcagctgttgtctccagtgtgctggccaagtccgaggacctgagtttcatgttgggtccctcgtccattctcgacctgcgccatgtgaataggaagcggcttcgcagcccagtgattaaacttgtcttcccagtatcttccaggtgtgctggtccgatagtcatcttctccctcgcagggtagacgtccagccttgtttgtggcctctcgtcggccagtcagcttcctggtgcacgtcctggctttgtccatgcgacgtggagccgaggggcgagtcctgcctgtcggggggtgactgggccgtgtgtgtccagaatagtatcatgggatcacggttgcaaggagtccttgggtgctcctgcgtgcgtccccaacggttcgactcagtgtcctgtaacgttctgaattacgaaccttcgtggcgctgtccgaagcccctggatggcatgcccttgtgggtgcgggtgagtccccgtgtggctggtctgctgtagatagttccctgtccccgggcgtgacactttgttcgtggacctgcttctctgtgtggctcgtttctcccgtgttcaggttcttccgacgtggcagtcttgtggcgagacagtggcgccgggctctgacgcttgccgtgggtccacccgtattggacccctggcttggggatccttagtgctcaagcactgttccccaggcactgaggacccat

SEQ ID NO: 692249 - DNA, 126 bp, Homo sapiens
gacatactctcgtattcccttgtcccacctcccacccccagcctaccactatggtattctctgcttctgtgagttaaactttattagattctacatatgagatcatgtcatatttgtcttctcgag

SEQ ID NO: 692250 - DNA, 134 bp, Homo sapiens
taacataaaaagcaacaaaagtaaaaaaagtacttaaatgaagatgtgaatggattcatggcaatacctcagacagaatacacagatggttcacaatgggcacaattatagcaagcagacagatgaggacagta

SEQ ID NO: 692251 - DNA, 1144 bp, Homo sapiens
  misc_feature (1)..(1): n is a, c, g, or t
ncgcggtccttttttttttgcttttttcctctttggttgcttctgtcctctttctcccgctcctttgttttctgtggcttttctcttttctgcttctcctcgtgtgtgccgcctccgtgattttggcctaggtggtggtctctttcccttcgttgagtgggcctgtttcccgtctctttgttcgcgcgtgtttggtttccgcctcccaccttgttttttgtgcgcctcctttgccttggacgggtccttcctccccgggttttttttttcttcaccccctgttttttccttccccattccttcctttggcctcaagttagcttccccggtcgtgggccattgtccgttttcaaggttgctgcaaccctgttatcgtgcctctgattatcttgggtatagcagccacacagaatgctgcaagcctttgttagtccctgatgtatgagcccatggtggtgtaagatgaagatggtttgcggccttgccccagatctatctccagcaccaggcagatattcttctggaagggtacgagatctggaagaggccccggttaataactgggccccagatccgtcatcatccagtaccagtttctgccttcagagcttccagatgagcccttaagaagcctcttctattttatgccagaccccggccccaagactttgcgttccactttcccaagccttttgggctttcggggccccacactgccccaacaccccagcactctcccctaagtgcctgcccataccccctgggcctggcccccgccccagtctccgcgccagtacatcccctgtcccctctccccactcccacaagtgccttcaatgccctatgggcccccaccagtggcctgcccctctcccacgagtatttatacgcgtccacacgagtatttatttaaccgctgctgtacctccgagtcttgaattctgccggggccccacgcccacactccacaccctgccacgcacagcttccacgccacgtccccaccacgcctcactcaagctctcttcacccggttttttgataactaatcttcccccaccccccacgctaacccacatataggggctgcagagttataagcccccaaccggtcatgctcccattaaaatgattctacctacca

SEQ ID NO: 692252 - DNA, 191 bp, Homo sapiens
atagctgtataaaatacacaagataaagaatgtggcaacaagtgtggagaaaagggaaccctagtgaacgtgttggtgatgaatggaaattagtacatgctctttatggaaaacagtatggcggttcctcaagaaaattaaaaatagaaccaccatttgatgcagcaatcccacactgggttaatgtagca

SEQ ID NO: 692253 - DNA, 1433 bp, Homo sapiens
  misc_feature (60)..(60): n is a, c, g, or t
  misc_feature (177)..(177): n is a, c, g, or t
  misc_feature (233)..(233): n is a, c, g, or t
  misc_feature (262)..(262): n is a, c, g, or t
  misc_feature (660)..(660): n is a, c, g, or t
  misc_feature (1248)..(1248): n is a, c, g, or t
gatcgatcgacgtctctagctgagaagactgacggcccgcagactgatatgcgcgtatcngttacctcgccactctctctgcgcaagtcggtcgatcattgtgaagagctgagtggtctgcaaccatggatccctcttggcacaaggccgtctacgtggtagcatcccatacacgtngacgacgcatccctccatggacatatgcgtggcgtgctgcctggatcatcacatcnagcgatcatccagatggaagggtggcccntttagtgggagctccctccccatctagctaagggctatgtcaatcgtggtcgaggtacaacccgatgcgcctagatcgcgcacacaaatgttgtgtcgtctctcgcgattgctcaatacacacacagacatgggacgcctaagttggtctgtcgaacgggacaaggcaatgtcgggtgccacaagctggactgacattcggtggagactagagcgagtctcgcggttcttaaacacaattgatcgcacggggggccgcacggcaggcgcattcgttctggctacttatgctcatagagcggttggttaatccgtaagcggtgggttacgaagagacgcgtgaaaacaattaagaggacccaggggaggtttgttgccaaacggaggtcgaaccccaancctgagagaataaaacccgacctggcttggattttcgatcaagcgaccggtttggtcggttgatcctccggaaggcggcttagcgctcatatgtgtcgagggcgaatcgcctcgagagcaatatccccttgagtgacacggttggggagcttatcaaagctacaccgccccggtcgaggtaaccttcttggctcggcaaaatgggcatcgctccacaccatttgaggaccacaaaacttgggatacatgttatagagaggctcccctgaagcggtttgccacccatttcattcaaagtttcacgcggggtgtgtggagcaaccccacctttctatttggtcgcatgcggaggccaaattcgcgctcttcccaatggggtctggtggggacgatcccgtgtgtggcgctcggtgcccctgggctggagacagttttggggccagtatatcagatgtaactccataattcttgaaaaatgcagtaaaaagttaaccggtgtggtcccatggggcggcgacagttcgaacacaagcgacgcgagaagctggccctggtgtcgcgcccagggcagcaacccacattggggangccaacgagggcgttttttgcgacaccgtgtgtgtacacaccccaacatggtatgagccttggtgctcaattgtggacgacacgctattccaagccggatttctgcaaccctagggacgcgtgcccgcatcctgaaacaccaccgtggtggtgctggtggtggcgcccccctatatacaccctcg

SEQ ID NO: 692254 - DNA, 402 bp, Homo sapiens
  misc_feature (17)..(17): n is a, c, g, or t
  misc_feature (76)..(76): n is a, c, g, or t
cttttaagggaacttancattcctaaagttcaagtcaagttgtcatgaagaagtacttaaatgaggcatacttttnaatctttgaatcgtagtgttgtagggctaaaagaaacctcaggccaggctgcatggtggctcacgcctgtaatcccagtactttgggagaccaaggcaggctgatcacctaaggccagtaatttgagaccagcccaaccaacctggtgaaaccctgtctccactaaaaatacaaaattagcctggtgtggtgatgcatgcgtgtaatcctaactactcgggaggctaaggcagaagaattgtttgaacccgggaggcggaggtttcagtgagccgagatcatgccattgcactccagcctgggtgacaggagccaaactccgtctc

SEQ ID NO: 692255 - DNA, 207 bp, Homo sapiens
caaagttggggctggaacttggccctggggactcatgtttggaatcgtaggggaacatttggctgttaatcccttgcccagttgaaaacatttcctaaacatcggcttttaattttagctcttatttcattttggaattttattttcttttgtcggcatgttcccaaaaccaagccttaaatgttttttaataactaaaaaaaaaaa

SEQ ID NO: 692256 - DNA, 200 bp, Homo sapiens
tccggcccgtggttggagtgactatgaatatagcagttctacggtacaagcctaagtaccatacttaatttagagctatttatagttatcctaaactactaccgcattcctactagtcaacgtgaaactcgagcaccacgaccctagctactatctcgtcacctgtaaacaagctaaacatgactaacaccctctaattc

SEQ ID NO: 692257 - DNA, 80 bp, Homo sapiens
gcttgagctcgggagttgagagcggccagggaaatgtggcaagaacttgtctctacagaaaatacagaaaatcggaattc

SEQ ID NO: 692258 - DNA, 214 bp, Homo sapiens
gagctctgagcatgatgatggatcatgggcggtcgtgctgcagcctgctctagtccctactgaagagggagaagcgactcctcctctgatacattaaaataaggctggtcttgtgctgttggtgtggcaaggtcttcaccaatgtgacgtaactgtagtctcacagtccacaacatctcagacactcactccccatagcctgcacggcactcct

SEQ ID NO: 692259 - DNA, 810 bp, Homo sapiens
gcgtccaaattgcctgttttactcgcagtgctctattcctgttcgctggttctgccacctcagtgtgaactgatggccatggagtccacagccactgcctgcctgtctgcctgctggagctggtttctgcctgacaaaattgaagatgttcctgctccttctacatctgcagataaagtggagagtcttggatgtgtgatagtgaagctaagaaactattgggtttatggacagaaacatctggtgatgggtggatattccagcagctgtcaatgcattccatggaagcagctagtcttttatggtaagaatggtatgtgagagacatgctaatgagtgtgtgagaagccttctttattctatgtggaaatcacttctggagttggcaagaattggagaatggtgtgttgggaaaacgccttggaaggtgttgcattgtggaatgaggaagaagtgatgaaaaacggaagattgaatctctgttagaaaagtaatgataacatagatgaggaaagcaaggggaagagttgagagaccaggttaatgacgccatgggacgaaaagtgaagaagccaaaaaacatgaacgaccaaggtctttggcaacagccttgaacgtgatacgagccacgtaccttgacagttgagaaggtgtgcacgagacgcatatggatatagtacattgagacagagccactggacaagtgcttgctctagctggtaacttaaaccttaacagccaaggacggcaggccaagtccgcataactaggcctctgggacgcaacaggggcaatgccggcgcagccaat

SEQ ID NO: 692260 - DNA, 240 bp, Homo sapiens
ctccgtacgccaaaatgcattgaaagttagaataaaaaaaaatacacacacacacacacattaaagaaaaaaaagaaatttataagaggttaatatggcctgcccgggaacgaaaaaaccaagacagtatttagtcattaacttcttggctatttcatcaattgtaaatagtttggggcgtacggaggagggccccggagcccgaattgcgaaatccagggccataggctggttcccggt

SEQ ID NO: 692261 - DNA, 139 bp, Homo sapiens
cagaggaccttaagcatcctaaccaggagctcagactctgaagaggctctgtcgggattggcggaagcagaagggaggtcactggtgttgtggctgctctggaacactgggtgctaattggctcccttggcgaaaggag

SEQ ID NO: 692262 - DNA, 159 bp, Homo sapiens
tatgacacacagtcagtgtgcacgtatttcgtctgagtgaactgaggggacctgatgaaaccggtgacgtggcacacgggaagccagctggcccaggattccgtacatggccgcaagctagacctacacgcgtcgacgctaactttaatgctatcccac

SEQ ID NO: 692263 - DNA, 169 bp, Homo sapiens
cctgataagtggtgagaaggagtagagacaaagaaagacaggaaagaagataaggaaagcaacagatgaaagaaagagaaaaaagagggacaaggaacaagaccaagaaaacaacgaacaagaaaaaaggaaaaaaaaaaagaaagaaaatagaaacaaagaaagaagt

SEQ ID NO: 692264 - DNA, 267 bp, Homo sapiens
agttcccccgcgcgggcggggttccctgcggtccatttaccatgccactgggcccctggaggagcggcagattgcctacgtctgccgagatggcctgatggggctccaccacctgcattctcaggggaggatccacagagacttcgagggagcctaccttctcctcactctccagggtgatgtccctctggctgactttggggtgtctggcgagctgacagcgtctgtggccaacaggaggtctttcattgggaccccccccgcact

SEQ ID NO: 692265 - DNA, 567 bp, Homo sapiens
acctggcttcttcccagcctacctggttttgaaacttccagtgacccacagacccaggctctacctatgggaggtgatgatgatggccttgccagactcgtgggcgtgtgccacagcattccagaacaggcgccgggccacggggtccatgccagtggatggctcatccaggaagatgaaggcaggctctccaatcagggcgatcaatgccagtgctcaacttcggcttgttaccaccaccgggggtggaagggagaaggttgggtgacggcaatggtcagtctccagcagtgagcactgccggctcaacactcaccccctttccttctctattcaggaagtattcccacacccctcatggggctttcagcaatgcagtccaccactttcacccagagctgaattgtggcttgggctatccactcaggaaataacttgttcccctggacacagggatgagtccagggtgagcacatggccgacgagtcttctttgagggtttgaagtgttgagggcaagcacctctccatctgagaggaaaggcattggcccaaaaaagctaactta

SEQ ID NO: 692266 - DNA, 878 bp, Homo sapiens
  misc_feature (431)..(431): n is a, c, g, or t
agcggctcggctcccacccttgtgtacctgggccgaaccattcaccggagcgcgcagcgggtggagtgtggctcggaggaccgcggcgggtcaagcacctttctcccccatatctgaaagcatgccctttgtccacgtcgtttacgctcattaaaacttccagaatgcaacaggacggacttggagtagggacaaggaacggaagtgggaaggggaggagcgtgcacccctcctggccttggtgcgcgccgcgccccctaaggtactttggaagggacgcgcgggccagacgcgcccagacggccgcgatggcgctgttggccggcgggctctccagagggctgggctcccaaccggccggccgcaggccgggaacgcgggccggacttccggtggtgggttcctggttaagaacctgggtggcacaagtntccggcaagggccaatccagggtgaccggtgtccaaccctataacaggtggtaggatcctcgtccagcgtggtgaccgtgccggtgtaccttaccagatgacctcgagccccaggacaaaccatcgtcattcgggaagtacaagtctttgctgccgggaccgcatcgccgatgccttctccccgggccagcgtcgacaagcagctcaaggcccagctggggcagccgggaacccgaggtacaaccccatacgtggagtgccaggacagcgtgcgcaccgtcggggtcgtggccaccaagacgggcaaacgctgagaccgtgggaagattactaccagggccggaggaatcccaatcagcgggaaatgctgacctgacctttggaccaaggggtgggaaagacagcggtgtggaatacggggacggggtcacggccaagaacctcagg

SEQ ID NO: 692267 - DNA, 799 bp, Homo sapiens
  misc_feature (1)..(1): n is a, c, g, or t
  misc_feature (25)..(25): n is a, c, g, or t
nttgacaggatggctatgaagcccnctgatataatgtttaacaagtccctcaaagccttgtctcgcagtccttaatcctttaatcccacatggaatacctgagaccatctgtcttgttgcccctcaggttgccccatattctccagagtcactagtagggccagcagcagccccttttggcctgtgaggtttggggccaataagcctgttggggtgggaatgaagtgtgggctttgaaatcagatggacttgggccaggcaccattgctcacgcctgtaatcccaacacttcggtaggccaaggtggaaggattgcttgaacccaggagtttgagaccagcctgggcaacatggcgagatcctgtctctataaaaaatacaaaaatttggccaggcacagtgggtcatgcctgtaatcccagcgctttgggaggctgaggcgggtggatcacctgaggccaggagttcaagaccagcttggccaacatggtgaaaccccatctctactaaaaacacaaaaattagccaggccaggcctggtgactcccacctgtaatcctagcactttgggaggcccaggcaggcggatcatgaggtcaggtattcaagaccagcctggccaacatggtgaaaccccgtctttattaaaaatacaaaaattagctgggcatggtgtgtgcgcctgtaatcccagctactctggaggctgaggcaggagaatcgcttaaaccagggaggtggaggttgcagtgagctgagatcgcaccagcgcactccagcctgggtgatagagcaagac

SEQ ID NO: 692268 - DNA, 699 bp, Homo sapiens
ttgtccagaaatgagttggagaaatctaaacttctgacagaactacccaggtgttctctctgatgtccaggaggagaaaggcatgaagtacaaattgaagtatatgagaagaatgattaatatgaaggtgttgactagtttaagctgttcccccttccctcatgataaaagtgaatgtattttgacattagaaaaggtttgcggttgactttagatctataattatttctaagcaacttgtatgtgattccccagctactctggtctcatatcagataccatgttatgagacattctggctataactaagtgcttcgtccaagacccgaactgagtccccagcacctgctacagtgagctgccattccacacccatcacatgtggcactcttgccagtccttgtacatcgtcgggctttgtcacatgtcggtaatatttattgaacagatgacagatccacatacccttcaactgagcagtttcacatagttggaaatacgcaaaagcttcctacgtgtatatccagaggtcgtagataagtgtggccaccttgtcgtaacagtgcagacattggacaacaactggaagtccagtgatgggaaaatgagtatgtacctgtcttagatcgggaaccaaagcagatgcaagactgaactttccgtgaaggcaggcataggtagggcatacagaagtcatca

SEQ ID NO: 692269 - DNA, 123 bp, Homo sapiens
  misc_feature (31)..(31): n is a, c, g, or t
  misc_feature (38)..(38): n is a, c, g, or t
  misc_feature (69)..(69): n is a, c, g, or t
cggagggcgatgtcgattgttctgccgcgcncacgctngccttcagcttgtcagcacccaggctacttnaaggatcccttccccatctcagccgcctcctgctattgtacctttatcgttatg

SEQ ID NO: 692270 - DNA, 303 bp, Homo sapiens
ggctgtctagaggtcccaggcggacgctactgtaacttttcagtacgtcacagttgcgggggctccacagaagttatgcagggaaaaggtgacgcccccagaataccgcccgtgatgtagtacgaccaaccgtgaaatctcagaatccaggtttacaacatcgtgggcattagtgaactccagtccatatgccattcacttatacctcataacaaggagtcgttgagtagataggccggtggcggcatctgctggagcgtttctatttccaaaccaaacataaacaccatcatttactacttg

SEQ ID NO: 692271 - DNA, 433 bp, Homo sapiens
aataccccaaaaattaagtttttctttttccaaggtgcccacgccacccctatgtcacgcctgaagtagttattgagaaagtcgtccctttccccttttctataaccaaatagacaggaatggaagattctcctcggggcctgaaagcttgcgggatgaataactcctcctcctcaggcccagtcccaaggtacaaacttgcaccagcagcaagatagcagaggcaggaagagagctggctggaagacacgtaccccctgaagatcaagagggaggtcgccctggtactacatagcagtcacgttaggctgggacaattcctgtttacagaggactataaaacccctgccccatcctcacttggggctgatgccattttaggcctcagcctgtctgcatgcaggcgctcattaaaacagcatgttgctccaaa

SEQ ID NO: 692272 - DNA, 374 bp, Homo sapiens
  misc_feature (100)..(100): n is a, c, g, or t
  misc_feature (141)..(141): n is a, c, g, or t
  misc_feature (152)..(152): n is a, c, g, or t
  misc_feature (190)..(190): n is a, c, g, or t
  misc_feature (205)..(205): n is a, c, g, or t
  misc_feature (211)..(211): n is a, c, g, or t
  misc_feature (215)..(215): n is a, c, g, or t
  misc_feature (225)..(225): n is a, c, g, or t
  misc_feature (353)..(353): n is a, c, g, or t
gtgttcctgttgcttggactttaacaaatattatacataatctggggatgtacgtattttgcatgcagtgaaaggaacacctttcgaaactccctgaccnagggtaaaaggcaagggctccctaacctccattggggaacnactgggacctnggagtaccgttttacatccttcacgggaagtttttccncaatttctcccaatnaatccnatantttccgggcnagtttcctatcgaagtatgatccaactcacttcatcctaaacacagcttctctcctgagtgtactaattcccaaaatgccacaactacatggtgttcggatctttgggattaataagtattggaatgntttggactggaaaaaaatttt

SEQ ID NO: 692273 - DNA, 659 bp, Homo sapiens
cagcgtaggtgctaccaccgttgccgtcgccgccggccatcttgatggcaggaacgcagtccggtgtctgggacagctggagacagtggtggctgagctgaaataactttacctcgaaacggaaatgcgtattgttgcgagagctatctgtcgtcctacgacgtgccacgcatggccaagtgtgactatggtgaacagagtcgctagtactgggtttccatatctcccaggatttcgctctttagttaaaagggtggtcaagtcccaaagcctgttcgaatgcaggatcatcaggttcggatgagtctcatgtggcttgctgcaccttccagatgatatagctctcgaacagtgatggccatgatgagaacgtactgggaccctttggtacctgcaacgatcggagaggttccagcttcctcgggagacataggtcctgatggtcaccgtcaagtgggacgtagcattcacgagaagaaaggcctggattcgataaaactttggcgtgatgttctagctagaaccgtttatcaagtgagagacgatgagtttgtagatggcacatatatgtgaatgaatttcagggtaatgatgcgagctgttgaacaagacattaacagtggggaatcttagttttgaaggtgcggagtagagtgtgc

SEQ ID NO: 692274 - DNA, 249 bp, Homo sapiens
  misc_feature (26)..(26): n is a, c, g, or t
  misc_feature (129)..(129): n is a, c, g, or t
gatcgcttaggctgtggtcagaaatntgttagaagaggccttcagctgccatctggcagagcatagcagcatgccacagtgtaggatctctgtagggtcatgtagttgggttcaggaagttctcctgcnttagtgatgctgcctggcaggctgttgacctgctcgtcgcaaatatctttagcctcctgcggtgagatgagaacaacaggccgtggagggccattgtctttctcgtttgtttgttccgta

SEQ ID NO: 692275 - DNA, 142 bp, Homo sapiens
tagaggatcgttacatgaccaagcatgcatgcatgcgtgttatcgacgtgtattcaccactgcggtgcatgccttccctgtacaagttccgtctacacgtgagccggcgtgctgacctccaaatatcgttaagctggagcct

SEQ ID NO: 692276 - DNA, 1287 bp, Homo sapiens
tggcatctcccattttttttaaatttggcaattttattattttggcaaattattttggagagacattgtgatttttctctcccgcggtgcctccccgcggttctctcccgtggcggaaggtgcgcgtgcgcgcgcccagcccgtggtcgcccccgcggggggtgattcccttcccttccgtgccgtgcccgccagccgtgaccgtgtgtgcccggcttcgggggccgcagcctcggccccggggcgccccgcgggagcttctcgggcgcgaagtgaaccattagaagaacgcctaacggggagggcggccgcgctttccgtggaatatggacaaggcgccagaaacaacaagaagaagccacggtgagagggagccgagggaggcggacttcgcctggggagccgagggagcgaagagagacgaggaaacagagaaagagagaggcgcaaattagcgcgtggcccagaggcgtgggcccacaatcacccttctccgtggtggagagggaacccccccgggatgtggagagggcgcccaaaccacgcgtggccacctctgtgcgtcttcacaacagcggtgactatccccccggacggagcgagagacaaaccccaacaagaagaaaacggcaaagatgaggaaaaaacaccccaatgaaccaggcaacaagagaacaagagaacagaagcaaaaaaagacaaagagaggaacggcacaagagcacaaaaaaacacacacaagaaagaaaaagacaagtaaagacgaaacaaaacaagaaccgacggggacagcaacaagacacaaaaccaggaagcaagaaaggagagacacactactgacgagacagagacgaaagtaaaagcgacaaagaacgaaacacagcagagaaccagagagacgaaagaaaagaccaagaccaaactcaaaccaagtaccaacgacaggaagacgctgcggagggagagaggtacaggccaaagagaagcaggacaggagcaggaggaagcagaggaaccacagagagaagtacccacagacgcatgcaagacgacaagagacgagaaagcgcaacaggaacaaccggcagacaaagcacagccacacaacgagaccgagacgagataagaaacaaacaaaaacaaccccaacaaacacgacgtaacccagcacaacagatcaaagaggaacacccgcacacacacgacaaacatacacagaagacaccaagccaaacagcgacatggagagagaagtccataaacgataggacagtgattagcgaacaa

SEQ ID NO: 692277 - DNA, 449 bp, Homo sapiens
caatcatggctctaagggtgccaggcagcaggcagcaaagctcacttgggaagcagtcttggtctttcagcttcttccccactgaaacactatacactgggtggccacagttcatggcaaaacacacacaaacacacactctctcacagtcaaacacacatctcaccaagttggtggcaggtagctctgggtatcatgggtctggcattcgcccattcggattctaagctgtcctaaagctctttccagttacttcccgctgtttccgggccgtgtgttgaggcactccagcttctattctgtcacgctgatcgtcaaggcacaagtgtgggcaagtcccctactgagatggccgtcgcttggaagcagtggagctaaggggcccgaaggtgccaaggatgatgtaggcttcctctgctccgtcagacctcaaagataggatcagtgtc

SEQ ID NO: 692278 - DNA, 194 bp, Homo sapiens
  misc_feature (129)..(129): n is a, c, g, or t
caacgagccggccctacttagaagagacgagatggagacaccagccccaactctcggaacaagaaagatgactggggaggaaacacaggtcagcatgggaacagtgtgtcacagctggacacgggggtngggctgtactctccacctcctacacagttaggctaacagggaacgcagcacacatatcagagtgc

SEQ ID NO: 692279 - DNA, 222 bp, Homo sapiens
tctccatttgcaatgttttcttacattttttaaagcactttttaccccccttttgcccaaaatttcatgatatccaaatgggtagttacagtcttgtcccgtcgctgcaactcccgtacggactcgggagaggcgaaggttgcactgctttttgacacacggctcgcttaacccggaaaacagccacaccaatggggtgtgcttcacagggtaccgagctcg

SEQ ID NO: 692280 - DNA, 544 bp, Homo sapiens
agcacaaggcttcacgctttacgaccatctgtggttttcagtgaacaacgcgctgagcaccagcagactagaaaatcaacaacaagaaaaacacctcgttttttaccttgtcttctagacatgaaagaggcagtcgcattccactctgcattatgttctacatgttgctttagtcagtatatgctatagtctgtaagtgacaaggtatttttttctgaacagaagtttacttagaaataccatgcacttgggggtaccaattaaccgcctgaaaattatgcatattgatagtgcttagagagatccaggatagtagagttcgtaagaatttatagtgaaagattgtgtatcagttagagccagaaataattttatattaatatataatacagattaacattatatataatatgtacgctagtggttcacattccgtgaacgatgagcctagtaaacagtatattcatatactgtacctgcacatgtacccacacgtgatgtaggtcttattcctttagtatggacttaaagtacttattcataa

SEQ ID NO: 692281 - DNA, 448 bp, Homo sapiens
  misc_feature (74)..(74): n is a, c, g, or t
  misc_feature (87)..(87): n is a, c, g, or t
  misc_feature (94)..(94): n is a, c, g, or t
  misc_feature (103)..(103): n is a, c, g, or t
  misc_feature (152)..(152): n is a, c, g, or t
  misc_feature (223)..(223): n is a, c, g, or t
  misc_feature (247)..(247): n is a, c, g, or t
  misc_feature (372)..(372): n is a, c, g, or t
  misc_feature (399)..(399): n is a, c, g, or t
  misc_feature (403)..(403): n is a, c, g, or t
  misc_feature (407)..(407): n is a, c, g, or t
acgatgattacgccaagctacgtaatacgactcactagtcaatgacagcaccttcacccagtaccgcagctggnaccttgcatacanctacggngaccctcanaccgggatccgctcatggaccctcctttgcactcctgacgtaacctgcngctcggagcaggtctactggtcgttgccagacatgatgcaagaccccgtgaccttccgctccacgagccanatcagcaactttccggtggtgggngccgagctgttgcccgtgcactccaagagcttctacaacgaccaggccgtctactcccagctcatccgccagtttacctctctgacccacgtgttcaatcgctttcccgagaaccagattttggngcgcccgccagcccccaccatcaccancgtnagtnaaaacgttcctgctctcacagatcacgggacgcttccgctg

SEQ ID NO: 692282 - DNA, 377 bp, Homo sapiens
  misc_feature (170)..(170): n is a, c, g, or t
tggtgagggtgatctagaggatccctctaccagctcattcttttctcccaagtaaatggtgtagcctgtattaatggtagacgtcatcttcctgaaatatccatttagcaggttaatgccggtggagctgcagtggggccggagcctttcttccaggcctctgttattgnaatccacctaccgcggtctatttggagctatggggggcctttggaacgggttcatgagatgcgttggccaagcagaaggctggtacagaagcagaacaaagctctgagcattcctgagagttttctgttgagaaatgccatgggtttatgtcttcagcctgccttgggagccctgcatatttttacttgccgtggggaaggaggggg

SEQ ID NO: 692283 - DNA, 136 bp, Homo sapiens
ccgcaggaaaaaaattggtttgggtttgtcttctgtcgtaatatacacaatgacgtttggaatacaataataaagtaacagtcttttgcactgaggaaaaggttgtgcatgaaacatgaactacaaatagttgttg

SEQ ID NO: 692284 - DNA, 151 bp, Homo sapiens
atcacccatccagcaacatcgagccacccccgcgccccgcgactagacgcgcgcacacacccacgaaactacaacactaaacgggaccccccacccgcgaccgtcacacatgatcacgaccacacccccgcccaccgcagcccgagcacgc

SEQ ID NO: 692285 - DNA, 244 bp, Homo sapiens
aaagcagaatagaagttggggatgctacatgatccaaataatgagcttaaaaggtagtaacaggaagtacatttgtgagcaaaagagctactcctgcacaggtacagtgccacacagactgtggtacctctggagaatgcaatgggcttctgacaggggagggactgctctccatccagaagggactggcaaagaggtcagaattggctgggcgaggtggctctccctgtgatctgagcacggt

SEQ ID NO: 692286 - DNA, 278 bp, Homo sapiens
cgatctagcggatccttgatatgtgtctcaggagtcatgaggagaggtggaactacttgtatatctatgtaaatggggagagcatggtaacactccaatccagcatgacacaataagctaaggtttagataatttaaggtggttttatggtctttgagcagaggctcatatcatagtagcttaagactcatggaatgccatgtcaattattgcataccaattttttcatgctgtcattctatagggcgtcgtgtgtgtgtggtgtggtgtgtggtgtg

SEQ ID NO: 692287 - DNA, 299 bp, Homo sapiens
  misc_feature (64)..(64): n is a, c, g, or t
acctgtcgcgcgagcacagcttcgggtggaccggtcaactcagctctacgcactgctgctggtngacctggcgccacctccccgccgagtcacctctgcggtgcacgcctccctggacaagttcctggcttctgtgagcaccgtgctgacctccaaataccgttgagctggagccccggtagccgttcctcctgacccgctggggcctcccacacgggccctcctcccctccttgcaccggcccttcctggtctttgaataaagtttgagtgggccgcaaggtgctcggcggccgcgag

SEQ ID NO: 692288 - DNA, 168 bp, Homo sapiens
  misc_feature (23)..(23): n is a, c, g, or t
aggcgggtctgaactgggccggntctgaactggggctggcgcgttctgagattttcgcccacggaaggatcctgggtaacctccagggcaaaaagtcttagacttcggttgcagggccagctcagttcctcctgcctgatgaggttgagccccgatggttgtggacac

SEQ ID NO: 692289 - DNA, 485 bp, Homo sapiens
ggaagaaaaatatgatccaggttatgaggcatcatattgtggtgcttacggagaacatccatgctacagtgaaccttgtggcttctcttcaaatgggtctaattgcacgagcgtggagcttaagatggagaatcagctcttcagtggcattcctaatgggcagtggatgacccaatcatttacagaccaaattccttcctttactaatcactgttgacacacaagaacaggaatatagacacatgccatgcttctgaatggtgcttctcagctctggttatatgctgcagtcttaatgcacttgtcaacaagtataacctcattttgctaactgaaggtgttttattagtattttactctagtggtgtaattgttgatgtagaacagttgtgtggtagtgtgaaccgtatgaacctaagtagtttggaagaaaaagtagggtttttgtatactagcttttgtatttgaattaattatcattccag

SEQ ID NO: 692290 - DNA, 129 bp, Homo sapiens
tccccgtcccgccgccggccgcggcggcggcagggagacgcgcacgtacttgctcgcgattcagcccaatctcggcgccgaggcgggcgggcggccggcgggccgggccgggcggcctcgtcgctcgct

SEQ ID NO: 692291 - DNA, 308 bp, Homo sapiens
  misc_feature (170)..(170): n is a, c, g, or t
tctcacgctgctatgaagaaatacctgagactgggttatttatgaagaaaagagggttaattggctcacagttccttatcgctggggaggcctcaggaaacttacaatcacagcagaaggcaaaggagaagcaggcaccttctgcacatgatggcaggacagagtgagtncaagcagggaaggtgccagacacttataaaaccctaagctctcgtgagactcactcacttattatgagaacagcatggggaaaccgtcgccatgacccagttacctccacctggtcccacttttttgacagattgggg

SEQ ID NO: 692292 - DNA, 206 bp, Homo sapiens
cgcgcgccatacctagtctaacattgtgtgtgaggctgctagaagtcatcaaaaagctattagtgcgagtagagtttgaagtccttagagaggattatgatgcgactgtgagtgcgtccgtagtttgagtttgctaggccgaatagtagtgaggatgtaagtccgtgggcgattatcagaatgactgcgccggtcaagcttcaggg

SEQ ID NO: 692293 - DNA, 327 bp, Homo sapiens
acccctaccacgtcatgataccagaaatgttgatggctgatgtaatacctggttcttatcttcttagttaaaaagaatttaaacaagagacacacagcaaaagaagtacagcataatttattgcaaaaaaaacagagaatattttgaaaattaattgcagaatagacggtacagtctgagaaagagattccagggcagcctgctcataaaagtgagacagcgctaattattgctggagaaaccccctttatgggagttttgcatgattattcataagaaggtggaaagaagcgttgcagaaagcatgttctgtacacatttgtgcat

SEQ ID NO: 692294 - DNA, 879 bp, Homo sapiens
  misc_feature (254)..(254): n is a, c, g, or t
gtgtacagtgataactgagcagcgagtactataaataagtgactcccatgggtgcgactcagtactatggaataaatccgcacagttggttagtgcaccgacgcagaggtcatggtagttatgctcatgatgtgtgtgcaggttttacttcacatgatcatcagagtacataaataagaatgaggtgggtagttacatccatctcctgatgtttacgtaggcctaataagaagcgtgatgaattaggtcgaagnacaagaaggtcccatcgtatgctcttctctagagttcaataggccacttataagtgacggagactcaggcgtgtaaagtgacttcggcatgactagtctattcccataatttaacaatagcgtgcatgtgtttctacgtgctatagcataaaatccacctgagaaggcctgaggctgaattggcctccccataggattcccttcaaaatagtccagagtcaacaaatgttcccttgtggcttttccttgcttgcaatatggggaatccacggtcatgtggttcccttaatctgtagcctgggtaattctatgggccttagcaggtgggttcaacttggaataaatagcggtcattgccagagcttcaatactttggaatgggtgtaagagggagcacatcccggagaacattataactcacgttcgagtgtgacctgagcattagcttcgcgaggtcacgtgagacgcttttatccaggagttgttacccccctaccgtcctatataagtggaccttttcgtggcgccaaggaaatgagggaagcaaagctcgtagaggacgaaaccatatctacggtggtaaaaccacctgggaagccgaatatgaaagcttgggacttagaag

SEQ ID NO: 692295 - DNA, 366 bp, Homo sapiens
  misc_feature (81)..(81): n is a, c, g, or t
gctgggcgctagtaatataatcgtctgtgacgtggcgagaagcgcattgcggcccgagagcaccccccgggtaacgagatntacagagacgattacgtctcgtcttcgagattgatgggaggcggcagcggacgtggtgccgcaatctgtgtcttttgtccaagatgttcctggaccacaagacgctctactacgacgtggacccctttctgttttatgtcatgacgatgcggacggacaagggatgccacattgtgggatacttttccaaggaaaaggagagcgcagatgcatacaacgtggcctgtatcttgactctcccgcagtaccagcggaaaggctatggccgtctcttgattcagttct

SEQ ID NO: 692296 - DNA, 215 bp, Homo sapiens
tgccgtctgttcactgcgccttgactggaaaaagctttactaggaagtgcctgccgttctgttttatgtcatgacgatgcggacggacaagggatgccacattgtgggatacttttccaaggaaaaggagagcgcagatgcatacaacgtggcctgtatcttgactctcccgcagtaccagcggaaaggctatggccgtctcttgattcagttct

SEQ ID NO: 692297 - DNA, 310 bp, Homo sapiens
tatcacaacctagggtcgtcttgcaggtggtagcatttaccaagatagttgtaggtaagaagggcagatttattagagaaattgtgaaaatatgttgcagtgggcagctcagcagagaaggggctacctgcaaagaggcaagggctggaggaaagttttatagggtcctgctgaagggtgctacgtgcggaatgaggtcattgtgcccgcaggttgtttgtgattagctgtttctaacaattgttcatacaatcattgttcattattgttctcaacttggggctctccccaacctggggacccttcctta

SEQ ID NO: 692298 - DNA, 99 bp, Homo sapiens
catggatttgctggtgcagtacaactaggcttaatagggacatgtcactgcactccagcctgggcgacagagtgagactccaactcaaaaaaaagaaaa

SEQ ID NO: 692299 - DNA, 491 bp, Homo sapiens
agcgttcattgcttcagatagatatacatcctactgtcggtgctgtgcctataactgtaggatcattacctctgctaggtgggttacctattacaccaccctaagtcaattcaggccatattaccggttactctcttctaatttcatcacctcattatctaagattaactacgtgaggcggcaagatgagaattaggtgtcacactagataagacgttatatgtataacagtataagagaatcctatagctatcttgggagtcttatctatgtttttaaagtaatggtattttcctaattctgttttttcgatttgctatgcttacctctcacttatgtttaaggttgaggttgtactatctatgtaggtaatgagtaatgactaatgacgcatttaaatttattaaccttgtactttggtactctgtagtttaatatatatatgtactcccaagtttccttagattgttaattaagaaaattttcggacc

SEQ ID NO: 692300 - DNA, 261 bp, Homo sapiens
caataacatcagagagcaggagacgcatgctgcagctctaacagtccaggcctgaggcgctagaaggtgcgttaccaggtgaggtccactctgcccggtctcgggccgaaccagggggctgctgtggcctgatagtccgagtggaacaaagccaactacgtgcgatataaatgtctggaagattctagagatctgcagcatgacaggacccgtatctggatcattcatccaatgggtgctgtacagtgagtactcccagca

SEQ ID NO: 692301 - DNA, 226 bp, Homo sapiens
gcgtaaggcgagtcgggtatgggcaatgacacggatgacttggcagtacttcttccatgctgctgaaggccttctccagctggttcttggcatcctcaatctggcatttcttgccgtacttgggtaaagggcttccttccttaaaattattggccattctttataagaaaacggcttcttggcattccttcaacttggatggttgctccaaggcaaaagaacaggt

SEQ ID NO: 692302 - DNA, 148 bp, Homo sapiens
atgacaaactctgcaagtacgtacacggcacagcatttgcgtctgcacaagagggtacgaaggagggcgaggctgtgacaccctggagatccacaggactgggctactttaggagttcactggtcgtgggctatcggcgatgtgcagc

SEQ ID NO: 692303 - DNA, 156 bp, Homo sapiens
tgtccctattgcatataaactatcatatatagaaaaacaaaagacttacagtcacgatggctcacacctgtaatcccagcactttgggaggaggaggctggtggatcacttgaggtcaagagttggagaccagcctggccaacatggtgaaactcc

SEQ ID NO: 692304 - DNA, 124 bp, Homo sapiens
ctggggcttctagaggatagagatttttgagctgagcaagatcccggattcggtcccccagtgagcgaatggacaggtctattggcagagagataggctaggatgttcataggtaggaatacag

SEQ ID NO: 692305 - DNA, 118 bp, Homo sapiens
ccaattttttccctaggggaaattgtttaggcttagggcccttggttcaaatatccccagggaattgccctcggtccccccctattttcccaaaaataaacctctcccccccttttta

SEQ ID NO: 692306 - DNA, 399 bp, Homo sapiens
  misc_feature (8)..(8): n is a, c, g, or t
  misc_feature (399)..(399): n is a, c, g, or t
tgaggcgngagaatcccttgagcctggaaggtagaggttgcagtgagccgaagttgtgccactgcctccagcctggatgacagtgtgagagtctgtctcaaaaaaaatatatgtatatatattgttaagactaaatgtcttaataaataaagaggctgggaatggtggctaatgcctgtaatctcaacactttgagaggtgaggttgaagtatcacttgagcctaggagttggagaccagcctgggcgaccatgggagcctcccatctctacagaaaaatgttttttaaattggctgggcatgatggcatgcgcctgtggtcctggctactcaggaggctgtggcaagttgatcacttgagcccgggagttcaaggctgctactgtgagctgtgatcgn

SEQ ID NO: 692307 - DNA, 518 bp, Homo sapiens
tctagaggatccctcggtcaggttgtactgctttaaagaaataccgagaatgggtattgataaagaagagaggtttaatcggctcacagttctgcaggctggacaggaagcctgactggggaagcctcaggaaactgacatgaatgtcagaaggcatagggcgggcaggtgcatctaacatggttagaacaggagcaggagagagagtgagaagggaggtgccacacactattaaacaacttgatcttgtgagaaatcactcactagcatgagaacagcaccaagaagaggatgctagaccattcatgaaaaagcacccccatgaccgaaccatctcccaatgggccccagctccaacgttggggattacaatttgacataacatttgggtgggaacacagatccaaaccttagcaggtgggaaagcaggctcaagggataagagaatggcattgggaaaatgatcacgtgtcttggcacccagaggttggaccatcttgcactgactgacagtgttg

SEQ ID NO: 692308 - DNA, 1120 bp, Homo sapiens
gcagaagccttggaatcagtccccatcagaacctgagctattttcctctggccgcagaggtgtaggggtggaatgagccgcggggaagctggctttgaaacctcagggcatgtcccagccccggctaagccacaggaaggaggggacgagacaggcagacccagacagtgtggagaccctgccacagaccagaggagggcatgagtggagaatccaagggttgagagccagtggcgggtgatggccagcccctggggcccagccctgtatactggttcttgcaaaatgggagctgagcagcctctggacagccagtgacctttgacctcggttgaccactcttctttaagccatagaccctgaggccctgggctgggtgctgggaagggagggttgaaaggcaccgtgaaccagaagggtgtggctttccagtcaccctcagggagcctcaccatctgtccagctggggccagaggctggagaagtacctacctgattcaccgttggcggcgggtactctggaactgtaaaacgcatccaccagaatcacgcttatgcttgaatccagaagagccccataatcagtaagatggcatctagtgtcgatctgggacattatcctcactcgtgacctacaagacaggtttaagcgggccaacatttcccccgtttagcaccttcagggacatgcagtacctaggggatctagagcgtcaggacggctccttcagaggcgccaggacagacagaagcccaagaacggacgaacacagaggcgttagcacacagcagtgtgaattagcctggaccacacgcatacatacgatcagcgtcagaccccaattgtcggagactaaaggatcagaaaagcagacccttaatcaggaactgagcaaggacccaacgtgagttccagggaacaccatgagaacatgtccagaaaagggaagcggggggaaaaggagacataacaggcgaacaacacaggagaggagtagagacatagaagcaccacgcgatgacagaggaaaaagagacgcgaccgaagaggaggagaggacaaaagaaagaacagagccagggagaaagggcagagaagagcgaagagcgagaacgcaca

SEQ ID NO: 692309 - DNA, 492 bp, Homo sapiens
  misc_feature (480)..(480): n is a, c, g, or t
  misc_feature (488)..(488): n is a, c, g, or t
tgatgcctgcttctggcctctgtgagccccaggttctctccttctacctttgtgggaattaaactcaggtcatcagccttgtgcagcgaacactttacctgttgggccgcctcacagccctctccacacacacccctcctaaaaatacttatgtggggcagttggtggcacacacctttgatcccagcactccggaagcagaagcaggcacatttctcagttcaagggcagccagtctacaaaatgagtttcaagagagccaagagtttcaaggaggtctgaagagactttgggcctcttagaactggagatagagatggccatgagccatgtggtgctgggattgcagtcctgtccttcctaagagcagtgagtcctcctaactgctgggccatcaccactcttgtcttctgccccatactcaccctccttttttcctgagacagagtttttatatgtaacccagactagccttaaatntctagctntgac

SEQ ID NO: 692310 - DNA, 98 bp, Homo sapiens
catggatttgctggtgcagtacaactaggttaatagggagcttctaacgttagaagcttgaattcgagaaaacgttagaagcttgaattcgagcagta

SEQ ID NO: 692311 - DNA, 1145 bp, Homo sapiens
  misc_feature (1145)..(1145): n is a, c, g, or t
aaaaaaaaaaaaaagaaaagaaaaattaagggagaattttgggtggttaatggctgaggaattggcttgagtgggttagttgttaccaattttctctttggaacctttgggagctaaggatgctgagttctagagaaatgctagtctcaagcccgtgtttaagtccctcgtgtttctagcccgtagtttcatagcatcaggtgaactggagccacaacagcaaatttctattcagctgtggtgttaccattacagcttgggtgctgaagggcgaattttcttgtgagccatttacctcagtattaaaggcacttgagtttcataatcttaagggaattaactcttataagacgcaatatttctgggtacagctggtggcttctggcgaacctaaaaattatttcacaaggggcaggtaaggttgtggcgcaggaggagcgcaatggataaattggggccagggcacagaacaaatctaagcttcataataattggtctggggactatacaccctaatttaatggtaagttttacagaagtaatatgactttggattggctactataccacaaagagtttatgaactggagatcataaggggcaactggatgttgtgaagaaagtagtcagtacatccgtggctcatgctctgaaagaattatccagagaggctctctaaaaaatcagggaaatgtttcccatgccatgcaccctggtttccaagcattctgctgggtccaagtgagcttaatgcactgaagtttaaagtatataatatcacgggattaaattcccaacttggttcaactgtgatcctccaagttgggacaacagtagggcaaaaataaaatttcgactttccaccgttcaagagcggacatttataagcaaatagagaaaggagaattaccccgagatataagagggaaaagtgggtttcgccaaagattccacttatacacacatatagcagacacattaaggagagagggaagagaccagacgtgaaaataaggagaaacatcgtgcgaagcaagaaaaaaccagtgtaggggagagcaaaacaagcaggaagacaaacacgacaacagaaggaaataggtaaaaaaagaacgaccatagtattgtcggttctctttcccacn

SEQ ID NO: 692312 - DNA, 204 bp, Homo sapiens
ttgcccggctcattttgtcatttttcagtcagcagcctggttttgccatgttggccaggctgtctcgaactcttgacttcagatgatccatctgccttggcctcccacagtgctgggcttaccgtgcgtgagccaccatgcccggcctctttctcacctttatacctgtcttcttatcctcacatctgttttcacattttggcg

SEQ ID NO: 692313 - DNA, 104 bp, Homo sapiens
tggcccgggtagtacggtgtgtcaccggaagagcatcccatctcctgcacttgagacgcctctatcccaccacctgaagcattgcccctgtcccaccatttgaa

SEQ ID NO: 692314 - DNA, 260 bp, Homo sapiens
tggacagcacagagggtggacagcacagaggagctggacagcacagaggaggtggacatcacagaggaggtggacagcacagaggggtggacagaacagaggaggtggacagaacagaggaggtggacagccaggaggggtgggtgggatacagtgaggccaaacaaggcagaagcggatgcagtagtccctggctactgcccagcttccgggactcacagagctgggctcagccttggatctggcagtgctgagctaaa

SEQ ID NO: 692315 - DNA, 271 bp, Homo sapiens
gtaggccaaagggctgcgatcactaggcttgatcccatatttaccatggtgttataattgcctacagttattcgatgtatagtaatgtgctgtgcagtgttagaggcgtaggagcaataagcaataccatgtagcctaagtatgtagtaaactataccatctaggtttgtgtaattgcactccagtaatgttcacacagagtgacaaaattgcctaatgacacatttctcagaacatatccccatcgttaagtgatgcatgactgttatta

SEQ ID NO: 692316 - DNA, 1001 bp, Homo sapiens
cgccaatctaagcagcggctgtgaggaaaacatggcatgaggggtcgtctttacggaaatctgtgccacaccggccctaccatttacgagggtgaagctcctcgaacaccatggtgaacacttttcttgcacgaagtctggtcgccagcggcatgactaccagaagcattcactcgactgctattaatgcttctaccatgattgctgccctggtgcattgacacaagcctcaatctcatgcacccagttctatagcttcagttgccatcaccatctcatcccggggaggcagagatcctctggactatcaagagggagcgcaggggagacccttataaagctcgtcttgaatgccttgcgtattagataattgtggaacgcagagcgcgaaagtcctgcggattgagccgagccatggctgccccgaggctgggaatccccaggagaaaggtatctcgcgcggggttccttggcaccctacttcctgcagctagcggtacaccgcctggcggcgccagtgtgtcgggataccggggaggccgagatacctagcacgtctggcgagatgccgtcctggctggtctggtagcgcaggtggagtgatggctggcctctccgggtccatgcccctctgcgaggctctgtcgccgtgcggaaggcccaggctggtgccatgagtccagctagtggttgcagctttggtgtccaaggctcggagaggccgtcgtaggtccgtgaacgagacccgacggccgctacctgttgttccacttgggcttggcgagacccctaggtcctcgccttagccccgtgatcccctggggtgcccgagccgggattgttgttgtgccctccgatccggactgtgaccagttcggttggaccacttcggcgtgttcacgaaggctatcggggccgtccaccggccggcttagcgtttcgtctgctggcttggccggccccccgtttgtcctctccgggccctttttctctttccttgc

SEQ ID NO: 692317 - DNA, 271 bp, Homo sapiens
  misc_feature (260)..(261): n is a, c, g, or t
agggtctgccatctatgtgtagagaggagtatgtctgtacccaggctgagtgcaatggcacaatcaaagtttactgcagcctcaaactttggggcttaagcaatcctcccacctcagcctccagagtagctggtactggaggtgtgagctgctgtgtctggccatgctctattgttttcttggctgtgcagaagcttttggtttgatgtaatcccatgggtctactttggcttgggttgcctgtgctttctgaggtcctnnatctcaaaaa

SEQ ID NO: 692318 - DNA, 206 bp, Homo sapiens
  misc_feature (72)..(72): n is a, c, g, or t
tcccatcaaccaaaccccccttaaaattaacctgtgggtcagttttcttaaaaaaaagccaaatttattttncttatcatttagaatttgccattttcaggaacaaaactttttggacattggaaaaggaaaacattgcagtttggttttaatttccccatgaaaatcaagggtaatttttaataaattatttggagaaaaatgta

SEQ ID NO: 692319 - DNA, 1171 bp, Homo sapiens
aattcgctggatttttaagagcgcgttattatttaacgcaccgacaaaagtatagccctgaaacgtttgaagtggcctcattcttcttagatgatgtcattgcgatgatggttaaccataactttaccagcttcacgagcaatgaacgggcggtcgttaagttaaatgaagtcatgcaagccgcattggtcaatagtgatgatcgcgattggcgttactttgtgatgcttgtgccagtgctttatgacatgcaacaattcttggttaaagaaggtagcatgaatgaacgctttgtggcacaagcaccgaagtttgacattaacttctggcgcatgattatcacggtgatggcgattaacttcttcaagtggcaaggtaaagatgtggctgaattgatgaagacatcttctgcaatcgatgatttgcaattcaagttcttgcaggtggacgataaggatgatcactttaacctaccagtcattgctgagacgtttagaggattgtcaccaaagatgaagcccttaaagggcgctgattcagttgttgcgcttgaacctaagttgactgaagcgcaaattcaagctgaactcgaatttgctgacaagcgcttggcgcaattcaaggcggcttctgtaaaagatgtggtcagtgataacgtggttaacatgttacgtgggttccatgaaggattggcgactgaatatcaagcgacacatgacttatggcaaccagcgatgtttaatgcgttagcaacggataagttgtttaattattggtcaccggcttgggataaccttgatggcattggtggtgaggtgaaatcttatctcactttcttgagtcaaaagcaagatattagtggcttaagtgaatttgtgacagggactgctggtattgatcgctacattgatgtggcagccttgaatcatcttcttgagcaaatgccagaagatgttttggcagaacgtgccttataaaaataagtaaaaaggacaatcactattgaaatagcgattgtcctttttataatgtaatatgacgaatcgtaccaggtaaaatgatggtcatttgatgggttttgggggattggattaaaatttccccatgttgattctgataaacatagccagtaaaattcgtcacttcttcagatagtagtgacacattgact

SEQ ID NO: 692320 - DNA, 153 bp, Homo sapiens
acccttatgtgctagaccgttgataaaagtgtcaattgattgaatgacaaagtgaagacgaaagctctaacatccatttgaaagggataccatcttcagcaacttgacttgggcagcttgataaacaatggtttctgaaaatggcctgacatg

SEQ ID NO: 692321 - DNA, 601 bp, Homo sapiens
ctgcttcacagtgcttggacggaacccggcgctcgttccccaccccggcggccgaccatagccagcccgaccgtcacctcttcaccgcatccctcggacctgcccaaggaccccgcgccgctccagcgccggcagcaccgccgacgtcgccgactctccttagtcgccgccatgacgaccgcgtcacctcgcagggtgcgccagaacctaccagcaggactcagaggccgccatcaaccgccagatcaacctggagctctacagcctcctacgtatacctgtccatgtcttactactttgaccgcgatgattgtggctttgaagaactttgcccaatacttatcttcacccaatctcatgaggagagggagacatgcttgagaacactagatgcagatgctggcagaaacccaaacgagagattgggccgacatcttcctttcacggatgattcaagaaacaccaagcactgtgatgcactggtgaacagacggggctggagatggcaattggcgttgtgtcattaacattagggaaacaaaatcgtgcatcagtccctaaccggaaactgacgaaactgggccctgacaaaatggaccca

SEQ ID NO: 692322 - DNA, 229 bp, Homo sapiens
  misc_feature (87)..(87): n is a, c, g, or t
  misc_feature (99)..(99): n is a, c, g, or t
  misc_feature (128)..(128): n is a, c, g, or t
  misc_feature (134)..(134): n is a, c, g, or t
  misc_feature (179)..(179): n is a, c, g, or t
  misc_feature (192)..(192): n is a, c, g, or t
gtaagccggtttctcggatcaagcatactgaccctgcgatatcgcagcgttttgctcctcaatgaatacgctttcgcatttcttcanggggcgcgcccnatgcttcttagcgcgcttgtcaaaatatnagctcntcagtctcagctgaggtactctggcatccgttcatgtcattgtgntaataccgtacanactggtgtttcctcgtaccgtccactccatctacgcg

SEQ ID NO: 692323 - DNA, 272 bp, Homo sapiens
  misc_feature (87)..(87): n is a, c, g, or t
gtcgactctagcaggatcttaagctccaacaagaagcataacttattatgatagaaacagtacaaattcaaaccaagctgcagttanctcctttgagacaccaaaaaaagtagcctccatatggttaccattgttaattccataatccgctttacaataatcattactgttgtacttcaggggctccggactgcctttggctctcgaacacattttggctttgtgacatggacccaatttcttatgttcctataaactttcttacaccctgt

SEQ ID NO: 692324 - DNA, 336 bp, Homo sapiens
  misc_feature (5)..(5): n is a, c, g, or t
  misc_feature (37)..(37): n is a, c, g, or t
  misc_feature (131)..(131): n is a, c, g, or t
  misc_feature (207)..(207): n is a, c, g, or t
  misc_feature (264)..(264): n is a, c, g, or t
cctancccttgcccctgcaatttggggaatgttaaancccctatcctcataggagtgtgtatggggtagcatgaacctaaggtagataaaggcttcacgtggtgtttggcatggcgtaggtgtagattggncctcagttttctgcccatgtttgctcttcacgtacctgtctggtatctgtatgtgctaagctctgagccttacaanccatagggagagatatgcaaacttgccctcaatgagcatgttgtctagcgaggaagntgaaatgcatagacagacaacttagaggtggggtttgagggagcccaagaaataagcactgacaacacttta

SEQ ID NO: 692325 - DNA, 365 bp, Homo sapiens
cccagaaaaccaccttcgtccctgcccctcgtggccgatggctgccaatttatgtttattttgcccggctcatctgtcgtttactgactgcggacccccataaaaaccccgctcctaggaggaaaagacaggaggaacatcataagggggttttttcctacgggtcgcattgaaccccgccccaccccccgggtggggagatattttctgaaaaagggcccgcaaacccggagcacaccccctccccgctcttttgtgtgggtttcgaacgcactggggcccttttatataggggaaggcggagcgccctttttgaggggcgcgcgactctatatatacaagctcacaaaaaactccaagtccac

SEQ ID NO: 692326 - DNA, 717 bp, Homo sapiens
  misc_feature (364)..(364): n is a, c, g, or t
gctcaagtgactaaagatgcattactgcagatgcctcatgcgagacaccagtatgaatctcgacgcgaagctggccccactaatggcatagctctctgactaggatgattgctgacaggctcgggcactaggcatacttgagcacgctctgcgagctctacaacaaccactcaaatacatactgccacatacatgagacattgtccgaggactaggactacacttaattgagaccacgcagtgaaacattcaggggctgccacccctaaggctgtagacacattctctgggtgtcccattgagaggagcctttatctgtatgaacattggcacatacactaagcctactctatgcctgtcaganatacgcttttacataactggggaaatctggatgtctgatgccaaagggttgaagctccttggatacatttgctggatatacagccactacgttatttgtgatcagcggactttgcgccactgtacaggggactgcccatcagcagcagcattaggggcttgagttgtgcaccttgaggatggtgtgtccgcggacatgagaatcttgatgggtggtatatgaaatgaactacgttagcactctgatgatgggtttaaaatggacatcctcataactggtgggcgatgagcaggactttgttgcgactcgtactaatggacctggactgattttgggcttttagatttttgggc

SEQ ID NO: 692327 - DNA, 172 bp, Homo sapiens
atacacttagcacaatgttgtcagttcaagctgcggcatctgacagtatttccttccttttctatggctgaataacattccattgtacgtatatactaaattttctaaattcattcaaccatcaatgggcatttaggttgtttccatctcttggctattatgataccgcgaa

SEQ ID NO: 692328 - DNA, 100 bp, Homo sapiens
gtctatcttctgaagtcggctacagaagtcaatagcccaggatgtgtagcctttgagtttgatcacctcattagcactctcaagccacctgctttgtgat

SEQ ID NO: 692329 - DNA, 102 bp, Homo sapiens
gaatatagaggatccccgtgtgctgcttatgatgagtcgagcgtggcttatcgcccgagctggtgagcaacctggcgtcgctgctgatgcagcttaatctct

SEQ ID NO: 692330 - DNA, 309 bp, Homo sapiens
gggcttattcctaaatccccactttcctgatgtgtaaccaccacttacagtcagagtctcgctccctcatcctcaatctccctatttattgttccattccgaatgcctcctctgcccatgctaggtgtgctattgaaagctcagccccaaagaaaggaaaaggggagggcttgggcaacacgaggaaaaagccagctggaaagctgtgccttggacacagcagacagactgctgcccttgactgaaggtgacccctaaatacgcgtccacatcctaacccccagagcccgggaatgcacccttatttgg

SEQ ID NO: 692331 - DNA, 1391 bp, Homo sapiens
  misc_feature (209)..(209): n is a, c, g, or t
  misc_feature (554)..(554): n is a, c, g, or t
tgcgtactatcgttgtctcgttgtagaggttgtcgctacagtgagtttcgtgtgtggcaggatatggttgtcggttgtgtgattgtgtatgctgatggtatttcgtccgcgttgtatgttgttgtagtatgcttgccgcgtatatctcgcgtgtatgttgtgctagtcgttcgctgcgcgccgcagcggtcggggtgcgtgcgtggctngtggtctaaaatataagaaccagcaggagacaccttcgctgtttttgtaaggtgggaacgcccccgttgccgcaggagtttgccccccctgggggtgtgagtacacccgccccgattctccccaccccccgtgtggttttgtgggccgcccctccccacttgggaaagaccccctcggggggccccggacttgccccaggcgctcttctccggggaactttcttaggcctttatggcccccgcccggggcacccggtgattacaccccaaatggtgtgcgaagccacccgagggggacaccacagctatttggcacccactttaggcgcccttatatttttaggngtggacacacagctttatttaaggagaaccacaagtgtttggtgacacacacaagaaaagccacaggtctggggtaaccccggggtgcccgccgaaattttcccccgcgcgattaaattccggtgccggagcgccacacccgcgcgcttccccgcaagggtattgtaaatttatatttagccaacgcttttcttaaccccgctaacacaacccgctgttaaccactaacccccactttgtcctctaaagtgtgtgagacactcagtgtgtaatgagttgagtcccctcagaacttatcttattccgccactttccctcaggctaaacgtctcacagactgtttgaaagctctccacgcgcaccccaccggagcccctattctagctatttcttcgccacccgtgtgaaccacagcttataacactgagctaaccacccctttaatgtcccactgccacccctcccttctccctctaaggagggccctcgccccccacctatacccggctttttggccccacaaatgggcccacattattcgcagaagaaattcacccacaaaaccacaatatgccctcactcactctcccacccactcatatatagccacccactcacccccctcttataacctctatacttttatacctatcgcctatatctaactccaccctcacatcaccacctatctccccaatattctaacacacgtataaaaaataaatgaccacgtttgaaacaaaccacaaacccacccccacttcctccccaccacctcattcgcccttatccacgctactcctacctatctccccttttatactaataattttatta

SEQ ID NO: 692332 - DNA, 259 bp, Homo sapiens
aaaggcaccaaggggttaggagggaagggaaagggcaatggagttggggaataagaagcagcaggacttagtggggacgcagtgttctacttacacagcacgtcattcatagctccacgcaccagacttgctacccatgtgtccctgtgggctgccctagtgcttggtgtttggaaccccatgccccctagcctcacagtgcagctacaaggaccatgtttggggcagaatgccttgtgccttgcccatatgcacaggg

SEQ ID NO: 692333 - DNA, 106 bp, Homo sapiens
ttacttctgccaaaagatgctgcttctctccttattctttcccctcagaatctcgctgtctccttccgaaccaccttggccggcatcctggcgttattgcctaatg

SEQ ID NO: 692334 - DNA, 787 bp, Homo sapiens
ggacgcgtgggcttctctcatggttcttatctccccaccatcccaccctggggccctttcagtgactcctaaagggacagcctgatggcaagtggctcttctcattggcctggcttccccttgagactggggatgaggaaaatcaaacaacaaccatttcctgggtgtcctgggtgtttgcagcaggccatgtactaaggattcacataaaagcaacaataacgaatctcatttacacttcacaaatggaagtcaaaaaataccacctctattatggagatgtgaaaagagagacccaaagacctcaaacaacttaccctaaatcataggctaatcaatccctaatcaatccttagcagatggagaggcaggattcaaacccagaattcttaaccagtacccaacagtccatctacaatcttaacaattaccctctactgccccttgggccccctgtccccaggaccctggccagccaagactcacatccccaggtgagtggtaaccaccagaagtggctgtgtcagggctactgccattgattttctttttcctgttagctccttctggaatgccagggctcttcctctgccaatattcttttaactgtgggaaagaagagtagtaacactcatgagaacaatcagcccctatagccacatcctcctttacagttttgacaaaatactcttatacaccatctggtttaatgccaccaacaactgtacaaggtgttgtcacaatcagttagtgactgagagggattgatatcatggatagaaaaaaa

SEQ ID NO: 692335 - DNA, 378 bp, Homo sapiens
tgtgtggggggtggagaaaaaaaaaggagcggggcccaccacaaaaaaaaaaaaaaaaaaacaaaccacgggggggcccccccgcgaggggggttctcttccagagagaggagagacaacaaacaaggggacacacaccagggggggggagaaaaatatatattttctctctcacccccaaaaaaaaaaacacaaatgtggtattgatgtgggggagagaaaaaaatatttgaggaggtatgtgtgtgagaaaaataatttcttctcgggagggtggagtttctctcacacatatatatctttgtgggggggagaaaagaaaagctgctaaaaaaaatacagcggcaaaagagggggcgcaaaaaaaggggcgccacc

SEQ ID NO: 692336 - DNA, 661 bp, Homo sapiens
ggacgcgtgggcttctctcatggttcttatctccccaccatcccaccctggggccctttcagtgactcctaaagggacagcctgatggcaagtggctcttctcattggcctggcttccccttgagactggggatgaggaaaatcaaacaacaaccatttcctgggtgtcctgggtgtttgcagcaggccatgtactaaggattcacataaaagcaacaataacgaatctcatttacacttcacaaatggaagtcaaaaaataccacctctattatggagatgtgaaaagagagacccaaagacctcaaacaacttaccctaaatcataggctaatcaatccctaatcaatccttagcagatggagaggcaggattcaaacccagaattcttaaccagtacccaacagtccatctacaatcttaacaattaccctctactgccccttgggccccctgtccccaggaccctggccagccaagactcacatccccaggtgagtggtaaccaccagaagtggctgtgtcagggctactgccattgattttctttttcctgttagctccttctggaatgccagggctcttcctctgccaatattcttttaacttctgtcgctccaagctgcactctgctgttgcctttgactcatggtggctacgt

SEQ ID NO: 692337 - DNA, 121 bp, Homo sapiens
tcggaaacttataatgctgagcagctccatatacaaatgttctcacagcaataacccatggagctgagttgcaccttcccctgataacataaggcagtttacctattaggggagtgatgct

SEQ ID NO: 692338 - DNA, 148 bp, Homo sapiens
tgggcggatcccaaggtcaagagttcgagaccagtctggcccatattgtgaaaccccatctcttctagaaaaaaaacatactaaaattagccgggtgtggtggcgggtgcctgtagtccagcctgggcgacaaaaacagatttcctct

SEQ ID NO: 692339 - DNA, 229 bp, Homo sapiens
  misc_feature (27)..(27): n is a, c, g, or t
  misc_feature (87)..(87): n is a, c, g, or t
  misc_feature (93)..(93): n is a, c, g, or t
  misc_feature (105)..(105): n is a, c, g, or t
  misc_feature (143)..(143): n is a, c, g, or t
  misc_feature (146)..(147): n is a, c, g, or t
  misc_feature (156)..(156): n is a, c, g, or t
  misc_feature (170)..(170): n is a, c, g, or t
  misc_feature (174)..(174): n is a, c, g, or t
  misc_feature (210)..(210): n is a, c, g, or t
  misc_feature (224)..(224): n is a, c, g, or t
  misc_feature (228)..(228): n is a, c, g, or t
tattaatcaactgatgtcttgattttnctaaatgggaagattgctttatttttaacactaattatgggagcagattcttagcaaacntctttngaaaagttaatnttatgatgtgcattaggctgccccatcgtgtatataantcnngcagatttnattttcctattctnacgnttctctgctttgtagttgtggctgtacttaaagganatacagaacttccntatnc

SEQ ID NO: 692340 - DNA, 132 bp, Homo sapiens
gattacatgacattactttgtctctactttttcttcaaatagagattaagactcagttaaaaatgtactttattaactgatgaatctttttgctattgaaacttctaaaactagggaaagtgttgggggtgt

SEQ ID NO: 692341 - DNA, 166 bp, Homo sapiens
ggggtagttttaaaaaattgctgggggttgtggcttgcgtctgtaatctcagctttttgggaggctgaaggaggaggattgcttgtggggcccaggagtttgaggctgcagtgagctatgatcgttccattgcactctagcttggtgacagagcaagactttgtct

SEQ ID NO: 692342 - DNA, 108 bp, Homo sapiens
tttgaaaactttgcagggtgggtttggataaacttatcctctgggttcccaaaaggtggaaaaatttaggccataatttccttataaataaatctataaatattttga

SEQ ID NO: 692343 - DNA, 356 bp, Homo sapiens
cccccaacatacaccacccccaactcttcttcctatttccccttaggagagcaccacttcatgtcagacctgcgtgtccaaaccgaaaagagcgagaagcaatgatcttatcatcatacgctggagtcttaatggtgaggggaagcgcactgtatctgtgcacactttgtgtcttctaagatcatttggtgctagtgcatgtttacatgtttttaatgtcgcttctaaatgccttggatttactaacagtaaaatttattattttaaatgtataatgaaaaatttgacttccataccctatcgcaaaaatatttatgggaggtcgacgcggccgcgaatttagtagtagtaggcgg

SEQ ID NO: 692344 - DNA, 167 bp, Homo sapiens
cggaccactcgcagtttgtttggtgatgcgaggaaggaacgttcaggcagctgattccaggtactcgggactcttggtgcgatctgatgactgctcacagtaggaccatgacgtgagcagatttgtagtcctgcatgaatgaaggaaagaaagaaatctgacaactc

SEQ ID NO: 692345 - DNA, 480 bp, Homo sapiens
  misc_feature (186)..(186): n is a, c, g, or t
  misc_feature (199)..(199): n is a, c, g, or t
  misc_feature (202)..(202): n is a, c, g, or t
  misc_feature (239)..(239): n is a, c, g, or t
  misc_feature (245)..(245): n is a, c, g, or t
  misc_feature (319)..(319): n is a, c, g, or t
  misc_feature (427)..(427): n is a, c, g, or t
  misc_feature (456)..(456): n is a, c, g, or t
ctcaggaggtggggtttgatccactctatcctggttgctcatgccccagtatctctgtgtgctcacaggagcgtatggcagaatcctgacccgccctgctcacatgccccatccctgtctgtcccctgtcagtgaggttgcaggcccatgatccccgccaggcctgtccatctgtccccgtgtcgnagacagagacagncanccctctctaccggccccccctccctaaggccgccctngttttngcccatactcccccccaccacggcattcaggatgtggaggaacagtgacccgcgtgtggctcccacggctggcnctggctggtctggaaaagcatgcgtgtctgctttctctgaccagatcgtcatttcatgtgcttatttgccatctgtacactttctttgaagtacctgaccaaatattntgctcatatgtgaaaactggggtgtttantttcttactgagctttgagaactt

SEQ ID NO: 692346 - DNA, 258 bp, Homo sapiens
  misc_feature (8)..(8): n is a, c, g, or t
  misc_feature (10)..(10): n is a, c, g, or t
  misc_feature (13)..(13): n is a, c, g, or t
  misc_feature (87)..(88): n is a, c, g, or t
  misc_feature (106)..(106): n is a, c, g, or t
  misc_feature (116)..(117): n is a, c, g, or t
ggtactcntnctncacttaccgcaagctgctggagggcgaggaatgcagactcagtggagaaggagttggaccagtcaacatctctnntgtcacaagcagtgtttnctctgatatnncagtgcagtggctatgcggtgcctcggtggagatcttggcggcggcatcggtggaggtctggccggaggtagcagtggatgatactactccagcagcaatgggggtgtcggcggtagatggtgggcgcacgtgtgaaacgc

SEQ ID NO: 692347 - DNA, 1453 bp, Homo sapiens
  misc_feature (338)..(338): n is a, c, g, or t
  misc_feature (396)..(396): n is a, c, g, or t
tgggagacccagctgagacgctactacagtcatctcggcgggaaaagacggctcggagcagggtggtggcagaggtgggagaagaggtcaggtctggggaaatttcgaaggcacagccaacaggatgtactgccgggctggatgcggggtgttaggggtcagggaggccgccaaggctctgcctgagaactggggagggccaggggcaccatttacggagctggggaacagcaggagctcgttttgttagcaggtgcgaggcgccgggcatttaaaggcggcctgacgggaccggccgaggcggaagaacggacagggccctgcgggaccgcgctcgnatccgcctcctccctgacctcggcgtccccggctactgcctccagagccgcttcgggnccgaccccggggactcttcccgcctgcggcctcgcgccagcccggccggctcgcctagtgcccggcgcccagaacgcgtggagctgggagaggccacacaacccacgccggaagcctaaccccgtcggccccccgcggccggcaccgccggaagcccgcgaagcctaactctcgcgagacgcctcctgagtcccgcactctccgcggttccgccagtcgccgcgctcctgtctgcgttgctgtggcagccccgccgtgcgtccgcgttccccggagccagcgcggcggcgcgcctgtgctcggggcttggccgtagcttttcctcaggtcccgcgcggcgcgcccctgtgtcgcaggcgccctgccgctgcccgcagcttttggggggttcgggggcgggggaagcagggccgcagaaggcccaatcggagccttctgacacccgccccggcccgccgccctcccggagcttccgtccccgccgctggtccttactgacgcgcgcgccgcccccggtcgcccgttttccctgggctccggcctcctctcgcttccagccctggcctgaggtcctgagggctccctggagggggcggcttcccagcacccagcgtttaacagggccctttcggcctccctgtcccccaagctcagagttggggtctgcagcaggggaaagaaggagggagactgggcagctcaagttccccagaccgcacctatcagacggagggcggcccgctcccgtcagagcccgacctcggcggacaggggaggggatgggttgagaagcgggagaaggccactagctggaaactccctgacgacagggacaccgttctcgccccagccccagcgctcggcctccgcagagccggcccaacgaaggaagaatgaaaatatgaacgtgacatgatgtgggcttgagaggccgccttgttctttggattcacccagaaacctgactgaaaggaaagttactgcaactggggaaaagcacagttggctggagaatttggtttaaaaataaataaataagttttaaattatgtaactc

SEQ ID NO: 692348 - DNA, 248 bp, Homo sapiens
  misc_feature (201)..(201): n is a, c, g, or t
ttggctacaagactgatgaataccagcttcacactaatgtgaatgacgggacagagtggggcggctccatttaccagaaagggaacaagaagtaggagaccgcgtgtcaagtctcgcctggacagcacggagacagataacacggcgcttcgagaatagcagccacagtatcagaatggaccctagacgccgtgcttctcnggctaaacgtgaacacactccacgcctgattaggtttacggatacac

SEQ ID NO: 692349 - DNA, 111 bp, Homo sapiens
tcccgctgtacagttgcggctgtaggttatatagtgatgcagcagctaggactgggagagataggagaactaggactgttggtggattaggacggatcagacgaagagggg

SEQ ID NO: 692350 - DNA, 81 bp, Homo sapiens
gttgaggacacggctgtgtattattgtgtgaaagagggaagcccgtatagcagcaactggtacggagcctggggccaggga

SEQ ID NO: 692351 - DNA, 382 bp, Homo sapiens
  misc_feature (340)..(340): n is a, c, g, or t
  misc_feature (352)..(352): n is a, c, g, or t
gtagtgtatcacagtagtagcctccaggtttccttaagggcccacatcctgaagtcaaaagagagaagaggcaccactaaaagatcgcagtttgcctggtgcagtggctcacacctgtaatcccaacattttgggaacccaaggtgggtagatcacgagatcaagagatcaagaccatagtgaccaacatagtgaaaccccatctctactgaaagtgcaaaaattagctgggtgtgttggcacatgcctgtagtcccagctacttgagaggctgaggcagggagaatcgttttgaacccgggaggcagaggtttgcagtgtgggtgagatccatggccantacattccagcnggggcgacagaggcgagatttggttttcca

SEQ ID NO: 692352 - DNA, 249 bp, Homo sapiens
gtatatcgctcacacctcatatcctgccctactatgcctagaaggaataatactatgcgctggttgcattatgagctactctcataaccctcatactacctcactccctcttagccaatattgtgcctattgcctatactagtctttgccgcctgcgaagcagcggtgggctcaagccctactagtctcaatctccaacataaatgcgtagactacgtacatacctacttcttgttttttttgttttta

SEQ ID NO: 692353 - DNA, 219 bp, Homo sapiens
ctgggaggctgcagtgcagtttttatgcaaagaaaccgataaagaaggtgtttttatgaatttaatggccttgatacgcatgtttaccattcgatttcggatggaaggcgccattggcgtggtcttgttgctgttaggtttgctcggtggcgttggcatgtggagcatgctgcgcatttatgacttgcaccaagactttattcaagtgcacttggctag

SEQ ID NO: 692354 - DNA, 927 bp, Homo sapiens
  misc_feature (4)..(4): n is a, c, g, or t
  misc_feature (105)..(105): n is a, c, g, or t
  misc_feature (134)..(134): n is a, c, g, or t
  misc_feature (139)..(139): n is a, c, g, or t
  misc_feature (156)..(156): n is a, c, g, or t
  misc_feature (176)..(176): n is a, c, g, or t
  misc_feature (303)..(303): n is a, c, g, or t
  misc_feature (322)..(323): n is a, c, g, or t
  misc_feature (330)..(330): n is a, c, g, or t
  misc_feature (337)..(337): n is a, c, g, or t
  misc_feature (363)..(363): n is a, c, g, or t
  misc_feature (547)..(547): n is a, c, g, or t
  misc_feature (558)..(558): n is a, c, g, or t
  misc_feature (567)..(567): n is a, c, g, or t
  misc_feature (569)..(569): n is a, c, g, or t
  misc_feature (602)..(602): n is a, c, g, or t
  misc_feature (614)..(614): n is a, c, g, or t
  misc_feature (619)..(620): n is a, c, g, or t
cacngcgtgttgctaacacatcaccacagacaatgggtccacgtcctgcagctgcagcccgctgcagctactcctgctgtccgcaccgatccacagtataaatangctgcaggagttcgcaatcctcagcaacntcttnatgcacagccacaagtnacaatgcaacagcctgctgntcatgtacaaggtcaggaacctttgactgcttccatgttggcatctgcccctcctcaagagcaaaagcaaatgttgggtgaacggctgtttcctcttattcaagccatgcaccctactctggccggnaaacgcactggcaggttgnnggagatngataatncagaccccctccatatgctcgagtcnccagagtcactccgttctaaggttgatgaagctgtggctgtactacaagccccccaggctaaagcggccgccccgaacgccgttcaccgtgccaccggtgttccaactgtttaaaattgatcagggaccatgaaaagaaacttgtgcttcaccgaagaaaaatatctaaacatcgaaaaacttnaatattatggnaaaaaaacntngccaaatataaaataaataaaaaaaggaaaggnaactttgaaccntatgnnccgagcaaatgccaggtctagcaaacataatgctagtcctagattacttattgatttaaaaacaaaaaaacacaaaaaaatagtaaaatataaaaacaaattaatgttttatagaccctgggaaaaagaattttcagcaaagtacaaaaatttaaagcattcctttctttaattttgtaattctttactgtggaatagctcagaatgtcagttctgttttaagtaacagaattgataactgagcaaggaaacgtaatttggattataaaattcttgctttaataaaaattccttaaacagtgaaaaa

SEQ ID NO: 692355 - DNA, 102 bp, Homo sapiens
gatcctctagagtcggcttcgtcctgtcctgctcgcccccaggaaacgtaatttggattataaaattcttgctttaataaaaattccttaaacagtgaaaaa

SEQ ID NO: 692356 - DNA, 165 bp, Homo sapiens
tgggaacgctatctggactatatatcaccaataacaacaaagatgatatatcgagccagaactcttagaagtagcggatctgagagaattgcagaatagcgtactagaagactgaaaataatgactgctgagaaacagctaccggcaagattgggatgctgtgct

SEQ ID NO: 692357 - DNA, 120 bp, Homo sapiens
cgtcgaccttgctcagttatcaattctgttacttaaaacagaactgacattctgagcaaggaaacgtaatttggattataaaattcttgctttaataaaaattccttaaacagtgaaaaa

SEQ ID NO: 692358 - DNA, 153 bp, Homo sapiens
ggtattgagtggcatgtgcacacacagtgagaaggcagctgcattcagctaagaagacagtgctcactagggctcctcaccaaatttgccagcaccttgatctgggatttctagcctccagaactgtgagaaaataaatttctgttgttcaag

SEQ ID NO: 692359 - DNA, 932 bp, Homo sapiens
  misc_feature (47)..(47): n is a, c, g, or t
  misc_feature (61)..(61): n is a, c, g, or t
  misc_feature (97)..(97): n is a, c, g, or t
  misc_feature (791)..(791): n is a, c, g, or t
  misc_feature (822)..(822): n is a, c, g, or t
  misc_feature (827)..(827): n is a, c, g, or t
  misc_feature (847)..(847): n is a, c, g, or t
  misc_feature (898)..(898): n is a, c, g, or t
  misc_feature (915)..(915): n is a, c, g, or t
ccattgtgctcttcaggctgggcgacaagaagtgaaactctgtttcnacaaaaagaaaagnaaaagccaagacatcaacatttttccatcaccccanaaacatcccccctgtgcttcttagtaatccatcctcttcctggaacccaaacctgggcacaactcatgcgttctctgtgcttggagttttgcctttcccagaatgccatggaatcatacggtgtgcagcggctcgtgtctggcttctccagctcggcacgatgctcctgagatccgagttgttgtgcgtgtcagtcggctgctcctcttcgctgctgtgtagcaccgctgttgtgtgaatgcaccgcagtttgttcatcgcttcctctgacgatggacatttaggttgttaccagtttttagcaattaaaaagaaagccaccataaacactgggtactggttttcacgtggacgtatgtttctgtgcagtcctgttttgattaaaatgtgaactcgtctactgccgtggtaggcaatttttggatgacttggggcctaaatgaagagaatgcaggcgcttgctgtgttctccctttctgtagtctgggactgccatggaagtcgtgtggtttctttgggcaggatggtgggtaatgcgggaattcttttatctatgccctgttccatcttcatatgcatgtcccctccagtgcccaaaagtttgcaaacacttagagcagcgatcagatgttttgctctactgaccccaaataaatacatgctgtttgcaaagaacagaggcaaggaggctttntctcccatttcacgaccccacttggcagagnaaagnaaagcattaggttgctgaantctaatgctttgcttacagctatgagaagtacagtaaatgctggttctganaaaactccacgtccaanaaaatgaatgaactgcc

SEQ ID NO: 692360 - DNA, 539 bp, Homo sapiens
tagtcaggagttacccagagtgggcgaaggaatatagagaaagaggaagacagggcagtacaaacgccaggtcgctctacctacggcttgagtgaggtcatttttgattatgtggtttctgactgattccaggctgaaggatatcttccatagctaagaaggatatttagaagaaaatatttaaagctaaaggctaaataaccaaatccaaatggtaggttgtctgttgacatattttgctcttggctccatatcctttaaatataattaagcaaatttttgatggaccaggtacaaaactggtactgtatagggagaaagttactgtagaaaatccatatattttccccatcttctaagactctaagatctagcaagagtttaagacataaccattcagcaaacatttgtcaagtgcctcccaggctcactatgtacagctgcacaggttgtgcatagcacaattgcaggggtaacatttacaaagattacctgtgaaaggaccccattagaactggtagtgcatgacctaacccagc

SEQ ID NO: 692361 - DNA, 144 bp, Homo sapiens
  misc_feature (118)..(118): n is a, c, g, or t
agctcgtaccgagctctctctgttggggagggagcggcactggacttgagaggtggctggggaggtgggctagctgcctagtggcagctacagcgagtttcataaatgccactgcggncaactgtatgctgcacccatttgatg

SEQ ID NO: 692362 - DNA, 163 bp, Homo sapiens
accggttaggggatttgggttttacaaggaagactaaactcctggttattgctaaaagtgggttttgcccacttaattttaaaagcagcctttttaaaattttcaaatccatggttttcccggattgtttggtaattttttaaaaaagtcatggtcagggtga

SEQ ID NO: 692363 - DNA, 625 bp, Homo sapiens
cccccagagcaaccgggagatttattgataaatacagaaacatgggcggggagccacgctccgacaacccgaactgggcccccgtcccgagctcaggccacgtccccaccttctggaagcctccaagctgttgttaatgtcagtttttttcaccaggcaaacggaaggggcatttttgctgttgttaggaaacggttaccacttttccgggtttgttaaaaataggatctttgcataaatggggataaatcacctggaggaattacacgtaaacaaggcgtgaaataaccattgcatgcatggcctgcaaagttgaaaagtgcaaattttcgttataaaaacacttttagtttgaatgaaaaaaaaaaaaccaccaacttttcataaacatgacttcctgcaaccgattttggccccacatgggggtggatcccaaaagcgggagacagccttccacgaaaactttgaaaactggcccaaaattttataattttgaaaatggctttgaatttttgggggggaaaaagaatcctgataaacacaataaaggggagaaatgctccctttgaaaaggtttgggttgggtttataaacaacctctttggggggaccttccctggaaaaa

SEQ ID NO: 692364 - DNA, 491 bp, Homo sapiens
tgcatcccagcgcaggcctagatccttgaaagcaaggtcgggtgtggcagtggggaagccagggaggctgggaagggcaaagggtggagaggaggagtgaccgggactggagccaggttctggggagagcaagagcaccaggcttcttcctggctagctggattggtacattcactgctgccaggtacccagagagtgtcactcgtcgtctccaggtagagcagtcaccagctcctgtggcctggtagatgactctgtgagcctcagtgagagagtgcaggcaagtagagtgatggggtcagtgtccatccagtttacgctgagtcagtccatacagcgagacacctggctctgggcaggtagtcctggagtgttgatgagcccgggtgagcatcgggccggtcagctggcatgtggtcctcacagccttcatcccaggtctgcctacgtgggagatcgtcgatcagaaacaggaacggggatctgtcttg

SEQ ID NO: 692365 - DNA, 775 bp, Homo sapiens
  misc_feature (56)..(56): n is a, c, g, or t
  misc_feature (61)..(62): n is a, c, g, or t
  misc_feature (77)..(77): n is a, c, g, or t
  misc_feature (162)..(162): n is a, c, g, or t
  misc_feature (167)..(167): n is a, c, g, or t
  misc_feature (172)..(172): n is a, c, g, or t
  misc_feature (175)..(175): n is a, c, g, or t
  misc_feature (184)..(184): n is a, c, g, or t
  misc_feature (208)..(208): n is a, c, g, or t
  misc_feature (210)..(210): n is a, c, g, or t
  misc_feature (251)..(251): n is a, c, g, or t
  misc_feature (369)..(369): n is a, c, g, or t
  misc_feature (397)..(397): n is a, c, g, or t
  misc_feature (405)..(405): n is a, c, g, or t
  misc_feature (410)..(410): n is a, c, g, or t
  misc_feature (458)..(458): n is a, c, g, or t
  misc_feature (482)..(482): n is a, c, g, or t
  misc_feature (485)..(485): n is a, c, g, or t
  misc_feature (487)..(487): n is a, c, g, or t
  misc_feature (515)..(515): n is a, c, g, or t
  misc_feature (551)..(552): n is a, c, g, or t
  misc_feature (559)..(559): n is a, c, g, or t
  misc_feature (622)..(622): n is a, c, g, or t
  misc_feature (638)..(638): n is a, c, g, or t
  misc_feature (767)..(767): n is a, c, g, or t
ggggggtggttggaggtctctggacagttatggggagcatcagcagataccctggntttgnnggggctgtgggagtngcagccctggtccccgcgttgacaggtgccctccttaaacctctatgcaaggaaatgtcttgagccgggcagcccgctgggccanatctnccggnggntccttccgnttgtactgaagcagcctgcgtttntnctcaatagcttcgtcggccgccttgccccctggccgggaangaggccggggaccccagttggcctccgggttagcctggaagcgcttgagttctcgctgttgggagcgggggttggcatcttcccggatggtgaagttggcctgcagcctgggctccanactgagaatgcggaacgctgggctagtntctgaaantcgcncccgtttcaccggacattccttctcccagcaacgcatgaaagttccanagggcagaggcaggggcatccgtnttnanagcgttcttacaggcgtgggagagttanaaccggaagtcagcgtggaggagggccgaccgcaannacaggangcttggtgttttgaagtagatgatgctgctcagctggtccagggtgtagtacagaggcacgtncgggagctcctcagtnatgacgctcaggacccctcggatccgctccgaggtgtggaagcggccggggttagcgctcacagcctccaggacacggcccacaaaatccaggtcatggatgggctctgccacatggggccaccaagcnggtgtggt

SEQ ID NO: 692366 - DNA, 176 bp, Homo sapiens
ccccaatttgttttggttttaaagcccccttttttgaaaattgggctggaaaataaatttttaaaaacccgttggaaaggggggccccccaaagggtttgtttggttaacccggatgtccaaacccctttttttttttacctccaaagcttttaatttataaaaaggaatttttta

SEQ ID NO: 692367 - DNA, 310 bp, Homo sapiens
ccccccccccccccctttggggggggggggggggggggggcgggggggggtttttctacccccgtttttttttcttccccctcccgtgggccggcccccccccctttttttttttttctttctttaaaggggccggggcccccccccccctctggtttttgcccgggggggggggggggttttccttttccccccgggtcccccctttccccttttttttttttgggttcccccctggttgggttttttccccgggggggggcggggccgggtttcccttttttgggttttcccccccccccgggcccga

SEQ ID NO: 692368 - DNA, 483 bp, Homo sapiens
aagttgtccatctgaagctggagaactcctccatatgcagagggcttaaagaaagatacgaagaactctaagctgggtctgctaccatcactccagttttgattgatcttggctgacagacatgcttgttcctctggattggaaagatgatttactctcgggaatcttctctgtcagcctgtacatctaaaggctttaagcactcagttgggcattcacattagtgtttgttctctgatggtatctctgagaatactggttgtaggactggccagtatttccaacgggactgggttcaccccaggtctgcggcagttgtcacagcgccagcaccgctggcctccaaagcatgtgcaggagcaaatggcaccgagatattccttctgccactattctcctacgtggtatgtcttcccatcatcataacacgttgcctcatgagggtcacacttgaattctccttttccgttcccaagacatgtg

SEQ ID NO: 692369 - DNA, 525 bp, Homo sapiens
tctgtgtggaaagcggctgtgcagacattcaattcaaaaaaaaaaaaaaaaaaaaaaaaaaaaaattgggggggggctggggccttggaaaaggtttctagaagaacacttctcggtggggcggcgcgggggggccccaggtgaggcacagtgtgagacctggggcccaacagcggggtgcccaaaggggagaccccggggcacaagagaaaaggggcggggagtcttccccaccatataaaaaagcgcgccggggggggaacaccggagaagggcgtttcgtagaacaaaactcccagacgggagggatctcagaggaggagcccacaaagggggggcgtctcactcaaaacgagggggggcccaaagggggagagccggcgaaaatacacaaaaaattagcagcacccggggccgcggggcaaaacggaaagagcaaaaaagaagagaaggagaaaaagaaaagaaagaagagaacaaaaacgcagcagagcagacaaacgaaaaaagagaacaggcagaaag

SEQ ID NO: 692370 - DNA, 252 bp, Homo sapiens
  misc_feature (101)..(101): n is a, c, g, or t
tttttttcattttccagtacccgggagcgggaaacccgggcggacgggcccaaaggcgggggtctccggcctcaagcttcccggttaatttttccggggangggggggggcccccccactcctgttgtttttaggcgcacccgtttcaattcaggattccaacgtttttgggccgggtgccgcccccccgagcacccccccgccccgcctttggttttgtttcagcttcagcaaaatgtgggtacgttacta

SEQ ID NO: 692371 - DNA, 112 bp, Homo sapiens
caatcttaaccacaggtttcacatgtacacctgtaaacttacaaatttaacattatcaaagaaggacagcttctacactcttacaaagaccactagaaagaaacaacaatta

SEQ ID NO: 692372 - DNA, 275 bp, Homo sapiens
  misc_feature (16)..(16): n is a, c, g, or t
cctagaagagtgtgcntcaagcatataataaaatgagcttagcagcaagctgtcactcacacaggagaagctgagcagaaagcaagcaaagaggaatttattgcttctctggctgaggcctaaggcccctccctctagggagcagctgtcagcacggactacaataagggcctccaaagtactgagaggagccatctagaacatatccccctcatattgtgtctatcatgccttaaattttagagggaccccaatccaaatgcaataaccctaga

SEQ ID NO: 692373 - DNA, 1465 bp, Homo sapiens
  misc_feature (120)..(120): n is a, c, g, or t
  misc_feature (1366)..(1366): n is a, c, g, or t
gtgatgtatagcattggaacactagcgccacttagatgcgagtccgaatcaacggggcgattcccagcgttcatcggatccacctgacaaaggaccggggccgcaggcagcgggtgggantgtgatgcgaatccacgggagcctcggaagggacagtcgagcagctggcaggcgtgatctatactcgcgcgcctattgcgatcacacgcgggaacctaggggtcaatctaacatctcgaggtttggactcaccacggacctgcgctagttagcctcctgcttctggcatgtacagcgccgagaagccggggagggagttcaggcctcgcagagatgatgagactctccaccgcgacccccggcggtcaatttacgtctctctgcggttgtgcccatacagcctcgggataccgtcggtgggcctgagcgtcgtcaggcaccgtagaaacatctcgcactgcgagacatggatgcggaatcgcaagggatcctggagacagggcgcttcccgtgtttgacctcaagggaacccacctcgaggcgacgagaggcatgcgcaagtcgtagggggcctggagggaatttccctcggggaagacgtgcgggacgaagaacacaaccgaacaccgtaaggcgttgccatgtgcccgcaatatcatggtctttgcgctgggctccattgagtagggggccttcattgaaagggacctccgcgatggtcacggtgtgcgttcccacggggtgaccacacgaggcggcggcggagaaaacgcaattgagcgcgtgcgaatgaaaaattgccgcaatgtccccaagacatcacattccctgggttgcttggcttcccccctgtaaggagggggtacaccccgggtgggtacgcacgcgccaaacggaaaaagggttcgcgcgtaatggcatgcgtgtggggacctccgatgagaaccctttgagacgcagaagaccctcgatagactagttcctccggggacgctatggcaaaaggcccgagagactcccgacaaggagttgcggtggcgaaccacacgtcgcgaggaaaaagctttgaggtacgccctttcgtgaggccgttcggtgtgtggccccacctatttgacttggctcccgaacaccgtgaagcgctcgctattcgcccaagatatgtccttcgtgagcgaaaacattcgctttagtaggagggcgaacctagacatatcggcgcaagtggttttgcgtggctcgtgacggtgatggcctttcacatttgggtgaaaggtcccccaaaggatggaacaatccgagaccggtgggcgaagtgagaggccgaataacgctcacatggccagcgctgcgttagattccaatntttcggacgcaccgtgtatatagggaggatagcgccaaagatatgagacgctctcaataaaaccacgtggcccccctgtatgcttggttaagcgctcca

SEQ ID NO: 692374 - DNA, 502 bp, Homo sapiens
cggaggcaagccaagccggtaggaggcggcgcccggcacggggactgcttgcggctgccgaggctccgaaagcctttgtgggcgctggcgggcacccccgcgtctgtcaccggcccccgcgccgggatctggactctcgcccccctcgcggggcgctccctcgccgttgctggtgcacccgcgtccggctcgccgtggacgccgggcctggcgtttcctcccgggcccgtcctgcccactccatgtgggcctcgcggactcggggcaccgggaccccgagggcagggcggacgcagccgggccccggtttccgagtccgtccccaggacggccacccctcccgcctcgggacacccagcgctttcctcttcaaagctggtgtttggccgggcgcggtggctcacgcctgtaatcccagcactttgggagaccgaggcgggtggatcacgaggtcaggagatcgagaccatcctgactaacacggtgaaaccccgtctctact

SEQ ID NO: 692375 - DNA, 157 bp, Homo sapiens
gttgatactaccttttggtttggccacggcgctcatccggggtgacaagagcgagactccgggtattccactcccacttcgggggcactaaatttaatataaatgtggggtcaagaaatataatggctcggtggacttctttttttcccccaaccat

SEQ ID NO: 692376 - DNA, 136 bp, Homo sapiens
cagagaccagtgcagcaagcgctcttgtatgtacgtccacttaaccacttgacgtgagttagccctccccgacagccccagcaacttgctaagcttaacccaggaggtgcagaagcattacttgcaacagcggccg

SEQ ID NO: 692377 - DNA, 793 bp, Homo sapiens
aatgatatggagcctaacttagctgtgccacgtgaatgcctctaagcacgatggacctatgccaaaaccacacatggtgctcacttaatcgataccaggacaaggaaactaatggaggagtgtacaagacttcagggagaattgatgaagctatcaggagataactcaggctctgagagatgaacgtttaaggctcatataggttgcacgttctgatagacctggatcaacctcatctgcatccttcaaagataatgtcaccacccctgttccttcacttcttgttgtacttgcagccattttcatgggattctttctagggaaatacatcttgtaaagtgaaccatgcaaagggctggttctttatttttttgtctctttaccagacaaagatgcctttacctaccatttccttggtaggatgcgccactggaaccatttgtttcggggacaggacctataagcttcccctttaatcgttttttaccgtggaatacacaatctaggcaactgtctgggtctgtacagggtgaatataaccaaaaatcactggcattgtcaacttcacatggatcctttattgaattctaaaggaagaaaggtgtttccttgtggtacaaataggttcaaaaaccgtaagatcctttcaaagaaaattaaaacccttttaattttggtgtaggggtgcctctcaaataagactctggaaggctaaaacacccattctggaaggccattaggacctcctgggaaattgtcggtcttagcgaaattttgctgtttacttgggaat

SEQ ID NO: 692378 - DNA, 221 bp, Homo sapiens
tatggccatggaatttatttaaatccccttcgataattacacatacactggaactacttatctgataccacagagcacaatttggattatagcctgtcttagacattatcaaaaaaaaaaatttaatctgtgctgtggctgcagtggcatcattgcctgtatttccagcacttttagcgtatgtcaaggtttagaagattcacttgaagcctgtggagtta

SEQ ID NO: 692379 - DNA, 405 bp, Homo sapiens
  misc_feature (66)..(66): n is a, c, g, or t
gccaacgtcctccatcatacctacccatgctgaatgctgtatagagaggtatacattttataaggntaaaatgatgacagtggggatgaggatgattttgcttaaatgggaagaccttgtggtgagcataggaagtgttaggaattacttgcttatgtatctctcaggagaaagcaccgtttgggaacataaggaaggaacagattttcatgtttttttttcggggtgttttgggaacacctcatagttaaaacatgtttggggttgtttttttaggacatatttggggggaattttcaaagggaaacttggaattggggtctggaacttaccaatgggcttcggactaaggggggttctttgtgattaattagtgagccctggttgttatttaaagccttgtaa

SEQ ID NO: 692380 - DNA, 967 bp, Homo sapiens
cgacaaaggaaaaacccacacacagcaagggaagacaatacgtgtgtgcataacgccaggcacgtgcgtcaaccaacgatatgccgcgttggtggcaccaccattcggaacagggggacctacgaaaactgagagacgaaccccagacacccgtgaacgagccacaacacgttcgggcccgaccaatcaccagggcgccccctgtgacccttggcaaacggaccacactacgccagcgcgtgggcaaaaacaacaattcaggcgcgcgggagacgaacacactctctccgtgtgtcattagggaaccccctcaccgggtagcacaccagtgcggcccccccccggacgtgtggggtttttcccccgggaaagttaccccttttgtggagtggtaattccccaaagctcgcccgcctgtaaatttccgccccggtgcgccaccacccaccgggttttttgcgcccccaagagtaggctaggccccccaagcgaggtggtcttctcacccacgaatggcgcgctggtatcttataggatatattgcgcaccgtctcttgcatagaccgggggttaatcaacagggcaagtaatcaaatctaacccacatggcgccgaaagccgctccgtggcttgcccaatattcttcttgtgcaacgtagttctaatgggtcaatgcataatgcctgggcccccccaccattgacagcgccgccctttcttgatacccgtggccctccttcattggcagacgatcgcgtttatgagtcgcccttcatgaaagccctcctgacgttgcccccttcaagcaagagagggtgccgcctaggcgtgaattgtaagagaaggcggggcaccaatcttgcggtcagacgcccgcacgccacattcagcttggagggatgtcgccacccgaaacagccacctttggaacccacaaaaaaacataaaaaaacaacccaacaagaca

SEQ ID NO: 692381 - DNA, 373 bp, Homo sapiens
ttctatgaggatccccatacagatgaatgtcaggagaccttactctggacacagtcattatcatctctaatagacactccatagtttacgttagtgttcactcttggtgttgcacattctacaggcttctgacaaatgaactatgacatgtatctatcatttagtatcatcaagaatagtttcactgccctaaaaatcctgtgtgttctgcctgtttgttcctttctctcccctaacctctggcaacccgtaatctttttatggtttccaaggttttattttttctggagtgttctgtagttggaatcacacagtatatcaccttttcagtttggctcatttcccttagtagtgtgcattttttcccatgcgt

SEQ ID NO: 692382 - DNA, 453 bp, Homo sapiens
  misc_feature (10)..(10): n is a, c, g, or t
catgctgggngggagcctcgagcttttctgtttgtaacatgaaaccattctgtgggacagtaagaagagaaagcaagggggggcactgtacgcagatacccacagccgaaaatggcaacgcaagattcatcatcgactgtcacagtaagcagagggggcacaaaaatgcttgccaaaggcatgaaccagaaggctagtgaggctcgcaggatgccctagtgaatcgtacagtgtagagctgtgctgcccacgcccgccagacactttctgggacagcacagaaggagaacaggacgctttaaggtgacagtcatccgggttctggtgcagatcaactttccacgtgtgccatcttggacaagtcattatctagctgggcctcactcgaggtattatggcgactgacaggcttcacaaggcttaaaagaactagccatgtcttccatcttagct

SEQ ID NO: 692383 - DNA, 241 bp, Homo sapiens
aattctagagtagcgggatcagatggcaatcgcttattggcaaaatgacaattttgtcatttttctgtcaccggaaaatcagagcctggcgagtaaagttggcggcataaaatcaccagaaattatgagcctatgtctccttgtaaacttctgccattttgtgtggcccttgcgctaaccggttgttcactggcaccggattatcagcgtccggcaatgccgtgccgcagcagttctcact

SEQ ID NO: 692384 - DNA, 740 bp, Homo sapiens
ctgcatcatggaggtgtccgtgtgtgccaggcggacagcagtgagaacgcctcaatcgctgaggacatgatatccaaagattactactttgactcctacgcacactttggacatccaagcgagggaagatgctgaaggacgaggtgcgcacccttcacttaccgcaactccatgtttcataaccggcacctcttcaaggacaaggtggtgctggacgtcggctcgggcaccggcatcctctgcatgttgtgctgccaaggcccggggcccgaaaggttcatcggagatcgagtgttccagtatctctgattatgcggtgaagatcgtcaaaagccaacaagttagaccacgttgtgaccatcatcacgggggaaggtgcagcgacggtggagctcccagtggcgacggtggacattcatcatcagcgagtgcatgggctatgtgcctcttcatacgagtccatgttcaacaccggtgctctatgccgggacaagtggtggcgcccgatggcctcatttttcccagaacgggccacgctggtatgtgacggccactcgaggacccgggcagttacaacagactaacaagatccactggtgggaaagaacggtgtaatggctcgaccatgtcttggcttccacacgatgtggccataagggagccctagtgatgtcgggaccccaaagaggtgtccaccaaacgcttgctcataaaggagtggactttataccgtcagggga

SEQ ID NO: 692385 - DNA, 301 bp, Homo sapiens
  misc_feature (38)..(38): n is a, c, g, or t
  misc_feature (42)..(42): n is a, c, g, or t
  misc_feature (50)..(50): n is a, c, g, or t
  misc_feature (69)..(69): n is a, c, g, or t
  misc_feature (71)..(71): n is a, c, g, or t
  misc_feature (74)..(74): n is a, c, g, or t
  misc_feature (76)..(76): n is a, c, g, or t
  misc_feature (104)..(104): n is a, c, g, or t
  misc_feature (151)..(151): n is a, c, g, or t
  misc_feature (155)..(155): n is a, c, g, or t
  misc_feature (160)..(161): n is a, c, g, or t
  misc_feature (189)..(189): n is a, c, g, or t
  misc_feature (191)..(191): n is a, c, g, or t
  misc_feature (240)..(240): n is a, c, g, or t
  misc_feature (274)..(274): n is a, c, g, or t
ggttaatctacaccttaactctggctgctgcaattganaacnttctttcnaataaaataatatatatancnctnantctgatgtgcatgatgaacatttctggnaagtaaacactttctctcgactaagaaagtatttttccagtaatttnttgnttctnnattactacccacttaaaaaatcaattcncnggtaattattgactatgtttaacttttcttggtttacataatatatcantaaatataagttttagtttacaaatttaaggagnggatatgataagttataaaatagttat

SEQ ID NO: 692386 - DNA, 135 bp, Homo sapiens
aattgccaagacctctaatccttgtaattactgtagtcaagagacactctttgacataggaaaaaccttgtagagagataaaaatttacaccatgtggcctaaagcagccaccaatttaggaagggtttcaggtt

SEQ ID NO: 692387 - DNA, 809 bp, Homo sapiens
ccaggctcacagcagtggcttctaggaaactgggagttggagatcagtctttacagatacatcgatcagaggtctaaaatgaaacctcaacctaaaactcataggactgagtgccgtgggaggagggttaggtctgcttcttccacttatagcttagtctctgtgctccaagaggtcaaatttgtagcgtctctagaatttccattgcgggtctgtcagagagggtggggggaaccaaaagccccctatgcggactgttgtctgtgtagttctgtttgttattcgaagagcataggaagatagccgtcttatgctccaaccaggggctgtgaggtgccaacgagtcgactaacactggaggtgcaattgaaacactacccatcgttccggtggttcagagcgcaattctgccttagacatcctttctaacagttacgtcttgggtactctacaagaactacaaccctcaactctagtgctcggggacatatagatatgagtaaattttcatgtaacacgaccaggggtcattttcacctagtgttctaggaccacggccattggactcgtcagaaagtgatctgaagccttcagggtgactccacgccgccacttggtgctcttcacccgaagaaggtagtcgtggggactcacggggacgcgaaaacgctaccgaggccgcacattccatagacctacgttttagttgagccaaccaactctcgggggtgattgcagggcaccaactagtggacattgccccgtgacgacggattctcaagacttgggcagttccctaatcctaatag

SEQ ID NO: 692388 - DNA, 1313 bp, Homo sapiens
  misc_feature (318)..(318): n is a, c, g, or t
  misc_feature (327)..(327): n is a, c, g, or t
gtgcgtcgggctgccggaaaccatggcggtctctccacgggagtgtaatagtacctcgttcaatgttcctgctatgtttggaatgagaccttgcaagcaaggactacaatggcagtaggcgagggatacagattcagcatgtgggccattggatagaatgatgtagagatatgacgactctcactgagcatgtaagtacgttgacggaaggctcgtaaacaagctgagaggtgataagttgcactgtgtgcagaagttgagtccccatatatccggtacatgacgtggcgatagggatttaccagaatggtgactgantgcggtgantgggaggcatcgatttcacacgcattacggagatggatgcaagaagataggcttcgacatctggtctgccttaccctcactacccgttaaaaggcagtgatcctagcaggtagatcaagtgcattgagcctttcttggaacaagacaattacaatcgtataaatccatggaagactagtttattagactccgtgggaatggaacttgagccaaaatgggttcggaaacacgttttagaaaattacacgcagagatagccagcgtcccgtcacggaaatcccaggatttggagggacgtattgtggttgccaccaaagaaaagagattcttaaagtaatttcgcataggcaggggaaacacattattaacattatatgttcgtccggcacggattgggggaaccatgtgggggttgggagagttggcgcacacaggttgtaggacctaggataatctccatggatggtgttaaaagcctgggaggaagaatgtggaggtttccacagcatttcgaattaggttaaggccacactttaggaggaataggcttggggtgaccgtattccaacgaggaggcgcccttaaaataagatatggagagtcggttagatgtcggatctagatctctagggatggaaataaggcttattggaaacaggctgtatacacgaaacgaagggacaccatctccccacggtagggggcagcttttacattctgggttttcccaaggccacagagaattggaattgtcttacccgtgtggaacttctgggctaaaccaacctttgggggtctttcccatagatccataactaaataccccttttcattaacttactcaatgtggttgacacatcggatccccttgggaaggttcaccacttaattacaccaccaaggtggtcgtcaaaacatttaaccttcgctgtttcacagggctcacaaacacgcaaacttttctccccgcactagggcgttgaacg

SEQ ID NO: 692389 - DNA, 345 bp, Homo sapiens
aggcatgagccactgtgccaggccaaaaaaggctttttagggtatgacatcaaaagcattagtgccaaaagaaaaaaaacagataaattgaacttcatcaaaattaagatactttgtgcttcaaaagatgccatttaaaaaaaaaaagaccacctccagaatgggagaatatggttgcaaattatatatctgataaatgacttctatctagaatatataaagaatgcttacaacttcatactaagaaagcaaatacccaattaaaaaataggtgacggatctgattagctacttcttcaaacaagatgcccaaatggctaataagcacacgaaaaaatgctcacc

SEQ ID NO: 692390 - DNA, 1152 bp, Homo sapiens
agcgggggagtagccgatagcggctggagcgggcggccaaggcgaggcgaaagctgcacagggcccctacgcggccgccgtcagcatgtcgggacttcgacggagttcgagcggcagctcatacggagaattaaactaagagctgggacagaggtagaatccggcatcggaagcgcagagcagcaggcgtctctcggagccgtggaccgcacagacgccggagaccggagccgcgaccggcgcataccgggaacccagcggaagacgcgcttcccgggaacatggcgacaaacgcagctaaactccgtttgaactctagaggcgcatagagagaggagacacggtgtgactgattcgtgtccctcgccgctcacgaagtaagaagaagaaggtccgtaatatactgggacgtgcccaacccctctagggactattgtagacactacttcgaacactcgcaaatatgccaagtacagatggccaatgtccaaggtcgtggcggggtcgagagtgtgcgacgaccgacttgtctctttacgtgccacgcaggcagtgtacccgcgtgacagggtcctgggctgtggactctccgagacgggcacagaggtgaccccgatgagttcagtgagacgaccatggattgaacgcacgaccacatggccgctggacggctctccttacaggtggggactaacagtcaccccttgtttggggcaagttctacatgcagaggaagggccagtggactgtggagtatttggcttgtcaacggacacacaatgtaatgtctgccctggggcgtgtgggcttggatcccctaaagggcacccattgggacataacctccaacggtggcatttcggggcctgtggccacgactttaaacaccaagcggatcagacggaaaggttctcgggccgtcttgagtggggaagcttgcccgcttcaaggatgcggaacgcaggaacttaacgccaagggagtaattggggcctttacggaatggcacatcagatcatttcccacgggaaccaagatccacattaagacgattcccggccagaggcacctacaacgaacttacccaagccccggttttacctgggcatgtgttcacgaagaagaccccattacagacttatgatggctgtg

SEQ ID NO: 692391 - DNA, 450 bp, Homo sapiens
gtcgaggctcaaaattaactgataagaatcactgataaatattcacaaaaaataccaggttaaaataccatttgtgcggatgggtgcagtggctcatgcctgtaatcctagcactgtgggaggctaaggcagatggatcacctaaggtcaggagttcttggccagcctggccaacatggtgaaaccccatctctactaaaaaatacaaaaattagccgggtgttgtggcacatgcctataatcccagctacttgagaggctgaggcaggaaagtcacttgaacccaggagctggaggttgcaacgaggcgggaatcacaccactgcactccaacctgggcaacaaagtgagactccatctcaaaaaaaataaaaaaccacagaggcttcatgatttctagtttacttaaccaggctctgttatccttcatttatagtaacaggataaata

SEQ ID NO: 692392 - DNA, 226 bp, Homo sapiens
tcaacacgcgaggcacaaactgcacacgccgagtgaccatacagattgagatcccaatggacgaagttgttgcaggtcggaatggacgaagttgttgcaggtcggaatggacgaagttgttgctgcacacgccgaatcaccaaacatacatatcggtatggacgaagttgttgcgcaacaacttcgtccatagtgatttgctcagtttggacgctcggcgtgtgca

SEQ ID NO: 692393 - DNA, 371 bp, Homo sapiens
tatcaagatattcgtgcagccatcgatgctgcctttcatagagagattctgctgtcgcatctgatcctatttcgacagctctttatccacggcacttttttgcaaaattggaaacccttccaatgtcacatcaattcaatttatgtaacatttaaaatcctttgttgtaattacagcaatgttcacagcatcttcaccaggaatagaatgcatctcaagaaaatactctgctcatctataaaaagcaactcctcatctatttcagttttatcatgagattgaaacaattcagttaattcttcaggctccacttctagttctcttgctatttccaccacatctacggttacttcctcccctaagttaggtca

SEQ ID NO: 692394 - DNA, 81 bp, Homo sapiens
agagagatgatatacccgaagctgctggataattttatcccaggggtggctgaatcacggaatgcacacgacggttctgcc

SEQ ID NO: 692395 - DNA, 170 bp, Homo sapiens
gaggtgaaaaatagcagttctctaggaatgcataactaacccatagggtccatttaggtaaccaagtttaaaaaaatattaacaattcttggccgggattgttggctaacgcctgcaattctagcacttaggaaggccgagatcacaccactgcactccagcctgggctc

SEQ ID NO: 692396 - DNA, 129 bp, Homo sapiens
ccgtactaccttctgtgtttttttggggggataggggtggcggtgggggcgggtatagccctcctaactagtgtcatgtgacatttcattgtggttttcatttgcattttcctgatgattagtgatgtt

SEQ ID NO: 692397 - DNA, 742 bp, Homo sapiens
  misc_feature (639)..(639): n is a, c, g, or t
  misc_feature (731)..(731): n is a, c, g, or t
ctagaatccttagccaccaacggagatcaggcattaaagagaattcaagagttccccagactctggaaaatgtagttgttgataacagactagcattggattatttactaagctgaacaaggtggggtcttgtgcagttattaataaaacctgctgcacatatattaactctggacaggttgaggttaacattcaaaagatctatgagcaagctacctagttacatagatataaccagggcactgcccccaactatatctggtcaaccatcaaaagtgccttcccaagtctcacctgtttttcacctcttctaggacctttgacaactgtcttgttacaaatgtttggtccttgcttctttaacctcttagtaaagtttgtgtattctagattaccacagttccagagacaatgctggcacaaggcttccagcccatcctgtccactgacacggagaatgaaatcgtcctgcctctgggctccttagatcaggtatccagagatttttactcctccagtgccaaggcagggcctacgtccataaactcagcaggaagtagttacggaaaacagatctccgcccttctgcagcccccttaagattaaggaggagtatctaaactctgaagggggaatganggaagaggggggactcaaccctgggaagtggggctcaggcactcagaccaaactgggcactagctaagaataggtccaggggcaagatgctnagtttccaaaa

SEQ ID NO: 692398 - DNA, 378 bp, Homo sapiens
ctcttcaagattgtttttaaggtaattcagcttctccgtcgggctttccattttcaactttaggttagttttgttcaaagtcaactcatttaagacacttcgcaggcccttgctatcagcctcaacacagtgataaaggacaactttactttggcatttgaacaaagcccaattggaaaaatcaaaacagcttaaatggaggtctcctcatccagtggtaataaaacatcccccaaaggtggagcttaaagagcccagccctgggatgtgaaaacatgggttcaaattgcccctttgccatgttcagctgtccccttgggcaaattatttttttgaaccttagttttttcatcattaaaatgggaaaatttgttttta

SEQ ID NO: 692399 - DNA, 127 bp, Homo sapiens
ttcaagcttggaaatgagtttcgacgcctgcccgctgctcgtgccaagcctttgagcagcagctgaaaaactgcccgtatcaaggaccgcgacaaacatccgctcactatcaaggcgatccatcgat

SEQ ID NO: 692400 - DNA, 327 bp, Homo sapiens
  misc_feature (74)..(74): n is a, c, g, or t
taaaccagtaccccaaccccctttgtaaaaggtcttttccctcaaaaatgggaaaaccttggggggggttaggncccatatgggaatttttcctttcagggccgaaaggaaaaaaaggaaaaaatttgaaccctgttaaattttttttaaactgttttttaacggccccgtttatggaaaaaccaggccccgtttatttttggggttttgggaaaaaatatttttgttgggggaaaatttttggggggggggttaaattgggggtattttttaattttttttggccatttggaaaagggccaaaaaaaaaaaccccttttatctgta

SEQ ID NO: 692401 - DNA, 242 bp, Homo sapiens
  misc_feature (21)..(21): n is a, c, g, or t
  misc_feature (72)..(72): n is a, c, g, or t
  misc_feature (223)..(223): n is a, c, g, or t
gggctccggcaaccgctccgncaacgcaaccgctccgctgcgccaggctgggctgcaggctctcggctgcangctgggctggtgtgcagtggtgcgaccacggctcacggcagcctcagccacccagatgtaagcgatctggttcccacctcagcctcccgagtagtggatctaggatctggcttccaacatgtggcagctctgggcctccctctgctgcctncttgtgttggttaggccaa

SEQ ID NO: 692402 - DNA, 381 bp, Homo sapiens
  misc_feature (38)..(38): n is a, c, g, or t
  misc_feature (64)..(64): n is a, c, g, or t
  misc_feature (86)..(86): n is a, c, g, or t
  misc_feature (89)..(89): n is a, c, g, or t
  misc_feature (194)..(194): n is a, c, g, or t
  misc_feature (277)..(277): n is a, c, g, or t
  misc_feature (334)..(334): n is a, c, g, or t
tgcaaactatcaagaaggattctgttggccagggagtntccactgaaaaaaaaaaatggcagtnaaaagtcttgagtgtcctattncanaagcccagagtcctcatccgtcatccacgggagagtctttgagggaaaaatgaagtcaagctcatgcatctgcctatgggtaaatttattcggaaatccctgaanatcctgatatcttaattacccctgcggaccaccatagttcagggtgctttcccttttaatgacgtcgctgacatcattggcgnagaccacggactgtccattgatgctgattatgacgtagttttccttgagaaacaagnttatgatggggtaaaaaaattaaataaattatataagctcctgagat

SEQ ID NO: 692403 - DNA, 282 bp, Homo sapiens
  misc_feature (10)..(10): n is a, c, g, or t
caccctacanttcttattgggagggaggtctggagctgccaccaaactccatgtaactttttctgtgaagtggggtgctttgaatgtgtaattcctccctggttccatctggtggtcactgttgtctcttcacaggatcaggaaaagtctcagaaaagggtcagtcttgcagttcttgggtctgaggcaggagaatcgcttgagcacaggagtttgagaatacagtgagctacgatcacaccattgcactccagtttgggtgacacagcaagaccctgtctc

SEQ ID NO: 692404 - DNA, 272 bp, Homo sapiens
cgttgcttcactgtacacaagagtatttgtgtgtctaatacccccaacataaggccgggcacagtggctcatacctgtaatacctgcacttagagaggccgaggtcggtgggtcacctaaggtcaggagcttgagactagcctggccaacatggtgaaaccccaactccactacaaatacaaaaaattagctgagcatggtggcaggcgcctgtaatcctagctactggggaggctgaggcgggagaatccgcttgaaaccaggaggcggag

SEQ ID NO: 692405 - DNA, 1699 bp, Homo sapiens
  misc_feature (250)..(250): n is a, c, g, or t
  misc_feature (512)..(512): n is a, c, g, or t
gtccaaaatgactgagggccatgtatgttcttgtgccgtggtgggatacatgtgcctgtattatctcgtgacaggatcaatgaagggatcaagcacgcgtcctcaatgcaataggcgtgtcgcttcgtagactttcggagatgattcatggtccacaaagtatctagtgcgttccatactcggagacggacagtacagccactgcctaggatagatgtcgcacgagagacgcgatgcaccaacgatgcanagcacttctgagtcgaaatgtgtggagatgacgactctcatgaggacgctcgcatggggataattagacagcatcgcgtacgatcttggcgtggaggaatgtgtcgtgcacctagggagttaagtcgacccgaagcgcacgttgccatacaatacacacgctataacgtctggggggtatgtcggatgtgacgcgacggtcccacatgggcatacattcaacgccatatggtgattattcctggtcactgaatcgaacgttnccaaacttcgttttcgaaccatacttgggtaccttggatagggcggagatagaagtaactcataatactcaaatatcgcatacgtctctcaaagaatacgacacttggaccaccatacatttcgcgttggccccctttctcctttctccaggcttgagaagttggccaaggcatctccacgtatgcaacctcctcgcaactttgagagctagtaagaacgccttggaggccctaactccaaatgaccaggcaaatgggggtccccatcgagcccttggggagttgcaatccggggaacaacatcagatagtacagattcggtcgcgttcgtgtggcccgaatctaggtcaccttggggggcccccagcggaatatcttgattacgttaactcatgccacgccttgaaaggcacacctacaaggggtatttcccccttggcataatctggataagaagcggctgcgaacaggaacttgggcgggatttgtggcggggtggagtacggagtgtgccagagatttaaagccgcgaggcaatctcggacaatagaacctttgtaattggcttttttctaacctttagctttaagagacaccccatggcaaaaatatttcccactgggttaaacattccaaacgggaaagattacatagtaccaccccggttgcgcgtgggtgcgcccaatttatggggaagcagtcatctacgcctttggagaagttaggggtcccccacatgtgctattcacagacgggttccacccttagtaggacttccttcctttggccaaagacagcgtgtggtaccccaaacatgctataaggcaaacggaacatatataagggcaaaggccatgtagcacactggcctgttttgtcacacactgtttcgataaagtgccaagatgtgtgctaaacggggaatcgctttgtgagaggggaacctggtaccacccgaggtgggcgggtgcaccctatatgttggcacaaaccatctccataccgagaagattaaaaggcccgtgaggggggtagaatcagacacacccctaatgatggatataatcctgggtgtcacaccaccgaaggctaatatcatagcctgctgtacaagcaactggagccgcagtgagcgacttagcagttcacattttcggtcgacgcgttgcactaaagatacgagcgta

SEQ ID NO: 692406 - DNA, 194 bp, Homo sapiens
tccattttttgggccccaatttttagggccccgccccgtttttaaaaaaaagggggccccaggcccttatgggccttttcttttggaaaccccacccttaatttggttggggagccccgggtttggagggggccctgggggaggccaaggctggccccctggtggctccccccttataaagtggggttttggga

SEQ ID NO: 692407 - DNA, 326 bp, Homo sapiens
catcccctttcttcctgacgactagcattaattgacagctgacccaggtgctacacagaattggattcaatgaatctaggaatactgcaactctcacgtttccaggaaccattgtttgatgaacctaggactcaagaccaagcaaacgggcaacacctcatggtggatatccgattttagggctcaccccagtgcgatttggtgaaggaagctaggaagaaggaaggagcgctaacgatttggtggtgaagctaggaaaaaggattccaggaaggagcgagtgcaatttggtgatgaaggtagcaggcggcttggcttgcaaccac

SEQ ID NO: 692408 - DNA, 104 bp, Homo sapiens
ggatcctttattttcagcacgctggagtggggcacaggaagggaagaggaggcaaaggagagtcgcccaggcaggtgcaatggctcacgcctgtaatcccagca

SEQ ID NO: 692409 - DNA, 209 bp, Homo sapiens
gtgaacactcctaccagatgaccctcaggctggaggaaaacaggtgtttgatttgtcaccgatggagctagtatatgtgcgtagagtgtttgtgtatgtgagagtgtgaatacacaggtggatatttaatctgtattatgccccgctcttggaattttcttccccatggggctggggtactttacatacaataaatactgtttggccca

SEQ ID NO: 692410 - DNA, 1122 bp, Homo sapiens
aaaaagactatttcgttggcctcgtgccagatgtcaccaggaggctgtggagcagaccattcatggcttcttcagagtggaccgtgagcgagcgatgtcaagtattttgcaaggctatccagcctgccagtaccaaaatctccgaagatgccatagagcacagggtcctcaaccgtactagaaggcttgaatctcggtgtctttcctgcttccatgagagccgaggttcagtgggcattcgcacacgctatgtgaccttgggatagctttcgggggaggagagaccttcctctcctgcggacttcattgcaggtgctaaggttgcctacacccaaataccagggattttcaatgagtcaagagaaagtacagtaaacactattatcttatcttgactttatacggggaaataagtttctcagaggattataattgtgaccagaaagggcttaaatccttctgtcttcctgagtgaatgaaacttgaattggcatgagcattttccgttatggaagggatgagattcccagagaactgcattgctttgctcctggttttattgaagaatcgacggaatgagattcttacgaggctgaaggcagacgtgtgccagatgtgaaagagaacttcagtatcagccgtaaatcttctctcccaggaagggactgccggggtctgtggcaagtgtcagcccagcctgtgtgtgtaaccggtgtgaacttgtgcccatcgggcacgcacggggggccacaactccctaaagggcccgtgttcccacccagtgggacagcgctggaaaccctcaaatgcagcacatatgtggtgcaccattaacacaacggcgcgcacgacacggacgagacatacacagcagagcaccacccgaaaaaatatgcgcacaactgacatagctgcgcacccagaccaccaaccaacagggaggcgcaccccatacgacacgtgccacccgagggcggggcacaccaccaagcgcggagccccgccccacaccaaacactcaaaaaaaggcggcactacgccccaccacccaacgcccgaatactcgcgctggatgacagcttcgtacacgactagataagcaacacgactactcaccaccga

SEQ ID NO: 692411 - DNA, 210 bp, Homo sapiens
  misc_feature (11)..(11): n is a, c, g, or t
  misc_feature (165)..(165): n is a, c, g, or t
  misc_feature (167)..(167): n is a, c, g, or t
  misc_feature (207)..(207): n is a, c, g, or t
gggcaagtcanacaagacccagacctcggacagcctcggcaatttctccttctcgccgccgctcggcaccaagctggtcaacatccaggcgaatggctattacgtggatgagatcaccggccgcctgtcgacctcggtgatcaatctgcaggcaaccgtcgatcngngcgagatgccgacccccaccgtcaatgtcttgacctcacngca

SEQ ID NO: 692412 - DNA, 454 bp, Homo sapiens
ggattgttgaaagagacacttggataaataaatgatcaggatgaggcgtgagggcagaatcagatggtaggcacaagtgcttatcaaactagggaaggtgctcttatttacagctgctggctcaagaatcatgtgctgggctgggcgcagtggctcatgcctgtaatctcaacacttggggaggctaaggtgggagaatcacttgaccccaggagctcgagaccagcctaggcaacgtgcctgagaccatgtctataccatataatttaaacattagctgggcatggctgcgtgcatacttgtggacccagctacttggaaggctgagcgccggggggactcacttgaggccaggaggtcgaggctacagtgagccatgttcatgccactgtacttcagcctgggcaacagagtacggccctgtctacaaccactgatactacttaatttccaa

SEQ ID NO: 692413 - DNA, 417 bp, Homo sapiens
tctcgaggatcttcgagcgactctgaggatcatctgtgcagatggcgcacacgcagcttccttggtagtgtacgcgccggttggttgtattggttgctctcagggaccttggagactggcctttcaggtagatcttcatgtttctgaccttgcactacccctatgtaggctccagactggcattcaaggtgcctttggaatgcccccgggcactgtggccagggttcacatcggccaagttatcatgtccatccgcaccacgctgcagaacatggagcatgtcattaaggccctgcgcagggccaagttcacgtttcctggccgccataaggtatgtagtgctgcagcccccgttctcccacctttgccccaagcctcctgactcaggttctttgccattgagccttcatagtcgat

SEQ ID NO: 692414 - DNA, 123 bp, Homo sapiens
ggcaacgccgagcggaaggagtgcagtgaacctgagcgcgagcagatcgctgtggtgggctccattggcttgggatcaccaccatcgtaggcggtgaagctgcaaatgatccaggttactgct

SEQ ID NO: 692415 - DNA, 189 bp, Homo sapiens
  misc_feature (97)..(97): n is a, c, g, or t
tgctctgaggatccccccttagtttataagggcatcgtagtttctggggtagaaaatgtaggccatttcttgccacctcatgggctacaccttgganctaaacgtctttacgtgggtacttgcgcttactttgtagccttcatcaagggttgctgaagatggcgggatataggctgaaggagggatgag

SEQ ID NO: 692416 - DNA, 402 bp, Homo sapiens
  misc_feature (137)..(137): n is a, c, g, or t
acctgatgagcgctaacgatagatgtacgaattatctgaacaccctaaggaaaaccgcgtatcaatggcgggaatggagaaacgcaacgacgcaaggaagctcatgacaggtgaaaaccaaagggcgcctaagcttntggatcgaacagcgtattacgcttcatcctccccgagaaccggcagttcctcgcagtacagcggcggcgtacgcgagtttgcgaacagcgtccttgtaaagcccttctcagacggctcctcaacgccattcaccatcgcacagtattgaatggtgactgagttgcgcccggcaggcctgatgacggtggtgtaaggctcaatcgtcaggaagaaaccatttgaaaccatatccggtgtcaacgggtccgagtcgaacggtacagg

SEQ ID NO: 692417 - DNA, 1439 bp, Homo sapiens
  misc_feature (495)..(495): n is a, c, g, or t
  misc_feature (721)..(721): n is a, c, g, or t
  misc_feature (1174)..(1174): n is a, c, g, or t
  misc_feature (1189)..(1190): n is a, c, g, or t
  misc_feature (1230)..(1230): n is a, c, g, or t
  misc_feature (1243)..(1244): n is a, c, g, or t
  misc_feature (1253)..(1254): n is a, c, g, or t
  misc_feature (1290)..(1290): n is a, c, g, or t
  misc_feature (1304)..(1305): n is a, c, g, or t
  misc_feature (1308)..(1309): n is a, c, g, or t
  misc_feature (1317)..(1317): n is a, c, g, or t
  misc_feature (1319)..(1319): n is a, c, g, or t
  misc_feature (1331)..(1331): n is a, c, g, or t
  misc_feature (1422)..(1422): n is a, c, g, or t
gctcacatgtcaagcattaatgcagtcttgtgttgctctttcccactatgtccggtgttgttgtttctcgtctgctcgttttgggttgttgtccggcgctcgtcgcgcgagcttgtggttgtcgtatgtcccccagcgactatgtctcccttcggtagtcctcggtctcgtctaatggactccctacctctgttttcgagcggggagtcccccccaaataatgggggcagttgctgcgccgtagttctcttgttggagtaccaccttcggttttgtccaccccccctggggatggccgtggcgtatattttcaacaggggggacccacaaagggttcataatttggcgccccctgttgttaagtgcccccagtgttgctgctatgggggtgaccccctgggggaatgttgtgcccatccagccctctcttggttttctttcctgccatggcgcttcccttgcgcgcacaacacaaactggcttttagcaccccgntggccaccagtgttcaactcccctggacccaagcctgtgtggggaattctgtgggaaacggagctcccattggccccccacggtccccctgtgcccaatctacaggctcccccccccgggaaggacttgtgtgatgggccccccctccgggggaacctttgttggccgtgtatgggcccccgggcggcgttttccccaggacgcgtctaatcccgccggccgtgtnttacatgggcgcgcgtgcccaaggccttgttggcgccaagaggtccatccctgaggctttacaccgggaagacgtctacatggccataggccattcccgtggtctccccacatgcccaacagggtccacatggctggcacacatgacacctgcccgttttagaaaacactttcgcccaatattcgagtgagcacttcacacgaaagtgttggtgaaacccaggccccttcggagagggccccccctctccaagggcacttcctggggcgtacacattgaggcaccacacggtgggttctctcttctgaactttcacacgcaagcgagcaacccacctcctccaccctcttgaaccctggggcttggcacttgccctcacacgagccacctttgtcacaggctcactttcctggtatgagccaccgagaatttggctaccacagccaacacagnggtggtggaccctcnntggcccacacatggcctcccaaggagtaagacccctgganccacccagccccnngccagagcnnccagaggaagaagagagaccctccctgctggggagntccctgccacacanncanntccccccncncaccactgaatntcccctcctcaccgattgccctgtagaccccttgtaagaggggaggggcctagggaacccccccttgtcaagtacccatccaattaagtancctgtgctccaacccca

SEQ ID NO: 692418 - DNA, 494 bp, Homo sapiens
gcagttgactttgtcttctccgggacgactgttacagaggtctccagaagccttctctctcctgtgcaacaaatggcaactcgttacaggacacaaactccatgtgcactcgagttagtccggaagacacgatggcaactatgcttccgaatacagattgatagatctatctggtagggtagaggatgtttgggacgagaaagtttagggtaaatagagcgagataggttgcattaaatccaaaggcgcaattcataagggcgcacaagaagattcatacatgggggctctcggcaagtcgggaaaccttttgtcattcatcttgggttgccgcacgatttggccttttatagtgggggcccaaagccaattaacaagctctttcttccacgacgagacggcccaagggcacaacatctgacaattgcggccaattcctttgcgccacagtccccaaacttggggcgggccaagacctctccttcaattgtcca

SEQ ID NO: 692419 - DNA, 223 bp, Homo sapiens
  misc_feature (3)..(3): n is a, c, g, or t
  misc_feature (5)..(5): n is a, c, g, or t
  misc_feature (88)..(88): n is a, c, g, or t
cgngngtcgcgtcttgcccaagtctccgcggtccccagcgctcgctcgcgcggtcctgccacggccttcctgctgcccgcgccatggnctcagctccaactccgctgtggagttgagtggatcgcggccgtcacctttgctgctggcacagcgctctcggttacctggcttacaagaagttctacgctaaagagaatcgcaccaaagctatgggtgaatcttc

SEQ ID NO: 692420 - DNA, 320 bp, Homo sapiens
  misc_feature (19)..(19): n is a, c, g, or t
  misc_feature (72)..(72): n is a, c, g, or t
  misc_feature (185)..(185): n is a, c, g, or t
  misc_feature (233)..(233): n is a, c, g, or t
aagagccacctggcctgtntccaagatgtggaaaaggaaaatattgggctaaggaatgtctttctaaatttnatgaaattggacagccattgtcgggaaatggaaagaggggccagccccaggccccgcaacaaagtggggcattcccgattcagccatttgttcctcagggttttcagggacancaacccccacagtaaataccaccatttcaggaaatcagccatttacancaatacagcaactatcccctgccacagcaggcagcgctgcagtagatttatgttctgctcaaatgatttctttaatccctgggagag

SEQ ID NO: 692421 - DNA, 129 bp, Homo sapiens
ccttctcaccgatcgctgttgctccttgcagcctgcgggtcctcttcagccgccctctccattaaccttttaacatgcctgatcctcatctgtcttcaccattgtgtgctcttaccagacttctccagt

SEQ ID NO: 692422 - DNA, 559 bp, Homo sapiens
ttggcgagactatcatccaggggtttggatggctgtctgagcgctgtgcccagtactacgaaggacggtatgctgacttcacgagtggcgttgtgtgctgaaaattggggaacacaccccctcagtccctcgccatcatggtagaatgccattgttcttggctcgtatgcctgtatttgccagtataatggtattgtgcccatcgtggtagcctgcatgatcctccctgatggggaccatgacttgaagcgctgccagtatgtgaccgacgagaggtgctggctgctgtctactaggctctgattgaccaccacttctacctggaaggcaccttgtttaaacccaacatggtcaccccaggccatgcttgcactcagaagttttctcattaggagattggcatggcgacggtcacagcgctgcgccgcacagtgccccccgctgtcactgggatcaccttcctgtctggaggccagagtgaggaggaggcgtccatcaacctcaatgccattaacaagtgccccctgctgaagccctgtggcctgaacttctcctacgg

SEQ ID NO: 692423 - DNA, 157 bp, Homo sapiens
gtagagtattatccccacttttgtaaatggtggggggaggcaaggcttcgagatcattattacttgccttacgctggtgcttctcagttactggggactcttgtttcacatggcgattttgattcagttaggtctacctgggggtaccgagctcgca

SEQ ID NO: 692424 - DNA, 160 bp, Homo sapiens
cccccggccttttccccaaaaggggggttttttgggggggggcccgtggaaaagggcccccccccccccaaccccctggggggggttttttggggtttgccctccttggggttttttttttttcccccaaaggattaaaggaaaagggggggggggggga

SEQ ID NO: 692425 - DNA, 136 bp, Homo sapiens
  misc_feature (94)..(94): n is a, c, g, or t
  misc_feature (132)..(132): n is a, c, g, or t
gcagatccagcgccagagagacaccagagaacccaccaagacctacactgttggctgtgaggaatgcacagacccagtgacatttccctcaatnggaggggctgtcctgaggtgtttccctgtttatccatnccct

SEQ ID NO: 692426 - DNA, 1285 bp, Homo sapiens
  misc_feature (394)..(394): n is a, c, g, or t
  misc_feature (431)..(431): n is a, c, g, or t
  misc_feature (1117)..(1117): n is a, c, g, or t
cgccatgcatgctctggcatactagatagctggcgcacgtgacatgtgtcacatgcgcacttggttaatggtgcccagcttattgctacttgggagcgctggtgcccactatggcataatcatgtgccgacactgaccagtctatctcatggagctatgactagttgtgtctgtggatgccagtagggatgcttgctagatgacgggactatcgcatcgtgtgccggaaatcacattgcgctgagaaaaagaccagagcgtttgagtcgtcagcaactagtagagacgaaagcttcagtaggacgcagctgactagcagcgtcagctagcgctataagatgtagcctaccattagggcaacgatacgtagagcttacagctgacgtgtgcactngacgtcgctgttgtggtatattgcgccaagtccaaangacttggaattggtagggatttggcttagccatgatcatccaagtaggcgattttccattgcatgatccaggagcgtcggatatataccaagcgatttttcacgaccgaacaatagctttgaatggagcgtattggcttcagagtcacgtgtggttctagatcgacctttggagctagctctacaagcttaatttgtgggcccagacgcctcacggtgcacatatactcgtcgtgtcggaactgcatcatgcttgccatgtttgggtctattggcaagagaaccaactactgtagaaggatgcttcatgcaatctggcggagccgttatcattcccagggtgtctttgtttcacgacagatagcgtaccgtgtatcagccacaggtgttgcagctgatgtaggtagctgtcatggcttattcctttaagttgaacgtggccgagcaagggtgaccggcatctgaggctagttccccagctttatggccgtaccgacgggtccgtttcctggtactgcgtggagcacttggcacaaaggggctggggcacatggcttcttcgtggattcgcccgggattttggatccttcaggcgcccgcagccgttccccttgggatccctcgcacctggttttggtctcttgcccccggggtcccccatgaaatttccccttgggtccccccttnttgaccgggctgggcctgtgagccttcttcccaagggggtttccattccctttccctttttgtttgggaagacggataccccaggggggacaaggtttctcacgcggagccctagggccggagggctccaggagcaggggccacggcgggcccgcggaaacccagacg

SEQ ID NO: 692427 - DNA, 353 bp, Homo sapiens
gacgcaacgcaggcacattgtagccgctgtcgtggccatgacccgcggtaaccagcgtgagctctcccgccagaagaatatgagcagagcgactcggttaaggggcgccgagatgacaggctttctgttgtcgcccgcaagcagagggacttggagatcatgcagcagaagcagaacccttttggccttcgcctgtgtgcctggagccagtgccacacacgctctgcgtttcctcctgtagtgctcacaggttccagaaccgatggcattccctctgccctgagtctgccgggtcccttttgtgctctctttcctcagagagcctctcttcccctgtgccacttccggggtgg

SEQ ID NO: 692428 - DNA, 220 bp, Homo sapiens
  misc_feature (81)..(82): n is a, c, g, or t
actacagatttggagaaatgcagtttggattttcgtacacccccaggttttgaccgaacacgtaagtgctgagattggaanncgacattaattcaacattggaagagctttacatcagaacactggcttgttaggatatataaagtaaaagcacctgataacgggagacattagatcacaaacctcgagtcaccaactttcccaaacgagtatttgtcaa

SEQ ID NO: 692429 - DNA, 117 bp, Homo sapiens
agacattaaaccagataacttcctaatgggtatttgggcgtcactgtaataaggtattccttattgattttggtttggccaaaaagtacagagacaacaaggacaaggcaacacata

SEQ ID NO: 692430 - DNA, 333 bp, Homo sapiens
cccgcgcggtgttccgcattctgcaagcctccgcagcgcacgtgggcagtcggctccctcgttgaccgaatcaccgacctctctgtccagatgtgtttcctgtgggtttctaacaagctgacgctggacacagctggacgttaaagggaagcgggtcggtatgagaggcgacttcaatgtgtcctatggagaacaacccggttacaaacaaccagaggattaagggtggtgtgccaagcatccgcgctgatggtgtgcccatgcctgacaaggactccttagagccagatgctgtggaactctctctgctgtgcaaggtggtctgtgtttggg

SEQ ID NO: 692431 - DNA, 400 bp, Homo sapiens
  misc_feature (6)..(6): n is a, c, g, or t
ccgctncccgcaggtatgcctttgctataaggaggtgaaggcgacatacaaggatggtcagtttgagctcatcccagcaccccagttccagcagccccactcaatgatcttgggccagtcccctcccctctgggagcgtactgtctccatgtgtgaaatgggaggatcatcctgggcctgctgttgcttcccaaggctggacagttaagattcacaacatgatcagaaaccaggctggttgagtgcagccctcacacctgtaatccaaggagtttgaaaccagcctgggcaacttggcaagaccccgtctctacaaataataataaaaggaaaaaaacagaaaccaggctgcagagtctgacagcccagaatcatcttcccaaatctctgcatcatctgg

SEQ ID NO: 692432 - DNA, 452 bp, Homo sapiens
accaaaaaaaaaaaaaaaaaaggtgtttgtctggagctgaaagccattatcctaactgaactaacacaggaactgaaaacgaaatactgcatcttgtcacttacaagtgggagctaaacactgagtacacatggatgcaaagaaaggaacaacagaccttggggcctacttgacgatggatggtgggaggagggtgagaatcaaaaaattgcctaccagatactgtgcttattacccaagtgacaaaatatctgtacacacgcaacccctgtgacacacaatttacctgtttaacaaagctgcacatgcactcctgaacctaaaataagagttaaaaagaaataaaaaccaaataccccaggagaattgcttgaacccaggggacagaggttgcagtgagccaagattgtgccactgcactccagccagggtgacagcataggactccatac

SEQ ID NO: 692433 - DNA, 369 bp, Homo sapiens
gaaaaaaggaaccatggatttattcaaattattttacaacatcgccttttttgacagttgtcagcttaacacttaatatagttaaaaaagtcaacaattacctgcaaaattatatatattttaatgtctaaaaatatgttgcttatataaagcaagaaaatccctcctttccacaagggaaagttttcttgtttttcccagagctgtgattattgacagactgttacacgcatttccaaagctttaaaaatctaaatggattatcttttccctgcttgtacatgcctgtaaagaaacatgtccaacgctttgctttttcatagagtaaggacataaacaaccctgtttccttttaagttattagcattt

SEQ ID NO: 692434 - DNA, 428 bp, Homo sapiens
cttaccagagaccctcatccaggcagtcatatttccatccttttgtgaaaggaaactaggcaatgtgagaactgtgcccagtggttttcaggctgactctgctggttgctgcctgcaggacacactggactattactgtagtaatgcagacaaaagatgatgagggcctgacatagggcatgtgtaacaggctgtagagacaaaaatctgggagagcttttggaggttgaatagactggaaaagctaccaataagctgcagctattgagtgaagtatcaacccacatgttagaaaagatttttttttgaggccgggcatggtggctcctgcctgttatcccagcactttgggaggctgatgcaggtggatcatgaggtcaggagatcgagaccagcctggttgacacggtgaaatcccatctctacta

SEQ ID NO: 692435 - DNA, 487 bp, Homo sapiens
  misc_feature (107)..(107): n is a, c, g, or t
  misc_feature (113)..(113): n is a, c, g, or t
tgcaagaaggaaggcatactacatattcttttttttgttttgagatggaatctcactctgtggcccaggctggagtgtagcagcacgatcttggctcactgcaaccncctccncctgggttcaagcgattctcctgtctcagcctcccgagtactgagattacaggcatgcatcactgcgcccggctaatttttgcatttttaatagagacggagtttcaccatgttggccaggctagtctcgaactcttggcctcaagtgatccagcccgccttggcctcccaaagtgctgggattacaggcatgaggcaccacgcctggcctcaaaagaatttttactatgtatagtaaatatacatagtaaaatatgtatagaatagtttactatgtataactattaaagaacataactcagggaagaaaaatccaattaatggggtggtattgaaaggaaaatggattgctgttacgttctgtatctgccctt

SEQ ID NO: 692436 - DNA, 111 bp, Homo sapiens
tcgagctcggcctggttacggttgcttgcgtgaggaaatacttgatggcagttctgtggaacgagggtttatttttttgcagagtcttggtgaggtagggtcttggtgagg

SEQ ID NO: 692437 - DNA, 690 bp, Homo sapiens
  misc_feature (5)..(5): n is a, c, g, or t
  misc_feature (525)..(525): n is a, c, g, or t
  misc_feature (536)..(536): n is a, c, g, or t
ttctncttttttttacagtgaatttaattttattagcaaaataataaaacaaagcatattctggacaataatcaatactctgaaattatattactttagttagttttcccttttaaattattttttccacttcaatttaaaaaatgtctccaagtaattcatgcgcataatttaaaaagtcaaatagaaccacaaggcttacaagcaaacaaacaaacaaaaagggctgtaatcttttggccttctttttgctacctccagaatagctgatatgaaaactttttccacaactacgggggtggagggtagaggctcctgagctggtctgaatttgttcaagtgccctttcctgagcagatcactgaagtcagggggatgataacagttatgagcttttgccagttggagcccctggaactggagaaaagtcagtctctatcacacctcacagctgctaccaacgatctcaccaatgatagtggtggaaggggcgctggacagactactgtgttcctggaaacactntccccagcccncttcactttctcccagtggtagactaataatggtctccaaagatatccagatcctaatctctggaaactgcggatgttatatggtaaaagtgattaaattaaaaattcttgagatgggagtattctggatcacctaggtgtccttataagagtg

SEQ ID NO: 692438 - DNA, 1009 bp, Homo sapiens
  misc_feature (1009)..(1009): n is a, c, g, or t
gagtttgtgacgctgctgatcgtctagaggctggcagattcaacgatctgggtgccatcattttctggcttctgttgatgaccctcttccagctttttcttataaggctaaaaattcacaaagcatatatcaatgaactcaggaggactctagatccggcactagtactacagactgtgcggccgactgttaccaaactactgccacgacagacacttatcacgacgacatgtgaccgcacacctgtgcgacacgatactggcaagacactgtcacgcaactaaccttacctcaccttacttggaactgaacacactcaccgacttcaaaatgctcagctactcacttgttaacttatgcacagctaacaatgctttaacccgcctgaacctcagctcaccctgcgccacgaacacaccacaccaccctggaacacaaacttccccttgcacctgaacgaaccgttcctccatacacaactctacgggacacaacgcaacgacgctccccacacaacgcctgccacgcacccaaactgactcatttgcaacatcgggtaaccctgatacccacttaacaggcgacgcttccaacgagccacattgccacccccgcctccaaccacgcgcacacgcaccttaccacccaccgcgcgcgcacaccatacccggctgccgctcgcgccacttgacacccactggccaaatccactgcattaacctggggacattccttccctttaaactgggcttacctgaaccaaccacgcttggcacaccttctggaagcctacctactaaccggcgctcggtaaaaaacccattattccccttgggaaaccttccacagcgaaccctccctcctaacacctggaacaccacgtaaccacaccctacacaacctcggcccataaacacttacctacaccacaggcaacacttactaacgccgcgacgacaacaacccctcccatcggcaccactaacccccctgcggagaccgcgaaacn

SEQ ID NO: 692439 - DNA, 584 bp, Homo sapiens
  misc_feature (419)..(419): n is a, c, g, or t
gggtccgaggcggccgcaatggaacctgtgggatccggtactctcagtagcgcggggagtcctggcgggtggaccttgaaccacttgtctggcccgggtggtctgattagacgtgacctgaccttgatcgacgctgtgctctgccttcgcttgtcgaaggtgagtatggacctgtcgcactggagtgtcattagacttcgtcgacctgcttgaaaggcagtgtgtgactcatatgccctatcgcagggacgtggatcactaaaagctctcgcgaattcccgagtatacgactatggcaaggtacacgtcaccgcattgaccaggggtattgcctcgagaggcgtgatgaataagcctggggattcctagaggcattcacgcaagggtccaaaactctaggacaaagttctaatacgtcnctaaagatcagggggtttcgatcgaccgatgctcctcgacccggaccacccgcgcaaccttgcgcgcgaaccctggtcaaggctctccctacgttttgcatgagttgtactcgtagaggttgtctcatccaccttgtgaatttcacctatgaacaaaggttggag

SEQ ID NO: 692440 - DNA, 278 bp, Homo sapiens
ttgttgacgtggcttctgcaacctccgcctcccaggttcaagtgattctcctccctcagcctcccaagtcctgagactacaggcgtgcaccaccacgcccagctaatttttgcatttttagtagagacgggatttcaccacgtagggcaggatggtctcgaactcctgacctcatgatccacctgcttcggcgtcccaaagtgctgggattacaggcattagccactgtgcctggcccaattccttgatatttaatccaatctttaaaacatattcac

SEQ ID NO: 692441 - DNA, 143 bp, Homo sapiens
gcaaggttttcattcgtgcacttcctcgtgcattttggccatgtggcagcacactccgtcatccagggcagcagttccaagccgatgtgggcagtcgcacaccaatatccattccccagcagtccagcaggcagcaagcagca

SEQ ID NO: 692442 - DNA, 1030 bp, Homo sapiens
ggaacaatgcgccttatcgaaaggcggctaaacagggagccaatgaacaaagtggttgatccactttactatgaacagattggtatgatgtgaaagcccctgctatgtccaatataagacatattggaatgacgctcgtcaccaggacccaaggagaccaaagattgcatctgatggtactcaacgggtctgtgtgttgtgaagtgagtctatgctgatttcgcatgaatgatgaaggttgcactttaggaacagattcacagctgattactggaagatgtatcaagggtaaaagactcgcctgaactacacttccatggcattggatcttacccgtgaccaaatgtgttccatgtgtcgaaaacaatgtgcagacaatgattggaacgctcacgtatgatgttcagaggactaccgatgcgtgactatgactatcggtctagtactgagttggggttctaccttaaaaaatatcggcagactaatcctgagtactggaagaccgtgcttatgctcaagtaccaatcatggtcacgcctaatagtcctggagagaacgatggattgggatcatcattgatccctggagaggatttcccaggacagtcgattgggcaacaatgacagtagaaaacatggcttggccaactctactttattcgctcctccatgaggtgtctttcgtttagacaaggtaagtagatgcttgatacgaagccccaagttttgcctcttggtgacacagctccatgggagcttctatgggtggacaaggcagctagtttctggaaaaaggccactgggtggaccgagacagggtggcctacaggttgaaccgagcctgatgcgagttattgaaaacccacccagttccacgcacatcctggtgtaaaaggttcccagactctccaaattaggtggggcacgtttaaacaacggtggccacaatgtggggcgcaaagagacaaaccagaggaaaaaacgggacacaacatatagcgggaggaacccgcaacgacacaccagccgct

SEQ ID NO: 692443 - DNA, 411 bp, Homo sapiens
tcaaaaaatgttgccacgataattgttttcagaagatagagcatgtctttttagacatactgactttaaggtgctggtaaaactttcttatgagtctgacgagcagaagaggaatggagcagactatacactcaagagataactccccatcaaaataagaatcaaagccacactttgattaggaagagagtatagagggagaagataattaaaagacaaccatgtgaaaggctgcacaaaatgggcaaaaagaggaaataagtgtcataaaaggagatctggctgggcacggtagctcacgcctgtaatcctagcactttgggaggccgaggcaggaggatcacttgaggtcaggagttcaaaaccagcctgaccaacgtggtgaaacgccatctctactaaaaatacaaa

SEQ ID NO: 692444 - DNA, 369 bp, Homo sapiens
  misc_feature (216)..(216): n is a, c, g, or t
  misc_feature (298)..(298): n is a, c, g, or t
  misc_feature (330)..(330): n is a, c, g, or t
ctggcccaaagaccatttaggtccacctcctcttttttgctcttttttttttttctgtgacagtttcactgtgtcgcccaggctggcgttcagtggtgcaatctcagctcactgcaaactctgtctcctgggctcaagtgattctcgtgcctcagcctcccgaatagctggaattacgggcatgcaccaccacacctggctaatttttgtattttnaatagagatggggtttcaccatattggccaggctgatctctaactcctggcctcaagtgatctatctgcctccctcagcctnccaaagtctgggattgcagacaagtcatcgtncccggccttctttttgcccttaaaagtaagggatgtggg

SEQ ID NO: 692445 - DNA, 467 bp, Homo sapiens
ttgtgtttttttttattggtttttttgggcatgccccctcctttaaaggagcttaaagtttactggtgtgttaggggatgggtgggttaaaataaaataggggaaagaaaacaggcaatggccctactgggatttgtgttacaattggaacatcctgggtccagggtgcatagggggggccggaaagacccccttagaaagacctctttgagggagacttttagagcagggttaaaacaaaagcttttcaagcctttgctaaatgatttgtttgaacaaagcccttctttaggtcctggggatccaaacattaataaagcccgacagagtttttttttacaccatgggagggtaaagagacaattatcaattctgcaatttaagggtgcaactgagagttgggccccccacaagggggaagttcttaatgcaaagagatgcaatgggatggaaactggccaagacag

SEQ ID NO: 692446 - DNA, 227 bp, Homo sapiens
gttagacgctcttaccgaagagcggtctccacctacacaccagtctgagctactgtggtcggattcttaacccactgggccacagtgggaactctgtatattacccagattaaaacaaaaaaaaattaaaaaaccagaacttaatgtagctagttctagtggagaagaatgttattaaagctactttaagaatctttggaagggcctgaaaatcagacacagtgacc

SEQ ID NO: 692447 - DNA, 241 bp, Homo sapiens
gcaacctcccacctaagccttcccagtagctggcacgtgcaccgtgctcggttaatttttgtgtttttttgtagagatggggtctcgctatgttgctcatgctggtctcaaactccaaggctcaagtggtcctcccaccttggcctcccaaagtactggggttgtaggtgtgagccactgtgcactgtgcccagcctgacatttttttttctttggcggtggttgtcgggggctgtaattc

SEQ ID NO: 692448 - DNA, 144 bp, Homo sapiens
ctcccttatcagtcatgctgtgtgtgcaattcactcacaaccacatcatgccatgcatcagctgtgaattctgcactactttttttttcttttttccccccaagaatatctctggggaaaagtttttagtacgtcacttagaca

SEQ ID NO: 692449 - DNA, 129 bp, Homo sapiens
cccactcaagccgaatgatatttcctattcgcctacccaattctccggatcgtccctaacaaactagtagtcttccttgccctattactatccatcctcatcctatcaataatcgccggtccacgagat

SEQ ID NO: 692450 - DNA, 582 bp, Homo sapiens
  misc_feature (582)..(582): n is a, c, g, or t
agccactcgaagtccctgaggagacgtggagaggaggagggacacgggcatggtggggagtccgggaagggagacgagcgtctgaagacgtcctcccgagggcgaagtgccggggagctgggcagtctctactagcgctgcaggctctgggcgattgtagcgggacgtcacaaaatggacccaggcagggtcagagctaattctgctgaggagcggttatgtggcatcgttctaaaaagttaaggcacatttatttattttattttttgagacaagatctgctctgtgccagctgagtgagtgggagatctcagtcatgacctgtgctccggttcaaggatctcagctcagctccgagtagtggattgaggcgcccgcacagccggtattttttaacttaggttggtgagatcatctcgttgtgccaggtgagtgagtgggggtctggtcatgacttgctccagtcaacgatctctgcctagctccgatagtgggatacaggagcgtgcacaatcgggatattcaggttaacgtaagatggggttcccatgtggacaggcgattcgaatcctgcctcagtgn

SEQ ID NO: 692451 - DNA, 717 bp, Homo sapiens
agcggatcgatgcttgctaggggaggtgagtccggtcgcggcggcaaccgacggcgtgagtgaggcggcggctgaggagaacggcggccagcgcgccggcatgcagggagcaaagacggccgcgtgggacggaagcacggtgtgggtggggaggggggggagaaggcgcacactgtgccagctcctgctggtggtcggagcgccaggggcgctcatcgggcaggccagcccagggacacctgacgacgggcacgagcgcgagtcaccggcgtccggcggagcgaagatgcagtgagtccccgcgggactgctgcgcggggcccgtctgggccagcgcggaagacctcagcatcctgaccgggactttgtggcgagctgctgacttgagaccagctccaaacggggtggctttccatctccagacacccctcggaggtgtggggagcaccgggccctatggcacactcgctgtagagttgccgcgggttttggtcccagtcctgagggttgtgtgtgttaggggacccagcatcacgttgcgccgaggagttcctgcatattcttgcaccatcccgggtgctgttgctggggctctctttatttgcacgcgcgcttctagcttttttcctgacattttccactctacgctcgttctttctcccttgcatcttgttgctttgcctgagactctttgctctcgcccttgcccaggctggg

SEQ ID NO: 692452 - DNA, 665 bp, Homo sapiens
ggatcccacaaagaccgatcggaactgtgcgcactgtacgcaccgggacgcacggtgtacgcacgtgtacgcacgtgtacgaacgtgtacgcacgtgtacgcacgtgtacgcacgtgtacgaacgtgtacgcagtgtacgcacgtgtacgcacgttatgtcctgtaaccattgactgaatagcaccttgtttggattgtcgtgccggatcatgagttccatgaagtccagctacaattgatttgactgtgttagggcctttgacggccatggctgagtccaagcatccccaaaaattaaaaaataccaaatgtatgaaacctcagttatgtgtgagcatgggctgattagtcattagtccatcgagatgtcttatttaaggggaaagagtgggcgattttaggtgagatggtcctgaagtaagaaccagatgcctgttaaagttcatcaatagaaacccccacgatttatgggcccggagcgagaagagggatccctgccaagcgggttgctggtttcacgcggcatggtaattaagctcgtgatctaatggtggtgatacgcatgttgactggagttatttgacatgatgtgaagatatgtgacgtgtataacgctgtcatggacgtggttaaaaagcagaagccagtactactgaggtgtaag

SEQ ID NO: 692453 - DNA, 777 bp, Homo sapiens
  misc_feature (710)..(710): n is a, c, g, or t
  misc_feature (713)..(713): n is a, c, g, or t
  misc_feature (722)..(722): n is a, c, g, or t
  misc_feature (728)..(728): n is a, c, g, or t
ggatcccacaaagaccgatcggaactgtgcgcactgtacgcaccgggacgcacggtgtacgcacgtgtacgcacgtgtacgaacgtgtacgcacgtgtacgcacgtgtacgcacgtgtacgaacgtgtacgcagtgtacgcacgtgtacgcacgttatgtcctgtaaccattgactgaatagcaccttgtttggattgtcgtgccggatcatgagttccatgaagtccagctacaattgatttgactgtgttagggcctttgacggccatggctgagtccaagcatccccaaaaattaaaaaataccaaatgtatgaaacctcagttatgtgtgagcatgggctgattagtcattagtccatcgagatgtcttatttaaggggaaagagtgggcgattttaggtgagatggtcctgaagtaagaaccagatgcctgttaaagttcatcaatagaaacccccacgatttatgggcccggagcgagaagagggatccctgccaagcgggttgctggtttcacgcggcatggtaattaagctcgtgatctaatggtggtgatacgcatgttgactggagttatttgacatgatatgtgctatgtacgatcaataatgatatgtactatgtaatattaataataatatgtacatgcttatatgcatggggactagcagttaatgcacgacgtacatagggctataatatattanatnttttgtttntaatgnttaatttttgcgctcgcatatttgtatgtctgtgcgcattataacggcc

SEQ ID NO: 692454 - DNA, 1264 bp, Homo sapiens
  misc_feature (533)..(533): n is a, c, g, or t
  misc_feature (1015)..(1015): n is a, c, g, or t
gggtgccttccttctgctgcgagtctagcctgttgtttcgtgtctctgttccctcctgctcggttgttgggtttcgccgcttgtttgtctctgccctctccgtccctccctctccgcggcgtgttggatgtttgcttttatcagcacatgtttgcgggcgggtcgccctgccgcccccttgtttgggtttttcccccgcggggttcttctttctccccacctggggtattcccccccgccttttgtaatccctttgtcctggcccccctgtatttccggggctatctagcccctgttttggcctttccaggaaggcacccgagcgatcggggagacggcctgttccgccccgcgtctttctggggccagacccaatggcccgatgtgtgtacccgtaatccacgggtccctgtttggctggggttatcacgctgctggtgcatcctaggtcatcccagagtgagcccccagtcctgagaaggggccccaggactccctggagggtggagatggagcccctgcccgcccctggnccgggtaccactcttccgcccccgcctgtcgctgccccaccccttcccgctggggaacttctcgcggaatttatagccacctcgcttcttcttctgggaggccccatcgagccccaccgtgccactttatatatggcaccactgctcctctcactgtttcctaaggtgcacctccgcccctctgtgggtgttaccacagcttcctctgcctccctcccctctgcgccaccaccgcctctggtgttacaccacattgccactgcaccgcttcccacgcgcccaccctcggcccacaagtgtcccacaggtgtgtacgccaagccaccgccttatacttgtctcgtggtctctcgccgctggagaatttcttctcctctctgtgtcccctccgccacgttcctccgtccacttcggaggtcgaccctcggaaaggtgttggcctttcctcccacactttttgtctccacgtatttactcttgcncttagttgttccccacacgacgggaaaggctggaaacttttaacttctgtatcccctctgaatagcttaatttaaattctgttttctcctaagtggttcaccacacattgaaactgaaattgagaatggtcgctccgggtggctcaaggagacacctcccctctccttcccccttgtgccccccttatccattgcctgttttgttttgtttgttttttaactttcccataataaaatggagttctcctt

SEQ ID NO: 692455 - DNA, 1023 bp, Homo sapiens
gcgggaggatcctttaagctcaagggtaagcagctgtagtgagctttgattgtgccactgcactccagcctgggcgaccgtgagacttcatctctttgcgttgtttttaaaagtcctgtcaattactatttgacctcccaaggctgatatttcaaccgttagccattcacccttattccagaaatactaaaactttagaattattttctgaggcaatcatcttgattatacctctcctacaaggtaaatactttctcagtgtcaagttttggagcttatattcatgactattgagcaaggactcttatacccctccgactccatttcatgcaaacaattgaagtggctagcttttctcctctcctggaataaaggaagtgaattagacactatgaatatataacctaggacttctctcaaattaggcacctgtggagtacccttagggtccatatgcttaccaatatgacgttctatccaccataataacctagagcaaagacagggccatgacggcaaacgccctaaacaacgaatactcagacaggagcgacctacaaagccaaaatcaacaacaataggacactgcttcacaacacgccatcacactaagcgcaccgtaagtggaccaccatgcaaaaacaaagcgacaagaaacgaccccacgaaggaaacaaacgcgaagactaagcgagcaaacgcccgtcggaacgaaaacaaacgatgccacgacaggcacgaggtaagagcagcacacagtgggacacccacgacagaagacatgccgcagagggtagcagccaagagatccacaacagcacagacaacaagagctgaacagaaaccaaaaataagagaacaacgcgccaagaatgcagaggacaccaaggagcggaagaacacagccaacaacgcgaaaataaaagagagcaacaagaacaacacagcaaaacaacacacagaaagcagcatacgcgcaacacaaacacagggacaacacaagggaacaaaaacagcagaaaa

SEQ ID NO: 692456 - DNA, 182 bp, Homo sapiens
cgacatagaggcaggtcgtggatggcagagaaggttacaggaatgtgggcagtcctggccaggctgtatctttctacaaacctcaccacagctatgtggaatatcatttctgctccactcaggattcttgtacctcgcccacaggaaatcaagtgtagggtattacggaacatgtagcagaa

SEQ ID NO: 692457 - DNA, 334 bp, Homo sapiens
  misc_feature (264)..(264): n is a, c, g, or t
  misc_feature (274)..(274): n is a, c, g, or t
  misc_feature (289)..(289): n is a, c, g, or t
tcatatccgccttcatgtgtcattccaaggtgtcttcaagagtcattccaggtttgctagtccatgccacagtgccttgcaaaagcaccacatgaataaagcaataaaatttgattattaagttccagtagtagaccatacttattcagtacagaatgagttttatatggttattaaaacatgactaattagattaaatctgtgtagacagggtatagattttgttaaccctaatgtgtaaatgcaattagcttaaattttggnatcttatggntttctatagctatgncctttttactcttgaattggaaagcacactccattatagggacaa

SEQ ID NO: 692458 - DNA, 1105 bp, Homo sapiens
gttcgagctctatagcctatctcgctccgattgcccgaaaaggaaacatgtcctctaaggcagagcataccggcctggaggctttgcctggactaaccaaggtagcccagtgacccatagtcagcaggaaggtttgtcgaatataaacgattcagtcgtcgtccgagtcgatccgagttccatcagcaatttacatgatgaatgcataggattgagttcgatcttctctctaacaaccgcccccgcggtattgcccaatcatagtcaagctggagaggtcagaatctcgaaggtgaggcagcacacaacatgttatgtatcccccacaggttgccgcaaggatagaaggtgcgatactggattgagatccgagacttgagcatcagcatgtggtagtccaagtgcccatcccaccaagataaatgtcattggttcgcacatgtcagtgatgcgcttagcatgtacttacgggccagagattcaaggggacggcaatgaacctgattgagaagttacgcagaaagcaaatgactgggtagttccctagtctccggtcactccccagacgaagaccgcgtctggtaggctagtgtgatgagaacactcaaatgcacactctagctacgacggctggaaaatccctggaataaacgccaaagaaatacaacggcgcctaccagggtctcgtatgaccgatagaccctaagaaccatgcctatatggcccacaaacagtgctttgacagttcctcgacgcatctggttgcccccaccagcggtccctggtccaaagggtgagcccaccgtgtctgcttgcaagcacctagcagaacttctgtgggaggtctgtcggtgtacctgtagctaagtcgtcgtggcacgccttcccgtgtgcctgttttgacgtcgggagaccccgtcactggatgagtcccggtttaatgaagcccggggacacgcttttccgtggcactagccctaggggtaccttgggccggggaggccaacacacgctgggtcacctgtgccgggggactcgggcttcgcccgcgtgttgtgtccccactctcgcccgccgggatgtggctctcggcggatttgtcccc

SEQ ID NO: 692459 - DNA, 1083 bp, Homo sapiens
  misc_feature (910)..(910): n is a, c, g, or t
  misc_feature (981)..(981): n is a, c, g, or t
gcgggacctggtggaggccgtggcacacattctgggcatccgcgacttggctgctgtcaacctggacagaatcactggacggaccatggagaactggaatcgactcatgaacgtggaggtgcgccagacgctggagcgtgagctcaacctggtgctgtccgtgcgcgaggtgcggcaactcacgctccggaaactgcaggagcatgtccatcaaaggcggatgaggccagcgagctggcatgcaccacgcaccaaggaggatggatctggacaaacagaagaatcagatgaacctgcgcatcccatgatggtgaacccggagggccccaccctgatgcggatcaactccgtgcagagctcggagcggccccatgttcctggatgcaaccaatagagggatccaccaacgtgttccacagcctggcctcccggctcagcatccccacctatggcctgcatgtgcacccgagacatgagccacacatatgaaagaaatcacacagaacatggactgactaaatacatcgaaatgaataaaggaaagtgcagacacagagggacaaataacgagatgagaggaataatcataaggggaaagagtggactttgaaatgtgctccagctgcaggccagcagagcccagccccacccacagaggctcttgctgattcgaaggatagaaaacataagttaatggcaataaaaaaaggaataaagggaaaagatgaaaaaagaaatgtgaagatgaagatgaaaaggcggaattgataatagagaagaagctcaagaaaatggaggaaaaaaggatgaatcgcagcaatcgatgagagtaaggggatagaagaagcagtatgaaaaagagaaggaaatgtataatcaagcagacaagacagtggaagaaagaagaagnattggagaagactttaaccgtgatgagtctaggaaaaaggagagaaaggatagagagaaagaagagagggngaaagagagaggagaaaaggtctgcgcgatcgaaggagaaaaagaagaaaagaaagagaaaaaaaagaaagagaagagaagggaaaaaaaagcgacaggggg

SEQ ID NO: 692460 - DNA, 222 bp, Homo sapiens
tctggctactgtatcctaacaactatttacatagtatttacattatattagccattgtaagtaatctagagatgatttaaagtatgtggaaggatgtgtgtaaattgtatgtgaatacaaacattttatataagggacttgagtatctgtggatcttgatggggtagggggtgtcctgaaaccaatccccctaggatacagtagggagagggtaccgagctc

SEQ ID NO: 692461 - DNA, 149 bp, Homo sapiens
gactaggacagcagtgaaaggggtcagtggtactcactgcttggcgataggtgatagtctcaccgctcagcgataggcagtggtctcaccgcttggcgataggtaatagtcccatctgggtcaccaagaatgtatctcggaatttggtg

SEQ ID NO: 692462 - DNA, 278 bp, Homo sapiens
aagcataatgccccatttttctgcagtctcttctaggcctctttatggtgaagtgcatactcccttctgagaattgtctggctctaatcgtgttgctctacattgacgtccggtttctatggattgtttgtaaccagcttttgctgcaactgttactctgattaatatcttgctaatcataggttatggaaagactgtgtctctgttttaaggctctgttagaaattactgatgcacacactgtattgtaaattcttatctctgtatactatacttct

SEQ ID NO: 692463 - DNA, 784 bp, Homo sapiens
cagcaagcatttgagatatttgtcaacaaattattaattctcaaggacaaggtatgcagaactttaaaactttaactttttaaaagacaaagaagggaaattatccccatgcatattatttagtgcattcccatgcacattatttaaatcatacttttattttagaattttgaaattggatgtcaaagaacttaataaatgccttatagtatcttaaaaggatctacttataggcatatggcttgattctgaacagctaccttattagggaaaggaaaaacatatgatctctccacagaacgctgcagaagcatgatggctaatttgtgtgacaagctggcaggtgagttggctcagtgccctgactaatgtgacaaggaagctaaattgggtacatgttttcgacccatccttgtttaccatttatttcagtttggactagtgaagctgccttgcttcaagctttttaactttatggcaaaaagaacatcagagactgcaaattctgacttagaaagatcagtcctataatatagtcataatgatttttctcttttctccattgtgaccatttattctaactcaatcttagactggtctagtaataattccaatattagagattcatattgaagatagctaaaattcttaattatctagaaaagttaattcggaggctcagactccaattccagagaatctctggctttctgctaattctcaagtcagtcctcaaactgggggtcaaagctgagcttgggtgtgcaatttgcctgaggggtcg

SEQ ID NO: 692464 - DNA, 126 bp, Homo sapiens
cttcccagcaaagacaagttaagtcaactgttaccgctgtggcgagtcaggacaccttgcacgggaatgcactaattgagtgctacagcctaattattttcctttgctcgcccctctctttttctg

SEQ ID NO: 692465 - DNA, 702 bp, Homo sapiens
  misc_feature (271)..(272): n is a, c, g, or t
ttaacctctttctgatctgcgtcttggagtgtactgtaccctgaaggttaagggctctgtcccttcttgactttgcccctactttctgattactagccggtacatgggttacccaggcttacccactactcactcttgtacaactgctagatttggggaactttacatcccctcagattctactagtacacctcccagggctcaggaaagtgctttacgtacaatcatgcttattatgaaggaaacccatgaactagctcagtgaagaganntggggaggtgggcactgatctctgagcaccgtgggggctccccagcctgggggctccccaaccctgatgcccaaaaagtttttatctaggcctcattacacaggtatgattgattaagtcattggtcattggtgattgaacacaaactcaatctctggcccctcccaggagtgggggcggtgaggggggctggaagttcctctctaattacatggttggttcctctggcaacaagctcccaccctaaagctaccttggggtcccccaagagtcacctcattagggtaaacaaatgtggtgaaaaagagttgttatgaaatcagacacccctatcaggaaattccaaagatttaaggagttctgtccctggaacaggggacaaagaccagatgtattttttattataccacaatacaaatctcttaattta

SEQ ID NO: 692466 - DNA, 252 bp, Homo sapiens
tttgataaagaatcagcagcctcaggttacaaaagcaatgtacacaaattggtagcacgtgggacacaccgccaccaacaacaaccaagctaagaatcaaatcaagaactcaatcccttttacaatagctacaacaaaagtaataaaatacctagaagtgtacttacacaaggaggtaaaagatctttacaagaagaactacaaaacactgctgaaaaaaatcatagatgacacaaacaaatggaaacatcc

SEQ ID NO: 692467 - DNA, 200 bp, Homo sapiens
ccgtccgagaacatcgcacggccggagaccccgacgccattggcgagagactgtttgacgttgacgccgacgcccacctttgtatgcggacgtcgcacccagcatgcatcgggcgccgtgaagttgcccgagccgtagttgtaggcagtgcacgacgcggcgttcttcgtcgggtcgcgctccagcgccaccacggcgta

SEQ ID NO: 692468 - DNA, 124 bp, Homo sapiens
ttttggaaaatttacgccaaaccccgggtttggttttttttttttcccgggggccccgggggtgtggcccggtcccggtccccccgccggttattgaaaggtataatttgtttttttggaaaga

SEQ ID NO: 692469 - DNA, 160 bp, Homo sapiens
aatgagacagaatacacgaaatgttctggagctagtatgtctcacaattttgtagaatcttacagcatctttgataaacttctccagaaaattgtgggctaggccaagttcagttaaaatatagtagaaatgtttatcctggctatctctaaggtatacc

SEQ ID NO: 692470 - DNA, 808 bp, Homo sapiens
gctttaaaaaacaaaaaaaagtgccgtgatgtagtggctgtggttagttaaccgtactgagttatccatctagcatctgtggcttgctggaagggtaatataaactatttaacattgtacatggtggtacttcactacttaacctagcacgctgtcattctcaattggctatatggaggggaggcgagggtactctcctgctgggcactggtctaacttggcttaacctggcagactttggcagtatatggctattgtgctaatgcaccaattctatgtggtagggtgcatattacagggaaaggcattaaagtgtgcatgggatgggtgaattgtggagttcaaaacaaataaaacaaatgtgcaattatgttgcacaaactcaatgggtgatgagagagcgagatgaggtggtcccataacgatatacacaccttgcacacagaaagaaacagatcaagagtgcacgccaccggatgacagcgaacagtggggacctactaaggagaactatctaacgcgtcacacaaagacacgccgtgagacaactgaggacagacgcgcccaaggaaaccccggggcaacagcagagagaggcgtcgcaccgaccaaggagggcgcgccaaggggacaccaccggagggcccgcacgagtaacaacccccataaaagacgccgcgagacgaagccacagccccatgccaaaaacgggaaacagaaaagagaccaccacaggcgggagaaccgcaggagccgcaccagcgaaagccccagcagcaggcccccccacagaaggagcgcaccgcaa

SEQ ID NO: 692471 - DNA, 209 bp, Homo sapiens
ctgtaccttgagtagctgagtttaatcaggtgtccaacatgtgagttacacattaccttatatttacactgttagctttttattgttttagatttattatgcttcttctggaagtattagtgatgctactttgaaaagatcccaaacttgtaactaaattctgacatatctgttactgctgacatcttaatctggggcccaagcctgct

SEQ ID NO: 692472 - DNA, 1255 bp, Homo sapiens
aatgtcgagtgttgttgtgttgttttgggggtactgtgtatcattgtgtgtgtagagggtgtggtggggagtattggggtgggtataaagtcttttgtttaatctatgagtgtgtattgagtgaggtaggtgttgtgggtatagtggagagaaatgtgaagttaggaagatggtgtgctgtcgatggtggtgaagttccgagtatggtatgtagaagttgtaccaagtgtgtgtgactgttgttattttattggttggcgtttgttttgatgtgagggaatgtttagtggagattggttttttaatagaggtagaatgatgattagtgttatgtctaggggaaattggtaggggctgttgtgtggttaggtatctgcgttctgggtagcttgcccagaagatcctgttgccgttccaggcttcaagttggatgtaatatctgttataacgggtgttgttggtccgctcatggtcagagggccgctgtcgttgctttcatgcatgacagccagagtacgatccgttgaggctttgttgcggatgatgtcgtatgatgatatctgagcctgagatgatcagcggggcgatgcgagtgcacccgttgggtgcgttgaatgtttgcgctcgctgtcttggttcgcgtgcgcggatgcactagggcgggcgtgttctgttcccggcgtgtgcggatgtgcttgtgagactatgagtcgaggtttgttgctatagggatgtggattgtgtgctggattacggtaatgtggagagatgccgtcttgtgaaggtacgcgtgcgctgttaatgataggattgttgctgaatacctttatgagtgtagtggtggatcatgagctttgtgcaaatggcatagtctcacacccatgaaccgtgtgctgcttgtgattcctgtgtgctctcgagctgagcgatgttgagtgagaatagtggcatgttcgtagtgcctatgatcgatgtaaacttggtactacataatgacttgctccacacatgcacgtaaactatcataatcgatgtactggtaaacctagaaacaaagaatgcagcaggatctgtctagcatattaaagatgaaactgaattggaaaaatagctccattttgttggtgcattgggaagcacagtgaccaaaaatagttgtatggctgcttagtcacttagtctttccatactgatgtcaatttccacggatccatgatgtatatgtggcttgtttgtgtggtgttgtgttggtggg

SEQ ID NO: 692473 - DNA, 765 bp, Homo sapiens
  misc_feature (503)..(503): n is a, c, g, or t
  misc_feature (535)..(535): n is a, c, g, or t
  misc_feature (559)..(559): n is a, c, g, or t
ggcgcccgcggctgcagagctgcagagcgggatctcttcgagctgtctgtgtccgggcagccggcgcgcaactgagccagaggacagcgcatcctttcggcgcgggccggcagggcccctgcggtcggcaagctggctccccgggtggcaccgggacccccgagcccaatggcgggggcggcggcaaaatcgacaacactgtagagatcacccccacctccaacggacagcgtcgggaccgctcgcgacgatgcagtgtgccacactgtgagccagcggtgcaggcgtgatgcggtgagctgctgagcgcggacgggggcacgggacgactgctgggctgtgcgacgcgactggggcaggaaggcctggtcggctgggccgtgcccccaggccccactccagcttggaggcgctgatcgcccaggtgggggcgctgggcgggtgcagcagctgcagctcggcctctgctgcctgccggtgctcttcgtggctctgggcatggnctcggaccccatcttcacgctggcgcccccgntgcaattgccactacggggccttnccccctaatgcctctggctgggagcagcctcccaatgccagacggcgtcagcgtcgccagctgctgccctagcagccagctgcctgacagccgtgtcgccaccagtaccgaccccatcgtgcagacggtttcgcccctgccgtacttcaaccattgcctcaagggattgggacctataactggcctaccttgtgctcaacggacga

SEQ ID NO: 692474 - DNA, 400 bp, Homo sapiens
atacggtcgccagattagatctaagcgacgatggtagagggcaactcaagcagtcactcacaatcgtgattaagattccagctacaatttcttgtggcacttatttattcttaattacttaggaattacccaggaaagagggcacaaatcaatctgcctctttaccttaaattaatgctcaagcaggatactgtgaatcactaaaaaactctccccaaaattatgttcttcacttcaaatcctttaagcgcaattctcatttttcacacaattcttcaatttctcatgcctcaggattattagcagctaagcagagttagaaaagattaataactgatacaaaaggctattcatttgattctagtgtttactgctgaattatactgtgttctaatctgag

SEQ ID NO: 692475 - DNA, 951 bp, Homo sapiens
ttcttcgtgcggtactataattcccgatctgtcttcggtggaagttacccccgtccgccggtccttccacgtgtgtcccgcagcttgttctcgaaaccatcttcccgggggacacctggaggcgctgggtttcccctgtacgcgccgccctgtgtaaattctcgcccccaccaggggtgttccaccctcccgccccggggtctcgaactctaatgccccccggccttatcggaattgttggcccccacaggccggcaaactcagaagcttggccagacgaatcaccctctaggtcccagtattgtaggaggctccaacccaagtctggggcctcgccgacaaaatgcatgtgcagccatgggcggaccaaccaccaacgctgtgggggaaccagtcggcctcacgttcagagtcgagttatgagccccacaccattcacggagacaaaggatcaattgtccctagccccacctccctcagtatcccaggttccctcgtggcggcccccaacccgcgccgccagcaaattgttccacgagtgttcaagaatcaagaagaggggcggtactaccacccagggtcacgaaaaagggtgcgctacgttcaaactcccaggtccaccaccgggaggacggaggaccacccacccacgcctcgcaccacagggcccagagaaataaccaaggggtgtcactccccccgcgccccccgccccccctggtcgttgtaggcgagcgcccccgcgcgcccccactgtacttgggcggcccgcgaaatacaattcctgccaccattgctggccagtaggaaacccacccccctcgcagtcatgcctgacccaaacaggggggcccacaccccgaagggagacgcaggcccccggacagagaaaactggaaaaccccgggggacccaacccaaaaacaaccacttttttctacaacaataaca

SEQ ID NO: 692476 - DNA, 327 bp, Homo sapiens
aacctcagctgcttccatccagctgacatgtttggtactagtgaccctggtggactggccagctggacccacaactattctggctgtagctgcacatcacgcgtaccggatgagaatgccaacctggatgccagctgcttcctaaatggcggccttgaagggtcaagggaaggcaggctttctggcacctcaccgccacccagcatggacgctggccggagtagctcaggggatctcagctggacttctagtgactgctttgagtcactccatgctctgccagactatagtttggggcctcactacacatcacaagagggttcttgc

SEQ ID NO: 692477 - DNA, 279 bp, Homo sapiens
ctgagagaaaatattggctgacattatgagttatatacacactataagttgtacacatgccagtaaaagcacccgacaggtagacacatatcaaaaatatttcacaaaatagaaagttgcttggaaataaaccataggacatgttattttgatagttcaaaaaaatgaaaatttaatttttaaatttccttattataaccatttcctatctattgctgagaggccctacagcattgatactcaggtagcactaaccatgtctggtatccagatgttgaa

SEQ ID NO: 692478 - DNA, 138 bp, Homo sapiens
atctagaggaccccggtcactttctacagtacagactagacaaaaaataattcacggttatgaatcccagtgcttggcacatagaatgtgctccataaatgtcagtcattattactattccctgataaatgacgtagt

SEQ ID NO: 692479 - DNA, 447 bp, Homo sapiens
ccccatccagtttgttgtgtactgggaagcactgggtgtgctgaagaaacgacaaacagcaggggtttgattcttaaaacgttcctgtactctaggtttttgtgtcattgttgttgtgttccttatttcctttttgccatcaatggtggcagttattggataggccttggccagcgctccagggctgctgctttgcccagtgactgtatctttcctgttagcatgctgatcatacttggaaactatgagtcagtgaaatgcagccgctagcagtgggggtgggtagattactagggaaagtgcagccaagacttcctgtaccaactcagggccattatctttgggggaaggtaggaactcactatggcaataggaacacctacattcacctggcatttgctgtgtactacattgatttagggagggtataaaagcacaaattaaaaa

SEQ ID NO: 692480 - DNA, 154 bp, Homo sapiens
ttggggctctattcagggggggacccctcttctccaaccactcaggaaacctcctgggcataatcaccagcaacacccgggacaataatacggggggccacctacccccaccttgaactttcagcattcccattgacgggtgctccagctgggc

SEQ ID NO: 692481 - DNA, 354 bp, Homo sapiens
cgtccagaaccaagtctcaacgtgtgtgccagtggccccgggtggcgatgaattagtccttctgtcggtagccgtctataaaggatgcgttgatgtagtctgtgtactcttgaccccgtatatcatggaaaggatcactcggttgaagtcatacgggatgatctggatgaccctggccttgttcatgtatgccggcaagttgcccgtacctcatgttctccttcatgatccggacatttgtcaactttcctgaaactacttcctccaggcccgaatcttggcccgaaatgggtagtggtgccgtgctgtaagtctgctagcagcttcagcagacaagagtaaacgaacatattc

SEQ ID NO: 692482 - DNA, 118 bp, Homo sapiens
atcatgcaccgtacagatggcccatgaaactgtggtttgctccacagatttacagagcattgaccgtagtatacccccggatcgtgtagacggtgaaagtggtttaggtttacgacgt

SEQ ID NO: 692483 - DNA, 245 bp, Homo sapiens
attttttcaacctccctggccccccccacttattccagaaacaacaccctgtggtttggagggtcccgccccccccctaaaaagggtttcccttagaactccccccaacttggggggcccagggcaggggctgggggtggttcccttttccgcccccctttttttctgcaattgggttgggccccctggggtgggctttcccccgttttccccatggatgggaaaaaagggcccttttctcctta

SEQ ID NO: 692484 - DNA, 689 bp, Homo sapiens
acgctagaaaggctgtgccctccctggtagagcggggaaatgaggtctactttattagttcccttaagagcaggttgttaaaaagaggctagcacctccctcccatctctctggttggctctcttgccatacggtctctgcacacactggctccccctcacctccaccatgagtggaagcagcctgaggccctcaccagcagcagatgcaggccccgtgcttcctgtacaggaagcagaaccatgaaccaaataaacctcttttctttataaattacccagtctcaggtgtgcctttatagtaacacaagtggactgagaaaattggtactgagagtggggtgttgctataaagatacctgaaaatgtggaagtggcttaggaactgagtaatgggcagaggttgaatgagtttggagggctcagaagaagacaagaagatgagggaaagttttaaacttcttggagactagttaagtggttgtgactaaaatgctgatagacatgcaggcaatagaggccatgctgatgaggtctctgatagaaatgaggaacttactggggactggagcgaagatcaccctggttaacccctagcaaaggtggcactgcattgtgtcgtgctttaggcttgtagaaggtaccttagagtgatgaccagatgtttgtggcgaattctaagctcagcgt

SEQ ID NO: 692485 - DNA, 151 bp, Homo sapiens
ctcgtggcttgctcaccgtcctccccaacgctactacgtgggcgtcgacgtttgcctgtccttgcgacgacgcgacttctgactgcgacctgtgcgtgcgttcgtcgtcttgcgtttgctacgtgccgacctacgtaccttgcgtgctgta

SEQ ID NO: 692486 - DNA, 638 bp, Homo sapiens
gcgggggtgttggggttttagacggagtcttgctctgttgcctaggctggagtgccatggcgcgatcttggccccctgcaacctccgcctcccgggttcgagccatttctcctgcctcagcctcccgagtatgctgggaattacaaggcgtgtgtcaaccaacgcctggctaaatttttttgtaatttttaagtagagacggggtttcaccataattggccacggctggtctcaaaactcctgagccttgtgagtccacccacacctcggcctccccaaggtgctggagaattacacggcactgaggccaccgcgcccggcgcccatcatgtgtttttgttgaaatgatcctacccgtgattagtggctattgagagttttacagggttatacattgttaaggggcccagaatcaagtaccaaaaattaaaaagggactgtaaaatccccttggtcattcataaataaatatctaaattaggaatactaattaattgagattttcactcatgagtatgttctgaatatttaatatttatttctattattttcatatgttaagatattcccttaatcttacttaaaagaattgtatgtataaattggcattaggataccaaagtaatgtttttaatgga

SEQ ID NO: 692487 - DNA, 212 bp, Homo sapiens
gctggacccatcactcaacttgctgccacaagagaaagctgcacacacatgatacactctgactttggtcacaaactctgctataaacaattctctacgttcactgttcccgagggtcattctaatacagtgtgtggtcaccacccctttagaagcaagcagaaaaagagaaagggcaaataagatgcagaaggcagtgaggttgagtgaat

SEQ ID NO: 692488 - DNA, 838 bp, Homo sapiens
  misc_feature (181)..(181): n is a, c, g, or t
gattgtgacccgggcctgtctctctccgggcgctcttggcgctttcgtatggcgctcgggcctctgatagggtttcattcgtccgttgctagcgggtcctcgtgcatggcgcttgctggccgcgacagcccctggcccgattccgcattgggggcgccgcatgtcacccgggggcgcaacnatttccgcaggccccccggaagccccaccgtgtcccagaaaagccccttttcatttcgggggttatccatgatgttgtttgccctccaagaggttttttctttcgcgcagaattttcttgaggcccctgttgccccctccagcggtagggccctctccccccactttggagggcactggccccccacaggcgatttaccccctgtgaatctccctatgagaggtctccactgctcgttggacacactccggtgttatctctgcactccggggtattccatcaccctggggtcacgcatatgtttataatatggcacccccccgtggaccccattaattccagcccttcttatatacaaatttactgggtctctattttaccctcctatcaatacctcacgagtacttcgagtctcccctcacacatttccgacggcatctacggctcaacacatttttgtaaaccacaaaggcttcccccaaacttcacgtcattattggctcaactttcctcacctatactgcttcatccccccactaagatttcacctttaccaacccaaaaacactttggtttgaaacccccccctgatactggccttttttaaatatggtttgactaattttgtatagtttccattttttgatgagggtttta

SEQ ID NO: 692489 - DNA, 237 bp, Homo sapiens
gggtgtctagaggatcccatctcaggcaggacgacagagcgagactgtatctcaaaaaagaaaagaaaagaaaaagaaaaaggcagtttctaggacacgtttatgacagtttaaaaacctggccctgcccactaaatgcttatggtgccttcaaccccttgtgaccaccaaataacaccctctgaaatcccgagtcgccccccaggtaggcaattccaccactccctaagcttgccc

SEQ ID NO: 692490 - DNA, 305 bp, Homo sapiens
tccctcagcggggtgtgtggaaccagtgtttatattccccgtcactttgaaggatattttcactggatacactgttctagggtaaatgttttttttcttcagcactttcaatatgtcatgccactctctccgggcctgaaacgtttctactaaagagtgtgctgccagatatattgtagctccattgtatattatgggtttcttttctctggctgcttttaagatcctttctttatccttgatcttagggactgtgattattaaatcccttgaggtagtcttctttgagtacaacctgccggtgg

SEQ ID NO: 692491 - DNA, 731 bp, Homo sapiens
  misc_feature (40)..(40): n is a, c, g, or t
  misc_feature (238)..(239): n is a, c, g, or t
  misc_feature (249)..(249): n is a, c, g, or t
  misc_feature (300)..(300): n is a, c, g, or t
  misc_feature (581)..(581): n is a, c, g, or t
  misc_feature (591)..(591): n is a, c, g, or t
  misc_feature (632)..(632): n is a, c, g, or t
  misc_feature (645)..(645): n is a, c, g, or t
  misc_feature (721)..(722): n is a, c, g, or t
ttttacccacagattaggcgcgccctaattaatcaaactnacccttacatagccatagataattattcatcagtccgatagatacagcttaatacaactgcataaaaaatgtgcacagtaggctactcagatcacgcttagctgtaagtttttaaccgaatttttttctgctgggggagaccaacagaaaacatcatctacttagcaagagtacgcatgaggttacgaaaggatacgnnggcccctaanatcatgacggacgtttgagataatacttctccatggactcaaaactgtttntcaaacataatagatactccggcctacagaaccttgaattaataccaatttaagggaaaggcttttagtttaaaaggaaggtgacttaagcagcgtaacaccaagtacaaaaatctgctgatatgtatattatggtgaggccctcttccaaaaaaagattaatccgctggcgatcaataaaccttcataatcaatgcgctaggacatttacgtcctttaaaggctaattacccacttactcaacgcgagcaagatggagaagttcatagagagatgcccgncaaacacttncaaaacatagacttttgactataaactgaagccacaattcngtaagttttaaanccataatgccaacaacctaatccccaagccacactaagttgacctggaagtctcactttttgtgcctatccaattnnacacccgtt

SEQ ID NO: 692492 - DNA, 216 bp, Homo sapiens
gggggggtttccccccccccttccaaacaaaaaccggccatttttacccggggatgggggcggtgggtccaaattaaagtaaaaaacacccctgatttttgccctggccctggggggggccccaaatctttttattccaaaatccctttttcccttccctcttttggttcctcaagtaaggggggaaaagatggggtcttttgggattaaaagcca

SEQ ID NO: 692493 - DNA, 264 bp, Homo sapiens
gaacagtttggtaattaaaactgggttacacaaaggccttctgtgttgtgtgtgtgcacatgtattatgtgtatatttcttcttatctatgatttatgacttttcttatataatagaaatgctcccttcaaaaatatttgaaaagtatgaatggacaggctactatgtgcaattgctatgttatatggtcatttacacaccacacaccctatccttcataggaagtaaatttcttaaggatgggatccacacttcacacttaat

SEQ ID NO: 692494 - DNA, 1019 bp, Homo sapiens
agacgttcaggctcatgacttaggaaaagttggagaggtcatagtggaccaagagacgatgccatgctcttaagaaggaaagaggtgagcaaggatcaagattgaaaagacggtattcaacgaaatcattgagcaggttagagtgtcacaagctacgtgactatgaacgaggaaaaacctgatatgaatcggcattgcaaatactttcacgatggagatggctgtggctgaacggttggtcgggacacagtgatgttgacagtgaagtgaagaagaaaggacacgagttagcgagatacccttaagtgctagctaagagctgctgttgaaggaaggcgatgttatagggagggggttcgtgccctccttcgatggcattccagccgttggactcgattgagctccgagctaatcgaagatcgaaaaagattggtatagaagattcattaaagagaacactcaaagattccagctaatgaccattgctaagaatgcaggtgtcgaaggatctgggatagttggagaaaattatgcaaagttcctcaagaagttggttatgatgctatggctggagattaggtgaatatggtggacacaggaatcattgacccaacaaaggtagtgagaaactggtttataggatgctgctggtgtggcctctctgggtaactacaggagaagtggtagtcacagagatgcctaaagaagagaagggaccctgggatgggtgcaagggtggaatggcgacagggatgggacgtggcctgttctaactcctaggactagtggcttgacgtatccccgaatgaacaggcgacacggaaaccccaagggcactggtgtcgcgcacccacgtaacctgtcgacaaaggctcagaggggacaaccgcaccaacaaccgggaggcaagcaacactgccacaaacccggcatcagcagagggggtcaacgcgggagacagcaaccaaacaggaggacaacagacatgacatcagaacatacggagcacacacacagca

SEQ ID NO: 692495 - DNA, 1360 bp, Homo sapiens
  misc_feature (799)..(799): n is a, c, g, or t
  misc_feature (869)..(869): n is a, c, g, or t
agcggattcgcggtcctggccggatgaacctgagccggggatgagctcagtgtcggagtctcgggacggtagaaggcggctggggcggaagcaagcgagagccggggcagcggggcgtcagccgatcgtagcgacgtccacggtacgcgtgaagtgcgcgtaacggcggcgaggtcacgagagcgtgaggcgcgcgcaggtggaccgatcagcttccaagagcgaccgtgatgcgatggaggtgacggcgcagcacgtctgtggaagcacctgtgaccccagaatattgaccggttgagaaaattgtactagaccattgttgcaacgcatcgggcgtgctatacggcagggaccaattcccgcccaggtcggaacacacgacgtgtacggcaggaatgccatcctaaccatggggacgcttgctcgtagcgctgtataaggccgtttccccttgcgcggaagtcttatcagatcacacgcgctgaggaccccacgggacaaaccattctccgctcactactgtgggaaggcacccaattcgtctttggcaaggaattccgtcgcacggcacagatgcccctggtatctcctcatcgtggcaaactaattcggggtaagagtttcgtaactcacccacgaagagggctcggataaggtggacttgcaaacgaatcctgacgtcggaagggagggcactgagacacgtgtgtgagacaactctacacaggcgtggggtgcggcaggatattgtgcacggcattatgtttgggagacaaaacggaaaaaaggaataaggaanatacgggaaggaagttaaatttcatcttgtgttccagaaaacctgttcaatgtatggttgaacaagtganggaacttcgattgtctaacacaaggttttggtgggggatcacaacacggcaatcccaggaccatgggatactggggtgccttgcgagaaccgaaaagaggagggggaagggggaaattagcaacggggaaaggcgtaccacgggggttataggaagtagggttccgtaattagagtaacaaagagaaccaacaaacgatttctcgtctcttacacgcggggggtataattttcttgcacaattgcggaaaaaaggggggtgcggcgaacagaggaggcaaaaaagaggcgtcagtttcaaattccttaaagcttcaattgtgtggaaatttttggaacacgtgcgtgcattgtgcatggagaaatacccctttggtgttaaccgttgaaggtgtgcgtgggaagtggaatgtttagagtgtgacagtttgtttggaacgagcgattgtctggtttgttggtcattggaaggctgggtgcgtaaatttaaga

SEQ ID NO: 692496 - DNA, 243 bp, Homo sapiens
acaagaatatatttagaggttttcaacattctcgcaatataaaagacatttaaaggatacataactctgttctctgaaaactggagcagctaattcagtcccgcaaggtactgaacggggactcaagaagcctgttgtacttctatttatgcaaacatagaagagcaagccgagaattgtagccctggtgtaatcacgaggagtggacactggttaaccctccagatgtacagtggaccgtgg

SEQ ID NO: 692497 - DNA, 204 bp, Homo sapiens
  misc_feature (145)..(145): n is a, c, g, or t
ccagtgcaaagctctacaactcaacaatacaacaaaataacaattactaactcaaagtgagaaaaggacttgaatgaacatttctctaaagaagatatacaggctcggtggggtggctcatgcctgttatcccccccaattttgnaaaggctgagtgtggatgggtcacttagagctcagtgagttcaagggccagcctatggc

SEQ ID NO: 692498 - DNA, 84 bp, Homo sapiens
atgattttcccttctttttttctaagaaaaaaatattttcaggagaatattcttctgatagctttcatcattgaacttaataaa

SEQ ID NO: 692499 - DNA, 108 bp, Homo sapiens
gtaatgggtcaggctgagctcactgccgtgtgtctttggaattgaggaggaggagactgccattgagatgcctgccatcaccttttccattccggctgcattctgccc

SEQ ID NO: 692500 - DNA, 1274 bp, Homo sapiens
  misc_feature (416)..(416): n is a, c, g, or t
ggagagcgcctgcctgtccctgtcgcgccgagccagctgccagaatgccgaactggtggaggagtgccagaaatgtggggtgtgtcagaagacgtgtttactttgccgaagaggttcagtgcgaaggcgaactagcttccataaatcctgcttcctgtgcatggtctgcacagaagaatctggacagtaccactgtggactgtgcatggtgagtgaagatctactgcaagtcgctgctacaggctaagaaagtatgtggcccagaaggctatgggtactgggcgagggcagcagtgcacccttcagatacctgacgaagtggggagtcgcgtgggtatcaaagcacgtaggaagccgccgtgggcctacaggtccagatgcagtcgaatcacctaatgcatccgaaatttgcccangaagatctgagtggctccagagcgctgccccccgtatgcagaccaggcaagtcatattgctgctggagaaggtgattggtcgctgggaacgtcctgggcataaggcctgttttcgatagtgaccaacgtgtgggaaatggccttgacgttcaagcaccctggcaataaaggatggggaaggcatcaactggcaccaagggatgtcgatgcttaaaaagacgttcgtgagccaaggggcgtagacgagtgagtgggggcaaaggagctgtgctgcctttggtacaactcttgagtgaggacaacatcgagccaacgagacccatggcctatctacctgcgctctagcaatcgcccatgccgattccaccagcaagttctgtgagaaccctccgaggcactaatctctcttgtgcagaccctgccacagtacttcattacattgacttgaaaccttgcggcaatatgggcttcccttattgagtatgggcgaggtacttgcttggaaggtcccgagcacagaataaaaagagctaccacacgatgctggggatgattgacaccaatccaacaagaaacgaagaccaacagagagttaacgggggtaccaaggagtgaagacagcacaagccccagtaatacaccagaacgagttgaaacccgacaaagcaggcacctgtaacataagacgatacactgtgagtggagatgacacacacaacacagacgagccaaggaaaccagagaggagacaaaaacttcgagaaccccacaaggaagaaagacaacaggtgcaacggaacagggacacacaacccacatcagaaagggggaaagatgaagaagcgcagcaagagacta

SEQ ID NO: 692501 - DNA, 148 bp, Homo sapiens
ctcggcctccgccgggttcacgggcgcgacggtgtgcgcgaagacggtgtcgcccgccccgaccgcgagggcgtcggcctcggcgcgggtcagctgcgcggcgaaccgctcgcccgtgtcggcacgcaggtccacccgcacctcgaag

SEQ ID NO: 692502 - DNA, 449 bp, Homo sapiens
cctctagcaccttcctgtatgtttgcttggtcacttcgtggctcaggtataacgtgcttttggaagacaagtctgtggcttgagtagtctgtgtggctgcagcctctgatctgtgcagggtattcacgtgtctgggctgaatgtccttgtgatttctctagaggctggcaagaaccagttgttttgtcttgcgggtctgtcagggttggaaagtccaagccgtaggacccagtttcctttcttagctgatgtctttggccagaacaccgtgggctgttacttgctttgagttggaagcggtttgcatttacgcctgtaaatgtattcattcttaatttatgtaaggttttttttgtacgcaattctcgattctttgaagagatgacaacaaattttggttttctactgttatgtgagaacattaggccccagcaacacgtcattgtgta

SEQ ID NO: 692503 - DNA, 164 bp, Homo sapiens
ctggctgggctgggctgagccggaatcctggctgggaagacctgcaatcgggcgcgctggaaaccgccatggacgactggcagatcgacccgatcgcgctgcacattgtcacgccgccgggccgccggcggccggcgcgggtgcaggcgctgatcgaatacctg

SEQ ID NO: 692504 - DNA, 146 bp, Homo sapiens
tggggttcccgccagtcgcctccaccctgcccaacggcgtcgtctggtgctggtggctccccgctcccccgaactgttggacgatactgcccgtgcgaacatcgtgcttgacagccagacgactgtcgccaggctgaatgcagttc

SEQ ID NO: 692505 - DNA, 349 bp, Homo sapiens
gcagaggcctggtcacacagggccttgtgggttttttttttttggcaaatcggatcttattggttcctcaaaaaaatcttatttcggacgggttccaaactaaaaaggggaacctcgcagaggggacagcctgggtcttttcgcaattggcccagggggcttcttaccctccttaattctctgggccaaaggttcagcatattctgcaccctctctttaatttttctaaaaaggcggctgctacaaaccaatcccccattgtttgccctgcaggacttgtggggtgacaggcccccaaatctggggtgctttgacccaaggttatttacctatttggttaaagggcttt

SEQ ID NO: 692506 - DNA, 361 bp, Homo sapiens
ttaaaggatccctcgtaatttgatcaccagcgatgcagcttcgctgggtaagagtcccagaaaagaagaggtcacatggtataatcataaagcagggttctccaaacatttacattgataatggggattgttgacattagcagagatagacgttgtgattacacatgtatgtgataagtgcataaagggtgatttagtatttactacaaagtaagatttgttgcaaagcacccaactttaaactattcttttaggtgctgatgtatctcttatagatattttggaagttgtccagtgatataaacaggaagaccatttaagtaaaagatgttttgaatattttaagacacggatatcaaca

SEQ ID NO: 692507 - DNA, 145 bp, Homo sapiens
tacttccacaggggaaaaaactaatgggaaagaaaaatcctcttttctttttcacactatgtttttctttcctacctcattctcccttctcctctactgtctccagtacctaatttttttaaagtgttaccttatccagaaatca

SEQ ID NO: 692508 - DNA, 100 bp, Homo sapiens
gtcactcatcaaacatccatctatctaatcattatccatccatcctatctatattagcatctatatctataggacgtcctcatcccagagacgtcctcat

SEQ ID NO: 692509 - DNA, 405 bp, Homo sapiens
taccccgctgggcaatggaggggtcgtgtctgaatgacagatgctggaggagcaggtgctgctggtgtcccaccagaggggaatagggtcgaatgtcaggcggaggtcgaggtactcctcagagacgtgcagcaggaccttgtccagcgcctccagcagctgcttgaaggtaggcctctgcgagggcgctgtgtgccagcactcacgcatcagcgcgtacagctctggggggcagtgtgggggtcggtccatcggatgtccctcccgcagcagggagaacagttcctccacgtggattgcaggatacggggaagcccccaagggtgaaagattttcccatagcaggatcccaaaagaccacacgtcactcttgtgtgtgttaccacccggtcaaacaaggccttc

SEQ ID NO: 692510 - DNA, 587 bp, Homo sapiens
cacgtgccagactctgattactggcgggctgtacatgagtccctgggcgttggaggggcagtggacagaccacttccatctgcttgtggttcatcttcactctcacatggtaacatattctttacttctagctccttgcggggaagaattcatttgaagaattctctttatattaaccttctcgggagttttcacataaatactcagtcctacttatttcattgtcggttgtggcggcatttcattcactttcctcttccagtatccatttttcactgcacttttcccatcatctgcacatcattgatggttctgcactcattatgggttccagtgggtctcacaggcgcccaaggatatcaacacggccatgcatcactcaaatagacgttgcttcccacctctgcctttctgcctctgaagctttaactccccagcacagattttaattcttggagcaccctcttggattctacatgctcacgcttctgtctctctttgtcttcttgagaccagtaataccatcatcctttctgcaatcactatcaatatctatatcatctacataagcttctcatttctgctcc

SEQ ID NO: 692511 - DNA, 370 bp, Homo sapiens
gccattctcatccaccttataatatctcagcacagccagcttacccttctttctcttgcgcttattcttcttgggagtggtgtaagacttcttcttccttttcttagccccaccacgaagtctcaccacaagatgaagagtacactccttttgaatatgtgtagtcagacaaagtacgtctatcttccagctgcttgccaacaaagatcagtctctgctgatcagaagaaatctccttccttatcgtggatcttggcctttacattttctatggtatcagagggttcaccctagagggtgatggtcttccccgtaagggttctcacgaaaatgtgcattgtggtggcgggctccaccacagcggcacgag

SEQ ID NO: 692512 - DNA, 941 bp, Homo sapiens
  misc_feature (47)..(47): n is a, c, g, or t
  misc_feature (71)..(72): n is a, c, g, or t
  misc_feature (90)..(90): n is a, c, g, or t
  misc_feature (98)..(98): n is a, c, g, or t
  misc_feature (125)..(125): n is a, c, g, or t
  misc_feature (132)..(132): n is a, c, g, or t
  misc_feature (139)..(139): n is a, c, g, or t
  misc_feature (146)..(146): n is a, c, g, or t
  misc_feature (159)..(159): n is a, c, g, or t
  misc_feature (179)..(179): n is a, c, g, or t
  misc_feature (184)..(184): n is a, c, g, or t
  misc_feature (220)..(220): n is a, c, g, or t
  misc_feature (223)..(223): n is a, c, g, or t
  misc_feature (236)..(236): n is a, c, g, or t
  misc_feature (241)..(241): n is a, c, g, or t
  misc_feature (257)..(258): n is a, c, g, or t
  misc_feature (300)..(300): n is a, c, g, or t
  misc_feature (314)..(314): n is a, c, g, or t
  misc_feature (317)..(317): n is a, c, g, or t
  misc_feature (342)..(342): n is a, c, g, or t
  misc_feature (346)..(346): n is a, c, g, or t
  misc_feature (375)..(375): n is a, c, g, or t
  misc_feature (404)..(404): n is a, c, g, or t
  misc_feature (433)..(433): n is a, c, g, or t
  misc_feature (443)..(443): n is a, c, g, or t
  misc_feature (485)..(485): n is a, c, g, or t
  misc_feature (502)..(502): n is a, c, g, or t
  misc_feature (553)..(553): n is a, c, g, or t
  misc_feature (566)..(566): n is a, c, g, or t
  misc_feature (591)..(591): n is a, c, g, or t
  misc_feature (606)..(606): n is a, c, g, or t
  misc_feature (681)..(681): n is a, c, g, or t
  misc_feature (824)..(824): n is a, c, g, or t
  misc_feature (849)..(849): n is a, c, g, or t
  misc_feature (879)..(880): n is a, c, g, or t
  misc_feature (894)..(894): n is a, c, g, or t
  misc_feature (897)..(897): n is a, c, g, or t
  misc_feature (906)..(906): n is a, c, g, or t
  misc_feature (911)..(911): n is a, c, g, or t
  misc_feature (920)..(920): n is a, c, g, or t
  misc_feature (936)..(936): n is a, c, g, or t
ttttgaaaaaggggggtaataagaggggaatggattttaggaatatnaaggtattggggaaaatagaaaanngtttgaaaatgtatgggnaagggttngttttaaaatgtagaaaaggttaaaantattatngaagaantggtgtnggggggaatggtnttggagaaaaatatgaatgngattntaaaaaaattgttgaaaaaaataagatggaaaaatntgnggatggattaganggggntaaagaaagtgatgtnnaagatgtaaagaatatgaatataaatgagaaaaaaagaaatnttaacattggtganatnagtataaaagtgccacccccgcccncctntaaataaaaatgtaaaaaggccccccccnggtaaaaccccgggggaagggtcctccangtttcccatgcagttgtttccccaaaatngggggggggngtcttaacttttgcccttggatttaagtcaaggtactgtatngaagtgggggaaaaccngtaggaaagtccaatgttgctgttcctgcccagtgattttaaagaaattgngtagtccctatgngatttttttttttcttttctaaacngcattcctgtgcccncctacggcatgcctctatgtattggctactacagtgtttaaaaagtgtttcagatatttctctaattatgtacancctaaaatgttggtgttttgtatggatcacaagtgcagcattccttaattccttctgctatatgtcacacagttgttatttggagaaccaagtatgtattgcatgaaaacattatgacttttttctcttagtttaaataaacnccaaggtaactggacttctaaagcncctttctgtttgcctgatatctactttagnnataattttttttanaancctctgacncaacnaagtaaatnaaagtatattttatcnctatt

SEQ ID NO: 692513 - DNA, 313 bp, Homo sapiens
gccattttccaagtcattagtggcattatgctccgctaagtcccactactgtagcacctgactgcagcatcaattgaacatacatttgccagtagagaaagagaaacaagaaatgaagtatggtctctgacttcaagggactctcaggccagtgacaagatatatttaattttaggccaagtgcagtggctcacgcctgtaatcccagcactttgggaggctgaagctggtggatcacttgaggtcaggagttggagacaagcctggccaacatggtgaaaccctgtctactaaaaatggtgggacatgcccg

SEQ ID NO: 692514 - DNA, 166 bp, Homo sapiens
gtcagggtcataacccatgttttgagaactactgctctaatactttgaagacaccatgggcacccctggtgatggaaagagttactcagaaagagctacacaaaagaagtggcggcctgattgtttgacatcttcttcccagagtgagctgaccatgagaggaaag

SEQ ID NO: 692515 - DNA, 105 bp, Homo sapiens
aggctccagcttaacgatatatggaggtcagcaacggtgctcacgtgtcgacggaacttgtaacagggaggcatgcaccgaagaggtgaatacacgtcgaccagg

SEQ ID NO: 692516 - DNA, 411 bp, Homo sapiens
tcagcccacctgcacccaggtgaaataaacagccatgttgctcacacaaagcctgtttggtggtctcttcacacagatgtgcatgaaatttggtgtggtgactcggatcgggggacctgcctcaggaaatcaatcccctgtcctcctgctcttgctccgtgggaaagatccactacgacctcaggtcctcagacgactagcccagaaacatctcaccaatttcaaatctgaccttgcaagagggtccgagacatttgcatcatcattcagtgagactgtaaacacagcatctgcttgacacatccatctggaaaactggagatatccattatgaatttcctacctgaaggagatgtctattgagcctggaggtaggatccttgaaggacctattgcactgatctgtatgag

SEQ ID NO: 692517 - DNA, 483 bp, Homo sapiens
tgttggggggggggggggagggggtcaaaaaagggggaaaaaggggggggggggaggggggagggataaaaaaacgaaaaaaaaaaatggggcagaaacgaatccgttcgagaagggagagctacgcggagggccagaaacagcgcgccggggtgccgcaccacacaacgagagggcgccgggcgggcgcctcccccccagcggtggatgcacacccccgcgcggggggggacaaacaccctggttggctgtctcgcgccaacacacaaatattaatagaaaccatcgaacctctacccggcatgcggagcgacggacgccacccgatagaccaccaacaacggggcgcagcaagagaagacacacaaacaactaccactcacaaagagcatgctggccccacacccccacaccacccaacgacaaccaccaccacacagcgccccgacggccgacacgcaccaccaacgaaggtgcgctcgc

SEQ ID NO: 692518 - DNA, 392 bp, Homo sapiens
cacgaggtggatctcaacagtgaaatggtgtaccagttgggacaggatcatgatttgaaagcaatcttgcatgagacagagttacggcctgtaaagacatttgatagttatattctgcaggcacacatccaggattcagttggcattagtagaggggctactgcgctgtgggaaaaccacacatgttctccagttcaatctatataactttatccagattgaccgatgagcatggtgtacaatcgtctaaactcagacgagaagaatcagtgcggtttctgtggcaaaacgagttgcatttggaagaggagactcgtctgccaaatgctgtggttacagggttcgatttgagactatacttcctcgtccgcatgccaatacacagttttgtc

SEQ ID NO: 692519 - DNA, 839 bp, Homo sapiens
  misc_feature (9)..(9): n is a, c, g, or t
  misc_feature (67)..(67): n is a, c, g, or t
  misc_feature (76)..(76): n is a, c, g, or t
  misc_feature (175)..(175): n is a, c, g, or t
  misc_feature (181)..(181): n is a, c, g, or t
  misc_feature (189)..(189): n is a, c, g, or t
  misc_feature (205)..(205): n is a, c, g, or t
  misc_feature (209)..(209): n is a, c, g, or t
  misc_feature (215)..(215): n is a, c, g, or t
  misc_feature (217)..(217): n is a, c, g, or t
  misc_feature (221)..(221): n is a, c, g, or t
  misc_feature (234)..(234): n is a, c, g, or t
  misc_feature (249)..(249): n is a, c, g, or t
  misc_feature (257)..(257): n is a, c, g, or t
  misc_feature (320)..(320): n is a, c, g, or t
  misc_feature (322)..(322): n is a, c, g, or t
  misc_feature (337)..(337): n is a, c, g, or t
  misc_feature (343)..(343): n is a, c, g, or t
  misc_feature (361)..(361): n is a, c, g, or t
  misc_feature (366)..(366): n is a, c, g, or t
  misc_feature (368)..(368): n is a, c, g, or t
  misc_feature (374)..(374): n is a, c, g, or t
  misc_feature (393)..(393): n is a, c, g, or t
  misc_feature (396)..(396): n is a, c, g, or t
  misc_feature (441)..(441): n is a, c, g, or t
  misc_feature (464)..(464): n is a, c, g, or t
  misc_feature (467)..(467): n is a, c, g, or t
  misc_feature (509)..(509): n is a, c, g, or t
  misc_feature (520)..(520): n is a, c, g, or t
  misc_feature (524)..(524): n is a, c, g, or t
  misc_feature (552)..(552): n is a, c, g, or t
  misc_feature (564)..(564): n is a, c, g, or t
  misc_feature (581)..(581): n is a, c, g, or t
  misc_feature (598)..(598): n is a, c, g, or t
  misc_feature (609)..(609): n is a, c, g, or t
  misc_feature (626)..(626): n is a, c, g, or t
  misc_feature (653)..(653): n is a, c, g, or t
  misc_feature (665)..(665): n is a, c, g, or t
  misc_feature (741)..(741): n is a, c, g, or t
  misc_feature (799)..(799): n is a, c, g, or t
aagcatagngaaggaagggaaaccctgaggccttgtttgggcctttggggtcctggcctcctcccangggccaaangtgggcacctggcctcccttcactttggccgtcctccaaaacacacgcggcccacctcctttgcctgaacctccgcccctcttctccaatggagggaangcactntgaaagantcctcacctcaaacangcangcacgngntcantccttgtggtcangcaccccttcacggnttcccggngggtcccctgccaacctgggtcccaagcgcaaagcaccccttcccctcaagaattttcaatgntnttaaataagtttcantcatantgtgggtccctgaagcantgcangntaatgntgataagaagcccttttgntcntaaagcgcaagaaaaaaaaatacctttttttcccactcctctcanggtctttaaaaaacctatgaagngantttccctttgccgcctgagttttttcctttccctcctacaantgaaaaattanaatntgggcctcgggcctccctgcaccgggcntgcgactcctgntaccttttcccctgccntgggtgtgaatttttcnttccttcctcnttccttttcctcaaacntaaattttttttccaatagggggctcnttgataaagccnccttttaaaagataggtaaaattcaataatggtttgaataacccttttgaaaacatctcaatgggatggcctgccnataggtggtgaagaagttttttctccccaaaaaaatggaagccagaagtgggctctgngttatggttgtctagccatggtgtagcaaaagaagattgc

SEQ ID NO: 692520 - DNA, 151 bp, Homo sapiens
  misc_feature (103)..(103): n is a, c, g, or t
agtactggaggatctctagtcaccaggctccagctataaccgatatttgggatggtcacacacggttgctcatctgtgtctgacgagaatcttgtacaagggnaggcattgcaaccggctaggtgagatgaaatactacctggtctggacc

SEQ ID NO: 692521 - DNA, 487 bp, Homo sapiens
  misc_feature (66)..(66): n is a, c, g, or t
ccctcggctgggttcgagttcagtgaggcacagtgttggactatgtctcatttagttggagtcggngggaggtcatgaatatgttcagataatggattttactcccttagagcaaaatctattagtctctctcagtttatcaatttaaatggctttaggcttatagggggtgtaaactttaagaatataattctcccattcaagtttacagcaaacatctagccaccttcaaaacaaagaagatacagaccatcatttagcaatactaatacatgattttccttggggatggcaggcttgagaatcctttagcaacaggacatacttcccctaaattacagtgaattatttataacgagataaagctttcaggtacaagctgaaggtggggtgtctaacaactaaaaactatcactaaatctcaaagagaaagttcttgcaaaatatgtaaagttcacaaggtgcagacattttccttctttaggct

SEQ ID NO: 692522 - DNA, 104 bp, Homo sapiens
  misc_feature (43)..(43): n is a, c, g, or t
  misc_feature (89)..(89): n is a, c, g, or t
atccagacagagccaatactgcaggaagacaaaatacgggagnggtgactagaggtgggacaattgctcgaggagagtaagcgcagtcnctagtccgagactac

SEQ ID NO: 692523 - DNA, 178 bp, Homo sapiens
ggctgatctagaggatcccatctcgacgggtaacgaattgggagaacgggcatatgcaggctttgggaacaaatagggcagatgaaaccatttgggagtctcaggcatgggcttgctcttcccatgagggctcgtattctccactaggaacagattctggcgtgggtatggctcaggg

SEQ ID NO: 692524 - DNA, 307 bp, Homo sapiens
  misc_feature (44)..(44): n is a, c, g, or t
  misc_feature (261)..(261): n is a, c, g, or t
  misc_feature (272)..(272): n is a, c, g, or t
  misc_feature (278)..(278): n is a, c, g, or t
atattcataacatgacacacaaagacataaacataatggttcgnatagtaatgcaaattacgtgtatcaacgaagtatacggacataaaaatgacacctcatattgtattccccccattttgtaaggtacaatagacatataaaaaatcgataattactctcaatacttaccgattaaaataaaagttatgtattaatgacataactggttatttcgaaaggtttttctttgcaagtgatgtggcagcgaaaacttttttnctttatttaancaaatnaaggtaggagtaccactatatatattgct

SEQ ID NO: 692525 - DNA, 344 bp, Homo sapiens
tagtatatatactccaaatagactgcagaatgcaagaatggaggagaagagacagagactatgcccagcaaaagatatagccaagagaggagtcagaccagcttggcagactactacctttcccccagaggctccattagaaagccttaaagcagcctactggaacccttgtctgcgattcaacaataagaacagtctattacacattttcactagctcctacctacatgaaacagatagagaggtctaactaaacaatgtacatcagtttggtcataactgctaggaactcttctgtagtaaactggctgcacttcaaaaacatcccatcttacctccaagtc

SEQ ID NO: 692526 - DNA, 1536 bp, Homo sapiens
cgcgtgcgtagcactcttaccgcgcgtcgtttctgttggccgcctctccatggtgtgtcggcccgctgtgcgtgcgccccgccgtcgatcacccgcgcgtggtggttgtgagcgccccccctactagctggtgagagactacccccggggggtcgtatgatagttccccagtcctgcttctcgcggcgtcgtttcttttagctcctctttggtagacccccgctggcgggaccggcgtataatctaaccactgttttttccagtcaaccactgggtggtggatcccacctcctgttttgttgcgccccccttttgtgggctccacattttttgtagggggggggccaccccattagtttgtgtgagaccacaacgggtgtgtgtgtgccgccgaaaagagctcgccagcgggtgggtgtgtatccccgcgtgttccccgtgggattttttcccccccggggggtatttttcgttgctgcgggcgccccacaccgggtggttttcggcgcccccgcgggtgtttttttccgtcgcacagggtggttctctccgcgtggtcgacgctcatacctctctgagtagcgcccccaacatatatgtagggggtgctacatgtggccgccgtagacccgttacccccgcgagaagagagattgttttgagagaacccgcgggtgtataccacacagccgcggcgggctctgttaaaaaagaaattttgtaccccggcgcgagagtgttcctcctggggcacacacccacgcgagagacacacgctctctcacagcactggtgcgcacacgcgctgtgctcgcgcgggggtgttttttggagcacactctccgcggggcgcacccacacactttctcaaaggtgtgtcttgtgtagagaagtttgagtgcccccgcgcacgtgctcatcacacactctcgagcgcgacattgtagagacacactctctcctctgtggagagacacacacccacttgtcgcgccagagacaaccgcgaggggcgcgcgcgcgcttttgtgggagcgccacacacctctgtggggcgcataaatactctcacgcggcgctgtgtagatctcacacggggggtatttgtgtatacacgcacacacgcgtgtgtggcgcagagattttgtgcgagagcctgtagatatatgtgagcgcgcgcgcgcgagatttcacagcgagagtattcacacacgcgcgtgtgtctcttggagacactctcactacttctccgcggcttggaggcacaagcgagagagtgttccaccctctctccccacagccctctctctctcgagaggaggacacagcgagaaatactccactataccacacacaccttgttttgcctccaacggtccttctgagaggcacccacacgctttgggggttttgtctgtcctttgtgaggggggttttttgggtaagaagggagatgggagaagagagaagggaacccctataccccccggtttttttcctgacccccccacattaaaatttttgggccacaaggga

SEQ ID NO: 692527 - DNA, 581 bp, Homo sapiens
aacggctgatgcgtttgggcatggtacaggctgtgcttggcctgagcccaggatggacatctgcagacatggtgtccatgaagctcacccagttatccttccacagcagcccccccgagtcaccttccagtgctggcctccaggatgccctggaaatgagggccgtagtcgtagccacgcagacgcagctccttgtaaacttcagcctgggccagtgaagaggggctcctgtggtgttgggggtggtgctttcctgtgtggtcgaagagcctggggtcagggtcatcccactggtacaacttcccactcactaccagtgttgccgttctctgacacctcgaagtgcactggagtgcctccaggagcctgtacctccagtgaacactgtcccagtcttgggcaggatggtggcctggtgcagcaacacatcctcaaaacatcacagtgcatgtgctcgacgcccaggcccaggtctgcgggccaagtgtctttcacacactaatgtcagtgtcgcatgtggtggggaacgcggacgcgatcggtcggagggtgtggatcaacagtgtagtggtcaggcgatc

SEQ ID NO: 692528 - DNA, 794 bp, Homo sapiens
tgccctcataacttagatagatcgtagcattaaccatctcacgtctaggaatattagtgtatcgtacaaaacttcagtatcctccctagtatgcgtagacagcactaatactatcggtgtgcaggatagcgtactgtcataacactctaacagatgagtccctcggtagaagtcatatactgtgcctatagccagtaacgttagtcttggccgcctgcagtacaactaggcgccgctaggcctactagtctcaatctccaacacatatggctagatacgtaacaactaaactactccaatgctaaaactaatcgtcccaacaattatattactaccagtgacatgatttccaaaaaacacataatggtgaatcaacaaaacacccacaagcctaaattattaagcatcatccctctactatttttaaccaaatcaacaacaaacctatttagttgttccccaaactttttcctccgaccccctaaaaagcccctccttaatattaaatacctgatcctaccctcaaatcatggaagccaacgcatttaatccagtgaaccacttatcacgaaaaaaaaagtcctacctctttataataaattccctaagaatctcttaattataacattcacagccaaagaactaatccatattaatatctctgaaaacagattatcccactgggtatcatcaccggtgggaacagcagagtgaaggggcatatctattaaccaatggcctcctatatggagttacacaaacgagcaaaattaatccgggcagattgcggcact

SEQ ID NO: 692529 - DNA, 329 bp, Homo sapiens
  misc_feature (67)..(67): n is a, c, g, or t
  misc_feature (138)..(138): n is a, c, g, or t
aagaaatcttaatgttatggggtattgtctaagaagctttattttaaaaccatctcattaaattttnttgcattttagataatcgtccccagatgccatgttaccctagtgcagagtttggggctggataagtttttnttgtaggtggctatcctgtgttttgtagggtatttagcagcatcctggccttaaaacaaaaatgttttcagacattgccaaatgtcccccgagcggtaaagtcacccccaagttgagaaccgctctatacaaagagctgttattagagctagacatttctgaattggcatcaatttctatattgtatccat

SEQ ID NO: 692530 - DNA, 116 bp, Homo sapiens
tttccacactagaaatcagtccctggcgagatatgatagaaagatctactcatcgtacgtagggttttagtttgaggatgaactactcgtaggcaacccgatattgaaccttttgt

SEQ ID NO: 692531 - DNA, 477 bp, Homo sapiens
  misc_feature (29)..(29): n is a, c, g, or t
  misc_feature (81)..(81): n is a, c, g, or t
  misc_feature (91)..(91): n is a, c, g, or t
  misc_feature (108)..(108): n is a, c, g, or t
  misc_feature (114)..(114): n is a, c, g, or t
  misc_feature (156)..(156): n is a, c, g, or t
  misc_feature (183)..(183): n is a, c, g, or t
  misc_feature (472)..(472): n is a, c, g, or t
gaagattgccctcaggtaaaaggggaaanttgaagtgaaatttaatgaaatggatccagcaaaacctaggtaagatttaanaattttatgntccccacactttggttnccttanccccctcattgaagtgcctttttaaaaataccatatatcctnaaaggtacctaaagagacaatgggcanaccctataatccccagcactttgggaggctaatgagggaggagggaggatttcttgagccccaggagttcgagacccaggctgggcaacacagtgaaacaccgcccccgcccccgcccatctctacaaaaaatacaaaaattagctggcgtggttttgcacgcctctaatcccagctcctcaggaggctgaggtgggaggatcacttgaacctgggagatggaggttgcatgagcaatgatcaagccactgcattccagcccggctgatagagcaagaccctgtctaanggtaa

SEQ ID NO: 692532 - DNA, 397 bp, Homo sapiens
gacacctacttgtaaccctggcagctaaggcctccagggcggggtctccatataactacacggttcatgaactgacattccacatcctgcccaccctctgagggccaagctgcctggccactgggctgggctggagtctggctggtccaacacagattctgcctggtccaacacagattctgcctgagcctccttatttattttctttacagtggcactcaggctgccccagccgggccgcccagaccctcgcccctgggggttggccctcctccccccccctcccccgggcccccccccccttgcccccccccctcctctgaggggaaagggtggggtgttctttgtgtaaaatagaaacatggttttgtacagaaataaacagccttgtatagag

SEQ ID NO: 692533 - DNA, 173 bp, Homo sapiens
gggccctgtggcctgctgtgagccacggcggcaatgtactctgctgggagaagaaccagaccaagccgtccccgaaacgcgagtccggagaggagatcctgcatggagaatgttgaaccagctgtgtggagaaggcccagctgcactgcatcttcctccctgtgaggctgtgc

SEQ ID NO: 692534 - DNA, 887 bp, Homo sapiens
  misc_feature (24)..(24): n is a, c, g, or t
  misc_feature (66)..(66): n is a, c, g, or t
  misc_feature (87)..(87): n is a, c, g, or t
  misc_feature (98)..(98): n is a, c, g, or t
  misc_feature (127)..(127): n is a, c, g, or t
  misc_feature (130)..(130): n is a, c, g, or t
  misc_feature (133)..(133): n is a, c, g, or t
  misc_feature (179)..(179): n is a, c, g, or t
  misc_feature (189)..(189): n is a, c, g, or t
  misc_feature (192)..(192): n is a, c, g, or t
  misc_feature (195)..(195): n is a, c, g, or t
  misc_feature (198)..(198): n is a, c, g, or t
  misc_feature (206)..(206): n is a, c, g, or t
  misc_feature (214)..(215): n is a, c, g, or t
  misc_feature (239)..(240): n is a, c, g, or t
  misc_feature (244)..(244): n is a, c, g, or t
  misc_feature (248)..(249): n is a, c, g, or t
  misc_feature (251)..(251): n is a, c, g, or t
  misc_feature (257)..(258): n is a, c, g, or t
  misc_feature (260)..(261): n is a, c, g, or t
  misc_feature (264)..(264): n is a, c, g, or t
  misc_feature (272)..(272): n is a, c, g, or t
  misc_feature (281)..(281): n is a, c, g, or t
  misc_feature (283)..(283): n is a, c, g, or t
  misc_feature (290)..(290): n is a, c, g, or t
  misc_feature (293)..(293): n is a, c, g, or t
  misc_feature (299)..(299): n is a, c, g, or t
  misc_feature (301)..(301): n is a, c, g, or t
  misc_feature (308)..(308): n is a, c, g, or t
  misc_feature (312)..(312): n is a, c, g, or t
  misc_feature (317)..(317): n is a, c, g, or t
  misc_feature (324)..(324): n is a, c, g, or t
  misc_feature (327)..(327): n is a, c, g, or t
  misc_feature (338)..(338): n is a, c, g, or t
  misc_feature (340)..(340): n is a, c, g, or t
  misc_feature (347)..(347): n is a, c, g, or t
  misc_feature (407)..(407): n is a, c, g, or t
  misc_feature (413)..(413): n is a, c, g, or t
  misc_feature (418)..(419): n is a, c, g, or t
  misc_feature (442)..(442): n is a, c, g, or t
  misc_feature (453)..(453): n is a, c, g, or t
  misc_feature (469)..(469): n is a, c, g, or t
  misc_feature (474)..(474): n is a, c, g, or t
  misc_feature (497)..(497): n is a, c, g, or t
  misc_feature (527)..(527): n is a, c, g, or t
  misc_feature (733)..(733): n is a, c, g, or t
  misc_feature (758)..(758): n is a, c, g, or t
  misc_feature (866)..(866): n is a, c, g, or t
tgactcttttctctcggcctcgtngtgaagacacatcgcatctccccgctgtaagcttcctcccanaaaacccgtttcgggcctcanagcgtctggtnaaaagctgttgcctgctgctgctgctgcnaancangtgctgggccgtggaggtcaaaaagccccggggtgtctccctcaanaaaaaaaaantcnaanaanagtccaancctttcanntgcctggacggttcggccaccaanncaantgannangtcaannannaanaatgcgantgcaaaaantnctctgangantcaggnanggctgcntgtnctaanggcagcntcnaatgcaacaanantggctanaagcacctgtatatcccctccaaccgggtcaacgatggtgtttgtgactgctgcgatggnacagangagtnnaacagcggcgtcatctgtgagancacctgctaanagaagggccgttaggngaganagtccctgcagcagatggccgangtcacccgcgaagggttccgtctgaagaanatccttattgaggactggaagaaggcacgggaggagaagcagaaaaagctcattgagctacaggctgggaagaagtctctggaagaccaggtggagatgctgcggacagtgaaggaggaagctgagaagccagagagagaggccaaagagcagcaccagaagctgtgggaagagcagctggctgctgccaaggcccaacaggagcnggagctggcggctgatgccttcaangagctggatgatgacatggacgggacggtctcggtgactgagctgcagactcacccggagctggacacagatggggatggggccgttgtcagaagcggaactcaggcnctcctcagtgggggacacaca

SEQ ID NO: 692535 - DNA, 177 bp, Homo sapiens
tgaagccgaccacagtggctatgcaggagagctgggctttcgcgctaactctggatctggcactagactggatggaaagaagaaaggggtacagcccatccggtccgcaatcaagcctggagatattaaaagaggaattcccaattatgaatttaaacttggaaagataactttcat

SEQ ID NO: 692536 - DNA, 341 bp, Homo sapiens
  misc_feature (187)..(187): n is a, c, g, or t
ttttattggatttttctaacccgggttaacccccttgaatggggatttcttaagaaaaaacccccctcttgggcccttaaaagcattactttaactggtaggggacgccagaaacttttcaggccagctattccttagataggaattgaagatatggataaatattccaaagaataaaaatatattnctgtctctttaggatgggtttcagggccattaaaccgagagatgtcttggttttttaaaaagaataggatttaatagggttctgacttttgggggtccttttgcccaaagctttatcaacttttaaacattaataaactggtttttttaaagga

SEQ ID NO: 692537 - DNA, 279 bp, Homo sapiens
taccaggcagaccctgtccagagcatttgatgtccctatcatctctgaccctatgctgggacaagctttgatggggggcccagcttcaaggctgtggtgggaacagcacccccaaatgccagcctctcctttattaccatccaccagtatactgcggggccatttctggtctcttgtcaacaggaaacccatttctggtgggatatgcctatcagtgccacagggccaactcaccccatgcatactctgtacctgccccgtcagtgcctgggcacggga

SEQ ID NO: 692538 - DNA, 407 bp, Homo sapiens
  misc_feature (356)..(356): n is a, c, g, or t
  misc_feature (390)..(390): n is a, c, g, or t
gaactttttcatcctcccaaactgaaactctacccaataagcaataactccccactgccccttccacccagctcgtggtaactccaacttcctgtctctatgttttgggctactctagacaccgcctataaatagaattacgtgatatttgtctttttgtgcctggcttctttcacttagcataatgtcttccaggttcatccatgtcgtgccatgtgtaattcctttctatgggcggaatagtattctaatatgtgggatatcccatattttgttcatccattcatttgttgataggacacttggggttgttcctacctcttggactattgtggaataatcttgctagggtacangggtgggacaaaatattctgtctggactccccgntttcaactctaggaaag

SEQ ID NO: 692539 - DNA, 338 bp, Homo sapiens
aatacttacaatttgtagcatgagtttgagaactagctagtgttagaactaaccagtggaccgggcaaggtggctcaagcctataatcccagccctttgggaggccaaggcaggaggatcacctgaggtcaggagttcgagacaagcctggccaacatggcaaatccccatctctactaaaaatacaaaaattagccgggcatggtggcaggtacctgtaatcccagttactcaggaagctaaggcaggagaatcactcgaacctgggaggcagaggttgcagtgagccaagatcgtgccactgcaccccggccaggtgacaagacagactctgtctc

SEQ ID NO: 692540 - DNA, 529 bp, Homo sapiens
  misc_feature (139)..(139): n is a, c, g, or t
ggcagttttctttgcccaagcatttggtgctagttagaggctgttcactctctcctgctcctcttcggagtagaaataaaggctgtgacacaaggaagccagtggggtgggagggaggcaccataatccctccctaaanaccaagaagaataactgatactctttgtgacccaactgcatcaacactaaacagctgcagaccccctgaatctttcacacatgccaagtgaacattctgtgatgatttctcttttgtgaccggaacacctgaaaaccagaacgatctagaatttccttccccgcccccttttgtgtttagtttctaatctctgtgttatgaggtgtggggtcaataagggactgaatcacactgacttgttcccaacaacaagaacaaacaaaaacaaaaaaaaatgccttttctcagggccagttgacgtttgcaaaataattttcaaagaaaagcctataattacatcatctcaataacatttttacaacacaaaaaccaccccacaacaacacacaa

SEQ ID NO: 692541 - DNA, 563 bp, Homo sapiens
cgcggtggctcacgcctgtaatcccagctctccaggtaggctaacaaggcgggaggataggcttgatcccagaagagttcgaaacctgcctgggcattatagcgagagcccgtgctccagacgaagtaagggtgacctgacattaagcaacataatgatcacttacgaggacgagcaggccaagcttatgatagacacacttagccggggcgatgggtgggccgcgcgcctgtagtcccagctagctcggggaggctgaccgtgggaaaaatcgcgttgagcccaaggagttggaggtctccacgagagcataataaatccactaggccaggtgcaacgtccaagccttgtggaaaacaagaagcgatgaggcgcaagtcgtcggcgagagcacaaaacagggggcccttactacaaacaacagagagactcccataggcggggccgcgagaatatgtccacattaaaagccccccggcggtggggggaacaacgtgggggacacgaggggccgcccaaagggaaagaaaaaaaggggcaaagctgcccaaggaaacacccgc

SEQ ID NO: 692542 - DNA, 419 bp, Homo sapiens
cagctttggaccaagcgaccatgagagggccagagctcgggcccgaaaccagcatggaaggggacgttctggacaccttggaggcgctggggtataaggggccactgttagaggaacaggcactctccaaggcagcagagggtggactgtcttcacctgagttttcagagctctgcatttggttaggctcccagataaagtccttatgcaacctggaagaaagcatcacttcagctgggagagatgacctagagagcttccagcttgagataagtgggtttttaaaagagatggcctgtccatactcggtactcgtctcaggagacattaaagagcgcctcacaaagaaggatgactgcttgaaacttctgttgtttttaagtacagaacttcaagctttacaaatattacagaaaaaa

SEQ ID NO: 692543 - DNA, 556 bp, Homo sapiens
  misc_feature (73)..(73): n is a, c, g, or t
  misc_feature (100)..(100): n is a, c, g, or t
  misc_feature (132)..(132): n is a, c, g, or t
  misc_feature (186)..(186): n is a, c, g, or t
  misc_feature (212)..(212): n is a, c, g, or t
  misc_feature (219)..(219): n is a, c, g, or t
  misc_feature (253)..(253): n is a, c, g, or t
cggccattattttgagcggctgaggcgggggtattgcaaaggaccttagacattttttgtgttcaaggtgctnaaaatgagcacatgaagaggccgctgngaacctccaagtggccctactgcgcgggggcntacggcacgcacattcttttatgacagggccccacactgtcccccaactcgctnattctgccctcacatcccttcctttncctcttnctgctcatctgccttccctgaattactcttcccntcagcggcttgtctcatctctgaagtttggattatttttctgttcccttacgcccacccccctcttctctagttcccccaccctactttttcctcgcctacctcgttcgcctcccggccttccccccccccctctcctctcctcctctctctttctctcttcctctcctctactacactttggtcctccctctctccctcctccctccttctttgtctccactattctctatcttttctccccttcctcctccctctcttccctccctctctccccgcttcttccatcttacacatacataca

SEQ ID NO: 692544 - DNA, 546 bp, Homo sapiens
caaacacattgtttatttttaacaaaaggcatatttttggggccttactacaaaatctagctgtcaaaaaataccacaaaaattgcctaggttgggcgaacctggtaacttggggacagtgtcttcgtttgattactgccagtttatttcaggatgctaaatccctacccacgtcccaccctttaggggagtaagggcgtaattttgtcttccgcccaattaattatttctaatcactccctcaatccaagaaacaaaccttgaaacacgaacatagaccccaggcttattggggcgtgcacagccaaaaccccaagaaggtgactccttgtaaaaatgttttttgtccttctcgaagcaaaaccaaaggcccttccattgtccctctggaaacttgtaagtggccttcggccaaaatgcccaacacaaaagttcggtggaatggactttttccattcagaaactcatagcgattgcccactttatttttcaatcacggggagcttggcttccttgaaaagggccactctcaaaagaaccctgggg

SEQ ID NO: 692545 - DNA, 1054 bp, Homo sapiens
  misc_feature (98)..(98): n is a, c, g, or t
  misc_feature (172)..(172): n is a, c, g, or t
  misc_feature (271)..(271): n is a, c, g, or t
  misc_feature (274)..(274): n is a, c, g, or t
  misc_feature (409)..(409): n is a, c, g, or t
  misc_feature (435)..(435): n is a, c, g, or t
  misc_feature (457)..(457): n is a, c, g, or t
  misc_feature (487)..(487): n is a, c, g, or t
  misc_feature (493)..(493): n is a, c, g, or t
  misc_feature (505)..(505): n is a, c, g, or t
  misc_feature (509)..(509): n is a, c, g, or t
  misc_feature (511)..(511): n is a, c, g, or t
  misc_feature (518)..(519): n is a, c, g, or t
  misc_feature (528)..(528): n is a, c, g, or t
  misc_feature (549)..(549): n is a, c, g, or t
  misc_feature (552)..(552): n is a, c, g, or t
  misc_feature (555)..(555): n is a, c, g, or t
  misc_feature (557)..(558): n is a, c, g, or t
  misc_feature (570)..(570): n is a, c, g, or t
  misc_feature (572)..(572): n is a, c, g, or t
  misc_feature (577)..(577): n is a, c, g, or t
  misc_feature (587)..(587): n is a, c, g, or t
  misc_feature (593)..(593): n is a, c, g, or t
  misc_feature (633)..(633): n is a, c, g, or t
  misc_feature (639)..(639): n is a, c, g, or t
  misc_feature (675)..(675): n is a, c, g, or t
  misc_feature (677)..(677): n is a, c, g, or t
  misc_feature (703)..(703): n is a, c, g, or t
  misc_feature (728)..(729): n is a, c, g, or t
  misc_feature (731)..(731): n is a, c, g, or t
  misc_feature (740)..(740): n is a, c, g, or t
  misc_feature (746)..(746): n is a, c, g, or t
  misc_feature (749)..(749): n is a, c, g, or t
  misc_feature (768)..(768): n is a, c, g, or t
  misc_feature (770)..(770): n is a, c, g, or t
  misc_feature (772)..(772): n is a, c, g, or t
  misc_feature (782)..(782): n is a, c, g, or t
  misc_feature (793)..(794): n is a, c, g, or t
  misc_feature (797)..(797): n is a, c, g, or t
  misc_feature (800)..(800): n is a, c, g, or t
  misc_feature (805)..(805): n is a, c, g, or t
  misc_feature (812)..(812): n is a, c, g, or t
  misc_feature (819)..(821): n is a, c, g, or t
  misc_feature (829)..(829): n is a, c, g, or t
  misc_feature (834)..(835): n is a, c, g, or t
  misc_feature (837)..(837): n is a, c, g, or t
  misc_feature (861)..(861): n is a, c, g, or t
  misc_feature (869)..(869): n is a, c, g, or t
  misc_feature (913)..(913): n is a, c, g, or t
  misc_feature (944)..(944): n is a, c, g, or t
  misc_feature (988)..(988): n is a, c, g, or t
  misc_feature (1030)..(1030): n is a, c, g, or t
tcacgggccgttccccctcacgggagtcctccgcccgggcgtccggaacagtcgacggcagactccggcccgctgagccacccgaggggtcccgtggnctccgcggacccggaatctgggccctcgcggacccgcgccccgcccagtcgccccagggcttccccacacccanggagtaagtcagccgcggccctgcctgggaggaacttaccgtctacagggaaaggtggccagcagatgtgtcgggcctggtgagagggtgaggcgaganggnccgatcgcccagggccccggaagctgcggaggtcacccccgcctggccttagctcagggacaccctggattcacgtgggagcccctgctcctgcctcccccgtcccaccactgaggctgttgggccaggccagtnatgctagaacggcctcctgcactggncatgcccatgcccacggagggnaccccgccacctctgagtggcacccccatnccagtnccagcctaattncgcnangcagaanntggattctncctcaagaggccagggggtcngcnggngnntcccaactccgncnctgcnaagggcagcnttcccntcagccgcctcttccctcctcggaccccaggctggcaccngctgcngccccggcgggtgtcattccggggcgaggcctcagngnctctgcagagccctgggtatgacccnagccggccagagtccttcttccagnngngcttccagnggctcngcngcctgggccatggctcctncngngaggtcttcnaggtgcgcccnnggnggncggcnggctctntgcggtnnngcgttccntgtcnncnttccggggccccaaggaccgggcncgcaagtnggccgaggtgggcagccacgagaaggtggggcagcacccatgcntgcgtgcggctggagaggcctgggaggaggnggcatcctgtacctgcagacggagctgtgtgagccagcgtgcanaacactgtgaggcatggggtgcaccctgcctgaggccaggtntggggtacatgcgggagagctgct

SEQ ID NO: 692546 - DNA, 217 bp, Homo sapiens
taacgtattttagtcatcaaatttctaagacaataacactttagtgtctgtcttagaaatttgatgagtaaaatacattaccaaaagtaattaaagcaacatgaaggaatcaactttccttgcttaatttattccaagcaaagagaaaatcttaggatgaaatttagtgttggaaccttttaaataagtttgcctttcttgaactggagctaatttg

SEQ ID NO: 692547 - DNA, 245 bp, Homo sapiens
cccaggcctgggggccccctgggggcccgtggggtgcaaagcccccccactttgcactcatgcagcagtccttcaaccccttcaagtactactcccccttttttttcaaagtggtggcccagctggtgaaccccggctaccccccccccctggaggacttttttttgggcctcaacttccaccactacttcccggacgcctgaggctgctttgcggggggcgggccccataaaggggttttcgga

SEQ ID NO: 692548 - DNA, 133 bp, Homo sapiens
ttgtaaaggttcaaacacgtggaattacaagcacactgcgccttggctcatctatgagggagtttgaggacagtgacagtacatcctgcgcaaaaaaacaaagcagagctgataccgcaactggtacggcggg

SEQ ID NO: 692549 - DNA, 405 bp, Homo sapiens
tcctgccaggcgcagtaagattgaggagctaaaaacagacttgggtggatgtctgcagctgcaagaagatgtgtgggaacagacacagaaactctccctcccagataagcaagacaaagaaacacagaataagagtccatctatgtggtcagagaatgggataagagctgatttaaaaaaactctgctctatatagaaggcacacctggtcccaaccaaaccactggaccctaggaggataagacctcctctgctcatgagccccctcctcagtagcccatttataaaaaccctgacaattttactaccacttggcaacccgctcgggacccctttctgtgatggagagctgttcttttcttttgcctattaaactcctgctccaaaaaccaaaaaaaagcaaaa

SEQ ID NO: 692550 - DNA, 168 bp, Homo sapiens
gctcgtaccaaatgccgacatacacctaacagtgttgaaagaatttcatttctttccattaagaaaacctaactagctgggcgtggtggctcatgcctgtaatctcagcactttgggaggccgcggccgggcagttcacctgaggtcaggagttcgagaccagcctag

SEQ ID NO: 692551 - DNA, 434 bp, Homo sapiens
  misc_feature (6)..(6): n is a, c, g, or t
  misc_feature (26)..(26): n is a, c, g, or t
  misc_feature (135)..(135): n is a, c, g, or t
  misc_feature (429)..(429): n is a, c, g, or t
  misc_feature (431)..(431): n is a, c, g, or t
  misc_feature (434)..(434): n is a, c, g, or t
agacgnggaatatggaaaaggtgggnagggacccctgccctccgtgattgttttccattttccatagcccaagtgtattagtcccattcctcgcactgcctataaacaacctaccctgaggcccgggcgcggtgnccgacgccctgtaatcctcagcagtttgggagacccgaggcgggtggagcaccctgaggtcaggagtttgacacccagccctggccaacatggtgaaaccccgtctctgttgaaaatacaaaaattaacccaggcgtggtggtgggcgcctgtaatcccagctactcgggaggctgaagcagaagaattgcttgaacctgggagatggaggttgcagcgagccgagattgcgctactgcactccagcctgggtgacagaaaaaaaaaagaactacatgagactgggtaatttantnaan

SEQ ID NO: 692552 - DNA, 213 bp, Homo sapiens
acacactgcatatcctttttgctttgttggtttgtaatttgtaaacgactggggactttcgccacgaatgcccaggctggtctcgaactcctgagctcaagcgattctcccacctacagcctgccaaggtagctgggattacatggcatgtgccacttgtgcccaggccaagtgcagtgatcttcatcgcaccgtttacaaagcattcaataa

SEQ ID NO: 692553 - DNA, 239 bp, Homo sapiens
gtaggcgtatggtctcgctactaactagtatggggatcatgaggtgtaggtagtgccttgttgttaggacgtgggcgagggcatttttaatacttagagcgcaagccgataatcactgcgcccgctcataaggggatggccatggctaggttcatagatagttgggtggttggtgctaactgagtgagtgcaggcagtccgagggaggttcagttgtggccatccaaaatgcttaagga

SEQ ID NO: 692554 - DNA, 694 bp, Homo sapiens
agcgggatcggggctcggcgcgcgacgcgggcggcgactgatggaacgagagtagcggccggcgtgtgagtgtgtgggagtgctaatagtggcctgagctgtgcataggcccgccacgcgtgcagtctgcagggcacccacgtcactcggctgcgaacgcgagacaatggaaggtcggcgtacagtataatcgccgtacgcctggtatcgcctctttctacaaatttggaaatctgccgttctactccatctgtgggactcaggcagccttggtgctcgaggtgccatgatgcgaaagacaagcgatgtacactacatcgaagatctaaccgttggatcccatgcaaatgtggccattccctcttcgtacgcgtgccccagagccatgcctaggccctgctgcaggactgtggacgatcgtctaatgttcgaagatgagacgcaaaagatctggcttcttggcgagctggtcagctgacggactccatctagttaaccgcagcatctaccatggccagttgtcagcgtctaaggtggctttggcccttccgcttggcatcccgaagaagcactcagctgcccattacgtgctcgtgctcagcaagggaggagactgtgctggcaacagtccaggctctgcagacagcatcccagctgtcccagcaggctgacctgaggagcatcgtggaggaga

SEQ ID NO: 692555 - DNA, 1632 bp, Homo sapiens
  misc_feature (315)..(315): n is a, c, g, or t
  misc_feature (330)..(330): n is a, c, g, or t
  misc_feature (383)..(383): n is a, c, g, or t
  misc_feature (434)..(434): n is a, c, g, or t
  misc_feature (446)..(446): n is a, c, g, or t
  misc_feature (1331)..(1331): n is a, c, g, or t
atgacagctgtaagtgtaatggctggaaacataccccgaagcccgctcattggacctcgcgcattggatctgcgagtgagccgagctgccaaccatgagtgagactgtgcccgtcatcttgttgagccaacacgcacttggtctggaccgagcagtatctccgacttgcgagcaattgttgtcaggaaggatgatgatatacagcgtagtagctgggtgatggctggtggattgtggatgcaatctcttcatcgtctcgttcatcggacggcacagcaggacgcacaagacaaccggaacgctacggtcgtattngcttaccgtccttcnatacgcctcacatgcggcaagagtgcgatccttggtccacgtatcgtagccgngggctagatggttggcacgagggttcccttgcgggcctaactctcgtcccnattttctgcagncacacactctaacattatggacagtctcagagggtgatgacagtgtacacatgtctggtgactcagttcacttagagtgtgtgtgacgtctgaccactgagagctcaccacgcgggaagaccgtggcgaagggggctgaacttgtttgcgtgagggctacattcccatagagggacttgctctgcagtattgggcttcgctggtgccctgttgacagcctgaaagttgtggcacacgtcccttggacatgtaccgatcgcttggcccccgaagttgtgtactgtgtccaggcacggaggtaacatcacacgaggccttggaggggaagcgggtgaggcgttaagcgctgtaacaagatgcgatcggacaaatataagcaagggccaggggaaatgggtgcctccgtaggtgtagtcaccctgtggcgcaaacaaggtttgggcccctctgaaggaagacattggctttgcattcacggcccgtttcccccgccacgggcggttaatgccacaggaggccgaacctttcgattagttccactttggagcgtggacagagaaaggtccctttccattcacgcgggggtgcgcgactacttttattaccaactggtttaaaacccgcgggtccgggtgccattgaactttggccttgggcaattagatgagtttccacagaacaggctgtggcgcaaggaagaggggggaacatgagcaacatctccggggtgaggccccccggaagaaaaagaaagcggcagaccccctttcagtatcggctcagagaagccacgcgtgttccacacaacacagaggacaggaagcccccgtataactggggcgcgctatgaaccagggagcagtgggggggcgccgcaaagaatcncacacttatgcgaccaaccccgcaggtttgtgtgcgacccccgcccattagatcagcacagcgacagaagcgttcctcgggggacaatggagagggacgccgaccaacaataacgatcacacaggagggaccacatgggaagaatcagcgggcgggacacaaaacacgccgcggaagcagaaaacaaggagggacgaacaacaaaaacacacacgtcagcgagacaacacacacaggggaggaacgagaaaccagaagagagaaagcacagagaggaagaagcaaatatgagagcagaacc

SEQ ID NO: 692556 - DNA, 119 bp, Homo sapiens
cacatatctcaaggctggactctctactggcttcctcttagcagtccctgaggtaccaccatgaaagggtctctggaaagaacggtggcaacagactaacaaagaatggttatcctctc

SEQ ID NO: 692557 - DNA, 188 bp, Homo sapiens
tagcggaccgtcagacgtggagagctggaccacactttgaatatattgactgaaaacgccttcgtgacacgggactgtggctcctccgctgttgcacttgttaggaattgccgactgtgtgcctgcagcgctcgcagtggagcctgttggcagtctttaaacggcatgggtctcgtggctgtcaggga

SEQ ID NO: 692558 - DNA, 113 bp, Homo sapiens
gagaggatccccagatcgaagtgtccactgagctgggagggcctctcttcctccaccattaccaacaataccgactccaacagaccactcggcttactgtcccgggcttacca

SEQ ID NO: 692559 - DNA, 3463 bp, Homo sapiens
agcggggtgtgggcgccgtacgtgcgcgcgcgcggcggccagaaagcggcgctgggaccctgaggcggccgtggttaggcggctccccggcggctcctccgcggcggtgacggcgaccgcactccccgcttcccgctccccgcgctcctccgcccgggtccgccagccgaggccgctcccgagcgtcggaagatgccggccgtgtccaagggggacgggatgcggggcctggcggtcttcatctcggatatccgcaactgtaaaagtaatccaacctcccttataatacatactgaaaggaatgtctcaggctggaatgaacaggacactaggtggtaggatacgtgaagaaataaaagaacaacggtgaagacagctacatatgtcaacgttaaaagacaatgtacaagtcacagaagcagaaataaaaaggataaacaaggaactggcaaatatcagatcaaaatttaaaggtgacaaggctcttgatggctatagtaaaaaaaagtacgtctgcaagttgctcttcatctttctccttggtcatgacattgactttggacacatggaggctgtgaacctgctgagttcaaacagatacacggaaaagcagatcggctaccttttcatctctgtgttggtgaactcaaacagtgagctgatccgcctgatcaacaacgccatcaagaatgacctggccagccgcaaccccaccttcatgggcctggccctgcactgcatcgccagcgtgggcagccgggagatggccgaggccttcgccggggagatccctaaggtcctcgtagccggagacactatggacagcgtgaagcagagcgcggccctgtgcttgctgcgcctgtacaggacgtcccccgatcttgtccccatgggcgactggacatcccgagtggtgcacctgctcaatgaccagcacttgggtgtggtaactgcagccacaagtctgatcaccactttagcacagaagaacccagaagagtttaaaacctccgtgtctctggctgtctctaggctaagcagaatcgtgacgtctgcatccacagatctccaggattacacttactattttgtcccggctccctggctgtctgtcaaactgctgagactgctgcagtgctacccacccccagaccctgcagtgcgaggccgcctgactgagtgcctggagaccatcctgaacaaagcccaagaaccgcccaagtcgaagaaggtccagcactccaacgcgaagaatgccgtgcttttcgaggccatcagcttaatcattcaccatgacagtgagccgaacctgctcgtccgtgcctgcaaccagttgggccagtttctgcagcaccgcgagaccaacctgcgctacctggccctggagagcatgtgcacgctggccagctctgagttctcccatgaggctgtcaagacgcacatcgagacggtcatcaacgccctgaagactgagcgggacgtgagcgtgcggcagcgggccgtggacctcctctacgccatgtgcgaccgcagcaacgccccacagatcgtggccgagatgctgagctatctggagacagctgactactccatccgagaagagattgtgctgaaggtcgccatcctggctgagaagtacgcggtggactacacctggtatgtggataccatcttgaacttgatccgaattgctggtgattacgtgagtgaagaggtgtggtaccgagtcattcagatcgtcatcaaccgggacgacgtgcagggctacgcggccaagactgtgttcgaggctcttcaggctcccgcgtgccacgagaacctggtcaaagtgggcggctacatcctgggggagtttggaaacttgatagctggagacccgagatccagcccgctgatccagttccacctgctgcactccaagttccacctgtgcagcgtccccacccgcgcgctgctcctgtccacctacatcaagttcgtgaacctcttcccggaggtgaagcccaccatccaggacgtgctgcgcagcgacagccagctcaggaacgcagacgtggagctgcagcagcgtgctgtggagtacctgcggctcagcaccgtggccagcaccgacattctggcgaccgtgctggaggagatgcccccattcccggagcgggagtcctccatcttggcaaagctcaagaagaagaagggccccagcacggtgacagacctggaggacaccaagcgggacaggagtgtggacgtgaacgggggtcctgagcctgccccagccagtaccagcgccgtgtctacgccttctccgtcggcagacctgctgggtctcggggctgccccccctgcccccgcgggccccccaccctcctccggcggcagcgggctgctcgtggacgtgttctcagactcggcctctgtggtcgcgcctctcgctcctggctccgaagacaactttgccaggtttgtttgtaaaaacaatggtgtgttgtttgaaaaccagctgcttcaaattggacttaagtctgaatttcggcagaatttaggtcggatgtttatcttttatggtaataagacctccacgcagttcctaaactttaccccaacactaatctgttcagacgaccttcagcctaacctgaacctgcagaccaagcccgtggacccgaccgtggaggggggcgcgcaggtgcagcaggtggtcaacatagagtgcgtgtccgacttcacggaggcgccagtcctcaacattcagttcaggtatgggggcaccttccagaacgtgtctgtgcagctgcccatcactctcaacaaattcttccagccgacagaaatggcttctcaggatttctttcaacgttggaagcagttgagcaatccacagcaggaagtgcagaacatcttcaaagcaaagcacccaatggacacagaagtcaccaaagccaagatcattggatttggttctgcacttcttgaagaagttgatcctaatcctgcgaatttcgtgggagctggaatcatccacacgaaaaccacccagattggatgcctgctgcgcttggagccgaacctgcaagcccagatgtaccggctcacgctgcgcacaagtaaggaagccgtttctcagagattatgtgaattgctctcagcgcagttttagtcctgaggatggaagaccaggctcgtgtgtcttgtgttgtcttcgtctgtgccgtttgtcttcgtggctatcctgcagatgagcaccgtgtccagtgccacagcacaaggcgcctccccgccccaccgccccacacctctcccctttgggctggacgggaacacacgtgtgtggctcaggaggaaaagctcagcctggactgtggcagccacggcagaaggtggatcttgggatcaatttttataaaaatcgagacagttctgtggttaaatctacaaattaaagggaaattagaagttggcgtga

SEQ ID NO: 692560 - DNA, 99 bp, Homo sapiens
tttgaagattcatcaaagaactaaaaaaagaaataccctttgactcaataatctcattactagttatacccccaaaaggaaatacattgttttccctta

SEQ ID NO: 692561 - DNA, 194 bp, Homo sapiens
tgtgaacttcgtccccgaataggggtagcacccttcagcaggaccctataaaactttcctccagcccttgcctctttgcaggtagccccttctctgctgagctgcccactgcaacatattgtcacaatttctctagtaaatctgcccttctttacctactactatcttggtaaatggctgtaccacctgcaaac

SEQ ID NO: 692562 - DNA, 3454 bp, Homo sapiens
agcggggtgtgggcgccgtacgtgcgcgcgcgcggcggccagaaagcggcgctgggaccctgaggcggccgtggttaggcggctccccggcggctcctccgcggcggtgacggcgaccgcactccccgcttcccgctccccgcgctcctccgcccgggtccgccagccgaggccgctcccgagcgtcggaagatgccggccgtgtccaagggggacgggatgcggggcctggcggtcttcatctcggatatccgcaactgtaaaagtaaagaagcagaaataaaaaggataaacaaggaactggcaaatatcagatcaaaatttaaaggtgacaaggctcttgatggctatagtaaaaaaaagtacgtctgcaagttgctcttcatctttctccttggtcatgacattgactttggacacatggaggctgtgaacctgctgagttcaaacagatacacggaaaagcagatcggctaccttttcatctctgtgttggtgaactcaaacagtgagctgatccgcctgatcaacaacgccatcaagaatgacctggccagccgcaaccccaccttcatgggcctggccctgcactgcatcgccagcgtgggcagccgggagatggccgaggccttcgccggggagatccctaaggtcctcgtagccggagacactatggacagcgtgaagcagagcgcggccctgtgcttgctgcgcctgtacaggacgtcccccgatcttgtccccatgggcgactggacatcccgagtggtgcacctgctcaatgaccagcacttgggtgtggtaactgcagccacaagtctgatcaccactttagcacagaagaacccagaagagtttaaaacctccgtgtctctggctgtctctaggctaagcagaatcgtgacgtctgcatccacagatctccaggattacacttactattttgtcccggctccctggctgtctgtcaaactgctgagactgctgcagtgctacccacccccagaccctgcagtgcgaggccgcctgactgagtgcctggagaccatcctgaacaaagcccaagaaccgcccaagtcgaagaaggtccagcactccaacgcgaagaatgccgtgcttttcgaggccatcagcttaatcattcaccatgacagtgagccgaacctgctcgtccgtgcctgcaaccagttgggccagtttctgcagcaccgcgagaccaacctgcgctacctggccctggagagcatgtgcacgctggccagctctgagttctcccatgaggctgtcaagacgcacatcgagacggtcatcaacgccctgaagactgagcgggacgtgagcgtgcggcagcgggccgtggacctcctctacgccatgtgcgaccgcagcaacgccccacagatcgtggccgagatgctgagctatctggagacagctgactactccatccgagaagagattgtgctgaaggtcgccatcctggctgagaagtacgcggtggactacacctggtatgtggataccatcttgaacttgatccgaattgctggtgattacgtgagtgaagaggtgtggtaccgagtcattcagatcgtcatcaaccgggacgacgtgcagggctacgcggccaagactgtgttcgaggctcttcaggctcccgcgtgccacgagaacctggtcaaagtgggcggctacatcctgggggagtttggaaacttgatagctggagacccgagatccagcccgctgatccagttccacctgctgcactccaagttccacctgtgcagcgtccccacccgcgcgctgctcctgtccacctacatcaagttcgtgaacctcttcccggaggtgaagcccaccatccaggacgtgctgcgcagcgacagccagctcaggaacgcagacgtggagctgcagcagcgtgctgtggagtacctgcggctcagcaccgtggccagcaccgacattctggcgaccgtgctggaggagatgcccccattcccggagcgggagtcctccatcttggcaaagctcaagaagaagaagggccccagcacggtgacagacctggaggacaccaagcgggacaggagtgtggacgtgaacgggggtcctgagcctgccccagccagtaccagcgccgtgtctacgccttctccgtcggcagacctgctgggtctcggggctgccccccctgcccccgcgggccccccaccctcctccggcggcagcgggctgctcgtggacgtgttctcagactcggcctctgtggtcgcgcctctcgctcctggctccgaagacaactttgccaggtttgtttgtaaaaacaatggtgtgttgtttgaaaaccagctgcttcaaattggacttaagtctgaatttcggcagaatttaggtcggatgtttatcttttatggtaataagacctccacgcagttcctaaactttaccccaacactaatctgttcagacgaccttcagcctaacctgaacctgcagaccaagcccgtggacccgaccgtggaggggggcgcgcaggtgcagcaggtggtcaacatagagtgcgtgtccgacttcacggaggcgccagtcctcaacattcagttcaggtatgggggcaccttccagaacgtgtctgtgcagctgcccatcactctcaacaaattcttccagccgacagaaatggcttctcaggatttctttcaacgttggaagcagttgagcaatccacagcaggaagtgcagaacatcttcaaagcaaagcacccaatggacacagaagtcaccaaagccaagatcattggatttggttctgcacttcttgaagaagttgatcctaatcctgcgaatttcgtgggagctggaatcatccacacgaaaaccacccagattggatgcctgctgcgcttggagccgaacctgcaagcccagatgtaccggctcacgctgcgcacaagtaaggaagccgtttctcagagattatgtgaattgctctcagcgcagttttagtcctgaggatggaagaccaggctcgtgtgtcttgtgttgtcttcgtctgtgccgtttgtcttcgtggctatcctgcagatgagcaccgtgtccagtgccacagcacaaggcgcctccccgccccaccgccccacacctctcccctttgggctggacgggaacacacgtgtgtggctcaggaggaaaagctcagcctggactgtggcagccacggcagaaggtggatcttgggatcaatttttataaaaatcgagacagttctgtggttaaatctacaaattaaagggaaattagaagttggcgtgaacgtggcgtttgtgggagtgtcactgagatggcccgtgctgccgcccaccccgaggcaccgcttccctgtgcggcgctgcagaggggccctcagtgtggcactcctcgtcaaagaaaaataaaggctagaactgca

SEQ ID NO: 692563 - DNA, 754 bp, Homo sapiens
gagcgggtcctcagatggatccagcgaggggcgccaacaagaggcgaagaggtggttccaggtcggcggcaggaagaggagcgggagcatgagcgcggagcggagtcgtcccgacccgccgtgctgtctttcttggagggcaaaggcggcggcgggaaagtcgcgcccctggagggacagcgcccggtggcgagggggcttagccaagttccggccggcggcgcccactccctcgcgttccaccgcagaggacacacgcttgtgcttgtttcttccaggacgcttccgccggttcgtgccctcccggtgccaagcctaccccgaggcacttccaggatgacagggcagcctgttcccatgctaccaggctatctcggggggaacatctgcagacgcactgtagatgcccttgggagcgagtagctacacaggtggtgtcaccacgcacggacagagggacaggggcagtctttgcgtgagcataggcagctgactatgccagctgggataaatcccattggggcatggagggttcatatcaaacacgtatgtttattcctacaaacccttccattcagaggcaattcccttccgctttcttccgctcacttctgagtcagaccagagctccctttggactcaacccggctccggctgtaccaggcctcaatccaccaacgtttaagcccagtgaaccaatgtttgacacacgacgtcatataatgcaattgtgctaccagcaagggcacgcagc

SEQ ID NO: 692564 - DNA, 337 bp, Homo sapiens
ctcgtgctcgcactcacatcctgccttggtttatacttgagggacgagactggctggatcagcgtgctcgaggtctcttaccgtggtctatgccctttaatactgggctgatactggctaatgagctggacaggtgcaatggcaatgactgtgtgggaataacgcgactgactgtggccctgcgccatcatgtgagtgttatagccatatgctgagatctgctgtgcttgccaatcgcgtagaaggagctataccagtgcgactggcgcctgaggatcgaagatacattattatgcatcgcctagtctttaggattcctgataggcgaggactattc

SEQ ID NO: 692565 - DNA, 2683 bp, Homo sapiens
agcggggtgtgggcgccgtacgtgcgcgcgcgcggcggccagaaagcggcgctgggaccctgaggcggccgtggttaggcggctccccggcggctcctccgcggcggtgacggcgaccgcactccccgcttcccgctccccgcgctcctccgcccgggtccgccagccgaggccgctcccgagcgtcggaagatgccggccgtgtccaagggggacgggatgcggggcctggcggtcttcatctcggatatccgcaactgtaaaagtaaagaagcagaaataaaaaggataaacaaggaactggcaaatatcagatcaaaatttaaaggtgatcaaactgctgagactgctgcagtgctacccacccccagaccctgcagtgcgaggccgcctgactgagtgcctggagaccatcctgaacaaagcccaagaaccgcccaagtcgaagaaggtccagcactccaacgcgaagaatgccgtgcttttcgaggccatcagcttaatcattcaccatgacagtgagccgaacctgctcgtccgtgcctgcaaccagttgggccagtttctgcagcaccgcgagaccaacctgcgctacctggccctggagagcatgtgcacgctggccagctctgagttctcccatgaggctgtcaagacgcacatcgagacggtcatcaacgccctgaagactgagcgggacgtgagcgtgcggcagcgggccgtggacctcctctacgccatgtgcgaccgcagcaacgccccacagatcgtggccgagatgctgagctatctggagacagctgactactccatccgagaagagattgtgctgaaggtcgccatcctggctgagaagtacgcggtggactacacctggtatgtggataccatcttgaacttgatccgaattgctggtgattacgtgagtgaagaggtgtggtaccgagtcattcagatcgtcatcaaccgggacgacgtgcagggctacgcggccaagactgtgttcgaggctcttcaggctcccgcgtgccacgagaacctggtcaaagtgggcggctacatcctgggggagtttggaaacttgatagctggagacccgagatccagcccgctgatccagttccacctgctgcactccaagttccacctgtgcagcgtccccacccgcgcgctgctcctgtccacctacatcaagttcgtgaacctcttcccggaggtgaagcccaccatccaggacgtgctgcgcagcgacagccagctcaggaacgcagacgtggagctgcagcagcgtgctgtggagtacctgcggctcagcaccgtggccagcaccgacattctggcgaccgtgctggaggagatgcccccattcccggagcgggagtcctccatcttggcaaagctcaagaagaagaagggccccagcacggtgacagacctggaggacaccaagcgggacaggagtgtggacgtgaacgggggtcctgagcctgccccagccagtaccagcgccgtgtctacgccttctccgtcggcagacctgctgggtctcggggctgccccccctgcccccgcgggccccccaccctcctccggcggcagcgggctgctcgtggacgtgttctcagactcggcctctgtggtcgcgcctctcgctcctggctccgaagacaactttgccaggtttgtttgtaaaaacaatggtgtgttgtttgaaaaccagctgcttcaaattggacttaagtctgaatttcggcagaatttaggtcggatgtttatcttttatggtaataagacctccacgcagttcctaaactttaccccaacactaatctgttcagacgaccttcagcctaacctgaacctgcagaccaagcccgtggacccgaccgtggaggggggcgcgcaggtgcagcaggtggtcaacatagagtgcgtgtccgacttcacggaggcgccagtcctcaacattcagttcaggtatgggggcaccttccagaacgtgtctgtgcagctgcccatcactctcaacaaattcttccagccgacagaaatggcttctcaggatttctttcaacgttggaagcagttgagcaatccacagcaggaagtgcagaacatcttcaaagcaaagcacccaatggacacagaagtcaccaaagccaagatcattggatttggttctgcacttcttgaagaagttgatcctaatcctgcgaatttcgtgggagctggaatcatccacacgaaaaccacccagattggatgcctgctgcgcttggagccgaacctgcaagcccagatgtaccggctcacgctgcgcacaagtaaggaagccgtttctcagagattatgtgaattgctctcagcgcagttttagtcctgaggatggaagaccaggctcgtgtgtcttgtgttgtcttcgtctgtgccgtttgtcttcgtggctatcctgcagatgagcaccgtgtccagtgccacagcacaaggcgcctccccgccccaccgccccacacctctcccctttgggctggacgggaacacacgtgtgtggctcaggaggaaaagctcagcctggactgtggcagccacggcagaaggtggatcttgggatcaatttttataaaaatcgagacagttctgtggttaaatctacaaattaaagggaaattagaagttggcgtga

SEQ ID NO: 692566 - DNA, 245 bp, Homo sapiens
caatttttgcaaaggccctgccggatggttccataactgtaaagtttaattgctatcccttacagaaatttatcggtcagtttaaaaaaggactgatggcttttccaaacaaatgaacccccgtagctgacaaagaaccggattgtaaaggtttgtagttagggcttatttttgcatgttgatgttgactagctaataaactgttaatgttaaccctgcgaattaaatggttttttttttttcca

SEQ ID NO: 692567 - DNA, 3222 bp, Homo sapiens
agcggggtgtgggcgccgtacgtgcgcgcgcgcggcggccagaaagcggcgctgggaccctgaggcggccgtggttaggcggctccccggcggctcctccgcggcggtgacggcgaccgcactccccgcttcccgctccccgcgctcctccgcccgggtccgccagccgaggccgctcccgagcgtcggaagatgccggccgtgtccaagggggacgggatgcggggcctggcggtcttcatctcggatatccgcaactgtaaaagtaaagaagcagaaataaaaaggataaacaaggaactggcaaatatcagatcaaaatttaaaggtgacaaggctcttgatggctatagtaaaaaaaagtacgtctgcaagttgctcttcatctttctccttggtcatgacattgactttggacacatggaggctgtgaacctgctgagttcaaacagatacacggaaaagcagatcggctaccttttcatctctgtgttggtgaactcaaacagtgagctgatccgcctgatcaacaacgccatcaagaatgacctggccagccgcaaccccaccttcatgggcctggccctgcactgcatcgccagcgtgggcagccgggagatggccgaggccttcgccggggagatccctaaggtcctcgtagccggagacactatggacagcgtgaagcagagcgcggccctgtgcttgctgcgcctgtacaggacgtcccccgatcttgtccccatgggcgactggacatcccgagtggtgcacctgctcaatgaccagcacttgggtgtggtaactgcagccacaagtctgatcaccactttagcacagaagaacccagaagagtttaaaacctccgtgtctctggctgtctctaggctaagcagaatcgtgacgtctgcatccacagatctccaggattacacttactattttgtcccggctccctggctgtctgtcaaactgctgagactgctgcagtgctacccacccccagaccctgcagtgcgaggccgcctgactgagtgcctggagaccatcctgaacaaagcccaagaaccgcccaagtcgaagaaggtccagcactccaacgcgaagaatgccgtgcttttcgaggccatcagcttaatcattcaccatgacagtgagccgaacctgctcgtccgtgcctgcaaccagttgggccagtttctgcagcaccgcgagaccaacctgcgctacctggccctggagagcatgtgcacgctggccagctctgagttctcccatgaggctgtcaagacgcacatcgagacggtcatcaacgccctgaagactgagcgggacgtgagcgtgcggcagcgggccgtggacctcctctacgccatgtgcgaccgcagcaacgccccacagatcgtggccgagatgctgagctatctggagacagctgactactccatccgagaagagattgtgctgaaggtcgccatcctggctgagaagtacgcggtggactacacctggtatgtggataccatcttgaacttgatccgaattgctggtgattacgtgagtgaagaggtgtggtaccgagtcattcagatcgtcatcaaccgggacgacgtgcagggctacgcggccaagactgtgttcgaggctcttcaggctcccgcgtgccacgagaacctggtcaaagtgggcggctacatcctgggggagtttggaaacttgatagctggagacccgagatccagcccgctgatccagttccacctgctgcactccaagttccacctgtgcagcgtccccacccgcgcgctgctcctgtccacctacatcaagttcgtgaacctcttcccggaggtgaagcccaccatccaggacgtgctgcgcagcgacagccagctcaggaacgcagacgtggagctgcagcagcgtgctgtggagtacctgcggctcagcaccgtggccagcaccgacattctggcgaccgtgctggaggagatgcccccattcccggagcgggagtcctccatcttggcaaagctcaagaagaagaagggccccagcacggtgacagacctggaggacaccaagcgggacaggagtgtggacgtgaacgggggtcctgagcctgccccagccagtaccagcgccgtgtctacgccttctccgtcggcagacctgctgggtctcggggctgccccccctgcccccgcgggccccccaccctcctccggcggcagcgggctgctcgtggacgtgttctcagactcggcctctgtggtcgcgcctctcgctcctggctccgaagacaactttgccaggtttgtttgtaaaaacaatggtgtgttgtttgaaaaccagctgcttcaaattggacttaagtctgaatttcggcagaatttaggtcggatgtttatcttttatggtaataagacctccacgcagttcctaaactttaccccaacactaatctgttcagacgaccttcagcctaacctgaacctgcagaccaagcccgtggacccgaccgtggaggggggcgcgcaggtgcagcaggtggtcaacatagagtgcgtgtccgacttcacggaggcgccagtcctcaacattcagttcaggtatgggggcaccttccagaacgtgtctgtgcagctgcccatcactctcaacaaattcttccagccgacagaaatggcttctcaggatttctttcaacgttggaagcagttgagcaatccacagcaggaagtgcagaacatcttcaaagcaaagcacccaatggacacagaagtcaccaaagccaagatcattggatttggttctgcacttcttgaagaagttgatcctaatcctgcgaatttcgtgggagctggaatcatccacacgaaaaccacccagattggatgcctgctgcgcttggagccgaacctgcaagcccagatgtaccggctcacgctgcgcacaagtaaggaagccgtttctcagagattatgtgaattgctctcagcgcagttttagtcctgaggatggaagaccaggctcgtgtgtcttgtgttgtcttcgtctgtgccgtttgtcttcgtggctatcctgtggctcaggaggaaaagctcagcctggactgtggcagccacggcagaaggtggatcttgggatcaatttttataaaaatcgagacagttctgtggttaaatctacaaattaaagggaaattagaagttggcgtga

SEQ ID NO: 692568 - DNA, 164 bp, Homo sapiens
gtgataaggcggttgagagtataaagcgttgagaagtataaagcgtgagaagtataaagcgttgaggaagtataaagcgttgaggaagtataaagcgttgaggaagtataaagcgttgagaagtataaagcgttgagaagtataaagcgttgggtaccgagctc

SEQ ID NO: 692569 - DNA, 141 bp, Homo sapiens
tagtatatttttaaattggttctgacatagtatattgtttgtatacccgcacaaatgttactagtcattaaactaatgatcctacttttcttacttctcacaaactagatttctagtgacttttttctgggtaccgatgct

SEQ ID NO: 692570 - DNA, 3355 bp, Homo sapiens
agcggggtgtgggcgccgtacgtgcgcgcgcgcggcggccagaaagcggcgctgggaccctgaggcggccgtggttaggcggctccccggcggctcctccgcggcggtgacggcgaccgcactccccgcttcccgctccccgcgctcctccgcccgggtccgccagccgaggccgctcccgagcgtcggaagatgccggccgtgtccaagggggacgggatgcggggcctggcggtcttcatctcggatatccgcaactgtaaaagtaaagaagcagaaataaaaaggataaacaaggaactggcaaatatcagatcaaaatttaaaggtgacaaggctcttgatggctatagtaaaaaaaagtacgtctgcaagttgctcttcatctttctccttggtcatgacattgactttggacacatggaggctgtgaacctgctgagttcaaacagatacacggaaaagcagatcggctaccttttcatctctgtgttggtgaactcaaacagtgagctgatccgcctgatcaacaacgccatcaagaatgacctggccagccgcaaccccaccttcatgggcctggccctgcactgcatcgccagcgtgggcagccgggagatggccgaggccttcgccggggagatccctaaggtcctcgtagccggagacactatggacagcgtgaagcagagcgcggccctgtgcttgctgcgcctgtacaggacgtcccccgatcttgtccccatgggcgactggacatcccgagtggtgcacctgctcaatgaccagcacttgggtgtggtaactgcagccacaagtctgatcaccactttagcacagaagaacccagaagagtttaaaacctccgtgtctctggctgtctctaggctaagcagaatcgtgacgtctgcatccacagatctccaggattacacttactattttgtcccggctccctggctgtctgtcaaactgctgagactgctgcagtgctacccacccccagaccctgcagtgcgaggccgcctgactgagtgcctggagaccatcctgaacaaagcccaagaaccgcccaagtcgaagaaggtccagcactccaacgcgaagaatgccgtgcttttcgaggccatcagcttaatcattcaccatgacagtgagccgaacctgctcgtccgtgcctgcaaccagttgggccagtttctgcagcaccgcgagaccaacctgcgctacctggccctggagagcatgtgcacgctggccagctctgagttctcccatgaggctgtcaagacgcacatcgagacggtcatcaacgccctgaagactgagcgggacgtgagcgtgcggcagcgggccgtggacctcctctacgccatgtgcgaccgcagcaacgccccacagatcgtggccgagatgctgagctatctggagacagctgactactccatccgagaagagattgtgctgaaggtcgccatcctggctgagaagtacgcggtggactacacctggtatgtggataccatcttgaacttgatccgaattgctggtgattacgtgagtgaagaggtgtggtaccgagtcattcagatcgtcatcaaccgggacgacgtgcagggctacgcggccaagactgtgttcgaggctcttcaggctcccgcgtgccacgagaacctggtcaaagtgggcggctacatcctgggggagtttggaaacttgatagctggagacccgagatccagcccgctgatccagttccacctgctgcactccaagttccacctgtgcagcgtccccacccgcgcgctgctcctgtccacctacatcaagttcgtgaacctcttcccggaggtgaagcccaccatccaggacgtgctgcgcagcgacagccagctcaggaacgcagacgtggagctgcagcagcgtgctgtggagtacctgcggctcagcaccgtggccagcaccgacattctggcgaccgtgctggaggagatgcccccattcccggagcgggagtcctccatcttggcaaagctcaagaagaagaagggccccagcacggtgacagacctggaggacaccaagcgggacaggagtgtggacgtgaacgggggtcctgagcctgccccagccagtaccagcgccgtgtctacgccttctccgtcggcagacctgctgggtctcggggctgccccccctgcccccgcgggccccccaccctcctccggcggcagcgggctgctcgtggacgtgttctcagactcggcctctgtggtcgcgcctctcgctcctggctccgaagacaactttgccaggtttgtttgtaaaaacaatggtgtgttgtttgaaaaccagctgcttcaaattggacttaagtctgaatttcggcagaatttaggtcggatgtttatcttttatggtaataagacctccacgcagttcctaaactttaccccaacactaatctgttcagacgaccttcagcctaacctgaacctgcagaccaagcccgtggacccgaccgtggaggggggcgcgcaggtgcagcaggtggtcaacatagagtgcgtgtccgacttcacggaggcgccagtcctcaacattcagttcaggtatgggggcaccttccagaacgtgtctgtgcagctgcccatcactctcaacaaattcttccagccgacagaaatggcttctcaggatttctttcaacgttggaagcagttgagcaatccacagcaggaagtgcagaacatcttcaaagcaaagcacccaatggacacagaagtcaccaaagccaagatcattggatttggttctgcacttcttgaagaagttgatcctaatcctgcgaatttcgtgggagctggaatcatccacacgaaaaccacccagattggatgcctgctgcgcttggagccgaacctgcaggcccaggtcaggccctcaggaaatggtggaacacactggagttgctctttattctggcacaatgtacgtggtgagatgcgtagctctttagtgcagttcagtcagttttgacagatgttgtttaaccaccaccctgtcaatacatggttgcctcccagcctccccgcagctggccaccgtggagcatcatccctagtgcagttcagtcagttgtgacagatgttgtgtgcctgtttaaccaccaccctgtcaatacatggttgcatcccagcctccccacagctggacaccatggagcatcgtcccaccatggagcagcctggccctgggcggtggctctcccagctgtatctctctgtcaccgcgttgttccttctcaccacgtcccgttctggcgacggacacctgtctccgtttcacttgggta

SEQ ID NO: 692571 - DNA, 738 bp, Homo sapiens
gttccaccaggaaatgccttggccagcatcccagagccctgaagggaagataaaaatgtgactatagcatgctcagcacctttcacagaccagcacttgggacctggcttcccaggccttaggccatttagttcccatgagaccctatgaggtcatctccctgcgtttaccaaggaccaaccggctccgagggcttcggtggacctcctcgagacacagctagtcggagaccagtcacccctgtgagttggaggggatggacattcacctggtaaaccagttcctccctgaagtctggcacggtgataaagtccccggaggggccccaaccggtggcataggaggagatggttctaccccagaaaggctggaacccgggccttcacccgtttctcccccgtacctatctggaatgttcgcaccccgtaagtctcctcattttcatactggggtgaccaggagagacatgtccttgaccacaccctgagaccccccgaggattgggatctggagctcaccccaggaatcccccaccccttggagacttgtggatgtggaggacctgggttcccctggtggaaaaggttttagactttaaaatttgacataagagtggagaatagggcgtggtggctcacgcccgtggtccccgccctttgggaggctgaggcgggcggatcacgagatccggagtttgaggcccgcgtggcccatatggtgaaaccctgtctctactga

SEQ ID NO: 692572 - DNA, 2872 bp, Homo sapiens
  misc_feature (2843)..(2843): n is a, c, g, or t
agcggggtgtgggcgccgtacgtgcgcgcgcgcggcggccagaaagcggcgctgggaccctgaggcggccgtggttaggcggctccccggcggctcctccgcggcggtgacggcgaccgcactccccgcttcccgctccccgcgctcctccgcccgggtccgccagccgaggccgctcccgagcgtcggaagatgccggccgtgtccaagggggacgggatgcggggcctggcggtcttcatctcggatatccgcaactgtaaaagtaaagaagcagaaataaaaaggataaacaaggaactggcaaatatcagatcaaaatttaaaggtgacaaggctcttgatggctatagtaaaaaaaagtacgtctgcaagttgctcttcatctttctccttggtcatgacattgactttggacacatggaggctgtgaacctgctgagttcaaacagatacacggaaaagcagatcggctaccttttcatctctgtgttggtgaactcaaacagtgagctgatccgcctgatcaacaacgccatcaagaatgacctggccagccgcaaccccaccttcatgggcctggccctgcactgcatcgccagcgtgggcagccgggagatggccgaggccttcgccggggagatccctaaggtcctcgtagccggagacactatggacagcgtgaagcagagcgcggccctgtgcttgctgcgcctgtacaggacgtcccccgatcttgtccccatgggcgactggacatcccgagtggtgcacctgctcaatgaccagcacttgggtgtggtaactgcagccacaagtctgatcaccactttagcacagaagaacccagaagagtttaaaacctccgtgtctctggctgtctctaggctaagcagaatcgtgacgtctgcatccacagatctccaggattacacttactattttgtcccggctccctggctgtctgtcaaactgctgagactgctgcagtgctacccacccccagaccctgcagtgcgaggccgcctgactgagtgcctggagaccatcctgaacaaagcccaagaaccgcccaagtcgaagaaggtccagcactccaacgcgaagaatgccgtgcttttcgaggccatcagcttaatcattcaccatgacagtgagccgaacctgctcgtccgtgcctgcaaccagttgggccagtttctgcagcaccgcgagaccaacctgcgctacctggccctggagagcatgtgcacgctggccagctctgagttctcccatgaggctgtcaagacgcacatcgagacggtcatcaacgccctgaagactgagcgggacgtgagcgtgcggcagcgggccgtggacctcctctacgccatgtgcgaccgcagcaacgccccacagatcgtggccgagatgctgagctatctggagacagctgactactccatccgagaagagattgtgctgaaggtcgccatcctggctgagaagtacgcggtggactacacctggtatgtggataccatcttgaacttgatccgaattgctggtgattacgtgagtgaagaggtgtggtaccgagtcattcagatcgtcatcaaccgggacgacgtgcagggctacgcggccaagactgtgttcgaggctcttcaggctcccgcgtgccacgagaacctggtcaaagtgggcggctacatcctgggggagtttggaaacttgatagctggagacccgagatccagcccgctgatccagttccacctgctgcactccaagttccacctgtgcagcgtccccacccgcgcgctgctcctgtccacctacatcaagttcgtgaacctcttcccggaggtgaagcccaccatccaggacgtgctgcgcagcgacagccagctcaggaacgcagacgtggagctgcagcagcgtgctgtggagtacctgcggctcagcaccgtggccagcaccgacattctggcgaccgtgctggaggagatgcccccattcccggagcgggagtcctccatcttggcaaagctcaagaagaagaagggccccagcacggtgacagacctggaggacaccaagcgggacaggagtgtggacgtgaacgggggtcctgagcctgccccagccagtaccagcgccgtgtctacgccttctccgtcggcagacctgctgggtctcggggctgccccccctgcccccgcgggccccccaccctcctccggcggcagcgggctgctcgtggacgtgttctcagactcggcctctgtggtcgcgcctctcgctcctggctccgaagacaactttgccaggtttgtttgtaaaaacaatggtgtgttgtttgaaaaccagctgcttcaaattggacttaagtctgaatttcggcagaatttaggtcggatgtttatcttttatggtaataagacctccacgcagttcctaaactttaccccaacactaatctgttcagacgaccttcagcctaacctgaacctgcagaccaagcccgtggacccgaccgtggaggggggcgcgcaggtgcagcaggtggtcaacatagagtgcgtgtccgacttcacggaggcgccagtcctcaacattcagttcaggtaagagccgcctgtgcgccccgggccaaggggtgtgtgggcgcctgagctgtgtgcctgggctccatgactgtgcctccgtgtccttcctgaggggacccggggcgtgcgggtgctcacggtgcatggatgcggcctgagctattgctgcccccggctctgcagagcgcaggaaacaaggggaggcggagccctgggctccgggacggcaggtggcagctcccacatggngccttgctaggatctttctgggcaccatg

SEQ ID NO: 692573 - DNA, 465 bp, Homo sapiens
  misc_feature (9)..(9): n is a, c, g, or t
gggaataanggggaaagttaatgtttaaagggtaacagggtttccagtttgggaaagatgaaaacagttcctagagatggatggtgcccaaaggttccccaatagtgtgaatgtaccctaatgcccactgaactgtacgttaatcatggcctaaaatggtcaatgttggctgggtgcggtggctcacacctgtaatcccagcactttgggaggcagaggcggggagatcacatgaggtcaggagttcgaggccagccttgccaacatggcaaaaccccgtctccactaaaaatacaaaaattagccaggtgtggtggtgcacatttgtgctcctagctatttgggaggctgagacacaagaatcgtgtaaacccgggagccagagtttgcagtgagccgagattgtagcactgcactccagcctgggtaacagagtaagactccatctcaaaaaataaaaaaaaa

SEQ ID NO: 692574 - DNA, 208 bp, Homo sapiens
cggcacgaggcatttgtaatattaattgggcctctgcatagccaaatggtgaaattattgctacaatacaaacaggcccaaaagagaaaaacagcccaaaatagcacagatattccaaatcaggacagaggtaatttctctatacataaaaaaccaccaattgaatgccttcaccaactcgcttgagttaaatgagttaaaaaaaaaa

SEQ ID NO: 692575 - DNA, 960 bp, Homo sapiens
tcgtgtcttctcgtgcttttcttttggtgtctctcttcttgctcgtcgcgttctgctctgctgttgtccgttttttatattatatgttggtgagtcgggtcagattacatgctcatgtggatcctcttcgtctgctcgctgcttattttttattttctctcatcgttctctctatcgccgtttactctcgtgtgggctcgcagtgcgtgttctccgtggcccgatgtcggcgttattgtcgcctctgtgctgttcgctagtggttgcagctctggtttatttttttcttggcgtcttccgtgttgctgcacacgtgatggcttatattgcatggttttcctgctatcttgatctgttggttttctaagccggctgtactttcttgggctgcttgtttccttgttgtggcagccgatgttcagatttttcggtggtcgttgcctcgtggggtcttggttgccactggggttacgcttctctgcctttggtatccgtcctggctttggttcgtgcctctgacagcaccgtgtgctggttgctgatgctctctgttagtgtgtcagctcgtcgacttttgtagtcatgagttgcctgccgtctccgaagtgtgttcatttgtctgcagaggcactgcttcgtggctgtctggccagtgttctgtctgccctatgctctgtgaacgtagcgatgaccgcgggctgcctgacctgtcgtctccatagttagatattccttgtagcagagcatccatacgctacatgtctgccatggaacgcttccgctacatggacaatgagagccacaatctgaggaccgcgacatctggccttggagacgctgcacctagatatatgctatcactcaagtctctatgttatgaggtggacaagcaagattgtctgcaaatgtttgcatctactggcgatcgatggagccatgacaatttgggatttcaagacc

SEQ ID NO: 692576 - DNA, 2375 bp, Homo sapiens
agcggggtgtgggcgccgtacgtgcgcgcgcgcggcggccagaaagcggcgctgggaccctgaggcggccgtggttaggcggctccccggcggctcctccgcggcggtgacggcgaccgcactccccgcttcccgctccccgcgctcctccgcccgggtccgccagccgaggccgctcccgagcgtcggaagatgccggccgtgtccaagggggacgggatgcggggcctggcggtcttcatctcggatatccgcaactgtaaaagtaaagaagcagaaataaaaaggataaacaaggaactggcaaatatcagatcaaaatttaaaggtgacaaggctcttgatggctatagtaaaaaaaagtacgtctgcaagttgctcttcatctttctccttggtcatgacattgactttggacacatggaggctgtgaacctgctgagttcaaacagatacacggaaaagcagatcggctaccttttcatctctgtgttggtgaactcaaacagtgagctgatccgcctgatcaacaacgccatcaagaatgacctggccagccgcaaccccaccttcatgggcctggccctgcactgcatcgccagcgtgggcagccgggagatggccgaggccttcgccggggagatccctaaggtcctcgtagccggagacactatggacagcgtgaagcagagcgcggccctgtgcttgctgcgcctgtacaggacgtcccccgatcttgtccccatgggcgactggacatcccgagtggtgcacctgctcaatgaccagcacttgggtgtggtaactgcagccacaagtctgatcaccactttagcacagaagaacccagaagagtttaaaacctccgtgtctctggctgtctctaggctaagcagaatcgtgacgtctgcatccacagatctccaggattacacttactattttgtcccggctccctggctgtctgtcaaactgctgagactgctgcagtgctacccacccccagaccctgcagtgcgaggccgcctgactgagtgcctggagaccatcctgaacaaagcccaagaaccgcccaagtcgaagaaggtccagcactccaacgcgaagaatgccgtgcttttcgaggccatcagcttaatcattcaccatgacagtgagccgaacctgctcgtccgtgcctgcaaccagttgggccagtttctgcagcaccgcgagaccaacctgcgctacctggccctggagagcatgtgcacgctggccagctctgagttctcccatgaggctgtcaagacgcacatcgagacggtcatcaacgccctgaagactgagcgggacgtgagcgtgcggcagcgggccgtggacctcctctacgccatgtgcgaccgcagcaacgccccacagatcgtggccgagatgctgagctatctggagacagctgactactccatccgagaagagattgtgctgaaggtcgccatcctggctgagaagtacgcggtggactacacctggtatgtggataccatcttgaacttgatccgaattgctggtgattacgtgagtgaagaggtgtggtaccgagtcattcagatcgtcatcaaccgggacgacgtgcagggctacgcggccaagactgtgttcgaggctcttcaggctcccgcgtgccacgagaacctggtcaaagtgggcggctacatcctgggggagtttggaaacttgatagctggagacccgagatccagcccgctgatccagttccacctgctgcactccaagttccacctgtgcagcgtccccacccgcgcgctgctcctgtccacctacatcaagttcgtgaacctcttcccggaggtgaagcccaccatccaggacgtgctgcgcagcgacagccagctcaggaacgcagacgtggagctgcagcagcgtgctgtggagtacctgcggctcagcaccgtggccagcaccgacattctggcgaccgtgctggaggagatgcccccattcccggagcgggagtcctccatcttggcaaagctcaagaagaagaagggccccagcacggtgacagacctggaggacaccaagcgggacaggagtgtggacgtgaacgggggtcctgagcctgccccagccagtaccagcgccgtgtctacgccttctccgtcggcagacctgctggtcgtgggggggggggccgaaacgatgataagggagcaaaggaggaaggtagaggactcaaaaacagaataaggggaggcgaaagacaaagaaaaaagagaaaaaccctaaacaaaataagaaaaaataggagaagaataaaaaaaacgcaacaaaaaagaagcaaagaaaagaggaacaaaaaaaaaacgaaaaaa

SEQ ID NO: 692577 - DNA, 336 bp, Homo sapiens
atcaccactataaggtctcgtgggatgtgattatatcactatctcctaaagacgaggctaccatggctcacgagatgccctctaggtgacacaagctcattcgtaccaactgcccccaacctcctggaaacatcgttagcacaggagctaatgctttcctttcttaaacatgttttgggcatgaccacactctggaagtggtgaactgttacacatttcgtgtgtgtgtacataacatcaaaaactactgtgtgaaacttgagaatgtctgattaacgatttcaatgtatatctaagaactaactcaaatcgttgaccagcactttcccagtatca

SEQ ID NO: 692578 - DNA, 2131 bp, Homo sapiens
agcggggtgtgggcgccgtacgtgcgcgcgcgcggcggccagaaagcggcgctgggaccctgaggcggccgtggttaggcggctccccggcggctcctccgcggcggtgacggcgaccgcactccccgcttcccgctccccgcgctcctccgcccgggtccgccagccgaggccgctcccgagcgtcggaagatgccggccgtgtccaagggggacgggatgcggggcctggcggtcttcatctcggatatccgcaactgtaaaagtaaagaagcagaaataaaaaggataaacaaggaactggcaaatatcagatcaaaatttaaaggtgacaaggctcttgatggctatagtaaaaaaaagtacgtctgcaagttgctcttcatctttctccttggtcatgacattgactttggacacatggaggctgtgaacctgctgagttcaaacagatacacggaaaagcagatcggctaccttttcatctctgtgttggtgaactcaaacagtgagctgatccgcctgatcaacaacgccatcaagaatgacctggccagccgcaaccccaccttcatgggcctggccctgcactgcatcgccagcgtgggcagccgggagatggccgaggccttcgccggggagatccctaaggtcctcgtagccggagacactatggacagcgtgaagcagagcgcggccctgtgcttgctgcgcctgtacaggacgtcccccgatcttgtccccatgggcgactggacatcccgagtggtgcacctgctcaatgaccagcacttgggtgtggtaactgcagccacaagtctgatcaccactttagcacagaagaacccagaagagtttaaaacctccgtgtctctggctgtctctaggctaagcagaatcgtgacgtctgcatccacagatctccaggattacacttactattttgtcccggctccctggctgtctgtcaaactgctgagactgctgcagtgctacccacccccagaccctgcagtgcgaggccgcctgactgagtgcctggagaccatcctgaacaaagcccaagaaccgcccaagtcgaagaaggtccagcactccaacgcgaagaatgccgtgcttttcgaggccatcagcttaatcattcaccatgacagtgagccgaacctgctcgtccgtgcctgcaaccagttgggccagtttctgcagcaccgcgagaccaacctgcgctacctggccctggagagcatgtgcacgctggccagctctgagttctcccatgaggctgtcaagacgcacatcgagacggtcatcaacgccctgaagactgagcgggacgtgagcgtgcggcagcgggccgtggacctcctctacgccatgtgcgaccgcagcaacgccccacagatcgtggccgagatgctgagctatctggagacagctgactactccatccgagaagagattgtgctgaaggtcgccatcctggctgagaagtacgcggtggactacacctggtatgtggataccatcttgaacttgatccgaattgctggtgattacgtgagtgaagaggtgtggtaccgagtcattcagatcgtcatcaaccgggacgacgtgcagggctacgcggccaagactgtgttcgaggctcttcaggctcccgcgtgccacgagaacctggtcaaagtgggcggctacatcctgggggagtttggaaacttgatagctggagacccgagatccagcccgctgatccagttccacctgctgcacaagtaaggaagccgtttctcagagattatgtgaattgctctcagcgcagttttagtcctgaggatggaagaccaggctcgtgtgtcttgtgttgtcttcgtctgtgccgtttgtcttcgtggctatcctgcagatgagcaccgtgtccagtgccacagcacaaggcgcctccccgccccaccgccccacacctctcccctttgggctggacgggaacacacgtgtgtggctcaggaggaaaagctcagcctggactgtggcagccacggcagaaggtggatcttgggatcaatttttataaaaatcgagacagttctgtggttaaatctacaaattaaagggaaattagaagttggcgtga

SEQ ID NO: 692579 - DNA, 1059 bp, Homo sapiens
cttgtgttttctgcaggtggctttgagtgacacatatactgtcccttttcccctaggtttgtttgtaaaaacaatggtgtgttgtttgaaaaccagctgcttcaaattggacttaagtctgaatttcggcagaatttaggtcggatgtttatcttttatggtaataagacctccacgcagttcctaaactttaccccaacactaatctgttcagacgaccttcagcctaacctgaacctgcagaccaagcccgtggacccgaccgtggaggggggcgcgcaggtgcagcaggtggtcaacatagagtgcgtgtccgacttcacggaggcgccagtcctcaacattcagttcaggtatgggggcaccttccagaacgtgtctgtgcagctgcccatcactctcaacaaattcttccagccgacagaaatggcttctcaggatttctttcaacgttggaagcagttgagcaatccacagcaggaagtgcagaacatcttcaaagcaaagcacccaatggacacagaagtcaccaaagccaagatcattggatttggttctgcacttcttgaagaagttgatcctaatcctgcgaatttcgtgggagctggaatcatccacacgaaaaccacccagattggatgcctgctgcgcttggagccgaacctgcaagcccagatgtaccggctcacgctgcgcacaagtaaggaagccgtttctcagagattatgtgaattgctctcagcgcagttttagtcctgaggatggaagaccaggctcgtgtgtcttgtgttgtcttcgtctgtgccgtttgtcttcgtggctatcctgcagatgagcaccgtgtccagtgccacagcacaaggcgcctccccgccccaccgccccacacctctcccctttgggctggacgggaacacacgtgtgtggctcaggaggaaaagctcagcctggactgtggcagccacggcagaaggtggatcttgggatcaatttttataaaaatcgagacagttctgtggttaaatctacaaattaaagggaaattagaagttggcgtga

SEQ ID NO: 692580 - DNA, 2561 bp, Homo sapiens
agcggggtgtgggcgccgtacgtgcgcgcgcgcggcggccagaaagcggcgctgggaccctgaggcggccgtggttaggcggctccccggcggctcctccgcggcggtgacggcgaccgcactccccgcttcccgctccccgcgctcctccgcccgggtccgccagccgaggccgctcccgagcgtcggaagatgccggccgtgtccaagggggacgggatgcggggcctggcggtcttcatctcggatatccgcaactgtaaaagtaaagaagcagaaataaaaaggataaacaaggaactggcaaatatcagatcaaaatttaaaggtgacaaggctcttgatggctatagtaaaaaaaagtacgtctgcaagttgctcttcatctttctccttggtcatgacattgactttggacacatggaggctgtgaacctgctgagttcaaacagatacacggaaaagcagatcggctaccttttcatctctgtgttggtgaactcaaacagtgagctgatccgcctgatcaacaacgccatcaagaatgacctggccagccgcaaccccaccttcatgggcctggccctgcactgcatcgccagcgtgggcagccgggagatggccgaggccttcgccggggagatccctaaggtcctcgtagccggagacactatggacagcgtgaagcagagcgcggccctgtgcttgctgcgcctgtacaggacgtcccccgatcttgtccccatgggcgactggacatcccgagtggtgcacctgctcaatgaccagcacttgggtgtggtaactgcagccacaagtctgatcaccactttagcacagaagaacccagaagagtttaaaacctccgtgtctctggctgtctctaggctaagcagaatcgtgacgtctgcatccacagatctccaggattacacttactattttgtcccggctccctggctgtctgtcaaactgctgagactgctgcagtgctacccacccccagaccctgcagtgcgaggccgcctgactgagtgcctggagaccatcctgaacaaagcccaagaaccgccgccccacacctctcccctttgggctggacgggaacacacgtgtgtggctcaggaggaaaagctcagcctggactgtggcagccacggcagaaggtggatcttgggatcaatttttataaaaatcgagacagttctgtggttaaatctacaaattaaagggaaattagaagttggcgtgaacgtggcgtttgtgggagtgtcactgagatggcccgtgctgccgcccaccccgcctcggagcctctgggagcagcagtgccactgtgcatggcgtgggctgagccttggtgtgtggccgtcctggtggctgcacacctggcgtcgtcctgggcccttgggaggagcacagctgaccctggttttgctgcagtcccagctggactgttttcccaggcaggattttaatctagaatttagaaacatttgtatttgtaatgacttctggcaaaagcacgtgtcctggccggatgtaactgttctcctttcccagctcctgtttgtgaagggcgtctgttatgctcctgcagtcgccgaggccttggatgtgcagccaggggaggagcgtcctgccggccccgcagggcccccaggactccagggtaaagtgtgggccggtggcgcaagactcagaggtgtgctcgtctctttcctgtcagagtgggcgtccccaggccacggtgcaggcctgagtccttccaccggccccgtccagtcgtccctggaggggctgtggaggaaggacgcctctgtgtggtcaggaagtgaaggggccattggccgcatgccatgtgccacctgcggcttgtgtctcacctgtcatctggactcagcacccaggctgcacgtctgacacctgagaggcgagagagtggggccggcctaggagccaaggctggggccttgcgctctgtccccaggatggtggccttgtttgtcctaaacacacccagcacaggttctggcttcctgacatgctgtggaggcagggagggtgggtggccacatgtgcttgagggttttcaccctggccctcagttgcctgctgtgcgggtccctggggcagctgcaggggctcacggacccatcagggtctccacagctcccctgcagtgtgtgcaccccacaatgtctgcggctcttcttccggcgtgtcgggctttgatcacagcatagccacgtcagtggcgtgcgcctctcgcacaggccattctgggtctggtggtgccaggtgccgtgacacgccgtgctgggcttgtgctgcagctgggtggtgtggccctcattctcatgttccagctgctgggcagtgctctgcctgtgtgctgcgcctgcaggctgcgtgtgctgccgtggatctcctgcatcccttgacccctcccgccatcagaggaaaggctgctccccgaggcaccgcttccctgtgcggcgctgcagaggggccctcagtgtggcactcctcgtcaaagaaaaataaaggctagaactgca

SEQ ID NO: 692581 - DNA, 362 bp, Homo sapiens
ggtatcggtctagcacataatcatatttttagttgtgtgctcgttgcgtgttgtttcctggtatgagtaacattgacttttgtctctagctcttttaaggaagaaaaagatataaagccgatcattaacagatgaagaaaggtatgatttatatttaatcgtggtcagggagccagagtatggttccctatattttgggcaggaggggcctggtagatatacacacttctggattcagataatttgtttgtgttatgtggttacctggaatcaaccacgctaatggtttcttgtagagactagtttttgatagttcgcaagcacctgcattttatgtttctcttgtggttgtcatctatggg

SEQ ID NO: 692582 - DNA, 445 bp, Homo sapiens
  misc_feature (24)..(24): n is a, c, g, or t
  misc_feature (67)..(67): n is a, c, g, or t
  misc_feature (211)..(211): n is a, c, g, or t
  misc_feature (214)..(214): n is a, c, g, or t
  misc_feature (330)..(330): n is a, c, g, or t
  misc_feature (362)..(363): n is a, c, g, or t
aacccaaacccgggctgaaccccnggaatttcaaccttgccatgatccctcagtatgagaatcctanctgttcctgtgctggacttcctaatatatagaacctgtgagataatgggtcacattggcctggatgtggtggcctcatacctgtaaatcccagcactttgggaggccgaggcaggcagatcacctgaggtcaggagttcaggancgncctggccgacatggtgaagccccgtctctactaaaaatacaaaaattagacgagcgtggtggtggacacctgtggtcccagctgcttgggaggctgaggcaggagactagctgganccagggaggtagaggttgcagtgagctgagannggccactgcactccagcctgggtgacagagtgagactccatcataaataaataaataaataaatgggtcacattaagcctat

SEQ ID NO: 692583 - DNA, 540 bp, Homo sapiens
agcggtgtcttagagaaagagcaagcactttctgaatcagtggggaaatatcaatatttgatcaaattaacactacctccttcccagtgatggtgttcactcagctatatgtctttaagaaaattaaaactatggaaaatatgtctagcatatcagaagttgtaaatgctatatctggtatccagaggctggctgtagaaaagttccttggggtcactctatctcacatttgacaggtctagcattattaaaaatgcaaagccacataattggcaaatactatgattccaaatattgagctcccattaccctcttggcacagtattctttaccgtcgcccttattgaagtcagactctaaccccaaattctagtatccaaaagatatcccaaatttcgtactaatgctatctgaacaatgtgtgtaatctgagtattctcagagcctgcgaagccgttatacgaccatttcaatacctagagatccgagagtcttgctatttgaagccagcacaccactgggtgtaatatgcttagtact

SEQ ID NO: 692584 - DNA, 670 bp, Homo sapiens
  misc_feature (442)..(442): n is a, c, g, or t
ttctcgcccacctcggtggtggtgtctgggggggcctcccaggaatgggttctcctgcccatgttgggagtgatggggcaaagtcatagctgtcacctcaaggggcccctcctagtccctcaggttgcagcacaagccctggtgtccaatggttgtcgtggttccatcatcaacatcagtagcctcgtaggaaaggtgggacacgtggggcaaacaaactatgcagcatccaaggctggagtgattgggcttacccagaccgcagcccgggagcttggacaacatgggatccgctgtaactctgtcctcccagggttcattgcaacccccatgacacagaaagggccccagaaagtggtggccaagattacttaaatgatcccgatgggccccttgggggaccctgaggatgtggcaaatgtggtcgcattcttggcatctnaagatagtggatcctcccaggggcctcagtggaaggcccggggggtcttttcatggaactgccccaaggaccctgggctttgctcccccccccccccctttgccgggcctcctgctgatgggggctttaagttcccaggatacaaaagggggggcagggtatggttcaggaatgctgaatatgggaagcaggggggcttgtggccctaataaattccaggtcctctta

SEQ ID NO: 692585 - DNA, 691 bp, Homo sapiens
  misc_feature (2)..(2): n is a, c, g, or t
  misc_feature (65)..(65): n is a, c, g, or t
  misc_feature (117)..(118): n is a, c, g, or t
  misc_feature (163)..(163): n is a, c, g, or t
  misc_feature (185)..(185): n is a, c, g, or t
  misc_feature (206)..(206): n is a, c, g, or t
  misc_feature (211)..(211): n is a, c, g, or t
  misc_feature (218)..(220): n is a, c, g, or t
  misc_feature (237)..(237): n is a, c, g, or t
  misc_feature (241)..(244): n is a, c, g, or t
  misc_feature (248)..(249): n is a, c, g, or t
  misc_feature (253)..(254): n is a, c, g, or t
  misc_feature (257)..(257): n is a, c, g, or t
  misc_feature (260)..(265): n is a, c, g, or t
  misc_feature (268)..(269): n is a, c, g, or t
  misc_feature (271)..(271): n is a, c, g, or t
  misc_feature (274)..(274): n is a, c, g, or t
  misc_feature (278)..(278): n is a, c, g, or t
  misc_feature (280)..(280): n is a, c, g, or t
  misc_feature (289)..(289): n is a, c, g, or t
  misc_feature (291)..(291): n is a, c, g, or t
  misc_feature (295)..(295): n is a, c, g, or t
  misc_feature (299)..(299): n is a, c, g, or t
  misc_feature (326)..(326): n is a, c, g, or t
  misc_feature (334)..(334): n is a, c, g, or t
  misc_feature (338)..(338): n is a, c, g, or t
  misc_feature (342)..(342): n is a, c, g, or t
  misc_feature (344)..(344): n is a, c, g, or t
  misc_feature (352)..(352): n is a, c, g, or t
  misc_feature (358)..(358): n is a, c, g, or t
  misc_feature (361)..(361): n is a, c, g, or t
  misc_feature (364)..(365): n is a, c, g, or t
  misc_feature (368)..(368): n is a, c, g, or t
  misc_feature (372)..(372): n is a, c, g, or t
  misc_feature (379)..(379): n is a, c, g, or t
  misc_feature (383)..(384): n is a, c, g, or t
  misc_feature (403)..(403): n is a, c, g, or t
  misc_feature (405)..(405): n is a, c, g, or t
  misc_feature (408)..(409): n is a, c, g, or t
  misc_feature (411)..(411): n is a, c, g, or t
  misc_feature (414)..(414): n is a, c, g, or t
  misc_feature (420)..(420): n is a, c, g, or t
  misc_feature (427)..(427): n is a, c, g, or t
  misc_feature (430)..(430): n is a, c, g, or t
  misc_feature (432)..(432): n is a, c, g, or t
  misc_feature (437)..(440): n is a, c, g, or t
  misc_feature (445)..(445): n is a, c, g, or t
  misc_feature (449)..(449): n is a, c, g, or t
  misc_feature (459)..(459): n is a, c, g, or t
  misc_feature (476)..(476): n is a, c, g, or t
  misc_feature (511)..(511): n is a, c, g, or t
  misc_feature (517)..(517): n is a, c, g, or t
  misc_feature (533)..(533): n is a, c, g, or t
  misc_feature (665)..(665): n is a, c, g, or t
anctcccattgcaatggttggggcaataaccctccctaatcctagctcagtgagtagagggagtnacctccctacccaggaagtccccattttggttgcaatggccaaggtcctgannatcccactctgtacttccctgctccatctccccacccatgtaaanagagttttgggctgagtttganaagctgcctctctgctttganaaggnagtaggnnntcccctaactgcaaggngaannnncttnnattnnaanttnnnnnnaannanaanaaananaaagaactnantttnaganctctggctagtaaatgccacacatatntgcaaggntgangaanantccccgcntttatnctnaannacnatanaaaaggnaaanngaaaaaaaaaagatgaggnanctnntnttngttttnttttctnatntngtttnnnnttgantcanccaatggtanatacacagatttttggnagttttgtgggaatggggaggagaaaaaccccagntccaanagaaaaaggaaggaantggggagtacaggggaggagaaggaggtgggaaacaggatcctccctccccgccgccacacacacacaagcacaggttttcgttgctaaggcactgagaacaaatccagagaactcagtgaagggtgggggntctgtatccttccagagttgtgacta

SEQ ID NO: 692586 - DNA, 273 bp, Homo sapiens
ccttaatcctaaatttattatgaaacatgcactatttatatgaaaatacatgcagtttcactgagcagatctaagatgtatctagctaagaagagctcaacatataaagatatgtgtcctccttaagattggttctctaaaagttattggcaagtcctaattcaaagattcacaactgaattttcgttgttttgggggcaggtagatcctggcttggggggacggtagagtcatggcttgctcaaggaacaaaggggtcttctaagacgtcgt

SEQ ID NO: 692587 - DNA, 220 bp, Homo sapiens
atccagttcagcacaatgtttaagtaaagaagagaagaaccttaagtggtccacagtccaagacagttatttggagaataaccttagaggggcttctggacattttttttttttttgggttaggagtgcttgcccctaatggactaagagttttaatgggtttaagggtgaaagagtttatccccggcttggaatgtttctgtgttggggataacatcag

SEQ ID NO: 692588 - DNA, 313 bp, Homo sapiens
gcagggtctctgtgtggcctcgagtgtataccggagcccgaatccgcagggatctgcacgtgaggcagccgcggagcgcaggcgcgagacgacgtatgtcgcggcgtgaagcacgagcgtgactactaggaggagggcagtccatcatgaatgagtgagccgagccagccagcgcactcgtcgccgttacgggccgctctccggcacggcgcacggcttcgctgctactgcgcggttgcctggtgccctgagcgtgcagccccgtgggtggcgatggggtcgcgcctgaggcagcggaggttctgcgtggcga

SEQ ID NO: 692589 - DNA, 737 bp, Homo sapiens
gcttgttcgcaagcgggtttgccgccagaacacaggtgtcgtgaaaactacccctaaaagccaaacatgggaaaggcaacgaagcactcatatcaacattgtcgtcattggacacgtagatttcgggcaagttccaccacttactggccatctgatctatccaatgcgggtgggccatcgaacaaaaaagaaccatttgaacacacacattttgaagcaaaggaagggctttggccttgagacatgggggacacacggggctccctttcaaagatattggccctgggggttctatgggattacaacctggaacaggcttggagcggttggaaacggttgggtaattcaaagcaatttggacattattcctaccctatggtgagcacacacttttggaagagaacccaagcaaaggctcaacttaatggttgaacttattccatctggaatgacacccccaagtggaccaacaaagtaagaacctttgtaattctcacacagaaaccgcattggaccttttatacagggagcacaccaatttcttccaagggcctggtaaccttggtggccctgagtcgccttggcaatttcgggtctgcgactggcgatgggcatgagtctatgcgggtgtgaacaactctgttggaaacagccctcggcgtatgtttcttgccaaatgcaaactgggggtcgccaagaagccccgaagacagccaatgtgccccgatttcctgagc

SEQ ID NO: 692590 - DNA, 505 bp, Homo sapiens
cgctcctggctaatgattcgaatctaggtactatcagaggactagaagcacaggcgctggatcaggatatctcagcttcaggcaagatatgacgtagtcttctaatatctgaatcatccttagcctatgtcaggataccgtgacagaatttaggaatgtgagctttacaggctgttcttaacatgtggttcaggcggtaatctgtgttcggggtgatctggcgctcggttatcatctgttagcctttgttatcccatcaattcagtgttcgtattaagcttccaagccggggacatggtaagagaatctgcttccgtacagaaccgtctttatcatctggttggagaacgctcatgagggtgtagtctagctctgggtccatcatctctgtctcctgcagcttaaatactttttggtggcagcgggtgcttagctgcttcttgttttctttcagacattcgataatctgagcgttgccatattgcacaggggaacagaaggtttt

SEQ ID NO: 692591 - DNA, 100 bp, Homo sapiens
gcggctttgcaagctgaatttggcctttccgaggcagagtcttgatacaatcatttacagccatttaggtaacagccatttagataacagccatttaggt

SEQ ID NO: 692592 - DNA, 276 bp, Homo sapiens
accttcagatacaacgcacgagcgatggctactgtacgacagtttcctgcaaggcgtgtgatcctggctcgggatggcgtcgacgctgacgccatcgacacggccatcggccaactgatgcagacctgggatttatcctgccgctacagcgccgcccattcggcgcgatgcgccagcagaaaatccacaaacgcccgcacccgatggggcacatagcggccgtggggatacagcaaggtaactggcctgcgcgaatgccacgctcgacgcattgca

SEQ ID NO: 692593 - DNA, 120 bp, Homo sapiens
catgtggtggtatagtcctagctacatgggaggctgagaccaggatggatcactttagccccggggtttacaggctgccagtgagctatcactgtgccacctcgattgcaacacggtctc

SEQ ID NO: 692594 - DNA, 214 bp, Homo sapiens
ggtcgacgggtcgatgaagtaataaatcagataggccacggcggcgtacgtaccgccatccaggtaccggtaggcgttttcttcatagtaaacgtcttgaaacttgtacaggcccaagcgtaaccaggcgatatccagcacgttaaatgccgtcatcgcgatcaatagcatcaacaccgtttgcagcttcagagttttcgcggcaaggtcgacg

SEQ ID NO: 692595 - DNA, 138 bp, Homo sapiens
cagagggtgacatcaccctgagcacagctgaggtcgggctttccaggtctgcacgggcagcgcgctgcatgatatcatctgccacaggcgaactttctgttccttccgcacctctgggctcatctgaagcgactttat

SEQ ID NO: 692596 - DNA, 309 bp, Homo sapiens
tgaccctagagaacttgataagtactctcaggctgggcctccaggaattacttaatagttaaaacgagtctcatatctacagatctctagacaattagtcaatcgccctataaagtgtacctaccagttgctaggctctagctacggctatctactcagtaatctgtgatactactgtatttatactagaactaggtaaatgggggcagtggtctgtacccgtgtcttcattctattgatggatctaaaaagagctgtagattttcagtaagtactaaacaaaaagatgataaatatagaaaagtgcac

SEQ ID NO: 692597 - DNA, 383 bp, Homo sapiens
ggtgggctacctggagatcaggcctgcggctgcaccgcttgctgcgctgacagcgaggtcttctgccaccgcaatgcagcgccgcgccgtaggcccgagcccgccgcggcttcgctaagttatcccgagctgccctcttcgggggctgctgcgccgggcgatgggctcaagctgctgcaagccagggccttgccagtctattcgcccagtcccagcccagccgagaggtgctggggggacttccagcggccggggagcccttacaattgttcctgcagttcgtttacttcagggcaattattctccccaaaaggcaattcgccgggtgctcacaccttttctaatgaaggcattccttgatgacggacttggttgaagaggac

SEQ ID NO: 692598 - DNA, 840 bp, Homo sapiens
tcctgtgtaacggggaattttaaaataagggactatttgctttctttggttattctcacacttctcagttataagggtgattaacaatgggttaacaccgggtgactcattctactcagacgtgacgtgaatgtgctttctcgtgattttcccagtgtgagtgtgactcatagttttcatacgtatattatacaccgagggtgttaactactcgtggtgagcgtgtaaattaccggggaacgtgtacaccgtggatttaacatgtgacagcttctctccttgtgggtggtccctatactcgtgatcacgggatattataatagccagtggtgggctactaaattattcctacaagttattacacacattttgccacttggttattccccacttattgtgtacccgtgaaaggaaggactagtgttatttccccttttttaaatcccgatacgggataattgggtgtcatttcaacaagtcccaaagatccgggctcctaatctaaagtgcgttacttaatacttgaaggaggcatacttgtgctgtgcccacaaattccccagaggtgcccttgagcaacctatgggttacagctttcccctaagagttaattaattttagacgtgctattctttgtgcttttccaacaactgggcgcacaagagttcaccctccgaataaaaccttcttggggggaaaaatccccccaaaaaaaaaaataaacaacaacccaacacaagaacaacacacctctatttgtggtcgccgcctcgcgtgccccctgcgagaagatgttgtttttgaacacacccatctcggtttgggtgaggccgcggggcc

SEQ ID NO: 692599 - DNA, 1006 bp, Homo sapiens
gagagccctaagaggcataggcacttgtccaaatgatgtcttttattattattcttaattctaaccaaattcttgcgtcattcagatcctattgcccaggttgaagcttgctacactttgcattgatattttagatcttcgcctatagaaactggagttcgcatccaaacattaggcgtgggggcaataaacattagcgtggtctacgccctagtcgtgcgcgggtgttgctagccttcagtggtaaccctatccacccatcacctggtgctaaagcatgcatcttgaacggtggtcaacagttgcttcgacaaggacctggacttccatgccagatgtttggttcactttcactatgagtgaacgtctgtactaatgcaatttactctttatcgaggaatgcccgtgaatgttgcacaggcttctccaaaagcttgcaagagcgcgagacattttgggacagaatccgaaatgacctttgttccgtgaaggcagccgttggtcaaggtttttttcagcccccatatcctaatttggatccgtcctgggcggggcaacagtgggttcctgtttacatagtcaccattttgtggttgaccccagtgtggtccgaaggctctccttctgcggtagagaacccattttagtctgatttatactggaagataatctccgtgaggtaatcccgtaaatggcttccgttataaatcctaagtgctctgaaggaatctcagagttttgccacaggcctcccacccggggaatccatatagcgagggaaattttaacgccaaggggttgtctctctgcggagagtaagtccggggggacactccgctttacgggggtgcgtttcaatgggctctgcccgaagctcaaggggcgtgtgaaataacttcttatgtcttacgcgccaagtgatcataaggctttttagttctacaaacatagtttacaacccaatctgtgcgggcgacaaacggctttatggggcgaggacgccaca

SEQ ID NO: 692600 - DNA, 1758 bp, Homo sapiens
agcggggtgtgggcgccgtacgtgcgcgcgcgcggcggccagaaagcggcgctgggaccctgaggcggccgtggttaggcggctccccggcggctcctccgcggcggtgacggcgaccgcactccccgcttcccgctccccgcgctcctccgcccgggtccgccagccgaggccgctcccgagcgtcggaagatgccggccgtgtccaagggggacgggatgcggggcctggcggtcttcatctcggatatccgcaactgtaaaagtaaagaagcagaaataaaaaggataaacaaggaactggcaaatatcagatcaaaatttaaaggtgaagcccaccatccaggacgtgctgcgcagcgacagccagctcaggaacgcagacgtggagctgcagcagcgtgctgtggagtacctgcggctcagcaccgtggccagcaccgacattctggcgaccgtgctggaggagatgcccccattcccggagcgggagtcctccatcttggcaaagctcaagaagaagaagggccccagcacggtgacagacctggaggacaccaagcgggacaggagtgtggacgtgaacgggggtcctgagcctgccccagccagtaccagcgccgtgtctacgccttctccgtcggcagacctgctgggtctcggggctggcgccgtgaaggcgtggaccggctgttgtggggtggctgggtgtgtgtcagactcggctctgtggtcggcctctgtctggctccgggacatttgcagtggttgtaaacgaggtgtgttgggaaccagctgcttcaaattggacttaagtctgaatttcggcagaatttaggtcggatgtttatcttttatggtaataagacctccacgcagttcctaaactttaccccaacactaatctgttcagacgaccttcagcctaacctgaacctgcagaccaagcccgtggacccgaccgtggaggggggcgcgcaggtgcagcaggtggtcaacatagagtgcgtgtccgacttcacggaggcgccagtcctcaacattcagttcaggtatgggggcaccttccagaacgtgtctgtgcagctgcccatcactctcaacaaattcttccagccgacagaaatggcttctcaggatttctttcaacgttggaagcagttgagcaatccacagcaggaagtgcagaacatcttcaaagcaaagcacccaatggacacagaagtcaccaaagccaagatcattggatttggttctgcacttcttgaagaagttgatcctaatcctgcgaatttcgtgggagctggaatcatccacacgaaaaccacccagattggatgcctgctgcgcttggagccgaacctgcaagcccagatgtaccggctcacgctgcgcacaagtaaggaagccgtttctcagagattatgtgaattgctctcagcgcagttttagtcctgaggatggaagaccaggctcgtgtgtcttgtgttgtcttcgtctgtgccgtttgtcttcgtggctatcctgcagatgagcaccgtgtccagtgccacagcacaaggcgcctccccgccccaccgccccacacctctcccctttgggctggacgggaacacacgtgtgtggctcaggaggaaaagctcagcctggactgtggcagccacggcagaaggtggatcttgggatcaatttttataaaaatcgagacagttctgtggttaaatctacaaattaaagggaaattagaagttggcgtga

SEQ ID NO: 692601 - DNA, 1032 bp, Homo sapiens
aacaaatctaactagagacttaatgatttgtgttaggattctgctgatccacacacaccaccttcttcatgtcctcaaagctggggtcattgggcaccacatcatagaaggggtcggatgtttatcttttatggtaataagacctccacgcagttcctaaactttaccccaacactaatctgttcagacgaccttcagcctaacctgaacctgcagaccaagcccgtggacccgaccgtggaggggggcgcgcaggtgcagcaggtggtcaacatagagtgcgtgtccgacttcacggaggcgccagtcctcaacattcagttcaggtatgggggcaccttccagaacgtgtctgtgcagctgcccatcactctcaacaaattcttccagccgacagaaatggcttctcaggatttctttcaacgttggaagcagttgagcaatccacagcaggaagtgcagaacatcttcaaagcaaagcacccaatggacacagaagtcaccaaagccaagatcattggatttggttctgcacttcttgaagaagttgatcctaatcctgcgaatttcgtgggagctggaatcatccacacgaaaaccacccagattggatgcctgctgcgcttggagccgaacctgcaagcccagatgtaccggctcacgctgcgcacaagtaaggaagccgtttctcagagattatgtgaattgctctcagcgcagttttagtcctgaggatggaagaccaggctcgtgtgtcttgtgttgtcttcgtctgtgccgtttgtcttcgtggctatcctgcagatgagcaccgtgtccagtgccacagcacaaggcgcctccccgccccaccgccccacacctctcccctttgggctggacgggaacacacgtgtgtggctcaggaggaaaagctcagcctggactgtggcagccacggcagaaggtggatcttgggatcaatttttataaaaatcgagacagttctgtggttaaatctacaaattaaagggaaattagaagttggcgtga

SEQ ID NO: 692602 - DNA, 256 bp, Homo sapiens
catacgcagggctatataatacataatcaggaaacccagtaaaactggtatcacacgaaggaattgcacctattgtattagtccattctcacacatctataacgaactacctgagagtgcgtaattactaaagaagagcggtttccttggctctgccagccagtccaagtcagccatggctggggcaagcctcacaaccaggccagcaaggtgcacaggggcacagccaggctactatcttcacgtggcatggcgc

SEQ ID NO: 692603 - DNA, 1101 bp, Homo sapiens
aaaaagacagagaacttaagattgtatactgtagaattcggggacatagacatgcaagtttttgtttcattctttgtgcaaatgcctttgccttttttaaagaaaaaacatcgcaccatttgcacagacttggagttctgggaaacagatgaatggggagaagtgaggcacagggacgtcctgcctgagtatgcggccctggcctgtcctcctgtctgtgggtgacactggacactgagccacacacgatccgtggggactgaaggctcggccccccgacccgctctggtgggtggcagtagatcgggacgcttctcactccaggctctttcccggtcctggggctctcagaggagtagctgactgtctctttctgctgctgctgctgctggcaggtatgggggcaccttccagaacgtgtctgtgcagctgcccatcactctcaacaaattcttccagccgacagaaatggcttctcaggatttctttcaacgttggaagcagttgagcaatccacagcaggaagtgcagaacatcttcaaagcaaagcacccaatggacacagaagtcaccaaagccaagatcattggatttggttctgcacttcttgaagaagttgatcctaatcctgcgaatttcgtgggagctggaatcatccacacgaaaaccacccagattggatgcctgctgcgcttggagccgaacctgcaagcccagatgtaccggctcacgctgcgcacaagtaaggaagccgtttctcagagattatgtgaattgctctcagcgcagttttagtcctgaggatggaagaccaggctcgtgtgtcttgtgttgtcttcgtctgtgccgtttgtcttcgtggctatcctgcagatgagcaccgtgtccagtgccacagcacaaggcgcctccccgccccaccgccccacacctctcccctttgggctggacgggaacacacgtgtgtggctcaggaggaaaagctcagcctggactgtggcagccacggcagaaggtggatcttgggatcaatttttataaaaatcgagacagttctgtggttaaatctacaaattaaagggaaattagaagttggcgtga

SEQ ID NO: 692604 - DNA, 255 bp, Homo sapiens
  misc_feature (50)..(50): n is a, c, g, or t
aagtcaaggagaggcaagtcacatcttacagggatggcagcaggcaaagngagagcttgagcagggaaactcctccttttaaaaccatcagatctcatgagacttattcactattaaaagattagcatgggaaatacctgcctccatgattcaactacttcccattgggtccctcccacaacacatgggaattcaagatgagatctgagtggggacacagccaaaccatatcaaaaggatatacaaaataaccag

SEQ ID NO: 692605 - DNA, 121 bp, Homo sapiens
ccattgttcgatcacgttgtggaacgactgcgagcgcgtaacgcagttattgtccgccaggttgcaggtcagctcggcgtatttgccggtttcccccatttatttctacaatactggttgg

SEQ ID NO: 692606 - DNA, 527 bp, Homo sapiens
  misc_feature (92)..(92): n is a, c, g, or t
  misc_feature (94)..(94): n is a, c, g, or t
  misc_feature (192)..(192): n is a, c, g, or t
  misc_feature (201)..(201): n is a, c, g, or t
gttgctatgtagccatacttaatcttttgggggcggttaacgggtatctttgcatcttctcttaatcaggaatgttagctaaataaggaaananttctggcggggcgttttttgtctgttcgtttgttctttgagaaaattacggacttttgatgattcattttgaagtttgctttggctaaatttgacaanccccattgnggatgagatgtcctgggagaatgcagtacttttgggaacgacaatagcacagctatgatgagatttacaagccttgctgttcctggccagttgcaggttaagccccagaaaagttcaccttggagaagctccgagaacacacagattgtgtctcattcatcttcagacacaggcacatagtgtggcactttgttcagttaacatttgtggagctgtcatcagctcagctttaacaacacaggtgactctttcccttgataaagtcataggtaattcaggggctgggtgcggcggctcacgcatgtaatcccagcactttgggaggc

SEQ ID NO: 692607 - DNA, 777 bp, Homo sapiens
aatggctatgtacgaggctggcgtggttacatgctgaggaggcctcccgtcgtttagtgctgttgtgtatcagttagcagagctactttgtttccctgcttgtgatgtgacctggagaagtgggagctcatgccacgtgctgcactgcctgtgatggctggagccttgcagcacctgcggctcgcctccctgcagttggtggtgtgggcacccatcatccatgcatctggacgtgagcacctgcatgcacatgcaacagtgaccatgctggtgacatcctatcttgtgctacatcactgcatccttgtgtaaccatgtggctgcaagttgtgcatgtctggtagcttggaatgaggaagtgcctgtgaaagcctgggaaatcttttggggccttaacttcagtgaggagagcctgcttgctaagtgcagattgacttctcgtagtatagcaaagctgtgcatgagatgcgctttatgatgattggccagccagttcccctcagtgtggattgatcaagggctgagctgtatcagtggactcatgtgctgactgctgcagacaatcaaccctgaagacctgggggcgtcatacattgctctgtgcttggagttgactggcacgctacaagcccgattggattcggacagcctgggaaaagctgtaacatagtggactccttatgaggaggtggatgacagactgtaatgtaccccagtataaaaagtacggcgaacgaaagggtgatcgacaacctgaagaagagcacttggaacagc

SEQ ID NO: 692608 - DNA, 203 bp, Homo sapiens
ttactggacttctggcatacctggatgcttctggcatacctgaccttctggcatacctgaccttctggcatacctgaccttctggcatacctggaccttctggcatacctctaccttctggcatacctggaccttctggcatacctggaccttctgcataagtgaattaactagaaataactttgcaaggagagccaggtatg

SEQ ID NO: 692609 - DNA, 920 bp, Homo sapiens
acgaagacatcaagatacacttgtaaatcaagctgatattggaatatattcatacctgttgtacacttgggtgaaaagtatggcagatgggagactaagagtgtattaacctacctgtgagatcatatgtgtaggaaaagctgtccccagtgtcgtaagcaggacgttgaattcgaaagcatgtcaagtggcttagtagatctgtggacgatatgagagggatgcagtgcctttccccattcattcctgatggaatggttatactaggttaacattgtaattttgtttctagttgtaaatgtgtatgtctggtaaataggtattatatctggccttacaagtaccgtaacaagtgttggtcattttgaaatagcttaatgccaagtaacgaatgcatgctttgggaaattggaagatggtttcattcttagagaagcaaatatgttgtgcattaaaggctttgattgtgtcatatcaagaaattgattgaacgttctcaaacccctgtttagggtactaggtaagagggagccggtagggagagaccattgcatcgtgatacaagtgtgaacttgtagttgcttttaaacatggagagggtaacctcaaaatatcagttttagcctggcattgctagtacttaaaaggggcacagacacggccccttacaggaaaaacacggaaccacacatcaccacacgcgatgaccaccaaaaaacaaacggcgcaccacatggacaaccccctacgggcgccacgcacaaaccacacaatgtttcacacggacacccatacacaacaagcaagacagcccggcgccatcaaccactcagtgtcccacgcaaccaatacggaagcaccacaacacggacaacaaaacaccagacgcggcaccacaacgagactatccgccactgcac

SEQ ID NO: 692610 - DNA, 1094 bp, Homo sapiens
  misc_feature (406)..(406): n is a, c, g, or t
  misc_feature (444)..(444): n is a, c, g, or t
gtggagctaggtacagtcacagctgtggggacagcatgctggccaatgggtcttcccccacgctcagtcctggtactaaaggctgccatacctttctgagtgcccccagggaggggctggagcgtctccatgggttgcccacttgtgccgcaagggaggctggcatcatcctaccacgacaagtcactcggccaccgttctaactgagatccccatctccatgtgatgacaaataggcatgagcttaaagccgtagtacctagttatctagcgagggagaccgggcatcatcaacaagagttccatcctttcaaccgagtgttccaagaaatttgcgcaccatagtaatggacccgtactttatcacgcggagcaaggctcgagcatatcgagtggaagtgtcggntgtgtacatgtcagtcgaggccctgagagtactgtggnctccttcatcgttttacagtccgcgggccctcgaactccaatgaactgattgcgctcattcgcacgggctcgcattggagtcggcgctttatcgacgctaggttattgacctaggagtacccgaatcagggaagttccttggtgtgcaaggaaggtcagagccacgaccatagggagacgaaaaggagccccgaggttgagcctcatgtataacgcaaaggtaggggtcgaattgtggctccaagatgggccatccatggaaaaccctttttggcccactcttgttgaggtattggcaaagttgttctactgagcgaacttttcgttcatgatgttccctgccacaggtgcggccattctacatgaacacggcggtggctcccggggtaaaaattacgtactggaggggacattcaagtgaattcgaccctatgtttcccgctttttgcgcctctatgaagattcccgaattccaacttgagatccgatcacttttttccgggggaggcaagcaggcccaaggggggaattgccatgcgacgcggaaatgttacggtggaaaacctcccgaagggtcccccaggcggaatttccactttgattggcccagtcgtaaccaagaactggtttcccacaacccagcggttccc

SEQ ID NO: 692611 - DNA, 286 bp, Homo sapiens
ggggcagtgtctctcacccagtctggaatgcaacagcgtggtctcggctcactgcaacttccacctcccgggttcaaaggattctcgtgcctcagcctcctgagtagctgggactacaggcatgtgactctatgcctggctaattttttttgttatttttaagtagagacggggttttgccatgttggcccaggcaggcggatcacttgaggccagaatttgagaccagcctggccaacatggtgaaaccctgtatcactcttttagacccttctgtcgtcttctc

SEQ ID NO: 692612 - DNA, 191 bp, Homo sapiens
gtgggctggttgggcttgagaagcttgtttggaggttctagcaggggagcgcagctactcgtatacccttgaccgaagaccggtcctcctctatcggggatggtcgtcctcttcgaccgagcgcgcagcttcgggagggacgcacatggagcggtgagggaggaaggggacacccgcctagccagctgcgg

SEQ ID NO: 692613 - DNA, 284 bp, Homo sapiens
  misc_feature (32)..(32): n is a, c, g, or t
  misc_feature (94)..(94): n is a, c, g, or t
  misc_feature (128)..(129): n is a, c, g, or t
  misc_feature (148)..(149): n is a, c, g, or t
  misc_feature (222)..(222): n is a, c, g, or t
  misc_feature (280)..(280): n is a, c, g, or t
ccgggaatatggttcgaacccaccggcggttnccaaacaaaagattctgggcaagtaaaattgtgggaaagagaaatttgttatgggcactgtnatattatgaaaataccttccaatacttaaccgtnnacatgttttccaacttttnntgatttttcttgtatagccacctaagagaatttctttcatagattaagaactaccaagttttcaccaccttancataaagtaaacaaaagtccttcataatttaaccattagcatctttggccaaaccaanaata

SEQ ID NO: 692614 - DNA, 285 bp, Homo sapiens
gactctgaggatccccatctatgaaaaagcaagatgaagacaagataaagagataaggaagaaaaagaaagcagcagagaaaaaagggagcggtctcgtagcccaagaagacgcagatccagatctccttccccgtagagagacgagtcttcccactgtcaggggaggagagaaagcgcagtcattctcgatctccccgtcgacagaaccaagagccggaggagctgaaaaagatgttgaaggaaaaagccaaagaacgaagagaggaaagaaatgcttgagaga

SEQ ID NO: 692615 - DNA, 124 bp, Homo sapiens
  misc_feature (87)..(87): n is a, c, g, or t
ctcgggtccgacaatcatgcatgtcagccaatttcattaagcacagtgggcttagtttggctatacttatgcagtctacaactctcnactgtcgcagcgacccgctgagatcacagcgctctgc

SEQ ID NO: 692616 - DNA, 994 bp, Homo sapiens
  misc_feature (541)..(541): n is a, c, g, or t
tggaactctgaatcttttttattgggcctggctgctccccaaggggtcccctggcttctggctgggcttaatggcctcacgaacttggtgtgtcattgtgtctcagacaccattttgccatccactatccggcgggtggtgggtctttgggatcgtgtttcgcatggaggttgctgctggtccaaggcttcaccaaggattaaaggtcctcgccattctttccagcagggcggcggtaggtggcagatctcagccctccagctttgaccttgattgttcagcggggcctcattactccggggcctggcgcgtgtacctcttgcccgggtctgtgccagctcgtgactcaggggtgcagcaggactcccgttgagctgcctccatcttgttagggcgtagggggcctccaccttccctcaggcgtgttcctccaagcgtggccttcagattttcctcagtggagctccaggtcgatctccagggaccgggactgtacgtctacagctctgtgagcgtcgtctacagaagtctccaacctcangagactgtgtggtgcccacgggggtgctctcctcaatctgttgagaccagtactggtctagctcctctgggttcttccagagccagctcgtcatatggcggccctggattgtctgccatgatctgtggcaaggtcctgagattgggggggcatctacctccaagggtcacccaagagctggccaatttgggcttgaaggcctttaacttcctctaaggggtacctctccttcattggaaagagagcaaggctccccttcctttgaagaagctctcagaaatcctcttgtctcccaagcttggcacagtcctgtggtgaaattgggggggtcacatccagagagccgcttggagagacccccttggaatgggtcggtcctcccaaagatgtgcgtgctgtggccaagttctgtcttcacaaatttgaactctaagggttcacagaggcacgatg

SEQ ID NO: 692617 - DNA, 408 bp, Homo sapiens
cgaactcgtggagcccacggactgcgccacctctgacctgccagctgaagcctgccagagtgcctgcgtggcgcacttgggctaatgccgctatctctgtgcactcgtacctcagtgcaactgatagctagaacccacgagtcactacccattcatggctaatacagatgtcacttctacatctatcattgctacatcctaccaggaggcctctcaagttgagtactagctagggcctgcagagttcaggccaagagcaaggtgtacctggatgtcccactgtggctgagaactcggcacatctgccactaccctgctacaataacggtccctctagcttagacagagctgatacagtcgtactgacacccgaggctacataccgcttggacgcacaggcattactcc

SEQ ID NO: 692618 - DNA, 376 bp, Homo sapiens
tagagttccaatatatcaggctatcccttccctacacatcaagcttgaagatttgcccccacccaggactggcaagattagcttaaactcaacatgccccgagtcagataactaaatatacctcttagtctaagtagacactttcactaggtaagtagaggcctttcctacagggtctgagaaggccaccgcagtcatttcttcccttcggtcagacacaattcctcagtttagccttcccacctctatacagtctaacagaccagcccttattagtcaaatcagccaagcagtttctcaggctcttagtattcagtgaaacctttatatcccttacggtcctccgtcttcaagaaaagtagaacggactacaggt

SEQ ID NO: 692619 - DNA, 152 bp, Homo sapiens
aaacgtgtctacctccaacagaaccctctatacacatgacaatcggggacgggatgacgccgtctgtagtacatgagtgccgcattcctatcacatggcactgccacatcttactgagacataagcagccccagaagcacagaaaacaaggc

SEQ ID NO: 692620 - DNA, 443 bp, Homo sapiens
ggaagataaagtgggagtgaagggcatccctacaactggtgactcatgatgctcgaaccatacgcataaccagatcctgatcatcaggtgaacgatactgtgacagatgataagaggactggcaagataatccaatttatcaaatatgatacaggcaatttgtgtatggtgattggtggagccaacctcggtcgtgtaggtgtgatcaccaacagggaaagcaatcaggttctttagatgtggtgcatgtgaaggatgccaatggcaacagctttgccacgaggctttccaacattttagtcattggcaatggcaataaaccttggatttccctgcccaggggaaagggcatacgacttacagttgctgaagagagagatacgaggatggccaccaaacaagagcagtggctacatagcagtcacagcatatctttatttctt

SEQ ID NO: 692621 - DNA, 564 bp, Homo sapiens
  misc_feature (563)..(563): n is a, c, g, or t
gaattatttgagcaggtggaccgacctatgcccattgcagccctggacatggggaatgtaatccgtgcccctaattgtactgccagacaccaccagctttactaatctgcgggcctggatgctaaaacatgtacgcaacagccgaggcctaacctttattttgaatttgggtatcaaaaagagaggggggccttccaaccccaccacaaaagtcaggttgggtttcctgtctcctgcacaaaaaacaccttgggtcgggaactaatttttcccacagcaaaagtgccggtggtagcagccgcaacaaaaaaatttctccaaagatgaagaatccccccttctttttttttaatggcggtcggccgggggggctgccgggcttgggttttaataaaaaaaagccccccggcggggtgctggcccccgtaagaggtaacccagtctgggcccccctccaaattttgttcgtttgtctgggcctttggggggggaaataagaccttaaaaatttttttttgccccaggaccagggggtgaataaataaaatttttttgtggcgggna

SEQ ID NO: 692622 - DNA, 300 bp, Homo sapiens
ccctgaaggtgctctgctccggagctgtggtgctgtgtcctgttgtctcctgtgagtcctcggaaaggttccttgtgttcctggtgctcctcgtctggaattctaggagatcagtagactcagctaggctcgtccagcatgtaccttgggtctccttcctgtccttgctgttcctcctcttcttcctcttttccattgttctcattgtcatcttcatctttctcgtctctctcctccctgttcctcccgtatatgatccttatgctgctttctctgtgtcctttcattgtcgtctgatcc

SEQ ID NO: 692623 - DNA, 227 bp, Homo sapiens
aaagacgaaatcaaacatcacccattgtaatctcaagcaacgacgacacactttaggctttgtctacaaattttctgacaaattaatgacaccagctgggaagaggagcagtttggatgagactgggataagaagtggttaataaaatctggttatctattctaggaaaaaataaacagcccgataccacacaaaaaaaaaaaatctggtctcagttggcctcagcg

SEQ ID NO: 692624 - DNA, 430 bp, Homo sapiens
  misc_feature (6)..(6): n is a, c, g, or t
ttggcnatcactgtctccagcctgggtgacagagcgagatccgtctcaaaaaaaaaaaaaaaaaagattaggcttgggggcacacgcctgtagtccctagctactcaggaggctgaggtgggaggatggcttgagcccaggtgtgggaggctgcagtgagccatgattataccactgtagtccagccgggacaacagaacgagaccctgtctctaaaagttatttttgtccacattaccataatacccagctactgaggaggctgaggcaaaaagagtgcttgagtccaggagtttgatgtcagcctgagcaatatagcaagaccctcacctcttaaaaaaaaaggtaaattaaaaaattaccacaatggctcaggtcaatggaaaaacaggcatatagtacagtgatcgaccaagggttaccgagctcg

SEQ ID NO: 692625 - DNA, 169 bp, Homo sapiens
ggcgtttgccccccccatttttaatatttgccaaaacctttttcaaggaaagggcttttttttggacacatttttaccccttttccattttaaaacagggaaagggggaaattactgttttttatgtccaaggaccaccaataaatcaaatggaaatttatttttttta

SEQ ID NO: 692626 - DNA, 771 bp, Homo sapiens
  misc_feature (51)..(51): n is a, c, g, or t
  misc_feature (66)..(66): n is a, c, g, or t
  misc_feature (72)..(72): n is a, c, g, or t
  misc_feature (90)..(90): n is a, c, g, or t
  misc_feature (96)..(96): n is a, c, g, or t
  misc_feature (100)..(100): n is a, c, g, or t
  misc_feature (116)..(116): n is a, c, g, or t
  misc_feature (118)..(118): n is a, c, g, or t
  misc_feature (121)..(121): n is a, c, g, or t
  misc_feature (134)..(134): n is a, c, g, or t
  misc_feature (137)..(137): n is a, c, g, or t
  misc_feature (142)..(142): n is a, c, g, or t
  misc_feature (146)..(146): n is a, c, g, or t
  misc_feature (153)..(153): n is a, c, g, or t
  misc_feature (166)..(167): n is a, c, g, or t
  misc_feature (179)..(179): n is a, c, g, or t
  misc_feature (200)..(200): n is a, c, g, or t
  misc_feature (223)..(224): n is a, c, g, or t
  misc_feature (242)..(242): n is a, c, g, or t
  misc_feature (256)..(257): n is a, c, g, or t
  misc_feature (271)..(272): n is a, c, g, or t
  misc_feature (279)..(279): n is a, c, g, or t
  misc_feature (281)..(281): n is a, c, g, or t
  misc_feature (288)..(288): n is a, c, g, or t
  misc_feature (295)..(295): n is a, c, g, or t
  misc_feature (297)..(298): n is a, c, g, or t
  misc_feature (300)..(300): n is a, c, g, or t
  misc_feature (304)..(304): n is a, c, g, or t
  misc_feature (317)..(317): n is a, c, g, or t
  misc_feature (320)..(322): n is a, c, g, or t
  misc_feature (325)..(325): n is a, c, g, or t
  misc_feature (342)..(342): n is a, c, g, or t
  misc_feature (346)..(346): n is a, c, g, or t
  misc_feature (349)..(349): n is a, c, g, or t
  misc_feature (352)..(352): n is a, c, g, or t
  misc_feature (357)..(358): n is a, c, g, or t
  misc_feature (368)..(369): n is a, c, g, or t
  misc_feature (373)..(373): n is a, c, g, or t
  misc_feature (381)..(381): n is a, c, g, or t
  misc_feature (383)..(383): n is a, c, g, or t
  misc_feature (388)..(390): n is a, c, g, or t
  misc_feature (393)..(393): n is a, c, g, or t
  misc_feature (406)..(407): n is a, c, g, or t
  misc_feature (454)..(455): n is a, c, g, or t
  misc_feature (459)..(459): n is a, c, g, or t
  misc_feature (496)..(496): n is a, c, g, or t
  misc_feature (512)..(512): n is a, c, g, or t
  misc_feature (530)..(530): n is a, c, g, or t
  misc_feature (535)..(535): n is a, c, g, or t
  misc_feature (560)..(560): n is a, c, g, or t
  misc_feature (584)..(584): n is a, c, g, or t
  misc_feature (591)..(591): n is a, c, g, or t
  misc_feature (603)..(603): n is a, c, g, or t
  misc_feature (606)..(606): n is a, c, g, or t
  misc_feature (618)..(618): n is a, c, g, or t
  misc_feature (621)..(621): n is a, c, g, or t
  misc_feature (634)..(634): n is a, c, g, or t
  misc_feature (636)..(636): n is a, c, g, or t
  misc_feature (638)..(638): n is a, c, g, or t
  misc_feature (646)..(646): n is a, c, g, or t
  misc_feature (662)..(662): n is a, c, g, or t
  misc_feature (675)..(675): n is a, c, g, or t
  misc_feature (688)..(688): n is a, c, g, or t
  misc_feature (701)..(701): n is a, c, g, or t
  misc_feature (750)..(750): n is a, c, g, or t
gacaaaaaaattttacagtatccctctgggaagggtgtggggtggggtgtnctcattgtacatttnctagcngggagtcctcgagacagnccgtcnggcntgagaaagcccccacnanaanaagggaaagaaancgncagtngaantaggccnggggggggggganntgagaaatccanaaagcaaacgccccgccgcanatgggtaaaagagatagggagcnngaagatgaaaaagggggngtggggggggtggnnaaaaataaaaacanngggccangncggactngggtttngnnangttnggtggggggtctngtnnnggntaaaggggggggtaatngctnggngcntgggnngaatgggggnngggngggggggntntgggnnnggngggaagaaagaanncgcgggctggggggtggggcggaatacgtgtggggagggactcgganngggnacaccggaacactcaggggtgaagggacagaaagggnacagtaaggcaggggntcagggagtggctcccgnaaggnggtggggtcaagggggggcggtggngaggggtgagtcgcgagatggggncgcgggnagataggcgtgnggngctgggcggggnacnggggcatggaatngngntgggcgantggggggcctcgcaanctcgcacgacgtnctcccgcccccancgaagcccatcancaaaacaggggcgcccaaagttgtggggcggggaaagcaaaagcgggtnccgcttccccaacgtggggca

SEQ ID NO: 692627 - DNA, 144 bp, Homo sapiens
aacagatactgccgaatctttcgtgctagaggagggccaaaacaactctaaagtacatcatcttggctgcacttttatatagaacctgcactctctgaagacctggtgctgtcataatggcaatccacactggacatagcaccg

SEQ ID NO: 692628 - DNA, 270 bp, Homo sapiens
tagggcgttccacgtacgtcgcgctccacgttcaccaccgacgcttcgagctgatccctaatcgcggactcagatgccagggtatcggaccatatagcgccgggttcctccggtggcgattacggccttggcgacaatatcgctggaatttcgtcatagctcattccctttttcgtacttctcgcgcatgcgcagggccgccgcctgcctcacgcgcgcggcgacgggattcaacgtgtggaagtacacgtcctgccccacccacaaggc

SEQ ID NO: 692629 - DNA, 156 bp, Homo sapiens
  misc_feature (121)..(121): n is a, c, g, or t
tttgttttgaatcatgcatatcattgaaattctcgtttcatttctagatgactctgtctgagacagaaatttctactacagcagtgcagtccagaggttaagatgtattagagttatacantatcagtttaaaaatctgtatgcataaggatgcac

SEQ ID NO: 692630 - DNA, 124 bp, Homo sapiens
cttcaaatgctaatcattccccccttgataattgggacccatatggcataggtaccgaagtaaactagtgcgaaagtagtggttcaggtaattgctgttagaaaatcccccgaagtcctccaat

SEQ ID NO: 692631 - DNA, 452 bp, Homo sapiens
  misc_feature (49)..(49): n is a, c, g, or t
  misc_feature (55)..(55): n is a, c, g, or t
caggaggtctcgtcctggataaatgtgtcgtagaggaggagctggatgnaatgtntccgtagaggagtagctggatgaaatgtatcctgtagaggaggagctggatggaatgtatcctgtagaggaggagctggatggaatgtgtctgcagaggaggagctggatggaatgtgtctgtagaggaggagctggatggaatgtgtctgtagaggaggagctggatggaatgtgtctgtagaggaggagctggatggaatgtgtctgtagaggaggagctggatggaatgtgtctgtagaggaggagctggatggaatgtgtctgtagaggaggagctggatggaatgtgcctgtagaggaggagctggatggaatgtgtctgtagaggaggagctggatggaatgtgtctgtagaggaggagctggatgaaatgtgtctgtagaggaggagtcg

SEQ ID NO: 692632 - DNA, 120 bp, Homo sapiens
agaagcagtcaaattgtccggatcatttgttttccttgtattcttttgattttgtacattactgaaatgttgactagagaatatctgtggttaccaacaaggagcagtttatgtattttt

SEQ ID NO: 692633 - DNA, 290 bp, Homo sapiens
agtgctacctccacaaacagtgtatagccagtggaatgtgtctgtagaggaggagctggatggaatgtgtctgtagaggaggagctggatggaatgtgtctgtagaggaggagctggatggaatgtgtctgtagaggaggagctggatggaatgtgtctgtagaggaggagctggatggaatgtgcctgtagaggaggagctggatggaatgtgtctgtagaggaggagctggatggaatgtgtctgtagaggaggagctggatgaaatgtgtctgtagaggaggagtcg

SEQ ID NO: 692634 - DNA, 512 bp, Homo sapiens
  misc_feature (61)..(61): n is a, c, g, or t
  misc_feature (72)..(72): n is a, c, g, or t
  misc_feature (128)..(128): n is a, c, g, or t
  misc_feature (130)..(130): n is a, c, g, or t
gttggtcccctgcaggcattgcgtcatttgatcacatcaccctcaggcccggccttaaggngtctgtcctgntcatccccttgctcatgggcaagaagtctgcagggcagagggaaatgctcacccanangttgcgctcttccttctctagaatcccctgcccagatggtttgtccatccagtgcactcgctcccaggcaggccatgccgcccaacgcaccctgagatgcgagatgcagcaaagcagtggctctgcagaacttcgggtagagtttggatgggtgcgtggaggtttccacacatgtgtgcagatcccttggaaagcaggatagagccagaaacagagaggagggtgcccgtaggccggtgggggctggctcccatggtcacatgcaagagtgaagcttcatggagaccatgattctaaactcacacctggcctcacaggtggtaatgtcactgttcttctgaaggaaggaggaaataaatattgacaagtttgctagattgta

SEQ ID NO: 692635 - DNA, 398 bp, Homo sapiens
agtgctacctccacaaacagtgtatagccagtggaatgtgtctgtagaggaggagctggatggaatgtgtctgtagaggaggagctggatggaatgtgtctgtagaggaggagctggatggaatgtgtctgtagaggaggagctggatggaatgtgtctgtagaggaggagctggatggaatgtgcctgtagaggaggagctggatggaatgtgtctgtagaggaggagctggcggacagtgaagtgccggccaggcctggtggtggtggtgaggtccggcggccagagggcaggtctgagaagctgatgctctggcgaaggcacaaggagggtggcccgtggccgccaggtctatcgctagggttgtggataaagtggcagcgaagaagcggtaggg

SEQ ID NO: 692636 - DNA, 121 bp, Homo sapiens
cctttcaggcttctgggagcctggtctgttggggtccatcttggtcatctatccttttcttccagtgaagtgttagacggttagcgacttgaaggactagtattgcctgatggagccagtc

SEQ ID NO: 692637 - DNA, 493 bp, Homo sapiens
  misc_feature (13)..(13): n is a, c, g, or t
  misc_feature (64)..(64): n is a, c, g, or t
  misc_feature (69)..(69): n is a, c, g, or t
  misc_feature (71)..(73): n is a, c, g, or t
  misc_feature (128)..(130): n is a, c, g, or t
  misc_feature (143)..(143): n is a, c, g, or t
  misc_feature (147)..(147): n is a, c, g, or t
  misc_feature (171)..(171): n is a, c, g, or t
  misc_feature (208)..(208): n is a, c, g, or t
  misc_feature (240)..(240): n is a, c, g, or t
  misc_feature (259)..(259): n is a, c, g, or t
  misc_feature (261)..(261): n is a, c, g, or t
  misc_feature (282)..(282): n is a, c, g, or t
  misc_feature (318)..(318): n is a, c, g, or t
  misc_feature (361)..(361): n is a, c, g, or t
  misc_feature (388)..(388): n is a, c, g, or t
  misc_feature (403)..(403): n is a, c, g, or t
  misc_feature (426)..(426): n is a, c, g, or t
  misc_feature (442)..(442): n is a, c, g, or t
actcttccttatntagaaaccagaatatcttgctaaagaagaaagcagaaatcacatgggtttnggggnannnagggggtaatagaaactgttccgctggctggggctctctctcttggggtgcagtnnnggagggggcagantctnttaagcctcatatactctgcaggntggggctggtggcaaaggcaggctgggggtgctggantaaaagcctgcggttctggaaggaagcgtctnccaccttttacggggcatngngggatcctaggagaccccaanatgatcgcagttcagataggcccaagctggatttancgcagctggaatgggtggtcacccaattagcctcgcagctganggacctctgccaccagggctaaaggtnaggctgcgggcagancctaacctgaggtgggggctganagggtctctgcggctnagcctggccgggcattgggggctcgctctctggacctagcgggcctgatgt

SEQ ID NO: 692638 - DNA, 536 bp, Homo sapiens
  misc_feature (276)..(276): n is a, c, g, or t
tgcagaaggcgttagcccttgatccagcagggtcaggcgttcgaagttcgaggcgcgatcttgtgcagctcctcgaccatctccggcacctggtgacctttgaccaccttctcttccaggcggtcgaacaggcggtagcgctgtgggtcacgcatgcggaaactcgaaagtaagcgcgggacagggcttccttgtctttgtcgacatccgccgagtgcagcaactcgttcaaatcaagctcgtagtcgagcatcaggcgcaggtagatttcggccnttggacttgaagtgtttgtagatcgtgcctttgccgatacccacggcatccgcaatcatctcgacggtgacgctgtcttcaccttgttcgaggaacaggcttgagcgcggtgtcgagaatttcctgctcacggcggcgaaattcacggaccttacgggggttctttgtgcatgaggaaaagtctgcaaaggtcggaaaatagggagggttgcgcagggccatggatacgtggggttacgatttacccctaaacgcctctg

SEQ ID NO: 692639 - DNA, 178 bp, Homo sapiens
attggggggggggggggggggaaattttttaaaaaaatggggccctttttccaaaaaaaattttttggccctttgggtttttttttttaaaaaaaggggaaacggggtttttttttaagaaaaaaggggcccaaagtttttttggccccaagggttaaaaaaaaagggggttccccca

SEQ ID NO: 692640 - DNA, 462 bp, Homo sapiens
  misc_feature (114)..(114): n is a, c, g, or t
  misc_feature (204)..(204): n is a, c, g, or t
  misc_feature (218)..(218): n is a, c, g, or t
  misc_feature (280)..(280): n is a, c, g, or t
  misc_feature (304)..(304): n is a, c, g, or t
  misc_feature (350)..(350): n is a, c, g, or t
  misc_feature (357)..(357): n is a, c, g, or t
  misc_feature (359)..(359): n is a, c, g, or t
  misc_feature (363)..(363): n is a, c, g, or t
  misc_feature (403)..(403): n is a, c, g, or t
  misc_feature (454)..(454): n is a, c, g, or t
ggctgccggaaaacagggcagacctgtatgattggtttattcctggggttgtcatatcatggctgataatgacacagacagaaaccagactgagaagctcctaaaaagagtacnagaactggagcaagaggtgcaaagacttaaaaaggaacaggccaaaaataaggaggactcaaacattagagaaaattcatcaggagctgnactaagcgtgcatntgatttcagtgctcatggccgaagacacgtagcccctaagaatagcctatatggctgggganccaggctttgctagcaggaaaccnagatataccattgaagagaaactgtttgaagctctaccaagactcnctagtangnagcnggcatccactataccatgtgggagaaccgataaggagtantgcctttggcaggtgactacttgacttccttcagttcaagggcggatcccnggcttttt

SEQ ID NO: 692641 - DNA, 184 bp, Homo sapiens
atgacaggtggacaggaggtcaggcgtacggggggaccaacaggaccagcatcaccagtgcgaccgcgaggaccaggcggcccaatggggccacggagaccgttgagtccatccttgccaggagcaccagcacgaattcccttagcaccagcacgaatcccttagcaccagcacgaattccctt

SEQ ID NO: 692642 - DNA, 237 bp, Homo sapiens
cggcctccccgaccaccctggtgatgactgtgccagctaccggcatctacttacactgcctatgaccaactgaaggccttcctgtgtgcgtcaaccctgactctgactcctacgcacccatggtggctggcgcgctggccgcctgggcaccgagacctgtcatcagccccctggagcttatgcggacaaacctcgagctcaccattctcgacccggaccgctcccctgtccaacgcc

SEQ ID NO: 692643 - DNA, 1074 bp, Homo sapiens
ggtgtgtagacacttcaagagtttgagaacgctactgtaaagagaccccccgcccttctgtccctgaaatattcgaccatattcaagatgtccaaactccaagtatttcttatctagcctatcagggtgctggctttgtgcataatcatttctcagattcagatgcaaaaatgttccagacctgtgtgccccagccatctagtgctcaagatatgcatgtccctgtacccaagcagttggcacatcttcctttgcctgctctgaaactgcctagtccttgcaaatccaaaagtctgggggacttaacatcagaggacattgcctgcaattttgagagcaagtaccagtgtattagtaagagttttgttacaactggcattagagacaagaagggcgtgactgtgaagacaaagtcgttagagcctatagatgccctgaccgagcagcttcggaagcttgtgtcctttgaccaggaagacaactgccaagtgctatattcaaagcaggatgccaatcagctcccccgggcactggtcaggaagttgtcatccagaagtcagagcagagtgcgcaatattgctagtcgtgccaaggagaaacaggaagccaacaagcagaaagttccaaaccccagcaatggggcaggagtggttcttagaaacaaaccctcagcacccacccctgcagtgaatcgccactccaccggctcctacatcgcaggctacctgaagaacacgaaagggggtggccttgaaggccggggcatcccagagggggcatgcacggctcttcactatggccacgttgaccagttttgttcagataattctgttttgcagactgagccaagcagtgatgataaaccagaaatttattttcttttgagactgtgaattatttaaaactgcattcttaaggttttcaaggtattctgtagaatgtcagagttttcagtaaataagttccttggctttggaatgattttcaaatgtatttttaaacttgtatttgggtctccctttgaaacaaacacaacaaaccacagaaaaacaacaacaaaacaaaaaagacaac

SEQ ID NO: 692644 - DNA, 112 bp, Homo sapiens
taccactagtcacggttggtatccaggcccaagacctcccaggacaggcgactgtgagctgggcagagaggagtgaagtcaggtgggggttctggcttgctgacaccagcgt

SEQ ID NO: 692645 - DNA, 848 bp, Homo sapiens
catggtggcttactcctgtaatcccagcactttgggaggccgaggcaggtggatcacttgaggtcaggagttcgagaccaacctggccaacatggtgaaaccccatctctactaaaaatacaaaaattagctgggcgtggtggtgtgtgcctgtaatctcacgctactcaggaggcggtaggcaggagaatcacttgaacccggtaggcggagagttgcacgtgagctgagactgtgccactgacgcgtccagcctgggccaacaaagtgagactccatcaaagaaagaaagacccgaccagagagagagacgcaaagagagacagagagaacgagagaaagcgagaaagcgagagagagcaacgagcagcgacgagagagacgagagctacgagacgacagagagcagagacgcagagacgcagacgagcgacgcagagagcagcagagagcagcgagcagacgagacacgagagagagaggagagagcgaccgagcgaccgaccgacgagcaccgaacgaggacgcgcaagtcgaataccgctgagttgtcctcttcaggtgctctttgtcagatgcctcagcatgatgatcgcagcatcacggtggcgcggagaaaagaaatggaagataaagggaagggacgacagagagagaaggacaaaacaatacagcaaaatgattaagtaaagatgagagcgcaacacaaatcaaacatacgactacagttatcttctattagtttcaccaacttcacccccacacaaactccatatcatcttcctcttcctttcatactcttaatctttagttgcatagtatcgataaaatataacacagagacagac

SEQ ID NO: 692646 - DNA, 382 bp, Homo sapiens
cgaccaaacccatgaggaaaaaaagcttaatcttgacttgatggggaatgcctgtaatctcagctctcagaaattgaaggcaggaggattagacggtcaaggtacatcgttagtttgaggccagcctgggagagacctatctcaaaaaccaaaccatacaaacaaacaaacaaacaaaaccaatgaaagtcccagagccctgttgtaggacgtgattgtcttctcccatcaattgtagcaacaattcataccacacattagtcagcttgttcttgtcttccatctaacggtgtggttcctcaattttttgagctattatagagatcaaaacaaatggtgacacagtcaagctctgtaagcataatgtgacaaccgtcgacgc

SEQ ID NO: 692647 - DNA, 477 bp, Homo sapiens
ccgtcgccgggggcagtccgccgtagggattcggctaactagagcccgaggtcggcacccctgagctggggccgaacgggggtccagggctgatgcggggtgggggagagcgttgcattaaatgcgatgagtgggtttggggggaggctgcggagacaaaagcagcaggtggggtagccggggagcaggggctcccttaccacccaggtgccaagggggaatcctggaagtgtcccgaagccttctttaatgaaaatctaggggactggaggctggttttactttccctttacttttggggggcgaggttgcaactgtgatgctttgtgggcaaacctaacttacggataggccgggggtctcaattctccctccaggggattgcctctggggctcccggctgccctgcgggattccccgaaggagccgcgccggggccagggaggggcgcgatttcctctcccaactcgccccctc

SEQ ID NO: 692648 - DNA, 421 bp, Homo sapiens
  misc_feature (12)..(12): n is a, c, g, or t
  misc_feature (70)..(70): n is a, c, g, or t
ggaacaaacccngatgtgaaggggttccaaccccacccacaccctcacctggggtgtgtaaagtgggtgnagtggaaaagcaataagccctgttgtccttgagaaagggatggggttgcacccacctaccccattaaggtatcaggttaccctctagggaatgggagtgagttcttgtaatattcttgccccatttgtaagattgttttgaaagctattacagagctgcaattctgtaagaatatgaagtagcattaaaacttaagtttcttgagtcttatgtaagaatttaaagatgtacatatgttttattagaggggcctctctttagtttttctcaaccttcaggtttttggtaaaattttcctctcctcccctccccaccagaatacaggggacacatctaaaaatggattgattg

SEQ ID NO: 692649 - DNA, 521 bp, Homo sapiens
ccggatctgatcactggcatttatatgtccagagagaccatgcttatttagcatagggcaaggcatgtcattcagagactatatcacatgtatctaacctcctctgaaatttgcctcttggtcattttactgaccctttgagattagaccatttgttatgaatgaagagataaaggtcagcgcttcagtcaaatttggcatccttgtgaaaaggtcgggcatccatgggattcatgtggacaagcgttggagccatttggccacaaattttatcttctgaataatcttgtgaatatctggttacaataaactcttgttgtttgctccagttggagaggagccacagctcaaaagaagatatctcaaaggaattagtaatcaattcctctcttcctttagggcaggaatctgcttccagcaaacgcaaaataagccatgctagaatcctgctgttctccccaactggctaggttgaggtcatggagttgactggggagtcgctctaaactgatgagtagaga

SEQ ID NO: 692650 - DNA, 108 bp, Homo sapiens
  misc_feature (15)..(15): n is a, c, g, or t
caggcgtgcgacttncatctggccctgtacgcacatttttaaaaataaactctaaaaaagagacagttgaaactaatgttaataacattttatttaaccacatatatc

SEQ ID NO: 692651 - DNA, 319 bp, Homo sapiens
tcgagtctgtaggaggccttgtgtgcgtgcgtgtgtgtgtcccttctcgtttccctgaagccttgagtgcgtgtgtgagagtccctcttcgcctactctgacgccttgcgtgcgcgcgcgtgtacaacttttgtactcctaaaaccttgagagcgtgcgcgtgtgtgtacattctcgtgtccctaagacttgcgtgcgcgcgcgtgtcccttattgctttcctgaagcctagacagcgcgtgagtgtgtcccttttcatctgcctgaaaccttgcgcgcgcgtgcgtgtgaggccctatatcgactctatgatacacag

SEQ ID NO: 692652 - DNA, 117 bp, Homo sapiens
actttacgcaggcataggttggtcctagcctttctattagctcttcagtaagattacacatagcagcatccccgtgtccagtgagttcacccttctaaatcacccacgatccacaag

SEQ ID NO: 692653 - DNA, 920 bp, Homo sapiens
ggagttctctcgagctgcccggatacggtgaggaggacggctctgcatactcgcggacagacgcggtcgctccctcggcgattccctgtgaacgtgggctcgaggaaaactggatctacagggagatgctagagctagtgtgttattgatagctatggtggctagttgtgtttaatgatcgagtgaaaacggttcggtaaaatgtgtgccatgatgcagcaagaatagtcaattaaagagaaatcaaggcgtggtaatgtaatagtcatcaagtggagaaaaaataaggtggaatttgttgtcgtacagaaggcgaagagagatctgggtctggagatgttggatgtgacaccaataatgcgtgagtcgctgttccagaagacgaatcttagtgggggaaatttgacgtatctcttgacaatacatgaattgtgtcagtgtatgcttcaggttactttgattgtcaaagaccttattgtacaaactattataatgtacaatccaatatggtaagaacagacgtttgacagattggggaaccaggttggggtcacatggatggaaacttaagggcacctttctgtaggaaaggtaagaaaatgaatgcctattgggaatgcatgctattgggatggccacatgttaacaagagagagaacattccagagggagtaaaagagcatgatctgtttagaagacaaattggaccaaggaaagatcgtacaatggcggggcttcggttgttggcttgaagagttgtggtgggatcctggagatttgtaaagtgctatgtgaggtggattgcccgtgtggttggaggaattcaaggtgggcaaaacaatttgttgtgcttcacaatgttccaaatgtaaattactactggcggatgtagatgaggcaaatattatttagagaccagg

SEQ ID NO: 692654 - DNA, 113 bp, Homo sapiens
tcacaccacggcactccagcctgggtgacagagcaagaccccatctctaagaaaaacaaaataaaacaaaaaacttaactcttcttgctcctgagttagagcaaaaagcaaaa

SEQ ID NO: 692655 - DNA, 314 bp, Homo sapiens
ctaatagtagtaagctgactcctacccctcacaatcatggcaagccaacgccacttatccagtgaagcactatcacgaggaaaaagctctacctctctatagctaatcggcctacaagtctccttaattatgacatttcgcaggcacagaactaatcatattttatatcttcttcgaaaccacacttatccccaccgttggcttattcatcacccgtatgatggcagacgcagccaggaatcgtcctgaatcgcagggcgcattagcttcgctagttctagcactccgtagatgaggcgtcccttttcccccta

SEQ ID NO: 692656 - DNA, 610 bp, Homo sapiens
ccgcccgctctgcaactctgagcctcctattgagcaaagataagctcataggcaaccaaagagcactttgacctggaagaggttctgggcccactgggctcggacggcacgacgcgggcctgaccagcgccccaggccccagagctgatgacgtgggatccccaaggaggtcgtaggctgtactctagccagcactctattacctcataactgctgttctcacgagaggctactgccagagaccaggcaggagctccctggagccacaggtcatccgcttccatctcttatctcttcattaattgagatggaatgtaccctattctagcccaaggctgaagtgcaagtggcatgacctcaactagcatcctcttggactcacgagagtccaacgacaacaattcctccacccctcagaactcctgagctacccgcgatccccaggccgtatgccaccatcatctacggctaaatcttgtaagagaccacgatatcgaccaagttggccagaggtggctctcggactcttggactctcgtgctcccacgcagcccagctcccaaacgtgtcgggattcacagcgccatcccaccggcacttggacaggtac

SEQ ID NO: 692657 - DNA, 609 bp, Homo sapiens
ggcggtggagctctacaagaaaaaaaaaaaaaaaaattccggggtgtagtagcaggtgcctacagccccagctactcgggaggctggaggggacagaatcgttccagccagggaggccagtcaagggctgcagggagctatactggaactccagccggggactctatctcaaaaaaataaacaaaaaccacggcactctagccggggattacaccactgcactccagattacaccactgcactctagccggggactctatctcaaaaagataaacaaagacaaaacagattagagcaggcttggacaaactacaacccacaggccaaatccaactctctgtctgcttctataagtaaagtcctatgggaagacagccaccttcattggtttacagatgggctatggctgctttcacactacaaaagcagagatgagtcctggcagagaccatttagcctccaatgcctaaaatatttactaactggtcctttacagaaaaaatctgcaaaccctcaatagagctgtcgggttataatgcagaatttgtaaagaaattaggtgcaaattcaaaaggatccaatcatctgttaacatttatggatccttca

SEQ ID NO: 692658 - DNA, 362 bp, Homo sapiens
ggggtcagggaaattttgggtggtttgggtggttttcttaaaaaacaagttaaaccctgccgttttttccaggctgggtaagcatgtttccctgtgggcttgctttgggggtttgttaaataaatgtcatatgtaaatgttaaaataaatcgccagtgtttcagaattgaataactccagtgacttgatgttttaaaccagggtaggatttaaaaatagagggtttttaatcctggaaattgtgattgtgccccatgaggggaggaactttcagttttaaagttaataaagtgtgtacccaaaagagttcttttttttttgtaccccctgttttgagggcaaaataattagggtaaaaacca

SEQ ID NO: 692659 - DNA, 355 bp, Homo sapiens
cccagaagacagaaaagaccacagatgagaaagcagttcacgcagagaacaaaacattcccggaccaaacccagggtcgggttgctcattcccgaggcccgatagcgagatgcagatgaactggggaagaagagggattttatttctgtaactggttacagggagaaggcctggaaatgattgccagaccaactccagattacagtttttccagagcttacacaccttctaagctctgtgtctccgtgtcagtgtgcattcgtctaaagacgtacgtgattcaattcttctcatctctaactgaggtctggtcctgaagatcttcctctgaagactcagtaaatttacttaatct

SEQ ID NO: 692660 - DNA, 966 bp, Homo sapiens
  misc_feature (940)..(940): n is a, c, g, or t
tgactctcctatgaaggtaaaggctagccctctgcagtgccagtgactgtgatacatggttccagtcctgggggtgaatacggcacacagtgagttctctttcttcgcacttttgaatagttggcagcgtggctgcatccaagtgagcacaagaggccataattgtcgggaagagtaatgtgacatgattatccccatgactggcagatggaagaaatcctctttgcgcagggattcctgttaccggtgcgttcattatctgactggcgcgtgccgggatggggaggtctgaagtgcatagcgactgatgatctcatcctctgctacgtgctgtttgacagaccgcggtgcaggacggatgtcacaaatgattggcgctgttcgccagtacgtagctggttcagtggtgcacaagatgccaccgctcgttcagtgccaaaagaacgagtgtgtgtgtacacctagttcattgaactggtacatgttgaggccatggcgtttgccgccgggaatgaatgtgaagcccagaacgccgtaaacacggtgtacctacacggggtgctatgtagtgtggggattagtgccgcaacacgctggacatctcagggacatggtgttcataaggcactagagatgacagggattgcggctaagcggcccgcgatctgagttcgtggtacccaggtcatgtgccgggcgacggcagacccatggtgaacgagactggttcatgtaatcgcggacgagcaggtcgagcctgaggtgcaactgcgaaagggaactggggacggatgaggccccaggcgcggcaaccgggcacggaggactcactaggccggcgaccagcgaaggcaacgggcgcaacaagagaggggaggcaccgaagaaggacaaaccgagggaagaagaaaagagacgaacgcgggcaaagacacacagncagaacacgtgaatcgacatgagacc

SEQ ID NO: 692661 - DNA, 1051 bp, Homo sapiens
ggggaagtcaccgtcaggcctgagaactgagtagctgtactgtgtggcgccttattctatgcacttgttgggcagaatgtcacacctgccgatgaaactcctgcgtaagaagatcgagaagcggaactcaaattgcggcagcggaacctccagtttcagcgggtgctcaaatctgaccctatcggaaactcaaaatggacgatgctcatctgacagaaacaactgggaacgtcgacacggttcaacaaatcaacaacacaagcccatgtactgtgggcttatcagaaactcacacctggaggcatgtctcaagaaagcagtgggacaatactaacagagttaccaaagtctccccaggacaatccacgtgtattaaagcaaagtggagaacagcagcacatgcacgcacttcccacattccagacactccacaacacagacacacagacagacaaacaggacggaacaaacatggtgacactgacttgctgaagccctgcatacagcaacaagacaaggccaaaacacacctgggaaaagcaccacaagggagtaaccacctccctggcacggcacagcaacactgtggcccggcaggacctaccgtaactacgcacaacacggacaaacctcacagcggtgggaggcaagcaccccgcactcaactgtgcactgcacaccgcatcgacaacgcttcaccgttgtcccccctgcgtgccaccccggcggaaccagcccaaacgcgccacttaatcttagctagcaattaccataaccgactattgggtactacacccgtaaagagcaaacatccctggcgcaaacgcgcacgcaaacacctcctggcaaagggcaaataatacaaggaacactgtgcggtttcaacacacaccacactggaaccaggcaaaaaccacacgcaacaacaacatttatcaatcacccgacacctccagggcaaccaacacggacacctgcagaatccagacctgacgcagaaaccgcggaccaaggggtacagcaacgctcaaagattatcaagcacaagcca

SEQ ID NO: 692662 - DNA, 109 bp, Homo sapiens
ctggcttgtcctgctctggatggcaggagggcgccggggtcctctcgacgccagagataaatctcatcatctgtgcagctcttcttaaacgcaagactacagaccagag

SEQ ID NO: 692663 - DNA, 474 bp, Homo sapiens
  misc_feature (1)..(1): n is a, c, g, or t
ntgatattcatcgactgcacgcatatgtgtatacaatagtatggcaattagcgccgtaatcatggcattgtaactagcatgctaacacatgtttagtcagcatcgaatatctatgtcaaacgttaatcagtctcagtcataaccgctgtattcaatgacagcgtagtctagtaatctgtaacatttctgcatataatgcgtattaagtctgttactttgtatcatttgagtatcagaagcgtctaattcgaaatcctgtccagcaatcgacagtatagtgcatccgttgcaaacgtatgtcgagcatcgcacatgataatggctcccgtctctgtgtagttccataatcgagtctgtgacagcagcccaattctgggctgtacagtacaacattgtatgccagcacctgcgtatatgactctagatgtctaccctggtggcgaattcggcagctcgtaacgaattcggcacgag

SEQ ID NO: 692664 - DNA, 221 bp, Homo sapiens
attcattttatggtgctttttcaatctattttatacagaaataaaatatgtactagaaaaattcgcatacaactacatgggcttacaagccctctatatgtattatgtcagttatctgtagtgtgccattaggtccgaaatatgcttcatttagatcctacattcttttcctgtatttaatgagttattagccactttgctgcacatacacttataacata

SEQ ID NO: 692665 - DNA, 460 bp, Homo sapiens
agcagtagtagcaaatgaccaatcgaagtactactatctatggtaaaaaggacactggtcaagtcatctgagtgtagagaatgtcccttacactgctggacaaataccactggctcccaagaaaagaaaatggtctagaagcctctgttgtaggctctcacaactcatctttccctaagtcatcaagctccacatcactgaggtcaatgtcatcctccacgggaagctcgccatccctgccgtcccaaggctctctactacaccgatggtagggaaagccccgcctacctacaggtgccgtggagccacgcccaaaagagagctccctgagaaactcgttgatgccttgctcactgaaggagcctatatcgcagagcaaatatcatcttgcgtgcattgatggcggacatggcggagtacccaaaccctccactccccaacgcggtctcaagtacagact

SEQ ID NO: 692666 - DNA, 124 bp, Homo sapiens
  misc_feature (14)..(15): n is a, c, g, or t
  misc_feature (40)..(40): n is a, c, g, or t
  misc_feature (70)..(70): n is a, c, g, or t
ttagaggagcttanngatcctaacaggcagtgttgtcctnagccatcttcttaaccaccacaccgggggncaccatagaggatctggagctcagcctgtcggctggcagggtgcagaggtggag

SEQ ID NO: 692667 - DNA, 929 bp, Homo sapiens
atttctttggctgggccagccggttgtttattgtatgatctttgctgggagacctgataagatgtgctagagactcgagagctgattggattgaatgcttgaagtggggacttataatgtgagaacaattggtaaggatgtttgattgtcggagttcatcaagggagaaattaaattgagaccggttgcagtgggtcgactgggaacgttggccttcgaagtaatatactctcgacgcatgcaatcggcatctcaataatcgcgttgcgtaatgagttatattcattctaacgagtgtcattgtccggaatgtgacaacataaacaatacttacagatttcggtattttatcttttggtaatcagtgctgggcggtagcaaataaacacatagggaattatggcctccattttctacgtgtcatagagctcgccggaggattcactcctaaggttgggcacctctgtacaagtcatgggccctgtctatcagtggtgcaacaattgtttcaaagagaacgtagtccctcctatgttccaaatgctatatggcatattctcatacctcaatgaatcgtagggccttctaatgcaaattctctctatgctatagtccaataaatagcaagggtagtgacgaagggtggattatgacaatgggcgaagatgaccaaatagatcttaggcagtactccgtcaattgtagaccagaataatgggtggaattaatatgggcgggatgagactgtacaatggacttaatgattaacattgcttcaattttagcggatcatttggatccttaaatgaaaagcagatttcttaggtatcaagataaaaggcgcagaggcaaagagacatgttattttgttggacttgtaaaatgtgtggttgataaagaggaaattaatgggaccctttctaaaggga

SEQ ID NO: 692668 - DNA, 342 bp, Homo sapiens
  misc_feature (1)..(1): n is a, c, g, or t
nccacctcactgtaccagtccaatttgggcccatgtaccatacacaaggctcggtctaccttctcatggggccaaggaagctctgtccacgtggcttgggttcctgacttcaggtccagccaccacagccgcggtcttgccatgatatgaacccgagaagccccaggccatataaagccggcatccacagagtccggaatattccctataaggggtcccgccttccttctccaggcgcttggaatacgcgcttatatagggtatagcctccctttgtcagggacacatatacgtgggtgctgtgccccagatagagtttctcttcacaggaagagacagcct

SEQ ID NO: 692669 - DNA, 108 bp, Homo sapiens
aaacatatacctcccctactatgcaaatacccaacacctagagtaaggagcgtactgctatattagatacccatgggctatgcctaccctacatatagacatagtagc

SEQ ID NO: 692670 - DNA, 340 bp, Homo sapiens
  misc_feature (242)..(242): n is a, c, g, or t
  misc_feature (252)..(252): n is a, c, g, or t
  misc_feature (285)..(285): n is a, c, g, or t
  misc_feature (312)..(312): n is a, c, g, or t
  misc_feature (330)..(330): n is a, c, g, or t
tgttctttccatgttcttccttctttatatgccaaaatgccttcttttatcgtttcctttctgcctagagaacttcctttagccatttctttaaggtaggcttgctaggaacaaaatctccttgcttattactgaagaatatttttgctagctttaaaattctgggctgacagttattttctttcaggcacttaaaaaatattatcttgggctggggcgtgggtgggctccatgcctgttanttccaggcantttggaggagggccaacgcagggcaggattcanttggagggttcagggagtttcggagantagcccggggcccaacangggtaaaaac

SEQ ID NO: 692671 - DNA, 849 bp, Homo sapiens
taactcactctgacccttagtgctgtattcacagtagaccctggtttcacttttcatggttatagttatctatagacaaccaccacctgaaaataggaaaaaaaattatgtatatggatttggtactacctgaggtttcaggcatccactggtgggtcttggaatgtatcccctatggttaatgtgtgatgaatgactacaaaccaactgaacttgctactatagcaatgatggaatggcatcaggtgcagtagctcctctgggaatagtaaagcacttctttctcctgctgccctgtgaacaaggacgtgtttgcatccccttccaccatgattgtgagtttcctgaggccttcccagccatgtggaactgccagctgccctttcccttcagccatgagtggcagcagcccgcaggccctcaccagatgcctaatcttgaagactccagccagccagaacttggcacactgcacgactagaacgagtcacaatacgaaaccctacctgcataaacggacccggcaacacctgaaacggcagcccatcaccccagccaaagacatgccccgaaccgaggcgcccctgctcacatcacaccaacagccccacatcccaccaaacatgtaccaacctaacacaaggaaccacacacgcaacaaccacacggcccacgacacgaccgcacaacaacaaacccagcatgacccaaacaacaccctgcaaccctgcgcacacaacgcagcacaccaacgcgcaaaaaacacccgacagcaccagagcccacacaccacccccgccacacacacaccacaccccgcacccacgcaccacctggtgcccacacaca

SEQ ID NO: 692672 - DNA, 127 bp, Homo sapiens
ttaacgtgactgcggggtggctgggagctcagctgcccccccattgagaagatctgtcccgctggccacatgcagcgcagggtgctatattaccatgctgaaggcccgggaagtatgtacacggggt

SEQ ID NO: 692673 - DNA, 707 bp, Homo sapiens
gcagctcctgaccgcgagtgatccgccagcctcggcctccggaggtgccgggattgcagacggagtctcgttcactcagtgctcaatgttgcccaggctggagtgcagtgtcctgatctcggctggctgcaacctccacctcccagccgcccgccttggcctcccaaagtgccgagattacagcctctgcccggccgccaccccctctgggaagtgcggagtgtctctgcctggccgcccattgtctgggatgtgaggagcccctctgcaccggctgcccagtctgggaacgtgaggagcgcctcttcctggacgacatcccatctaggaagtgaggagtgtctctgacccggtccgcccatcatctgagatgctggggagcacctcagcgcccgaccgccccgtctgggatgtgaggagcgcctctgcccggccgagacccagtctgggaggtgaggagcgtctctgacccagccgacccagtctgagaagtgaggagcccctccgcactggcagccagaccacgactgacaagtgaggaagcccacgtccgaccgagcagccagaacacgatcacgacacaggagaggcaggaagagagatacagaacgccccgaacccgaaaacagaaccacggacctaaacccacaaaagagcagagaacaagacgaaacagaacaccccaccaggagcacaaaacgaaccag

SEQ ID NO: 692674 - DNA, 173 bp, Homo sapiens
tagaggatccccgtcactgacacactatgcacgatctgaaggattatgtggatatcggttcaagggaagtagagtagagagtatggagatgtcccatatatggctaactgtgtactatattcaaagtgaaagacactccgcatcagacgatgaatgaacaggaacgtagtttc

SEQ ID NO: 692675 - DNA, 381 bp, Homo sapiens
ataattgcccaatttttggccaattactgagtaacagcagttgtggtggtgggttaaatcagggaataaatatttgcaaagataaaactgtaaggagcccctcgtcgcaccatacagctcaaaacaatcacaaatatggtgggctcattgagcactttcctacgacatcatttattgttgtacatttgtatgattattggatgctttattacaatcatttgtatccattcattttctaaggcacttcttccagttcagggtcatcaagggtggctggaggctatcctggaagctcggggtgcaaggcggcaacccaccctggacaagacaccgtcccatcacagcacactcacccacacccacccaagaacagggtttgta

SEQ ID NO: 692676 - DNA, 226 bp, Homo sapiens
  misc_feature (68)..(68): n is a, c, g, or t
  misc_feature (82)..(82): n is a, c, g, or t
  misc_feature (100)..(100): n is a, c, g, or t
  misc_feature (177)..(177): n is a, c, g, or t
  misc_feature (219)..(219): n is a, c, g, or t
tttcaaacaatcacacctgcctgagaagggagtgggctgtcactgggatttttatccccagtccgtcnggatttttgtagangggcttcatgtgctggtnccaataggacaggaagattttaatcagcttttacttatcttatgtttttttatggaaactgtgtgtatgtaatacantacatttccaaaaagaaaaattaaactgattatagagattanaaaaaaa

SEQ ID NO: 692677 - DNA, 766 bp, Homo sapiens
tgagcctggagaagcacaagccccattcccatgagaattgtatggcagccgaggcctccatcggaggcagacgacctgatgaagagagtgggtttccaggtatgaggggcacctacaagtgtggtagaaccccctcacaagctcctgaggccgctgggcaccgtacttctccacaccctctcgtcacagcgggccatccactcctgtgacacagccgcctcgtacctccgagtcgtggaggagctctcgcggaccattgacctcaagctgaacattcacttggcccccgggtctcctggtcaccagggccagcccctcgatgcatgctagctacccgagcccaggcgtaccattcgtcagttgtcaagcactcgagaccatcttggcctctccagaccctgctctgagcacccaggaggcttgagtcacctcctccacgtcactaccagtccccaacatgaaggaaggagagagggacgccacattcggtctgtccctagagcttattggccaatggctctcactcactgagtgggtccaggtttgggagggagggactagggggaggaaaggggcgagcacccacgtgagagaatctgcctgtggccttgcccgccagcctcagtgccacttgacattccttgtcaccagcaacatctcgagcccctggatgtcccctgtcccaccaacttctgcactccatggccacctcagtgccacccgtaggcagccttctctgctaataagacaaggagacgcagcaagc

SEQ ID NO: 692678 - DNA, 1684 bp, Homo sapiens
  misc_feature (655)..(655): n is a, c, g, or t
  misc_feature (922)..(922): n is a, c, g, or t
  misc_feature (1683)..(1683): n is a, c, g, or t
agggaggctaagaggcgggaggatagcttgagcccaggagttcgagacctgcctggtgcaagtatagcgagaccccgttctccagaaaaaggaaaaaaaaaaaacaagaagacaaaaaaaaaaaattaagcgttaactttcccttcaaagcaacaacccccccccaccggttttagagagctaggcctcagccagtctttgccactcccattctcaggtgctttcctgaaagagcgcgtgttttgaggtgttgattgaacaacgcacattgcaatttattgccaaagcagttatttgacgcagaattaattatattctcttttcttttctcttattggcgttaacaattcattgaattcccggccagggatcacgggggcgctccacaccctttgttcattccacaggcaccttttggcgagaggcgccaaggagcggcgcggcgattatacctttagattacctctaaggggtcaggagacgtctcagaagaccacagccttggtgcccacattacttggtagaacaccttcggtcactctataacccgaaaaaataacacaacacaaccaaacaccacaacaacagaggggcgacgagagcgcgcgctctctaatagagaagtatcatctcccctctagggagggggcgcgcncccacagaggctattaccgcgcggtacacccccacaggcttatcttcgctgcgggtcccacaaacgctggggacccccaaaataaggacagcagccgcggctatataaaaagcccgcctaagaagcgcaccagtagcgcgcccgcacgctggttgatatacacaacaccaccacgcctacgatacgaactcggtgggggccaacaacaccagcgctgaccacaccgacttgcgagggccacacccactgtcggagcggaacacgagngcgagagacaccacctatacacacctccccgcaacgggagggcgagggacagacaccaactataattagtgtgcagccacaaacgatcatacccactatcaacacgagagactattcaacacaagcgccctctcaataagggcgacacacctactttatactacaacctatgtcataccacgcggtggtctatacacgagcgtggtgtctcacaaaccacaaacgcgcgtcgcaaaatttcctgctgtgcccgcagcgttctaacaaacaaacattttgcggcccaacgaggcaacgcacattcgcactctcctgacaccaccacatttttattcccgacggagtcactcaccacactaagattcactcagcaccagcatacgcaacaacatcactcattacaggactcaccactcactcatactatcacaccacccatcatcagtcaagccgcactacgcacagcgaggtcaacaacagactaacaacacagagagcaagtagacagcagagagcacgacagcaagcaaacagagaaccagacagacaaatcaacccccaacaccaacaaccacgacacacaccaccaccccaccaacacaccacacacgcacacacacacagagcgagacaccacagaccacagacacacaagtaacgaagactacagaccgcacgaaacacagagacagcacacacgcaaacaacgtagcggcagtccacacagcacgaacccaaaccatcgagcccagacgcagccnc

SEQ ID NO: 692679 - DNA, 115 bp, Homo sapiens
atgctacgcggcatggcacgtgagctccggaatagatgtcttcatcacttcttccacagtggtgtgacacggttggccgttacctatttcctcagatccacagtcttcgcctgat

SEQ ID NO: 692680 - DNA, 183 bp, Homo sapiens
tcaaatttgacaaaaaaaaaaaaaaatgggtgtgtttggcccaaagggcttggtggtaatggacctccccgttccctcaagttttggagggctgaagtgttgaacaaaactttgttcaggctgttttaatctcagaatggccccttcctttcactttcacatttaatttaattccggttgtca

SEQ ID NO: 692681 - DNA, 170 bp, Homo sapiens
caatctactataatcactgcgcccgctcataaggggatggccatggctagtgtttatagatgttgggtggttggtgtacatgagtgagcgcaggagtccgaggaggttagttgtggcaataaaaatgattacggatactagtataagagatcaggttcgtccaaccaata

SEQ ID NO: 692682 - DNA, 262 bp, Homo sapiens
cccactattgcgttgtcgaagatttacaaaaattttgcattacataatttacactaaagcaagtgctatcacctcccctggtttggacttggaagagcgcctgcggcattctccttagagagaagtggggtggcttttaggatggcaagggacttcctgtaacaacgcatctcatatttggaatgactattaaaaaacaacaatgtgcaatcaaagtcctcggccacattgtgaactttgggggatgctcgctccaaccgac

SEQ ID NO: 692683 - DNA, 3351 bp, Homo sapiens
ctcatatttcataaaatatgaacttttcccggcccacatccctaggccttcctgatgcgcttgcctgctccctggtctctctgcatggggaaggagtgttcccagcttgcaaactccagctttgcctgtgagaggaacaagcgtccctgatccagaaggtgttcagatggagatggcgagttctgctggctcctggctctctggctgcctcatccctctcgtcttcctccggctgtctgtgcatgtgtcaggccacgcaggggatgccggcaagttccacgtggccctactagggggcacagccgagctgctctgccctctctccctctggcccgggacggtacccaaggaggtgaggtggctgcggtccccattcccgcagcgttcccaggctgttcacatattccgggatgggaaggaccaggatgaagatctgatgccggaatataaggggaggacggtgctagtgagagatgcccaagagggaagtgtcactctgcagatccttgacgtgcgccttgaggaccaagggtcttaccgatgtctgatccaagttggaaatctgagtaaagaggacaccgtgatcctgcaggttgcagccccatctgtggggagtctctccccctcagcagtggctctggctgtgatcctgcctgtcctggtacttctcatcatggtgtgcctttgccttatctggaagcaaagaagagcaaaagaaaagcttctctatgaacatgtgacggaggtggacaatcttctttcagaccatgctaaagaaaaaggaaaactccataaagctgtcaagaaactccggagtgaactgaagttgaaaagagctgcagcaaactcaggctggagaagagcccggttgcattttgtggcagtgaccctggacccagacacagcacatcccaaactcatcctttctgaggaccaaagatgtgtaaggcttggagacagacggcagcctgtacctgacaacccccagagatttgatttcgttgtcagcatcctaggctctgagtacttcacgactggctgccactactgggaggtgtatgtgggagacaagaccaaatggattcttggagtatgtagtgagtcagtgagcaggaaggggaaggttactgcctcacctgccaatggacactggcttctgcgacagagtcgtgggaatgagtatgaagctctcacatccccgcagacctccttccgccttaaagagcctccacggtgtgtggggattttcctggactatgaagcaggagtcatctctttctacaatgtgaccaacaagtcccacatctttactttcacccacaatttctctggcccccttcgccctttctttgaaccttgccttcatgatggaggaaaaaacacagcacctctagtcatttgttcagaactacacaaatcagaggaatcaattgtccccaggccagaagggaaaggccatgctaatggagatgtgtccctcaaggtgaactcttctttactacccccgaaggccccagagctgaaggatataatcctgtccttgccccctgaccttggcccagcccttcaggagctcaaggctccttctttttagggatatgccacattacctgctcccatcaccatccagcccagcaccctggacttcagtcgcctggcccaaccccatgattatggaacgtctcttcaccttaacccaaatccagacccttttgtggtttctatttgtaccacttttctcccaggcctcagttctgaagcttacctttcttctaaggaattgaagctcccagtgacctggagggaggattcctggaaaccaaacaatcagtttaggtgcaggtggagatgttgaatatgtgttaccaagatacagcacaggttcagggaaaagagttcgctactccaggggttatttagaagacactttctctgcctcatcctgccctcaagctttagtcaagaagttatggcccccagtccctgacttcttacttatcccattgaggactgcctttctctctctcagttctggcctctgccccccaaagtcagctctctaaaagcaagcatgttttagaccactcactctttccctctttcttcaggaatgaattgggaaaggctgatgagtaaaacataccatccttttctattttcttgatgctgtttacaacatagtttggtgatatccagagctaatgtacatgctttcaaaagctaatctgcctgttgatgataactaggtacagcgactttaaatacagttgctataatcctgaaaagccccaggagcacatcagggagctgggaaacacagttgcagagaactcagctgtatgttgccctctgaccttggcccagaccttcagaggctcagtctgttgagtctgttgtgactgtcttatgaatcaatctgttgtgccaaccctttctgagattcagagaggtccagctagaaaaagtggcagttttaaccaccaacgtagaagcttttttttccccacaagaccattgtactgcaatacttgactatttgtgtagcaaacagcctcttaggttggagagtattgatttcaaataggaagttggtagactaggtgtgaggatgaaataatgaccttgatttttgggtgtgtattgcagaagcctcgtcgctttcaagtcacatcatatatgcgatctggcctaaccatggagatattggttatcagtttgcagatgaatacacagttctatccaacagaaactgtatctttctgtttgtcagaagttctccgttagttcctgtattagtcaaggttttccagagaaacagaatcaatatatattggggcaggggggcggtggttattataaggaattggctcacgtgattatggaggcggttaaatcccaagatctgcaggataagtcagcaagatggagtcccatgagagctgatggtttagttccagtctgatggcagcaggcttgacgccaaggaagagatgatgtttaattcaagtccgaaggcaaggaaaaagctgatggtcctgtccaaaggctattaggcaggaagaattctcttagggcagagttagctcttttgttctattcaggccttcaactgattcagcaaggcccgcccacatttgggaggacagtctgcattactcagtctactgatttgaatgttaatgtcattgagaaacaccctcacaggaacactcagaataatgtttgaccaaatagctgggcatcttgtgacccagttaagtggatacataagattaactatcacagtgactcagtggaattttttgtttgcttttgtacagttttaaaataaaagtttggtatttgtgtttt

SEQ ID NO: 692684 - DNA, 746 bp, Homo sapiens
  misc_feature (746)..(746): n is a, c, g, or t
aggcaagatggcggcaaccaagaggaaacggcgtggaggcttgcagtcaggcgaagaagccaaaaagaaacgaaatagatgcggagccgcagctaagcggcacgccacagcagaggaggtgaaggaagaagagagggacggatcccaggccccgtttgcaagggaatgtggcaaatttaaggaacggattctcatcttttcttccagaggaataaattttagaacaagacatttaatgcaggactttgagaatgtgatgcctcattctaaagcagatactaaaatggatcgtaggataagctatggtgataacgaggtgggtgaaatgaagaacgtgtaataaatgcatctatttggaagctaagaaaaaaaggatctctatatgtggtttcaaattcacctcagcggaccattgtgtaaattcctgtgttcaaaatattcataccctcgctgaactgaagatgactgaaactgttctgaaaggttctccggccctttgagtctttggaccctgctttgtgatgaattaccacattatgcttgtgttaaaaagaactcttaaattccaggatcttttaggtacacccacggtatcatcccaaaaaaggcaaccattgtgtggacctccggtgtttaactttcacccatttgtggtctatcgcgatatggctcgggagcttttcagatccttagaaagaaaatgctgggtctgtagaaaataggaccccggtttgtcttaaaatttn

SEQ ID NO: 692685 - DNA, 602 bp, Homo sapiens
  misc_feature (25)..(25): n is a, c, g, or t
  misc_feature (69)..(69): n is a, c, g, or t
  misc_feature (97)..(97): n is a, c, g, or t
  misc_feature (101)..(101): n is a, c, g, or t
  misc_feature (155)..(155): n is a, c, g, or t
  misc_feature (159)..(159): n is a, c, g, or t
  misc_feature (168)..(168): n is a, c, g, or t
  misc_feature (173)..(173): n is a, c, g, or t
  misc_feature (175)..(175): n is a, c, g, or t
  misc_feature (184)..(184): n is a, c, g, or t
  misc_feature (213)..(213): n is a, c, g, or t
  misc_feature (256)..(256): n is a, c, g, or t
  misc_feature (284)..(284): n is a, c, g, or t
  misc_feature (317)..(317): n is a, c, g, or t
  misc_feature (321)..(321): n is a, c, g, or t
  misc_feature (323)..(323): n is a, c, g, or t
  misc_feature (327)..(327): n is a, c, g, or t
  misc_feature (353)..(353): n is a, c, g, or t
  misc_feature (475)..(475): n is a, c, g, or t
  misc_feature (490)..(490): n is a, c, g, or t
  misc_feature (493)..(493): n is a, c, g, or t
  misc_feature (498)..(498): n is a, c, g, or t
  misc_feature (531)..(531): n is a, c, g, or t
  misc_feature (602)..(602): n is a, c, g, or t
gacaggcccggagcgagccccggangcctggctgatccgcggccgggcccgcacccggagcggcgggangggcggggagccgcggtcgcgccgggcncctnccaccccgccctcggcgcccccgcccctccaggaaggggaggaggcgaggggancccnccgcggagnccgancnaccccccancccaacctggcgactggggaccccggcanataaggtggacgcccccggggaaaacttgggtgcacagccaancgagaaggtcttgagtcaaacaaagcancaaccttggggaccctggaccactatcatgganactnanagcnagcaaaactccaattccaccaatggnaattctagctcagggggcagctctcggccccaaatagctcaaatgtcactatatgaacgacaagcagtgcaggctcttcaaacacttcaacggcacccaatgcagctcagtatttccaccanttcattctccaccancanctcantaattcccagctgcatacctggctgccgtccancaggccacaatttctgccaatcggcaggccagctccccaaacaccagcactacacagcagcagactaccan

SEQ ID NO: 692686 - DNA, 507 bp, Homo sapiens
  misc_feature (60)..(60): n is a, c, g, or t
  misc_feature (201)..(201): n is a, c, g, or t
  misc_feature (260)..(260): n is a, c, g, or t
  misc_feature (267)..(267): n is a, c, g, or t
  misc_feature (278)..(278): n is a, c, g, or t
  misc_feature (284)..(284): n is a, c, g, or t
  misc_feature (325)..(325): n is a, c, g, or t
  misc_feature (333)..(334): n is a, c, g, or t
ccgcaagctgcagaaggagcagcagcgctccaaagacctggagagccggcagcgatcccntaggagccaggccaaccgcagcctgcagctccgaaattcaaggaactagaactgcaggcccagatccatggcctgccagtgcctcccactccaggctgctttccttggccacgacttcggcttctgacagcctcaagccangagcagctggacattgaggaggagggcaggccaggcgcagcaacgttccatgtaggggnggggacnctgcccagaantgctcncccatcatgcaagcccgcctggcagcgcgccctcagatgcnccttcgtnnggacctgcactttcccgagcgaccacctgggggacctgggagaccccttccacctggggctggaggaccatctcgtggaatttggcaggaggaggagggggtggtgggaggactgtcggggggtgccctgtccccactgcgcggcttgcccatcccgaaaaatcccctgctct

SEQ ID NO: 692687 - DNA, 186 bp, Homo sapiens
tcaacgaagtccctgagtccagcagcatgctagcaacattccggagcaccagagtgtaagtgccgtcaaggagatcacccagccgtcgacgcttacactgctgtaccagtcacagaatggtgcccacctcctgaactttgatggagttggagaggttacttggaatcgtacccgcaatccgacggc

SEQ ID NO: 692688 - DNA, 5301 bp, Homo sapiens
  misc_feature (1691)..(1691): n is a, c, g, or t
taaaagacatccagccaaactctcagtcttgccttaacaatgttccagaggctgaataaaatgtttgtgggtgaagtcagttcttcctccaaccaagaaccagaattcaatgagaaagaagatgatgaatggattcttgttgacttcatagatacttgcactggtttctcagcagaagaagaagaagaagaggaggacatcagtgaagagtcacctactgagcacccttcagtcttttcctgtttaccggcatctcttgagtgcttggctgatacaagtgattcctgctttctccagtttgagtcatgtccaatggaggagagctggtttatcaccccacccccatgttttactgcaggtggattaaccactatcaaggtggaaacaagtcctatggaaaaccttctcattgaacatcccagcatgtctgtctatgctgtgcataactcctgccctggtctcagtgaggccacccgtgggactgatgaattacatagcccaagtagtcccagagtggaagctcaaaatgaaatggggcagcatattcattgttatgttgcagctcttgctgctcatacaacttttctggaacaacccaagagctttcgcccttcccagtggataaaagaacacagtgaaagacagcctcttaacagaaatagccttcgtcgccaaaatcttaccagggattgccaccctcggcaagtcaagcacaatggctgggttgttcatcagccctgcccgcgtcagtacaattactaatagtttcaagttttgttggttggtttctcttggtttgtgctaacatgtatggatgtgtgtatatgtacagtgaaaatgttgtctctttacaaccaattgataaccaatcacatagttttatcagtgtatttagacactatcttgaaaatcagatttatatgctgtgtatcacataatgccttgcctttaacatttactttttttgtacactttttcagattatttctggaaacatatcaatataattacagtgtttgggggtgtctttaaatatattaggttatacattagtcagcattttaaagacatttcttcccaagtacgagaataggcatctttcattttcattttattttgtattacttaatcttttaagcaagcaaaaatttattctcagggtcagctgtacactttattgaccagtacttgataatctctctgtatatgatgaatacatttttatacactaacattagcattaacaggtgatagttgccatggatataatggaattatggctggactttcttttgaaagaaaacttgatgtattctgtgtgtatggtttttccccagattagtcatacagttcatttggaattcaggtacattaagctttagtgaagagtgcatgcagtaattccaatgtgactgcatgacgtggtacagacattacaggtgttgtagacagaggcacttgtctcgtgcagagggattaaattagacctgtgagattatatttggaaaaattcatgtctgtaactaacccattagtgcagtatttaatttgttactattccttcccgccaattctgtccactcctcacctcgcatcagctataaatttggaaatacttgtccaggcactcaagtgacttcatatttctctctgcccatgggaaaagagataggctttatatttccacagantgaaaaatcctctgtcatggagcctgtcctgccaagtggcaagaatgtggggactgtctggtgatgatgtctttcatggcatctgagtgaagaatgacaggttggctcaacttttttcttttttttttttaattgccttgtattgtaagtattcttccctgcagtccaagtgacttttcattttttgttttaacttcaggcaaaatctttaaccactctggcctctgtttcccccaccaacggggagcagtgacatttacctccctcacagagtcactgtgaggattctatactgatttgaagtggagctgttcagaactgaaccttgtaggaaattccaagggcctttctactgaatctggtgatggggtggggccgtggcactttctctgccacagctgttcttcacagtgttggtgctaatgaggccagggtgcagggttcgattcacacgtaggccagttaacttagagaaaatctatttccttacctctagccagtcacttcctttttccgcagttgtgatgggttttgctgagccatccactctgactgatttcctctgaagtaaacatatttacaatccaaagcaattctactgacagaagtgttgccttcataatcaaacagcttgtttttccatctcctctgcaaccctaattaaatgagtacaggtctacaaaatgttttcaaggagaaaagcagcatatccttaagtgaagtattatatttttcaataaccctgtagtggcttgatgcagggaaccctgggggactttcagcgaagagctgtgctcttttctgactagattagagcgtttggagtggaagacgtcaaatgtgtagtgagatggaggttttacattgttcttctactggctgtgatgaagtgccagaatgtctctttagaacaagagttagattccccctttctccttattgccccttccgttttgacttcccctttatttatttgctgtctaattaggggccaagtctgtaaagttttgtcaaagtgagttagaagttgttttttcttactatttgtgtttaccagagttgggagataagatagtttccatgaaggtgtgtatgttttatacgatgtttgttatagggccatgcattggtaacttgaaaatagacagacagcttaatgtcttcaggatgtaatcagacagcttaatgtcttcagggatgtaaaactctgactacacggcgtctctttttcatacattgcatgtaagttgttagtacctcacaagctacagaagttcagccatgagattttgtttggcaacatgaacagatttgtgtataactgcaatggccttttttccagatttccttattgactttttgtttgccttacctggggctagttttttatgctttgtacctagaaaacaaaaaattacattcgttgggctttttttcaaggttgggattaccacaccacctggaatatcatactgtggtttctgcctaaaattggcacatgtaagtattgaagaaaatggttatataattcagttgaaactcttggttattagatgttaggcatctcctgtatgtaagacacaaggccaaccacaacacagaacgatgttgacctgttaagtattctctgaaacatggccaaaatgcattttatgagctttttttttttgctattgtaaatattagtggtttacaatgcgctttaaacatatttctttaaaatgcaagcagtgagaaataagacctctctgaattagtagctctaaactgttaacatagaatgttacttggaaaaagtctggaatatgtggtgtacacaagcagtgcttcgtgaatgagtttcttagcttttatagtgcgccatgtttctcaaagtttgtttttgttgacaaaacattttataatatatatcttatgtttattttttttctcaactaattgtgtactgcactgtaaggtgaaaattagccatccattatttatcttctgtggcaatgcatttatatggttgattgggtggggaattttttgcagaaagatgcaaagtgatgggttttcgacttcctatcgcagggagcttttaagaaatattaatttcctatacatttttccaatccccatgcaaactgttcctgtttacataccttctctgttgtatcagtactttgagtgagaagacagtttatttaaaacttgagcaggctgttcagcattttttctgcttctgaaatctgtatagtacactggtttgtaatcattatgtcttcattgaaatccttgctacttctcttcctcctcaatgaaatacattatatattatctttatgtactcttaagaaaaacgagcaaggaagagtatcttcattattctcattttctctgagttggaaacaaaaacatgaaggactccaactagaagacagatatttacatttaaatagattagtgggaaaactttaagagtttccacatattagttttcattttttgagtcaagagactgctccttgtactgggagacactagtagtatatgtttgtaatgttactttaaaattatctttttattttataaggcccataaatactggttaaactctgttaaaagtgggccttctatcttggatggtttcactgccatcagccatgctgatatattagaaatggcatccctatctacttactttaatgcttaaaattatacataaaatgctttatttagaaaacctacatgatacagtggtgtcagccttgccatgtatcagtttcacttgaaatttgagaccaattaaatttcaactgtttagggtggagaaagaggtactggaaaacatgcagatgaggatatcttttatgtgcaacagtatcctttgcatgggaggagagttactcttgaaaggcaggcagcttaagtggacaatgttttgtatatagttgagaattttacgacacttttaaaaattgtgtaattgttaaatgtccagttttgctctgttttgcctgaagttttagtatttgttttctaggtggacctctgaaaaccaaaccagtacctggggaggttagatgtgtgtttcaggcttggagtgtatgagtggttttgcttgtattttcctccagagattttgaactttaataattgcgtgtgtgttttttttttttttaagtggctttgtttttttttctcaagtaaaattgtgaacatatttcctttataggggcagggcatgagttagggagactgaagagtattgtagactgtacatgtgccttcttaatgtgtttctcgacacattttttttcagtaacttgaaaattcaaaagggacatttggttaggttactgtacatcaatctatgcataaatggcagcttgttttcttgagccacggtctaaattttgtttttatagaaattttttatactgattggttcatagatggtcagttttgtacacagactgaacaatacagcactttgccaaaaatgagtgtagcattgtttaaacattgtgtgttaacacctgttctttgtaattgggttgtggtgcattttgcactacctggagttacagttttcaatctgtcagtaaataaagtgtcctttaacttc

SEQ ID NO: 692689 - DNA, 5339 bp, Homo sapiens
  misc_feature (535)..(535): n is a, c, g, or t
  misc_feature (1729)..(1729): n is a, c, g, or t
taaaagacatccagccaaactctcagtcttgccttaacaatgttccagaggctgaataaaatgtttgtgggtgaagtcagttcttcctccaaccaagaaccagaattcaatgagaaagaagatgatgaatggattcttgttgacttcatagatacttgcactggtttctcagcagaagaagaagaagaagaggaggacatcagtgaagagtcacctactgagcacccttcagtcttttcctgtttaccggcatctcttgagtgcttggctgatacaagtgattcctgctttctccagtttgagtcatgtccaatggaggagagctggtttatcaccccacccccatgttttactgcaggtggattaaccactatcaaggtggaaacaagtcctatggaaaaccttctcattgaacatcccagcatgtctgtctatgctgtgcataactcctgccctggtctcagtgaggccacccgtgggactgatgaattacatagcccaagtagtcccagggccaggaaaagctgcttataanactcacgggcacagaagtggaagctcaaaatgaaatggggcagcatattcattgttatgttgcagctcttgctgctcatacaacttttctggaacaacccaagagctttcgcccttcccagtggataaaagaacacagtgaaagacagcctcttaacagaaatagccttcgtcgccaaaatcttaccagggattgccaccctcggcaagtcaagcacaatggctgggttgttcatcagccctgcccgcgtcagtacaattactaatagtttcaagttttgttggttggtttctcttggtttgtgctaacatgtatggatgtgtgtatatgtacagtgaaaatgttgtctctttacaaccaattgataaccaatcacatagttttatcagtgtatttagacactatcttgaaaatcagatttatatgctgtgtatcacataatgccttgcctttaacatttactttttttgtacactttttcagattatttctggaaacatatcaatataattacagtgtttgggggtgtctttaaatatattaggttatacattagtcagcattttaaagacatttcttcccaagtacgagaataggcatctttcattttcattttattttgtattacttaatcttttaagcaagcaaaaatttattctcagggtcagctgtacactttattgaccagtacttgataatctctctgtatatgatgaatacatttttatacactaacattagcattaacaggtgatagttgccatggatataatggaattatggctggactttcttttgaaagaaaacttgatgtattctgtgtgtatggtttttccccagattagtcatacagttcatttggaattcaggtacattaagctttagtgaagagtgcatgcagtaattccaatgtgactgcatgacgtggtacagacattacaggtgttgtagacagaggcacttgtctcgtgcagagggattaaattagacctgtgagattatatttggaaaaattcatgtctgtaactaacccattagtgcagtatttaatttgttactattccttcccgccaattctgtccactcctcacctcgcatcagctataaatttggaaatacttgtccaggcactcaagtgacttcatatttctctctgcccatgggaaaagagataggctttatatttccacagantgaaaaatcctctgtcatggagcctgtcctgccaagtggcaagaatgtggggactgtctggtgatgatgtctttcatggcatctgagtgaagaatgacaggttggctcaacttttttcttttttttttttaattgccttgtattgtaagtattcttccctgcagtccaagtgacttttcattttttgttttaacttcaggcaaaatctttaaccactctggcctctgtttcccccaccaacggggagcagtgacatttacctccctcacagagtcactgtgaggattctatactgatttgaagtggagctgttcagaactgaaccttgtaggaaattccaagggcctttctactgaatctggtgatggggtggggccgtggcactttctctgccacagctgttcttcacagtgttggtgctaatgaggccagggtgcagggttcgattcacacgtaggccagttaacttagagaaaatctatttccttacctctagccagtcacttcctttttccgcagttgtgatgggttttgctgagccatccactctgactgatttcctctgaagtaaacatatttacaatccaaagcaattctactgacagaagtgttgccttcataatcaaacagcttgtttttccatctcctctgcaaccctaattaaatgagtacaggtctacaaaatgttttcaaggagaaaagcagcatatccttaagtgaagtattatatttttcaataaccctgtagtggcttgatgcagggaaccctgggggactttcagcgaagagctgtgctcttttctgactagattagagcgtttggagtggaagacgtcaaatgtgtagtgagatggaggttttacattgttcttctactggctgtgatgaagtgccagaatgtctctttagaacaagagttagattccccctttctccttattgccccttccgttttgacttcccctttatttatttgctgtctaattaggggccaagtctgtaaagttttgtcaaagtgagttagaagttgttttttcttactatttgtgtttaccagagttgggagataagatagtttccatgaaggtgtgtatgttttatacgatgtttgttatagggccatgcattggtaacttgaaaatagacagacagcttaatgtcttcaggatgtaatcagacagcttaatgtcttcagggatgtaaaactctgactacacggcgtctctttttcatacattgcatgtaagttgttagtacctcacaagctacagaagttcagccatgagattttgtttggcaacatgaacagatttgtgtataactgcaatggccttttttccagatttccttattgactttttgtttgccttacctggggctagttttttatgctttgtacctagaaaacaaaaaattacattcgttgggctttttttcaaggttgggattaccacaccacctggaatatcatactgtggtttctgcctaaaattggcacatgtaagtattgaagaaaatggttatataattcagttgaaactcttggttattagatgttaggcatctcctgtatgtaagacacaaggccaaccacaacacagaacgatgttgacctgttaagtattctctgaaacatggccaaaatgcattttatgagctttttttttttgctattgtaaatattagtggtttacaatgcgctttaaacatatttctttaaaatgcaagcagtgagaaataagacctctctgaattagtagctctaaactgttaacatagaatgttacttggaaaaagtctggaatatgtggtgtacacaagcagtgcttcgtgaatgagtttcttagcttttatagtgcgccatgtttctcaaagtttgtttttgttgacaaaacattttataatatatatcttatgtttattttttttctcaactaattgtgtactgcactgtaaggtgaaaattagccatccattatttatcttctgtggcaatgcatttatatggttgattgggtggggaattttttgcagaaagatgcaaagtgatgggttttcgacttcctatcgcagggagcttttaagaaatattaatttcctatacatttttccaatccccatgcaaactgttcctgtttacataccttctctgttgtatcagtactttgagtgagaagacagtttatttaaaacttgagcaggctgttcagcattttttctgcttctgaaatctgtatagtacactggtttgtaatcattatgtcttcattgaaatccttgctacttctcttcctcctcaatgaaatacattatatattatctttatgtactcttaagaaaaacgagcaaggaagagtatcttcattattctcattttctctgagttggaaacaaaaacatgaaggactccaactagaagacagatatttacatttaaatagattagtgggaaaactttaagagtttccacatattagttttcattttttgagtcaagagactgctccttgtactgggagacactagtagtatatgtttgtaatgttactttaaaattatctttttattttataaggcccataaatactggttaaactctgttaaaagtgggccttctatcttggatggtttcactgccatcagccatgctgatatattagaaatggcatccctatctacttactttaatgcttaaaattatacataaaatgctttatttagaaaacctacatgatacagtggtgtcagccttgccatgtatcagtttcacttgaaatttgagaccaattaaatttcaactgtttagggtggagaaagaggtactggaaaacatgcagatgaggatatcttttatgtgcaacagtatcctttgcatgggaggagagttactcttgaaaggcaggcagcttaagtggacaatgttttgtatatagttgagaattttacgacacttttaaaaattgtgtaattgttaaatgtccagttttgctctgttttgcctgaagttttagtatttgttttctaggtggacctctgaaaaccaaaccagtacctggggaggttagatgtgtgtttcaggcttggagtgtatgagtggttttgcttgtattttcctccagagattttgaactttaataattgcgtgtgtgttttttttttttttaagtggctttgtttttttttctcaagtaaaattgtgaacatatttcctttataggggcagggcatgagttagggagactgaagagtattgtagactgtacatgtgccttcttaatgtgtttctcgacacattttttttcagtaacttgaaaattcaaaagggacatttggttaggttactgtacatcaatctatgcataaatggcagcttgttttcttgagccacggtctaaattttgtttttatagaaattttttatactgattggttcatagatggtcagttttgtacacagactgaacaatacagcactttgccaaaaatgagtgtagcattgtttaaacattgtgtgttaacacctgttctttgtaattgggttgtggtgcattttgcactacctggagttacagttttcaatctgtcagtaaataaagtgtcctttaacttc

SEQ ID NO: 692690 - DNA, 203 bp, Homo sapiens
  misc_feature (125)..(125): n is a, c, g, or t
  misc_feature (151)..(151): n is a, c, g, or t
  misc_feature (162)..(162): n is a, c, g, or t
  misc_feature (181)..(181): n is a, c, g, or t
ggagagggcacgcgggacgaggagccctggggtcccatcggaagctcagagccttagtggctcccttcgagacgaatggccaggtacttcaacgcatgcactttgtgttgaccgtcatccctggncttcacctttggtttttcccatcctnagttctccccncttatgcctgaatatcctngtcgttttctgttgtttaatta

SEQ ID NO: 692691 - DNA, 706 bp, Homo sapiens
attctttctataaagaggccccctcatatgggcaaatttttttaaaaatggaaaatttccaccccctttaaaaaagtgatattttaaaaaccccatttttcttttttccccaaaatttaaaatatttttttaagggggccccttttaacccaaacccaacctggggaggtaaaatgtttttccacctgaaaggtaaagggtttcccttattttcccccaaaattttaacttaaaaaagggggggggtttttttttttttaagtggctttgtttttttttctcaagtaaaattgtgaacatatttcctttataggggcagggcatgagttagggagactgaagagtattgtagactgtacatgtgccttcttaatgtgtttctcgacacattttttttcagtaacttgaaaattcaaaagggacatttggttaggttactgtacatcaatctatgcataaatggcagcttgttttcttgagccacggtctaaattttgtttttatagaaattttttatactgattggttcatagatggtcagttttgtacacagactgaacaatacagcactttgccaaaaatgagtgtagcattgtttaaacattgtgtgttaacacctgttctttgtaattgggttgtggtgcattttgcactacctggagttacagttttcaatctgtcagtaaataaagtgtcctttaacttc

SEQ ID NO: 692692 - DNA, 273 bp, Homo sapiens
caggcgagcgccagctgcgcctccgcctctgagtactcaacgagatcttgctcaccgagagggactacgcgggcaccttgcgcttcttgcagtcggcattcctgcatcgcatccggcagaacgaggccgactcagtggagaagggcctcacggaggagaatgtcagggtcctgttctcgaacatccaacacatactggaagttcataaggattgcttggtcgccttggagtattgattacacccggagccgcagtctcagcatgaacttgggt

SEQ ID NO: 692693 - DNA, 5269 bp, Homo sapiens
  misc_feature (1691)..(1691): n is a, c, g, or t
taaaagacatccagccaaactctcagtcttgccttaacaatgttccagaggctgaataaaatgtttgtgggtgaagtcagttcttcctccaaccaagaaccagaattcaatgagaaagaagatgatgaatggattcttgttgacttcatagatacttgcactggtttctcagcagaagaagaagaagaagaggaggacatcagtgaagagtcacctactgagcacccttcagtcttttcctgtttaccggcatctcttgagtgcttggctgatacaagtgattcctgctttctccagtttgagtcatgtccaatggaggagagctggtttatcaccccacccccatgttttactgcaggtggattaaccactatcaaggtggaaacaagtcctatggaaaaccttctcattgaacatcccagcatgtctgtctatgctgtgcataactcctgccctggtctcagtgaggccacccgtgggactgatgaattacatagcccaagtagtcccagagtggaagctcaaaatgaaatggggcagcatattcattgttatgttgcagctcttgctgctcatacaacttttctggaacaacccaagagctttcgcccttcccagtggataaaagaacacagtgaaagacagcctcttaacagaaatagccttcgtcgccaaaatcttaccagggattgccaccctcggcaagtcaagcacaatggctgggttgttcatcagccctgcccgcgtcagtacaattactaatagtttcaagttttgttggttggtttctcttggtttgtgctaacatgtatggatgtgtgtatatgtacagtgaaaatgttgtctctttacaaccaattgataaccaatcacatagttttatcagtgtatttagacactatcttgaaaatcagatttatatgctgtgtatcacataatgccttgcctttaacatttactttttttgtacactttttcagattatttctggaaacatatcaatataattacagtgtttgggggtgtctttaaatatattaggttatacattagtcagcattttaaagacatttcttcccaagtacgagaataggcatctttcattttcattttattttgtattacttaatcttttaagcaagcaaaaatttattctcagggtcagctgtacactttattgaccagtacttgataatctctctgtatatgatgaatacatttttatacactaacattagcattaacaggtgatagttgccatggatataatggaattatggctggactttcttttgaaagaaaacttgatgtattctgtgtgtatggtttttccccagattagtcatacagttcatttggaattcaggtacattaagctttagtgaagagtgcatgcagtaattccaatgtgactgcatgacgtggtacagacattacaggtgttgtagacagaggcacttgtctcgtgcagagggattaaattagacctgtgagattatatttggaaaaattcatgtctgtaactaacccattagtgcagtatttaatttgttactattccttcccgccaattctgtccactcctcacctcgcatcagctataaatttggaaatacttgtccaggcactcaagtgacttcatatttctctctgcccatgggaaaagagataggctttatatttccacagantgaaaaatcctctgtcatggagcctgtcctgccaagtggcaagaatgtggggactgtctggtgatgatgtctttcatggcatctgagtgaagaatgacaggttggctcaacttttttcttttttttttttaattgccttgtattgtaagtattcttccctgcagtccaagtgacttttcattttttgttttaacttcaggcaaaatctttaaccactctggcctctgtttcccccaccaacggggagcagtgacatttacctccctcacagagtcactgtgaggattctatactgatttgaagtggagctgttcagaactgaaccttgtaggaaattccaagggcctttctactgaatctggtgatggggtggggccgtggcactttctctgccacagctgttcttcacagtgttggtgctaatgaggccagggtgcagggttcgattcacacgtaggccagttaacttagagaaaatctatttccttacctctagccagtcacttcctttttccgcagttgtgatgggttttgctgagccatccactctgactgatttcctctgaagtaaacatatttacaatccaaagcaattctactgacagaagtgttgccttcataatcaaacagcttgtttttccatctcctctgcaaccctaattaaatgagtacaggtctacaaaatgttttcaaggagaaaagcagcatatccttaagtgaagtattatatttttcaataaccctgtagtggcttgatgcagggaaccctgggggactttcagcgaagagctgtgctcttttctgactagattagagcgtttggagtggaagacgtcaaatgtgtagtgagatggaggttttacattgttcttctactggctgtgatgaagtgccagaatgtctctttagaacaagagttagattccccctttctccttattgccccttccgttttgacttcccctttatttatttgctgtctaattaggggccaagtctgtaaagttttgtcaaagtgagttagaagttgttttttcttactatttgtgtttaccagagttgggagataagatagtttccatgaaggtgtgtatgttttatacgatgtttgttatagggccatgcattggtaacttgaaaatagaccagcttaatgtcttcagggatgtaaaactctgactacacggcgtctctttttcatacattgcatgtaagttgttagtacctcacaagctacagaagttcagccatgagattttgtttggcaacatgaacagatttgtgtataactgcaatggccttttttccagatttccttattgactttttgtttgccttacctggggctagttttttatgctttgtacctagaaaacaaaaaattacattcgttgggctttttttcaaggttgggattaccacaccacctggaatatcatactgtggtttctgcctaaaattggcacatgtaagtattgaagaaaatggttatataattcagttgaaactcttggttattagatgttaggcatctcctgtatgtaagacacaaggccaaccacaacacagaacgatgttgacctgttaagtattctctgaaacatggccaaaatgcattttatgagctttttttttttgctattgtaaatattagtggtttacaatgcgctttaaacatatttctttaaaatgcaagcagtgagaaataagacctctctgaattagtagctctaaactgttaacatagaatgttacttggaaaaagtctggaatatgtggtgtacacaagcagtgcttcgtgaatgagtttcttagcttttatagtgcgccatgtttctcaaagtttgtttttgttgacaaaacattttataatatatatcttatgtttattttttttctcaactaattgtgtactgcactgtaaggtgaaaattagccatccattatttatcttctgtggcaatgcatttatatggttgattgggtggggaattttttgcagaaagatgcaaagtgatgggttttcgacttcctatcgcagggagcttttaagaaatattaatttcctatacatttttccaatccccatgcaaactgttcctgtttacataccttctctgttgtatcagtactttgagtgagaagacagtttatttaaaacttgagcaggctgttcagcattttttctgcttctgaaatctgtatagtacactggtttgtaatcattatgtcttcattgaaatccttgctacttctcttcctcctcaatgaaatacattatatattatctttatgtactcttaagaaaaacgagcaaggaagagtatcttcattattctcattttctctgagttggaaacaaaaacatgaaggactccaactagaagacagatatttacatttaaatagattagtgggaaaactttaagagtttccacatattagttttcattttttgagtcaagagactgctccttgtactgggagacactagtagtatatgtttgtaatgttactttaaaattatctttttattttataaggcccataaatactggttaaactctgttaaaagtgggccttctatcttggatggtttcactgccatcagccatgctgatatattagaaatggcatccctatctacttactttaatgcttaaaattatacataaaatgctttatttagaaaacctacatgatacagtggtgtcagccttgccatgtatcagtttcacttgaaatttgagaccaattaaatttcaactgtttagggtggagaaagaggtactggaaaacatgcagatgaggatatcttttatgtgcaacagtatcctttgcatgggaggagagttactcttgaaaggcaggcagcttaagtggacaatgttttgtatatagttgagaattttacgacacttttaaaaattgtgtaattgttaaatgtccagttttgctctgttttgcctgaagttttagtatttgttttctaggtggacctctgaaaaccaaaccagtacctggggaggttagatgtgtgtttcaggcttggagtgtatgagtggttttgcttgtattttcctccagagattttgaactttaataattgcgtgtgtgttttttttttttttaagtggctttgtttttttttctcaagtaaaattgtgaacatatttcctttataggggcagggcatgagttagggagactgaagagtattgtagactgtacatgtgccttcttaatgtgtttctcgacacattttttttcagtaacttgaaaattcaaaagggacatttggttaggttactgtacatcaatctatgcataaatggcagcttgttttcttgagccacggtctaaattttgtttttatagaaattttttatactgattggttcatagatggtcagttttgtacacagactgaacaatacagcactttgccaaaaatgagtgtagcattgtttaaacattgtgtgttaacacctgttctttgtaattgggttgtggtgcattttgcactacctggagttacagttttcaatctgtcagtaaataaagtgtcctttaacttc

SEQ ID NO: 692694 - DNA, 810 bp, Homo sapiens
ctttccagccctccccctacggtcagccaggtaccccatggcccagccctacccccaagggggctacccacagtgtccctacccccaatggggctacccacaggcccctaccccacaagagggctacccacagtgacccatacaccccaagggagcatacccacaggggccatatccaacagagcacatacacacacaaaaacgcaaattgggacaagcaacacgaggagaaacaccacgacaaggacccaagcaccacgcccaggcaatgaaaaaacaacaccaaggcagggagcagtcacccaatcctagccagtgaataacacaacgagcgaccattccacgtagcaagccccaaccctgagcacttagcaccataagggagcattccgaacacgagcccatacacttacccgcgcagagaggctgatcccacacgttgcgtagaacattgcgtacgctgtccgagatagacacctctctacaccagactagctcatggatcgacacaccggatggtgcgcacgcgagagtcaagagcccttttgtccccgccacaacactgtactgggactcgaacaaactgaatcacagcaccaccgactgagctaccacaacccctcgctcttcaatcagtccacacccactagtcgacggagtcacatacccgccgcgcatgcaccaccgatggaaaccctttgtctcaccattggcgaagccccttgacgcgcacacgcacagacaggaagattacgcaggaggattcccagcaagcgtcatagcaaaagcccccccccccacactgccccg

SEQ ID NO: 692695 - DNA, 346 bp, Homo sapiens
ttgttacccggcaatgacacaatgaataccacagaccagctctcagctgtgctgccaaagtattcataaccaaccagaccgatattacaaattaaatcataatatcgaatgacataccgttaagatatgacaatctgagcctctgagacagggggaacctatagtggtatcgagagcatgtttacatcaaaatgacctatcatactacaaggtttcactgccaaaaagtgtaacagagtttaaggcactggtaactttgtccactgttagagattaaaacttccaaagcaaatgaaagaaccaatgttcacctttaacgtggggaaagttggcaaaaagaacccca

SEQ ID NO: 692696 - DNA, 234 bp, Homo sapiens
  misc_feature (181)..(181): n is a, c, g, or t
  misc_feature (199)..(199): n is a, c, g, or t
taattctgttatattaacatgtttattctctctgttgcccgatttaacattctgtttttgcttttatgtgtgtttacatgaccttctaatttattttttgatggtttcttaactgtattttaattatatattaaaatattatctatatgttcagatatttaactgtattctaacattcttntttcttgatattttgagntgtttcagctagcttgtcagtactgtactgctact

SEQ ID NO: 692697 - DNA, 130 bp, Homo sapiens
tgtaccatgatgagagaacctgtctgtgtatagtgcacaggcccaatatgtgttgagggccaaggtgtacacatttgtgcttgagctgagcaaatgaattctttattcttaccgcctttgaccttttggg

SEQ ID NO: 692698 - DNA, 247 bp, Homo sapiens
ggtcgactttttatttggcttatccgtgatctaaatgctgtaatggaaaaataatagatcacttaagtttttgctgtgggtttcccgattggctgacccttattttttaatcaagcaccacctttatagccgtaacagcatagaaaactgagttcctgtgataagggaactttgcacaacgggatgaggatcatccggttaaaacaacaaagtgaggaaaaaaaaaaaagaagttttgcccgtcgac

SEQ ID NO: 692699 - DNA, 169 bp, Homo sapiens
aatacgccaatccttcaaccacaatgctgatcatcatacggtggtcagcatggacacggaaagtaagtagtaggataagtagtaagttctgttatcaagacacagctaatacaacttctcacttttctatacgttaaattttctggatttaaaaatatccaaaccatca

SEQ ID NO: 692700 - DNA, 186 bp, Homo sapiens
cgatctaaggatcccccacagtgccggggcttccaaaggcactcgcattctgttggagctgtcagcccagcacaggacgacatcttgtttgatgcggatgacgtgaaggggtggagcgcacccggatatggaagcatctttgcacaacttttaccatgtacttattgggacaaattcgggcagcct

SEQ ID NO: 692701 - DNA, 262 bp, Homo sapiens
ctcgaggccaatcgcgctgatggtgttctcggtgctgctggtgctgatcgtcgaactgctcaattccgcggtcgaagccaccgtcgatcgcatttcgctggagaaccacgcgctggccaagcgcgccaaggacatcggctcggccgccgtcatggtttctctgctcaacctgctcctggtgtgggcgctggtgctgatcgcccgattcctggatcggctgaaaggcgccgctccggctcctgtcgcgggcgcccccccccgg

SEQ ID NO: 692702 - DNA, 338 bp, Homo sapiens
tccagcatatgcacacatgcattctagtactttcacattacacctgtctcacacaccaagtcgcctctagtatacataccccactgccatgttaaatgtctgcaccattctttctcatctgtcacttacaaatacactctcttcatcacactgtattcttaaacacacctgtcgctttttaactactgcacctagctgtcttcgctccttgttacctctactctcccatcacgcagactctgcaaaggaaaccaaatacacttggactggcttctggggaaaagaactccaaagccagcttaccagggtgtcctgctgcaggtgctgcccaacccctg

SEQ ID NO: 692703 - DNA, 922 bp, Homo sapiens
  misc_feature (922)..(922): n is a, c, g, or t
ttttgcttcagccaatccaaaccatatactagagtgttctgtagtcacaattcttatttcaaatgtaattcagcaccttacataatttttgagaggttgtcattcatcacatatttactgagtttctatgtgccaggctctgtgactggatactggagctatcaaaatgaaaaaaatagtgttaagaactcactcgctggtgttagagcaggtagatgagtggcaatccatttaaatccatttgccttggctattatttggaatgccttcttgtttaaagctctatctacggtaggcgaagaattatctctggaggggctaccgggtataggcgggccttaattatctctctttctcttttcgctcgctaaagagggagtctcgcatcggtcctccaggcgggaggacgtgccggggcacgatctcagcttcatgggaacctcgcctcccagttcaagcgattcttctggctaagccctcctgagtagctgggactgcggtgcatgcaccaaaccagctaatctaacactcagagagacggaatttgccacgttgcccagcctgtttcgagctccggctcaagtgatcaggcctgcttcagcccccagagggcggcaattacgggcagagtcactgggcccagacggggggggttgggggacaaaggcgaggaaacagtcgccccgcgtcctgaaacgcggctgtgtggagaaaacacactcccccacaggcggtaacccggggagcggtataaagggctcacgagcaaacggtgggggcccaacacttaccgggtggagggtcacaagtttgaagaccccctcacgaacgcggcggtcggaaaaaaacggcacatgtcgcgacacacaaaagacggggacgagcgccacacaattctccccagaagatgcgaagcgcaacn

SEQ ID NO: 692704 - DNA, 995 bp, Homo sapiens
agcggcccggctaatttttgtatttttagtagagacggggtttcaccgtgttagccaagatggtctcgatctcctgaccttgtgatccgcccgcctcggcctaccaaagtgctgggattacaggcgtgagccaccgcgcccagccttctccgtgtatttttaacagctttagtttttgtgctgtctctgagtgcgtatttagtttatttagcgattcacagcgatttacattttccctctatggggttttcacttttaactcccgtgggaagggtgggttctcttaccatttactggtgttacccctataattctaactttggggtgggtagaaactattggtgaatcccctatttccctttttgggccctgtgtgtgctatcacactggtgtctcttacacaatgagcgtgatacttctccagggtgtccccggggaattcccttaggtgtgttctgagtccccctaaagactacttctctgtgtttctagtgcgtactaaaaagttttccttatttttggctttcttcaggtccattattcacctctgtgatcctttaccttgtgttttattatatagatcttcacttccataattctaaactataatatcttaattctatttttctagattttcttccacctattactggccttacaccctacagtcttatttcctggtgctcattataactaagcataaatttacaattctctaactggggacaaaacctggatactttaagtaatacaagcactgtataccacgggaagaccactgttcccattattaaccacatgaatagtgatattgccaagtgattaaaatttactcatgagaagtacacatgagagtagtaggccaaaacttaagcgatattacattaggaatacttatttattgcccttgggatctactggagagacacagatgaggcaggttatttcctcccgtattccctatttatgggccgccgagtaattttaataaagca

SEQ ID NO: 692705 - DNA, 320 bp, Homo sapiens
ctgggtagacaataaggaagggtccccaggattggggagagccccaagtcgagaacaataatgaacaattactgtatgaacaatcgttagagacagctaatcacaaacaacctgcgggcacaatgacctcattccacacgtagcacccttcagcaggaccctataaaactttcctccagcccttgcctctttgcaggtagccccttctctgctgagctgcccactgcaacatattgtcacaatttctctaataaatctgcccttctttacctacaactatcttggtaaatggctttaccacctgcaaaactgaccctagg

SEQ ID NO: 692706 - DNA, 299 bp, Homo sapiens
gttgctatgctgtctcatcatggaggtttacatcatatttttccacctctgattctgcttgatcgtagccaaagaaacttagcagcttgaggagcagttactcctcaataagcacatgtgaatctctgcagtagtgatcatccagatgcttgtagatgataggtcagtgcactctatactggggatacttcactgcgcttgactatgcacagctgggcccggtctcgatgaccatcattctcattgctcaggggagtcacatagagcatgaagggctgcgctgttaccaatatagctgc

SEQ ID NO: 692707 - DNA, 119 bp, Homo sapiens
  misc_feature (9)..(9): n is a, c, g, or t
  misc_feature (32)..(32): n is a, c, g, or t
  misc_feature (104)..(104): n is a, c, g, or t
cagtagcgnttggcccccagctcggcaagccngccgtccaaggacttggcgtacgcatgaaattctcgtacgcacggtcaccgatccccagcacggagtaccgnaccccgctcaggtcc

SEQ ID NO: 692708 - DNA, 112 bp, Homo sapiens
agagatatcgagctcggcacccctatctttaaaaaggaatttggaaggttgaattctagcttcaaaatattcaaatttttttgcatggatttagctacgcttttcaaaattt

SEQ ID NO: 692709 - DNA, 634 bp, Homo sapiens
ccgtgaaaatgcggcgcagcagacacacacgatcgcaaaaagccaacagtactccacaatctactcgttctcacaaccagcagcatcacaaccaacaagcgtcactacacccacgctactcccccttttcactcacctcacactcccattccctccacacctacggcgaatcggcaatgagagcgaaagtagcacggacacgcatatgagacgatgagtgatcatgacagtttgtgaaatacgctgacagacaggtcgagatacggtgcagacactagacgcgggtgatgatctcggcattagtagtgatgggttggcaattgagacttaacagcgagagcaagaactatagagaacggaacatatcacacacgacggccacatcctacatataccactcaataccatcacgccaccccgacattcaaatacacacacaacatacacctacaccatacatcccgacatcactaatcttcaaacacattcacactaccaccacctctcttatctacctcccctctcaccccatcctcctccaaccccacccaaccatcacaaccaccgataccatacactccaaccgcgccatcttcctctccgtcccgccacagctagcccacccacactacaa

SEQ ID NO: 692710 - DNA, 986 bp, Homo sapiens
  misc_feature (513)..(513): n is a, c, g, or t
  misc_feature (874)..(874): n is a, c, g, or t
  misc_feature (904)..(904): n is a, c, g, or t
  misc_feature (945)..(945): n is a, c, g, or t
agcgggcagtgcctgccccggaagtggtcggcgcgcggcgcggcgcgcctgggcgctaagatggcggcggcgtgagttgcatgttgtgtgaggatcccggggccgccgcgtcgctcgggccccgccatggccgtcaccatcacgctcaaaacgctgcagcagcagaccttcaagatccgcatggagcctgacgagacggtgaaggtgctaaaggagaagatagaagctgagaagggtcgtgatgccttccccgtggctggacagaaactcatctatgccggcaagatcttgagtgacgatgtccctatcagggactatcgcatcgatgagaagaactttgtggtcgtcatggtgaccaagaccaaagccggccagggtacctcagcacccccagaggcctcacccacagctgccccagagtcctctacatccttcccgcctgcccacagctcaggcatgtcccatcccccaactgccgcagagaggacaagagcccatcagaggaatccagcnccacaagacgtccccagagtctgtgtcaggctctgttccctcttcaggtagcagcgggcgagaggaagacgcggcctccacgctagtgacgggctctgagtatgagacgatgctgaacaggagatcaatgtccatgggctatgagcgagacgggtcgtggccgccctgagagccagctacaacaacccccaccgagccgtggagtatctgctcacgggaattcctgggagccccgagccggaacacggttctgtccaggagagccaggtatcggagcagccggccacggaagcagcaggagagaacccctggagttcctgcgggaccagcccagttccagaacatgcggcaggtgattcanagaacctgcgctgctgccgccctgctccanagctgggccaggagaccctcagctttacagcaatcagcggnacaggagagtcatcagatgtgacgagccctgggagctggcg

SEQ ID NO: 692711 - DNA, 594 bp, Homo sapiens
  misc_feature (593)..(593): n is a, c, g, or t
aaatagagaaaaatgaacagtgggataaaaattcctttcccagtccctacttatcaacatgaaacatctgcttcagctacagtggttcccagtggcagtcagaattattgatatggcaaaatcgctgcttatatgcagcacaatggcatgtccccccacccctactggctgcattgtaataattcattactgtaccagtgcgaccaaagacaccatggatgtgaaaggggagttagtgccagggcaattgtgcaaatggtgagggtggtggaagaaagttttcaccacgagcaataaatttctgcctgctgttctattttattgtggctcgacacagtgattatactggttggaaaataagcaataagcgtctgtctgtctccagttgtttttaatattcttgtttaatgggagaacatagcttttatttaaactaaacataacggatgcattttaagatttggatcggtttttgaaaaaaaagtatcttgctatctcgtatgttaggtaagcatatgctgctataaataggaaaaccaatatgcctagttcagccttttggtagataaatttgattagggatgtgcaaagcng

SEQ ID NO: 692712 - DNA, 123 bp, Homo sapiens
tgggcgtgctcgacccatgcggtcccgggcgtgctgttgacgatgcaggcgagcacggcgagccccgttttatcgcgaaggtcgagcggtatggcgacgaaaccggatttgcgcttgcggccg

SEQ ID NO: 692713 - DNA, 174 bp, Homo sapiens
cggatctgccctgggtgcatgcatgtgtgtgatgccagcgtgccaaatgaagaaactgcatcagttatcaattaaaaggattttattataggagctgtttataatatccacagaggtgcggacagtgcttccccagaaattctagtcaatatttgtgttacagaagaactccca

SEQ ID NO: 692714 - DNA, 363 bp, Homo sapiens
gactaaaattagatcatgaaactagagtaaggacacccttctcacctcacccggatgtcatgccaccaattacaaataaataaaatgtgaccaattacttagcttcaagattctatacaaatatctctgaaatctgtaagccatcattacagctattctggattaatataatacattctaccctaaattacaccaaaggactataatattcagtgtattccaatgtttcagcacataaggaaagtttgtgcctgatatggaaggaaaaagaacactctggtaattacatagttacttcaggtctctttcaatctgacaaactgggttgtctggagaattgaacatagacaagcaatattatca

SEQ ID NO: 692715 - DNA, 408 bp, Homo sapiens
gcctatcatatagccaaacccagaccatgacccctaacaggggccctctgagccctactaaggacctgcggcctagccatgtgattgcacttacacttcataacgctgctcatactacgcctactaaccaacacactatccatataccaatgatggcgcgatgtcacacgagaaagcacataccaaggccaccacacaccacctgtccaaagaggccttcgacactggataatcctatttagtacctcagaagagtttgtcttcgcaggatattgctgagccttttaccactccaggctaacccctaccacgcaactagggggagcactggcccacaacaggcatcaccccgctagatgcactagaagtcccactgctcacattcgcattactagcatcaggagttct

SEQ ID NO: 692716 - DNA, 523 bp, Homo sapiens
gtctagagtatcccgagtgcacgtccactaacaggcagcggacatgcccgcagcatgggtgccaaaacggtcatcgccaatcactctgagatatgaaagatctgtcgcgcctcagcacctacagagacagcctgtccggctggtggctgctgtggaagcggctgaatccctgggctgacaaggtaaaggttccagacatggctgaaatccagtcccgcctggcctacgtgtcctgtgtgcggcagctagaggttgtcaagtccagcccctactgcgagtacctgcgcccgcccatcgactgcttcaagaccatggactttgggaagttcgaacagatctatgatgtgggctaccagtacgggaaggcggtgtttggaggctggagccgtggcaacgtcattgagaaaatgctcacagaccggcggtctacagaccttaatgagagccgccgtgcagacgtgcttgccttcccaagctctggcttcactgacttctgtttgtggaggtagcacttgggtaccga

SEQ ID NO: 692717 - DNA, 212 bp, Homo sapiens
atcggccaacacactaattctctttcaaaataatgtaataaatataccattcatacacacacacttaggctaggatggtggctcatgcgtgtgatcccagcactttgggaggcgaggcaggcagaccacaaggtcaggagttcaagaccaacctggccactatggtaaaaccccgtctctattaaaaatacaaaattagccacgcatggtgt

SEQ ID NO: 692718 - DNA, 361 bp, Homo sapiens
ttagggtggtcagcggcgtcctgtacgactggttcggcgcgggtctctgatcatgcagcgtcacaatagtggcatgccagttcaggacgttctgcaggtgcaaaatgtagtcgatgccgtgttctagggtttctctcttgctcacattctgtgttctcctgaaagctgggcccatgctccttgagcttgaagtacgcagtcgttcatgttgtatagcaggctcatcggctggctccatacgtctctcacaggcctgatgcttttcatcctgatcgtgaggtacggctataccgagagtgatctgatcgccctggagctcagtctcactctcacgccatctgatcgagctgcgcttggcgcc

SEQ ID NO: 692719 - DNA, 119 bp, Homo sapiens
gattccaagtcccagggggtttattttttccttttaaatcctgttctgggttcctggtctttttgcccatgccaagagccgggcgttggcagggccatagggatagcgaaggtttgaaa

SEQ ID NO: 692720 - DNA, 921 bp, Homo sapiens
gcggaggcataagcagagaggatctggaaaggtctcttgttttcttatccacagagaaagaaagaaaaaaaatgtaactaatttgtaaacctctgtggtcaaaaaaaaaaaacacaaaaaaaggctgacggcagctgcggaggaaaacccttttttccctaaccatctgggttgcggggctttggttatgctgtaatccaaaaggctccggttaatcagagcattctggtagccaggaacataatctgagagccaagcccacattcagggtttgggaacagggcatgacgaatcccgtgtcagggatttcatagtagaaggggcctatacggggaaaggagccaaagaaatctcttctagggatatggtaagaaactaaagtgagatactccaccagaggggcacccgtggagcctttcccggcaaaagagggtggcgtgtgactatctagggaaactccgtagtgcaagaaagctaccgcgtaatcaacgggttgcgggcagtgaacaagagggcccgaggcccggtgggtaacccccaggaccttgaaagctcccgccttttatcactagaagaaatctctggcggctatcgcaaaaacgtgctgcagcaagagaacgccagaaagcccaaaagggaaccaagactaagttgattgtagtgcagaccaaagccaaaagccaaattaggtggactgtggacaggcgggaaaaacaaaccctccccagtttaaatcttagtgcgacacactttcctccaagagtagtggtgttcagaatccctgtgaagggacccttgttttccctagctattatccattaagaaaaccgtttgagatggtaattgcataaggggaacagccatctcccgagtcagtggccctcggccacggcatttaactccataaaccctgtgaaaaac

SEQ ID NO: 692721 - DNA, 515 bp, Homo sapiens
caagtttcccaactctgaagtgttggtcaagtccatcgtggactttgtgacgagccacgggaacatcaaggccttcatctccatccacagctactcccagctccttctctacccctatggctacacatcagaaccagctcctgacaaggaggagctggatcagctagcaaaatctgctgtgacagccttgacatctctacacgggaccaagttcaagtatggcagtatcattgatacgatctatcaagccagtgggagcactattgactggacctacagccagggcatcaagtattccttcacttttgagctgagggacactgggctcagaggtttcctgctgcctgcctcccagatcatccccacagcggaggagacatggctggcccttttgaccatcatggaccacactgtcaaacacccctactgaagaagcttttattcccttcccctttcttctccttagccccatttaggcaacccaataaagtctgattgtaaactaaaaaaaaaaa

SEQ ID NO: 692722 - DNA, 271 bp, Homo sapiens
tgaggagaccacgattaataaagaaagacagggaagtgtctcatgcgggagcctccatgtcatctgcttcatcagacactggaatgagtccctcatcatcgtctcccccagaaaaggtacttgcttgtaagaatgtaggtgatacacatttgctcgtaccttcccagaaggtgtgctgccatggacataaatccccaaaccctgaattacaaccacagaaagcactcaactggattgacattgctcagtatatcctgtatacttttccagg

SEQ ID NO: 692723 - DNA, 143 bp, Homo sapiens
tctagaggatcccttttcggctccattcaggacaaatgggaacagactgaacgagaaagacagatagacacacacacacacacacacacacacacacacacacacacacagacacacacaaagacacacacacagagagagag

SEQ ID NO: 692724 - DNA, 518 bp, Homo sapiens
ccgcgcgctcagcggcaaatcaacaggggggttttggagatcgggcacactgcggaccgctggggggtgtccctggatgtcaacccttcgccccggacgaacttacggtcaaaaccaaggatggggtggtggagatccccggcaagcacaaggagcggcaggacgagcatggttacatctcccggtgcttcacccggaaatacacgctgccccccggtgtggacccacccaagtttcctctcccctgtcccctaagggcacactgaccgggggggccccccttgcccaagttagccacgcagtccaaagagatccccatcccagtcccctttgagttgcgggcccagcttgggggcccaaaaactgcaaaatccgatgagactgcccccaagtaaagccttagcccggatgcccccccctgctgccgcccctgggtgggcctccccccccccctgggggttttttttaaacatttattttttgtttttttcaaaaaaagttcaaagcccccccctgta

SEQ ID NO: 692725 - DNA, 287 bp, Homo sapiens
tgtaatagctgcatctatctacaacaagtattttcagttatataagcagttaataatacccttgactcatagaccattatgatgtatcatgatattatatgcgaaaatgataatcaaaactgttgcctatacattcgtaagagttgtgtgccacctttgctgagggtattaaaattaatttccatttaccatgattatatactagtatcatagacagtgtggtcagcatctcagcatgtatctttataatcaggaatacgttttatgcttgtaatcgtttatgctgt

SEQ ID NO: 692726 - DNA, 90 bp, Homo sapiens
  misc_feature (34)..(34): n is a, c, g, or t
ctatcaactgaggcgattccgggtcaacttggtnattaacgagtccccactgctctaaaaaggcatggaccctcatccgcttatgcaatg

SEQ ID NO: 692727 - DNA, 646 bp, Homo sapiens
  misc_feature (613)..(613): n is a, c, g, or t
atactgcagctctctctgatgtcaggtaatgcggcaggcatatcgtgtgtgctgacctgagagctatggatgctgtgagcaggggctggtaggccaggatagacaaacttctgacctcgcccctcattctaaagtgtaattcccatgattttgcagtaacttacgtaccaacctctaagcccctttatggttgattcattcctaggtatattaaaaataattcaggttgacataatctatctctaattgcaagagttagagaggaaatttaaactactgctttagttgttgggcatatgggtctctagagacagggtgttaagcatcactgcatcaccactttgcatataggaagcactcaataaatgttagtaaggccgggcacggtggttcacggcctgtaaccccagcacttggggagagcgaggcagggtggatcacctgaggtcaggagttcgagaccagcctggccaaagtggtgaaagcctgtttttactaaaaatacagaaattagccaggcatggtggcgtgcacgtcatcccatctactcaggaaactgaggcaggagaatcacttgaccccaggaggctgaggtcgcagttgagccaggatncgtgcactgcactccaggctgggcaacaggacg

SEQ ID NO: 692728 - DNA, 244 bp, Homo sapiens
ttaaaggttttacccccttatcccaaaacgcccgaagaaaagggctccggacacccccttttttataggaaaggggcaggaaaaaggggtttataagacaggggggcttttttgggaaatgcgccccccccttttttgttttttataaaacctaaaattttgcccgtgagaaaaacccctaagaggcctaatattgaaagggagagttggttttcacttgggggcccttattttttggggggtt

SEQ ID NO: 692729 - DNA, 101 bp, Homo sapiens
ttagaattattgtttcaagttaaccatcttcataacagctgcatccacagacttcaactactatgattacttctttgcccattcttctctttcttttcttt

SEQ ID NO: 692730 - DNA, 239 bp, Homo sapiens
tggggatcaccaggtcccgtctttttcagtctcttgctaaagagccacagcgctagctctggctggccctcatgtgacttgggcggcagcctcctttcaaattcccacttaccccccaaatggctccattcctacccccagtgcctggaaaacctcctactgtcttttctgtcgcagcccccgaaggttttttttgtgtctctggttttcatcctcctgtaaatataaacacgtcagga

SEQ ID NO: 692731 - DNA, 337 bp, Homo sapiens
cccccgggcttttgcctggggcggggggggggttaccttttccccccgggaaccgctttggccctttggccttttttgggggcccttttgacccagtttggtccaaaaaggcgggcggggcccgggccggtattcccgggattttggcgccccccggggccccccccggggcccaggaatttttttggccgggtttttgggaatttggttttatggatggccccttttggccttttaggttccttttttccttttttcccttttgttgaggggggggggggtgggggttttttgggttttttttggtcccccggttttatttttccttaaactttga

SEQ ID NO: 692732 - DNA, 894 bp, Homo sapiens
  misc_feature (1)..(1): n is a, c, g, or t
  misc_feature (112)..(112): n is a, c, g, or t
  misc_feature (160)..(160): n is a, c, g, or t
  misc_feature (245)..(245): n is a, c, g, or t
  misc_feature (247)..(247): n is a, c, g, or t
  misc_feature (271)..(271): n is a, c, g, or t
  misc_feature (274)..(274): n is a, c, g, or t
  misc_feature (279)..(280): n is a, c, g, or t
  misc_feature (291)..(291): n is a, c, g, or t
  misc_feature (305)..(305): n is a, c, g, or t
  misc_feature (308)..(308): n is a, c, g, or t
  misc_feature (322)..(322): n is a, c, g, or t
  misc_feature (324)..(324): n is a, c, g, or t
  misc_feature (327)..(327): n is a, c, g, or t
  misc_feature (354)..(354): n is a, c, g, or t
  misc_feature (373)..(373): n is a, c, g, or t
  misc_feature (379)..(379): n is a, c, g, or t
  misc_feature (385)..(385): n is a, c, g, or t
  misc_feature (388)..(389): n is a, c, g, or t
  misc_feature (418)..(418): n is a, c, g, or t
  misc_feature (432)..(432): n is a, c, g, or t
  misc_feature (445)..(445): n is a, c, g, or t
  misc_feature (457)..(457): n is a, c, g, or t
  misc_feature (469)..(469): n is a, c, g, or t
  misc_feature (483)..(483): n is a, c, g, or t
  misc_feature (496)..(496): n is a, c, g, or t
  misc_feature (520)..(520): n is a, c, g, or t
  misc_feature (538)..(538): n is a, c, g, or t
  misc_feature (550)..(550): n is a, c, g, or t
  misc_feature (552)..(552): n is a, c, g, or t
  misc_feature (578)..(578): n is a, c, g, or t
  misc_feature (601)..(601): n is a, c, g, or t
  misc_feature (605)..(605): n is a, c, g, or t
  misc_feature (612)..(612): n is a, c, g, or t
  misc_feature (616)..(616): n is a, c, g, or t
  misc_feature (633)..(633): n is a, c, g, or t
  misc_feature (638)..(638): n is a, c, g, or t
  misc_feature (652)..(652): n is a, c, g, or t
  misc_feature (663)..(663): n is a, c, g, or t
  misc_feature (674)..(674): n is a, c, g, or t
  misc_feature (697)..(697): n is a, c, g, or t
  misc_feature (702)..(702): n is a, c, g, or t
  misc_feature (705)..(705): n is a, c, g, or t
  misc_feature (711)..(711): n is a, c, g, or t
  misc_feature (725)..(725): n is a, c, g, or t
  misc_feature (730)..(730): n is a, c, g, or t
  misc_feature (741)..(741): n is a, c, g, or t
  misc_feature (799)..(799): n is a, c, g, or t
  misc_feature (811)..(811): n is a, c, g, or t
  misc_feature (829)..(829): n is a, c, g, or t
  misc_feature (831)..(831): n is a, c, g, or t
  misc_feature (880)..(880): n is a, c, g, or t
naaattcaggcaggttcaatcacagaaaccatgcagtggacaaaagagagaaaaagttcaccatgaggagattctaaaaacctgccttttgacttgtctatttttatctctnatttctcactttgcttctcctcccgcttggaccctttgtctgactgtntgaaattaagtggcaggtgaaccctccattacccatgtccagaacaaatagacataagcacagaacctcactaactccccaaatntnaatttttccaatttgatcaccacnaantgtcnngggatcaatgnagaatttaattttntanttaaaacaataacncnccncgaggtggattcggatgatagaagganaacaccaagagaatgggcncaaacnacaaanaannccaaacgaacgggaaggagcagccttccngaaatttctcttanaaagcagaaaagnagaaccaatgcngccacctagagnccagccaaacaaantagggagcatacnggagaaaaaggtcagtatggcccnacaagcggggggcccggncgagaagcaatncnctcgaactccggatgttgccacaaanaaacacaaccacagagcgtgaancaancgcgccnccanagggagaagccaaagangtgtngacagcaaccaaangcgggtgggtngaaacacacgncggcgcaggaaacgggccgcggncgagnttnaggganggaggcccgggccnagggnccaggagagangacacaggagaacacggaaacatccaaaatgtacactggatcagagtgtgtacacaanaattttgatgtntgtcgcctcaaatacctncncgatcatcgcagatacattttcccattgcagatgatcaagaacacatanaatcctgggcatgg

SEQ ID NO: 692733 - DNA, 287 bp, Homo sapiens
  misc_feature (22)..(22): n is a, c, g, or t
gtacaatcagctcggtaccagnaggctgggcccagattaagatgtcatcccaccggggtatgcgagggtcactaggcgaggaggtgcggggcgctgtctgtgttcgagagagttggcctgggaggcgctaggggagagggcaggacttgcgtgatctgtagcgtggggcggtgattcggttgagaccgacggcgaggtgcaaggggtagggggggaggtcggatcttcgggtgcaagggggagacttgacatcttaatctgcgcccaagcctgctggtaccggctga

SEQ ID NO: 692734 - DNA, 1355 bp, Homo sapiens
tcctcattaacctttttaaaggggtctcaaaatcctgtgacaaatttgtgggctcaaggtgggttcccattaaaaagttacgatgatttaaaaaacgtaataactctaaaacgtgccacacgcaacaaacagaaagaccaagaggtggctccacaaaaacatttctccttgtctccttctcgtgagaggttctcacgaagtgcagtgtgctatactcgatttacaccgagtctctgtattatacatcactatagacactttaaaactgtggcctacagtgtgcacacaccacagacgagaattcgttgagacacctgtgttctattcccaaccgaacggtgaattttacaacagtgtggggtgtggcaggtgtttattagagcgcaactaaactagtcgcagttgaagccttctcgcaggagcccgtatacgtgggaacacaaactatgagggagagaacactaggacgcgaagggacatacacgaagcacgagacgcctctcagtgtgtctacacacgcgggcacttatgcgaaagtagacaacccgcgagcgcgcacaacaagtgacacaaggggctatcaagatatatacaccgagacaacaggcaagaaagggcgacacacacaaagaggcggtgaggcaccaacgccttcgtagcaagtgaacaggagctctatcacaacgcaacaccgaggatggggccttgaggtccccgagcggaacaccccagctaagtcgcacacacaaaagtggggacaaaggcagaactcaagcgacgaaggaaacgactctacgaagcgacacacactgggacgggggggcgcacaatagcttatacgcgcagggcagtattacaacagcgcaagagaacagccgatgacccaaagctacagcacgagtcgttcacgccccgatcatacaggagcagacgaggctgaacaaacgttagtgcaccagcaggaccaagaaagtgggttagaacggccgctgcgatgtgttgcggaacacaaacgtacgccaaaatattaccgacgggggaggcccaatacaagcaccgcgaggccggcgcatacaatatgtgtggagacccaccggagaaagcggtgaccccacggggacacaaaagcaccacccccatagtacagcacagggtgaacagacaccccacgcgatggaccaacccaccaatgagggtgagtagggcaccacacactaaagggaagttgcagcagcccacacgcagacaagcgagttaggaccccacagaaaaagaacaaccacacgctcgccccagtagacaagccaggcaaaccaaacgatcattcgttgtgacaaaccagttttaaaccaagc

SEQ ID NO: 692735 - DNA, 83 bp, Homo sapiens
gtcgtttcttaagagacagtatctcactctatttttcaggctacagtgcagtagtgtggtggtcacccttctgtcgtcttctc

SEQ ID NO: 692736 - DNA, 289 bp, Homo sapiens
atacatcccactggctgctgttctgaaaccatctgattggctttctgagcgatttggctgggtggagtgactgctctatttggccacttctgtcaaattggccttgtcccgcgttcctgaagcgctctctagctgttctgtaaatacctgtggcatatttctcttccagatccctcctcacgatgcacccaccgccctgagggcccgtcctaggaatggatgtggggatggtcgctttgtaatgtgctggttctctttttttttctttcccctttggcccttatccgag

SEQ ID NO: 692737 - DNA, 346 bp, Homo sapiens
tttttttggtggagtgtcctgggtctcttcttattaacggataagaatgtcaaaattaccttgcactcttcagaaaagtaagagtggaagtctgcatttggtccggggcttaggcaaagaagctaacagaattcctggggttgccatatactgtttatcagccctccagtcgtcaatactgggatttgggatctagaaagacctaatacaggtggtgctgaaaaagacttacccacctgcataattttttttaaatctctgctggcaggaaccgcctgcatatcataatttacaaactagaagaccacatcagcctcgtgtgggtaaaacagatgtgactagcagc

SEQ ID NO: 692738 - DNA, 143 bp, Homo sapiens
gattgcagccacaactcatggtccctagtcggattcgtttccactgtgccacgacgggaactccacaatttttaaatgtattattttataaacaattcactaatacacagtaatttaaaccaggaggttattagaggtcagag

SEQ ID NO: 692739 - DNA, 332 bp, Homo sapiens
cctgtcaacaagcgacgagagtcttctggagcgagagagggaaaagagaactagtaggggaaaagcagagcagagtgatcagacccctgctggagaaagggccaagtgagccaggtagagagcctcagagaggggcattggatgatctcaaggctgcagtctgcagatgactgagccgacatgaccatgatgaaacccgcggctcccagcatgggtctctgcgctctggcgtcctcaaagatcaggtctccgtgtagtctacagatgaattggcctgacaattgtgaccacaggcaggtggtctccattcatgttgactgggcgaagtcgtt

SEQ ID NO: 692740 - DNA, 218 bp, Homo sapiens
cctagaggatcctcataggtcgcagggttgctgcccgacagctgatgtggttgctctcagcgatcctctgggcctccttgttggatggccaggatggcctcgcgctccctatcggcgtcggcagggtggactcgaactggtcatgggctgagatcaggccctcaatctcctcgatggtatggacgatgaacatgtcctggaggcctgcgaacctatga

SEQ ID NO: 692741 - DNA, 617 bp, Homo sapiens
tgtatgctggactggagggcatgatgtttaatctaatttaaggagccactgattgtaaaacatgccattattttatgttgcactaagaaggtggggtcgaggagttgccaataaacttgggacagactcttgatggccaagccccactgaatttaagttttttgggtgtgggaaaaatacatcttggggtccatgaaataccatactcctgttccattcctcatggtcctctttgtgctattaacccaggtcttaattttgggtcttcacagcgaatctttgccttgttttgccccgtcttttccctgcctccggggtcctcttttacatttttctggtcttctcttgttgctttccttccgtcaatctgccctgcccttttttgtcatacacctcgggcgccttgtgacttttgctctttttttgttttgttggtttcctttccccctccccgcgcggcacgtccgggttggttttcttctcctcccctcttctctccgctctctttctttcctgtgggctattttgtcctccccctgctcccttccgctccccgccccttcccgccccgccgcccccgcgctccgctaccgctcccgcgtgaggagtgtgagaca

SEQ ID NO: 692742 - DNA, 1472 bp, Homo sapiens
aggagctcaactgatctgttttctttcgcccagccaaaatcacagaatgaaggcggtgaagagcgaacgggagcgatggtgagccggtgaagacaccgggactggggacgtggtgctgcccggcttgggggtgtgtagtgaatgcagtgagcgtctcagcccagaagtcagcacctccctgcccacctgacgtcctggaccactcctggtggtagccctgtctccgccgaacagctgagcctggcacctgtcgggccactgcggggaaccgagcccgaggagttagacggtcccaccaaccaaaaatgaacaacaaggccgtcagtggacgaaggaacagcaaagtcatcctcggccacgcttcatgagaaagcgagagtcctcaccacctacaacaagtcacaagtgcagaggccaggagcgtggagtgatcatccccgtgaagaggacagggaggatcgaggaggccaaacaggggaacccatcagacagacagggaaccacagcgcagagcgataaaggaaccaggagaaccggggaccagagccacacgggggaccaatgagaccgcaaaccaaagggaaggaaacggtctacaccgagaagcgcgcaaggggcagctggggcacacgggcatccaggcgaccccggcaatcgcgagcacacacacatgcaacaacggcgggcaagggccattccacgagacaacagaacaaaagcgagacacgcatccaccatacactgcccagggacggaacggagggacggcccaatacgacaacagcaagggcaacacgcaacggcagagccagcgcggagcgagaaagacggaagcatcacgagagaacggaaggagaacaacgtccgagagccctgggaggcacgacgcgacgccacacgcacacaagagaatgcaggacaccacgacggaaaaggaacacacaggccaaagggcgacgggagacggacataacacgaggcaggcaccacacgtactacggagggagcaggccacaacgaacgcatacaccggcagcgctatgacaggacgaaaaaaaaaagagtagggtggagagcgcgagcggagacaggccaggagaacacagcagaaaagaggaagggagaggggacgcgaacagagcgaaagcaaagaaacgtgacaaagagggcgaccacaaggggacggcgagacgaacgagcgagcacggagagacgggagacaagacgaagggggaacagaaaagcagcagaagcacagtgacaagcatgagacacgcaaagagaacaaagggaagaggggcgcgaaaagccagcaagaggggggaggaagaccaagaacgggcaagagcgcggaaggacccaagaagaaagagccagaaaagaacgacagaggaaagaagcaagccaagaagagacaggacggaagaaaagagcaagagacaaaaaggacacgaacagcagcagaagacgcc

SEQ ID NO: 692743 - DNA, 809 bp, Homo sapiens
ggcggcgtccaggcggcggcggcggcggcggctcctcagagtccggctcaggctccggctgcggctccagcccgcgatgccccattccgtgaccctgcgcgggccttcgcccttggggcttccgcctggtgggcggccgggacttcagcgcgccctcaccatctcacgggtccaatgctggcagcaaaggctgctattgggttgccctgtgcccaggagacctgatccaggccatcaatggtgagagcacagagctcatgacacaccttggaggcacaggaacccgccatcaaggggctgcacgattcaacctcacaacgtgtctgtggagcaaggcctgaggggcaggagctggcccagtgcccctgattgacaggcaggttccagggcacacaggatcccaccatcgatcctgagatccaggacgggagcccaaaaaaccagcgggctggcccttcaggcacgcgggacgtgggccaagaaggagtggcaagaccaaaggcgtgggatctccattatggacaacccccctccgtttccagtccctcacaagtgcagcaggaggcaccctgccagccaggatgaagcaccctgcagttgtgtctccacccccaaggtgaccagcagaggcctcacggggagccggactgaaagtcgcctggctcccgaggggggacagatgctggggaccagcgagccgggcggggagccaagaagaggtcctcgaattgggggatgaacagcgcgagcggagatgccggctggggccacgaaactaaaccacggaaaatgggcccctgagacatgcg

SEQ ID NO: 692744 - DNA, 841 bp, Homo sapiens
tggggtaccaaattccttaattggaaggatgggtccaaatcaaaaaccttaagtggatgtttgggtacaacttataaaaaaggtaaaggaaaccccaaaatgcttgccctgcctgtggtaaccagggaagtcaccccagggctagggggaaataagcccgaggctaacgcttcatatatcactggtctcccagggtgtgctggtcacaagagatattccgccaagccagattcggggcgctcccatctggcgcaatgtgggccacgtggtcacccaatatcttgagattggcttccacctgctacatccaggtaaaggtgtctcaatgaatgtcaccacaaatggggggctaattttgggtcaagtgggccagttggtggcactgtcccagtcagtgactggatccacattttttcccaacttggtaatggcaacactccatggcatttcaagcccgctcctcccagtcaatcaacagtcggggtttctgagatacccttgaagggaaaaattggggccacctcgtgggtactctggccagattccatccagcttcactcccgagaccagttgtctcccccttcttcctctaagtagaaaattgtgcggcgaacagaacgcggtcttgggcacaagtctctttacagagagccaacaattcatatcagggagacacaggtttagtaacacgaacactgggcccggggataacacggtacagaagagcggaaagacacctcccagggttggaccctgggacgggagtaaatagcgaggggcccatcgagaagcccccgaggggggaaagtacctgcgcggccccctcggcgaagggtgggag

SEQ ID NO: 692745 - DNA, 916 bp, Homo sapiens
agcgggtcttacccactgggtgggccacgcccacagcccccagctaggtgcctccgctgtccgggctctagtcccgccccgccctccccgccaccggctcgcagtcaccgggacgccaatcttgtgcatggagtcgcatttgctcctaagaggcgtcaggagaccgggctttcttccttctgcagctgaggctgcggcaggggccggggcatggggtcggggacaggaggaatttcgttgtcagagaataaaaggaggttgtccataattgactttaagcagcaatcagtaaaacatagagctcgattcagctcccgcacatttcttgctctgaaaattggaaaaacaagaaggtttacgatgtttgtgtgacgccacctgaattagaaaccaagatgaacataaacaaaggtggtctggtgtcgtcttcagcaaactcgacctccatcatgtactggagctatcaaagacaacttgcagagcggctaggcgtggacgatcgcgcaaagcgcccgctcacccaacgaacctaaccaaaagacaacaagagtacacatccaacgacatccgacgacgggacacacgacgttacatcatccacactgctcgacacgacggtaaacaacagaccagccaatggaagctcctgatatgggctataccctgtaccaacctcatgtcgccacgcagcatcatgggctaaacccctacttcacatacagaaagagtgcaaacggcgcaaaacacgtcacaggcacataaacagcgacatacctcattccaaccggcctaagcaactcatccatcgattcacacagaaagacatcgctcacacacacccacgataccccacacccacccccacacaccacgacaacaccaaccagacatcccaacctataccaagcacctcccg

SEQ ID NO: 692746 - DNA, 492 bp, Homo sapiens
aagagcatgtagtgcaagtggcgaggtacatagctcattgcagctttcaaactcctaagactctaagacgatcctcccgcctctgcctcctgagatagctgagaacacaggtgcaagacaccacgcccagctaattatatattgtagagacggggtatatgtcatgttgcccgggctggtctcgaactcctgggttcaagcgatcttcctgccttagcctcccagagtgctgggattacaggcatgagccactgcaatctggcctcattttcttgacagtggctttaacagagtagaaaattttaattttaatgaagtctagcttatcagttatttcatggatcatgtcttaaggagttgtaatctcaaaagtcatcaaactcaagatcatctaggattattcttttttgtgaatcctctaagagttttaaatacagttttgagtagtacatttaggtctgtgatccatttagagttaatatatgtgaagac

SEQ ID NO: 692747 - DNA, 277 bp, Homo sapiens
gcagattgcctgagctcaggagttcgagaccagcctgggtaacacagtgaagccctgtctgtactaaaatacaaacaattagccgggtgtggtggtgtgcgcctgtagtcccagccactcaggaggctgaggtaggagaattgcttgaacccgggaggtggaggttgtagagagccaagattgcacaattgcactccagcctgggcaagagtgagactcgtctccaaaaaaaaaaagactttgcctgaacaaatgtgccctaagtttcaaattaatt

SEQ ID NO: 692748 - DNA, 479 bp, Homo sapiens
  misc_feature (169)..(169): n is a, c, g, or t
  misc_feature (174)..(175): n is a, c, g, or t
cattagctattaagacacgcacataaatgagctgcattgaatccacacatgccattccatgaagacatcaaagaggatcatgtggatctttggtgccttccggttggcccctccctaggtctgtgagggtcagacatatcctgacacaacaaaaaaaaaaaacaaaacnaaaanncaaaaaacaacaaaaaaatagacggctgttattagagactgaatgtttgtgtcccccccaaattcctgtgttgaaaggctcacccccactatggtagtgttaggacgtggggcctttgggaggtgatggggttatgagggtggagccccagagagctctcacgccctttccaccatgtgaggttatggtgagaagatggtctctgaggaagctgcccttgccacacaccacatttgccagcgccttcatcttggatgtctatagcctccagaactgtgagaaataaacacttgttgtttaagcc

SEQ ID NO: 692749 - DNA, 126 bp, Homo sapiens
aacactatatacttgggatgctgggtttcgtaaattctaaaattctcccaaacagtatctttcagtcgtctagttgccctgtgaaggatgatcatgaagaaacaaagttcttcgcctcataaattt

SEQ ID NO: 692750 - DNA, 178 bp, Homo sapiens
taaaacgaagggcgtctagcatcttgtccaagtctttgagcgccactcactcagagggtctgtcactcattcctgaacttgaatctgctggtttaatcaggtcaggcagtgtgattgacagcgtagaattcttgagatgttcccaagcccttttggtaaccctagggcggcttgaaaa

SEQ ID NO: 692751 - DNA, 264 bp, Homo sapiens
tgagagcagtatcgatacaataaatgtacgaatagagtcagataactgcattctgaagatggactacatctcttcgcacttggaggatccacatactgtgggatccctatttcctttcatcgtagcttcccagtcaacaatttatgtgtcgattctgttgcctttcttcagagaagctcaaggtcccctatgttacaaagatattcttggtcatgtgaagctgttggttgtgcaacctcatactgttcatttccagggtcttgg

SEQ ID NO: 692752 - DNA, 734 bp, Homo sapiens
gaacaacagccctttcctgaccatcaccagcatgacccgagtcatggaagtctctcactggggtaatatggctgtggatagaaatatgtggacttaaagcacacaggagctgtgcttaaggggcctttcgcacgctatgattaccagagacagccagatagtggaatatcctccatccgttctttgaagaccatccttcctgcgtgctgcccagggatgtttagttacacgggatgagattgggcagatgtggactaccagccagcctccttatggtggagtgatcgtctgtatgagatggaaagtccggcctcgctatccctctcttaggcgggtggagagacccattacatcagtgggctacaacctcccaaggctatgagtacctctataatttgggtgaccagtgatgcactgataagatgaggtctggtggaccactgtgtgtggagttgaacaagtgatcagattctctgactgtgaagatcatgcctgcctgaaggagccaagaacattgaaatcgatagtcgcctatgaaatcagccgtgccccgagatgagctggactacgacctatctggacacatttggccgtcctgtgatagttgcctacaagaaaaatctggtagaacagcacattcaggaccattgtggtccactacagcgttcaacaaggtgctcatgctggagggagccctgctggtggtggcggcctttctacatcctggtctttac

SEQ ID NO: 692753 - DNA, 755 bp, Homo sapiens
ctgagctggggaggctgtcttgagtgcgtgcacctgtcaccgacaccgatggcggactggcagccctgagcgtcgcagtcatgccggacggacccgtgcaggcggtgcccccgccgccgacccgtgcccatggagcccaaacagcccacagaagaagaagcatcttcacacggaggattcctgcaccttctaagccagtagtggggattatataccctcctccagaggtcagaaatatgtagacaagactgacagctttgtggccagaaacgggcctgaatttgaagctaggatccgacagaacgagatcaacaaacccaagttcaactttctgaaccccaaaatgacccttaccatgcctactaccgcacaaggtcaagcgagttcaaggaagggcacggctcaggagccgtccgcgccataccccaaggtcatgcaagcagcagcgagacagacacaccagaaggagctgccccagaagggtcaagcccaagtaatccaagagaccatcgtgccaaaagagcctcctcctgagcattgagttcattgctgatcctcgcatctatctcagtccttcgcacgggaatgtggtgaagctgaccggctcagtattgtggaccaggattgggcgccagttcatgacccagctgcatgcagtacagagcagcgcaataccaggttgactttctacggccaagcacagcactcttcaacaaattcaggaagctagttggacaggcacaccagggatcttg

SEQ ID NO: 692754 - DNA, 770 bp, Homo sapiens
gctgagatgaccctgtcgctcgacttctgctgttcctgccaccggctgctgctgctgctggaccgtccccacggacggcggtgcgaggcgtccctctgcaagcgttagacttcttcagggaatggggcaccagttaactacaaggacaggcaatctatacctgcgggggcccctgaagaagtccaatgcaccgcttgtcaatgtgaccctctactatgaaggcactgtgcggtggcttgacgataccttacctgatccggagagcatcttccgccaacatggctgtgtggtcatggacgatcctcaatgtcacgctggatgccctacggaagacgcagcaggaacaaaatgtcagatgtgcaggtgggagttcaagtgccagcatggacaagaggagtgcgatatgcaagcaaggtggaggcctgcgctgtcgtgatgaacttgacatggtagctagctcttcctgaccattgtctgcatggaagtagtttgagtgacatggagagaagtctgccacgtatgtcctgtcagtctctacagctccccaggccgtgtcgccgagacactatcactggagtgtgcgaattggcgggaccgccggacagtgcgaggcatcagtgacaacgcacaacgcccatgccggacagatgctctccagagcaccgacgacgagtatgtgcccttgaggtctagccgtcatagtgggaaagcccttggaagatcagactccagctccttagccttgtctgccagttgtaccagggcaagaa

SEQ ID NO: 692755 - DNA, 293 bp, Homo sapiens
  misc_feature (6)..(6): n is a, c, g, or t
gtgggngtgaacggtcggagcgggacggatttcgattcaacggggttcggaccgcgactgcgcctatggagcagtgtcaatgagctgaaaggagaaaggcaacaaggccctgaagccggtgggtacattgatgatgccttacaggtgctactccgaagctattaagctgggatcccgcacaaaccactgtgctgtacagcaaccgtatctgctgcctatgccaagaaaaaagggggagactaccagaaggcttatgaggatggctgcaagactgtcgaaccttaaagccctga

SEQ ID NO: 692756 - DNA, 936 bp, Homo sapiens
acgaggcgcttgagatcactagccaggttgttgaagatgatgaactcatttccgaagtaaaacagagaattacttgctttcagatagccagttgttcagggcgggggtaacattttttaaacattaccatatatggggatgattatgataccatcctatcctgtagatagtactcagctactcatagagtgaatgggggctatataatgacttggtaccaatgttggtaatcaagtgtcctgatagggtagatcattggtcctacttcacaccggctgtggtacctaagggaagtcgttaactggatacttgcgtccacgaaaggatgaagctacgtggatctgtacacactggatgctatcccaaggatcaacttgggaagtagaccgtattaggggaacgaacaaattgttccatgtcttgtaggggtccctcttggggcagagttaccgcccagtatgcattgtgcatttctccttgaatgctactggtcatcccgtaagcacatggttttctttgcgttttacattttgaataagttgcgggcctcaattggatacatcgtttacaggaattcttttgttacaggagatcctagtggatcttgttgtttagtccgtacgaagctccattttatatacattacgaagatgaattcgaggattttctacatctccagatcaacataggaacttgagaggaggacattgcagactagattcgttgctccatgtccacgataatgcatcacctggtgggcttcccccgaggggtctcagggggtggcatcaacgtgagacatgagcaatcgctcaatgtaggggtcatgtttcccctggtaacctaaagtgatccggcggtagtttcgcgcttcccagtggtagtctgggcactggacggtaaaggtacaaacaatggggggttagatttaagact

SEQ ID NO: 692757 - DNA, 410 bp, Homo sapiens
gatgcacgatgtagggaggcaacagtcgcctcaattacattacatggctagtctagatatcggttaccagattccgaaggtgacccttatcgactctcagtgccatatactttgcagagacacggagcgtatccgtgtgataactgagaaagacagctgagacgatgccgattgagaagctgcgcagatcggcctacactatatttagcctatgatagctaacgctgtgtcaattagcctactgtgaggatcaatatgtctgccttatggtaaacctgtggaactcactacactagctgctggtctctatgacgagtctatctggctatatatgatgtggatgcttctatgtcctactgcgctgcactatagacctgcgagatgccatgggtatcatctgggcgctcgct

SEQ ID NO: 692758 - DNA, 115 bp, Homo sapiens
gagcagcacttgcacaataaatgggcagcagtatcactgtctctgctgatagcactggtctgaaactcccttaggattagactgaaacacaccattctagggccccacttaaata

SEQ ID NO: 692759 - DNA, 722 bp, Homo sapiens
  misc_feature (27)..(27): n is a, c, g, or t
  misc_feature (30)..(30): n is a, c, g, or t
  misc_feature (34)..(34): n is a, c, g, or t
  misc_feature (40)..(40): n is a, c, g, or t
  misc_feature (42)..(42): n is a, c, g, or t
  misc_feature (53)..(53): n is a, c, g, or t
aacaccgcccacccccatgacaccatnganaagnccgagngncatgagtaganacccgggaagacggtcgaaaccgtcgggagcgcaggctcacgcctgtaatcccagcactttgggaggccgaggcggacggatcacgaggttaggagatcgagaccatcccggctaaaacggcgaaaccccgtctctactaaaaatacaaaaaattagccgggcgtagtggcgggcgcctgtagtcccagctacttgggaggctgaggcaggagaatggcgagaacccgggaggcggagcttgcagagagccgagatcccgccactgcactccagcctgggcgacagagcgagactccgcctcaaaaaaaaaacaaaggaccacacttaagccacatccaacacaggcaccattcattctactcacgcattcattcattcaacaaaagtttcaaagctcttactctaccaattctccctattgatgaaatattatctgcaagaattcaaagaatagttcccatgagacggagatatggaaaatacatctacttagcgccattctagcatgaagactggtcaacaactactccatgaaccagaatccaattgctaaaacgggcaaaggagccttaggcaagaggggaaatctgtaccgcaatggcgctaaaatcaagggcatctcttcagccggaaacgcacacccagggggccaaacctctggaagcctg

SEQ ID NO: 692760 - DNA, 231 bp, Homo sapiens
atagtgacccagactcacgtctatcatcctgtgctactgtgcggtaccggcttgttgaagggctgagaagcgatcaaagaacaagtagctgggcaagcagttctgatgctgcgtctgagggcttggcacctaagctaccgctgctgcccttcccccagctcagtcgccctccaggtgcccagagctggttgatagagtcgatggagccaagcttggtcgatcttgatgcgt

SEQ ID NO: 692761 - DNA, 301 bp, Homo sapiens
ccgggacaccctggctgtcatccgccacttccgcgagcccatccgtctcaagactgtgaaaccaggcaaagtcattaataaagatttgcggcattacctaaggcttcagtttcaaaaaggatcaattgacccacaacttcaggcaggtgattcaagagatattctctactttgagacccatccatgcactacagggcccccaagggtatggagatgtcccaggtgttgattataatctcattcccgttgcacagtcacacgcactgggagagagtagaagcattgttagaaagttggacat

SEQ ID NO: 692762 - DNA, 428 bp, Homo sapiens
  misc_feature (28)..(28): n is a, c, g, or t
tacagggtggtcacaggataacaaattntaggcagcagatttacatgacttgaggctgtgggctgttaagacgttgaaaaaccagggtgtggaccaagctggctaaggctgagtggacccaacgtggtgctggattggatggaggttttacctaggccctcattatatgctcattaacatactaaatcacacacccgccagtgccatgacagttctgagaccagtgtttgatgtaaaaatggcaccacagttccaagaaatctccacctttacccaggaattttcgtgaacattccactctttggttaaagaaacccatcaagatgaaaccccagaacccattattctctcttgggtatgcccaagctcccctttcttgagagtgtactttttgctttgcaataaatctcttctttcactatcaaaaa

SEQ ID NO: 692763 - DNA, 164 bp, Homo sapiens
tggagcgccttctctctgcttttggagaaagggaatacacgataaagaaggagacggaaagaagagaaaaagtgaggcgggagacagagggaaaagggcgtgaacagaaagggccggagcgtgcaggggagcacagggcgcgggggcggcactgccgagccggg

SEQ ID NO: 692764 - DNA, 272 bp, Homo sapiens
  misc_feature (238)..(238): n is a, c, g, or t
  misc_feature (241)..(242): n is a, c, g, or t
  misc_feature (245)..(245): n is a, c, g, or t
  misc_feature (251)..(251): n is a, c, g, or t
  misc_feature (253)..(253): n is a, c, g, or t
  misc_feature (257)..(258): n is a, c, g, or t
  misc_feature (264)..(264): n is a, c, g, or t
atgggtgaccgtggcttgtgggttgaccgtggcttgtgggttgaccgtggcttgtgggttgaccgtggcttgtgggttgaccgtggcttgtgggttgaccgtggcttgtgggttgaccgtggcttgtgggttgaccgtggcttgtgggttgaccgtggcttgtgggttgaccgtggcttgtgggttgaccgtggcttgtgggttgaccgtggcttgtgggttgaccgtggcttacgtnacnncangcatgncngggnncctctngatcacca

SEQ ID NO: 692765 - DNA, 493 bp, Homo sapiens
atgggtgaccgtggcttgtgggttgaccgtggcttgtgggttgaccgtggcttgtgggttgaccgtggcttgtgggttgaccgtggcttgtgggttgaccgtggcttgtgggttgaccgtggcttgtgggttgaccgtggcttgtgggttgaccgtggcttgtgggttgaccgtggcttgtgggttgaccgtggcttgtgggttgaccgtggcttgtgggttgaccgtggcttactatgaaagcattcagttatatgcattcacaaagagatgacttgaaattggaacttatgtttaaaagggaagcagagcataaagatttggaaaatttgcagcccgactatgtggtagaaaataaaaacccattttctggggaggaattcaagccagctgcagaaatgtgcataagtaactaggtgctgaatattaagagtcaagagaatgggctaaatgtctccaagagcatgtcagagactttcccatcaagcccctc

SEQ ID NO: 692766 - DNA, 361 bp, Homo sapiens
gccccccagtttttgggggggggtgtttttttttggtggatttaaagctgactccctggtacaaacagctgttgaagctcaaagctggaggtgagtttttgaggcctttgccattatccagcccaaaatttggggcccgcacccttttgtttggttgaggacttggggcaggaaaggaaagctgctgaacttgaatttccctttcccaggggaaaaaaaaaaaggaaaggggttgctgcccccctgtccctgtttggagattgatgggggttggaactgttttcagttttgatttgctttattcagttttttagcagcttttaaaagtccccttttcccccctaaaggggttttgtttgca

SEQ ID NO: 692767 - DNA, 441 bp, Homo sapiens
atgggtgaccgtggcttgtgggttgaccgtggcttgtgggttgaccgtggcttgtgggttgaccgtggcttgtgggttgaccgtggcttgtgggttgaccgtggcttgtgggttgaccgtggcttgtgggttgaccgtggcttgtgggttgaccgtggcttgtgggttgaccgtggcttgtgggttgaccgtggcttgtgggttgaccgtggcttgtgggttgaccgtggcttacaattttgtcttctgtttccatatctgggtcattagaagccccttcaatcccatcatcccttttcccttcaaatcagggcaactcagagatagctttcttggccgggggcctgatggctatcctttctctcgcaaatatcctcatagcatcaggatcatttaaaggataggcagattctgcggtagaaacatccgaggtagtcacgg

SEQ ID NO: 692768 - DNA, 757 bp, Homo sapiens
  misc_feature (7)..(7): n is a, c, g, or t
  misc_feature (46)..(46): n is a, c, g, or t
  misc_feature (83)..(83): n is a, c, g, or t
  misc_feature (110)..(110): n is a, c, g, or t
  misc_feature (138)..(138): n is a, c, g, or t
  misc_feature (148)..(148): n is a, c, g, or t
  misc_feature (159)..(159): n is a, c, g, or t
  misc_feature (199)..(199): n is a, c, g, or t
  misc_feature (211)..(211): n is a, c, g, or t
  misc_feature (249)..(249): n is a, c, g, or t
  misc_feature (262)..(263): n is a, c, g, or t
  misc_feature (282)..(282): n is a, c, g, or t
  misc_feature (288)..(288): n is a, c, g, or t
  misc_feature (293)..(293): n is a, c, g, or t
  misc_feature (304)..(306): n is a, c, g, or t
  misc_feature (334)..(335): n is a, c, g, or t
  misc_feature (339)..(339): n is a, c, g, or t
  misc_feature (350)..(350): n is a, c, g, or t
  misc_feature (396)..(396): n is a, c, g, or t
  misc_feature (422)..(423): n is a, c, g, or t
  misc_feature (449)..(449): n is a, c, g, or t
  misc_feature (451)..(451): n is a, c, g, or t
  misc_feature (457)..(457): n is a, c, g, or t
  misc_feature (474)..(474): n is a, c, g, or t
  misc_feature (485)..(485): n is a, c, g, or t
  misc_feature (509)..(509): n is a, c, g, or t
  misc_feature (511)..(511): n is a, c, g, or t
  misc_feature (514)..(515): n is a, c, g, or t
  misc_feature (527)..(528): n is a, c, g, or t
  misc_feature (534)..(534): n is a, c, g, or t
  misc_feature (545)..(545): n is a, c, g, or t
  misc_feature (550)..(550): n is a, c, g, or t
  misc_feature (554)..(554): n is a, c, g, or t
  misc_feature (557)..(557): n is a, c, g, or t
  misc_feature (567)..(567): n is a, c, g, or t
  misc_feature (570)..(570): n is a, c, g, or t
  misc_feature (577)..(577): n is a, c, g, or t
  misc_feature (580)..(581): n is a, c, g, or t
  misc_feature (600)..(600): n is a, c, g, or t
  misc_feature (602)..(602): n is a, c, g, or t
  misc_feature (610)..(611): n is a, c, g, or t
  misc_feature (617)..(617): n is a, c, g, or t
  misc_feature (621)..(621): n is a, c, g, or t
  misc_feature (623)..(623): n is a, c, g, or t
  misc_feature (630)..(630): n is a, c, g, or t
  misc_feature (633)..(633): n is a, c, g, or t
  misc_feature (637)..(637): n is a, c, g, or t
  misc_feature (642)..(642): n is a, c, g, or t
  misc_feature (644)..(644): n is a, c, g, or t
  misc_feature (647)..(647): n is a, c, g, or t
  misc_feature (649)..(649): n is a, c, g, or t
  misc_feature (654)..(654): n is a, c, g, or t
  misc_feature (663)..(663): n is a, c, g, or t
  misc_feature (667)..(667): n is a, c, g, or t
  misc_feature (674)..(674): n is a, c, g, or t
  misc_feature (676)..(676): n is a, c, g, or t
  misc_feature (680)..(680): n is a, c, g, or t
  misc_feature (687)..(687): n is a, c, g, or t
  misc_feature (693)..(693): n is a, c, g, or t
  misc_feature (699)..(700): n is a, c, g, or t
  misc_feature (703)..(703): n is a, c, g, or t
  misc_feature (705)..(705): n is a, c, g, or t
  misc_feature (713)..(713): n is a, c, g, or t
  misc_feature (715)..(715): n is a, c, g, or t
  misc_feature (720)..(720): n is a, c, g, or t
  misc_feature (722)..(722): n is a, c, g, or t
  misc_feature (727)..(727): n is a, c, g, or t
  misc_feature (733)..(733): n is a, c, g, or t
  misc_feature (736)..(737): n is a, c, g, or t
  misc_feature (741)..(741): n is a, c, g, or t
tcatggnacgtttttttaaccgcagggatgtttttattgaaatgcntgttatgagtaacacatgaactgcctctggcccaggnggaacttgttccctgataggtgggacnggcccagtggagacagtctaggaggggntaagaagggngccaagtgacngagggcttcaacggcataaggtaaggcttccagggagtcnggtgaaccgagngttattaactctggtgtaagcccgacatggtatggagnttagtatgtgggnntactgatggatgatatggngtgacntttgnaaaaacaatcnnntgactgccgcagtcacacatggaagtannactntgaagtgattngcctaagccagatggtgatccatgagcaatcggctgatggaatgtngtgaataccagcgaagaatagaaagnntttgctgcagcaagagctttatgtcntnacaggnatggacaacttgacatncagccgattgntcatgcatgaccatccagactgangnctnntgagagtacatnngagttnacttgagtggncgcgnaaanatnacaatgcctntancaaaggnatnngatgatgcgaatcagcagncnctgatgcnnagatgnatancntgcgggnttnacancagantnagnancactnggtacaggnggtnacctggnancatntcttaanggttgnagacgnnctntnggtggagncnatttnangaccntgaagntgnnactnttgggctaacccaccg

SEQ ID NO: 692769 - DNA, 291 bp, Homo sapiens
  misc_feature (281)..(281): n is a, c, g, or t
ccaggcaacagtggctcatgcctgcaatagcagcacttcctgcaataccagggaggccaaggcaggaggatcacctgagatcaggagtttgagaccagcctggccaacatgttgaaaccccatctccagtaaaaatacaaaaattagctctgtgtggtggcaggtacctgtagtcccagctactcaggaggctgaggcaagagaattgcttgaacccgggaggtggaggttgcagtgagctaagattgtgccactgcactccagcctggcaatagagcaanctccgtctca

SEQ ID NO: 692770 - DNA, 300 bp, Homo sapiens
atgggtgaccgtggcttgtgggttgaccgtggcttgtgggttgaccgtggcttgtgggttgaccgtggcttgtgggttgaccgtggcttgtgggttgaccgtggcttgtgggttgaccgtggcttgtgggttgaccgtggcttgtgggttgaccgtggcttgtgggggtatcttgtctatccagtgagctttagtcgcttctacccctaggtgctttctccttagtagtcgttacagcagttgaaagttatagttgctagaaaatctgggggacagtctccctcctatgatgaatagaga

SEQ ID NO: 692771 - DNA, 191 bp, Homo sapiens
  misc_feature (27)..(27): n is a, c, g, or t
gtgcccatcctttaaaaacccaggaanaaaacttcaggttgcgcttcctgaaccttgacagacatacgtggcaccacagcttctggcaaagaacaagaaatgtagtggacagacttagccttacagtacctacatgagaatgttccccccactggaaactgacgctaggctactttcttgcggatggattt

SEQ ID NO: 692772 - DNA, 124 bp, Homo sapiens
agacatcggaccgtactcagcctcttctgagtagccccatcacctttttattaatttttggaacaaagtctcgactctgtagccaaggtaggaagtgcagtgacttaatctcggttcattaaca

SEQ ID NO: 692773 - DNA, 947 bp, Homo sapiens
  misc_feature (947)..(947): n is a, c, g, or t
aaagacgctgaccttcgctgcctcggctccagcggccagggatgccctccaggaagtacttcgtggggggggaaagtggaacatgaccggtgcggaagcacgaggtctgcagtcatactcatcagggctctctgaactgcaggaacgcggtggcggctgacatcttgacggggtgtcgatgcatcccctgtagtggcttagtatcgggttctcggccggccacgaagtgtagatccgcaagatttgctgtgccgtgagtcagaggttgcctataaagagtcgcactacatgggtgcataaacgcggggcggaaaatcatgctcccgtgagattgtgaactcaatgagaagcttgttggaaggtcgcaacggttgcgtatatgcgttgcgcggggaggaagacagttgcgagtatgacgcaagtggtccatgtacttgtggtgggaaggtcccagagtagtagtctcgattctggtgggccaagacagttttggcttgctagtgcttgctgagaaagtagtgggcaccatccgaattgtaaatgggacgcttggagatttggggggaagaacgacgtgatgaattgaaatcggtggaaaagcgttggtgcaattggccctagaagaaaagggttggcgcgggactagtagcccagcatcgctatgggggccatcgggcccaaacatcagcgcggtcgacacagtgacggtcagttcgacgcaaggtgggtcgggtagcatcggtgccattagtggacccccgattgttgtatggcgggccccagtttcgtgtggtcttggacaagctaagtgggagaatagggccccataagatggggcctcagggaggagaagtagggaatggagaaggcaaggcctcacatgagggagagtggtatatgggaaccctcggagaagtctccaaggaattggctggtagagcaacagn

SEQ ID NO: 692774 - DNA, 309 bp, Homo sapiens
atgggtgaccgtggcttgtgggttgaccgtggcttgtgggttgaccgtggcttgtgggttgaccgtggcttgtgggttgaccgtggcttgtgggttgaccgtggcttgtgggttgaccgtggcttgtgggttgaccgtggcttgtgggttgaccgtggcttgtgggttctctccattgcttctattttctaggtgaaataggaaaccaaggcacagctgagggtgatcatgggggaggaggtgatggagttctgaagagaaagaaggtcttccaggatagagaagaaccagggcaattagatcctcttg

SEQ ID NO: 692775 - DNA, 345 bp, Homo sapiens
  misc_feature (339)..(339): n is a, c, g, or t
atgggtgaccgtggcttgtgggttgaccgtggcttgtgggttgaccgtggcttgtgggttgaccgtggcttgtgggttgaccgtggcttgtgggttgaccgtggcttgtgggttgaccgtggcttgtgggttgaccgtggcttgtgggttgaccgtggcttgtgggttttagacatgaagtcctagccaacgcctatgtcctgaatggtaatgcctaggttttcttctagggttttactggtttacggtctaacgtttaagtctgtaataccatcttgaattgaggtttagtactaacggtgtaaggaaaggactccagtttcagcttcacatagtggncagggg

SEQ ID NO: 692776 - DNA, 261 bp, Homo sapiens
atgggtgaccgtggcttgtgggttgaccgtggcttgtgggttgaccgtggcttgtgggttgaccgtggcttgtgggttgaccgtggcttgtgggttgaccgtggcttgtgggttgaccgtggcttgtgggttgaccgtggcttgtgggttgaccgtggcttgtgggagaagccggcgataaagagtgttatagatcaccccttccccaataaagctaaaacactcttaacgccggcttctatgacttgggtaattcgtgga

SEQ ID NO: 692777 - DNA, 468 bp, Homo sapiens
gcttagatgtgctctgaccgtactatttgctgtggctgtaaacctgcattgttatgaaaactcaggtaaatgaatttgtaatgactactgaaaatgaaacaggagtatacttgaataagtattgacatttttgtttcaggtcatttactttaagactcacaaagaacatattagctaatagaattcatggccaaaccatgatgtaaatggagctaaggtcagaattagattccttagggagctgaagaaaaaacacggctatgacccttaaaccaatctgctgactgttttctgctgactcttttctgatgcaaagtaaatggtgggaaaaaaaaaactgatactaaaaacaaacaaataaacaaaaaaaacctctaattatccaaccacctgtgcaatacaatagctttctattaaataaaacagaatggaaaaaaaatctccaaatcatgagttgaacccatgaaa

SEQ ID NO: 692778 - DNA, 224 bp, Homo sapiens
atgggtgaccgtggcttgtgggttgaccgtggcttgtgggttgaccgtggcttgtgggttgaccgtggcttgtgggttgaccgtggcttgtgggttgaccgtggcttgtgggttgaccgtggcttgtgggttgaccgtggcttgtgggttgaccgtggcttgtgggtagccttcatcagggtttgctgaagatggcggatataggctgagcaagaggtggtaac

SEQ ID NO: 692779 - DNA, 1034 bp, Homo sapiens
gctcacttgaacccaggaggcggaggtgcagtgagctgagatgcgccgctgcactccagcctgagtgacagagcaagactccgtctcaaaaaaaaaaaaaaaaaagaaagttcaggtgctctataacataagtggtagtctgggtcaaccctattaggggcccttcacggaaaaccattgtgactctgggagcctggggttgccctctgtgttcttgttgaccagtgcacttccctttttcttactatccttattttccccgggatttccatagaacttcccaagatatccgtcacgtggtgaggcatataacccataggacgtggggaccgttgggcaaaattacgtgtacagccaatttctacggtaggcgctgcttataaacttgatatttataatcgagcatatctaacattgctgtaaaatggcacaaatcttaatcggtacagctgggtgaaaatttggatatgtatacacccatcataatcaccacccaaatcaggatatacaatatttctagaaagggtccctcaatgcccttggcacttaggtgtggccccaagaagataagcacatatatcagacgatcggtcaaacatagatacaggcttccacctgtggaccgtatccaacatatactggcgtcaacaaaagcgaaaagggataaaaacaccaaatttaaatagggaagggagaaccggtcaattccacccaagggggcgtcatctttggggagggggtgtgaaatggcaagacactgggatctgcataaacccgatctgttgggatcattgggatataaatggattttaaggattgtgagccattttgtggcacaccgaatattgtttacgacaaaatagagaggggatcaaagtagtacacacaacatgggcccctaaaaatatagccggatatacacaatggtgcccaaactagaaaccaaatccacggctgacataagacggatgagtggacctaaggaaagagggaggaggcgccaccacggagacacgacggggagatacacggga

SEQ ID NO: 692780 - DNA, 272 bp, Homo sapiens
atgggtgaccgtggcttgtgggttgaccgtggcttgtgggttgaccgtggcttgtgggttgaccgtggcttgtgggttgaccgtggcttgtgggttgaccgtggcttgtgggttgaccgtggcttgtgggttgaccgtggcttgtgggttgaccgtggcttgtgggcatggctttttttgtgggctgccacgcccatctttatcaccagaatgagtagctgagttactgggcccagaggctgggcccctggacatgtacctgcagaataata

SEQ ID NO: 692781 - DNA, 1238 bp, Homo sapiens
ggagacgagacagacacctcagtctacgtattctattcatttcctgattgagatcaagcgccgagatgctggtgcaaagagcattgtgcgcgagtatgccgccgtcagccaggtatcatgttggcagctttgggtgtaacgttgcgtcgtagtcttcgacgcagggagggcgtcgtagagcgctcaggatagcctaagaagaccatgtcccttgggcagcatgctagtatgctgtttgccctcgtcactagggccatgcatgagaagcgtgcagggcacatgcagcacttggcgaagcttcaagggggacgaagaacgttaagtccgtagacaagttgtacctctcagtcgagacgcgacgaccgagttgggggaccttcctagttggcacaaaatccgggacttatatttcaccgctcagagggcccgactcaatcaaggacaaaaccttgtcgattacgagcgactcggcactcacgttcctagaacactcagtaattcgttctcctgcaaaaacacgcacgaaaaattgttcccccttgaacagtgagcaaggacgtcaaacgaacttgcctttttggcaatacgcgcaaattgacgcggccattaacaatgctgcaggcgccccagtggaattgcccgttgcgccatccatgctgaaagcgcccaaattggtgcggggctaacaattgaacaaccggctcgaaattttccccaatatttaattctcctttggtttgtaacaccagagccgctttggcattagcgcccacccctacctacttgaaacctttggacttctcaacggaaaattagcgctttattcccctgggctccgaaatccccaatgggccgcccaaggttctccaaggaagcggaacccactcccctaggcccttggacacagtgatctgccttggccccaaaaggggtccctggctccacgcaaattttccaaccggaagcctgatcgaaagcccactgggcagcacagcgttcccggggtatcttcataggcccaggaggtcagttcttctttgccgaagatgggtcaagtccgttacattggcttcctagtagcgcgcaaggagcgaccctttttggtttgacatattcccccctactattccccttatcacagccactttgacacacctattttatccccccccaatgcctagtcctctaaaagttgcctatccaagtaacctttgttacacacaaccacaggatgtccc

SEQ ID NO: 692782 - DNA, 233 bp, Homo sapiens
atgggtgaccgtggcttgtgggttgaccgtggcttgtgggttgaccgtggcttgtgggttgaccgtggcttgtgggttgaccgtggcttgtgggttgaccgtggcttgtgggttgaccgtggcttgtgggttgaccgtggcttgtgggttgaccgtggcttgtgggatcaagaccatcctggctaacacagtgaaatcccatctctactaaaaatacaaaaaataccacgcat

SEQ ID NO: 692783 - DNA, 242 bp, Homo sapiens
ctgtgtctctgtttctctctggtctctcctccattctggtctatctctagtgggagtggtttctctgtgggtgcgtgcgttccttcgcgtgtttctgggtgtgtctgtagtgccccacaggaggtggccctctccctagtggctgtccttctctgatcagcactgtgcgccccggctgagctctacgaccgccgtgacctgcgactgtccgtttcagtccaggagcctcgtgccactcggaa

SEQ ID NO: 692784 - DNA, 201 bp, Homo sapiens
  misc_feature (163)..(163): n is a, c, g, or t
cgagaccatttcattgtgatgagtagtcatcctctagagaagcacttaactagggatgagtatatattctctttggctctcaaagtattctaggtcaaggccatatgctagatatagggataggatgataagaacatgggctagagacccgaacagccacagntagtagaaacggcataacgaaggctaagcactatatac

SEQ ID NO: 692785 - DNA, 826 bp, Homo sapiens
  misc_feature (29)..(29): n is a, c, g, or t
  misc_feature (76)..(77): n is a, c, g, or t
  misc_feature (97)..(97): n is a, c, g, or t
  misc_feature (107)..(107): n is a, c, g, or t
  misc_feature (110)..(110): n is a, c, g, or t
  misc_feature (116)..(116): n is a, c, g, or t
  misc_feature (118)..(118): n is a, c, g, or t
  misc_feature (122)..(122): n is a, c, g, or t
  misc_feature (139)..(139): n is a, c, g, or t
  misc_feature (150)..(150): n is a, c, g, or t
  misc_feature (160)..(160): n is a, c, g, or t
  misc_feature (168)..(168): n is a, c, g, or t
  misc_feature (170)..(170): n is a, c, g, or t
  misc_feature (173)..(173): n is a, c, g, or t
  misc_feature (196)..(196): n is a, c, g, or t
  misc_feature (201)..(201): n is a, c, g, or t
  misc_feature (207)..(207): n is a, c, g, or t
  misc_feature (209)..(209): n is a, c, g, or t
  misc_feature (223)..(223): n is a, c, g, or t
  misc_feature (236)..(236): n is a, c, g, or t
  misc_feature (238)..(238): n is a, c, g, or t
  misc_feature (243)..(243): n is a, c, g, or t
  misc_feature (250)..(250): n is a, c, g, or t
  misc_feature (266)..(266): n is a, c, g, or t
  misc_feature (270)..(270): n is a, c, g, or t
  misc_feature (280)..(280): n is a, c, g, or t
  misc_feature (305)..(305): n is a, c, g, or t
  misc_feature (307)..(308): n is a, c, g, or t
  misc_feature (328)..(328): n is a, c, g, or t
  misc_feature (371)..(371): n is a, c, g, or t
  misc_feature (406)..(406): n is a, c, g, or t
  misc_feature (449)..(449): n is a, c, g, or t
  misc_feature (483)..(483): n is a, c, g, or t
  misc_feature (523)..(523): n is a, c, g, or t
  misc_feature (541)..(541): n is a, c, g, or t
  misc_feature (552)..(552): n is a, c, g, or t
  misc_feature (564)..(564): n is a, c, g, or t
  misc_feature (572)..(572): n is a, c, g, or t
  misc_feature (575)..(576): n is a, c, g, or t
acttaacacaagggttggctactctgccnatagaagataatagtgttcagaggaacttctcttataaaaaccaggnnacgcctgtcggccttgaaantcaccctgtnggngtttancnaacngccagcaatcacaacancggtacttgcngctgctttantgccttcntnatntacctcaagacatgccttatggnatgtntctgananatagaggtcatctnggccttctggaanantaccnggggggngggggggggggggggngaanagatcgaganggggcatgtgttggagctgctcctngnnagtgaagccgtcctcaatgnggaagcgggggatgtggaccaccagcatcatctcctccaattnatccagccactcctgcagcacctctggggggagtnccttctccaccttgggcagggtcttctcagggttgggcaagangaggaccatggtgatgtcatcacctttgaagggnaactgaagcacctgggtgcgttcagccacgcgccgataanggaacttgcgttcctggnacatcatagangctgaacacgantgtccatnagnnttgtagaacagttccttccttgtgttctcagggctgaactttgacttccacagggccttgaagtaaatggtgttaaccagcaccagaacagtgagctcattgatggcttccgagggaatgacatcggtgattcggccttcggtcttattggacacccatttgttgatggccgctctggattgctctgcattttccttgaagtccaggggctggagcttggctccatataccaactcactgatgttctggg

SEQ ID NO: 692786 - DNA, 167 bp, Homo sapiens
ccccaaacccccttttttttttttaaagggggcccccccccccccttggtttttttggtggttggggggttttttttgggcccttttggtgcggggggccccccccggaaaggggggggggccccaattttcctttttgttttaccccccgttttttttttggggga

SEQ ID NO: 692787 - DNA, 259 bp, Homo sapiens
  misc_feature (50)..(51): n is a, c, g, or t
  misc_feature (106)..(106): n is a, c, g, or t
  misc_feature (173)..(173): n is a, c, g, or t
tatgccagcacggagagggagtcgcttcctcctcaacttaaaagtcatanngagaaaattaacacgctccatttgaagtatgtgttatttcccttctgtgtatttnggctgagctccctgatagtggttgctgggtacaggacactgagaaacagctggcagaggagtattanaggactagccagtagattgtaaactcagaagggaacagtgtccccaagtccaagggaggaagtgttcccttctccggtggcgtggt

SEQ ID NO: 692788 - DNA, 447 bp, Homo sapiens
  misc_feature (54)..(54): n is a, c, g, or t
  misc_feature (107)..(107): n is a, c, g, or t
  misc_feature (281)..(281): n is a, c, g, or t
  misc_feature (348)..(348): n is a, c, g, or t
  misc_feature (370)..(370): n is a, c, g, or t
  misc_feature (429)..(429): n is a, c, g, or t
accgggcttgacctgggagatgctcacggggcaggagcgcgtggccctggaacncggaagcgggagtgcggcaacccacttaccagcgggcggacttcgtctggccncaactcctacgacctcgccatcaaggctatcacctccagcgccaaagtggacatgacgttcgaggaggaggcacagctcctgcagttgaaggtgaagtgtctgaacaacctgggcggcctcccctgaaagctcgaccactaccgcgcagcctgcgttcctgcagccttgtgctnggagcaccagccagacaacatcaaggctcttcttccgcaagggcaaggtgctggcccagcagggggnagttacagtgaggccatccccntcctgagggcagccttgaagctgggaactttccaacaagacgttccacgcagagttttnaaagttggttgaaagaag

SEQ ID NO: 692789 - DNA, 239 bp, Homo sapiens
ctcccaactagcccacaacccccccatccaattcacccagcagaccacatagcaccccctgggtgctacagggactcatctacaaactttatgggaaatgtgcacaacttggattttcacaaatatgtggaaaaactgcaatgagggttctgacttacaattcctagggacaactagcagtcatcaagaaaaagtgtatgctagcctcaactttggcagtaagactcaggaaacatttg

SEQ ID NO: 692790 - DNA, 492 bp, Homo sapiens
ttgccagatgcccctaaagctgacttaataaacgtcaacaattgagacctctgcctcagtcactcatctcagctatcagccacatgtcaccatataaaatttatattgccagccgggcgtggtggctcactcctgtaatcccagcactttgggaggccgaggcgggtggatcacctgaggtcacgagtttgagaccagcctcactaacatggggaaaccccatctctactaaaaaatacaacaaaattagccagctatggtggcacatgcctgtagtcccagctacttggaaggctgaggtgggaggatcacttgagactgggaggttgcagtaagctacaatcatgccactgcaccccagcctgggcgacagagggaaaccttgtctcaaaaaaaaaaacaacacgcatttagagtagacttaattggccggaaaaccggtggggaaaatactcacccataggttattccttggaacagatcagcaaaatt

SEQ ID NO: 692791 - DNA, 662 bp, Homo sapiens
gttgtggaacaaatggacaaaatgcagttcaacgaaaaagatgacgaagttacacgacggtggaagaattacttgaaacttggacttattcagcgtggcaactaaatgaagaggagctgaatgcgataagcaacagaaaattcatctctgacaaaagaagttcaagacgttaaaagctaagcaaaatgagtcaggtttctttgggctctctgagttgaaggaacttaagaaagtgatccatgagaaagatggagagatcaagtctgtagaagagcttctggagggagaacttctcaaagttgctaacaaggagaaaactgttcaggatttgaaacaggaaataaaggctctaaaagaagaaataggagatgtccagcttgagaaggctcaagagttatctatcacttccaaaggttcaggagctgcagaacttattgcaaggaaaagaggaacagatgaataccatgaaggctgtgtaggcagagaaagagaaaggactagccaatacagggaagtggttacaggatcttccagaagaaactgaatctctagcacatgttcaggaagtagccccacatcacttggaagaggctcctctggatcacagcttgccaacgtgcgatgctgtgtaacaccaggggaaggacgggcgggttccgtgc

SEQ ID NO: 692792 - DNA, 695 bp, Homo sapiens
tgggagataacccaaaattgtgtaaaggggaactgggaatggtgtaaggtgaaccactggacagaaatggataaaaaaagaaaaagaacattaccagacagatgagcaaatttatcccgatcaatcacacagagtcttgtggtggtactgttgcattaagaatactttaatgtactaaggagtcttcacagagacatgtatagtgattataacagacacagtggaagaaaatcattaatcctatcagaatgttcaaaggtcgttcagagtcacagaggaatatctctctgtacacagaatcattgacaatttcagagctagtccagataaatagacatgaacagttaaagcagagtacaagagatatgaattagcaagaacgctgacgcactacatggttcacacagtgtcgaagacaaagctctatgggaccttgatatagtggggatatttgtccccagccaaatctcatgtgtgaatgacaatcccaagtgttgaaggtggggccgggtggaaggtgtatgggtcataggcggagatccctcacagcgaagatctgtcctctcaaaagtgagtaagagatatcatgagatcagctctctctagtctctctctctctctctctctctctctctctctctctctctctctctctctctctctctctctctctccgcgtgccgaattcctagcag

SEQ ID NO: 692793 - DNA, 146 bp, Homo sapiens
gaagcatgtagagttagattctccagactgtaggctcatcgaataggcatacactgctcttgagaggactggcaagcaggagaggtgcttcattggtgctgcaaggtccggagctgtggtcggcttggctagtgggggtcggctcg

SEQ ID NO: 692794 - DNA, 226 bp, Homo sapiens
atcttcagagatgatgctgctgtgagtctaaagggtccctgactcgtgagctcaggaacctggaccaggagcacactacctcgaaagcttaagatctcttggcagcaggacgcccaagaccagagcctgtgtcacgtcctaggaacagggtggtgcggccgtccctcaaggcaaggtgagcttgagcccttcccaggggcaggggtggggctcccagtttggtctt

SEQ ID NO: 692795 - DNA, 618 bp, Homo sapiens
acagactgccctgagggtgtttgcgccctggacggatggtaagctgctccgtgtgcgattggaaacagctgcgtgagcgtttggcattttcggtcagaatccccgcaaggatgagtgctgacagagagtctgacccgcattgccagaaacgttcagcctcatcagacgacgatctgagatttagcagtcgacaggcagcaaactagcataatgaagagagaaaacttgagttcttgagacttatggctgcaggaatgaaagctcatactggccggcttgatatagcagatcacacatcaacatctcacttacgaaccggtaacgaagacctgacaatccatgaagaactgcaggctcaatatcagcgtgtggtctgttatcaggatgatatcggcgacattgcggacttggcttcagtgaagtagaagaccatgttgaagaaggtgatgtagcttgagatgatgatgattgcgattatgattcacctggacctcaatgtccatatgattctgactgcgagtcacagtcattgatagaggaatttgctgacgaacttcaagctagtgtgcacactgatgcagtgtaggatcccacctccagtggtgcattctgcattct

SEQ ID NO: 692796 - DNA, 620 bp, Homo sapiens
caaagaactttttttctcccaaggactcctttttacctccaattcccttaaagggccttttaaccccccagttaatttgggtttcttataaccagttatctgaaaaaaacgcgtatgggttaagtccaacttttccgcatcccctgaaattccgcaggttttagatattatggaccaccttacttttgatatgaagaaaaaattccgcccgatttaaagcagtattttaaaactgcaagggactatagtatgcttacgcagcattcaaaacccaatctttgtattcttagggcacatgtttacagcaaagttggcccacagatctgcttttgtgaagctgtcgtcccgaaacaggcaccacaagcattgttttgtgccgccataattaaaagatgcacagttctcgctgtttccgaactcatcatagtaagtgcctacatatatctagctaacacatgtcatttaacattttttcccagtactgttacacggagagaagttcattaaggtcacccagaacacaggccctatgacgaaattgggcgcacaatgggtaacacttagtttatacactgtacgtgtcgaacctttataactgtggcttgactcgtgtttcaatc

SEQ ID NO: 692797 - DNA, 2306 bp, Homo sapiens
  misc_feature (94)..(94): n is a, c, g, or t
  misc_feature (98)..(98): n is a, c, g, or t
  misc_feature (100)..(100): n is a, c, g, or t
  misc_feature (104)..(105): n is a, c, g, or t
  misc_feature (483)..(483): n is a, c, g, or t
  misc_feature (485)..(485): n is a, c, g, or t
  misc_feature (487)..(488): n is a, c, g, or t
  misc_feature (491)..(491): n is a, c, g, or t
  misc_feature (493)..(493): n is a, c, g, or t
  misc_feature (495)..(495): n is a, c, g, or t
  misc_feature (498)..(498): n is a, c, g, or t
  misc_feature (508)..(508): n is a, c, g, or t
  misc_feature (514)..(514): n is a, c, g, or t
  misc_feature (540)..(540): n is a, c, g, or t
  misc_feature (843)..(843): n is a, c, g, or t
gattatctggatgaacaaaacagacgtggatgtactgaggatagagggactatcaatgcagagttaatgttaatggttattaattgtgatatanaatncncagnngaggagcaacattcctggatttaaagaatctacagttttgtgcaattgtgatttgagaaactggaaacattgtgccaatggctttgagttcctataacaacggtgttaatttgattaactcactgatatcttttaaaaataatagacatttgcttcctacacctttttgtacatgacctaaagagtatattcccagaagctgctggtcagacacatttagggatgacagttgaagaggacttttttaaagctgcatgtgaatatttcctctgtgtgatttgtctgatgtagaaaagttttcccctcatttttatgagtaaaaacactaagtgggtggcaggggggtgggggttcttatgggagtgtcataccgggctntnanntgncngnagnctagagactntttccnttataagccttcagaaacccaaccangtctttactgtgtctagctttttaaatactgattggttagttttatttttgcccacagtttcttgggcaaaaaggttcttcattttgtctgaaaaagaaattatttgccagaggtatttggagcctctttgaaggggagatagagtgggggtgggttgtggggagggtggagttattggggtttggggttctgtttccatacaacattgtttatttccgattcctcagaagatcctttattatgaataacctcagtgtaatgttaatttcccgtccccatgtcaaaattgtcaccctaagccnttttttttttttttttttttttttggagacgggctcactctgtcagccacgctggagtgcagtgacatgatcttgactcatggcaggcttgacctcctgggctcaaggaccacctcccaagtagctgagaccacaggtttgccccatcacacctggccgatttttatttttttgtagagatggggttgtccaggctggtctcaaactcctgagctcaagcaatgtgcccgccttggcttcccaaagtgctgggattataggcgtaaaccactgcacgcagcctaccctctgcctttttaagatgatgtatttatttaatttttgccatcattggtgcttcaccttcctgcgaaggaaattccagagcctgtatttaagctacctaggcttttacactccctttattgcctttccaaatagtatctcatttggtgtactctagtgtcctatacctcttggaaacgaaagagggcccaacctacaactaagaagggacaaaccttgaactaagtaagaccttacacacccagaaagaacactgggccctccttcttcagggacaatgcagtagccacttggcttgtggaatttactgaaggctatttcctgtaacttgctagttaacttagttttgtatttcaggcagaggtgcgctctgtaatgttgggcctttgacttcacagtactggagagctgttcacacagatgtttagacctttctctctctctctctctctctctctccttttcttctttctcaacaactctttcacagaggcagtcattttgaaaggttgaaatatttggcctttaccaaagagctttttttttccttaagcaaaatcctttcagaaagaaacaaatggggaagggcagattaagaatgcatatgtcccaatccacttctataggagtttaatcatattcacatgagtaaaatgatggaagaactctttaaggtaatcctttgggataaaggatcctgggaagttctctcaggtaaagaaagcttacagcagatttgtaatatatgtctggagagctatttataagaaatttaagaggattgttttgttttcctttattaaagatttaagcctttttactttgcaaaaagaaaactacaaaagttttatagatataactttgctaattttttaaacttttctgaaacgattagctgtagccaaattatgtggttacgttttgctacattagaatttgaaaatgcaatatgtgtggtaaatctactgtttgaaatttataatggtctctgatatgattcgaattttggtaacttttgaaagttattttccccctttagtcatggatttctatttgttttttaatgttaatttttctagaaagcatctgaattgactaggcttttcctatataaaaaactcaaaacttgttaactctgtactttaataaaatttaaaattaaaactgtgttgtttttt

SEQ ID NO: 692798 - DNA, 2469 bp, Homo sapiens
  misc_feature (94)..(94): n is a, c, g, or t
  misc_feature (98)..(98): n is a, c, g, or t
  misc_feature (100)..(100): n is a, c, g, or t
  misc_feature (104)..(105): n is a, c, g, or t
  misc_feature (483)..(483): n is a, c, g, or t
  misc_feature (485)..(485): n is a, c, g, or t
  misc_feature (487)..(488): n is a, c, g, or t
  misc_feature (491)..(491): n is a, c, g, or t
  misc_feature (493)..(493): n is a, c, g, or t
  misc_feature (495)..(495): n is a, c, g, or t
  misc_feature (498)..(498): n is a, c, g, or t
  misc_feature (508)..(508): n is a, c, g, or t
  misc_feature (514)..(514): n is a, c, g, or t
  misc_feature (540)..(540): n is a, c, g, or t
  misc_feature (843)..(843): n is a, c, g, or t
gattatctggatgaacaaaacagacgtggatgtactgaggatagagggactatcaatgcagagttaatgttaatggttattaattgtgatatanaatncncagnngaggagcaacattcctggatttaaagaatctacagttttgtgcaattgtgatttgagaaactggaaacattgtgccaatggctttgagttcctataacaacggtgttaatttgattaactcactgatatcttttaaaaataatagacatttgcttcctacacctttttgtacatgacctaaagagtatattcccagaagctgctggtcagacacatttagggatgacagttgaagaggacttttttaaagctgcatgtgaatatttcctctgtgtgatttgtctgatgtagaaaagttttcccctcatttttatgagtaaaaacactaagtgggtggcaggggggtgggggttcttatgggagtgtcataccgggctntnanntgncngnagnctagagactntttccnttataagccttcagaaacccaaccangtctttactgtgtctagctttttaaatactgattggttagttttatttttgcccacagtttcttgggcaaaaaggttcttcattttgtctgaaaaagaaattatttgccagaggtatttggagcctctttgaaggggagatagagtgggggtgggttgtggggagggtggagttattggggtttggggttctgtttccatacaacattgtttatttccgattcctcagaagatcctttattatgaataacctcagtgtaatgttaatttcccgtccccatgtcaaaattgtcaccctaagccnttttttttttttttttttttttttggagacgggctcactctgtcagccacgctggagtgcagtgacatgatcttgactcatggcaggcttgacctcctgggctcaaggaccacctcccaagtagctgagaccacaggtttgccccatcacacctggccgatttttatttttttgtagagatggggttgtccaggctggtctcaaactcctgagctcaagcaatgtgcccgccttggcttcccaaagtgctgggattataggcgtaaaccactgcacgcagcctaccctctgcctttttaagatgatgtatttatttaatttttgccatcattggtgcttcaccttcctgcgaaggaaattccagagcctgtatttaagctacctaggcttttacactccctttattgcctttccaaatagtatctcatttggtgtactctagtgtcctatacctcttggaaacgaaagagggcccaacctacaactaagaagggacaaaccttgaactaagtaagaccttacacacccagaaagaacactgggccctccttcttcagggacaatgcagtagccacttggcttgtggaatttactgaaggctatttcctgtaacttgctagttaacttagttttgtatttcaggcagaggtgcgctctgtaatgttgggcctttgacttcacagtactggagagctgttcacacagatgtttagacctttctctctctctctctctctctctctccttttcttctttctcaacaactctttcacagaggcagtcattttgaaaggttgaaatatttggcctttaccaaagagctttttttttccttaagcaaaatcctttcagaaagaaacaaatggggaagggcagattaagaatgcatatgtcccaatccacttctataggagtttaatcatattcacatgagtaaaatgatggaagaactctttaaggtaatcctttgggataaaggatcctgggaagttctctcaggtaaagaaagcttacagcagatttgtaatatatgtctggagagctatttataagaaatttaagaggattgttttgttttcctttattaaagatttaagcctttttactttgcaaaaagaaaactacaaaagttttatagatataactttgctaattttttaaacttttctgaaacgattagctgtagccaaattatgtggttacgttttgctacattagaatttgaaaatgcaatatgtgtggtaaatctactgtttgaaatttataatggtctctgatatgattcgaattttggtaacttttgaaagttattttccccctttagtcatggatttctatttgttttttaatgttaatttttctagaaagcatctgaattgactaggcttttcctatataaaaaactcaaaacttgttaactctgtactttaataaaatttaaaattaaaactgtgttgtttttttctcttctgctagatacatatataattaaagtactcaagttagttgttttgcagagatgttgccttcagatgttaatcaggtctctcaagtttcatggagtctatgctgatcctttaattgacaaataaaagatatatatctgtggtgtgcaaaaaaaaaaaa

SEQ ID NO: 692799 - DNA, 1185 bp, Homo sapiens
gcctatcatatagtaaaatccatcccatgacccctatgaggggccctctcgatgcctcctaatgacctccgggctacccatgtgatttcacttccactcacatagagcgtctcctcatatcggttagcgtcctacgtaaaccacacgaacactaatccatataaccaatggtatggcgcgatggtagatcatcgagaaagcacggatacgcaaggtccacacagccacacacaaacctgtacctaaacatggccttcgcatacgtggtataatcgctatgtttattacctcaggaagtcaggtacttcggaggaattattctctgagtgcctgtgttagccagcatgccgcagaccctagccacctaacactcgcccaaattgaggtagggacactgggcgccgccatacttgggcaatcgatcccggcgtaagattgccctagagagtcgccatctccgtgagacacattccggtatttactctggatgaccggaaggtattcgagatcgagcccgtgacgactcacccagtaagttcttagactagaaaaaatcatagcgcgacccaccagaactagagttcgcccgcgaacgtggcttgacttgaccacattgcatagcgtggcgtcgttctcacttttcatcgccgtccttaccaaaagccttcgatgacgatggcctcctctgaagatcgtccctccttttcgaactccgatttcgttcccggcatccggcaaggtcctaaacggagccttcaagacgactttgtaatctttgttacgcgctattcagtgcctttgcccacagtgatcttctccctccgatccacgtgttattacgggccttcgataactggtagccgcgtcaacttgaatcgtagctttcaatccccgtcatagcttaaaatattttcgagttcccactaggttcccaaaaacccagttcacgtttttgcgccttttccgaaaaatgcccgccgggcggtgagttccctggggcaactttttgcgcaccagtaggtggcgattcagacgcataattatcatcagtaagtgttcctccgcaatcttaattgactgaaggggtccttcagacaacggcgacacaacggcacacaagcaacgcacaagagagacaccacaaatagacacacagggggcacccaccgccgaccgagaacttgc

SEQ ID NO: 692800 - DNA, 779 bp, Homo sapiens
cacagctatgtgtatcctgactctgatgcgcgatctgcgtagattggtaccatctgtccaaatgacttagtgttcgagccagaataccagagcgtgaatccggaataaaggttcactctgtaagatatcaatgtggcatgtcgatagactaaattgcgtattgttcgatctcggagggattgttttggggacctcatgatccattggatggtatcatgttatgtgtgacacatattggcgaaggtgataattaggttcaatgaaacattgttgattgagtaaatagggcgaaatttcttttggggaagaagaacttatcaccgttttccgaatgccgatttctcgaagtcggggcaccaaataaggtcccgatagtaggtcctgcacagaatttaacagttcgcgggatccactcgggggaggtggtacagacaggtttgcggttcacgactttggggtgaacccaacccattttaatgtttaaagtttaattttcctattgaccggaggcgttgtcagagcagtgtgcgatggatcgttgggttaacggactttgtaccgctaaaatttttcccttgcgcggatttgccattgccaggggattttgtcccccacccaatactaatagatgttcgttaatttccattacggtcttttgagctccaggccatatggaggctattttttggaggagcttcggaaataactttagacattccgaagggcaacattccccttcataacccaaggaattaaagtatttcctagtcagatatcag

SEQ ID NO: 692801 - DNA, 403 bp, Homo sapiens
  misc_feature (29)..(29): n is a, c, g, or t
  misc_feature (31)..(31): n is a, c, g, or t
acgggtgtcgttctactcccaatccgctngnaatatgcaacccatgttgccccttataggcagcacgctccggctggctccagccactgagcaactcatcctccagcctatagatctcaacccctaacggacgacacaccgtcagcgggtcctgcgcctccggcccccacatcggcagcgacaaatccccgccagggcacgtcgacaatgcccacaacaaatcaatctcggcaaagaattccaggtaatcgcccttctgcgccggacaggccttcataaagtacatgtcatcgtgattgagcccggcgcactggaaaatactcaacacgtcatgcacatcgaactccgtcagtccgtggggcaatacagcacgggtcaggttcgagtgagaacgacccaccga

SEQ ID NO: 692802 - DNA, 608 bp, Homo sapiens
  misc_feature (46)..(47): n is a, c, g, or t
ccctacgattctcgtgattaataaatacatatacatgcatgataannagcatgagcaaattgacagtagtactgtctgagtagttaaatattaaaagccaaggcccttatacaaaggctgggatataagaaaagcccaccaagtttagcttaggcctttcctgggccttaaaacataaaataacgaagaatacgtcaggacccatttaggattaagccagttttattgggaagaaaactccccaaactgctgtgatttagcagaaggcaaagcaagggtaattaccccagcactcacagccatttaaattaagtcaatttactgaggctccagaggaaggtcttcaagactcaatccttagttaatagattaaaagtcagtaacttatgtctttacataaatgtacacatatgtatagacatatagcttaaaaaatatataagctctgaaaaactttgtaattttaagttggtctggcaataatttccaggccttttccctgcaactggttgcagaaataaaaactccacctactcagttaatgtgcatcttgttattgggccatgagaaatagcagcccaaacctcagtttggtccaggaactgcac

SEQ ID NO: 692803 - DNA, 514 bp, Homo sapiens
ggccataaagaaattcatctgcttcctctttttgtttatatgtcctgagccgtgaagaaaagcgtatttatacattatttgctttatctctttgttttctcctggtcccatcagcctgacttcttttccctaattaggactcacataaatgttacatgaaaaattattaaaaagcaacaaacagagtagagagaaaaaggtagaaaggcttgggtccaggtggctgaatggttcttgatgagcacatagaatgctctttcctctaaatgatgataatgtagtactgtgaataatctaggcagatattagtgtattctcaataatttcctaatgttgctgcagccactactggaagatgtcttaacagctcagcgattaaatctcagtggttatagttcaacagtacttcagtaaagggcctcaaaatgtttcatcatatcattcatgtttctaagcaactatttctatggcaatgtatcacaaacctatgattaaataaattagcactctctat

SEQ ID NO: 692804 - DNA, 409 bp, Homo sapiens
  misc_feature (128)..(128): n is a, c, g, or t
tcccacattttcccctcaccctccaagtcctaacccctccatcctttttaacttttcaagccaatcccttaatgtcattcctctttttggggatttgggccaaaggttttccttttttccttttttangggaaggccctccacatttttccctccttggaagaggactttattaaaagtcacaggtggtggccaggggggatttcccaaatttccatcaggggggttaatagttgtccccattgtttacccacacaaatcctcaggaaaccaccccccgcccagggggccctgaggggggcattcccctttatgggttagaaaaacatgaccagaaatcaaaaatgtcagagccccgaagcaggtaatgtaataagcactcatgttattaaaggttttgccttgtggta

SEQ ID NO: 692805 - DNA, 334 bp, Homo sapiens
tccttgaaacccaaatcgtaatccagaagaagatcctaatcgctttaattctatcaaggctgaaggaggtaaggaagctgtcagaagaacaagcttaagcctagcagaagttcattcatgaagcttaaggaaagaagccatctccacaagataaaagtgcaaggtgaagcagtgaatgctgacgtaggaagcttcagcaagttatccagaagatctagctaaaataattgatgaaggtggctacgataaataacagatcttcaacgtagattaaacagctttaaattgaaagaagacaccatctaaaactttcatagctagagacaagtcaatg

SEQ ID NO: 692806 - DNA, 286 bp, Homo sapiens
atggttatgtgtgatctgtcggagtctggcatcgtgcacattccgtgacccatgtggtcatgctgatctgtctctacgagatctgagagatgaaaagagagcagtgtgtgaaagcgtgacagaggattcaggtgatgactgtccgctctgagtcatgctatcagctgagttgcagatgtctgaggttacggtgcctctgtgctttcagcattcctatgaagatgagcgctcagctgcaggaagatgtctgcagtcccatgtcaggcatgggaggtaggaggtacga

SEQ ID NO: 692807 - DNA, 239 bp, Homo sapiens
gttcagagcgttgggcggcgggcgtccctgagagaattataccttgtatatactactggttgggcatcctactcatcagtgtaacccggtaccagggcacttcggaaatgatggctcttaattgcctgcagaattaaccatggacattttagtttggtttgaaaaacatataggccttctgcctccagccttccatcaggctagtaaaagaccttgcagactcagttgaataaaataat

SEQ ID NO: 692808 - DNA, 281 bp, Homo sapiens
ggagacatgatacgaatcgagctggtacccatcggtttcaaggtttatgggtggagcgtataagaagccaagttcacaatgatggctcgcttatatccggcggctctaagctcatcactccatgcttttacggatgccccccaactttcaagacccaccgccaatcgggtagggtcagctgttaaggtagtgtaaacctgattaccagcaacaccatcttcatggagaccgttttcttttggaaaacttttaagagccagttctaatgggtcatcaaaaat

SEQ ID NO: 692809 - DNA, 233 bp, Homo sapiens
  misc_feature (48)..(48): n is a, c, g, or t
  misc_feature (52)..(52): n is a, c, g, or t
  misc_feature (84)..(84): n is a, c, g, or t
  misc_feature (105)..(106): n is a, c, g, or t
  misc_feature (134)..(134): n is a, c, g, or t
  misc_feature (143)..(143): n is a, c, g, or t
  misc_feature (147)..(147): n is a, c, g, or t
  misc_feature (150)..(150): n is a, c, g, or t
  misc_feature (170)..(170): n is a, c, g, or t
  misc_feature (178)..(178): n is a, c, g, or t
  misc_feature (180)..(180): n is a, c, g, or t
  misc_feature (183)..(183): n is a, c, g, or t
  misc_feature (194)..(194): n is a, c, g, or t
  misc_feature (201)..(201): n is a, c, g, or t
  misc_feature (212)..(213): n is a, c, g, or t
ggggcgagctccaccgagggtccttgtacagaaatggagggcaaagcngggngggggctggtcccccacccccttaccccactnccagctggtccctccactctnnagggccagacccgaagctactgctgagnaccagtggngagnggnccgtgccttccttcccttcnaccctcantnggntcttggcccanccaaatncccttgttttnnattttcttggacccccgccc

SEQ ID NO: 692810 - DNA, 874 bp, Homo sapiens
agcggggggtactcacttgccgattcctccggggtaccgcaacgtgacggtctccgcgctagccggccgcagcgcgcgattcacggatggaagctccttgaggagcctcgttgccagtgcgctggaatggcctctggtagagcgacgcccttgcagagtccgctgggtctgacgctgtcattgccggcttgtccggcgcttcctgagcaagagcttgcgggacgcgtcttgtgcgtccgtggtcatgtggcccgcagtactatgcgttgcgagtctgtcatggtgttccatgatcaggtttcaataacgcgtcctgggtctctgtggcccatcatggatgagaatcttggaagacttgggatgacaagttcgatcggcattgagtcagatcgccggattaatctaaatgctcaatttgggatgtcttcgaaatgcgagatatcgggccattactactttcttggccctgtgtaacataccactcaatctgctcagatcggtacagaggaaggcacaaagaaaccctgaagacagctgtgagagcagatggactgctttgacacgtacggtaggtatgtcgcatcgttaacctgcatcactcgtgcttgactatactcacctttgaacaggggttgccggacttccttattgtccatacaaggacaaccgcccaagtttaactaatcacttagtcgtttgggttcctaaacaaggtggcccatgggaatctcgggcgagggattggattgtttcccaatggagccctttttgacacccaatggaaccctttaatggttacatcgtgattctttttcaagtatacgccagatttacttgctccgtggacttcaccttgttacttttcattacttgt

SEQ ID NO: 692811 - DNA, 414 bp, Homo sapiens
tatcccccgagctgatggggaggcacactccggataactttatggaaattgtaatttctatctgatgtttttgctctttcatttctctaaaaacgtttttgtatggtaccaatctgtcttccactgtttgctttattttcagtgtctgtatcagagaagggtccatgttgtaaaagaagttgaaaggagtcttgaataatcagaaccgttctgccatactgtctaatgtcaatttgtttcctggcactgcttttggtacatcttcttcctcatcatctggtactgttcagaagcactcatgtccatcaagcctcttctgttaattactctgctgtggtgtctattagctcttgaattaatccaagatccatatcttgaaagccttcatacactccccaaccgctcggggtaccg

SEQ ID NO: 692812 - DNA, 190 bp, Homo sapiens
tttcaattgggatcaactctcggtccagtgctgacatcatctcccatgtcatctacaggaccgtcgtgtcactgtccactggtccttcttcaccaccaattcctcatgcagggctcagcaatcttgttcccgcattggagttgtcttcggggagttctgaataaccgtcacctctggccgtgtgcttatc

SEQ ID NO: 692813 - DNA, 104 bp, Homo sapiens
cacccccaccgcccaccacaccctccctagctagtacgaggctgggtggcgggagagcttgtgggagcaaggagcacttggacatctggagtctggcaggagtg

SEQ ID NO: 692814 - DNA, 107 bp, Homo sapiens
agaggaccagcatgtttatttctaggctactgggctaaaaaatcagtgcgaacttagcgctgtgatgagtgtgcctagaaataaacgggctacctttcattccagtt

SEQ ID NO: 692815 - DNA, 377 bp, Homo sapiens
gcttaagtgatgtcgttcatttaaaaaaaagaatcagttgatgtgatcacttccaaaacataaaaatgaatttttaaaaaatatgttaactcttgagttaattagtgctctgtattttcagtctttcggaaaacatactttttgccagataaaatgaaaggaatgaatcttagatacactttgagaataatgatattttacagagtattattgctgaagtaagggaagaatagaggaattattgagttagatttgaaaattggtttaataatctgacaaaatatttccagtgtttcaagtggatgttctatgttaaagaaatagcactggaacatgaccccttttttcttaaattttctttccattttcctccttag

SEQ ID NO: 692816 - DNA, 915 bp, Homo sapiens
ggtcccactccggctggcggtacgcgagggaatgggggaacgccgcgggctcgaagcatgggcggtatctgcagatctaagggggaacagactctgcgtgactgtttcacaggtacagcttactactgacgtatcccgtgatcccgagatcttagccgcgtgcgcgtgaacatgaacgacaccggaaatatgaagagggccagcgccgatcggaaccaaaggctacgtagccacgtcttataggcacgagatagaagtgagtgggcgttgattgacccaagtgcaacatgggcctgcaccttttgaccaaccgatggtgttaaacaagtacaagcctctcattaactgtacacgacctacctctgatgaacacagtttccgagccagttccacaccttaaatagccagacgtgtcatgtggcccagctcgagcgggaactggccccggcaaaattgttaacacattgggaaaaactgagattgtcgcccatgtgttttcggagcattgaaaggacttcctttgttccaggcgtaactaataaggaagccgtataaggataattcctctctctttgaaacttgacgtagaaaaggggttgttgggcggaagccgacggaaaacgcagtgacttttagagtggtagatcggtacaagagttgggcttgtgtgttcgaaggaacaagctttttaacggaaggagttcaggtatatattttgggtaaagttatcttcgtttttaattacattttcaccttctttaaggaacgaagcctaggggggagttggcacacccttggtagtatgtgccacgtatgatgaaaaaaggcgccttttaaatgaaaagccatatgtgcgggagaacaacattgggacttcggcaagtaaaattggaagtcttggcgccgttaagaaaa

SEQ ID NO: 692817 - DNA, 217 bp, Homo sapiens
  misc_feature (16)..(16): n is a, c, g, or t
tgttatagccacatgnggcgcttatgattttcagtctgcgggtgacgaggtaacatggggcctcgcgttgttgtcgccgatgggccaaacactattatttaacagtacgttaacccagccgcgtaacaaacgggcgccggcgacgcagacgcatatctgatgaaaaaaaccagacagcaacagttaacccgttggcttaaaacccagagttcgttag

SEQ ID NO: 692818 - DNA, 1698 bp, Homo sapiens
actttttgcttcaaaggacactagcaataaagcgaaaaggcaattaaaagagctggaaaaatatttgtaaaccatatatcaggtaacagtctagtattcagaatagataaggaactcttaaaactgaccaataaaaagataaaccatttaaaaaatgaacaaaaaatttaatagacatttgccttagtctgttggaactgctattacaaactaccatagactaggtagcttgtagtaacagatttatttctcacagttctggagactgggaattcctatatcaaagtgccagcagatttggtgtctggtgagggccttcttccaggttcacagatagtgtcttactaagttctcacatgatagaagaagtaggggtgctatccagagtctcttttataacagcactaattccattcataaggactctgccctcatggccttatcacctaccaaagtgcccacttcctaatgccagcacattggagattagtatttcaacatatgaattttgggggatacatattcaatccatagcctgccaccccttgcctcccaaaatttatgtttttctcacaagcaaaagacattgcatcccaacagtcctcaaaatcttgattcattccagcatcaacctaaaatttaaaacccacagtctcacctaaatatcatctaaatcagatatgggtgagactcaagatatgattcatcttgaggcaaattgctccctagctgtgacactgtgaaaccaaataagccatatgcttccaaaatacagtggtgggacagggatagaatagacatatccattccaaaagggagaaatagcaaagaagaaaagggtaacaaatcccatgtaagtccaggctacaagccaaactccatgagatcttaaggcttgagaaaaatcttttttggcttgatgctccttccaggcccactacagtgggactcctgccttcaagaactgctaggttagaggttctgctcccatggctctgtcaggcagggcttaggctccaagccttttggcagtcctgctgtcactattttgggtggaggagatctggctgattgtgcaatgatggtcttcccttttgaaaccaaggaaggcagccctgatgatctctggaatcatctttggggtcattcttccattgtcttagaggatcatacctggcttctgttgagatggctgatccatacaaatttcattagcaaatggttgcttggtcacatctttactgttatcttgttttgcaatatggatagtctaagaattttctaaatctttacgttctgcttccttttttacctaacaatttcatatttaagtcatttctctcttctgttattttactataagcagtcggaaggagccaagcctcactttcaacacttctcttagaaatagttttggggccgggcatggtggctcatgcctgtaatcccagcactttgggagactgaggtgggtggatcatgaggtcaggagttcaagaccagcctggccaagatggtgaaaccccatctctattaaagatacaaaaattagctgggcacggtggtgggtgcctgtaatcccagctactcgggaggctgaggcaggaaaatcgcttgaaacctgggaggcagaggttgcagtgagccgagatcatgccattgtactccagcctgggggacacagcgagactccgtctc

SEQ ID NO: 692819 - DNA, 1441 bp, Homo sapiens
actttttgcttcaaaggacactagcaataaagcgaaaaggcaattaaaagagctggaaaaatatttgtaaaccatatatcaggtaacagtctagtattcagaatagataaggaactcttaaaactgaccaataaaaagataaaccatttaaaaaatgaacaaaaaatttaatagacatttgccttagtctgttggaactgctattacaaactaccatagactaggtagcttgtagtaacagatttatttctcacagttctggagactgggaattcctatatcaaagtgccagcagatttggtgtctggtgagggccttcttccaggttcacagatagtgtcttactaagttctcacatgatagaagaagtaggggtgctatccagagtctcttttataacagcactaattccattcataaggactctgccctcatggccttatcacctaccaaagtgcccacttcctaatgccagcacattggagattagtatttcaacatatgaattttgggggatacatattcaatccatagcctgccaccccttgcctcccaaaatttatgtttttctcacaagcaaaagacattgcatcccaacagtcctcaaaatcttgattcattccagcatcaacctaaaatttaaaacccacagtctcacctaaatatcatctaaatcagatatgggtgagactcaagatatgattcatcttgaggcaaattgctccctagctgtgacactgtgaaaccaaataagccatatgcttccaaaatacagtggtgggacagggatagaatagacatatccattccaaaagggagaaatagcaaagaagaaaagggtaacaaatcccatgtaagtccaggctacaagccaaactccatgagatcttaaggcttgagaaaaatcttttttggcttgatgctccttccaggcccactacagtgggactcctgccttcaagaactgctaggttagaggttctgctcccatggctctgtcaggcagggcttaggctccaagccttttggcagtcctgctgtcactattttgggtggaggagatctggctgattgtgcaatgatggtcttcccttttgaaaccaaggaaggcagccctgatgatctctggaatcatctttggggtcattcttccattgtcttagaggatcatacctggcttctgttgagatggctgatccatacaaatttcattagcaaatggttgcttggtcacatctttactgttatcttgttttgcaatatggatagtctaagaattttctaaatctttacgttctgcttccttttttacctaacaatttcatatttaagtcatttctctcttctgttattttactataagcagtcggaaggagccaccatgcccgcccacatatatttttcttaaaactttaatattgctaccatagtctatcccata

SEQ ID NO: 692820 - DNA, 283 bp, Homo sapiens
gtctgagcacagagcgagaccctgtttaaaaaaaagaaaagaaagaaaaaaagaaaaaccgggattttctttactggactacaattccccaactaatatggatgggtggttggtttccaacgagccctggtttccggtgaattctatttgggttcagccgttacctgattaagcggtcaagcggggccttaaatggttttacctagaggcggcggtatactccggaaaggcagggcttaagcgacagtacgtggtccccagctggctcagaggggtaccgagc

SEQ ID NO: 692821 - DNA, 144 bp, Homo sapiens
agtattgatgggcagtgagggcgcatatgcatctaggctataatatccggagtatacgtagcggatacgtaacaaccggtactctagaatatagctagcatgcgcaatttacggcgctgatatcgatcgcgcgcagatcgtgtc

SEQ ID NO: 692822 - DNA, 512 bp, Homo sapiens
gctcgatctagaggatcccgaacgtagcccacctgtgtccgcagccagtcccatgtatagaatattacaacctttaactatcacacttgtacatgcctacaccctttagacttcatagctgtcaagggccctcttagacccaaggtgagcattgccactggtataagaattttcaagaatttagtgagtctccggtacatcactgaaattcacaacattagaaaagaggttacgctgattattcctcctagggaatcccctatctatatgtggggctttagctgagatgagtgatagtttacacttcttataagttgtgagtatcgaggggatctacaagtcacatttaatctcttcaaagagcttaccgtgtgacagtgtcctgatgtatgtattgatcccggtatcagcaaacgtcctgggctatctctctaaaacatctctctctctgaaacatctatctttcctaacaatgaatctcttaatttcaatggtaagttcgggaatcccag

SEQ ID NO: 692823 - DNA, 438 bp, Homo sapiens
gccccgtgtatgcccagcagtcaggtctgtcagcaagatttgtcctgttgagacactggtggaagaagccatccccgtgtgcggaaaaaattggcagctattctaaaattgtaatatcgatggtccacggatcagtgaatgcagctgttgaaatgacattgacagaatgaagtaagttggcgaagaaactcttttattcaacctttgccactgatgaccggaaagaagggattaccgcgtttgtggtaatagagaaaggccctcttcctagaccagtgagaatctgctgtccctgcttcacatctctgcttggagaggacgatgtgcagcctgtcagtttttgaagctagttcattatcctcttttccagagcactgttcgtggtgtgcatttcctctccaattgctgtgtggtcgttgtccgacctctcacggcctt

SEQ ID NO: 692824 - DNA, 575 bp, Homo sapiens
ttaaaagcacccgcaacacaagtcagatccgtaccttgagcaactcccgaggagacagggaagctttcctccctagaactggttgacgaaagttgtgaaatccgagcgacagctttcaatgagcaagtggacaagttctttcctctgattgaagtgacccaggtgtattatttctcgaaaggcccctgaagatagctacgcagcggttcacagctgttcaaaattgacgacgagatgaccttcaataacgagacttccgtcatgccctgtgaggcacgaccatcatttacctacggttcagctttgatttcaccggggatggatgaccttctagaacgaaggtcgaaagactcacttgtggacatcatcgggatctgccagagctatgaagacgccacttaaatcacagtgaggtctaacgacagagaagttgccaagcaggaatatctacttgatgggcacctccgggaaggtggtgactgctacactgtggggggaccgatgctgatcaatttgatggttctagacaggccgtgttgggtatcaaaggagcccgagtctctgatttcggtgga

SEQ ID NO: 692825 - DNA, 196 bp, Homo sapiens
atgagtatgttgggacgagcgcgtcgtttcctaatgtatcggctgggcagtgctcaggatgtactcctgagtgttcgccgtcgggctgagccgcttaggcctggggtgagagacttccgtcaccctgggtgagagtttatttttttgatggctaagatactgctgatgctgaaatagactagggtttcggcctgcc

SEQ ID NO: 692826 - DNA, 257 bp, Homo sapiens
  misc_feature (11)..(11): n is a, c, g, or t
atggcgctgangactccgttccgtcgctcctcattgagcgaggcgtacatcaacccacattcaacatcatcttcaagctcccccctgcgctgggctgtaggccgcccgatcttgtggcagatgttgagagctttatcgcaagacagccctagccggctttgtcctgttgcaagccgccaaaccactagcctgcccaacacgcctcctaagcccttacaaggaacaagtaatgaggcgccttgtcctttccgtttgcc

SEQ ID NO: 692827 - DNA, 384 bp, Homo sapiens
cccggtttttttaaaaaggttgaaggggggttttccccccaggggatatatagggttttgcagatttttttggggacagcccactatcccggggaacccttaattttttttttttagagaaaaacccagttttaaaggctttttttttaatttggggtgtttgtcccccgggccattgccaagggttggaacaaccccatatggatttcggtttccccccgggttacaaaggtgaattttttttttttttctttaattggggaacccggtccaaccccaatttgaatatttaattttccctggggaaagccattttgtaaaccccctaattgggatttggttaataattttcattaaataaaccccaaatgggaatttggtcca

SEQ ID NO: 692828 - DNA, 647 bp, Homo sapiens
gcattattataagcagcgctccagtctgcctacgacaaagagacctaaaatcgctcattgcatactcttcaatcagccacatagccctcgtagatatacagccattctcatccagaacccccatgtacagcttctaccggacgacagatcatgtctcaatagagtctgcccatcggtactttactatcgctcaattatctattctcgcgctatggcagaactcaagagctagcgaacgcacgtcacagtcgcatcataatcctcgtctcaaggacttcaaactctactcccagctaagtagctttttgatgacttctagcaagcctcgcttaacctcgaccttaccccccactattaacctactggtgcagaactctctgtgctagtaaccactgttctcctgatcacaatatcactctcctacttacaggactcaacatactagtcacagccctatactccctctacatatttaccacaacacaatgggtctcactcaaccaccacattaacaacataaaaccctcattcacacgagaaaacaccctcatgttcatacacctatcccccattctcctcctatcccgtcaacccgacatcattaccgggttttcctcttaaaaacaatgttatacaaagtcatacag

SEQ ID NO: 692829 - DNA, 1628 bp, Homo sapiens
aaatattatactagcatataaccatactacactatactagagaatactacgtatatacgctcacacctcatataactcccgtactatagcctagcaaggaataatactatcgctagtatcatatataagactactctctataaccctacaacacccactaccctacttgagccaatatatgtgcctatatagccataactaagtacttaagaccgcactagacgacagcaacggtaaaggccataaagccctgaactaagtctacaatactaccaaacacataataggcactaaagactaaccgtaaacataaaacctaaaaacacatgactacccaaatagactaaaagacactaaataacagtaccccaacaaattaataaataaactaacacactagatcatagaactgctaccagaagaaatccacgataaatatatagcaaatcaaacaacaacgcaaccacaacaagacctaaatctcatattagccatacatgaccaccctaactaagtataacataatagacactaaaggtcaaatctataacagaccattagttataacaccctgatattcactcacgaaaacatatatacacatacccgataccagcacacataaaccaacagacacgcacccgtcgcctcaagtcacttaaatcataaccatagagactgtaccataacaccctatccacaaagtcaaatgagacacagatccataacaacacatcatataatcccaaagatggatacccaaatactcctaagcaaaaaaaataataagacataagcatcatacgtaatacatatatactaccactaaacaaaaaattactccctatataaatataataaatcagtagataaaaagaaacaaaagacacaataaacacataaataacaaagctaaaacacaatacgtagggcaaaaagaccacaaacaaaacaataacaagaaacacgtgaggacgcaagtcaaatcggacgccccgagacaaaacgaggcaaaagacagcggcggagagaaaaggcactcgaacgccgcaaggaggagaggacaagatgaggcgagaagacatcagcgccccagaggaaggggatacataagatagcatcaaaaccgccaaaatagagcacgagagcattaatgacaaggcacaagtaccgctaagagggcacaaaggagaactgaagaagagtatagtcaggaaagaaaagggacgaagaaacatgcagaaaagtacgtagcggacagagaagaaaagagtgagaagagaagaggacatagagccagaggaggtacagctacgactgtctggcggacacacaagacaagtaagcacaaagagtctggaagacaagcacgcagagacgggactcaaaataaggcgcagagaagactgaacaagagcggcagataggaaaagagaactgaaatacagaagacggcagagaaacagaccgactcacgaagacacataggaacaagcagaggatagtacacgaacaagcagtatgtagctgtacgagaagaacaatcacgacgaatagcaagagtgttcagagcatgagtgagcgaacggcggacggaagtggagtcaagaaggaacggacggaccgga

SEQ ID NO: 692830 - DNA, 251 bp, Homo sapiens
ttcccgcttctgcttctgccccacttgcacatcatttcacattcctgatctatacatgatgtcattctttggactggtttgaacatctaaccagtttcctcattaaggagttaaagaaaatctttttttttttttttttttttttttttggattctcgctctgtgccccaggggggagtgcaggggggcaacctcattccatggcaccctctggcctccggggtgttcaattagatccccctggcctcacc

SEQ ID NO: 692831 - DNA, 113 bp, Homo sapiens
gaccctgccaaaggcggagatgctgcaacgtcttgatattggcaacccagaacctgaggccctaaccctatagttaagttttgtaagcggacccagcatctccgctttggaaa

SEQ ID NO: 692832 - DNA, 177 bp, Homo sapiens
cgtcattatgaagatatggtgtgtagttattaaaatggagaagctctttactaatgtaccataacaagccatcaaagaagtgtttatactgggcgttcacatagtgataggaataaaacacagcatccatgaataaataaaggctgagcatggtggctcatgactgtaatcctagca

SEQ ID NO: 692833 - DNA, 271 bp, Homo sapiens
ttttttttttaaggaaccagcccgggtttgtcctccggagcccctgcctaagccccatgtgttcctacagggggtggggttgttgttgggggggggctttatgtttcccataaccctggtggaggagggggttttgcccgtgacccttaagggttgatggggccagtggaaaggggttgggttgcccttccttccccccaaccacaggaatgggggggggacacagggccagtaggggcaataggtttttaataaacagaacccctcccca

SEQ ID NO: 692834 - DNA, 170 bp, Homo sapiens
  misc_feature (19)..(19): n is a, c, g, or t
  misc_feature (118)..(119): n is a, c, g, or t
  misc_feature (125)..(126): n is a, c, g, or t
  misc_feature (137)..(137): n is a, c, g, or t
  misc_feature (140)..(140): n is a, c, g, or t
  misc_feature (147)..(148): n is a, c, g, or t
  misc_feature (155)..(156): n is a, c, g, or t
cagacctaaccccaacatnacccacaccgcctcacgtgaagctgggctgagagccctttctcccatccattggaggtcccaggagtgtcacccatggagaggctatgcgacatggctnngggctnngttcttgccanctngagtttnngtttccnnggacatgaacaagg

SEQ ID NO: 692835 - DNA, 528 bp, Homo sapiens
  misc_feature (10)..(10): n is a, c, g, or t
  misc_feature (83)..(83): n is a, c, g, or t
  misc_feature (87)..(87): n is a, c, g, or t
  misc_feature (92)..(92): n is a, c, g, or t
  misc_feature (100)..(100): n is a, c, g, or t
  misc_feature (106)..(106): n is a, c, g, or t
  misc_feature (162)..(162): n is a, c, g, or t
  misc_feature (187)..(187): n is a, c, g, or t
  misc_feature (189)..(190): n is a, c, g, or t
  misc_feature (194)..(194): n is a, c, g, or t
  misc_feature (202)..(202): n is a, c, g, or t
  misc_feature (217)..(217): n is a, c, g, or t
  misc_feature (220)..(220): n is a, c, g, or t
  misc_feature (230)..(230): n is a, c, g, or t
  misc_feature (238)..(238): n is a, c, g, or t
  misc_feature (244)..(244): n is a, c, g, or t
  misc_feature (256)..(256): n is a, c, g, or t
  misc_feature (258)..(258): n is a, c, g, or t
  misc_feature (261)..(261): n is a, c, g, or t
  misc_feature (263)..(263): n is a, c, g, or t
  misc_feature (271)..(271): n is a, c, g, or t
  misc_feature (279)..(279): n is a, c, g, or t
  misc_feature (281)..(281): n is a, c, g, or t
  misc_feature (292)..(292): n is a, c, g, or t
  misc_feature (297)..(297): n is a, c, g, or t
  misc_feature (301)..(301): n is a, c, g, or t
  misc_feature (308)..(308): n is a, c, g, or t
  misc_feature (310)..(310): n is a, c, g, or t
  misc_feature (316)..(316): n is a, c, g, or t
  misc_feature (341)..(341): n is a, c, g, or t
  misc_feature (344)..(344): n is a, c, g, or t
  misc_feature (354)..(354): n is a, c, g, or t
  misc_feature (357)..(357): n is a, c, g, or t
  misc_feature (372)..(373): n is a, c, g, or t
  misc_feature (496)..(496): n is a, c, g, or t
cagccccccncccataagaccatttctcctctgcgtgtggcctagttcttagatatactgtaatttctttcttccccagggcncttnggggncggtttcnttttcntggcgggcaagggcttcaggaagagtcgttccacagggtccctggaaatgaaaccngaatctgttcgtggcgggggggggngnngggnggaggttnggcgaggggggggcnccngggggggacngggggggngggcgnggcggcggggtncnccncngggggggngcccgccncngggcgtaagtngcggngggngggggcncnggggcntcctccaggatggcggggtccgggnttnctccggaccnganggggtggggtcgcannaagcccccgcagcctgcctcttcacaccggggaagtttctcaactgggatgctggcatcttgagttccaggttctggagcaccttttcctgataaagctggacaaattggactcttgtaattntcagccacaactccacaagaggtacatcgagt

SEQ ID NO: 692836 - DNA, 513 bp, Homo sapiens
gtcaaccatgtgcgcctgtgttgtatctattctacatcatttgtttttttttttctgagattagggtctcactctgtcgacccaggctagagtgcaggggtgcgatctcagtttactgcaacttcctcccgggttcgggcgattctcatgcctcagcctcctgagtgtctgggattacaggagtgcttcaccacgcccgagctcattgtagtatttagggtagagatggggttcaccatgttggccaggttggtctcgaactcctgacctcaagtaatcggcctgcctgtggcctcccaaagtgctgggattacaagtgtgagccaccaagcccagcttatatcactgtggtctctggtcagaaaggtctggaaaataccaccttagtacaaacacattacatcaacttttatatgtaagatgtaatttagaacaaatgtcaataagggttttatgacgagactgaaattgcagacttgttcataagcacaatgcttctttactcttactgtg
